United States Patent Application Publication US 2014/0004565 A1 - sequence listing, part 126

SEQ ID NO: 3159371 - RNA, 19 nt, Artificial Sequence
  Description of Artificial Sequence: Synthetic oligonucleotide
aagaauggcccuuuacaca

SEQ ID NO: 3159372 - RNA, 19 nt, Artificial Sequence
  Description of Artificial Sequence: Synthetic oligonucleotide
guugcuuuucuucugaguc

SEQ ID NO: 3159373 - RNA, 19 nt, Artificial Sequence
  Description of Artificial Sequence: Synthetic oligonucleotide
guacauuaaauuguagucc

SEQ ID NO: 3159374 - RNA, 19 nt, Artificial Sequence
  Description of Artificial Sequence: Synthetic oligonucleotide
aguuggguaaucuucuuca

SEQ ID NO: 3159375 - RNA, 19 nt, Artificial Sequence
  Description of Artificial Sequence: Synthetic oligonucleotide
aaggaagaaacuguaagaa

SEQ ID NO: 3159376 - RNA, 19 nt, Artificial Sequence
  Description of Artificial Sequence: Synthetic oligonucleotide
uucuagaaaggacaguauc

SEQ ID NO: 3159377 - RNA, 19 nt, Artificial Sequence
  Description of Artificial Sequence: Synthetic oligonucleotide
aaccuaucuggaccauucc

SEQ ID NO: 3159378 - RNA, 19 nt, Artificial Sequence
  Description of Artificial Sequence: Synthetic oligonucleotide
uacaaccucugacagagcu

SEQ ID NO: 3159379 - RNA, 19 nt, Artificial Sequence
  Description of Artificial Sequence: Synthetic oligonucleotide
gugguuagaacccaccaag

SEQ ID NO: 3159380 - RNA, 19 nt, Artificial Sequence
  Description of Artificial Sequence: Synthetic oligonucleotide
agagacauccaguauccag

SEQ ID NO: 3159381 - RNA, 19 nt, Artificial Sequence
  Description of Artificial Sequence: Synthetic oligonucleotide
ucuugcaguuccaacacac

SEQ ID NO: 3159382 - RNA, 19 nt, Artificial Sequence
  Description of Artificial Sequence: Synthetic oligonucleotide
uggaagugcagcuuguaca

SEQ ID NO: 3159383 - RNA, 19 nt, Artificial Sequence
  Description of Artificial Sequence: Synthetic oligonucleotide
uauaaauaacacucuuuaa

SEQ ID NO: 3159384 - RNA, 19 nt, Artificial Sequence
  Description of Artificial Sequence: Synthetic oligonucleotide
acucuugcaguuccaacac

SEQ ID NO: 3159385 - RNA, 19 nt, Artificial Sequence
  Description of Artificial Sequence: Synthetic oligonucleotide
uuuaaggaagaaacuguaa

SEQ ID NO: 3159386 - RNA, 19 nt, Artificial Sequence
  Description of Artificial Sequence: Synthetic oligonucleotide
agagacuagugccggaaac

SEQ ID NO: 3159387 - RNA, 19 nt, Artificial Sequence
  Description of Artificial Sequence: Synthetic oligonucleotide
ggaagaaacuguaagaaug

SEQ ID NO: 3159388 - RNA, 19 nt, Artificial Sequence
  Description of Artificial Sequence: Synthetic oligonucleotide
uugcaguuccaacacacug

SEQ ID NO: 3159389 - RNA, 19 nt, Artificial Sequence
  Description of Artificial Sequence: Synthetic oligonucleotide
guaagaauggcccuuuaca

SEQ ID NO: 3159390 - RNA, 19 nt, Artificial Sequence
  Description of Artificial Sequence: Synthetic oligonucleotide
ugguuagaacccaccaagg

SEQ ID NO: 3159391 - RNA, 19 nt, Artificial Sequence
  Description of Artificial Sequence: Synthetic oligonucleotide
ucuaggagcccacaggaaa

SEQ ID NO: 3159392 - RNA, 19 nt, Artificial Sequence
  Description of Artificial Sequence: Synthetic oligonucleotide
ugaacgacagccacacagc

SEQ ID NO: 3159393 - RNA, 19 nt, Artificial Sequence
  Description of Artificial Sequence: Synthetic oligonucleotide
uacauagauaaacucugaa

SEQ ID NO: 3159394 - RNA, 19 nt, Artificial Sequence
  Description of Artificial Sequence: Synthetic oligonucleotide
ugcaguuccaacacacuga

SEQ ID NO: 3159395 - RNA, 19 nt, Artificial Sequence
  Description of Artificial Sequence: Synthetic oligonucleotide
uggcccuuuacacauauau

SEQ ID NO: 3159396 - RNA, 19 nt, Artificial Sequence
  Description of Artificial Sequence: Synthetic oligonucleotide
ucugucguagugcuuugcc

SEQ ID NO: 3159397 - RNA, 19 nt, Artificial Sequence
  Description of Artificial Sequence: Synthetic oligonucleotide
guuagaacccaccaaggca

SEQ ID NO: 3159398 - RNA, 19 nt, Artificial Sequence
  Description of Artificial Sequence: Synthetic oligonucleotide
acaugaucaguuugucuuc

SEQ ID NO: 3159399 - RNA, 19 nt, Artificial Sequence
  Description of Artificial Sequence: Synthetic oligonucleotide
cuuagugaacgacagccac

SEQ ID NO: 3159400 - RNA, 19 nt, Artificial Sequence
  Description of Artificial Sequence: Synthetic oligonucleotide
gguaacaagaaggagaaca

SEQ ID NO: 3159401 - RNA, 19 nt, Artificial Sequence
  Description of Artificial Sequence: Synthetic oligonucleotide
gcuacgaaaagaugcaugc

SEQ ID NO: 3159402 - RNA, 19 nt, Artificial Sequence
  Description of Artificial Sequence: Synthetic oligonucleotide
uaucguucagcguagucaa

SEQ ID NO: 3159403 - RNA, 19 nt, Artificial Sequence
  Description of Artificial Sequence: Synthetic oligonucleotide
agcacugcgagcuuggaaa

SEQ ID NO: 3159404 - RNA, 19 nt, Artificial Sequence
  Description of Artificial Sequence: Synthetic oligonucleotide
agaacgaauguacaaguuu

SEQ ID NO: 3159405 - RNA, 19 nt, Artificial Sequence
  Description of Artificial Sequence: Synthetic oligonucleotide
uuagugaacgacagccaca

SEQ ID NO: 3159406 - RNA, 19 nt, Artificial Sequence
  Description of Artificial Sequence: Synthetic oligonucleotide
ucaaguggcaacucguguc

SEQ ID NO: 3159407 - RNA, 19 nt, Artificial Sequence
  Description of Artificial Sequence: Synthetic oligonucleotide
auacucuugcaguuccaac

SEQ ID NO: 3159408 - RNA, 19 nt, Artificial Sequence
  Description of Artificial Sequence: Synthetic oligonucleotide
uuacacagugaauaaguua

SEQ ID NO: 3159409 - RNA, 19 nt, Artificial Sequence
  Description of Artificial Sequence: Synthetic oligonucleotide
uccuuuaaaagaaccuauc

SEQ ID NO: 3159410 - RNA, 19 nt, Artificial Sequence
  Description of Artificial Sequence: Synthetic oligonucleotide
acagaugcgaggaauuggg

SEQ ID NO: 3159411 - RNA, 19 nt, Artificial Sequence
  Description of Artificial Sequence: Synthetic oligonucleotide
ucuuagugaacgacagcca

SEQ ID NO: 3159412 - RNA, 19 nt, Artificial Sequence
  Description of Artificial Sequence: Synthetic oligonucleotide
caagccacgagagaguggc

SEQ ID NO: 3159413 - RNA, 19 nt, Artificial Sequence
  Description of Artificial Sequence: Synthetic oligonucleotide
gucuuacaaguuuucagug

SEQ ID NO: 3159414 - RNA, 19 nt, Artificial Sequence
  Description of Artificial Sequence: Synthetic oligonucleotide
gugcaacagagucacaugc

SEQ ID NO: 3159415 - RNA, 19 nt, Artificial Sequence
  Description of Artificial Sequence: Synthetic oligonucleotide
acgaaaagaugcaugcacg

SEQ ID NO: 3159416 - RNA, 19 nt, Artificial Sequence
  Description of Artificial Sequence: Synthetic oligonucleotide
uccauuuacaauucccuuu

SEQ ID NO: 3159417 - RNA, 19 nt, Artificial Sequence
  Description of Artificial Sequence: Synthetic oligonucleotide
cugaaguaaauauucagua

SEQ ID NO: 3159418 - RNA, 19 nt, Artificial Sequence
  Description of Artificial Sequence: Synthetic oligonucleotide
aacuucagcuugucuagga

SEQ ID NO: 3159419 - RNA, 19 nt, Artificial Sequence
  Description of Artificial Sequence: Synthetic oligonucleotide
cuugcgaaggcugagaaga

SEQ ID NO: 3159420 - RNA, 19 nt, Artificial Sequence
  Description of Artificial Sequence: Synthetic oligonucleotide
cuguuucuagaaaggacag

SEQ ID NO: 3159421 - RNA, 19 nt, Artificial Sequence
  Description of Artificial Sequence: Synthetic oligonucleotide
gaugacuugaacuaggucc

SEQ ID NO: 3159422 - RNA, 19 nt, Artificial Sequence
  Description of Artificial Sequence: Synthetic oligonucleotide
ugcgauguuauccugauag

SEQ ID NO: 3159423 - RNA, 19 nt, Artificial Sequence
  Description of Artificial Sequence: Synthetic oligonucleotide
aaguugagagcagagaagg

SEQ ID NO: 3159424 - RNA, 19 nt, Artificial Sequence
  Description of Artificial Sequence: Synthetic oligonucleotide
ucuaaggccaucuucacgu

SEQ ID NO: 3159425 - RNA, 19 nt, Artificial Sequence
  Description of Artificial Sequence: Synthetic oligonucleotide
ugaacuagguccuaucuga

SEQ ID NO: 3159426 - RNA, 19 nt, Artificial Sequence
  Description of Artificial Sequence: Synthetic oligonucleotide
agcuuuucuaagcccaucc

SEQ ID NO: 3159427 - RNA, 19 nt, Artificial Sequence
  Description of Artificial Sequence: Synthetic oligonucleotide
ucuggcuuagagcaccucg

SEQ ID NO: 3159428 - RNA, 19 nt, Artificial Sequence
  Description of Artificial Sequence: Synthetic oligonucleotide
aaagcgaucccuccagcuc

SEQ ID NO: 3159429 - RNA, 19 nt, Artificial Sequence
  Description of Artificial Sequence: Synthetic oligonucleotide
agagccugagguuacaaag

SEQ ID NO: 3159430 - RNA, 19 nt, Artificial Sequence
  Description of Artificial Sequence: Synthetic oligonucleotide
acugccaacagccaggacu

SEQ ID NO: 3159431 - RNA, 19 nt, Artificial Sequence
  Description of Artificial Sequence: Synthetic oligonucleotide
gauaggaagguugauccgg

SEQ ID NO: 3159432 - RNA, 19 nt, Artificial Sequence
  Description of Artificial Sequence: Synthetic oligonucleotide
agcaugaagaccacgaagg

SEQ ID NO: 3159433 - RNA, 19 nt, Artificial Sequence
  Description of Artificial Sequence: Synthetic oligonucleotide
guaaagucugcagaggugg

SEQ ID NO: 3159434 - RNA, 19 nt, Artificial Sequence
  Description of Artificial Sequence: Synthetic oligonucleotide
guuucucggaaguugagag

SEQ ID NO: 3159435 - RNA, 19 nt, Artificial Sequence
  Description of Artificial Sequence: Synthetic oligonucleotide
caucucauccuucaggugc

SEQ ID NO: 3159436 - RNA, 19 nt, Artificial Sequence
  Description of Artificial Sequence: Synthetic oligonucleotide
gugaggaagggucagaggc

SEQ ID NO: 3159437 - RNA, 19 nt, Artificial Sequence
  Description of Artificial Sequence: Synthetic oligonucleotide
caugguaaagucugcagag

SEQ ID NO: 3159438 - RNA, 19 nt, Artificial Sequence
  Description of Artificial Sequence: Synthetic oligonucleotide
uuauuguuucuguccaggg

SEQ ID NO: 3159439 - RNA, 19 nt, Artificial Sequence
  Description of Artificial Sequence: Synthetic oligonucleotide
auggucuugaucaucaccg

SEQ ID NO: 3159440 - RNA, 19 nt, Artificial Sequence
  Description of Artificial Sequence: Synthetic oligonucleotide
aaggguugaugacuugaac

SEQ ID NO: 3159441 - RNA, 19 nt, Artificial Sequence
  Description of Artificial Sequence: Synthetic oligonucleotide
acagugucuggcuuagagc

SEQ ID NO: 3159442 - RNA, 19 nt, Artificial Sequence
  Description of Artificial Sequence: Synthetic oligonucleotide
uucggguucccucuuacag

SEQ ID NO: 3159443 - RNA, 19 nt, Artificial Sequence
  Description of Artificial Sequence: Synthetic oligonucleotide
guugcuuggcucuuuauug

SEQ ID NO: 3159444 - RNA, 19 nt, Artificial Sequence
  Description of Artificial Sequence: Synthetic oligonucleotide
agagccuagguguuuguac

SEQ ID NO: 3159445 - RNA, 19 nt, Artificial Sequence
  Description of Artificial Sequence: Synthetic oligonucleotide
uauuguuucuguccagggc

SEQ ID NO: 3159446 - RNA, 19 nt, Artificial Sequence
  Description of Artificial Sequence: Synthetic oligonucleotide
acuagguccuaucugaaga

SEQ ID NO: 3159447 - RNA, 19 nt, Artificial Sequence
  Description of Artificial Sequence: Synthetic oligonucleotide
gacagugucuggcuuagag

SEQ ID NO: 3159448 - RNA, 19 nt, Artificial Sequence
  Description of Artificial Sequence: Synthetic oligonucleotide
gaucuccacaucuaaggcc

SEQ ID NO: 3159449 - RNA, 19 nt, Artificial Sequence
  Description of Artificial Sequence: Synthetic oligonucleotide
aggguugaugacuugaacu

SEQ ID NO: 3159450 - RNA, 19 nt, Artificial Sequence
  Description of Artificial Sequence: Synthetic oligonucleotide
gagccuagguguuuguacg

SEQ ID NO: 3159451 - RNA, 19 nt, Artificial Sequence
  Description of Artificial Sequence: Synthetic oligonucleotide
uugaacuagguccuaucug

SEQ ID NO: 3159452 - RNA, 19 nt, Artificial Sequence
  Description of Artificial Sequence: Synthetic oligonucleotide
ugaucggugaggaaggguc

SEQ ID NO: 3159453 - RNA, 19 nt, Artificial Sequence
  Description of Artificial Sequence: Synthetic oligonucleotide
ugguaaagucugcagaggu

SEQ ID NO: 3159454 - RNA, 19 nt, Artificial Sequence
  Description of Artificial Sequence: Synthetic oligonucleotide
aacuagguccuaucugaag

SEQ ID NO: 3159455 - RNA, 19 nt, Artificial Sequence
  Description of Artificial Sequence: Synthetic oligonucleotide
uucucggaaguugagagca

SEQ ID NO: 3159456 - RNA, 19 nt, Artificial Sequence
  Description of Artificial Sequence: Synthetic oligonucleotide
aggagcaggcgugagaggc

SEQ ID NO: 3159457 - RNA, 19 nt, Artificial Sequence
  Description of Artificial Sequence: Synthetic oligonucleotide
aaagucugcagagguggac

SEQ ID NO: 3159458 - RNA, 19 nt, Artificial Sequence
  Description of Artificial Sequence: Synthetic oligonucleotide
aagggucagaggcugugag

SEQ ID NO: 3159459 - RNA, 19 nt, Artificial Sequence
  Description of Artificial Sequence: Synthetic oligonucleotide
cuagguguuuguacgacug

SEQ ID NO: 3159460 - RNA, 19 nt, Artificial Sequence
  Description of Artificial Sequence: Synthetic oligonucleotide
ugugacauccgagagugga

SEQ ID NO: 3159461 - RNA, 19 nt, Artificial Sequence
  Description of Artificial Sequence: Synthetic oligonucleotide
augaagaccacgaaggggu

SEQ ID NO: 3159462 - RNA, 19 nt, Artificial Sequence
  Description of Artificial Sequence: Synthetic oligonucleotide
acuugaacuagguccuauc

SEQ ID NO: 3159463 - RNA, 19 nt, Artificial Sequence
  Description of Artificial Sequence: Synthetic oligonucleotide
uacgacugccaacagccag

SEQ ID NO: 3159464 - RNA, 19 nt, Artificial Sequence
  Description of Artificial Sequence: Synthetic oligonucleotide
agguguuuguacgacugcc

SEQ ID NO: 3159465 - RNA, 19 nt, Artificial Sequence
  Description of Artificial Sequence: Synthetic oligonucleotide
uguguggccucgcugacga

SEQ ID NO: 3159466 - RNA, 19 nt, Artificial Sequence
  Description of Artificial Sequence: Synthetic oligonucleotide
aucuaaggccaucuucacg

SEQ ID NO: 3159467 - RNA, 19 nt, Artificial Sequence
  Description of Artificial Sequence: Synthetic oligonucleotide
gaaguugagagcagagaag

SEQ ID NO: 3159468 - RNA, 19 nt, Artificial Sequence
  Description of Artificial Sequence: Synthetic oligonucleotide
guugaugacuugaacuagg

SEQ ID NO: 3159469 - RNA, 19 nt, Artificial Sequence
  Description of Artificial Sequence: Synthetic oligonucleotide
aagcgaucccuccagcucu

SEQ ID NO: 3159470 - RNA, 19 nt, Artificial Sequence
  Description of Artificial Sequence: Synthetic oligonucleotide
uucagggcugguuucucgg

SEQ ID NO: 3159471 - RNA, 19 nt, Artificial Sequence
  Description of Artificial Sequence: Synthetic oligonucleotide
ucagcugagaggcuucacu

SEQ ID NO: 3159472 - RNA, 19 nt, Artificial Sequence
  Description of Artificial Sequence: Synthetic oligonucleotide
agguccuaucugaagagcc

SEQ ID NO: 3159473 - RNA, 19 nt, Artificial Sequence
  Description of Artificial Sequence: Synthetic oligonucleotide
cugugagugaaggagagug

SEQ ID NO: 3159474 - RNA, 19 nt, Artificial Sequence
  Description of Artificial Sequence: Synthetic oligonucleotide
uugaugacuugaacuaggu

SEQ ID NO: 3159475 - RNA, 19 nt, Artificial Sequence
  Description of Artificial Sequence: Synthetic oligonucleotide
aggaagguugauccggcuc

SEQ ID NO: 3159476 - RNA, 19 nt, Artificial Sequence
  Description of Artificial Sequence: Synthetic oligonucleotide
acaucuaaggccaucuuca

SEQ ID NO: 3159477 - RNA, 19 nt, Artificial Sequence
  Description of Artificial Sequence: Synthetic oligonucleotide
guuuguacgacugccaaca

SEQ ID NO: 3159478 - RNA, 19 nt, Artificial Sequence
  Description of Artificial Sequence: Synthetic oligonucleotide
ucggaaguugagagcagag

SEQ ID NO: 3159479 - RNA, 19 nt, Artificial Sequence
  Description of Artificial Sequence: Synthetic oligonucleotide
cuucaggaggcagugaggc

SEQ ID NO: 3159480 - RNA, 19 nt, Artificial Sequence
  Description of Artificial Sequence: Synthetic oligonucleotide
cuagguccuaucugaagag

SEQ ID NO: 3159481 - RNA, 19 nt, Artificial Sequence
  Description of Artificial Sequence: Synthetic oligonucleotide
ugggugugacauccgagag

SEQ ID NO: 3159482 - RNA, 19 nt, Artificial Sequence
  Description of Artificial Sequence: Synthetic oligonucleotide
gaccacgaaggggugaucg

SEQ ID NO: 3159483 - RNA, 19 nt, Artificial Sequence
  Description of Artificial Sequence: Synthetic oligonucleotide
auagccacuggccucgcug

SEQ ID NO: 3159484 - RNA, 19 nt, Artificial Sequence
  Description of Artificial Sequence: Synthetic oligonucleotide
uuucucggaaguugagagc

SEQ ID NO: 3159485 - RNA, 19 nt, Artificial Sequence
  Description of Artificial Sequence: Synthetic oligonucleotide
gcgaucuccacaucuaagg

SEQ ID NO: 3159486 - RNA, 19 nt, Artificial Sequence
  Description of Artificial Sequence: Synthetic oligonucleotide
acucuccuucugcagcucc

SEQ ID NO: 3159487 - RNA, 19 nt, Artificial Sequence
  Description of Artificial Sequence: Synthetic oligonucleotide
agcaccuucggguucccuc

SEQ ID NO: 3159488 - RNA, 19 nt, Artificial Sequence
  Description of Artificial Sequence: Synthetic oligonucleotide
auaggaagguugauccggc

SEQ ID NO: 3159489 - RNA, 19 nt, Artificial Sequence
  Description of Artificial Sequence: Synthetic oligonucleotide
ugacauccgagaguggaag

SEQ ID NO: 3159490 - RNA, 19 nt, Artificial Sequence
  Description of Artificial Sequence: Synthetic oligonucleotide
uccugauagccacuggccu

SEQ ID NO: 3159491 - RNA, 19 nt, Artificial Sequence
  Description of Artificial Sequence: Synthetic oligonucleotide
agaggcgguacccucccac

SEQ ID NO: 3159492 - RNA, 19 nt, Artificial Sequence
  Description of Artificial Sequence: Synthetic oligonucleotide
auccugauagccacuggcc

SEQ ID NO: 3159493 - RNA, 19 nt, Artificial Sequence
  Description of Artificial Sequence: Synthetic oligonucleotide
gguuacaaaggugggaggg

SEQ ID NO: 3159494 - RNA, 19 nt, Artificial Sequence
  Description of Artificial Sequence: Synthetic oligonucleotide
gagccugagguuacaaagg

SEQ ID NO: 3159495 - RNA, 19 nt, Artificial Sequence
  Description of Artificial Sequence: Synthetic oligonucleotide
uccuaucugaagagccuag

SEQ ID NO: 3159496 - RNA, 19 nt, Artificial Sequence
  Description of Artificial Sequence: Synthetic oligonucleotide
uccagcugcucacccaucc

SEQ ID NO: 3159497 - RNA, 19 nt, Artificial Sequence
  Description of Artificial Sequence: Synthetic oligonucleotide
cuuggcucuuuauuguuuc

SEQ ID NO: 3159498 - RNA, 19 nt, Artificial Sequence
  Description of Artificial Sequence: Synthetic oligonucleotide
uuguuucuguccagggccc

SEQ ID NO: 3159499 - RNA, 19 nt, Artificial Sequence
  Description of Artificial Sequence: Synthetic oligonucleotide
ucucccuccagcagcuucc

SEQ ID NO: 3159500 - RNA, 19 nt, Artificial Sequence
  Description of Artificial Sequence: Synthetic oligonucleotide
ucuccugggcagcaugaag

SEQ ID NO: 3159501 - RNA, 19 nt, Artificial Sequence
  Description of Artificial Sequence: Synthetic oligonucleotide
cuucacuccaucucucgac

SEQ ID NO: 3159502 - RNA, 19 nt, Artificial Sequence
  Description of Artificial Sequence: Synthetic oligonucleotide
cagcaugaagaccacgaag

SEQ ID NO: 3159503 - RNA, 19 nt, Artificial Sequence
  Description of Artificial Sequence: Synthetic oligonucleotide
caacagccaggacucaugg

SEQ ID NO: 3159504 - RNA, 19 nt, Artificial Sequence
  Description of Artificial Sequence: Synthetic oligonucleotide
uucacguugagcaggucuu

SEQ ID NO: 3159505 - RNA, 19 nt, Artificial Sequence
  Description of Artificial Sequence: Synthetic oligonucleotide
ggugugacauccgagagug

SEQ ID NO: 3159506 - RNA, 19 nt, Artificial Sequence
  Description of Artificial Sequence: Synthetic oligonucleotide
aagucugcagagguggacu

SEQ ID NO: 3159507 - RNA, 19 nt, Artificial Sequence
  Description of Artificial Sequence: Synthetic oligonucleotide
ucuugguacucccgcaggu

SEQ ID NO: 3159508 - RNA, 19 nt, Artificial Sequence
  Description of Artificial Sequence: Synthetic oligonucleotide
cacaucuaaggccaucuuc

SEQ ID NO: 3159509 - RNA, 19 nt, Artificial Sequence
  Description of Artificial Sequence: Synthetic oligonucleotide
ugaugacuugaacuagguc

SEQ ID NO: 3159510 - RNA, 19 nt, Artificial Sequence
  Description of Artificial Sequence: Synthetic oligonucleotide
uguuuguacgacugccaac

SEQ ID NO: 3159511 - RNA, 19 nt, Artificial Sequence
  Description of Artificial Sequence: Synthetic oligonucleotide
aucucauccuucaggugcc

SEQ ID NO: 3159512 - RNA, 19 nt, Artificial Sequence
  Description of Artificial Sequence: Synthetic oligonucleotide
ggagggaaaggguugauga

SEQ ID NO: 3159513 - RNA, 19 nt, Artificial Sequence
  Description of Artificial Sequence: Synthetic oligonucleotide
ucguguugcugcugugugg

SEQ ID NO: 3159514 - RNA, 19 nt, Artificial Sequence
  Description of Artificial Sequence: Synthetic oligonucleotide
uugguguggaccucagaac

SEQ ID NO: 3159515 - RNA, 19 nt, Artificial Sequence
  Description of Artificial Sequence: Synthetic oligonucleotide
uagguguuuguacgacugc

SEQ ID NO: 3159516 - RNA, 19 nt, Artificial Sequence
  Description of Artificial Sequence: Synthetic oligonucleotide
augguaaagucugcagagg

SEQ ID NO: 3159517 - RNA, 19 nt, Artificial Sequence
  Description of Artificial Sequence: Synthetic oligonucleotide
ugcagagguggacuggggu

SEQ ID NO: 3159518 - RNA, 19 nt, Artificial Sequence
  Description of Artificial Sequence: Synthetic oligonucleotide
aagguugauccggcucucc

SEQ ID NO: 3159519 - RNA, 19 nt, Artificial Sequence
  Description of Artificial Sequence: Synthetic oligonucleotide
ucauccuucaggugccgga

SEQ ID NO: 3159520 - RNA, 19 nt, Artificial Sequence
  Description of Artificial Sequence: Synthetic oligonucleotide
uugcuuggcucuuuauugu

SEQ ID NO: 3159521 - RNA, 19 nt, Artificial Sequence
  Description of Artificial Sequence: Synthetic oligonucleotide
guuaauauaauguucaggg

SEQ ID NO: 3159522 - RNA, 19 nt, Artificial Sequence
  Description of Artificial Sequence: Synthetic oligonucleotide
  modified_base (16)..(16): a, c, u, g, unknown or other
ugaauuaacagccugngga

SEQ ID NO: 3159523 - RNA, 19 nt, Artificial Sequence
  Description of Artificial Sequence: Synthetic oligonucleotide
uuuucuuuaaucaaguuaa

SEQ ID NO: 3159524 - RNA, 19 nt, Artificial Sequence
  Description of Artificial Sequence: Synthetic oligonucleotide
aagccauuugcuuggaucc

SEQ ID NO: 3159525 - RNA, 19 nt, Artificial Sequence
  Description of Artificial Sequence: Synthetic oligonucleotide
agaaccugcaucuuaaugg

SEQ ID NO: 3159526 - RNA, 19 nt, Artificial Sequence
  Description of Artificial Sequence: Synthetic oligonucleotide
aacguguagccacaaaacc

SEQ ID NO: 3159527 - RNA, 19 nt, Artificial Sequence
  Description of Artificial Sequence: Synthetic oligonucleotide
aagcuuaacaagcuucugc

SEQ ID NO: 3159528 - RNA, 19 nt, Artificial Sequence
  Description of Artificial Sequence: Synthetic oligonucleotide
uguuccucaagaaaguccg

SEQ ID NO: 3159529 - RNA, 19 nt, Artificial Sequence
  Description of Artificial Sequence: Synthetic oligonucleotide
ucuuuaaucaaguuaauau

SEQ ID NO: 3159530 - RNA, 19 nt, Artificial Sequence
  Description of Artificial Sequence: Synthetic oligonucleotide
uuugcuuggauccaggaca

SEQ ID NO: 3159531 - RNA, 19 nt, Artificial Sequence
  Description of Artificial Sequence: Synthetic oligonucleotide
ugagcauaugguaugagag

SEQ ID NO: 3159532 - RNA, 19 nt, Artificial Sequence
  Description of Artificial Sequence: Synthetic oligonucleotide
auuaaagccauuugcuugg

SEQ ID NO: 3159533 - RNA, 19 nt, Artificial Sequence
  Description of Artificial Sequence: Synthetic oligonucleotide
uauuucacguauaauauuc

SEQ ID NO: 3159534 - RNA, 19 nt, Artificial Sequence
  Description of Artificial Sequence: Synthetic oligonucleotide
uuuacuguccaauagucga

SEQ ID NO: 3159535 - RNA, 19 nt, Artificial Sequence
  Description of Artificial Sequence: Synthetic oligonucleotide
aacuguucaccacauuuac

SEQ ID NO: 3159536 - RNA, 19 nt, Artificial Sequence
  Description of Artificial Sequence: Synthetic oligonucleotide
uguuaaaaguguaauauuu

SEQ ID NO: 3159537 - RNA, 19 nt, Artificial Sequence
  Description of Artificial Sequence: Synthetic oligonucleotide
uaauauaauguucaggguu

SEQ ID NO: 3159538 - RNA, 19 nt, Artificial Sequence
  Description of Artificial Sequence: Synthetic oligonucleotide
ucugcgaaugaacaugccg

SEQ ID NO: 3159539 - RNA, 19 nt, Artificial Sequence
  Description of Artificial Sequence: Synthetic oligonucleotide
agaagcaaucucuccaugc

SEQ ID NO: 3159540 - RNA, 19 nt, Artificial Sequence
  Description of Artificial Sequence: Synthetic oligonucleotide
uaauuucucugcuaaaggc

SEQ ID NO: 3159541 - RNA, 19 nt, Artificial Sequence
  Description of Artificial Sequence: Synthetic oligonucleotide
uuuuacuguccaauagucg

SEQ ID NO: 3159542 - RNA, 19 nt, Artificial Sequence
  Description of Artificial Sequence: Synthetic oligonucleotide
caagaaaguccguagaacc

SEQ ID NO: 3159543 - RNA, 19 nt, Artificial Sequence
  Description of Artificial Sequence: Synthetic oligonucleotide
uccuauuucacguauaaua

SEQ ID NO: 3159544 - RNA, 19 nt, Artificial Sequence
  Description of Artificial Sequence: Synthetic oligonucleotide
uuuauguuucaaaauucca

SEQ ID NO: 3159545 - RNA, 19 nt, Artificial Sequence
  Description of Artificial Sequence: Synthetic oligonucleotide
aauggcuggauuuccuggg

SEQ ID NO: 3159546 - RNA, 19 nt, Artificial Sequence
  Description of Artificial Sequence: Synthetic oligonucleotide
uauucuuuauaacacuuuc

SEQ ID NO: 3159547 - RNA, 19 nt, Artificial Sequence
  Description of Artificial Sequence: Synthetic oligonucleotide
aauagucgagccuacacaa

SEQ ID NO: 3159548 - RNA, 19 nt, Artificial Sequence
  Description of Artificial Sequence: Synthetic oligonucleotide
ucuguugaagcaaacgugu

SEQ ID NO: 3159549 - RNA, 19 nt, Artificial Sequence
  Description of Artificial Sequence: Synthetic oligonucleotide
aagcaaucucuccaugcgc

SEQ ID NO: 3159550 - RNA, 19 nt, Artificial Sequence
  Description of Artificial Sequence: Synthetic oligonucleotide
gagaguuucaaacuguuga

SEQ ID NO: 3159551 - RNA, 19 nt, Artificial Sequence
  Description of Artificial Sequence: Synthetic oligonucleotide
acgguacugaauuaacagc

SEQ ID NO: 3159552 - RNA, 19 nt, Artificial Sequence
  Description of Artificial Sequence: Synthetic oligonucleotide
aaacccagguaacugcaac

SEQ ID NO: 3159553 - RNA, 19 nt, Artificial Sequence
  Description of Artificial Sequence: Synthetic oligonucleotide
aggacaacagcuuucacca

SEQ ID NO: 3159554 - RNA, 19 nt, Artificial Sequence
  Description of Artificial Sequence: Synthetic oligonucleotide
aaguuaauauaauguucag

SEQ ID NO: 3159555 - RNA, 19 nt, Artificial Sequence
  Description of Artificial Sequence: Synthetic oligonucleotide
gaagcaaacguguagccac

SEQ ID NO: 3159556 - RNA, 19 nt, Artificial Sequence
  Description of Artificial Sequence: Synthetic oligonucleotide
aaacguguagccacaaaac

SEQ ID NO: 3159557 - RNA, 19 nt, Artificial Sequence
  Description of Artificial Sequence: Synthetic oligonucleotide
aguaacacauagcugacga

SEQ ID NO: 3159558 - RNA, 19 nt, Artificial Sequence
  Description of Artificial Sequence: Synthetic oligonucleotide
aguuaauauaauguucagg

SEQ ID NO: 3159559 - RNA, 19 nt, Artificial Sequence
  Description of Artificial Sequence: Synthetic oligonucleotide
aauuacaaacccagguaac

SEQ ID NO: 3159560 - RNA, 19 nt, Artificial Sequence
  Description of Artificial Sequence: Synthetic oligonucleotide
accgcaguaacacauagcu

SEQ ID NO: 3159561 - RNA, 19 nt, Artificial Sequence
  Description of Artificial Sequence: Synthetic oligonucleotide
aauuccaauggcuggauuu

SEQ ID NO: 3159562 - RNA, 19 nt, Artificial Sequence
  Description of Artificial Sequence: Synthetic oligonucleotide
uucacccucuguuuaaggg

SEQ ID NO: 3159563 - RNA, 19 nt, Artificial Sequence
  Description of Artificial Sequence: Synthetic oligonucleotide
uuauaacacuuucugcuug

SEQ ID NO: 3159564 - RNA, 19 nt, Artificial Sequence
  Description of Artificial Sequence: Synthetic oligonucleotide
aaacuguugaugaaguucu

SEQ ID NO: 3159565 - RNA, 19 nt, Artificial Sequence
  Description of Artificial Sequence: Synthetic oligonucleotide
uaaucuggacuccaagacc

SEQ ID NO: 3159566 - RNA, 19 nt, Artificial Sequence
  Description of Artificial Sequence: Synthetic oligonucleotide
uccuauccauauuaaagcc

SEQ ID NO: 3159567 - RNA, 19 nt, Artificial Sequence
  Description of Artificial Sequence: Synthetic oligonucleotide
guccuauccauauuaaagc

SEQ ID NO: 3159568 - RNA, 19 nt, Artificial Sequence
  Description of Artificial Sequence: Synthetic oligonucleotide
ucacguauaauauucuuua

SEQ ID NO: 3159569 - RNA, 19 nt, Artificial Sequence
  Description of Artificial Sequence: Synthetic oligonucleotide
auuugcuuggauccaggac

SEQ ID NO: 3159570 - RNA, 19 nt, Artificial Sequence
  Description of Artificial Sequence: Synthetic oligonucleotide
aggcacuuaaucuggacuc

SEQ ID NO: 3159571 - RNA, 19 nt, Artificial Sequence
  Description of Artificial Sequence: Synthetic oligonucleotide
uccauauuaaagccauuug

SEQ ID NO: 3159572 - RNA, 19 nt, Artificial Sequence
  Description of Artificial Sequence: Synthetic oligonucleotide
ucucugacgaucgugaugu

SEQ ID NO: 3159573 - RNA, 19 nt, Artificial Sequence
  Description of Artificial Sequence: Synthetic oligonucleotide
uagucgagccuacacaaag

SEQ ID NO: 3159574 - RNA, 19 nt, Artificial Sequence
  Description of Artificial Sequence: Synthetic oligonucleotide
uucaaacuguugaugaagu

SEQ ID NO: 3159575 - RNA, 19 nt, Artificial Sequence
  Description of Artificial Sequence: Synthetic oligonucleotide
uccugggagaagaagacca

SEQ ID NO: 3159576 - RNA, 19 nt, Artificial Sequence
  Description of Artificial Sequence: Synthetic oligonucleotide
cugcgaaugaacaugccgc

SEQ ID NO: 3159577 - RNA, 19 nt, Artificial Sequence
  Description of Artificial Sequence: Synthetic oligonucleotide
aguccguagaaccugcauc

SEQ ID NO: 3159578 - RNA, 19 nt, Artificial Sequence
  Description of Artificial Sequence: Synthetic oligonucleotide
cacgguacugaauuaacag

SEQ ID NO: 3159579 - RNA, 19 nt, Artificial Sequence
  Description of Artificial Sequence: Synthetic oligonucleotide
guaugagaguuucaaacug

SEQ ID NO: 3159580 - RNA, 19 nt, Artificial Sequence
  Description of Artificial Sequence: Synthetic oligonucleotide
  modified_base (19)..(19): a, c, u, g, unknown or other
uacugaauuaacagccugn

SEQ ID NO: 3159581 - RNA, 19 nt, Artificial Sequence
  Description of Artificial Sequence: Synthetic oligonucleotide
uaguucugcauucuucuug

SEQ ID NO: 3159582 - RNA, 19 nt, Artificial Sequence
  Description of Artificial Sequence: Synthetic oligonucleotide
aacugcaacuguucaccac

SEQ ID NO: 3159583 - RNA, 19 nt, Artificial Sequence
  Description of Artificial Sequence: Synthetic oligonucleotide
gaacaugccgcaucucugg

SEQ ID NO: 3159584 - RNA, 19 nt, Artificial Sequence
  Description of Artificial Sequence: Synthetic oligonucleotide
caggacaacagcuuucacc

SEQ ID NO: 3159585 - RNA, 19 nt, Artificial Sequence
  Description of Artificial Sequence: Synthetic oligonucleotide
acguguagccacaaaaccc

SEQ ID NO: 3159586 - RNA, 19 nt, Artificial Sequence
  Description of Artificial Sequence: Synthetic oligonucleotide
cauuuaccugagcauaugg

SEQ ID NO: 3159587 - RNA, 19 nt, Artificial Sequence
  Description of Artificial Sequence: Synthetic oligonucleotide
cagcuuucaccauaaaagc

SEQ ID NO: 3159588 - RNA, 19 nt, Artificial Sequence
  Description of Artificial Sequence: Synthetic oligonucleotide
auagcugacgaucuuucug

SEQ ID NO: 3159589 - RNA, 19 nt, Artificial Sequence
  Description of Artificial Sequence: Synthetic oligonucleotide
uagaaccugcaucuuaaug

SEQ ID NO: 3159590 - RNA, 19 nt, Artificial Sequence
  Description of Artificial Sequence: Synthetic oligonucleotide
uaugguaugagaguuucaa

SEQ ID NO: 3159591 - RNA, 19 nt, Artificial Sequence
  Description of Artificial Sequence: Synthetic oligonucleotide
uuacuguccaauagucgag

SEQ ID NO: 3159592 - RNA, 19 nt, Artificial Sequence
  Description of Artificial Sequence: Synthetic oligonucleotide
uaauguucaggguuuucug

SEQ ID NO: 3159593 - RNA, 19 nt, Artificial Sequence
  Description of Artificial Sequence: Synthetic oligonucleotide
uuuaauggggucagaaauu

SEQ ID NO: 3159594 - RNA, 19 nt, Artificial Sequence
  Description of Artificial Sequence: Synthetic oligonucleotide
gagacaccacuuuaauggg

SEQ ID NO: 3159595 - RNA, 19 nt, Artificial Sequence
  Description of Artificial Sequence: Synthetic oligonucleotide
guugaagcaaacguguagc

SEQ ID NO: 3159596 - RNA, 19 nt, Artificial Sequence
  Description of Artificial Sequence: Synthetic oligonucleotide
acuguccaauagucgagcc

SEQ ID NO: 3159597 - RNA, 19 nt, Artificial Sequence
  Description of Artificial Sequence: Synthetic oligonucleotide
uaguagcuggauuaguucu

SEQ ID NO: 3159598 - RNA, 19 nt, Artificial Sequence
  Description of Artificial Sequence: Synthetic oligonucleotide
ucuaguagcuggauuaguu

SEQ ID NO: 3159599 - RNA, 19 nt, Artificial Sequence
  Description of Artificial Sequence: Synthetic oligonucleotide
acugcaacuguucaccaca

SEQ ID NO: 3159600 - RNA, 19 nt, Artificial Sequence
  Description of Artificial Sequence: Synthetic oligonucleotide
uucacguauaauauucuuu

SEQ ID NO: 3159601 - RNA, 19 nt, Artificial Sequence
  Description of Artificial Sequence: Synthetic oligonucleotide
uguccuauuucacguauaa

SEQ ID NO: 3159602 - RNA, 19 nt, Artificial Sequence
  Description of Artificial Sequence: Synthetic oligonucleotide
uauaacacuuucugcuuga

SEQ ID NO: 3159603 - RNA, 19 nt, Artificial Sequence
  Description of Artificial Sequence: Synthetic oligonucleotide
uuuauaacacuuucugcuu

SEQ ID NO: 3159604 - RNA, 19 nt, Artificial Sequence
  Description of Artificial Sequence: Synthetic oligonucleotide
uucaccacauuuaccugag

SEQ ID NO: 3159605 - RNA, 19 nt, Artificial Sequence
  Description of Artificial Sequence: Synthetic oligonucleotide
gcuaaaggcacuuaaucug

SEQ ID NO: 3159606 - RNA, 19 nt, Artificial Sequence
  Description of Artificial Sequence: Synthetic oligonucleotide
auguuccucaagaaagucc

SEQ ID NO: 3159607 - RNA, 19 nt, Artificial Sequence
  Description of Artificial Sequence: Synthetic oligonucleotide
ucugguguuaaaaguguaa

SEQ ID NO: 3159608 - RNA, 19 nt, Artificial Sequence
  Description of Artificial Sequence: Synthetic oligonucleotide
uaaugguguccagagauug

SEQ ID NO: 3159609 - RNA, 19 nt, Artificial Sequence
  Description of Artificial Sequence: Synthetic oligonucleotide
uguuuaagggcccggaguu

SEQ ID NO: 3159610 - RNA, 19 nt, Artificial Sequence
  Description of Artificial Sequence: Synthetic oligonucleotide
uugagugggaggcauugug

SEQ ID NO: 3159611 - RNA, 19 nt, Artificial Sequence
  Description of Artificial Sequence: Synthetic oligonucleotide
ugaugaaguucuaguagcu

SEQ ID NO: 3159612 - RNA, 19 nt, Artificial Sequence
  Description of Artificial Sequence: Synthetic oligonucleotide
  modified_base (18)..(18): a, c, u, g, unknown or other
acugaauuaacagccugng

SEQ ID NO: 3159613 - RNA, 19 nt, Artificial Sequence
  Description of Artificial Sequence: Synthetic oligonucleotide
ugaacaugccgcaucucug

SEQ ID NO: 3159614 - RNA, 19 nt, Artificial Sequence
  Description of Artificial Sequence: Synthetic oligonucleotide
ccauauuaaagccauuugc

SEQ ID NO: 3159615 - RNA, 19 nt, Artificial Sequence
  Description of Artificial Sequence: Synthetic oligonucleotide
ucucugguguuaaaagugu

SEQ ID NO: 3159616 - RNA, 19 nt, Artificial Sequence
  Description of Artificial Sequence: Synthetic oligonucleotide
ucacccucuguuuaagggc

SEQ ID NO: 3159617 - RNA, 19 nt, Artificial Sequence
  Description of Artificial Sequence: Synthetic oligonucleotide
cagaaauuacaaacccagg

SEQ ID NO: 3159618 - RNA, 19 nt, Artificial Sequence
  Description of Artificial Sequence: Synthetic oligonucleotide
acgaucgugauguccgugg

SEQ ID NO: 3159619 - RNA, 19 nt, Artificial Sequence
  Description of Artificial Sequence: Synthetic oligonucleotide
ugagaguuucaaacuguug

SEQ ID NO: 3159620 - RNA, 19 nt, Artificial Sequence
  Description of Artificial Sequence: Synthetic oligonucleotide
uaacacauagcugacgauc

SEQ ID NO: 3159621 - RNA, 19 nt, Artificial Sequence
  Description of Artificial Sequence: Synthetic oligonucleotide
aaauauuuccaucauacgg

SEQ ID NO: 3159622 - RNA, 19 nt, Artificial Sequence
  Description of Artificial Sequence: Synthetic oligonucleotide
aaguuguucccuuuggucc

SEQ ID NO: 3159623 - RNA, 19 nt, Artificial Sequence
  Description of Artificial Sequence: Synthetic oligonucleotide
aauauuuccaucauacggg

SEQ ID NO: 3159624 - RNA, 19 nt, Artificial Sequence
  Description of Artificial Sequence: Synthetic oligonucleotide
uuuucuuugacauggugcg

SEQ ID NO: 3159625 - RNA, 19 nt, Artificial Sequence
  Description of Artificial Sequence: Synthetic oligonucleotide
ugaaggaccucuuugacgg

SEQ ID NO: 3159626 - RNA, 19 nt, Artificial Sequence
  Description of Artificial Sequence: Synthetic oligonucleotide
uauguuaucaguccaucgg

SEQ ID NO: 3159627 - RNA, 19 nt, Artificial Sequence
  Description of Artificial Sequence: Synthetic oligonucleotide
uuuauugcaaauauguuau

SEQ ID NO: 3159628 - RNA, 19 nt, Artificial Sequence
  Description of Artificial Sequence: Synthetic oligonucleotide
cauaccaucaucuaccaag

SEQ ID NO: 3159629 - RNA, 19 nt, Artificial Sequence
  Description of Artificial Sequence: Synthetic oligonucleotide
aaccauaccaucaucuacc

SEQ ID NO: 3159630 - RNA, 19 nt, Artificial Sequence
  Description of Artificial Sequence: Synthetic oligonucleotide
uuuuauugcaaauauguua

SEQ ID NO: 3159631 - RNA, 19 nt, Artificial Sequence
  Description of Artificial Sequence: Synthetic oligonucleotide
auuuccaucauacggguuc

SEQ ID NO: 3159632 - RNA, 19 nt, Artificial Sequence
  Description of Artificial Sequence: Synthetic oligonucleotide
ucuuugacggacauagccg

SEQ ID NO: 3159633 - RNA, 19 nt, Artificial Sequence
  Description of Artificial Sequence: Synthetic oligonucleotide
ucaaaugcucuucuguagg

SEQ ID NO: 3159634 - RNA, 19 nt, Artificial Sequence
  Description of Artificial Sequence: Synthetic oligonucleotide
aauucuagcuuucucaaau

SEQ ID NO: 3159635 - RNA, 19 nt, Artificial Sequence
  Description of Artificial Sequence: Synthetic oligonucleotide
ucuuuuguaagcauggcuc

SEQ ID NO: 3159636 - RNA, 19 nt, Artificial Sequence
  Description of Artificial Sequence: Synthetic oligonucleotide
uuacuuucuuacuaaaccc

SEQ ID NO: 3159637 - RNA, 19 nt, Artificial Sequence
  Description of Artificial Sequence: Synthetic oligonucleotide
acggacauagccgugaugc

SEQ ID NO: 3159638 - RNA, 19 nt, Artificial Sequence
  Description of Artificial Sequence: Synthetic oligonucleotide
auugcaaauauguuaucag

SEQ ID NO: 3159639 - RNA, 19 nt, Artificial Sequence
  Description of Artificial Sequence: Synthetic oligonucleotide
aguaguaauuggaaguucc

SEQ ID NO: 3159640 - RNA, 19 nt, Artificial Sequence
  Description of Artificial Sequence: Synthetic oligonucleotide
gaucuuuuaguugaaauac

SEQ ID NO: 3159641 - RNA, 19 nt, Artificial Sequence
  Description of Artificial Sequence: Synthetic oligonucleotide
aauauguuaucaguccauc

SEQ ID NO: 3159642 - RNA, 19 nt, Artificial Sequence
  Description of Artificial Sequence: Synthetic oligonucleotide
uaauuggaaguuccaaucc

SEQ ID NO: 3159643 - RNA, 19 nt, Artificial Sequence
  Description of Artificial Sequence: Synthetic oligonucleotide
uuaucaguccaucgguugg

SEQ ID NO: 3159644 - RNA, 19 nt, Artificial Sequence
  Description of Artificial Sequence: Synthetic oligonucleotide
uacgauauuugcuuuacgu

SEQ ID NO: 3159645 - RNA, 19 nt, Artificial Sequence
  Description of Artificial Sequence: Synthetic oligonucleotide
ugcaaauauguuaucaguc

SEQ ID NO: 3159646 - RNA, 19 nt, Artificial Sequence
  Description of Artificial Sequence: Synthetic oligonucleotide
uuuggucccgaaaugaaga

SEQ ID NO: 3159647 - RNA, 19 nt, Artificial Sequence
  Description of Artificial Sequence: Synthetic oligonucleotide
uacuuucuuacuaaacccc

SEQ ID NO: 3159648 - RNA, 19 nt, Artificial Sequence
  Description of Artificial Sequence: Synthetic oligonucleotide
gauuuuauugcaaauaugu

SEQ ID NO: 3159649 - RNA, 19 nt, Artificial Sequence
  Description of Artificial Sequence: Synthetic oligonucleotide
aauuggaaguuccaauccu

SEQ ID NO: 3159650 - RNA, 19 nt, Artificial Sequence
  Description of Artificial Sequence: Synthetic oligonucleotide
aaaugaagaaaguucuuuu

SEQ ID NO: 3159651 - RNA, 19 nt, Artificial Sequence
  Description of Artificial Sequence: Synthetic oligonucleotide
auauguuaucaguccaucg

SEQ ID NO: 3159652 - RNA, 19 nt, Artificial Sequence
  Description of Artificial Sequence: Synthetic oligonucleotide
ucuuuuaguugaaauacau

SEQ ID NO: 3159653 - RNA, 19 nt, Artificial Sequence
  Description of Artificial Sequence: Synthetic oligonucleotide
uuugggagcaagcuucucc

SEQ ID NO: 3159654 - RNA, 19 nt, Artificial Sequence
  Description of Artificial Sequence: Synthetic oligonucleotide
aguuguucccuuugguccc

SEQ ID NO: 3159655 - RNA, 19 nt, Artificial Sequence
  Description of Artificial Sequence: Synthetic oligonucleotide
acagcugagaagucagagc

SEQ ID NO: 3159656 - RNA, 19 nt, Artificial Sequence
  Description of Artificial Sequence: Synthetic oligonucleotide
uauugcaaauauguuauca

SEQ ID NO: 3159657 - RNA, 19 nt, Artificial Sequence
  Description of Artificial Sequence: Synthetic oligonucleotide
uucuucugcacucaguccu

SEQ ID NO: 3159658 - RNA, 19 nt, Artificial Sequence
  Description of Artificial Sequence: Synthetic oligonucleotide
ugcuuuacguaucucuucc

SEQ ID NO: 3159659 - RNA, 19 nt, Artificial Sequence
  Description of Artificial Sequence: Synthetic oligonucleotide
cuuuuguaagcauggcucg

SEQ ID NO: 3159660 - RNA, 19 nt, Artificial Sequence
  Description of Artificial Sequence: Synthetic oligonucleotide
ucuuacuaaaccccaaaau

SEQ ID NO: 3159661 - RNA, 19 nt, Artificial Sequence
  Description of Artificial Sequence: Synthetic oligonucleotide
cucuuugacggacauagcc

SEQ ID NO: 3159662 - RNA, 19 nt, Artificial Sequence
  Description of Artificial Sequence: Synthetic oligonucleotide
uuugacauggugcgcgcgg

SEQ ID NO: 3159663 - RNA, 19 nt, Artificial Sequence
  Description of Artificial Sequence: Synthetic oligonucleotide
aaagcccaguaguaauugg

SEQ ID NO: 3159664 - RNA, 19 nt, Artificial Sequence
  Description of Artificial Sequence: Synthetic oligonucleotide
cagcugagaagucagagcc

SEQ ID NO: 3159665 - RNA, 19 nt, Artificial Sequence
  Description of Artificial Sequence: Synthetic oligonucleotide
accucuuugacggacauag

SEQ ID NO: 3159666 - RNA, 19 nt, Artificial Sequence
  Description of Artificial Sequence: Synthetic oligonucleotide
uucucaaaugcucuucugu

SEQ ID NO: 3159667 - RNA, 19 nt, Artificial Sequence
  Description of Artificial Sequence: Synthetic oligonucleotide
augaagaaaguucuuuugu

SEQ ID NO: 3159668 - RNA, 19 nt, Artificial Sequence
  Description of Artificial Sequence: Synthetic oligonucleotide
cuagcuuucucaaaugcuc

SEQ ID NO: 3159669 - RNA, 19 nt, Artificial Sequence
  Description of Artificial Sequence: Synthetic oligonucleotide
uaucucuuccacaacuuga

SEQ ID NO: 3159670 - RNA, 19 nt, Artificial Sequence
  Description of Artificial Sequence: Synthetic oligonucleotide
uuuggcuacgauauuugcu

SEQ ID NO: 3159671 - RNA, 19 nt, Artificial Sequence
  Description of Artificial Sequence: Synthetic oligonucleotide
aggauuuuauugcaaauau

SEQ ID NO: 3159672 - RNA, 19 nt, Artificial Sequence
  Description of Artificial Sequence: Synthetic oligonucleotide
uugagggucacauucucug

SEQ ID NO: 3159673 - RNA, 19 nt, Artificial Sequence
  Description of Artificial Sequence: Synthetic oligonucleotide
guaauuggaaguuccaauc

SEQ ID NO: 3159674 - RNA, 19 nt, Artificial Sequence
  Description of Artificial Sequence: Synthetic oligonucleotide
aguaauuggaaguuccaau

SEQ ID NO: 3159675 - RNA, 19 nt, Artificial Sequence
  Description of Artificial Sequence: Synthetic oligonucleotide
uugcaaauauguuaucagu

SEQ ID NO: 3159676 - RNA, 19 nt, Artificial Sequence
  Description of Artificial Sequence: Synthetic oligonucleotide
ucugccuuaaguuguuccc

SEQ ID NO: 3159677 - RNA, 19 nt, Artificial Sequence
  Description of Artificial Sequence: Synthetic oligonucleotide
ucuuuggcuacgauauuug

SEQ ID NO: 3159678 - RNA, 19 nt, Artificial Sequence
  Description of Artificial Sequence: Synthetic oligonucleotide
uacaucuuuugucucaaaa

SEQ ID NO: 3159679 - RNA, 19 nt, Artificial Sequence
  Description of Artificial Sequence: Synthetic oligonucleotide
uuuaguugaaauacaucuu

SEQ ID NO: 3159680 - RNA, 19 nt, Artificial Sequence
  Description of Artificial Sequence: Synthetic oligonucleotide
uuuacguaucucuuccaca

SEQ ID NO: 3159681 - RNA, 19 nt, Artificial Sequence
  Description of Artificial Sequence: Synthetic oligonucleotide
ucuuccacaacuugagggu

SEQ ID NO: 3159682 - RNA, 19 nt, Artificial Sequence
  Description of Artificial Sequence: Synthetic oligonucleotide
ggaaguuccaauccucucg

SEQ ID NO: 3159683 - RNA, 19 nt, Artificial Sequence
  Description of Artificial Sequence: Synthetic oligonucleotide
gaaguuccaauccucucgc

SEQ ID NO: 3159684 - RNA, 19 nt, Artificial Sequence
  Description of Artificial Sequence: Synthetic oligonucleotide
uuaaguuguucccuuuggu

SEQ ID NO: 3159685 - RNA, 19 nt, Artificial Sequence
  Description of Artificial Sequence: Synthetic oligonucleotide
ucuucugucucuugccucc

SEQ ID NO: 3159686 - RNA, 19 nt, Artificial Sequence
  Description of Artificial Sequence: Synthetic oligonucleotide
uaaguuguucccuuugguc

SEQ ID NO: 3159687 - RNA, 19 nt, Artificial Sequence
  Description of Artificial Sequence: Synthetic oligonucleotide
gcaaauauguuaucagucc

SEQ ID NO: 3159688 - RNA, 19 nt, Artificial Sequence
  Description of Artificial Sequence: Synthetic oligonucleotide
uucguuccuggcaugaaga

SEQ ID NO: 3159689 - RNA, 19 nt, Artificial Sequence
  Description of Artificial Sequence: Synthetic oligonucleotide
auaccaucaucuaccaagc

SEQ ID NO: 3159690 - RNA, 19 nt, Artificial Sequence
  Description of Artificial Sequence: Synthetic oligonucleotide
uuggcuacgauauuugcuu

SEQ ID NO: 3159691 - RNA, 19 nt, Artificial Sequence
  Description of Artificial Sequence: Synthetic oligonucleotide
cugaaggaccucuuugacg

SEQ ID NO: 3159692 - RNA, 19 nt, Artificial Sequence
  Description of Artificial Sequence: Synthetic oligonucleotide
cuuuuaguugaaauacauc

SEQ ID NO: 3159693 - RNA, 19 nt, Artificial Sequence
  Description of Artificial Sequence: Synthetic oligonucleotide
aguuccaauccucucgcag

SEQ ID NO: 3159694 - RNA, 19 nt, Artificial Sequence
  Description of Artificial Sequence: Synthetic oligonucleotide
cucuuugggagcaagcuuc

SEQ ID NO: 3159695 - RNA, 19 nt, Artificial Sequence
  Description of Artificial Sequence: Synthetic oligonucleotide
uacuaaaccccaaaauuuu

SEQ ID NO: 3159696 - RNA, 19 nt, Artificial Sequence
  Description of Artificial Sequence: Synthetic oligonucleotide
caacuugagggucacauuc

SEQ ID NO: 3159697 - RNA, 19 nt, Artificial Sequence
  Description of Artificial Sequence: Synthetic oligonucleotide
uuugcuuuacguaucucuu

SEQ ID NO: 3159698 - RNA, 19 nt, Artificial Sequence
  Description of Artificial Sequence: Synthetic oligonucleotide
uucuuacuaaaccccaaaa

SEQ ID NO: 3159699 - RNA, 19 nt, Artificial Sequence
  Description of Artificial Sequence: Synthetic oligonucleotide
ucucuugccucccaauucu

SEQ ID NO: 3159700 - RNA, 19 nt, Artificial Sequence
  Description of Artificial Sequence: Synthetic oligonucleotide
cucaaaugcucuucuguag

SEQ ID NO: 3159701 - RNA, 19 nt, Artificial Sequence
  Description of Artificial Sequence: Synthetic oligonucleotide
aggucucccuguuugacuc

SEQ ID NO: 3159702 - RNA, 19 nt, Artificial Sequence
  Description of Artificial Sequence: Synthetic oligonucleotide
uuugcaugccucuugguuu

SEQ ID NO: 3159703 - RNA, 19 nt, Artificial Sequence
  Description of Artificial Sequence: Synthetic oligonucleotide
guuaucaguccaucgguug

SEQ ID NO: 3159704 - RNA, 19 nt, Artificial Sequence
  Description of Artificial Sequence: Synthetic oligonucleotide
caaaugcucuucuguaggg

SEQ ID NO: 3159705 - RNA, 19 nt, Artificial Sequence
  Description of Artificial Sequence: Synthetic oligonucleotide
agcaagcuucuccagaucu

SEQ ID NO: 3159706 - RNA, 19 nt, Artificial Sequence
  Description of Artificial Sequence: Synthetic oligonucleotide
auauuuccaucauacgggu

SEQ ID NO: 3159707 - RNA, 19 nt, Artificial Sequence
  Description of Artificial Sequence: Synthetic oligonucleotide
aaugcucuucuguaggguu

SEQ ID NO: 3159708 - RNA, 19 nt, Artificial Sequence
  Description of Artificial Sequence: Synthetic oligonucleotide
ucguucuucugucucuugc

SEQ ID NO: 3159709 - RNA, 19 nt, Artificial Sequence
  Description of Artificial Sequence: Synthetic oligonucleotide
ucuccagaucuuuuaguug

SEQ ID NO: 3159710 - RNA, 19 nt, Artificial Sequence
  Description of Artificial Sequence: Synthetic oligonucleotide
uucccuuuggucccgaaau

SEQ ID NO: 3159711 - RNA, 19 nt, Artificial Sequence
  Description of Artificial Sequence: Synthetic oligonucleotide
cuuuggucccgaaaugaag

SEQ ID NO: 3159712 - RNA, 19 nt, Artificial Sequence
  Description of Artificial Sequence: Synthetic oligonucleotide
uuggaaguuccaauccucu

SEQ ID NO: 3159713 - RNA, 19 nt, Artificial Sequence
  Description of Artificial Sequence: Synthetic oligonucleotide
ugcuuggaaagcccaguag

SEQ ID NO: 3159714 - RNA, 19 nt, Artificial Sequence
  Description of Artificial Sequence: Synthetic oligonucleotide
gaaauacaucuuuugucuc

SEQ ID NO: 3159715 - RNA, 19 nt, Artificial Sequence
  Description of Artificial Sequence: Synthetic oligonucleotide
auguuaucaguccaucggu

SEQ ID NO: 3159716 - RNA, 19 nt, Artificial Sequence
  Description of Artificial Sequence: Synthetic oligonucleotide
ucugaaggaccucuuugac

SEQ ID NO: 3159717 - RNA, 19 nt, Artificial Sequence
  Description of Artificial Sequence: Synthetic oligonucleotide
uuucucuuugggagcaagc

SEQ ID NO: 3159718 - RNA, 19 nt, Artificial Sequence
  Description of Artificial Sequence: Synthetic oligonucleotide
ucucaaaugcucuucugua

SEQ ID NO: 3159719 - RNA, 19 nt, Artificial Sequence
  Description of Artificial Sequence: Synthetic oligonucleotide
cuuuacguaucucuuccac

SEQ ID NO: 3159720 - RNA, 19 nt, Artificial Sequence
  Description of Artificial Sequence: Synthetic oligonucleotide
ucuucuguaggguuugcau

SEQ ID NO: 3159721 - RNA, 19 nt, Artificial Sequence
  Description of Artificial Sequence: Synthetic oligonucleotide
aaagcagccacagauagcc

SEQ ID NO: 3159722 - RNA, 19 nt, Artificial Sequence
  Description of Artificial Sequence: Synthetic oligonucleotide
ucaaaugaaagccuagugc

SEQ ID NO: 3159723 - RNA, 19 nt, Artificial Sequence
  Description of Artificial Sequence: Synthetic oligonucleotide
aauuuuaguaaaccagcuc

SEQ ID NO: 3159724 - RNA, 19 nt, Artificial Sequence
  Description of Artificial Sequence: Synthetic oligonucleotide
uacucuaacauccagggga

SEQ ID NO: 3159725 - RNA, 19 nt, Artificial Sequence
  Description of Artificial Sequence: Synthetic oligonucleotide
caaaugaaagccuagugcc

SEQ ID NO: 3159726 - RNA, 19 nt, Artificial Sequence
  Description of Artificial Sequence: Synthetic oligonucleotide
uguuggaucacauagugga

SEQ ID NO: 3159727 - RNA, 19 nt, Artificial Sequence
  Description of Artificial Sequence: Synthetic oligonucleotide
uguaugaggguccagcagg

SEQ ID NO: 3159728 - RNA, 19 nt, Artificial Sequence
  Description of Artificial Sequence: Synthetic oligonucleotide
gaaccaaccauguucauag

SEQ ID NO: 3159729 - RNA, 19 nt, Artificial Sequence
  Description of Artificial Sequence: Synthetic oligonucleotide
uuagaugaccaauagaccu

SEQ ID NO: 3159730 - RNA, 19 nt, Artificial Sequence
  Description of Artificial Sequence: Synthetic oligonucleotide
acaauuuuaguaaaccagc

SEQ ID NO: 3159731 - RNA, 19 nt, Artificial Sequence
  Description of Artificial Sequence: Synthetic oligonucleotide
cugaguuacucuaacaucc

SEQ ID NO: 3159732 - RNA, 19 nt, Artificial Sequence
  Description of Artificial Sequence: Synthetic oligonucleotide
aaagguccuccucagggcc

SEQ ID NO: 3159733 - RNA, 19 nt, Artificial Sequence
  Description of Artificial Sequence: Synthetic oligonucleotide
uguuuggccaaccugagca

SEQ ID NO: 3159734 - RNA, 19 nt, Artificial Sequence
  Description of Artificial Sequence: Synthetic oligonucleotide
guauuuauuuccucggugg

SEQ ID NO: 3159735 - RNA, 19 nt, Artificial Sequence
  Description of Artificial Sequence: Synthetic oligonucleotide
cucaaaucaaaugaaagcc

SEQ ID NO: 3159736 - RNA, 19 nt, Artificial Sequence
  Description of Artificial Sequence: Synthetic oligonucleotide
aucggaaccaaccauguuc

SEQ ID NO: 3159737 - RNA, 19 nt, Artificial Sequence
  Description of Artificial Sequence: Synthetic oligonucleotide
ugcucaaaucaaaugaaag

SEQ ID NO: 3159738 - RNA, 19 nt, Artificial Sequence
  Description of Artificial Sequence: Synthetic oligonucleotide
accaauagaccucacuccc

SEQ ID NO: 3159739 - RNA, 19 nt, Artificial Sequence
  Description of Artificial Sequence: Synthetic oligonucleotide
ugaauuccuacaauuuuag

SEQ ID NO: 3159740 - RNA, 19 nt, Artificial Sequence
  Description of Artificial Sequence: Synthetic oligonucleotide
  modified_base (9)..(9): a, c, u, g, unknown or other
augcaagcnccuuuuaacc

SEQ ID NO: 3159741 - RNA, 19 nt, Artificial Sequence
  Description of Artificial Sequence: Synthetic oligonucleotide
caugccaggaauuagauga

SEQ ID NO: 3159742 - RNA, 19 nt, Artificial Sequence
  Description of Artificial Sequence: Synthetic oligonucleotide
ugugcuuccgagcuggagg

SEQ ID NO: 3159743 - RNA, 19 nt, Artificial Sequence
  Description of Artificial Sequence: Synthetic oligonucleotide
auuccuacaauuuuaguaa

SEQ ID NO: 3159744 - RNA, 19 nt, Artificial Sequence
  Description of Artificial Sequence: Synthetic oligonucleotide
aaagccuagugccuggcuc

SEQ ID NO: 3159745 - RNA, 19 nt, Artificial Sequence
  Description of Artificial Sequence: Synthetic oligonucleotide
ucuagaagucgcuucacag

SEQ ID NO: 3159746 - RNA, 19 nt, Artificial Sequence
  Description of Artificial Sequence: Synthetic oligonucleotide
auuguuggaucacauagug

SEQ ID NO: 3159747 - RNA, 19 nt, Artificial Sequence
  Description of Artificial Sequence: Synthetic oligonucleotide
uuuuaguaaaccagcucgc

SEQ ID NO: 3159748 - RNA, 19 nt, Artificial Sequence
  Description of Artificial Sequence: Synthetic oligonucleotide
ugaccaauagaccucacuc

SEQ ID NO: 3159749 - RNA, 19 nt, Artificial Sequence
  Description of Artificial Sequence: Synthetic oligonucleotide
ugauuuuccagcugagaag

SEQ ID NO: 3159750 - RNA, 19 nt, Artificial Sequence
  Description of Artificial Sequence: Synthetic oligonucleotide
caaucuagugccaugguug

SEQ ID NO: 3159751 - RNA, 19 nt, Artificial Sequence
  Description of Artificial Sequence: Synthetic oligonucleotide
  modified_base (4)..(4): a, c, u, g, unknown or other
agcnccuuuuaacccaugc

SEQ ID NO: 3159752 - RNA, 19 nt, Artificial Sequence
  Description of Artificial Sequence: Synthetic oligonucleotide
gucaaggacacacaugucc

SEQ ID NO: 3159753 - RNA, 19 nt, Artificial Sequence
  Description of Artificial Sequence: Synthetic oligonucleotide
auuagaugaccaauagacc

SEQ ID NO: 3159754 - RNA, 19 nt, Artificial Sequence
  Description of Artificial Sequence: Synthetic oligonucleotide
gaucacauaguggaguggg

SEQ ID NO: 3159755 - RNA, 19 nt, Artificial Sequence
  Description of Artificial Sequence: Synthetic oligonucleotide
uaguaaaccagcucgcucu

SEQ ID NO: 3159756 - RNA, 19 nt, Artificial Sequence
  Description of Artificial Sequence: Synthetic oligonucleotide
uccuuaguuggcaaucuag

SEQ ID NO: 3159757 - RNA, 19 nt, Artificial Sequence
  Description of Artificial Sequence: Synthetic oligonucleotide
ucuucuagaagucgcuuca

SEQ ID NO: 3159758 - RNA, 19 nt, Artificial Sequence
  Description of Artificial Sequence: Synthetic oligonucleotide
uagcucuucuucuagaagu

SEQ ID NO: 3159759 - RNA, 19 nt, Artificial Sequence
  Description of Artificial Sequence: Synthetic oligonucleotide
uuuacagucuugcuuuacu

SEQ ID NO: 3159760 - RNA, 19 nt, Artificial Sequence
  Description of Artificial Sequence: Synthetic oligonucleotide
aaccgugugacccacuccu

SEQ ID NO: 3159761 - RNA, 19 nt, Artificial Sequence
  Description of Artificial Sequence: Synthetic oligonucleotide
ugguguuuggccaaccuga

SEQ ID NO: 3159762 - RNA, 19 nt, Artificial Sequence
  Description of Artificial Sequence: Synthetic oligonucleotide
aaugaaagccuagugccug

SEQ ID NO: 3159763 - RNA, 19 nt, Artificial Sequence
  Description of Artificial Sequence: Synthetic oligonucleotide
gacuuuaccuuuucuauuc

SEQ ID NO: 3159764 - RNA, 19 nt, Artificial Sequence
  Description of Artificial Sequence: Synthetic oligonucleotide
uuccguuccgcaaaagcag

SEQ ID NO: 3159765 - RNA, 19 nt, Artificial Sequence
  Description of Artificial Sequence: Synthetic oligonucleotide
ucgcuucacagaaaggucc

SEQ ID NO: 3159766 - RNA, 19 nt, Artificial Sequence
  Description of Artificial Sequence: Synthetic oligonucleotide
agacugaggguccugccgc

SEQ ID NO: 3159767 - RNA, 19 nt, Artificial Sequence
  Description of Artificial Sequence: Synthetic oligonucleotide
uuguuggaucacauagugg

SEQ ID NO: 3159768 - RNA, 19 nt, Artificial Sequence
  Description of Artificial Sequence: Synthetic oligonucleotide
caaggcaucggaaccaacc

SEQ ID NO: 3159769 - RNA, 19 nt, Artificial Sequence
  Description of Artificial Sequence: Synthetic oligonucleotide
uagacugaggguccugccg

SEQ ID NO: 3159770 - RNA, 19 nt, Artificial Sequence
  Description of Artificial Sequence: Synthetic oligonucleotide
aaucuagugccaugguuga

SEQ ID NO: 3159771 - RNA, 19 nt, Artificial Sequence
  Description of Artificial Sequence: Synthetic oligonucleotide
gacauaugggccugaauac

SEQ ID NO: 3159772 - RNA, 19 nt, Artificial Sequence
  Description of Artificial Sequence: Synthetic oligonucleotide
uauuguuggaucacauagu

SEQ ID NO: 3159773 - RNA, 19 nt, Artificial Sequence
  Description of Artificial Sequence: Synthetic oligonucleotide
auacuuucuaucugcaagu

SEQ ID NO: 3159774 - RNA, 19 nt, Artificial Sequence
  Description of Artificial Sequence: Synthetic oligonucleotide
uuugggcuggaauuggccc

SEQ ID NO: 3159775 - RNA, 19 nt, Artificial Sequence
  Description of Artificial Sequence: Synthetic oligonucleotide
caaccauguucauagauuc

SEQ ID NO: 3159776 - RNA, 19 nt, Artificial Sequence
  Description of Artificial Sequence: Synthetic oligonucleotide
gaccaauagaccucacucc

SEQ ID NO: 3159777 - RNA, 19 nt, Artificial Sequence
  Description of Artificial Sequence: Synthetic oligonucleotide
uauuuauuuccucgguggu

SEQ ID NO: 3159778 - RNA, 19 nt, Artificial Sequence
  Description of Artificial Sequence: Synthetic oligonucleotide
uucuguuuggccaccgagc

SEQ ID NO: 3159779 - RNA, 19 nt, Artificial Sequence
  Description of Artificial Sequence: Synthetic oligonucleotide
  modified_base (18)..(18): a, c, u, g, unknown or other
auugggcagaugcaagcnc

SEQ ID NO: 3159780 - RNA, 19 nt, Artificial Sequence
  Description of Artificial Sequence: Synthetic oligonucleotide
gcucaaaucaaaugaaagc

SEQ ID NO: 3159781 - RNA, 19 nt, Artificial Sequence
  Description of Artificial Sequence: Synthetic oligonucleotide
ucuugcuuuacuugguccu

SEQ ID NO: 3159782 - RNA, 19 nt, Artificial Sequence
  Description of Artificial Sequence: Synthetic oligonucleotide
accgugaaccgugugaccc

SEQ ID NO: 3159783 - RNA, 19 nt, Artificial Sequence
  Description of Artificial Sequence: Synthetic oligonucleotide
aguuacucuaacauccagg

SEQ ID NO: 3159784 - RNA, 19 nt, Artificial Sequence
  Description of Artificial Sequence: Synthetic oligonucleotide
ugaugcagcaaggacagca

SEQ ID NO: 3159785 - RNA, 19 nt, Artificial Sequence
  Description of Artificial Sequence: Synthetic oligonucleotide
  modified_base (8)..(8): a, c, u, g, unknown or other
ugcaagcnccuuuuaaccc

SEQ ID NO: 3159786 - RNA, 19 nt, Artificial Sequence
  Description of Artificial Sequence: Synthetic oligonucleotide
  modified_base (17)..(17): a, c, u, g, unknown or other
uugggcagaugcaagcncc

SEQ ID NO: 3159787 - RNA, 19 nt, Artificial Sequence
  Description of Artificial Sequence: Synthetic oligonucleotide
aacccaugcuuguaagcag

SEQ ID NO: 3159788 - RNA, 19 nt, Artificial Sequence
  Description of Artificial Sequence: Synthetic oligonucleotide
uagauuccugccauggcca

SEQ ID NO: 3159789 - RNA, 19 nt, Artificial Sequence
  Description of Artificial Sequence: Synthetic oligonucleotide
uaccuuuucuauuccuuag

SEQ ID NO: 3159790 - RNA, 19 nt, Artificial Sequence
  Description of Artificial Sequence: Synthetic oligonucleotide
uuaguaaaccagcucgcuc

SEQ ID NO: 3159791 - RNA, 19 nt, Artificial Sequence
  Description of Artificial Sequence: Synthetic oligonucleotide
ggaauuagaugaccaauag

SEQ ID NO: 3159792 - RNA, 19 nt, Artificial Sequence
  Description of Artificial Sequence: Synthetic oligonucleotide
uggauagcucuucuucuag

SEQ ID NO: 3159793 - RNA, 19 nt, Artificial Sequence
  Description of Artificial Sequence: Synthetic oligonucleotide
agauagccggaccaggcuc

SEQ ID NO: 3159794 - RNA, 19 nt, Artificial Sequence
  Description of Artificial Sequence: Synthetic oligonucleotide
cagaaucuggugaggaccg

SEQ ID NO: 3159795 - RNA, 19 nt, Artificial Sequence
  Description of Artificial Sequence: Synthetic oligonucleotide
agugaauuccuacaauuuu

SEQ ID NO: 3159796 - RNA, 19 nt, Artificial Sequence
  Description of Artificial Sequence: Synthetic oligonucleotide
uccugccgcacacugagag

SEQ ID NO: 3159797 - RNA, 19 nt, Artificial Sequence
  Description of Artificial Sequence: Synthetic oligonucleotide
uaacccaugcuuguaagca

SEQ ID NO: 3159798 - RNA, 19 nt, Artificial Sequence
  Description of Artificial Sequence: Synthetic oligonucleotide
aaccauguucauagauucc

SEQ ID NO: 3159799 - RNA, 19 nt, Artificial Sequence
  Description of Artificial Sequence: Synthetic oligonucleotide
cuacaauuuuaguaaacca

SEQ ID NO: 3159800 - RNA, 19 nt, Artificial Sequence
  Description of Artificial Sequence: Synthetic oligonucleotide
accuguaugaggguccagc

SEQ ID NO: 3159801 - RNA, 19 nt, Artificial Sequence
  Description of Artificial Sequence: Synthetic oligonucleotide
gugccugucaccgugaacc

SEQ ID NO: 3159802 - RNA, 19 nt, Artificial Sequence
  Description of Artificial Sequence: Synthetic oligonucleotide
uugguccugauuuuccagc

SEQ ID NO: 3159803 - RNA, 19 nt, Artificial Sequence
  Description of Artificial Sequence: Synthetic oligonucleotide
gaaagguccuccucagggc

SEQ ID NO: 3159804 - RNA, 19 nt, Artificial Sequence
  Description of Artificial Sequence: Synthetic oligonucleotide
ucaucucagggacuuuacc

SEQ ID NO: 3159805 - RNA, 19 nt, Artificial Sequence
  Description of Artificial Sequence: Synthetic oligonucleotide
uagugccuggcucauauaa

SEQ ID NO: 3159806 - RNA, 19 nt, Artificial Sequence
  Description of Artificial Sequence: Synthetic oligonucleotide
uggcaaucuagugccaugg

SEQ ID NO: 3159807 - RNA, 19 nt, Artificial Sequence
  Description of Artificial Sequence: Synthetic oligonucleotide
ugaguuacucuaacaucca

SEQ ID NO: 3159808 - RNA, 19 nt, Artificial Sequence
  Description of Artificial Sequence: Synthetic oligonucleotide
ccugccauggccaagucgg

SEQ ID NO: 3159809 - RNA, 19 nt, Artificial Sequence
  Description of Artificial Sequence: Synthetic oligonucleotide
ugccaugacccaacagugg

SEQ ID NO: 3159810 - RNA, 19 nt, Artificial Sequence
  Description of Artificial Sequence: Synthetic oligonucleotide
caauagaccucacucccag

SEQ ID NO: 3159811 - RNA, 19 nt, Artificial Sequence
  Description of Artificial Sequence: Synthetic oligonucleotide
aagccuagugccuggcuca

SEQ ID NO: 3159812 - RNA, 19 nt, Artificial Sequence
  Description of Artificial Sequence: Synthetic oligonucleotide
cauuggauccaaggcaucg

SEQ ID NO: 3159813 - RNA, 19 nt, Artificial Sequence
  Description of Artificial Sequence: Synthetic oligonucleotide
aacagugguuucaugccag

SEQ ID NO: 3159814 - RNA, 19 nt, Artificial Sequence
  Description of Artificial Sequence: Synthetic oligonucleotide
uuugguguuuggccaaccu

SEQ ID NO: 3159815 - RNA, 19 nt, Artificial Sequence
  Description of Artificial Sequence: Synthetic oligonucleotide
uccucagggccuaagggac

SEQ ID NO: 3159816 - RNA, 19 nt, Artificial Sequence
  Description of Artificial Sequence: Synthetic oligonucleotide
uguccaucaucugugugcc

SEQ ID NO: 3159817 - RNA, 19 nt, Artificial Sequence
  Description of Artificial Sequence: Synthetic oligonucleotide
uuuaguaaaccagcucgcu

SEQ ID NO: 3159818 - RNA, 19 nt, Artificial Sequence
  Description of Artificial Sequence: Synthetic oligonucleotide
uguaagcaggcagacauau

SEQ ID NO: 3159819 - RNA, 19 nt, Artificial Sequence
  Description of Artificial Sequence: Synthetic oligonucleotide
uucuauuccuuaguuggca

SEQ ID NO: 3159820 - RNA, 19 nt, Artificial Sequence
  Description of Artificial Sequence: Synthetic oligonucleotide
aaaugaaagccuagugccu

SEQ ID NO: 3159821 - RNA, 19 nt, Artificial Sequence
  Description of Artificial Sequence: Synthetic oligonucleotide
aacaaguacaaccucaugg

SEQ ID NO: 3159822 - RNA, 19 nt, Artificial Sequence
  Description of Artificial Sequence: Synthetic oligonucleotide
aaaagauugucauauuguc

SEQ ID NO: 3159823 - RNA, 19 nt, Artificial Sequence
  Description of Artificial Sequence: Synthetic oligonucleotide
uacauaaaagaauagaaga

SEQ ID NO: 3159824 - RNA, 19 nt, Artificial Sequence
  Description of Artificial Sequence: Synthetic oligonucleotide
aaacaucuuuuauugagac

SEQ ID NO: 3159825 - RNA, 19 nt, Artificial Sequence
  Description of Artificial Sequence: Synthetic oligonucleotide
gaagaaacaucuuuuauug

SEQ ID NO: 3159826 - RNA, 19 nt, Artificial Sequence
  Description of Artificial Sequence: Synthetic oligonucleotide
aagauugucauauuguccu

SEQ ID NO: 3159827 - RNA, 19 nt, Artificial Sequence
  Description of Artificial Sequence: Synthetic oligonucleotide
aagaauagaagaauaaaag

SEQ ID NO: 3159828 - RNA, 19 nt, Artificial Sequence
  Description of Artificial Sequence: Synthetic oligonucleotide
aagaauaaaagauugucau

SEQ ID NO: 3159829 - RNA, 19 nt, Artificial Sequence
  Description of Artificial Sequence: Synthetic oligonucleotide
acaucuuuuauugagacgg

SEQ ID NO: 3159830 - RNA, 19 nt, Artificial Sequence
  Description of Artificial Sequence: Synthetic oligonucleotide
ucucagucaaaccagagcc

SEQ ID NO: 3159831 - RNA, 19 nt, Artificial Sequence
  Description of Artificial Sequence: Synthetic oligonucleotide
uucgcuugaguuuaaaagg

SEQ ID NO: 3159832 - RNA, 19 nt, Artificial Sequence
  Description of Artificial Sequence: Synthetic oligonucleotide
ucaauuguggaaaggaaag

SEQ ID NO: 3159833 - RNA, 19 nt, Artificial Sequence
  Description of Artificial Sequence: Synthetic oligonucleotide
uuuaaaagguggcacauca

SEQ ID NO: 3159834 - RNA, 19 nt, Artificial Sequence
  Description of Artificial Sequence: Synthetic oligonucleotide
uuugauggcgccaaaagca

SEQ ID NO: 3159835 - RNA, 19 nt, Artificial Sequence
  Description of Artificial Sequence: Synthetic oligonucleotide
ucaacuuguaauaacuccc

SEQ ID NO: 3159836 - RNA, 19 nt, Artificial Sequence
  Description of Artificial Sequence: Synthetic oligonucleotide
aaagauugucauauugucc

SEQ ID NO: 3159837 - RNA, 19 nt, Artificial Sequence
  Description of Artificial Sequence: Synthetic oligonucleotide
aauaaauggcuucaauugu

SEQ ID NO: 3159838 - RNA, 19 nt, Artificial Sequence
  Description of Artificial Sequence: Synthetic oligonucleotide
uguaauaacucccgaaggc

SEQ ID NO: 3159839 - RNA, 19 nt, Artificial Sequence
  Description of Artificial Sequence: Synthetic oligonucleotide
agaauagaagaauaaaaga

SEQ ID NO: 3159840 - RNA, 19 nt, Artificial Sequence
  Description of Artificial Sequence: Synthetic oligonucleotide
aauuguggaaaggaaaguc

SEQ ID NO: 3159841 - RNA, 19 nt, Artificial Sequence
  Description of Artificial Sequence: Synthetic oligonucleotide
ucuaccuuuacucucaauc

SEQ ID NO: 3159842 - RNA, 19 nt, Artificial Sequence
  Description of Artificial Sequence: Synthetic oligonucleotide
aaguacaaccucauggucc

SEQ ID NO: 3159843 - RNA, 19 nt, Artificial Sequence
  Description of Artificial Sequence: Synthetic oligonucleotide
uaaaagguggcacaucaag

SEQ ID NO: 3159844 - RNA, 19 nt, Artificial Sequence
  Description of Artificial Sequence: Synthetic oligonucleotide
uauugagacggacugaggc

SEQ ID NO: 3159845 - RNA, 19 nt, Artificial Sequence
  Description of Artificial Sequence: Synthetic oligonucleotide
agaagaauaaaagauuguc

SEQ ID NO: 3159846 - RNA, 19 nt, Artificial Sequence
  Description of Artificial Sequence: Synthetic oligonucleotide
accaggaaguaauaaaugg

SEQ ID NO: 3159847 - RNA, 19 nt, Artificial Sequence
  Description of Artificial Sequence: Synthetic oligonucleotide
uucucuuucagcaugugac

SEQ ID NO: 3159848 - RNA, 19 nt, Artificial Sequence
  Description of Artificial Sequence: Synthetic oligonucleotide
uuguaauaacucccgaagg

SEQ ID NO: 3159849 - RNA, 19 nt, Artificial Sequence
  Description of Artificial Sequence: Synthetic oligonucleotide
acuaugguagucuaccagg

SEQ ID NO: 3159850 - RNA, 19 nt, Artificial Sequence
  Description of Artificial Sequence: Synthetic oligonucleotide
uuugcagaugagaagaaac

SEQ ID NO: 3159851 - RNA, 19 nt, Artificial Sequence
  Description of Artificial Sequence: Synthetic oligonucleotide
uaaaagaauagaagaauaa

SEQ ID NO: 3159852 - RNA, 19 nt, Artificial Sequence
  Description of Artificial Sequence: Synthetic oligonucleotide
aaaagguggcacaucaagc

SEQ ID NO: 3159853 - RNA, 19 nt, Artificial Sequence
  Description of Artificial Sequence: Synthetic oligonucleotide
uuuucuuguuuucaguuca

SEQ ID NO: 3159854 - RNA, 19 nt, Artificial Sequence
  Description of Artificial Sequence: Synthetic oligonucleotide
aaagguggcacaucaagcu

SEQ ID NO: 3159855 - RNA, 19 nt, Artificial Sequence
  Description of Artificial Sequence: Synthetic oligonucleotide
uuggcauucuuuaucaagc

SEQ ID NO: 3159856 - RNA, 19 nt, Artificial Sequence
  Description of Artificial Sequence: Synthetic oligonucleotide
uaaauggcuucaauugugg

SEQ ID NO: 3159857 - RNA, 19 nt, Artificial Sequence
  Description of Artificial Sequence: Synthetic oligonucleotide
uucaacuuguaauaacucc

SEQ ID NO: 3159858 - RNA, 19 nt, Artificial Sequence
  Description of Artificial Sequence: Synthetic oligonucleotide
aaagaauagaagaauaaaa

SEQ ID NO: 3159859 - RNA, 19 nt, Artificial Sequence
  Description of Artificial Sequence: Synthetic oligonucleotide
uugucuucucuccagagcc

SEQ ID NO: 3159860 - RNA, 19 nt, Artificial Sequence
  Description of Artificial Sequence: Synthetic oligonucleotide
uuuaucaagcgguacauaa

SEQ ID NO: 3159861 - RNA, 19 nt, Artificial Sequence
  Description of Artificial Sequence: Synthetic oligonucleotide
aaugaagaccacucucuuc

SEQ ID NO: 3159862 - RNA, 19 nt, Artificial Sequence
  Description of Artificial Sequence: Synthetic oligonucleotide
aacaucuuuuauugagacg

SEQ ID NO: 3159863 - RNA, 19 nt, Artificial Sequence
  Description of Artificial Sequence: Synthetic oligonucleotide
auugagacggacugaggcc

SEQ ID NO: 3159864 - RNA, 19 nt, Artificial Sequence
  Description of Artificial Sequence: Synthetic oligonucleotide
aauggaugagcuuugguuu

SEQ ID NO: 3159865 - RNA, 19 nt, Artificial Sequence
  Description of Artificial Sequence: Synthetic oligonucleotide
aagaccacucucuucaaug

SEQ ID NO: 3159866 - RNA, 19 nt, Artificial Sequence
  Description of Artificial Sequence: Synthetic oligonucleotide
guucgcuugaguuuaaaag

SEQ ID NO: 3159867 - RNA, 19 nt, Artificial Sequence
  Description of Artificial Sequence: Synthetic oligonucleotide
uuuggcauucuuuaucaag

SEQ ID NO: 3159868 - RNA, 19 nt, Artificial Sequence
  Description of Artificial Sequence: Synthetic oligonucleotide
uuuauugagacggacugag

SEQ ID NO: 3159869 - RNA, 19 nt, Artificial Sequence
  Description of Artificial Sequence: Synthetic oligonucleotide
uuuugauggcgccaaaagc

SEQ ID NO: 3159870 - RNA, 19 nt, Artificial Sequence
  Description of Artificial Sequence: Synthetic oligonucleotide
uuguuuucaguucaacuug

SEQ ID NO: 3159871 - RNA, 19 nt, Artificial Sequence
  Description of Artificial Sequence: Synthetic oligonucleotide
ucaagcgguacauaaaaga

SEQ ID NO: 3159872 - RNA, 19 nt, Artificial Sequence
  Description of Artificial Sequence: Synthetic oligonucleotide
aaaagaauagaagaauaaa

SEQ ID NO: 3159873 - RNA, 19 nt, Artificial Sequence
  Description of Artificial Sequence: Synthetic oligonucleotide
cuuuuauugagacggacug

SEQ ID NO: 3159874 - RNA, 19 nt, Artificial Sequence
  Description of Artificial Sequence: Synthetic oligonucleotide
cagcaugugacuaugguag

SEQ ID NO: 3159875 - RNA, 19 nt, Artificial Sequence
  Description of Artificial Sequence: Synthetic oligonucleotide
gagugugcggaacuaaugg

SEQ ID NO: 3159876 - RNA, 19 nt, Artificial Sequence
  Description of Artificial Sequence: Synthetic oligonucleotide
uuucaguucaacuuguaau

SEQ ID NO: 3159877 - RNA, 19 nt, Artificial Sequence
  Description of Artificial Sequence: Synthetic oligonucleotide
aaugcugggccuuuguaca

SEQ ID NO: 3159878 - RNA, 19 nt, Artificial Sequence
  Description of Artificial Sequence: Synthetic oligonucleotide
uaccuuuacucucaauccg

SEQ ID NO: 3159879 - RNA, 19 nt, Artificial Sequence
  Description of Artificial Sequence: Synthetic oligonucleotide
uuugucuggcuccaggugc

SEQ ID NO: 3159880 - RNA, 19 nt, Artificial Sequence
  Description of Artificial Sequence: Synthetic oligonucleotide
augaagaccacucucuuca

SEQ ID NO: 3159881 - RNA, 19 nt, Artificial Sequence
  Description of Artificial Sequence: Synthetic oligonucleotide
uucaauuguggaaaggaaa

SEQ ID NO: 3159882 - RNA, 19 nt, Artificial Sequence
  Description of Artificial Sequence: Synthetic oligonucleotide
uucuuuaucaagcgguaca

SEQ ID NO: 3159883 - RNA, 19 nt, Artificial Sequence
  Description of Artificial Sequence: Synthetic oligonucleotide
uggcacaucaagcucauca

SEQ ID NO: 3159884 - RNA, 19 nt, Artificial Sequence
  Description of Artificial Sequence: Synthetic oligonucleotide
ucuuuuauugagacggacu

SEQ ID NO: 3159885 - RNA, 19 nt, Artificial Sequence
  Description of Artificial Sequence: Synthetic oligonucleotide
guacauaaaagaauagaag

SEQ ID NO: 3159886 - RNA, 19 nt, Artificial Sequence
  Description of Artificial Sequence: Synthetic oligonucleotide
cucaucagaggcuaucugg

SEQ ID NO: 3159887 - RNA, 19 nt, Artificial Sequence
  Description of Artificial Sequence: Synthetic oligonucleotide
uaucaagcgguacauaaaa

SEQ ID NO: 3159888 - RNA, 19 nt, Artificial Sequence
  Description of Artificial Sequence: Synthetic oligonucleotide
cuaccuuuacucucaaucc

SEQ ID NO: 3159889 - RNA, 19 nt, Artificial Sequence
  Description of Artificial Sequence: Synthetic oligonucleotide
uaauaacucccgaaggcgc

SEQ ID NO: 3159890 - RNA, 19 nt, Artificial Sequence
  Description of Artificial Sequence: Synthetic oligonucleotide
cuugaguuuaaaagguggc

SEQ ID NO: 3159891 - RNA, 19 nt, Artificial Sequence
  Description of Artificial Sequence: Synthetic oligonucleotide
agcucaucagguuugcuuc

SEQ ID NO: 3159892 - RNA, 19 nt, Artificial Sequence
  Description of Artificial Sequence: Synthetic oligonucleotide
augguagucuaccaggaag

SEQ ID NO: 3159893 - RNA, 19 nt, Artificial Sequence
  Description of Artificial Sequence: Synthetic oligonucleotide
acaaguacaaccucauggu

SEQ ID NO: 3159894 - RNA, 19 nt, Artificial Sequence
  Description of Artificial Sequence: Synthetic oligonucleotide
agaccacucucuucaaugc

SEQ ID NO: 3159895 - RNA, 19 nt, Artificial Sequence
  Description of Artificial Sequence: Synthetic oligonucleotide
ucuuguuuucaguucaacu

SEQ ID NO: 3159896 - RNA, 19 nt, Artificial Sequence
  Description of Artificial Sequence: Synthetic oligonucleotide
guaauaacucccgaaggcg

SEQ ID NO: 3159897 - RNA, 19 nt, Artificial Sequence
  Description of Artificial Sequence: Synthetic oligonucleotide
uagucuaccaggaaguaau

SEQ ID NO: 3159898 - RNA, 19 nt, Artificial Sequence
  Description of Artificial Sequence: Synthetic oligonucleotide
gaagaauaaaagauuguca

SEQ ID NO: 3159899 - RNA, 19 nt, Artificial Sequence
  Description of Artificial Sequence: Synthetic oligonucleotide
ucuaccaggaaguaauaaa

SEQ ID NO: 3159900 - RNA, 19 nt, Artificial Sequence
  Description of Artificial Sequence: Synthetic oligonucleotide
uuuacucucaauccguuuu

SEQ ID NO: 3159901 - RNA, 19 nt, Artificial Sequence
  Description of Artificial Sequence: Synthetic oligonucleotide
uucaguucaacuuguaaua

SEQ ID NO: 3159902 - RNA, 19 nt, Artificial Sequence
  Description of Artificial Sequence: Synthetic oligonucleotide
ucauauuguccuuuguacu

SEQ ID NO: 3159903 - RNA, 19 nt, Artificial Sequence
  Description of Artificial Sequence: Synthetic oligonucleotide
uuuguacacgcucucaguc

SEQ ID NO: 3159904 - RNA, 19 nt, Artificial Sequence
  Description of Artificial Sequence: Synthetic oligonucleotide
uugcagaugagaagaaaca

SEQ ID NO: 3159905 - RNA, 19 nt, Artificial Sequence
  Description of Artificial Sequence: Synthetic oligonucleotide
uaauggaugagcuuugguu

SEQ ID NO: 3159906 - RNA, 19 nt, Artificial Sequence
  Description of Artificial Sequence: Synthetic oligonucleotide
caacuuguaauaacucccg

SEQ ID NO: 3159907 - RNA, 19 nt, Artificial Sequence
  Description of Artificial Sequence: Synthetic oligonucleotide
uuugucuucucuccagagc

SEQ ID NO: 3159908 - RNA, 19 nt, Artificial Sequence
  Description of Artificial Sequence: Synthetic oligonucleotide
gaaggcgcucaucagaggc

SEQ ID NO: 3159909 - RNA, 19 nt, Artificial Sequence
  Description of Artificial Sequence: Synthetic oligonucleotide
uuugguuuugucuucucuc

SEQ ID NO: 3159910 - RNA, 19 nt, Artificial Sequence
  Description of Artificial Sequence: Synthetic oligonucleotide
aagguggcacaucaagcuc

SEQ ID NO: 3159911 - RNA, 19 nt, Artificial Sequence
  Description of Artificial Sequence: Synthetic oligonucleotide
ugagcuuugguuuugucuu

SEQ ID NO: 3159912 - RNA, 19 nt, Artificial Sequence
  Description of Artificial Sequence: Synthetic oligonucleotide
uuuucaguucaacuuguaa

SEQ ID NO: 3159913 - RNA, 19 nt, Artificial Sequence
  Description of Artificial Sequence: Synthetic oligonucleotide
ugaguuuaaaagguggcac

SEQ ID NO: 3159914 - RNA, 19 nt, Artificial Sequence
  Description of Artificial Sequence: Synthetic oligonucleotide
uugguuuugucuucucucc

SEQ ID NO: 3159915 - RNA, 19 nt, Artificial Sequence
  Description of Artificial Sequence: Synthetic oligonucleotide
uagaagaauaaaagauugu

SEQ ID NO: 3159916 - RNA, 19 nt, Artificial Sequence
  Description of Artificial Sequence: Synthetic oligonucleotide
uaccaggaaguaauaaaug

SEQ ID NO: 3159917 - RNA, 19 nt, Artificial Sequence
  Description of Artificial Sequence: Synthetic oligonucleotide
gaauaaaagauugucauau

SEQ ID NO: 3159918 - RNA, 19 nt, Artificial Sequence
  Description of Artificial Sequence: Synthetic oligonucleotide
uuuugucuucucuccagag

SEQ ID NO: 3159919 - RNA, 19 nt, Artificial Sequence
  Description of Artificial Sequence: Synthetic oligonucleotide
ugugcggaacuaauggaug

SEQ ID NO: 3159920 - RNA, 19 nt, Artificial Sequence
  Description of Artificial Sequence: Synthetic oligonucleotide
cuuuguacuucucuuucag

SEQ ID NO: 3159921 - RNA, 19 nt, Artificial Sequence
  Description of Artificial Sequence: Synthetic oligonucleotide
aauccaaggaaacagugac

SEQ ID NO: 3159922 - RNA, 19 nt, Artificial Sequence
  Description of Artificial Sequence: Synthetic oligonucleotide
aaguacagcaccuccaucc

SEQ ID NO: 3159923 - RNA, 19 nt, Artificial Sequence
  Description of Artificial Sequence: Synthetic oligonucleotide
ugcauuauuagcuuuagag

SEQ ID NO: 3159924 - RNA, 19 nt, Artificial Sequence
  Description of Artificial Sequence: Synthetic oligonucleotide
aauccguucaaguagaaug

SEQ ID NO: 3159925 - RNA, 19 nt, Artificial Sequence
  Description of Artificial Sequence: Synthetic oligonucleotide
aauaccaucauaauuugac

SEQ ID NO: 3159926 - RNA, 19 nt, Artificial Sequence
  Description of Artificial Sequence: Synthetic oligonucleotide
aauagauuuauuagagucc

SEQ ID NO: 3159927 - RNA, 19 nt, Artificial Sequence
  Description of Artificial Sequence: Synthetic oligonucleotide
ucuaauauugaagauaaag

SEQ ID NO: 3159928 - RNA, 19 nt, Artificial Sequence
  Description of Artificial Sequence: Synthetic oligonucleotide
agaauuuguagauucuucc

SEQ ID NO: 3159929 - RNA, 19 nt, Artificial Sequence
  Description of Artificial Sequence: Synthetic oligonucleotide
aaagcagcuacagagaagg

SEQ ID NO: 3159930 - RNA, 19 nt, Artificial Sequence
  Description of Artificial Sequence: Synthetic oligonucleotide
uuuacuugagcaaaggucu

SEQ ID NO: 3159931 - RNA, 19 nt, Artificial Sequence
  Description of Artificial Sequence: Synthetic oligonucleotide
uuuauuagaguccauggug

SEQ ID NO: 3159932 - RNA, 19 nt, Artificial Sequence
  Description of Artificial Sequence: Synthetic oligonucleotide
cauuauuagcuuuagagag

SEQ ID NO: 3159933 - RNA, 19 nt, Artificial Sequence
  Description of Artificial Sequence: Synthetic oligonucleotide
uuauuagaguccauggugg

SEQ ID NO: 3159934 - RNA, 19 nt, Artificial Sequence
  Description of Artificial Sequence: Synthetic oligonucleotide
gauuuauuagaguccaugg

SEQ ID NO: 3159935 - RNA, 19 nt, Artificial Sequence
  Description of Artificial Sequence: Synthetic oligonucleotide
ugcaauagauuuauuagag

SEQ ID NO: 3159936 - RNA, 19 nt, Artificial Sequence
  Description of Artificial Sequence: Synthetic oligonucleotide
aauaauuaaaagcaacuua

SEQ ID NO: 3159937 - RNA, 19 nt, Artificial Sequence
  Description of Artificial Sequence: Synthetic oligonucleotide
uuugaccuuauacuaaagg

SEQ ID NO: 3159938 - RNA, 19 nt, Artificial Sequence
  Description of Artificial Sequence: Synthetic oligonucleotide
uagauuaaaauucugcuuc

SEQ ID NO: 3159939 - RNA, 19 nt, Artificial Sequence
  Description of Artificial Sequence: Synthetic oligonucleotide
aauccaaauacagccagcc

SEQ ID NO: 3159940 - RNA, 19 nt, Artificial Sequence
  Description of Artificial Sequence: Synthetic oligonucleotide
ucaauaauuaaaagcaacu

SEQ ID NO: 3159941 - RNA, 19 nt, Artificial Sequence
  Description of Artificial Sequence: Synthetic oligonucleotide
guaacaaacuuuuagaauc

SEQ ID NO: 3159942 - RNA, 19 nt, Artificial Sequence
  Description of Artificial Sequence: Synthetic oligonucleotide
aaggggaauccucagaggg

SEQ ID NO: 3159943 - RNA, 19 nt, Artificial Sequence
  Description of Artificial Sequence: Synthetic oligonucleotide
uuuuccauaacuaauccaa

SEQ ID NO: 3159944 - RNA, 19 nt, Artificial Sequence
  Description of Artificial Sequence: Synthetic oligonucleotide
caugucuuaagucuuaggg

SEQ ID NO: 3159945 - RNA, 19 nt, Artificial Sequence
  Description of Artificial Sequence: Synthetic oligonucleotide
ucauaauuugaccuuauac

SEQ ID NO: 3159946 - RNA, 19 nt, Artificial Sequence
  Description of Artificial Sequence: Synthetic oligonucleotide
agagguaggaaguauuggc

SEQ ID NO: 3159947 - RNA, 19 nt, Artificial Sequence
  Description of Artificial Sequence: Synthetic oligonucleotide
auauaauccguucaaguag

SEQ ID NO: 3159948 - RNA, 19 nt, Artificial Sequence
  Description of Artificial Sequence: Synthetic oligonucleotide
acugcaauagauuuauuag

SEQ ID NO: 3159949 - RNA, 19 nt, Artificial Sequence
  Description of Artificial Sequence: Synthetic oligonucleotide
aauuaaaagcaacuuauuu

SEQ ID NO: 3159950 - RNA, 19 nt, Artificial Sequence
  Description of Artificial Sequence: Synthetic oligonucleotide
aauggaaugugguagcaug

SEQ ID NO: 3159951 - RNA, 19 nt, Artificial Sequence
  Description of Artificial Sequence: Synthetic oligonucleotide
uaagcuucaucaaaguaag

SEQ ID NO: 3159952 - RNA, 19 nt, Artificial Sequence
  Description of Artificial Sequence: Synthetic oligonucleotide
gauagugcagaauuuguag

SEQ ID NO: 3159953 - RNA, 19 nt, Artificial Sequence
  Description of Artificial Sequence: Synthetic oligonucleotide
caauagauuuauuagaguc

SEQ ID NO: 3159954 - RNA, 19 nt, Artificial Sequence
  Description of Artificial Sequence: Synthetic oligonucleotide
gacuauguaagcuucauca

SEQ ID NO: 3159955 - RNA, 19 nt, Artificial Sequence
  Description of Artificial Sequence: Synthetic oligonucleotide
aagucuuagggcuuggcag

SEQ ID NO: 3159956 - RNA, 19 nt, Artificial Sequence
  Description of Artificial Sequence: Synthetic oligonucleotide
aagaagauggcucucuucu

SEQ ID NO: 3159957 - RNA, 19 nt, Artificial Sequence
  Description of Artificial Sequence: Synthetic oligonucleotide
uggaagaauaccaucauaa

SEQ ID NO: 3159958 - RNA, 19 nt, Artificial Sequence
  Description of Artificial Sequence: Synthetic oligonucleotide
uuuacuguuuuaaaaucca

SEQ ID NO: 3159959 - RNA, 19 nt, Artificial Sequence
  Description of Artificial Sequence: Synthetic oligonucleotide
aggaacacuaagaagaugg

SEQ ID NO: 3159960 - RNA, 19 nt, Artificial Sequence
  Description of Artificial Sequence: Synthetic oligonucleotide
ugaccuuauacuaaaggca

SEQ ID NO: 3159961 - RNA, 19 nt, Artificial Sequence
  Description of Artificial Sequence: Synthetic oligonucleotide
auaacuaauccaaauacag

SEQ ID NO: 3159962 - RNA, 19 nt, Artificial Sequence
  Description of Artificial Sequence: Synthetic oligonucleotide
ucaaguagaauggauagug

SEQ ID NO: 3159963 - RNA, 19 nt, Artificial Sequence
  Description of Artificial Sequence: Synthetic oligonucleotide
uuuaaaauccacugcauua

SEQ ID NO: 3159964 - RNA, 19 nt, Artificial Sequence
  Description of Artificial Sequence: Synthetic oligonucleotide
aaaagcaacuuauuuucca

SEQ ID NO: 3159965 - RNA, 19 nt, Artificial Sequence
  Description of Artificial Sequence: Synthetic oligonucleotide
aaguagaauggauagugca

SEQ ID NO: 3159966 - RNA, 19 nt, Artificial Sequence
  Description of Artificial Sequence: Synthetic oligonucleotide
ugagaauccaaggaaacag

SEQ ID NO: 3159967 - RNA, 19 nt, Artificial Sequence
  Description of Artificial Sequence: Synthetic oligonucleotide
aaagcacugcaauagauuu

SEQ ID NO: 3159968 - RNA, 19 nt, Artificial Sequence
  Description of Artificial Sequence: Synthetic oligonucleotide
uccaaagauuuccaaaagc

SEQ ID NO: 3159969 - RNA, 19 nt, Artificial Sequence
  Description of Artificial Sequence: Synthetic oligonucleotide
gauaaagcugucccaagag

SEQ ID NO: 3159970 - RNA, 19 nt, Artificial Sequence
  Description of Artificial Sequence: Synthetic oligonucleotide
aauacagccagccaauguu

SEQ ID NO: 3159971 - RNA, 19 nt, Artificial Sequence
  Description of Artificial Sequence: Synthetic oligonucleotide
guucaaguagaauggauag

SEQ ID NO: 3159972 - RNA, 19 nt, Artificial Sequence
  Description of Artificial Sequence: Synthetic oligonucleotide
gcagauucaauccugaugc

SEQ ID NO: 3159973 - RNA, 19 nt, Artificial Sequence
  Description of Artificial Sequence: Synthetic oligonucleotide
aguuaggagagauacuaag

SEQ ID NO: 3159974 - RNA, 19 nt, Artificial Sequence
  Description of Artificial Sequence: Synthetic oligonucleotide
uauaauccguucaaguaga

SEQ ID NO: 3159975 - RNA, 19 nt, Artificial Sequence
  Description of Artificial Sequence: Synthetic oligonucleotide
aaugacgguuuauucauga

SEQ ID NO: 3159976 - RNA, 19 nt, Artificial Sequence
  Description of Artificial Sequence: Synthetic oligonucleotide
uaacuaauccaaauacagc

SEQ ID NO: 3159977 - RNA, 19 nt, Artificial Sequence
  Description of Artificial Sequence: Synthetic oligonucleotide
uccaaauacagccagccaa

SEQ ID NO: 3159978 - RNA, 19 nt, Artificial Sequence
  Description of Artificial Sequence: Synthetic oligonucleotide
auaauuaaaagcaacuuau

SEQ ID NO: 3159979 - RNA, 19 nt, Artificial Sequence
  Description of Artificial Sequence: Synthetic oligonucleotide
uuggcuuuaguuuuguccu

SEQ ID NO: 3159980 - RNA, 19 nt, Artificial Sequence
  Description of Artificial Sequence: Synthetic oligonucleotide
cauuaauggaaugugguag

SEQ ID NO: 3159981 - RNA, 19 nt, Artificial Sequence
  Description of Artificial Sequence: Synthetic oligonucleotide
uuagagguaggaaguauug

SEQ ID NO: 3159982 - RNA, 19 nt, Artificial Sequence
  Description of Artificial Sequence: Synthetic oligonucleotide
uuuauccuacagcagauuc

SEQ ID NO: 3159983 - RNA, 19 nt, Artificial Sequence
  Description of Artificial Sequence: Synthetic oligonucleotide
auugaagauaaagcugucc

SEQ ID NO: 3159984 - RNA, 19 nt, Artificial Sequence
  Description of Artificial Sequence: Synthetic oligonucleotide
aaauucugcuucauauccc

SEQ ID NO: 3159985 - RNA, 19 nt, Artificial Sequence
  Description of Artificial Sequence: Synthetic oligonucleotide
gaagaugagaauccaagga

SEQ ID NO: 3159986 - RNA, 19 nt, Artificial Sequence
  Description of Artificial Sequence: Synthetic oligonucleotide
gaaguagucuguuuacuug

SEQ ID NO: 3159987 - RNA, 19 nt, Artificial Sequence
  Description of Artificial Sequence: Synthetic oligonucleotide
aaguagucuguuuacuuga

SEQ ID NO: 3159988 - RNA, 19 nt, Artificial Sequence
  Description of Artificial Sequence: Synthetic oligonucleotide
gagauacuaaggcuguggg

SEQ ID NO: 3159989 - RNA, 19 nt, Artificial Sequence
  Description of Artificial Sequence: Synthetic oligonucleotide
uguaacaaacuuuuagaau

SEQ ID NO: 3159990 - RNA, 19 nt, Artificial Sequence
  Description of Artificial Sequence: Synthetic oligonucleotide
agauacuaaggcugugggc

SEQ ID NO: 3159991 - RNA, 19 nt, Artificial Sequence
  Description of Artificial Sequence: Synthetic oligonucleotide
acauauaauccguucaagu

SEQ ID NO: 3159992 - RNA, 19 nt, Artificial Sequence
  Description of Artificial Sequence: Synthetic oligonucleotide
aaagcaacuuauuuuccau

SEQ ID NO: 3159993 - RNA, 19 nt, Artificial Sequence
  Description of Artificial Sequence: Synthetic oligonucleotide
uaaaagcaacuuauuuucc

SEQ ID NO: 3159994 - RNA, 19 nt, Artificial Sequence
  Description of Artificial Sequence: Synthetic oligonucleotide
auggucaugucuuaagucu

SEQ ID NO: 3159995 - RNA, 19 nt, Artificial Sequence
  Description of Artificial Sequence: Synthetic oligonucleotide
ugaaagcaacccauuaaug

SEQ ID NO: 3159996 - RNA, 19 nt, Artificial Sequence
  Description of Artificial Sequence: Synthetic oligonucleotide
uaugcccacauucagaguu

SEQ ID NO: 3159997 - RNA, 19 nt, Artificial Sequence
  Description of Artificial Sequence: Synthetic oligonucleotide
uugagcaaaggucugugga

SEQ ID NO: 3159998 - RNA, 19 nt, Artificial Sequence
  Description of Artificial Sequence: Synthetic oligonucleotide
auuuauuagaguccauggu

SEQ ID NO: 3159999 - RNA, 19 nt, Artificial Sequence
  Description of Artificial Sequence: Synthetic oligonucleotide
uucagauaggcucucaaua

SEQ ID NO: 3160000 - RNA, 19 nt, Artificial Sequence
  Description of Artificial Sequence: Synthetic oligonucleotide
aguauuggcaacuccagaa

SEQ ID NO: 3160001 - RNA, 19 nt, Artificial Sequence
  Description of Artificial Sequence: Synthetic oligonucleotide
aggugcuagauuaaaauuc

SEQ ID NO: 3160002 - RNA, 19 nt, Artificial Sequence
  Description of Artificial Sequence: Synthetic oligonucleotide
cauauuaaggggaauccuc

SEQ ID NO: 3160003 - RNA, 19 nt, Artificial Sequence
  Description of Artificial Sequence: Synthetic oligonucleotide
cauguaacaaacuuuuaga

SEQ ID NO: 3160004 - RNA, 19 nt, Artificial Sequence
  Description of Artificial Sequence: Synthetic oligonucleotide
acgguuuauucaugaaagc

SEQ ID NO: 3160005 - RNA, 19 nt, Artificial Sequence
  Description of Artificial Sequence: Synthetic oligonucleotide
caaacuuuuagaauccuga

SEQ ID NO: 3160006 - RNA, 19 nt, Artificial Sequence
  Description of Artificial Sequence: Synthetic oligonucleotide
uuuuaaaauccacugcauu

SEQ ID NO: 3160007 - RNA, 19 nt, Artificial Sequence
  Description of Artificial Sequence: Synthetic oligonucleotide
uaauuugaccuuauacuaa

SEQ ID NO: 3160008 - RNA, 19 nt, Artificial Sequence
  Description of Artificial Sequence: Synthetic oligonucleotide
cauaauuugaccuuauacu

SEQ ID NO: 3160009 - RNA, 19 nt, Artificial Sequence
  Description of Artificial Sequence: Synthetic oligonucleotide
agugauuccugccucagga

SEQ ID NO: 3160010 - RNA, 19 nt, Artificial Sequence
  Description of Artificial Sequence: Synthetic oligonucleotide
uccuacagcagauucaauc

SEQ ID NO: 3160011 - RNA, 19 nt, Artificial Sequence
  Description of Artificial Sequence: Synthetic oligonucleotide
aaacuuuuagaauccugaa

SEQ ID NO: 3160012 - RNA, 19 nt, Artificial Sequence
  Description of Artificial Sequence: Synthetic oligonucleotide
uuagaauccugaagcagga

SEQ ID NO: 3160013 - RNA, 19 nt, Artificial Sequence
  Description of Artificial Sequence: Synthetic oligonucleotide
gagagauuuucagauaggc

SEQ ID NO: 3160014 - RNA, 19 nt, Artificial Sequence
  Description of Artificial Sequence: Synthetic oligonucleotide
agcuucaucaaaguaagug

SEQ ID NO: 3160015 - RNA, 19 nt, Artificial Sequence
  Description of Artificial Sequence: Synthetic oligonucleotide
uuauccuacagcagauuca

SEQ ID NO: 3160016 - RNA, 19 nt, Artificial Sequence
  Description of Artificial Sequence: Synthetic oligonucleotide
uuuguagauucuuccuuag

SEQ ID NO: 3160017 - RNA, 19 nt, Artificial Sequence
  Description of Artificial Sequence: Synthetic oligonucleotide
auagauuuauuagagucca

SEQ ID NO: 3160018 - RNA, 19 nt, Artificial Sequence
  Description of Artificial Sequence: Synthetic oligonucleotide
uagauggcuccucuuacag

SEQ ID NO: 3160019 - RNA, 19 nt, Artificial Sequence
  Description of Artificial Sequence: Synthetic oligonucleotide
uaagucuuagggcuuggca

SEQ ID NO: 3160020 - RNA, 19 nt, Artificial Sequence
  Description of Artificial Sequence: Synthetic oligonucleotide
aggaaguauuggcaacucc

SEQ ID NO: 3160021 - RNA, 19 nt, Artificial Sequence
  Description of Artificial Sequence: Synthetic oligonucleotide
aguaacaaaguucugcucc

SEQ ID NO: 3160022 - RNA, 19 nt, Artificial Sequence
  Description of Artificial Sequence: Synthetic oligonucleotide
uacauuugaaauuagcagg

SEQ ID NO: 3160023 - RNA, 19 nt, Artificial Sequence
  Description of Artificial Sequence: Synthetic oligonucleotide
ucuacauucucucucacgg

SEQ ID NO: 3160024 - RNA, 19 nt, Artificial Sequence
  Description of Artificial Sequence: Synthetic oligonucleotide
augaaaacuuaacacagcc

SEQ ID NO: 3160025 - RNA, 19 nt, Artificial Sequence
  Description of Artificial Sequence: Synthetic oligonucleotide
uuaugaaaacuuaacacag

SEQ ID NO: 3160026 - RNA, 19 nt, Artificial Sequence
  Description of Artificial Sequence: Synthetic oligonucleotide
uuggaagacaucuugagag

SEQ ID NO: 3160027 - RNA, 19 nt, Artificial Sequence
  Description of Artificial Sequence: Synthetic oligonucleotide
uguuaugaaaacuuaacac

SEQ ID NO: 3160028 - RNA, 19 nt, Artificial Sequence
  Description of Artificial Sequence: Synthetic oligonucleotide
uuuuccauuuaucaaaaca

SEQ ID NO: 3160029 - RNA, 19 nt, Artificial Sequence
  Description of Artificial Sequence: Synthetic oligonucleotide
agcuaagacaucuaguaac

SEQ ID NO: 3160030 - RNA, 19 nt, Artificial Sequence
  Description of Artificial Sequence: Synthetic oligonucleotide
aaaacaucucccaauaauc

SEQ ID NO: 3160031 - RNA, 19 nt, Artificial Sequence
  Description of Artificial Sequence: Synthetic oligonucleotide
auuugaaauuagcaggucg

SEQ ID NO: 3160032 - RNA, 19 nt, Artificial Sequence
  Description of Artificial Sequence: Synthetic oligonucleotide
aagacaucuaguaacaaag

SEQ ID NO: 3160033 - RNA, 19 nt, Artificial Sequence
  Description of Artificial Sequence: Synthetic oligonucleotide
aauguguucaggucacugg

SEQ ID NO: 3160034 - RNA, 19 nt, Artificial Sequence
  Description of Artificial Sequence: Synthetic oligonucleotide
aaacaucucccaauaaucc

SEQ ID NO: 3160035 - RNA, 19 nt, Artificial Sequence
  Description of Artificial Sequence: Synthetic oligonucleotide
uuuccauuuaucaaaacau

SEQ ID NO: 3160036 - RNA, 19 nt, Artificial Sequence
  Description of Artificial Sequence: Synthetic oligonucleotide
cauuuaucaaaacaucucc

SEQ ID NO: 3160037 - RNA, 19 nt, Artificial Sequence
  Description of Artificial Sequence: Synthetic oligonucleotide
cauuuugugggacauaacc

SEQ ID NO: 3160038 - RNA, 19 nt, Artificial Sequence
  Description of Artificial Sequence: Synthetic oligonucleotide
guacauuugaaauuagcag

SEQ ID NO: 3160039 - RNA, 19 nt, Artificial Sequence
  Description of Artificial Sequence: Synthetic oligonucleotide
guuaugaaaacuuaacaca

SEQ ID NO: 3160040 - RNA, 19 nt, Artificial Sequence
  Description of Artificial Sequence: Synthetic oligonucleotide
uuugaaauuagcaggucga

SEQ ID NO: 3160041 - RNA, 19 nt, Artificial Sequence
  Description of Artificial Sequence: Synthetic oligonucleotide
uuuugugggacauaaccag

SEQ ID NO: 3160042 - RNA, 19 nt, Artificial Sequence
  Description of Artificial Sequence: Synthetic oligonucleotide
uucaugaucccauugauau

SEQ ID NO: 3160043 - RNA, 19 nt, Artificial Sequence
  Description of Artificial Sequence: Synthetic oligonucleotide
cuuucuuucuaucauuggg

SEQ ID NO: 3160044 - RNA, 19 nt, Artificial Sequence
  Description of Artificial Sequence: Synthetic oligonucleotide
ucuaguaacaaaguucugc

SEQ ID NO: 3160045 - RNA, 19 nt, Artificial Sequence
  Description of Artificial Sequence: Synthetic oligonucleotide
cuuucuaucauugggauug

SEQ ID NO: 3160046 - RNA, 19 nt, Artificial Sequence
  Description of Artificial Sequence: Synthetic oligonucleotide
uccauuuaucaaaacaucu

SEQ ID NO: 3160047 - RNA, 19 nt, Artificial Sequence
  Description of Artificial Sequence: Synthetic oligonucleotide
uuugauagucuuucuauca

SEQ ID NO: 3160048 - RNA, 19 nt, Artificial Sequence
  Description of Artificial Sequence: Synthetic oligonucleotide
ucccauugauauuugauag

SEQ ID NO: 3160049 - RNA, 19 nt, Artificial Sequence
  Description of Artificial Sequence: Synthetic oligonucleotide
uuuuacgaaauggaaagcc

SEQ ID NO: 3160050 - RNA, 19 nt, Artificial Sequence
  Description of Artificial Sequence: Synthetic oligonucleotide
ugcaacagggucaucauug

SEQ ID NO: 3160051 - RNA, 19 nt, Artificial Sequence
  Description of Artificial Sequence: Synthetic oligonucleotide
uuucuuucuaucauuggga

SEQ ID NO: 3160052 - RNA, 19 nt, Artificial Sequence
  Description of Artificial Sequence: Synthetic oligonucleotide
cucccaauaauccacgugg

SEQ ID NO: 3160053 - RNA, 19 nt, Artificial Sequence
  Description of Artificial Sequence: Synthetic oligonucleotide
caccaugucauuuuguggg

SEQ ID NO: 3160054 - RNA, 19 nt, Artificial Sequence
  Description of Artificial Sequence: Synthetic oligonucleotide
aaguacauuugaaauuagc

SEQ ID NO: 3160055 - RNA, 19 nt, Artificial Sequence
  Description of Artificial Sequence: Synthetic oligonucleotide
uuuccuugcagcuaagaca

SEQ ID NO: 3160056 - RNA, 19 nt, Artificial Sequence
  Description of Artificial Sequence: Synthetic oligonucleotide
aacuuaacacagccucucc

SEQ ID NO: 3160057 - RNA, 19 nt, Artificial Sequence
  Description of Artificial Sequence: Synthetic oligonucleotide
uuuacgaaauggaaagcca

SEQ ID NO: 3160058 - RNA, 19 nt, Artificial Sequence
  Description of Artificial Sequence: Synthetic oligonucleotide
auuugauagucuuucuauc

SEQ ID NO: 3160059 - RNA, 19 nt, Artificial Sequence
  Description of Artificial Sequence: Synthetic oligonucleotide
aaauggaaagccacucugc

SEQ ID NO: 3160060 - RNA, 19 nt, Artificial Sequence
  Description of Artificial Sequence: Synthetic oligonucleotide
acaucuaguaacaaaguuc

SEQ ID NO: 3160061 - RNA, 19 nt, Artificial Sequence
  Description of Artificial Sequence: Synthetic oligonucleotide
uauuugauagucuuucuau

SEQ ID NO: 3160062 - RNA, 19 nt, Artificial Sequence
  Description of Artificial Sequence: Synthetic oligonucleotide
ucaucauuggaagacaucu

SEQ ID NO: 3160063 - RNA, 19 nt, Artificial Sequence
  Description of Artificial Sequence: Synthetic oligonucleotide
gaaauggaaagccacucug

SEQ ID NO: 3160064 - RNA, 19 nt, Artificial Sequence
  Description of Artificial Sequence: Synthetic oligonucleotide
uagucuuucuaucacacaa

SEQ ID NO: 3160065 - RNA, 19 nt, Artificial Sequence
  Description of Artificial Sequence: Synthetic oligonucleotide
agugaauguguucagguca

SEQ ID NO: 3160066 - RNA, 19 nt, Artificial Sequence
  Description of Artificial Sequence: Synthetic oligonucleotide
ucugcucccauccugaggu

SEQ ID NO: 3160067 - RNA, 19 nt, Artificial Sequence
  Description of Artificial Sequence: Synthetic oligonucleotide
uggaaagccacucugcacu

SEQ ID NO: 3160068 - RNA, 19 nt, Artificial Sequence
  Description of Artificial Sequence: Synthetic oligonucleotide
auguuaugaaaacuuaaca

SEQ ID NO: 3160069 - RNA, 19 nt, Artificial Sequence
  Description of Artificial Sequence: Synthetic oligonucleotide
aauggaaagccacucugca

SEQ ID NO: 3160070 - RNA, 19 nt, Artificial Sequence
  Description of Artificial Sequence: Synthetic oligonucleotide
uaugaaaacuuaacacagc

SEQ ID NO: 3160071 - RNA, 19 nt, Artificial Sequence
  Description of Artificial Sequence: Synthetic oligonucleotide
auugauauuugauagucuu

SEQ ID NO: 3160072 - RNA, 19 nt, Artificial Sequence
  Description of Artificial Sequence: Synthetic oligonucleotide
cuaucauugggauugcaac

SEQ ID NO: 3160073 - RNA, 19 nt, Artificial Sequence
  Description of Artificial Sequence: Synthetic oligonucleotide
aagacaucuugagagguuc

SEQ ID NO: 3160074 - RNA, 19 nt, Artificial Sequence
  Description of Artificial Sequence: Synthetic oligonucleotide
aaacuuaacacagccucuc

SEQ ID NO: 3160075 - RNA, 19 nt, Artificial Sequence
  Description of Artificial Sequence: Synthetic oligonucleotide
aucauuggaagacaucuug

SEQ ID NO: 3160076 - RNA, 19 nt, Artificial Sequence
  Description of Artificial Sequence: Synthetic oligonucleotide
gauguuaugaaaacuuaac

SEQ ID NO: 3160077 - RNA, 19 nt, Artificial Sequence
  Description of Artificial Sequence: Synthetic oligonucleotide
uccugaggucccaugaugg

SEQ ID NO: 3160078 - RNA, 19 nt, Artificial Sequence
  Description of Artificial Sequence: Synthetic oligonucleotide
caaaguucugcucccaucc

SEQ ID NO: 3160079 - RNA, 19 nt, Artificial Sequence
  Description of Artificial Sequence: Synthetic oligonucleotide
uuccuugcagcuaagacau

SEQ ID NO: 3160080 - RNA, 19 nt, Artificial Sequence
  Description of Artificial Sequence: Synthetic oligonucleotide
uuacgaaauggaaagccac

SEQ ID NO: 3160081 - RNA, 19 nt, Artificial Sequence
  Description of Artificial Sequence: Synthetic oligonucleotide
aacaucucccaauaaucca

SEQ ID NO: 3160082 - RNA, 19 nt, Artificial Sequence
  Description of Artificial Sequence: Synthetic oligonucleotide
aguacauuugaaauuagca

SEQ ID NO: 3160083 - RNA, 19 nt, Artificial Sequence
  Description of Artificial Sequence: Synthetic oligonucleotide
ugauguuaugaaaacuuaa

SEQ ID NO: 3160084 - RNA, 19 nt, Artificial Sequence
  Description of Artificial Sequence: Synthetic oligonucleotide
ugauauuugauagucuuuc

SEQ ID NO: 3160085 - RNA, 19 nt, Artificial Sequence
  Description of Artificial Sequence: Synthetic oligonucleotide
gaaauuagcaggucgaggu

SEQ ID NO: 3160086 - RNA, 19 nt, Artificial Sequence
  Description of Artificial Sequence: Synthetic oligonucleotide
uuaucaaaacaucucccaa

SEQ ID NO: 3160087 - RNA, 19 nt, Artificial Sequence
  Description of Artificial Sequence: Synthetic oligonucleotide
uaaccagaaguacauuuga

SEQ ID NO: 3160088 - RNA, 19 nt, Artificial Sequence
  Description of Artificial Sequence: Synthetic oligonucleotide
uaucauugggauugcaaca

SEQ ID NO: 3160089 - RNA, 19 nt, Artificial Sequence
  Description of Artificial Sequence: Synthetic oligonucleotide
ugaaauuagcaggucgagg

SEQ ID NO: 3160090 - RNA, 19 nt, Artificial Sequence
  Description of Artificial Sequence: Synthetic oligonucleotide
aucaccaugucauuuugug

SEQ ID NO: 3160091 - RNA, 19 nt, Artificial Sequence
  Description of Artificial Sequence: Synthetic oligonucleotide
uccaggaaggucauugggc

SEQ ID NO: 3160092 - RNA, 19 nt, Artificial Sequence
  Description of Artificial Sequence: Synthetic oligonucleotide
ucaccaugucauuuugugg

SEQ ID NO: 3160093 - RNA, 19 nt, Artificial Sequence
  Description of Artificial Sequence: Synthetic oligonucleotide
ugaaaacuuaacacagccu

SEQ ID NO: 3160094 - RNA, 19 nt, Artificial Sequence
  Description of Artificial Sequence: Synthetic oligonucleotide
cauugggauugcaacaggg

SEQ ID NO: 3160095 - RNA, 19 nt, Artificial Sequence
  Description of Artificial Sequence: Synthetic oligonucleotide
ugggauugcaacaggguca

SEQ ID NO: 3160096 - RNA, 19 nt, Artificial Sequence
  Description of Artificial Sequence: Synthetic oligonucleotide
uaagacaucuaguaacaaa

SEQ ID NO: 3160097 - RNA, 19 nt, Artificial Sequence
  Description of Artificial Sequence: Synthetic oligonucleotide
ucuaucauugggauugcaa

SEQ ID NO: 3160098 - RNA, 19 nt, Artificial Sequence
  Description of Artificial Sequence: Synthetic oligonucleotide
uugauagucuuucuaucac

SEQ ID NO: 3160099 - RNA, 19 nt, Artificial Sequence
  Description of Artificial Sequence: Synthetic oligonucleotide
ucuccagugaauguguuca

SEQ ID NO: 3160100 - RNA, 19 nt, Artificial Sequence
  Description of Artificial Sequence: Synthetic oligonucleotide
ucauuggaagacaucuuga

SEQ ID NO: 3160101 - RNA, 19 nt, Artificial Sequence
  Description of Artificial Sequence: Synthetic oligonucleotide
uuccaggaaggucauuggg

SEQ ID NO: 3160102 - RNA, 19 nt, Artificial Sequence
  Description of Artificial Sequence: Synthetic oligonucleotide
uuucuaucacacaaguuuu

SEQ ID NO: 3160103 - RNA, 19 nt, Artificial Sequence
  Description of Artificial Sequence: Synthetic oligonucleotide
cauuggaagacaucuugag

SEQ ID NO: 3160104 - RNA, 19 nt, Artificial Sequence
  Description of Artificial Sequence: Synthetic oligonucleotide
acuguuucucgauagcuga

SEQ ID NO: 3160105 - RNA, 19 nt, Artificial Sequence
  Description of Artificial Sequence: Synthetic oligonucleotide
aauccacguggaucuuucc

SEQ ID NO: 3160106 - RNA, 19 nt, Artificial Sequence
  Description of Artificial Sequence: Synthetic oligonucleotide
uuccauuuaucaaaacauc

SEQ ID NO: 3160107 - RNA, 19 nt, Artificial Sequence
  Description of Artificial Sequence: Synthetic oligonucleotide
uaucaaaacaucucccaau

SEQ ID NO: 3160108 - RNA, 19 nt, Artificial Sequence
  Description of Artificial Sequence: Synthetic oligonucleotide
ucucucacggucauugugu

SEQ ID NO: 3160109 - RNA, 19 nt, Artificial Sequence
  Description of Artificial Sequence: Synthetic oligonucleotide
ugggacauaaccagaagua

SEQ ID NO: 3160110 - RNA, 19 nt, Artificial Sequence
  Description of Artificial Sequence: Synthetic oligonucleotide
ugagagguucuucuucugc

SEQ ID NO: 3160111 - RNA, 19 nt, Artificial Sequence
  Description of Artificial Sequence: Synthetic oligonucleotide
acagggucaucauuggaag

SEQ ID NO: 3160112 - RNA, 19 nt, Artificial Sequence
  Description of Artificial Sequence: Synthetic oligonucleotide
ucccaugauggcauugagg

SEQ ID NO: 3160113 - RNA, 19 nt, Artificial Sequence
  Description of Artificial Sequence: Synthetic oligonucleotide
ugauagucuuucuaucaca

SEQ ID NO: 3160114 - RNA, 19 nt, Artificial Sequence
  Description of Artificial Sequence: Synthetic oligonucleotide
agggucaucauuggaagac

SEQ ID NO: 3160115 - RNA, 19 nt, Artificial Sequence
  Description of Artificial Sequence: Synthetic oligonucleotide
agaaguacauuugaaauua

SEQ ID NO: 3160116 - RNA, 19 nt, Artificial Sequence
  Description of Artificial Sequence: Synthetic oligonucleotide
gauagucuuucuaucacac

SEQ ID NO: 3160117 - RNA, 19 nt, Artificial Sequence
  Description of Artificial Sequence: Synthetic oligonucleotide
cccaugauggcauugaggc

SEQ ID NO: 3160118 - RNA, 19 nt, Artificial Sequence
  Description of Artificial Sequence: Synthetic oligonucleotide
uugcagcuaagacaucuag

SEQ ID NO: 3160119 - RNA, 19 nt, Artificial Sequence
  Description of Artificial Sequence: Synthetic oligonucleotide
acaaaguucugcucccauc

SEQ ID NO: 3160120 - RNA, 19 nt, Artificial Sequence
  Description of Artificial Sequence: Synthetic oligonucleotide
uugggauugcaacaggguc

SEQ ID NO: 3160121 - RNA, 19 nt, Artificial Sequence
  Description of Artificial Sequence: Synthetic oligonucleotide
aacaaugacaucuaggucu

SEQ ID NO: 3160122 - RNA, 19 nt, Artificial Sequence
  Description of Artificial Sequence: Synthetic oligonucleotide
uaugaaugcauuuagacac

SEQ ID NO: 3160123 - RNA, 19 nt, Artificial Sequence
  Description of Artificial Sequence: Synthetic oligonucleotide
aaaucuuugucauauagau

SEQ ID NO: 3160124 - RNA, 19 nt, Artificial Sequence
  Description of Artificial Sequence: Synthetic oligonucleotide
ucuaucagaaugcagaggu

SEQ ID NO: 3160125 - RNA, 19 nt, Artificial Sequence
  Description of Artificial Sequence: Synthetic oligonucleotide
auuguuaccauuuuaaaau

SEQ ID NO: 3160126 - RNA, 19 nt, Artificial Sequence
  Description of Artificial Sequence: Synthetic oligonucleotide
aaaagauauuuacaaaaca

SEQ ID NO: 3160127 - RNA, 19 nt, Artificial Sequence
  Description of Artificial Sequence: Synthetic oligonucleotide
cugacuaugguuuuguagg

SEQ ID NO: 3160128 - RNA, 19 nt, Artificial Sequence
  Description of Artificial Sequence: Synthetic oligonucleotide
aaugguucggacuucuauc

SEQ ID NO: 3160129 - RNA, 19 nt, Artificial Sequence
  Description of Artificial Sequence: Synthetic oligonucleotide
cauuuuaaaauggagaaag

SEQ ID NO: 3160130 - RNA, 19 nt, Artificial Sequence
  Description of Artificial Sequence: Synthetic oligonucleotide
aaauuccucugauuguuac

SEQ ID NO: 3160131 - RNA, 19 nt, Artificial Sequence
  Description of Artificial Sequence: Synthetic oligonucleotide
aaugcauacauguaugaaa

SEQ ID NO: 3160132 - RNA, 19 nt, Artificial Sequence
  Description of Artificial Sequence: Synthetic oligonucleotide
aauuccucugauuguuacc

SEQ ID NO: 3160133 - RNA, 19 nt, Artificial Sequence
  Description of Artificial Sequence: Synthetic oligonucleotide
ucaucaauaaauaaauauu

SEQ ID NO: 3160134 - RNA, 19 nt, Artificial Sequence
  Description of Artificial Sequence: Synthetic oligonucleotide
gaaugcagagguaugaggg

SEQ ID NO: 3160135 - RNA, 19 nt, Artificial Sequence
  Description of Artificial Sequence: Synthetic oligonucleotide
ucggacuucuaucagaaug

SEQ ID NO: 3160136 - RNA, 19 nt, Artificial Sequence
  Description of Artificial Sequence: Synthetic oligonucleotide
aaacaaugacaucuagguc

SEQ ID NO: 3160137 - RNA, 19 nt, Artificial Sequence
  Description of Artificial Sequence: Synthetic oligonucleotide
aaggaauucacugacuaug

SEQ ID NO: 3160138 - RNA, 19 nt, Artificial Sequence
  Description of Artificial Sequence: Synthetic oligonucleotide
aucuauuugcauuuuacca

SEQ ID NO: 3160139 - RNA, 19 nt, Artificial Sequence
  Description of Artificial Sequence: Synthetic oligonucleotide
uuaaaagugugccccacgc

SEQ ID NO: 3160140 - RNA, 19 nt, Artificial Sequence
  Description of Artificial Sequence: Synthetic oligonucleotide
caaaagauauuuacaaaac

SEQ ID NO: 3160141 - RNA, 19 nt, Artificial Sequence
  Description of Artificial Sequence: Synthetic oligonucleotide
ucuaauuuccaagaaaauc

SEQ ID NO: 3160142 - RNA, 19 nt, Artificial Sequence
  Description of Artificial Sequence: Synthetic oligonucleotide
ugagaaugcauacauguau

SEQ ID NO: 3160143 - RNA, 19 nt, Artificial Sequence
  Description of Artificial Sequence: Synthetic oligonucleotide
gaucuauuugcauuuuacc

SEQ ID NO: 3160144 - RNA, 19 nt, Artificial Sequence
  Description of Artificial Sequence: Synthetic oligonucleotide
uucucuggaaacaaugaca

SEQ ID NO: 3160145 - RNA, 19 nt, Artificial Sequence
  Description of Artificial Sequence: Synthetic oligonucleotide
accauuuuaaaauggagaa

SEQ ID NO: 3160146 - RNA, 19 nt, Artificial Sequence
  Description of Artificial Sequence: Synthetic oligonucleotide
auaugaaugcauuuagaca

SEQ ID NO: 3160147 - RNA, 19 nt, Artificial Sequence
  Description of Artificial Sequence: Synthetic oligonucleotide
ucuauuugcauuuuaccau

SEQ ID NO: 3160148 - RNA, 19 nt, Artificial Sequence
  Description of Artificial Sequence: Synthetic oligonucleotide
auggagaaaguccacaaug

SEQ ID NO: 3160149 - RNA, 19 nt, Artificial Sequence
  Description of Artificial Sequence: Synthetic oligonucleotide
aaugacaucuaggucuccg

SEQ ID NO: 3160150 - RNA, 19 nt, Artificial Sequence
  Description of Artificial Sequence: Synthetic oligonucleotide
uguuguuaaaauuccucug

SEQ ID NO: 3160151 - RNA, 19 nt, Artificial Sequence
  Description of Artificial Sequence: Synthetic oligonucleotide
uaaaggaauucacugacua

SEQ ID NO: 3160152 - RNA, 19 nt, Artificial Sequence
  Description of Artificial Sequence: Synthetic oligonucleotide
cuaauuuccaagaaaaucu

SEQ ID NO: 3160153 - RNA, 19 nt, Artificial Sequence
  Description of Artificial Sequence: Synthetic oligonucleotide
acugacuaugguuuuguag

SEQ ID NO: 3160154 - RNA, 19 nt, Artificial Sequence
  Description of Artificial Sequence: Synthetic oligonucleotide
uuaguuauccagcuccaga

SEQ ID NO: 3160155 - RNA, 19 nt, Artificial Sequence
  Description of Artificial Sequence: Synthetic oligonucleotide
gauuguuaccauuuuaaaa

SEQ ID NO: 3160156 - RNA, 19 nt, Artificial Sequence
  Description of Artificial Sequence: Synthetic oligonucleotide
uuuauuucuacagguguug

SEQ ID NO: 3160157 - RNA, 19 nt, Artificial Sequence
  Description of Artificial Sequence: Synthetic oligonucleotide
aaauggagaaaguccacaa

SEQ ID NO: 3160158 - RNA, 19 nt, Artificial Sequence
  Description of Artificial Sequence: Synthetic oligonucleotide
acuucuaucagaaugcaga

SEQ ID NO: 3160159 - RNA, 19 nt, Artificial Sequence
  Description of Artificial Sequence: Synthetic oligonucleotide
gaugccuuuccccucagug

SEQ ID NO: 3160160 - RNA, 19 nt, Artificial Sequence
  Description of Artificial Sequence: Synthetic oligonucleotide
aaaauggagaaaguccaca

SEQ ID NO: 3160161 - RNA, 19 nt, Artificial Sequence
  Description of Artificial Sequence: Synthetic oligonucleotide
aaugaugccuuuccccuca

SEQ ID NO: 3160162 - RNA, 19 nt, Artificial Sequence
  Description of Artificial Sequence: Synthetic oligonucleotide
acaaacaaugguucggacu

SEQ ID NO: 3160163 - RNA, 19 nt, Artificial Sequence
  Description of Artificial Sequence: Synthetic oligonucleotide
cuauuugcauuuuaccaug

SEQ ID NO: 3160164 - RNA, 19 nt, Artificial Sequence
  Description of Artificial Sequence: Synthetic oligonucleotide
ugcaucaucgcgcgggcgg

SEQ ID NO: 3160165 - RNA, 19 nt, Artificial Sequence
  Description of Artificial Sequence: Synthetic oligonucleotide
agacuggcgagcuggacac

SEQ ID NO: 3160166 - RNA, 19 nt, Artificial Sequence
  Description of Artificial Sequence: Synthetic oligonucleotide
ucgcucgugggcuacauag

SEQ ID NO: 3160167 - RNA, 19 nt, Artificial Sequence
  Description of Artificial Sequence: Synthetic oligonucleotide
aaugcagagguaugagggu

SEQ ID NO: 3160168 - RNA, 19 nt, Artificial Sequence
  Description of Artificial Sequence: Synthetic oligonucleotide
acuaugguuuuguaggcca

SEQ ID NO: 3160169 - RNA, 19 nt, Artificial Sequence
  Description of Artificial Sequence: Synthetic oligonucleotide
aguuugagggucugaaucu

SEQ ID NO: 3160170 - RNA, 19 nt, Artificial Sequence
  Description of Artificial Sequence: Synthetic oligonucleotide
cauauuuauuuauugcaga

SEQ ID NO: 3160171 - RNA, 19 nt, Artificial Sequence
  Description of Artificial Sequence: Synthetic oligonucleotide
uuagacaccggaucuauuu

SEQ ID NO: 3160172 - RNA, 19 nt, Artificial Sequence
  Description of Artificial Sequence: Synthetic oligonucleotide
aauggagaaaguccacaau

SEQ ID NO: 3160173 - RNA, 19 nt, Artificial Sequence
  Description of Artificial Sequence: Synthetic oligonucleotide
ucgugggcuacauagcugc

SEQ ID NO: 3160174 - RNA, 19 nt, Artificial Sequence
  Description of Artificial Sequence: Synthetic oligonucleotide
aaaggaauucacugacuau

SEQ ID NO: 3160175 - RNA, 19 nt, Artificial Sequence
  Description of Artificial Sequence: Synthetic oligonucleotide
ugaaugcauuuagacaccg

SEQ ID NO: 3160176 - RNA, 19 nt, Artificial Sequence
  Description of Artificial Sequence: Synthetic oligonucleotide
uggaaacaaugacaucuag

SEQ ID NO: 3160177 - RNA, 19 nt, Artificial Sequence
  Description of Artificial Sequence: Synthetic oligonucleotide
ugggacgcagacauggacc

SEQ ID NO: 3160178 - RNA, 19 nt, Artificial Sequence
  Description of Artificial Sequence: Synthetic oligonucleotide
gucaucaauaaauaaauau

SEQ ID NO: 3160179 - RNA, 19 nt, Artificial Sequence
  Description of Artificial Sequence: Synthetic oligonucleotide
cucuuuuaaaagugugccc

SEQ ID NO: 3160180 - RNA, 19 nt, Artificial Sequence
  Description of Artificial Sequence: Synthetic oligonucleotide
cagguguuguuaaaauucc

SEQ ID NO: 3160181 - RNA, 19 nt, Artificial Sequence
  Description of Artificial Sequence: Synthetic oligonucleotide
agaccgagaaggcauagcu

SEQ ID NO: 3160182 - RNA, 19 nt, Artificial Sequence
  Description of Artificial Sequence: Synthetic oligonucleotide
ugccuuuccccucaguggc

SEQ ID NO: 3160183 - RNA, 19 nt, Artificial Sequence
  Description of Artificial Sequence: Synthetic oligonucleotide
gagaaugcauacauguaug

SEQ ID NO: 3160184 - RNA, 19 nt, Artificial Sequence
  Description of Artificial Sequence: Synthetic oligonucleotide
uaaaagugugccccacgcc

SEQ ID NO: 3160185 - RNA, 19 nt, Artificial Sequence
  Description of Artificial Sequence: Synthetic oligonucleotide
ugauuguuaccauuuuaaa

SEQ ID NO: 3160186 - RNA, 19 nt, Artificial Sequence
  Description of Artificial Sequence: Synthetic oligonucleotide
aguuugaucccacuguuuu

SEQ ID NO: 3160187 - RNA, 19 nt, Artificial Sequence
  Description of Artificial Sequence: Synthetic oligonucleotide
agaaugcauacauguauga

SEQ ID NO: 3160188 - RNA, 19 nt, Artificial Sequence
  Description of Artificial Sequence: Synthetic oligonucleotide
ugggcuacauagcugcagc

SEQ ID NO: 3160189 - RNA, 19 nt, Artificial Sequence
  Description of Artificial Sequence: Synthetic oligonucleotide
uaucagaaugcagagguau

SEQ ID NO: 3160190 - RNA, 19 nt, Artificial Sequence
  Description of Artificial Sequence: Synthetic oligonucleotide
cucgcuguugcucaggcug

SEQ ID NO: 3160191 - RNA, 19 nt, Artificial Sequence
  Description of Artificial Sequence: Synthetic oligonucleotide
gcagacauggaccaggccc

SEQ ID NO: 3160192 - RNA, 19 nt, Artificial Sequence
  Description of Artificial Sequence: Synthetic oligonucleotide
gacaucuaggucuccggcc

SEQ ID NO: 3160193 - RNA, 19 nt, Artificial Sequence
  Description of Artificial Sequence: Synthetic oligonucleotide
uuggaguccagcucgucgc

SEQ ID NO: 3160194 - RNA, 19 nt, Artificial Sequence
  Description of Artificial Sequence: Synthetic oligonucleotide
augccuuuccccucagugg

SEQ ID NO: 3160195 - RNA, 19 nt, Artificial Sequence
  Description of Artificial Sequence: Synthetic oligonucleotide
caguuugagggucugaauc

SEQ ID NO: 3160196 - RNA, 19 nt, Artificial Sequence
  Description of Artificial Sequence: Synthetic oligonucleotide
augacaucuaggucuccgg

SEQ ID NO: 3160197 - RNA, 19 nt, Artificial Sequence
  Description of Artificial Sequence: Synthetic oligonucleotide
auuccucugauuguuacca

SEQ ID NO: 3160198 - RNA, 19 nt, Artificial Sequence
  Description of Artificial Sequence: Synthetic oligonucleotide
augguucggacuucuauca

SEQ ID NO: 3160199 - RNA, 19 nt, Artificial Sequence
  Description of Artificial Sequence: Synthetic oligonucleotide
uccugcaucaucgcgcggg

SEQ ID NO: 3160200 - RNA, 19 nt, Artificial Sequence
  Description of Artificial Sequence: Synthetic oligonucleotide
cuucucuggaaacaaugac

SEQ ID NO: 3160201 - RNA, 19 nt, Artificial Sequence
  Description of Artificial Sequence: Synthetic oligonucleotide
ucuacagguguuguuaaaa

SEQ ID NO: 3160202 - RNA, 19 nt, Artificial Sequence
  Description of Artificial Sequence: Synthetic oligonucleotide
agcuccgccugcuaguggg

SEQ ID NO: 3160203 - RNA, 19 nt, Artificial Sequence
  Description of Artificial Sequence: Synthetic oligonucleotide
aggaauucacugacuaugg

SEQ ID NO: 3160204 - RNA, 19 nt, Artificial Sequence
  Description of Artificial Sequence: Synthetic oligonucleotide
cagacauggaccaggcccc

SEQ ID NO: 3160205 - RNA, 19 nt, Artificial Sequence
  Description of Artificial Sequence: Synthetic oligonucleotide
augaaugcauuuagacacc

SEQ ID NO: 3160206 - RNA, 19 nt, Artificial Sequence
  Description of Artificial Sequence: Synthetic oligonucleotide
acaucuaggucuccggccu

SEQ ID NO: 3160207 - RNA, 19 nt, Artificial Sequence
  Description of Artificial Sequence: Synthetic oligonucleotide
uggcugauuggcacgaccu

SEQ ID NO: 3160208 - RNA, 19 nt, Artificial Sequence
  Description of Artificial Sequence: Synthetic oligonucleotide
uuuaguuauccagcuccag

SEQ ID NO: 3160209 - RNA, 19 nt, Artificial Sequence
  Description of Artificial Sequence: Synthetic oligonucleotide
aauuugggcucugcucuuc

SEQ ID NO: 3160210 - RNA, 19 nt, Artificial Sequence
  Description of Artificial Sequence: Synthetic oligonucleotide
cucuagacuguccauuuuc

SEQ ID NO: 3160211 - RNA, 19 nt, Artificial Sequence
  Description of Artificial Sequence: Synthetic oligonucleotide
uuauccagcuccagaguuc

SEQ ID NO: 3160212 - RNA, 19 nt, Artificial Sequence
  Description of Artificial Sequence: Synthetic oligonucleotide
uuucuacagguguuguuaa

SEQ ID NO: 3160213 - RNA, 19 nt, Artificial Sequence
  Description of Artificial Sequence: Synthetic oligonucleotide
cuacauagcugcagcuugc

SEQ ID NO: 3160214 - RNA, 19 nt, Artificial Sequence
  Description of Artificial Sequence: Synthetic oligonucleotide
acguccugcaucaucgcgc

SEQ ID NO: 3160215 - RNA, 19 nt, Artificial Sequence
  Description of Artificial Sequence: Synthetic oligonucleotide
gacgccaccgccaggagcc

SEQ ID NO: 3160216 - RNA, 19 nt, Artificial Sequence
  Description of Artificial Sequence: Synthetic oligonucleotide
aacaaugguucggacuucu

SEQ ID NO: 3160217 - RNA, 19 nt, Artificial Sequence
  Description of Artificial Sequence: Synthetic oligonucleotide
augcauacauguaugaaaa

SEQ ID NO: 3160218 - RNA, 19 nt, Artificial Sequence
  Description of Artificial Sequence: Synthetic oligonucleotide
uacagguguuguuaaaauu

SEQ ID NO: 3160219 - RNA, 19 nt, Artificial Sequence
  Description of Artificial Sequence: Synthetic oligonucleotide
uauuuacaaaacagucaua

SEQ ID NO: 3160220 - RNA, 19 nt, Artificial Sequence
  Description of Artificial Sequence: Synthetic oligonucleotide
ucugcagcuccucguacga

SEQ ID NO: 3160221 - RNA, 19 nt, Artificial Sequence
  Description of Artificial Sequence: Synthetic oligonucleotide
aauuuauugaucuuugggg

SEQ ID NO: 3160222 - RNA, 19 nt, Artificial Sequence
  Description of Artificial Sequence: Synthetic oligonucleotide
aaaacauucaauuuauuga

SEQ ID NO: 3160223 - RNA, 19 nt, Artificial Sequence
  Description of Artificial Sequence: Synthetic oligonucleotide
acuguauuacaauugagcc

SEQ ID NO: 3160224 - RNA, 19 nt, Artificial Sequence
  Description of Artificial Sequence: Synthetic oligonucleotide
auagauuuaagagaaaggc

SEQ ID NO: 3160225 - RNA, 19 nt, Artificial Sequence
  Description of Artificial Sequence: Synthetic oligonucleotide
aaaauuugcaaguucuuuc

SEQ ID NO: 3160226 - RNA, 19 nt, Artificial Sequence
  Description of Artificial Sequence: Synthetic oligonucleotide
uguauauuuacaaaagcug

SEQ ID NO: 3160227 - RNA, 19 nt, Artificial Sequence
  Description of Artificial Sequence: Synthetic oligonucleotide
uuuaaauuuguucuuggcc

SEQ ID NO: 3160228 - RNA, 19 nt, Artificial Sequence
  Description of Artificial Sequence: Synthetic oligonucleotide
uuaaaguuuguauaaaaca

SEQ ID NO: 3160229 - RNA, 19 nt, Artificial Sequence
  Description of Artificial Sequence: Synthetic oligonucleotide
uaaaacauucaauuuauug

SEQ ID NO: 3160230 - RNA, 19 nt, Artificial Sequence
  Description of Artificial Sequence: Synthetic oligonucleotide
uuaaauuuguucuuggcca

SEQ ID NO: 3160231 - RNA, 19 nt, Artificial Sequence
  Description of Artificial Sequence: Synthetic oligonucleotide
ucauucauaauguuuaucu

SEQ ID NO: 3160232 - RNA, 19 nt, Artificial Sequence
  Description of Artificial Sequence: Synthetic oligonucleotide
auucauaauguuuaucuuc

SEQ ID NO: 3160233 - RNA, 19 nt, Artificial Sequence
  Description of Artificial Sequence: Synthetic oligonucleotide
uuuaaaguuuguauaaaac

SEQ ID NO: 3160234 - RNA, 19 nt, Artificial Sequence
  Description of Artificial Sequence: Synthetic oligonucleotide
uguagcuucaucaacauua

SEQ ID NO: 3160235 - RNA, 19 nt, Artificial Sequence
  Description of Artificial Sequence: Synthetic oligonucleotide
uaaaguuuguauaaaacau

SEQ ID NO: 3160236 - RNA, 19 nt, Artificial Sequence
  Description of Artificial Sequence: Synthetic oligonucleotide
uguccuuuaaauuuguucu

SEQ ID NO: 3160237 - RNA, 19 nt, Artificial Sequence
  Description of Artificial Sequence: Synthetic oligonucleotide
uucugcauagauuuaagag

SEQ ID NO: 3160238 - RNA, 19 nt, Artificial Sequence
  Description of Artificial Sequence: Synthetic oligonucleotide
aaacauucaauuuauugau

SEQ ID NO: 3160239 - RNA, 19 nt, Artificial Sequence
  Description of Artificial Sequence: Synthetic oligonucleotide
ugaaauacauuccuggacu

SEQ ID NO: 3160240 - RNA, 19 nt, Artificial Sequence
  Description of Artificial Sequence: Synthetic oligonucleotide
aauguuuaucuucuuaaga

SEQ ID NO: 3160241 - RNA, 19 nt, Artificial Sequence
  Description of Artificial Sequence: Synthetic oligonucleotide
auuuucgugaugcugcagc

SEQ ID NO: 3160242 - RNA, 19 nt, Artificial Sequence
  Description of Artificial Sequence: Synthetic oligonucleotide
uaagauuaguaguaacugg

SEQ ID NO: 3160243 - RNA, 19 nt, Artificial Sequence
  Description of Artificial Sequence: Synthetic oligonucleotide
ugagccauuagucuuguag

SEQ ID NO: 3160244 - RNA, 19 nt, Artificial Sequence
  Description of Artificial Sequence: Synthetic oligonucleotide
aaguuuguauaaaacauuc

SEQ ID NO: 3160245 - RNA, 19 nt, Artificial Sequence
  Description of Artificial Sequence: Synthetic oligonucleotide
uucauuuucgugaugcugc

SEQ ID NO: 3160246 - RNA, 19 nt, Artificial Sequence
  Description of Artificial Sequence: Synthetic oligonucleotide
ucugcauagauuuaagaga

SEQ ID NO: 3160247 - RNA, 19 nt, Artificial Sequence
  Description of Artificial Sequence: Synthetic oligonucleotide
uuuacaaaagcuguguuca

SEQ ID NO: 3160248 - RNA, 19 nt, Artificial Sequence
  Description of Artificial Sequence: Synthetic oligonucleotide
uauaaaacauucaauuuau

SEQ ID NO: 3160249 - RNA, 19 nt, Artificial Sequence
  Description of Artificial Sequence: Synthetic oligonucleotide
uuuucaucauucauaaugu

SEQ ID NO: 3160250 - RNA, 19 nt, Artificial Sequence
  Description of Artificial Sequence: Synthetic oligonucleotide
ucuguauauuuacaaaagc

SEQ ID NO: 3160251 - RNA, 19 nt, Artificial Sequence
  Description of Artificial Sequence: Synthetic oligonucleotide
auuuacaaaagcuguguuc

SEQ ID NO: 3160252 - RNA, 19 nt, Artificial Sequence
  Description of Artificial Sequence: Synthetic oligonucleotide
ucuucuuaagauuaguagu

SEQ ID NO: 3160253 - RNA, 19 nt, Artificial Sequence
  Description of Artificial Sequence: Synthetic oligonucleotide
uauauuuacaaaagcugug

SEQ ID NO: 3160254 - RNA, 19 nt, Artificial Sequence
  Description of Artificial Sequence: Synthetic oligonucleotide
uuguauaaaacauucaauu

SEQ ID NO: 3160255 - RNA, 19 nt, Artificial Sequence
  Description of Artificial Sequence: Synthetic oligonucleotide
uucuguauauuuacaaaag

SEQ ID NO: 3160256 - RNA, 19 nt, Artificial Sequence
  Description of Artificial Sequence: Synthetic oligonucleotide
aaauuugcaaguucuuucu

SEQ ID NO: 3160257 - RNA, 19 nt, Artificial Sequence
  Description of Artificial Sequence: Synthetic oligonucleotide
augugaaauacauuccugg

SEQ ID NO: 3160258 - RNA, 19 nt, Artificial Sequence
  Description of Artificial Sequence: Synthetic oligonucleotide
caauuuauugaucuuuggg

SEQ ID NO: 3160259 - RNA, 19 nt, Artificial Sequence
  Description of Artificial Sequence: Synthetic oligonucleotide
uucauaauguuuaucuucu

SEQ ID NO: 3160260 - RNA, 19 nt, Artificial Sequence
  Description of Artificial Sequence: Synthetic oligonucleotide
ucaucauucauaauguuua

SEQ ID NO: 3160261 - RNA, 19 nt, Artificial Sequence
  Description of Artificial Sequence: Synthetic oligonucleotide
acaaaagcuguguucauuc

SEQ ID NO: 3160262 - RNA, 19 nt, Artificial Sequence
  Description of Artificial Sequence: Synthetic oligonucleotide
uuaagauuaguaguaacug

SEQ ID NO: 3160263 - RNA, 19 nt, Artificial Sequence
  Description of Artificial Sequence: Synthetic oligonucleotide
cauagauuuaagagaaagg

SEQ ID NO: 3160264 - RNA, 19 nt, Artificial Sequence
  Description of Artificial Sequence: Synthetic oligonucleotide
aucuucuuaagauuaguag

SEQ ID NO: 3160265 - RNA, 19 nt, Artificial Sequence
  Description of Artificial Sequence: Synthetic oligonucleotide
uuacaauugagccauuagu

SEQ ID NO: 3160266 - RNA, 19 nt, Artificial Sequence
  Description of Artificial Sequence: Synthetic oligonucleotide
uuucuguauauuuacaaaa

SEQ ID NO: 3160267 - RNA, 19 nt, Artificial Sequence
  Description of Artificial Sequence: Synthetic oligonucleotide
uguauuacaauugagccau

SEQ ID NO: 3160268 - RNA, 19 nt, Artificial Sequence
  Description of Artificial Sequence: Synthetic oligonucleotide
uauacugucacuguauuac

SEQ ID NO: 3160269 - RNA, 19 nt, Artificial Sequence
  Description of Artificial Sequence: Synthetic oligonucleotide
uacaauugagccauuaguc

SEQ ID NO: 3160270 - RNA, 19 nt, Artificial Sequence
  Description of Artificial Sequence: Synthetic oligonucleotide
ucuuguagcuucaucaaca

SEQ ID NO: 3160271 - RNA, 19 nt, Artificial Sequence
  Description of Artificial Sequence: Synthetic oligonucleotide
uuuguauaaaacauucaau

SEQ ID NO: 3160272 - RNA, 19 nt, Artificial Sequence
  Description of Artificial Sequence: Synthetic oligonucleotide
aauaugauauacugucacu

SEQ ID NO: 3160273 - RNA, 19 nt, Artificial Sequence
  Description of Artificial Sequence: Synthetic oligonucleotide
gaauaugauauacugucac

SEQ ID NO: 3160274 - RNA, 19 nt, Artificial Sequence
  Description of Artificial Sequence: Synthetic oligonucleotide
acauucaauuuauugaucu

SEQ ID NO: 3160275 - RNA, 19 nt, Artificial Sequence
  Description of Artificial Sequence: Synthetic oligonucleotide
uucaauuuauugaucuuug

SEQ ID NO: 3160276 - RNA, 19 nt, Artificial Sequence
  Description of Artificial Sequence: Synthetic oligonucleotide
cacuguauuacaauugagc

SEQ ID NO: 3160277 - RNA, 19 nt, Artificial Sequence
  Description of Artificial Sequence: Synthetic oligonucleotide
uagucuuguagcuucauca

SEQ ID NO: 3160278 - RNA, 19 nt, Artificial Sequence
  Description of Artificial Sequence: Synthetic oligonucleotide
uuuuaaaguuuguauaaaa

SEQ ID NO: 3160279 - RNA, 19 nt, Artificial Sequence
  Description of Artificial Sequence: Synthetic oligonucleotide
uuuaucuucuuaagauuag

SEQ ID NO: 3160280 - RNA, 19 nt, Artificial Sequence
  Description of Artificial Sequence: Synthetic oligonucleotide
auaauguuuaucuucuuaa

SEQ ID NO: 3160281 - RNA, 19 nt, Artificial Sequence
  Description of Artificial Sequence: Synthetic oligonucleotide
ucaauuuauugaucuuugg

SEQ ID NO: 3160282 - RNA, 19 nt, Artificial Sequence
  Description of Artificial Sequence: Synthetic oligonucleotide
uagauuuaagagaaaggcu

SEQ ID NO: 3160283 - RNA, 19 nt, Artificial Sequence
  Description of Artificial Sequence: Synthetic oligonucleotide
aaaagcuguguucauucug

SEQ ID NO: 3160284 - RNA, 19 nt, Artificial Sequence
  Description of Artificial Sequence: Synthetic oligonucleotide
uaauguuuaucuucuuaag

SEQ ID NO: 3160285 - RNA, 19 nt, Artificial Sequence
  Description of Artificial Sequence: Synthetic oligonucleotide
auguuuaucuucuuaagau

SEQ ID NO: 3160286 - RNA, 19 nt, Artificial Sequence
  Description of Artificial Sequence: Synthetic oligonucleotide
uguauaaaacauucaauuu

SEQ ID NO: 3160287 - RNA, 19 nt, Artificial Sequence
  Description of Artificial Sequence: Synthetic oligonucleotide
auuacaauugagccauuag

SEQ ID NO: 3160288 - RNA, 19 nt, Artificial Sequence
  Description of Artificial Sequence: Synthetic oligonucleotide
uaugugaaauacauuccug

SEQ ID NO: 3160289 - RNA, 19 nt, Artificial Sequence
  Description of Artificial Sequence: Synthetic oligonucleotide
aacauuagcugguucauuu

SEQ ID NO: 3160290 - RNA, 19 nt, Artificial Sequence
  Description of Artificial Sequence: Synthetic oligonucleotide
aagauuaguaguaacuggu

SEQ ID NO: 3160291 - RNA, 19 nt, Artificial Sequence
  Description of Artificial Sequence: Synthetic oligonucleotide
cuucaucaacauuagcugg

SEQ ID NO: 3160292 - RNA, 19 nt, Artificial Sequence
  Description of Artificial Sequence: Synthetic oligonucleotide
uuguucuuggccauuguca

SEQ ID NO: 3160293 - RNA, 19 nt, Artificial Sequence
  Description of Artificial Sequence: Synthetic oligonucleotide
guuuguauaaaacauucaa

SEQ ID NO: 3160294 - RNA, 19 nt, Artificial Sequence
  Description of Artificial Sequence: Synthetic oligonucleotide
acuucuguccuuuaaauuu

SEQ ID NO: 3160295 - RNA, 19 nt, Artificial Sequence
  Description of Artificial Sequence: Synthetic oligonucleotide
ucuuucuguauauuuacaa

SEQ ID NO: 3160296 - RNA, 19 nt, Artificial Sequence
  Description of Artificial Sequence: Synthetic oligonucleotide
cuuuaaauuuguucuuggc

SEQ ID NO: 3160297 - RNA, 19 nt, Artificial Sequence
  Description of Artificial Sequence: Synthetic oligonucleotide
ugucacuguauuacaauug

SEQ ID NO: 3160298 - RNA, 19 nt, Artificial Sequence
  Description of Artificial Sequence: Synthetic oligonucleotide
aucaacauuagcugguuca

SEQ ID NO: 3160299 - RNA, 19 nt, Artificial Sequence
  Description of Artificial Sequence: Synthetic oligonucleotide
guauaaaacauucaauuua

SEQ ID NO: 3160300 - RNA, 19 nt, Artificial Sequence
  Description of Artificial Sequence: Synthetic oligonucleotide
auaugauauacugucacug

SEQ ID NO: 3160301 - RNA, 19 nt, Artificial Sequence
  Description of Artificial Sequence: Synthetic oligonucleotide
aauacauuccuggacuucu

SEQ ID NO: 3160302 - RNA, 19 nt, Artificial Sequence
  Description of Artificial Sequence: Synthetic oligonucleotide
ugugaaauacauuccugga

SEQ ID NO: 3160303 - RNA, 19 nt, Artificial Sequence
  Description of Artificial Sequence: Synthetic oligonucleotide
acaauugagccauuagucu

SEQ ID NO: 3160304 - RNA, 19 nt, Artificial Sequence
  Description of Artificial Sequence: Synthetic oligonucleotide
gagccauuagucuuguagc

SEQ ID NO: 3160305 - RNA, 19 nt, Artificial Sequence
  Description of Artificial Sequence: Synthetic oligonucleotide
uucaucauucauaauguuu

SEQ ID NO: 3160306 - RNA, 19 nt, Artificial Sequence
  Description of Artificial Sequence: Synthetic oligonucleotide
ggcuaugugaaauacauuc

SEQ ID NO: 3160307 - RNA, 19 nt, Artificial Sequence
  Description of Artificial Sequence: Synthetic oligonucleotide
aauuugcaaguucuuucug

SEQ ID NO: 3160308 - RNA, 19 nt, Artificial Sequence
  Description of Artificial Sequence: Synthetic oligonucleotide
uaugauauacugucacugu

SEQ ID NO: 3160309 - RNA, 19 nt, Artificial Sequence
  Description of Artificial Sequence: Synthetic oligonucleotide
uucaucaacauuagcuggu

SEQ ID NO: 3160310 - RNA, 19 nt, Artificial Sequence
  Description of Artificial Sequence: Synthetic oligonucleotide
gggaauaugauauacuguc

SEQ ID NO: 3160311 - RNA, 19 nt, Artificial Sequence
  Description of Artificial Sequence: Synthetic oligonucleotide
gaugcugcagcucuuucug

SEQ ID NO: 3160312 - RNA, 19 nt, Artificial Sequence
  Description of Artificial Sequence: Synthetic oligonucleotide
cauuccuggacuucugucc

SEQ ID NO: 3160313 - RNA, 19 nt, Artificial Sequence
  Description of Artificial Sequence: Synthetic oligonucleotide
ucuuaagauuaguaguaac

SEQ ID NO: 3160314 - RNA, 19 nt, Artificial Sequence
  Description of Artificial Sequence: Synthetic oligonucleotide
ugguucauuuucgugaugc

SEQ ID NO: 3160315 - RNA, 19 nt, Artificial Sequence
  Description of Artificial Sequence: Synthetic oligonucleotide
agcuucaucaacauuagcu

SEQ ID NO: 3160316 - RNA, 19 nt, Artificial Sequence
  Description of Artificial Sequence: Synthetic oligonucleotide
auuaguaguaacugguuuu

SEQ ID NO: 3160317 - RNA, 19 nt, Artificial Sequence
  Description of Artificial Sequence: Synthetic oligonucleotide
agcugguucauuuucguga

SEQ ID NO: 3160318 - RNA, 19 nt, Artificial Sequence
  Description of Artificial Sequence: Synthetic oligonucleotide
aaguucuuucuguauauuu

SEQ ID NO: 3160319 - RNA, 19 nt, Artificial Sequence
  Description of Artificial Sequence: Synthetic oligonucleotide
aguaguaacugguuuugcu

SEQ ID NO: 3160320 - RNA, 19 nt, Artificial Sequence
  Description of Artificial Sequence: Synthetic oligonucleotide
ugauauacugucacuguau

SEQ ID NO: 3160321 - RNA, 19 nt, Artificial Sequence
  Description of Artificial Sequence: Synthetic oligonucleotide
aauauuuguacacauauuc

SEQ ID NO: 3160322 - RNA, 19 nt, Artificial Sequence
  Description of Artificial Sequence: Synthetic oligonucleotide
cuuguuaaaauauucuucg

SEQ ID NO: 3160323 - RNA, 19 nt, Artificial Sequence
  Description of Artificial Sequence: Synthetic oligonucleotide
augagacucauacaaaacc

SEQ ID NO: 3160324 - RNA, 19 nt, Artificial Sequence
  Description of Artificial Sequence: Synthetic oligonucleotide
ugaaaauauacuucuuugg

SEQ ID NO: 3160325 - RNA, 19 nt, Artificial Sequence
  Description of Artificial Sequence: Synthetic oligonucleotide
aagauauguuucuccaacc

SEQ ID NO: 3160326 - RNA, 19 nt, Artificial Sequence
  Description of Artificial Sequence: Synthetic oligonucleotide
acacauauucuccaguacc

SEQ ID NO: 3160327 - RNA, 19 nt, Artificial Sequence
  Description of Artificial Sequence: Synthetic oligonucleotide
ugugauugcagcaugagaa

SEQ ID NO: 3160328 - RNA, 19 nt, Artificial Sequence
  Description of Artificial Sequence: Synthetic oligonucleotide
uguuaaaauauucuucgca

SEQ ID NO: 3160329 - RNA, 19 nt, Artificial Sequence
  Description of Artificial Sequence: Synthetic oligonucleotide
uuucaugagacucauacaa

SEQ ID NO: 3160330 - RNA, 19 nt, Artificial Sequence
  Description of Artificial Sequence: Synthetic oligonucleotide
aaauauacuucuuugguuu

SEQ ID NO: 3160331 - RNA, 19 nt, Artificial Sequence
  Description of Artificial Sequence: Synthetic oligonucleotide
ucauacaaaaccaggagga

SEQ ID NO: 3160332 - RNA, 19 nt, Artificial Sequence
  Description of Artificial Sequence: Synthetic oligonucleotide
aagugcauagaguauuuuc

SEQ ID NO: 3160333 - RNA, 19 nt, Artificial Sequence
  Description of Artificial Sequence: Synthetic oligonucleotide
uacaaaaccaggaggagcc

SEQ ID NO: 3160334 - RNA, 19 nt, Artificial Sequence
  Description of Artificial Sequence: Synthetic oligonucleotide
aaauauucuucgcaagaag

SEQ ID NO: 3160335 - RNA, 19 nt, Artificial Sequence
  Description of Artificial Sequence: Synthetic oligonucleotide
uugaaaauauacuucuuug

SEQ ID NO: 3160336 - RNA, 19 nt, Artificial Sequence
  Description of Artificial Sequence: Synthetic oligonucleotide
agauauguuucuccaaccc

SEQ ID NO: 3160337 - RNA, 19 nt, Artificial Sequence
  Description of Artificial Sequence: Synthetic oligonucleotide
uaaaauauucuucgcaaga

SEQ ID NO: 3160338 - RNA, 19 nt, Artificial Sequence
  Description of Artificial Sequence: Synthetic oligonucleotide
cauuucaugagacucauac

SEQ ID NO: 3160339 - RNA, 19 nt, Artificial Sequence
  Description of Artificial Sequence: Synthetic oligonucleotide
uguuucuccaacccgauga

SEQ ID NO: 3160340 - RNA, 19 nt, Artificial Sequence
  Description of Artificial Sequence: Synthetic oligonucleotide
agauggaauauuuguacac

SEQ ID NO: 3160341 - RNA, 19 nt, Artificial Sequence
  Description of Artificial Sequence: Synthetic oligonucleotide
uuaaaauauucuucgcaag

SEQ ID NO: 3160342 - RNA, 19 nt, Artificial Sequence
  Description of Artificial Sequence: Synthetic oligonucleotide
gauauguuucuccaacccg

SEQ ID NO: 3160343 - RNA, 19 nt, Artificial Sequence
  Description of Artificial Sequence: Synthetic oligonucleotide
agugcauagaguauuuucc

SEQ ID NO: 3160344 - RNA, 19 nt, Artificial Sequence
  Description of Artificial Sequence: Synthetic oligonucleotide
uccaguaccacguugaaaa

SEQ ID NO: 3160345 - RNA, 19 nt, Artificial Sequence
  Description of Artificial Sequence: Synthetic oligonucleotide
ucuuguuaaaauauucuuc

SEQ ID NO: 3160346 - RNA, 19 nt, Artificial Sequence
  Description of Artificial Sequence: Synthetic oligonucleotide
acuccauacaucuucuugg

SEQ ID NO: 3160347 - RNA, 19 nt, Artificial Sequence
  Description of Artificial Sequence: Synthetic oligonucleotide
acauacuccauacaucuuc

SEQ ID NO: 3160348 - RNA, 19 nt, Artificial Sequence
  Description of Artificial Sequence: Synthetic oligonucleotide
guuacaguagcugugauug

SEQ ID NO: 3160349 - RNA, 19 nt, Artificial Sequence
  Description of Artificial Sequence: Synthetic oligonucleotide
auuuguacacauauucucc

SEQ ID NO: 3160350 - RNA, 19 nt, Artificial Sequence
  Description of Artificial Sequence: Synthetic oligonucleotide
aaaauauacuucuuugguu

SEQ ID NO: 3160351 - RNA, 19 nt, Artificial Sequence
  Description of Artificial Sequence: Synthetic oligonucleotide
ugagacucauacaaaacca

SEQ ID NO: 3160352 - RNA, 19 nt, Artificial Sequence
  Description of Artificial Sequence: Synthetic oligonucleotide
uauuuguacacauauucuc

SEQ ID NO: 3160353 - RNA, 19 nt, Artificial Sequence
  Description of Artificial Sequence: Synthetic oligonucleotide
aauauucuucgcaagaagu

SEQ ID NO: 3160354 - RNA, 19 nt, Artificial Sequence
  Description of Artificial Sequence: Synthetic oligonucleotide
cucauacaaaaccaggagg

SEQ ID NO: 3160355 - RNA, 19 nt, Artificial Sequence
  Description of Artificial Sequence: Synthetic oligonucleotide
gaagauauguuucuccaac

SEQ ID NO: 3160356 - RNA, 19 nt, Artificial Sequence
  Description of Artificial Sequence: Synthetic oligonucleotide
caagauggaauauuuguac

SEQ ID NO: 3160357 - RNA, 19 nt, Artificial Sequence
  Description of Artificial Sequence: Synthetic oligonucleotide
ugagaagauauguuucucc

SEQ ID NO: 3160358 - RNA, 19 nt, Artificial Sequence
  Description of Artificial Sequence: Synthetic oligonucleotide
aagauggaauauuuguaca

SEQ ID NO: 3160359 - RNA, 19 nt, Artificial Sequence
  Description of Artificial Sequence: Synthetic oligonucleotide
agcaagaggaacaggagcc

SEQ ID NO: 3160360 - RNA, 19 nt, Artificial Sequence
  Description of Artificial Sequence: Synthetic oligonucleotide
aauauacuucuuugguuug

SEQ ID NO: 3160361 - RNA, 19 nt, Artificial Sequence
  Description of Artificial Sequence: Synthetic oligonucleotide
uucuccaacccgaugaggc

SEQ ID NO: 3160362 - RNA, 19 nt, Artificial Sequence
  Description of Artificial Sequence: Synthetic oligonucleotide
auacaaaaccaggaggagc

SEQ ID NO: 3160363 - RNA, 19 nt, Artificial Sequence
  Description of Artificial Sequence: Synthetic oligonucleotide
acucauacaaaaccaggag

SEQ ID NO: 3160364 - RNA, 19 nt, Artificial Sequence
  Description of Artificial Sequence: Synthetic oligonucleotide
aggauaucuggguugacag

SEQ ID NO: 3160365 - RNA, 19 nt, Artificial Sequence
  Description of Artificial Sequence: Synthetic oligonucleotide
guuaaaauauucuucgcaa

SEQ ID NO: 3160366 - RNA, 19 nt, Artificial Sequence
  Description of Artificial Sequence: Synthetic oligonucleotide
acguugaaaauauacuucu

SEQ ID NO: 3160367 - RNA, 19 nt, Artificial Sequence
  Description of Artificial Sequence: Synthetic oligonucleotide
uuuguacacauauucucca

SEQ ID NO: 3160368 - RNA, 19 nt, Artificial Sequence
  Description of Artificial Sequence: Synthetic oligonucleotide
uaccacguugaaaauauac

SEQ ID NO: 3160369 - RNA, 19 nt, Artificial Sequence
  Description of Artificial Sequence: Synthetic oligonucleotide
uuugguuuggcaugccaag

SEQ ID NO: 3160370 - RNA, 19 nt, Artificial Sequence
  Description of Artificial Sequence: Synthetic oligonucleotide
cuugggcagcucaagaugg

SEQ ID NO: 3160371 - RNA, 19 nt, Artificial Sequence
  Description of Artificial Sequence: Synthetic oligonucleotide
ucaugagacucauacaaaa

SEQ ID NO: 3160372 - RNA, 19 nt, Artificial Sequence
  Description of Artificial Sequence: Synthetic oligonucleotide
ucaagauggaauauuugua

SEQ ID NO: 3160373 - RNA, 19 nt, Artificial Sequence
  Description of Artificial Sequence: Synthetic oligonucleotide
gaaaauauacuucuuuggu

SEQ ID NO: 3160374 - RNA, 19 nt, Artificial Sequence
  Description of Artificial Sequence: Synthetic oligonucleotide
aaaauauucuucgcaagaa

SEQ ID NO: 3160375 - RNA, 19 nt, Artificial Sequence
  Description of Artificial Sequence: Synthetic oligonucleotide
uacuccauacaucuucuug

SEQ ID NO: 3160376 - RNA, 19 nt, Artificial Sequence
  Description of Artificial Sequence: Synthetic oligonucleotide
gauaucuggguugacagac

SEQ ID NO: 3160377 - RNA, 19 nt, Artificial Sequence
  Description of Artificial Sequence: Synthetic oligonucleotide
uagcaagaggaacaggagc

SEQ ID NO: 3160378 - RNA, 19 nt, Artificial Sequence
  Description of Artificial Sequence: Synthetic oligonucleotide
cauauucuccaguaccacg

SEQ ID NO: 3160379 - RNA, 19 nt, Artificial Sequence
  Description of Artificial Sequence: Synthetic oligonucleotide
uauucuucgcaagaagugc

SEQ ID NO: 3160380 - RNA, 19 nt, Artificial Sequence
  Description of Artificial Sequence: Synthetic oligonucleotide
acuucuuugguuuggcaug

SEQ ID NO: 3160381 - RNA, 19 nt, Artificial Sequence
  Description of Artificial Sequence: Synthetic oligonucleotide
uuuggcaugccaagucagg

SEQ ID NO: 3160382 - RNA, 19 nt, Artificial Sequence
  Description of Artificial Sequence: Synthetic oligonucleotide
ucgcaagaagugcauagag

SEQ ID NO: 3160383 - RNA, 19 nt, Artificial Sequence
  Description of Artificial Sequence: Synthetic oligonucleotide
ucuugggcagcucaagaug

SEQ ID NO: 3160384 - RNA, 19 nt, Artificial Sequence
  Description of Artificial Sequence: Synthetic oligonucleotide
uaucuggguugacagaccc

SEQ ID NO: 3160385 - RNA, 19 nt, Artificial Sequence
  Description of Artificial Sequence: Synthetic oligonucleotide
aggaacaggagccagucca

SEQ ID NO: 3160386 - RNA, 19 nt, Artificial Sequence
  Description of Artificial Sequence: Synthetic oligonucleotide
ugcauagaguauuuucccc

SEQ ID NO: 3160387 - RNA, 19 nt, Artificial Sequence
  Description of Artificial Sequence: Synthetic oligonucleotide
uuguuaaaauauucuucgc

SEQ ID NO: 3160388 - RNA, 19 nt, Artificial Sequence
  Description of Artificial Sequence: Synthetic oligonucleotide
uguacacauauucuccagu

SEQ ID NO: 3160389 - RNA, 19 nt, Artificial Sequence
  Description of Artificial Sequence: Synthetic oligonucleotide
gagaagauauguuucucca

SEQ ID NO: 3160390 - RNA, 19 nt, Artificial Sequence
  Description of Artificial Sequence: Synthetic oligonucleotide
cacguugaaaauauacuuc

SEQ ID NO: 3160391 - RNA, 19 nt, Artificial Sequence
  Description of Artificial Sequence: Synthetic oligonucleotide
cauacaucuucuugggcag

SEQ ID NO: 3160392 - RNA, 19 nt, Artificial Sequence
  Description of Artificial Sequence: Synthetic oligonucleotide
cuucgcaagaagugcauag

SEQ ID NO: 3160393 - RNA, 19 nt, Artificial Sequence
  Description of Artificial Sequence: Synthetic oligonucleotide
agcaugagaagauauguuu

SEQ ID NO: 3160394 - RNA, 19 nt, Artificial Sequence
  Description of Artificial Sequence: Synthetic oligonucleotide
uucuccaguaccacguuga

SEQ ID NO: 3160395 - RNA, 19 nt, Artificial Sequence
  Description of Artificial Sequence: Synthetic oligonucleotide
ugcagcaugagaagauaug

SEQ ID NO: 3160396 - RNA, 19 nt, Artificial Sequence
  Description of Artificial Sequence: Synthetic oligonucleotide
caugagacucauacaaaac

SEQ ID NO: 3160397 - RNA, 19 nt, Artificial Sequence
  Description of Artificial Sequence: Synthetic oligonucleotide
uacuucuuugguuuggcau

SEQ ID NO: 3160398 - RNA, 19 nt, Artificial Sequence
  Description of Artificial Sequence: Synthetic oligonucleotide
uuguacacauauucuccag

SEQ ID NO: 3160399 - RNA, 19 nt, Artificial Sequence
  Description of Artificial Sequence: Synthetic oligonucleotide
gagacucauacaaaaccag

SEQ ID NO: 3160400 - RNA, 19 nt, Artificial Sequence
  Description of Artificial Sequence: Synthetic oligonucleotide
uacacauauucuccaguac

SEQ ID NO: 3160401 - RNA, 19 nt, Artificial Sequence
  Description of Artificial Sequence: Synthetic oligonucleotide
aagaagugcauagaguauu

SEQ ID NO: 3160402 - RNA, 19 nt, Artificial Sequence
  Description of Artificial Sequence: Synthetic oligonucleotide
aggucuuguuaaaauauuc

SEQ ID NO: 3160403 - RNA, 19 nt, Artificial Sequence
  Description of Artificial Sequence: Synthetic oligonucleotide
gaugaggcggacauacucc

SEQ ID NO: 3160404 - RNA, 19 nt, Artificial Sequence
  Description of Artificial Sequence: Synthetic oligonucleotide
cuccauacaucuucuuggg

SEQ ID NO: 3160405 - RNA, 19 nt, Artificial Sequence
  Description of Artificial Sequence: Synthetic oligonucleotide
auuucaugagacucauaca

SEQ ID NO: 3160406 - RNA, 19 nt, Artificial Sequence
  Description of Artificial Sequence: Synthetic oligonucleotide
agucaggauaucuggguug

SEQ ID NO: 3160407 - RNA, 19 nt, Artificial Sequence
  Description of Artificial Sequence: Synthetic oligonucleotide
ucuggguugacagacccca

SEQ ID NO: 3160408 - RNA, 19 nt, Artificial Sequence
  Description of Artificial Sequence: Synthetic oligonucleotide
ucuccaacccgaugaggcg

SEQ ID NO: 3160409 - RNA, 19 nt, Artificial Sequence
  Description of Artificial Sequence: Synthetic oligonucleotide
ugccaagucaggauaucug

SEQ ID NO: 3160410 - RNA, 19 nt, Artificial Sequence
  Description of Artificial Sequence: Synthetic oligonucleotide
gugcauagaguauuuuccc

SEQ ID NO: 3160411 - RNA, 19 nt, Artificial Sequence
  Description of Artificial Sequence: Synthetic oligonucleotide
agacucauacaaaaccagg

SEQ ID NO: 3160412 - RNA, 19 nt, Artificial Sequence
  Description of Artificial Sequence: Synthetic oligonucleotide
auauuuguacacauauucu

SEQ ID NO: 3160413 - RNA, 19 nt, Artificial Sequence
  Description of Artificial Sequence: Synthetic oligonucleotide
gauggaauauuuguacaca

SEQ ID NO: 3160414 - RNA, 19 nt, Artificial Sequence
  Description of Artificial Sequence: Synthetic oligonucleotide
auauucuucgcaagaagug

SEQ ID NO: 3160415 - RNA, 19 nt, Artificial Sequence
  Description of Artificial Sequence: Synthetic oligonucleotide
uauacuucuuugguuuggc

SEQ ID NO: 3160416 - RNA, 19 nt, Artificial Sequence
  Description of Artificial Sequence: Synthetic oligonucleotide
auggaauauuuguacacau

SEQ ID NO: 3160417 - RNA, 19 nt, Artificial Sequence
  Description of Artificial Sequence: Synthetic oligonucleotide
aacccgaugaggcggacau

SEQ ID NO: 3160418 - RNA, 19 nt, Artificial Sequence
  Description of Artificial Sequence: Synthetic oligonucleotide
auauacuucuuugguuugg

SEQ ID NO: 3160419 - RNA, 19 nt, Artificial Sequence
  Description of Artificial Sequence: Synthetic oligonucleotide
uucaugagacucauacaaa

SEQ ID NO: 3160420 - RNA, 19 nt, Artificial Sequence
  Description of Artificial Sequence: Synthetic oligonucleotide
ucuuugguuuggcaugcca

SEQ ID NO: 3160421 - RNA, 19 nt, Artificial Sequence
  Description of Artificial Sequence: Synthetic oligonucleotide
aaagaucccaugcaaaccc

SEQ ID NO: 3160422 - RNA, 19 nt, Artificial Sequence
  Description of Artificial Sequence: Synthetic oligonucleotide
agagcuaugucuuugcucc

SEQ ID NO: 3160423 - RNA, 19 nt, Artificial Sequence
  Description of Artificial Sequence: Synthetic oligonucleotide
uauacauuuccucauuugg

SEQ ID NO: 3160424 - RNA, 19 nt, Artificial Sequence
  Description of Artificial Sequence: Synthetic oligonucleotide
uauggcagaaguaucacgg

SEQ ID NO: 3160425 - RNA, 19 nt, Artificial Sequence
  Description of Artificial Sequence: Synthetic oligonucleotide
uuauuguuuauacauuucc

SEQ ID NO: 3160426 - RNA, 19 nt, Artificial Sequence
  Description of Artificial Sequence: Synthetic oligonucleotide
agaugaauaaaccaacguc

SEQ ID NO: 3160427 - RNA, 19 nt, Artificial Sequence
  Description of Artificial Sequence: Synthetic oligonucleotide
gauaacuccaaacccaagg

SEQ ID NO: 3160428 - RNA, 19 nt, Artificial Sequence
  Description of Artificial Sequence: Synthetic oligonucleotide
gaugaauaaaccaacgucc

SEQ ID NO: 3160429 - RNA, 19 nt, Artificial Sequence
  Description of Artificial Sequence: Synthetic oligonucleotide
ucuugaguaguucacaggc

SEQ ID NO: 3160430 - RNA, 19 nt, Artificial Sequence
  Description of Artificial Sequence: Synthetic oligonucleotide
aacaaagggaaacugagaa

SEQ ID NO: 3160431 - RNA, 19 nt, Artificial Sequence
  Description of Artificial Sequence: Synthetic oligonucleotide
aaagacgcaguauacacca

SEQ ID NO: 3160432 - RNA, 19 nt, Artificial Sequence
  Description of Artificial Sequence: Synthetic oligonucleotide
aaaaguucccucugucgcc

SEQ ID NO: 3160433 - RNA, 19 nt, Artificial Sequence
  Description of Artificial Sequence: Synthetic oligonucleotide
acaaagacgcaguauacac

SEQ ID NO: 3160434 - RNA, 19 nt, Artificial Sequence
  Description of Artificial Sequence: Synthetic oligonucleotide
acauucacaggccaagacc

SEQ ID NO: 3160435 - RNA, 19 nt, Artificial Sequence
  Description of Artificial Sequence: Synthetic oligonucleotide
aaguaucacggauugaucu

SEQ ID NO: 3160436 - RNA, 19 nt, Artificial Sequence
  Description of Artificial Sequence: Synthetic oligonucleotide
ugucaaggaaaguagagca

SEQ ID NO: 3160437 - RNA, 19 nt, Artificial Sequence
  Description of Artificial Sequence: Synthetic oligonucleotide
gaaaguagagcagaaaaug

SEQ ID NO: 3160438 - RNA, 19 nt, Artificial Sequence
  Description of Artificial Sequence: Synthetic oligonucleotide
auaacuccaaacccaaggg

SEQ ID NO: 3160439 - RNA, 19 nt, Artificial Sequence
  Description of Artificial Sequence: Synthetic oligonucleotide
ugcuuuauuguuuauacau

SEQ ID NO: 3160440 - RNA, 19 nt, Artificial Sequence
  Description of Artificial Sequence: Synthetic oligonucleotide
cuuuacagaugaauaaacc

SEQ ID NO: 3160441 - RNA, 19 nt, Artificial Sequence
  Description of Artificial Sequence: Synthetic oligonucleotide
acuacugggcccaagaucg

SEQ ID NO: 3160442 - RNA, 19 nt, Artificial Sequence
  Description of Artificial Sequence: Synthetic oligonucleotide
aacuacugggcccaagauc

SEQ ID NO: 3160443 - RNA, 19 nt, Artificial Sequence
  Description of Artificial Sequence: Synthetic oligonucleotide
aucucuagcuaaaaguucc

SEQ ID NO: 3160444 - RNA, 19 nt, Artificial Sequence
  Description of Artificial Sequence: Synthetic oligonucleotide
ggauugaucucucacaggg

SEQ ID NO: 3160445 - RNA, 19 nt, Artificial Sequence
  Description of Artificial Sequence: Synthetic oligonucleotide
uauuguuuauacauuuccu

SEQ ID NO: 3160446 - RNA, 19 nt, Artificial Sequence
  Description of Artificial Sequence: Synthetic oligonucleotide
cuaaaaguucccucugucg

SEQ ID NO: 3160447 - RNA, 19 nt, Artificial Sequence
  Description of Artificial Sequence: Synthetic oligonucleotide
ucugaggucccucaccagg

SEQ ID NO: 3160448 - RNA, 19 nt, Artificial Sequence
  Description of Artificial Sequence: Synthetic oligonucleotide
guaagcagccaccacacgg

SEQ ID NO: 3160449 - RNA, 19 nt, Artificial Sequence
  Description of Artificial Sequence: Synthetic oligonucleotide
ucucaaggcagucagggga

SEQ ID NO: 3160450 - RNA, 19 nt, Artificial Sequence
  Description of Artificial Sequence: Synthetic oligonucleotide
uaagcagccaccacacggg

SEQ ID NO: 3160451 - RNA, 19 nt, Artificial Sequence
  Description of Artificial Sequence: Synthetic oligonucleotide
uacagaugaauaaaccaac

SEQ ID NO: 3160452 - RNA, 19 nt, Artificial Sequence
  Description of Artificial Sequence: Synthetic oligonucleotide
ugcacauauggacaggucu

SEQ ID NO: 3160453 - RNA, 19 nt, Artificial Sequence
  Description of Artificial Sequence: Synthetic oligonucleotide
uccccaguuagcaaacugg

SEQ ID NO: 3160454 - RNA, 19 nt, Artificial Sequence
  Description of Artificial Sequence: Synthetic oligonucleotide
cacucuuccaggaacaaag

SEQ ID NO: 3160455 - RNA, 19 nt, Artificial Sequence
  Description of Artificial Sequence: Synthetic oligonucleotide
ucaucuucaggagaaggcg

SEQ ID NO: 3160456 - RNA, 19 nt, Artificial Sequence
  Description of Artificial Sequence: Synthetic oligonucleotide
ucaaagaucccaugcaaac

SEQ ID NO: 3160457 - RNA, 19 nt, Artificial Sequence
  Description of Artificial Sequence: Synthetic oligonucleotide
gaucucaaggcagucaggg

SEQ ID NO: 3160458 - RNA, 19 nt, Artificial Sequence
  Description of Artificial Sequence: Synthetic oligonucleotide
augaauaaaccaacguccc

SEQ ID NO: 3160459 - RNA, 19 nt, Artificial Sequence
  Description of Artificial Sequence: Synthetic oligonucleotide
aacuggaaagggcugcauc

SEQ ID NO: 3160460 - RNA, 19 nt, Artificial Sequence
  Description of Artificial Sequence: Synthetic oligonucleotide
agacgcaguauacaccagc

SEQ ID NO: 3160461 - RNA, 19 nt, Artificial Sequence
  Description of Artificial Sequence: Synthetic oligonucleotide
aaggagagaucucaaggca

SEQ ID NO: 3160462 - RNA, 19 nt, Artificial Sequence
  Description of Artificial Sequence: Synthetic oligonucleotide
aagggaugcugcaaguacc

SEQ ID NO: 3160463 - RNA, 19 nt, Artificial Sequence
  Description of Artificial Sequence: Synthetic oligonucleotide
uuuauuguuuauacauuuc

SEQ ID NO: 3160464 - RNA, 19 nt, Artificial Sequence
  Description of Artificial Sequence: Synthetic oligonucleotide
acuuuacagaugaauaaac

SEQ ID NO: 3160465 - RNA, 19 nt, Artificial Sequence
  Description of Artificial Sequence: Synthetic oligonucleotide
aguaucacggauugaucuc

SEQ ID NO: 3160466 - RNA, 19 nt, Artificial Sequence
  Description of Artificial Sequence: Synthetic oligonucleotide
uacaccagcccuaacuacc

SEQ ID NO: 3160467 - RNA, 19 nt, Artificial Sequence
  Description of Artificial Sequence: Synthetic oligonucleotide
cuuccuucuguccagggcc

SEQ ID NO: 3160468 - RNA, 19 nt, Artificial Sequence
  Description of Artificial Sequence: Synthetic oligonucleotide
guauauccccacuuuacag

SEQ ID NO: 3160469 - RNA, 19 nt, Artificial Sequence
  Description of Artificial Sequence: Synthetic oligonucleotide
cugacggcgaccaaucagg

SEQ ID NO: 3160470 - RNA, 19 nt, Artificial Sequence
  Description of Artificial Sequence: Synthetic oligonucleotide
aauaaaccaacgucccuau

SEQ ID NO: 3160471 - RNA, 19 nt, Artificial Sequence
  Description of Artificial Sequence: Synthetic oligonucleotide
uaugucuuugcuccuuccc

SEQ ID NO: 3160472 - RNA, 19 nt, Artificial Sequence
  Description of Artificial Sequence: Synthetic oligonucleotide
agaaaggagagaucucaag

SEQ ID NO: 3160473 - RNA, 19 nt, Artificial Sequence
  Description of Artificial Sequence: Synthetic oligonucleotide
uuugcuccuucccacaacu

SEQ ID NO: 3160474 - RNA, 19 nt, Artificial Sequence
  Description of Artificial Sequence: Synthetic oligonucleotide
ucaaggaaaguagagcaga

SEQ ID NO: 3160475 - RNA, 19 nt, Artificial Sequence
  Description of Artificial Sequence: Synthetic oligonucleotide
uacauuuccucauuugguc

SEQ ID NO: 3160476 - RNA, 19 nt, Artificial Sequence
  Description of Artificial Sequence: Synthetic oligonucleotide
acggauugaucucucacag

SEQ ID NO: 3160477 - RNA, 19 nt, Artificial Sequence
  Description of Artificial Sequence: Synthetic oligonucleotide
ugcaaacccacugauaacu

SEQ ID NO: 3160478 - RNA, 19 nt, Artificial Sequence
  Description of Artificial Sequence: Synthetic oligonucleotide
agagcagaaaaugucaacu

SEQ ID NO: 3160479 - RNA, 19 nt, Artificial Sequence
  Description of Artificial Sequence: Synthetic oligonucleotide
cacaccaguguacagacac

SEQ ID NO: 3160480 - RNA, 19 nt, Artificial Sequence
  Description of Artificial Sequence: Synthetic oligonucleotide
aagggaaacugagaaagga

SEQ ID NO: 3160481 - RNA, 19 nt, Artificial Sequence
  Description of Artificial Sequence: Synthetic oligonucleotide
acucuugaguaguucacag

SEQ ID NO: 3160482 - RNA, 19 nt, Artificial Sequence
  Description of Artificial Sequence: Synthetic oligonucleotide
uuuauacauuuccucauuu

SEQ ID NO: 3160483 - RNA, 19 nt, Artificial Sequence
  Description of Artificial Sequence: Synthetic oligonucleotide
acuggaaagggcugcauca

SEQ ID NO: 3160484 - RNA, 19 nt, Artificial Sequence
  Description of Artificial Sequence: Synthetic oligonucleotide
acggcgaccaaucaggaga

SEQ ID NO: 3160485 - RNA, 19 nt, Artificial Sequence
  Description of Artificial Sequence: Synthetic oligonucleotide
aaaguucccucugucgccg

SEQ ID NO: 3160486 - RNA, 19 nt, Artificial Sequence
  Description of Artificial Sequence: Synthetic oligonucleotide
gaguaagggaugcugcaag

SEQ ID NO: 3160487 - RNA, 19 nt, Artificial Sequence
  Description of Artificial Sequence: Synthetic oligonucleotide
agaaguaucacggauugau

SEQ ID NO: 3160488 - RNA, 19 nt, Artificial Sequence
  Description of Artificial Sequence: Synthetic oligonucleotide
gagcagaaaaugucaacug

SEQ ID NO: 3160489 - RNA, 19 nt, Artificial Sequence
  Description of Artificial Sequence: Synthetic oligonucleotide
cuuaucucuagcuaaaagu

SEQ ID NO: 3160490 - RNA, 19 nt, Artificial Sequence
  Description of Artificial Sequence: Synthetic oligonucleotide
uaugggcccgguuugagga

SEQ ID NO: 3160491 - RNA, 19 nt, Artificial Sequence
  Description of Artificial Sequence: Synthetic oligonucleotide
ucuagcuaaaaguucccuc

SEQ ID NO: 3160492 - RNA, 19 nt, Artificial Sequence
  Description of Artificial Sequence: Synthetic oligonucleotide
uaucucuagcuaaaaguuc

SEQ ID NO: 3160493 - RNA, 19 nt, Artificial Sequence
  Description of Artificial Sequence: Synthetic oligonucleotide
cuaacuaccucuauggugu

SEQ ID NO: 3160494 - RNA, 19 nt, Artificial Sequence
  Description of Artificial Sequence: Synthetic oligonucleotide
caaagacgcaguauacacc

SEQ ID NO: 3160495 - RNA, 19 nt, Artificial Sequence
  Description of Artificial Sequence: Synthetic oligonucleotide
accauaaagcaagucagag

SEQ ID NO: 3160496 - RNA, 19 nt, Artificial Sequence
  Description of Artificial Sequence: Synthetic oligonucleotide
gaagaguaagggaugcugc

SEQ ID NO: 3160497 - RNA, 19 nt, Artificial Sequence
  Description of Artificial Sequence: Synthetic oligonucleotide
caagcuguaagcagccacc

SEQ ID NO: 3160498 - RNA, 19 nt, Artificial Sequence
  Description of Artificial Sequence: Synthetic oligonucleotide
caugcaaacccacugauaa

SEQ ID NO: 3160499 - RNA, 19 nt, Artificial Sequence
  Description of Artificial Sequence: Synthetic oligonucleotide
acagaugaauaaaccaacg

SEQ ID NO: 3160500 - RNA, 19 nt, Artificial Sequence
  Description of Artificial Sequence: Synthetic oligonucleotide
cauucacaggccaagacca

SEQ ID NO: 3160501 - RNA, 19 nt, Artificial Sequence
  Description of Artificial Sequence: Synthetic oligonucleotide
aggucuucuaggcacacca

SEQ ID NO: 3160502 - RNA, 19 nt, Artificial Sequence
  Description of Artificial Sequence: Synthetic oligonucleotide
ugaauaaaccaacgucccu

SEQ ID NO: 3160503 - RNA, 19 nt, Artificial Sequence
  Description of Artificial Sequence: Synthetic oligonucleotide
auacaccagcccuaacuac

SEQ ID NO: 3160504 - RNA, 19 nt, Artificial Sequence
  Description of Artificial Sequence: Synthetic oligonucleotide
uaaagcaagucagagcuau

SEQ ID NO: 3160505 - RNA, 19 nt, Artificial Sequence
  Description of Artificial Sequence: Synthetic oligonucleotide
aagcagccaccacacgggc

SEQ ID NO: 3160506 - RNA, 19 nt, Artificial Sequence
  Description of Artificial Sequence: Synthetic oligonucleotide
aagcaagucagagcuaugu

SEQ ID NO: 3160507 - RNA, 19 nt, Artificial Sequence
  Description of Artificial Sequence: Synthetic oligonucleotide
acugauaacuccaaaccca

SEQ ID NO: 3160508 - RNA, 19 nt, Artificial Sequence
  Description of Artificial Sequence: Synthetic oligonucleotide
agcaagucagagcuauguc

SEQ ID NO: 3160509 - RNA, 19 nt, Artificial Sequence
  Description of Artificial Sequence: Synthetic oligonucleotide
ucacaggcugcugucaagg

SEQ ID NO: 3160510 - RNA, 19 nt, Artificial Sequence
  Description of Artificial Sequence: Synthetic oligonucleotide
agguauauccccacuuuac

SEQ ID NO: 3160511 - RNA, 19 nt, Artificial Sequence
  Description of Artificial Sequence: Synthetic oligonucleotide
aacccaaggggacucuuga

SEQ ID NO: 3160512 - RNA, 19 nt, Artificial Sequence
  Description of Artificial Sequence: Synthetic oligonucleotide
ggaacaaagggaaacugag

SEQ ID NO: 3160513 - RNA, 19 nt, Artificial Sequence
  Description of Artificial Sequence: Synthetic oligonucleotide
cucuugaguaguucacagg

SEQ ID NO: 3160514 - RNA, 19 nt, Artificial Sequence
  Description of Artificial Sequence: Synthetic oligonucleotide
acaacuacugggcccaaga

SEQ ID NO: 3160515 - RNA, 19 nt, Artificial Sequence
  Description of Artificial Sequence: Synthetic oligonucleotide
ucucuagcuaaaaguuccc

SEQ ID NO: 3160516 - RNA, 19 nt, Artificial Sequence
  Description of Artificial Sequence: Synthetic oligonucleotide
ucauuugguccuugcagca

SEQ ID NO: 3160517 - RNA, 19 nt, Artificial Sequence
  Description of Artificial Sequence: Synthetic oligonucleotide
ucacggauugaucucucac

SEQ ID NO: 3160518 - RNA, 19 nt, Artificial Sequence
  Description of Artificial Sequence: Synthetic oligonucleotide
acgcaguauacaccagccc

SEQ ID NO: 3160519 - RNA, 19 nt, Artificial Sequence
  Description of Artificial Sequence: Synthetic oligonucleotide
gccauucaugcacauaugg

SEQ ID NO: 3160520 - RNA, 19 nt, Artificial Sequence
  Description of Artificial Sequence: Synthetic oligonucleotide
augggcgaggcacauucac

SEQ ID NO: 3160521 - RNA, 19 nt, Artificial Sequence
  Description of Artificial Sequence: Synthetic oligonucleotide
gucaguagaaaucagaagg

SEQ ID NO: 3160522 - RNA, 19 nt, Artificial Sequence
  Description of Artificial Sequence: Synthetic oligonucleotide
acaaaugagauguuguagg

SEQ ID NO: 3160523 - RNA, 19 nt, Artificial Sequence
  Description of Artificial Sequence: Synthetic oligonucleotide
aaugagauguuguaggggu

SEQ ID NO: 3160524 - RNA, 19 nt, Artificial Sequence
  Description of Artificial Sequence: Synthetic oligonucleotide
ucugaguugacaaaugaga

SEQ ID NO: 3160525 - RNA, 19 nt, Artificial Sequence
  Description of Artificial Sequence: Synthetic oligonucleotide
aaggauguuuacuuccugg

SEQ ID NO: 3160526 - RNA, 19 nt, Artificial Sequence
  Description of Artificial Sequence: Synthetic oligonucleotide
agaaaucagaaggaaaccc

SEQ ID NO: 3160527 - RNA, 19 nt, Artificial Sequence
  Description of Artificial Sequence: Synthetic oligonucleotide
uuggcuguugucuugagga

SEQ ID NO: 3160528 - RNA, 19 nt, Artificial Sequence
  Description of Artificial Sequence: Synthetic oligonucleotide
aacuguggagauuuggcug

SEQ ID NO: 3160529 - RNA, 19 nt, Artificial Sequence
  Description of Artificial Sequence: Synthetic oligonucleotide
uggucuauugaccagguuc

SEQ ID NO: 3160530 - RNA, 19 nt, Artificial Sequence
  Description of Artificial Sequence: Synthetic oligonucleotide
cuauugaccagguucagac

SEQ ID NO: 3160531 - RNA, 19 nt, Artificial Sequence
  Description of Artificial Sequence: Synthetic oligonucleotide
uugaggaugucucaugcgc

SEQ ID NO: 3160532 - RNA, 19 nt, Artificial Sequence
  Description of Artificial Sequence: Synthetic oligonucleotide
ucaguagaaaucagaagga

SEQ ID NO: 3160533 - RNA, 19 nt, Artificial Sequence
  Description of Artificial Sequence: Synthetic oligonucleotide
aaggaaacccucgagaacu

SEQ ID NO: 3160534 - RNA, 19 nt, Artificial Sequence
  Description of Artificial Sequence: Synthetic oligonucleotide
guagaaaucagaaggaaac

SEQ ID NO: 3160535 - RNA, 19 nt, Artificial Sequence
  Description of Artificial Sequence: Synthetic oligonucleotide
aaaugagauguuguagggg

SEQ ID NO: 3160536 - RNA, 19 nt, Artificial Sequence
  Description of Artificial Sequence: Synthetic oligonucleotide
uugacaaaugagauguugu

SEQ ID NO: 3160537 - RNA, 19 nt, Artificial Sequence
  Description of Artificial Sequence: Synthetic oligonucleotide
ugucucaugcgccagguca

SEQ ID NO: 3160538 - RNA, 19 nt, Artificial Sequence
  Description of Artificial Sequence: Synthetic oligonucleotide
aaaucagaaggaaacccuc

SEQ ID NO: 3160539 - RNA, 19 nt, Artificial Sequence
  Description of Artificial Sequence: Synthetic oligonucleotide
ucuugaggaugucucaugc

SEQ ID NO: 3160540 - RNA, 19 nt, Artificial Sequence
  Description of Artificial Sequence: Synthetic oligonucleotide
caaaugagauguuguaggg

SEQ ID NO: 3160541 - RNA, 19 nt, Artificial Sequence
  Description of Artificial Sequence: Synthetic oligonucleotide
auugaccagguucagaccu

SEQ ID NO: 3160542 - RNA, 19 nt, Artificial Sequence
  Description of Artificial Sequence: Synthetic oligonucleotide
aggauguuuacuuccuggg

SEQ ID NO: 3160543 - RNA, 19 nt, Artificial Sequence
  Description of Artificial Sequence: Synthetic oligonucleotide
gagaacuucaaugucugag

SEQ ID NO: 3160544 - RNA, 19 nt, Artificial Sequence
  Description of Artificial Sequence: Synthetic oligonucleotide
uuggcuguucucuccaugg

SEQ ID NO: 3160545 - RNA, 19 nt, Artificial Sequence
  Description of Artificial Sequence: Synthetic oligonucleotide
ucaaugucugaguugacaa

SEQ ID NO: 3160546 - RNA, 19 nt, Artificial Sequence
  Description of Artificial Sequence: Synthetic oligonucleotide
uguuguagggguuggggag

SEQ ID NO: 3160547 - RNA, 19 nt, Artificial Sequence
  Description of Artificial Sequence: Synthetic oligonucleotide
ugaguugacaaaugagaug

SEQ ID NO: 3160548 - RNA, 19 nt, Artificial Sequence
  Description of Artificial Sequence: Synthetic oligonucleotide
aacuucaaugucugaguug

SEQ ID NO: 3160549 - RNA, 19 nt, Artificial Sequence
  Description of Artificial Sequence: Synthetic oligonucleotide
gacaaaugagauguuguag

SEQ ID NO: 3160550 - RNA, 19 nt, Artificial Sequence
  Description of Artificial Sequence: Synthetic oligonucleotide
aaucagaaggaaacccucg

SEQ ID NO: 3160551 - RNA, 19 nt, Artificial Sequence
  Description of Artificial Sequence: Synthetic oligonucleotide
ugucugaguugacaaauga

SEQ ID NO: 3160552 - RNA, 19 nt, Artificial Sequence
  Description of Artificial Sequence: Synthetic oligonucleotide
aaugucugaguugacaaau

SEQ ID NO: 3160553 - RNA, 19 nt, Artificial Sequence
  Description of Artificial Sequence: Synthetic oligonucleotide
uuuggcuguugucuugagg

SEQ ID NO: 3160554 - RNA, 19 nt, Artificial Sequence
  Description of Artificial Sequence: Synthetic oligonucleotide
acuucaaugucugaguuga

SEQ ID NO: 3160555 - RNA, 19 nt, Artificial Sequence
  Description of Artificial Sequence: Synthetic oligonucleotide
cagaaggauguuuacuucc

SEQ ID NO: 3160556 - RNA, 19 nt, Artificial Sequence
  Description of Artificial Sequence: Synthetic oligonucleotide
ucgagaacuucaaugucug

SEQ ID NO: 3160557 - RNA, 19 nt, Artificial Sequence
  Description of Artificial Sequence: Synthetic oligonucleotide
ucagaaggaaacccucgag

SEQ ID NO: 3160558 - RNA, 19 nt, Artificial Sequence
  Description of Artificial Sequence: Synthetic oligonucleotide
acagaaggauguuuacuuc

SEQ ID NO: 3160559 - RNA, 19 nt, Artificial Sequence
  Description of Artificial Sequence: Synthetic oligonucleotide
agaacuucaaugucugagu

SEQ ID NO: 3160560 - RNA, 19 nt, Artificial Sequence
  Description of Artificial Sequence: Synthetic oligonucleotide
gauguuguagggguugggg

SEQ ID NO: 3160561 - RNA, 19 nt, Artificial Sequence
  Description of Artificial Sequence: Synthetic oligonucleotide
cucuccauggucuauugac

SEQ ID NO: 3160562 - RNA, 19 nt, Artificial Sequence
  Description of Artificial Sequence: Synthetic oligonucleotide
ucuccauggucuauugacc

SEQ ID NO: 3160563 - RNA, 19 nt, Artificial Sequence
  Description of Artificial Sequence: Synthetic oligonucleotide
aauggguuggcuguucucu

SEQ ID NO: 3160564 - RNA, 19 nt, Artificial Sequence
  Description of Artificial Sequence: Synthetic oligonucleotide
accagguucagaccucccc

SEQ ID NO: 3160565 - RNA, 19 nt, Artificial Sequence
  Description of Artificial Sequence: Synthetic oligonucleotide
agaaggaaacccucgagaa

SEQ ID NO: 3160566 - RNA, 19 nt, Artificial Sequence
  Description of Artificial Sequence: Synthetic oligonucleotide
gaguugacaaaugagaugu

SEQ ID NO: 3160567 - RNA, 19 nt, Artificial Sequence
  Description of Artificial Sequence: Synthetic oligonucleotide
uagaaaucagaaggaaacc

SEQ ID NO: 3160568 - RNA, 19 nt, Artificial Sequence
  Description of Artificial Sequence: Synthetic oligonucleotide
ugaggaugucucaugcgcc

SEQ ID NO: 3160569 - RNA, 19 nt, Artificial Sequence
  Description of Artificial Sequence: Synthetic oligonucleotide
uucaaugucugaguugaca

SEQ ID NO: 3160570 - RNA, 19 nt, Artificial Sequence
  Description of Artificial Sequence: Synthetic oligonucleotide
ucugugggacagaaggaug

SEQ ID NO: 3160571 - RNA, 19 nt, Artificial Sequence
  Description of Artificial Sequence: Synthetic oligonucleotide
acccucgagaacuucaaug

SEQ ID NO: 3160572 - RNA, 19 nt, Artificial Sequence
  Description of Artificial Sequence: Synthetic oligonucleotide
cuugaggaugucucaugcg

SEQ ID NO: 3160573 - RNA, 19 nt, Artificial Sequence
  Description of Artificial Sequence: Synthetic oligonucleotide
guugacaaaugagauguug

SEQ ID NO: 3160574 - RNA, 19 nt, Artificial Sequence
  Description of Artificial Sequence: Synthetic oligonucleotide
acuguggagauuuggcugu

SEQ ID NO: 3160575 - RNA, 19 nt, Artificial Sequence
  Description of Artificial Sequence: Synthetic oligonucleotide
ugacaaaugagauguugua

SEQ ID NO: 3160576 - RNA, 19 nt, Artificial Sequence
  Description of Artificial Sequence: Synthetic oligonucleotide
ugagauguuguagggguug

SEQ ID NO: 3160577 - RNA, 19 nt, Artificial Sequence
  Description of Artificial Sequence: Synthetic oligonucleotide
ucagaccuccccaacugug

SEQ ID NO: 3160578 - RNA, 19 nt, Artificial Sequence
  Description of Artificial Sequence: Synthetic oligonucleotide
ugggacagaaggauguuua

SEQ ID NO: 3160579 - RNA, 19 nt, Artificial Sequence
  Description of Artificial Sequence: Synthetic oligonucleotide
uauugaccagguucagacc

SEQ ID NO: 3160580 - RNA, 19 nt, Artificial Sequence
  Description of Artificial Sequence: Synthetic oligonucleotide
ucaugcgccaggucaguag

SEQ ID NO: 3160581 - RNA, 19 nt, Artificial Sequence
  Description of Artificial Sequence: Synthetic oligonucleotide
gaaggaaacccucgagaac

SEQ ID NO: 3160582 - RNA, 19 nt, Artificial Sequence
  Description of Artificial Sequence: Synthetic oligonucleotide
ugggacccagccaucaaug

SEQ ID NO: 3160583 - RNA, 19 nt, Artificial Sequence
  Description of Artificial Sequence: Synthetic oligonucleotide
aucagaaggaaacccucga

SEQ ID NO: 3160584 - RNA, 19 nt, Artificial Sequence
  Description of Artificial Sequence: Synthetic oligonucleotide
ggauguuuacuuccugggg

SEQ ID NO: 3160585 - RNA, 19 nt, Artificial Sequence
  Description of Artificial Sequence: Synthetic oligonucleotide
gaaggauguuuacuuccug

SEQ ID NO: 3160586 - RNA, 19 nt, Artificial Sequence
  Description of Artificial Sequence: Synthetic oligonucleotide
auguuguagggguugggga

SEQ ID NO: 3160587 - RNA, 19 nt, Artificial Sequence
  Description of Artificial Sequence: Synthetic oligonucleotide
guucagaccuccccaacug

SEQ ID NO: 3160588 - RNA, 19 nt, Artificial Sequence
  Description of Artificial Sequence: Synthetic oligonucleotide
aguagaaaucagaaggaaa

SEQ ID NO: 3160589 - RNA, 19 nt, Artificial Sequence
  Description of Artificial Sequence: Synthetic oligonucleotide
uccauggucuauugaccag

SEQ ID NO: 3160590 - RNA, 19 nt, Artificial Sequence
  Description of Artificial Sequence: Synthetic oligonucleotide
ucaauggguuggcuguucu

SEQ ID NO: 3160591 - RNA, 19 nt, Artificial Sequence
  Description of Artificial Sequence: Synthetic oligonucleotide
gucugaguugacaaaugag

SEQ ID NO: 3160592 - RNA, 19 nt, Artificial Sequence
  Description of Artificial Sequence: Synthetic oligonucleotide
guugucuugaggaugucuc

SEQ ID NO: 3160593 - RNA, 19 nt, Artificial Sequence
  Description of Artificial Sequence: Synthetic oligonucleotide
uugucuugaggaugucuca

SEQ ID NO: 3160594 - RNA, 19 nt, Artificial Sequence
  Description of Artificial Sequence: Synthetic oligonucleotide
gacagaaggauguuuacuu

SEQ ID NO: 3160595 - RNA, 19 nt, Artificial Sequence
  Description of Artificial Sequence: Synthetic oligonucleotide
ggucaguagaaaucagaag

SEQ ID NO: 3160596 - RNA, 19 nt, Artificial Sequence
  Description of Artificial Sequence: Synthetic oligonucleotide
ucuauugaccagguucaga

SEQ ID NO: 3160597 - RNA, 19 nt, Artificial Sequence
  Description of Artificial Sequence: Synthetic oligonucleotide
agauuuggcuguugucuug

SEQ ID NO: 3160598 - RNA, 19 nt, Artificial Sequence
  Description of Artificial Sequence: Synthetic oligonucleotide
cagaccuccccaacugugg

SEQ ID NO: 3160599 - RNA, 19 nt, Artificial Sequence
  Description of Artificial Sequence: Synthetic oligonucleotide
gaaaucagaaggaaacccu

SEQ ID NO: 3160600 - RNA, 19 nt, Artificial Sequence
  Description of Artificial Sequence: Synthetic oligonucleotide
gagauguuguagggguugg

SEQ ID NO: 3160601 - RNA, 19 nt, Artificial Sequence
  Description of Artificial Sequence: Synthetic oligonucleotide
uguugucuugaggaugucu

SEQ ID NO: 3160602 - RNA, 19 nt, Artificial Sequence
  Description of Artificial Sequence: Synthetic oligonucleotide
uucugugggacagaaggau

SEQ ID NO: 3160603 - RNA, 19 nt, Artificial Sequence
  Description of Artificial Sequence: Synthetic oligonucleotide
uucucuccauggucuauug

SEQ ID NO: 3160604 - RNA, 19 nt, Artificial Sequence
  Description of Artificial Sequence: Synthetic oligonucleotide
gaaacccucgagaacuuca

SEQ ID NO: 3160605 - RNA, 19 nt, Artificial Sequence
  Description of Artificial Sequence: Synthetic oligonucleotide
cagaaggaaacccucgaga

SEQ ID NO: 3160606 - RNA, 19 nt, Artificial Sequence
  Description of Artificial Sequence: Synthetic oligonucleotide
uucagaccuccccaacugu

SEQ ID NO: 3160607 - RNA, 19 nt, Artificial Sequence
  Description of Artificial Sequence: Synthetic oligonucleotide
ccaacuguggagauuuggc

SEQ ID NO: 3160608 - RNA, 19 nt, Artificial Sequence
  Description of Artificial Sequence: Synthetic oligonucleotide
auggguuggcuguucucuc

SEQ ID NO: 3160609 - RNA, 19 nt, Artificial Sequence
  Description of Artificial Sequence: Synthetic oligonucleotide
agguucagaccuccccaac

SEQ ID NO: 3160610 - RNA, 19 nt, Artificial Sequence
  Description of Artificial Sequence: Synthetic oligonucleotide
aggucaguagaaaucagaa

SEQ ID NO: 3160611 - RNA, 19 nt, Artificial Sequence
  Description of Artificial Sequence: Synthetic oligonucleotide
gaggaugucucaugcgcca

SEQ ID NO: 3160612 - RNA, 19 nt, Artificial Sequence
  Description of Artificial Sequence: Synthetic oligonucleotide
uggguuggcuguucucucc

SEQ ID NO: 3160613 - RNA, 19 nt, Artificial Sequence
  Description of Artificial Sequence: Synthetic oligonucleotide
ucucuccauggucuauuga

SEQ ID NO: 3160614 - RNA, 19 nt, Artificial Sequence
  Description of Artificial Sequence: Synthetic oligonucleotide
cuccauggucuauugacca

SEQ ID NO: 3160615 - RNA, 19 nt, Artificial Sequence
  Description of Artificial Sequence: Synthetic oligonucleotide
uugggacccagccaucaau

SEQ ID NO: 3160616 - RNA, 19 nt, Artificial Sequence
  Description of Artificial Sequence: Synthetic oligonucleotide
gucuugaggaugucucaug

SEQ ID NO: 3160617 - RNA, 19 nt, Artificial Sequence
  Description of Artificial Sequence: Synthetic oligonucleotide
uggagauuuggcuguuguc

SEQ ID NO: 3160618 - RNA, 19 nt, Artificial Sequence
  Description of Artificial Sequence: Synthetic oligonucleotide
agaaggauguuuacuuccu

SEQ ID NO: 3160619 - RNA, 19 nt, Artificial Sequence
  Description of Artificial Sequence: Synthetic oligonucleotide
ggacccagccaucaauggg

SEQ ID NO: 3160620 - RNA, 19 nt, Artificial Sequence
  Description of Artificial Sequence: Synthetic oligonucleotide
caggucaguagaaaucaga

SEQ ID NO: 3160621 - RNA, 19 nt, Artificial Sequence
  Description of Artificial Sequence: Synthetic oligonucleotide
gaaacuuucgguuccaaug

SEQ ID NO: 3160622 - RNA, 19 nt, Artificial Sequence
  Description of Artificial Sequence: Synthetic oligonucleotide
aguaugccaggguugaucc

SEQ ID NO: 3160623 - RNA, 19 nt, Artificial Sequence
  Description of Artificial Sequence: Synthetic oligonucleotide
aaaacuuggccucauggca

SEQ ID NO: 3160624 - RNA, 19 nt, Artificial Sequence
  Description of Artificial Sequence: Synthetic oligonucleotide
augacuuccuugcaguugc

SEQ ID NO: 3160625 - RNA, 19 nt, Artificial Sequence
  Description of Artificial Sequence: Synthetic oligonucleotide
acaauaugcucguugcacc

SEQ ID NO: 3160626 - RNA, 19 nt, Artificial Sequence
  Description of Artificial Sequence: Synthetic oligonucleotide
aacugaucccuccagaugu

SEQ ID NO: 3160627 - RNA, 19 nt, Artificial Sequence
  Description of Artificial Sequence: Synthetic oligonucleotide
accacaauaugcucguugc

SEQ ID NO: 3160628 - RNA, 19 nt, Artificial Sequence
  Description of Artificial Sequence: Synthetic oligonucleotide
caagacacacagaagaacc

SEQ ID NO: 3160629 - RNA, 19 nt, Artificial Sequence
  Description of Artificial Sequence: Synthetic oligonucleotide
uggcaagacacacagaaga

SEQ ID NO: 3160630 - RNA, 19 nt, Artificial Sequence
  Description of Artificial Sequence: Synthetic oligonucleotide
ugauccugguaacugaucc

SEQ ID NO: 3160631 - RNA, 19 nt, Artificial Sequence
  Description of Artificial Sequence: Synthetic oligonucleotide
aaacuuucgguuccaauga

SEQ ID NO: 3160632 - RNA, 19 nt, Artificial Sequence
  Description of Artificial Sequence: Synthetic oligonucleotide
acuuccuugcaguugcugc

SEQ ID NO: 3160633 - RNA, 19 nt, Artificial Sequence
  Description of Artificial Sequence: Synthetic oligonucleotide
uccuaccacaauaugcucg

SEQ ID NO: 3160634 - RNA, 19 nt, Artificial Sequence
  Description of Artificial Sequence: Synthetic oligonucleotide
uugcauuucacacacugcu

SEQ ID NO: 3160635 - RNA, 19 nt, Artificial Sequence
  Description of Artificial Sequence: Synthetic oligonucleotide
ucuccuaccacaauaugcu

SEQ ID NO: 3160636 - RNA, 19 nt, Artificial Sequence
  Description of Artificial Sequence: Synthetic oligonucleotide
uuuaugaccagacgucacc

SEQ ID NO: 3160637 - RNA, 19 nt, Artificial Sequence
  Description of Artificial Sequence: Synthetic oligonucleotide
ucaucucuagggaagaaac

SEQ ID NO: 3160638 - RNA, 19 nt, Artificial Sequence
  Description of Artificial Sequence: Synthetic oligonucleotide
gaaaacuuggccucauggc

SEQ ID NO: 3160639 - RNA, 19 nt, Artificial Sequence
  Description of Artificial Sequence: Synthetic oligonucleotide
aaagcacucaguaugccag

SEQ ID NO: 3160640 - RNA, 19 nt, Artificial Sequence
  Description of Artificial Sequence: Synthetic oligonucleotide
guuccaaugacuuccuugc

SEQ ID NO: 3160641 - RNA, 19 nt, Artificial Sequence
  Description of Artificial Sequence: Synthetic oligonucleotide
ucuagggaagaaacuuucg

SEQ ID NO: 3160642 - RNA, 19 nt, Artificial Sequence
  Description of Artificial Sequence: Synthetic oligonucleotide
gaugugaugggcugguugc

SEQ ID NO: 3160643 - RNA, 19 nt, Artificial Sequence
  Description of Artificial Sequence: Synthetic oligonucleotide
aucuccuaccacaauaugc

SEQ ID NO: 3160644 - RNA, 19 nt, Artificial Sequence
  Description of Artificial Sequence: Synthetic oligonucleotide
aagacacacagaagaaccc

SEQ ID NO: 3160645 - RNA, 19 nt, Artificial Sequence
  Description of Artificial Sequence: Synthetic oligonucleotide
cuagggaagaaacuuucgg

SEQ ID NO: 3160646 - RNA, 19 nt, Artificial Sequence
  Description of Artificial Sequence: Synthetic oligonucleotide
agaagaaccccucaucucu

SEQ ID NO: 3160647 - RNA, 19 nt, Artificial Sequence
  Description of Artificial Sequence: Synthetic oligonucleotide
uccaaugacuuccuugcag

SEQ ID NO: 3160648 - RNA, 19 nt, Artificial Sequence
  Description of Artificial Sequence: Synthetic oligonucleotide
cucauggcaagacacacag

SEQ ID NO: 3160649 - RNA, 19 nt, Artificial Sequence
  Description of Artificial Sequence: Synthetic oligonucleotide
acccuuguacuccacauuc

SEQ ID NO: 3160650 - RNA, 19 nt, Artificial Sequence
  Description of Artificial Sequence: Synthetic oligonucleotide
uucgguuccaaugacuucc

SEQ ID NO: 3160651 - RNA, 19 nt, Artificial Sequence
  Description of Artificial Sequence: Synthetic oligonucleotide
gaaccccucaucucuaggg

SEQ ID NO: 3160652 - RNA, 19 nt, Artificial Sequence
  Description of Artificial Sequence: Synthetic oligonucleotide
aacuuucgguuccaaugac

SEQ ID NO: 3160653 - RNA, 19 nt, Artificial Sequence
  Description of Artificial Sequence: Synthetic oligonucleotide
acagaagaaccccucaucu

SEQ ID NO: 3160654 - RNA, 19 nt, Artificial Sequence
  Description of Artificial Sequence: Synthetic oligonucleotide
auucugaucuccuaccaca

SEQ ID NO: 3160655 - RNA, 19 nt, Artificial Sequence
  Description of Artificial Sequence: Synthetic oligonucleotide
ugcuuggaaaacuuggccu

SEQ ID NO: 3160656 - RNA, 19 nt, Artificial Sequence
  Description of Artificial Sequence: Synthetic oligonucleotide
cacugcuuggaaaacuugg

SEQ ID NO: 3160657 - RNA, 19 nt, Artificial Sequence
  Description of Artificial Sequence: Synthetic oligonucleotide
ggaaaacuuggccucaugg

SEQ ID NO: 3160658 - RNA, 19 nt, Artificial Sequence
  Description of Artificial Sequence: Synthetic oligonucleotide
uagggaagaaacuuucggu

SEQ ID NO: 3160659 - RNA, 19 nt, Artificial Sequence
  Description of Artificial Sequence: Synthetic oligonucleotide
agacacacagaagaacccc

SEQ ID NO: 3160660 - RNA, 19 nt, Artificial Sequence
  Description of Artificial Sequence: Synthetic oligonucleotide
uaccacaauaugcucguug

SEQ ID NO: 3160661 - RNA, 19 nt, Artificial Sequence
  Description of Artificial Sequence: Synthetic oligonucleotide
uugcaguugcugcagacga

SEQ ID NO: 3160662 - RNA, 19 nt, Artificial Sequence
  Description of Artificial Sequence: Synthetic oligonucleotide
aaugacuuccuugcaguug

SEQ ID NO: 3160663 - RNA, 19 nt, Artificial Sequence
  Description of Artificial Sequence: Synthetic oligonucleotide
acugcuuggaaaacuuggc

SEQ ID NO: 3160664 - RNA, 19 nt, Artificial Sequence
  Description of Artificial Sequence: Synthetic oligonucleotide
uuuuaugaccagacgucac

SEQ ID NO: 3160665 - RNA, 19 nt, Artificial Sequence
  Description of Artificial Sequence: Synthetic oligonucleotide
uaacugaucccuccagaug

SEQ ID NO: 3160666 - RNA, 19 nt, Artificial Sequence
  Description of Artificial Sequence: Synthetic oligonucleotide
cauggcaagacacacagaa

SEQ ID NO: 3160667 - RNA, 19 nt, Artificial Sequence
  Description of Artificial Sequence: Synthetic oligonucleotide
cauuucacacacugcuugg

SEQ ID NO: 3160668 - RNA, 19 nt, Artificial Sequence
  Description of Artificial Sequence: Synthetic oligonucleotide
uuguacuccacauucugau

SEQ ID NO: 3160669 - RNA, 19 nt, Artificial Sequence
  Description of Artificial Sequence: Synthetic oligonucleotide
ugaucuccuaccacaauau

SEQ ID NO: 3160670 - RNA, 19 nt, Artificial Sequence
  Description of Artificial Sequence: Synthetic oligonucleotide
ucacacacugcuuggaaaa

SEQ ID NO: 3160671 - RNA, 19 nt, Artificial Sequence
  Description of Artificial Sequence: Synthetic oligonucleotide
cugguugcauuucacacac

SEQ ID NO: 3160672 - RNA, 19 nt, Artificial Sequence
  Description of Artificial Sequence: Synthetic oligonucleotide
cacauucugaucuccuacc

SEQ ID NO: 3160673 - RNA, 19 nt, Artificial Sequence
  Description of Artificial Sequence: Synthetic oligonucleotide
caauaugcucguugcaccc

SEQ ID NO: 3160674 - RNA, 19 nt, Artificial Sequence
  Description of Artificial Sequence: Synthetic oligonucleotide
agaugugaugggcugguug

SEQ ID NO: 3160675 - RNA, 19 nt, Artificial Sequence
  Description of Artificial Sequence: Synthetic oligonucleotide
aagcacucaguaugccagg

SEQ ID NO: 3160676 - RNA, 19 nt, Artificial Sequence
  Description of Artificial Sequence: Synthetic oligonucleotide
gguugcauuucacacacug

SEQ ID NO: 3160677 - RNA, 19 nt, Artificial Sequence
  Description of Artificial Sequence: Synthetic oligonucleotide
aacuuggccucauggcaag

SEQ ID NO: 3160678 - RNA, 19 nt, Artificial Sequence
  Description of Artificial Sequence: Synthetic oligonucleotide
uuaugaccagacgucaccc

SEQ ID NO: 3160679 - RNA, 19 nt, Artificial Sequence
  Description of Artificial Sequence: Synthetic oligonucleotide
uaugccaggguugauccug

SEQ ID NO: 3160680 - RNA, 19 nt, Artificial Sequence
  Description of Artificial Sequence: Synthetic oligonucleotide
agggaagaaacuuucgguu

SEQ ID NO: 3160681 - RNA, 19 nt, Artificial Sequence
  Description of Artificial Sequence: Synthetic oligonucleotide
aucccuccagaugugaugg

SEQ ID NO: 3160682 - RNA, 19 nt, Artificial Sequence
  Description of Artificial Sequence: Synthetic oligonucleotide
guugcugcagacgaagcag

SEQ ID NO: 3160683 - RNA, 19 nt, Artificial Sequence
  Description of Artificial Sequence: Synthetic oligonucleotide
aagaaccccucaucucuag

SEQ ID NO: 3160684 - RNA, 19 nt, Artificial Sequence
  Description of Artificial Sequence: Synthetic oligonucleotide
cugcuuggaaaacuuggcc

SEQ ID NO: 3160685 - RNA, 19 nt, Artificial Sequence
  Description of Artificial Sequence: Synthetic oligonucleotide
cacaauaugcucguugcac

SEQ ID NO: 3160686 - RNA, 19 nt, Artificial Sequence
  Description of Artificial Sequence: Synthetic oligonucleotide
gauccugguaacugauccc

SEQ ID NO: 3160687 - RNA, 19 nt, Artificial Sequence
  Description of Artificial Sequence: Synthetic oligonucleotide
ugguaacugaucccuccag

SEQ ID NO: 3160688 - RNA, 19 nt, Artificial Sequence
  Description of Artificial Sequence: Synthetic oligonucleotide
ggaagaaacuuucgguucc

SEQ ID NO: 3160689 - RNA, 19 nt, Artificial Sequence
  Description of Artificial Sequence: Synthetic oligonucleotide
cucuagggaagaaacuuuc

SEQ ID NO: 3160690 - RNA, 19 nt, Artificial Sequence
  Description of Artificial Sequence: Synthetic oligonucleotide
gaucccuccagaugugaug

SEQ ID NO: 3160691 - RNA, 19 nt, Artificial Sequence
  Description of Artificial Sequence: Synthetic oligonucleotide
uuucacacacugcuuggaa

SEQ ID NO: 3160692 - RNA, 19 nt, Artificial Sequence
  Description of Artificial Sequence: Synthetic oligonucleotide
aguugcugcagacgaagca

SEQ ID NO: 3160693 - RNA, 19 nt, Artificial Sequence
  Description of Artificial Sequence: Synthetic oligonucleotide
aaccccucaucucuaggga

SEQ ID NO: 3160694 - RNA, 19 nt, Artificial Sequence
  Description of Artificial Sequence: Synthetic oligonucleotide
uucacacacugcuuggaaa

SEQ ID NO: 3160695 - RNA, 19 nt, Artificial Sequence
  Description of Artificial Sequence: Synthetic oligonucleotide
gguuccaaugacuuccuug

SEQ ID NO: 3160696 - RNA, 19 nt, Artificial Sequence
  Description of Artificial Sequence: Synthetic oligonucleotide
uggccucauggcaagacac

SEQ ID NO: 3160697 - RNA, 19 nt, Artificial Sequence
  Description of Artificial Sequence: Synthetic oligonucleotide
ucucuagggaagaaacuuu

SEQ ID NO: 3160698 - RNA, 19 nt, Artificial Sequence
  Description of Artificial Sequence: Synthetic oligonucleotide
cuugcaguugcugcagacg

SEQ ID NO: 3160699 - RNA, 19 nt, Artificial Sequence
  Description of Artificial Sequence: Synthetic oligonucleotide
ugcacccuuugcauuucgg

SEQ ID NO: 3160700 - RNA, 19 nt, Artificial Sequence
  Description of Artificial Sequence: Synthetic oligonucleotide
acauucugaucuccuacca

SEQ ID NO: 3160701 - RNA, 19 nt, Artificial Sequence
  Description of Artificial Sequence: Synthetic oligonucleotide
ugaccagacgucacccuug

SEQ ID NO: 3160702 - RNA, 19 nt, Artificial Sequence
  Description of Artificial Sequence: Synthetic oligonucleotide
uucugaucuccuaccacaa

SEQ ID NO: 3160703 - RNA, 19 nt, Artificial Sequence
  Description of Artificial Sequence: Synthetic oligonucleotide
gaucuccuaccacaauaug

SEQ ID NO: 3160704 - RNA, 19 nt, Artificial Sequence
  Description of Artificial Sequence: Synthetic oligonucleotide
gcauuucacacacugcuug

SEQ ID NO: 3160705 - RNA, 19 nt, Artificial Sequence
  Description of Artificial Sequence: Synthetic oligonucleotide
agaaccccucaucucuagg

SEQ ID NO: 3160706 - RNA, 19 nt, Artificial Sequence
  Description of Artificial Sequence: Synthetic oligonucleotide
acuccacauucugaucucc

SEQ ID NO: 3160707 - RNA, 19 nt, Artificial Sequence
  Description of Artificial Sequence: Synthetic oligonucleotide
uuggccucauggcaagaca

SEQ ID NO: 3160708 - RNA, 19 nt, Artificial Sequence
  Description of Artificial Sequence: Synthetic oligonucleotide
uccagaugugaugggcugg

SEQ ID NO: 3160709 - RNA, 19 nt, Artificial Sequence
  Description of Artificial Sequence: Synthetic oligonucleotide
agaaacuuucgguuccaau

SEQ ID NO: 3160710 - RNA, 19 nt, Artificial Sequence
  Description of Artificial Sequence: Synthetic oligonucleotide
aauaugcucguugcacccu

SEQ ID NO: 3160711 - RNA, 19 nt, Artificial Sequence
  Description of Artificial Sequence: Synthetic oligonucleotide
aucucuagggaagaaacuu

SEQ ID NO: 3160712 - RNA, 19 nt, Artificial Sequence
  Description of Artificial Sequence: Synthetic oligonucleotide
agacgucacccuuguacuc

SEQ ID NO: 3160713 - RNA, 19 nt, Artificial Sequence
  Description of Artificial Sequence: Synthetic oligonucleotide
cauucugaucuccuaccac

SEQ ID NO: 3160714 - RNA, 19 nt, Artificial Sequence
  Description of Artificial Sequence: Synthetic oligonucleotide
gacgucacccuuguacucc

SEQ ID NO: 3160715 - RNA, 19 nt, Artificial Sequence
  Description of Artificial Sequence: Synthetic oligonucleotide
aaacuuggccucauggcaa

SEQ ID NO: 3160716 - RNA, 19 nt, Artificial Sequence
  Description of Artificial Sequence: Synthetic oligonucleotide
ugcucguugcacccuuugc

SEQ ID NO: 3160717 - RNA, 19 nt, Artificial Sequence
  Description of Artificial Sequence: Synthetic oligonucleotide
uguacuccacauucugauc

SEQ ID NO: 3160718 - RNA, 19 nt, Artificial Sequence
  Description of Artificial Sequence: Synthetic oligonucleotide
guacuccacauucugaucu

SEQ ID NO: 3160719 - RNA, 19 nt, Artificial Sequence
  Description of Artificial Sequence: Synthetic oligonucleotide
uggaaaacuuggccucaug

SEQ ID NO: 3160720 - RNA, 19 nt, Artificial Sequence
  Description of Artificial Sequence: Synthetic oligonucleotide
cacagaagaaccccucauc

SEQ ID NO: 3160721 - RNA, 19 nt, Artificial Sequence
  Description of Artificial Sequence: Synthetic oligonucleotide
acuugaauauucuucaggc

SEQ ID NO: 3160722 - RNA, 19 nt, Artificial Sequence
  Description of Artificial Sequence: Synthetic oligonucleotide
uuaagugcuguccagauug

SEQ ID NO: 3160723 - RNA, 19 nt, Artificial Sequence
  Description of Artificial Sequence: Synthetic oligonucleotide
uaaugcauaucccugagcc

SEQ ID NO: 3160724 - RNA, 19 nt, Artificial Sequence
  Description of Artificial Sequence: Synthetic oligonucleotide
aacaccagugcucacacuc

SEQ ID NO: 3160725 - RNA, 19 nt, Artificial Sequence
  Description of Artificial Sequence: Synthetic oligonucleotide
uuugaguucaacuggaagu

SEQ ID NO: 3160726 - RNA, 19 nt, Artificial Sequence
  Description of Artificial Sequence: Synthetic oligonucleotide
auaaccgccucccagacgg

SEQ ID NO: 3160727 - RNA, 19 nt, Artificial Sequence
  Description of Artificial Sequence: Synthetic oligonucleotide
ugugcucuggggaugaugg

SEQ ID NO: 3160728 - RNA, 19 nt, Artificial Sequence
  Description of Artificial Sequence: Synthetic oligonucleotide
uuuuccuccacuuugucca

SEQ ID NO: 3160729 - RNA, 19 nt, Artificial Sequence
  Description of Artificial Sequence: Synthetic oligonucleotide
ugaugguagaauuuccagg

SEQ ID NO: 3160730 - RNA, 19 nt, Artificial Sequence
  Description of Artificial Sequence: Synthetic oligonucleotide
ucuucucugaaccugguca

SEQ ID NO: 3160731 - RNA, 19 nt, Artificial Sequence
  Description of Artificial Sequence: Synthetic oligonucleotide
ucugaguuccaaauucacg

SEQ ID NO: 3160732 - RNA, 19 nt, Artificial Sequence
  Description of Artificial Sequence: Synthetic oligonucleotide
uaccuugucgcuuaguucc

SEQ ID NO: 3160733 - RNA, 19 nt, Artificial Sequence
  Description of Artificial Sequence: Synthetic oligonucleotide
aaacucuggccccagggac

SEQ ID NO: 3160734 - RNA, 19 nt, Artificial Sequence
  Description of Artificial Sequence: Synthetic oligonucleotide
gacuugaauauucuucagg

SEQ ID NO: 3160735 - RNA, 19 nt, Artificial Sequence
  Description of Artificial Sequence: Synthetic oligonucleotide
ucccaaaauagccuggugc

SEQ ID NO: 3160736 - RNA, 19 nt, Artificial Sequence
  Description of Artificial Sequence: Synthetic oligonucleotide
ucugucuagaacaccagug

SEQ ID NO: 3160737 - RNA, 19 nt, Artificial Sequence
  Description of Artificial Sequence: Synthetic oligonucleotide
ugaggugucgcuuaucaca

SEQ ID NO: 3160738 - RNA, 19 nt, Artificial Sequence
  Description of Artificial Sequence: Synthetic oligonucleotide
uuggcaaugaaaaccccag

SEQ ID NO: 3160739 - RNA, 19 nt, Artificial Sequence
  Description of Artificial Sequence: Synthetic oligonucleotide
ugucgcuuaucacagacac

SEQ ID NO: 3160740 - RNA, 19 nt, Artificial Sequence
  Description of Artificial Sequence: Synthetic oligonucleotide
ugccuuucuccaaagagcc

SEQ ID NO: 3160741 - RNA, 19 nt, Artificial Sequence
  Description of Artificial Sequence: Synthetic oligonucleotide
caaccauucaggcugacag

SEQ ID NO: 3160742 - RNA, 19 nt, Artificial Sequence
  Description of Artificial Sequence: Synthetic oligonucleotide
uguugucucgauaguaucc

SEQ ID NO: 3160743 - RNA, 19 nt, Artificial Sequence
  Description of Artificial Sequence: Synthetic oligonucleotide
  modified_base (13)..(13): a, c, u, g, unknown or other
cuuuguccaaacnccaccg

SEQ ID NO: 3160744 - RNA, 19 nt, Artificial Sequence
  Description of Artificial Sequence: Synthetic oligonucleotide
uaaaccugugcucugggga

SEQ ID NO: 3160745 - RNA, 19 nt, Artificial Sequence
  Description of Artificial Sequence: Synthetic oligonucleotide
aggacgugcuguuuaaugg

SEQ ID NO: 3160746 - RNA, 19 nt, Artificial Sequence
  Description of Artificial Sequence: Synthetic oligonucleotide
caaauugccuuccugggcc

SEQ ID NO: 3160747 - RNA, 19 nt, Artificial Sequence
  Description of Artificial Sequence: Synthetic oligonucleotide
ugcuuugauggcauugagg

SEQ ID NO: 3160748 - RNA, 19 nt, Artificial Sequence
  Description of Artificial Sequence: Synthetic oligonucleotide
ugucucgauaguauccagg

SEQ ID NO: 3160749 - RNA, 19 nt, Artificial Sequence
  Description of Artificial Sequence: Synthetic oligonucleotide
gagacugccacugagugcc

SEQ ID NO: 3160750 - RNA, 19 nt, Artificial Sequence
  Description of Artificial Sequence: Synthetic oligonucleotide
gucacaagugcccaacugg

SEQ ID NO: 3160751 - RNA, 19 nt, Artificial Sequence
  Description of Artificial Sequence: Synthetic oligonucleotide
aagagggucaucacacagc

SEQ ID NO: 3160752 - RNA, 19 nt, Artificial Sequence
  Description of Artificial Sequence: Synthetic oligonucleotide
cucggguguuguuagaugg

SEQ ID NO: 3160753 - RNA, 19 nt, Artificial Sequence
  Description of Artificial Sequence: Synthetic oligonucleotide
uuaauggagacugccacug

SEQ ID NO: 3160754 - RNA, 19 nt, Artificial Sequence
  Description of Artificial Sequence: Synthetic oligonucleotide
gagaugguagaacggaagc

SEQ ID NO: 3160755 - RNA, 19 nt, Artificial Sequence
  Description of Artificial Sequence: Synthetic oligonucleotide
guuuaauggagacugccac

SEQ ID NO: 3160756 - RNA, 19 nt, Artificial Sequence
  Description of Artificial Sequence: Synthetic oligonucleotide
uugaggauguucucauagg

SEQ ID NO: 3160757 - RNA, 19 nt, Artificial Sequence
  Description of Artificial Sequence: Synthetic oligonucleotide
aauguguagugacccucgg

SEQ ID NO: 3160758 - RNA, 19 nt, Artificial Sequence
  Description of Artificial Sequence: Synthetic oligonucleotide
uuggcaaagucauucuuca

SEQ ID NO: 3160759 - RNA, 19 nt, Artificial Sequence
  Description of Artificial Sequence: Synthetic oligonucleotide
agaugguagaacggaagcc

SEQ ID NO: 3160760 - RNA, 19 nt, Artificial Sequence
  Description of Artificial Sequence: Synthetic oligonucleotide
uuggcugcaucucugcugc

SEQ ID NO: 3160761 - RNA, 19 nt, Artificial Sequence
  Description of Artificial Sequence: Synthetic oligonucleotide
ucuagaacaccagugcuca

SEQ ID NO: 3160762 - RNA, 19 nt, Artificial Sequence
  Description of Artificial Sequence: Synthetic oligonucleotide
ugcaguaagccauccaugu

SEQ ID NO: 3160763 - RNA, 19 nt, Artificial Sequence
  Description of Artificial Sequence: Synthetic oligonucleotide
aguuaaugcauaucccuga

SEQ ID NO: 3160764 - RNA, 19 nt, Artificial Sequence
  Description of Artificial Sequence: Synthetic oligonucleotide
agcuguguugugcugacag

SEQ ID NO: 3160765 - RNA, 19 nt, Artificial Sequence
  Description of Artificial Sequence: Synthetic oligonucleotide
gcuuuuguugucucgauag

SEQ ID NO: 3160766 - RNA, 19 nt, Artificial Sequence
  Description of Artificial Sequence: Synthetic oligonucleotide
aggguuagugcucaggaca

SEQ ID NO: 3160767 - RNA, 19 nt, Artificial Sequence
  Description of Artificial Sequence: Synthetic oligonucleotide
uuuuggacccaugaguuga

SEQ ID NO: 3160768 - RNA, 19 nt, Artificial Sequence
  Description of Artificial Sequence: Synthetic oligonucleotide
aauaaccgccucccagacg

SEQ ID NO: 3160769 - RNA, 19 nt, Artificial Sequence
  Description of Artificial Sequence: Synthetic oligonucleotide
uuuaauggagacugccacu

SEQ ID NO: 3160770 - RNA, 19 nt, Artificial Sequence
  Description of Artificial Sequence: Synthetic oligonucleotide
cuggcuuuuguccaucugc

SEQ ID NO: 3160771 - RNA, 19 nt, Artificial Sequence
  Description of Artificial Sequence: Synthetic oligonucleotide
uugcuugcagaucuggaga

SEQ ID NO: 3160772 - RNA, 19 nt, Artificial Sequence
  Description of Artificial Sequence: Synthetic oligonucleotide
caacccucgaaauaaccgc

SEQ ID NO: 3160773 - RNA, 19 nt, Artificial Sequence
  Description of Artificial Sequence: Synthetic oligonucleotide
gucucgauaguauccaggc

SEQ ID NO: 3160774 - RNA, 19 nt, Artificial Sequence
  Description of Artificial Sequence: Synthetic oligonucleotide
gauggcguuuccauagugg

SEQ ID NO: 3160775 - RNA, 19 nt, Artificial Sequence
  Description of Artificial Sequence: Synthetic oligonucleotide
ucucgauaguauccaggcg

SEQ ID NO: 3160776 - RNA, 19 nt, Artificial Sequence
  Description of Artificial Sequence: Synthetic oligonucleotide
uuaaugcauaucccugagc

SEQ ID NO: 3160777 - RNA, 19 nt, Artificial Sequence
  Description of Artificial Sequence: Synthetic oligonucleotide
cacccuacaggauccaugg

SEQ ID NO: 3160778 - RNA, 19 nt, Artificial Sequence
  Description of Artificial Sequence: Synthetic oligonucleotide
aaagagccaccugagcagg

SEQ ID NO: 3160779 - RNA, 19 nt, Artificial Sequence
  Description of Artificial Sequence: Synthetic oligonucleotide
aaaaucgggcugcugcugu

SEQ ID NO: 3160780 - RNA, 19 nt, Artificial Sequence
  Description of Artificial Sequence: Synthetic oligonucleotide
cugucuagaacaccagugc

SEQ ID NO: 3160781 - RNA, 19 nt, Artificial Sequence
  Description of Artificial Sequence: Synthetic oligonucleotide
agggacacagaauuggcca

SEQ ID NO: 3160782 - RNA, 19 nt, Artificial Sequence
  Description of Artificial Sequence: Synthetic oligonucleotide
guuaaugcauaucccugag

SEQ ID NO: 3160783 - RNA, 19 nt, Artificial Sequence
  Description of Artificial Sequence: Synthetic oligonucleotide
uuugaauguccauugcaau

SEQ ID NO: 3160784 - RNA, 19 nt, Artificial Sequence
  Description of Artificial Sequence: Synthetic oligonucleotide
ugcuguguaggguuagugc

SEQ ID NO: 3160785 - RNA, 19 nt, Artificial Sequence
  Description of Artificial Sequence: Synthetic oligonucleotide
ggccaagucauucaagagg

SEQ ID NO: 3160786 - RNA, 19 nt, Artificial Sequence
  Description of Artificial Sequence: Synthetic oligonucleotide
uuugcaggcacaccucaca

SEQ ID NO: 3160787 - RNA, 19 nt, Artificial Sequence
  Description of Artificial Sequence: Synthetic oligonucleotide
agugcucacaguguucccc

SEQ ID NO: 3160788 - RNA, 19 nt, Artificial Sequence
  Description of Artificial Sequence: Synthetic oligonucleotide
ucaggacaaccauucaggc

SEQ ID NO: 3160789 - RNA, 19 nt, Artificial Sequence
  Description of Artificial Sequence: Synthetic oligonucleotide
ucaaucgcauucuucugca

SEQ ID NO: 3160790 - RNA, 19 nt, Artificial Sequence
  Description of Artificial Sequence: Synthetic oligonucleotide
ucuguggcuucggugaugg

SEQ ID NO: 3160791 - RNA, 19 nt, Artificial Sequence
  Description of Artificial Sequence: Synthetic oligonucleotide
aucccuggacuucuguggc

SEQ ID NO: 3160792 - RNA, 19 nt, Artificial Sequence
  Description of Artificial Sequence: Synthetic oligonucleotide
uuagugcucaggacaacca

SEQ ID NO: 3160793 - RNA, 19 nt, Artificial Sequence
  Description of Artificial Sequence: Synthetic oligonucleotide
cuacaggauccauggaugg

SEQ ID NO: 3160794 - RNA, 19 nt, Artificial Sequence
  Description of Artificial Sequence: Synthetic oligonucleotide
caauguguagugacccucg

SEQ ID NO: 3160795 - RNA, 19 nt, Artificial Sequence
  Description of Artificial Sequence: Synthetic oligonucleotide
uauccaggcgacaacccug

SEQ ID NO: 3160796 - RNA, 19 nt, Artificial Sequence
  Description of Artificial Sequence: Synthetic oligonucleotide
guugcugauacaacccucg

SEQ ID NO: 3160797 - RNA, 19 nt, Artificial Sequence
  Description of Artificial Sequence: Synthetic oligonucleotide
uuggucugcagcagggaag

SEQ ID NO: 3160798 - RNA, 19 nt, Artificial Sequence
  Description of Artificial Sequence: Synthetic oligonucleotide
acugugcuccuguguaucc

SEQ ID NO: 3160799 - RNA, 19 nt, Artificial Sequence
  Description of Artificial Sequence: Synthetic oligonucleotide
agggguuuugaguucaacu

SEQ ID NO: 3160800 - RNA, 19 nt, Artificial Sequence
  Description of Artificial Sequence: Synthetic oligonucleotide
cucgauaguauccaggcga

SEQ ID NO: 3160801 - RNA, 19 nt, Artificial Sequence
  Description of Artificial Sequence: Synthetic oligonucleotide
caauguguauuaagguccc

SEQ ID NO: 3160802 - RNA, 19 nt, Artificial Sequence
  Description of Artificial Sequence: Synthetic oligonucleotide
cuuccagcugcuuugccag

SEQ ID NO: 3160803 - RNA, 19 nt, Artificial Sequence
  Description of Artificial Sequence: Synthetic oligonucleotide
gaauucauuucuuucauuu

SEQ ID NO: 3160804 - RNA, 19 nt, Artificial Sequence
  Description of Artificial Sequence: Synthetic oligonucleotide
uccaaauucacgguccaga

SEQ ID NO: 3160805 - RNA, 19 nt, Artificial Sequence
  Description of Artificial Sequence: Synthetic oligonucleotide
ucuuggcuuacacagucuc

SEQ ID NO: 3160806 - RNA, 19 nt, Artificial Sequence
  Description of Artificial Sequence: Synthetic oligonucleotide
cugaaccuggucaucaaug

SEQ ID NO: 3160807 - RNA, 19 nt, Artificial Sequence
  Description of Artificial Sequence: Synthetic oligonucleotide
uucucauaggcaguggcug

SEQ ID NO: 3160808 - RNA, 19 nt, Artificial Sequence
  Description of Artificial Sequence: Synthetic oligonucleotide
auaucccugagccauccug

SEQ ID NO: 3160809 - RNA, 19 nt, Artificial Sequence
  Description of Artificial Sequence: Synthetic oligonucleotide
uggcaaugaaaaccccagg

SEQ ID NO: 3160810 - RNA, 19 nt, Artificial Sequence
  Description of Artificial Sequence: Synthetic oligonucleotide
gauguucucauaggcagug

SEQ ID NO: 3160811 - RNA, 19 nt, Artificial Sequence
  Description of Artificial Sequence: Synthetic oligonucleotide
uuguuagaugggaaggaaa

SEQ ID NO: 3160812 - RNA, 19 nt, Artificial Sequence
  Description of Artificial Sequence: Synthetic oligonucleotide
caugguaucucucccuuug

SEQ ID NO: 3160813 - RNA, 19 nt, Artificial Sequence
  Description of Artificial Sequence: Synthetic oligonucleotide
uugaauguccauugcaauu

SEQ ID NO: 3160814 - RNA, 19 nt, Artificial Sequence
  Description of Artificial Sequence: Synthetic oligonucleotide
augcuucucggccucuacc

SEQ ID NO: 3160815 - RNA, 19 nt, Artificial Sequence
  Description of Artificial Sequence: Synthetic oligonucleotide
gcugaaaaugagcugaaac

SEQ ID NO: 3160816 - RNA, 19 nt, Artificial Sequence
  Description of Artificial Sequence: Synthetic oligonucleotide
uggugcacaccucucacac

SEQ ID NO: 3160817 - RNA, 19 nt, Artificial Sequence
  Description of Artificial Sequence: Synthetic oligonucleotide
uaagugcuguccagauugg

SEQ ID NO: 3160818 - RNA, 19 nt, Artificial Sequence
  Description of Artificial Sequence: Synthetic oligonucleotide
aaaugccuuucuccaaaga

SEQ ID NO: 3160819 - RNA, 19 nt, Artificial Sequence
  Description of Artificial Sequence: Synthetic oligonucleotide
uuuccaggcaaauugccuu

SEQ ID NO: 3160820 - RNA, 19 nt, Artificial Sequence
  Description of Artificial Sequence: Synthetic oligonucleotide
gggguuuugaguucaacug

SEQ ID NO: 3160821 - RNA, 19 nt, Artificial Sequence
  Description of Artificial Sequence: Synthetic oligonucleotide
aauaauaacagucucccag

SEQ ID NO: 3160822 - RNA, 19 nt, Artificial Sequence
  Description of Artificial Sequence: Synthetic oligonucleotide
aaaucgaccaaacaaauca

SEQ ID NO: 3160823 - RNA, 19 nt, Artificial Sequence
  Description of Artificial Sequence: Synthetic oligonucleotide
aauacugaccucuucaauc

SEQ ID NO: 3160824 - RNA, 19 nt, Artificial Sequence
  Description of Artificial Sequence: Synthetic oligonucleotide
aauggguggaaauggaccc

SEQ ID NO: 3160825 - RNA, 19 nt, Artificial Sequence
  Description of Artificial Sequence: Synthetic oligonucleotide
aaauggaggugcuagauag

SEQ ID NO: 3160826 - RNA, 19 nt, Artificial Sequence
  Description of Artificial Sequence: Synthetic oligonucleotide
uuuaucaugccuaagccca

SEQ ID NO: 3160827 - RNA, 19 nt, Artificial Sequence
  Description of Artificial Sequence: Synthetic oligonucleotide
acaauaauaacagucuccc

SEQ ID NO: 3160828 - RNA, 19 nt, Artificial Sequence
  Description of Artificial Sequence: Synthetic oligonucleotide
aaacaaaucauugaggaga

SEQ ID NO: 3160829 - RNA, 19 nt, Artificial Sequence
  Description of Artificial Sequence: Synthetic oligonucleotide
auaacagucucccagagug

SEQ ID NO: 3160830 - RNA, 19 nt, Artificial Sequence
  Description of Artificial Sequence: Synthetic oligonucleotide
aauauuauuguguuuggau

SEQ ID NO: 3160831 - RNA, 19 nt, Artificial Sequence
  Description of Artificial Sequence: Synthetic oligonucleotide
gaguaaaggaaagaaaugg

SEQ ID NO: 3160832 - RNA, 19 nt, Artificial Sequence
  Description of Artificial Sequence: Synthetic oligonucleotide
aaauaaaauacugaccucu

SEQ ID NO: 3160833 - RNA, 19 nt, Artificial Sequence
  Description of Artificial Sequence: Synthetic oligonucleotide
uaaaauacugaccucuuca

SEQ ID NO: 3160834 - RNA, 19 nt, Artificial Sequence
  Description of Artificial Sequence: Synthetic oligonucleotide
acaaauauuauuguguuug

SEQ ID NO: 3160835 - RNA, 19 nt, Artificial Sequence
  Description of Artificial Sequence: Synthetic oligonucleotide
cacacaaccggucaaaucg

SEQ ID NO: 3160836 - RNA, 19 nt, Artificial Sequence
  Description of Artificial Sequence: Synthetic oligonucleotide
aacgcugccucauacacuc

SEQ ID NO: 3160837 - RNA, 19 nt, Artificial Sequence
  Description of Artificial Sequence: Synthetic oligonucleotide
aaauggguggaaauggacc

SEQ ID NO: 3160838 - RNA, 19 nt, Artificial Sequence
  Description of Artificial Sequence: Synthetic oligonucleotide
accacaugacaccacaucc

SEQ ID NO: 3160839 - RNA, 19 nt, Artificial Sequence
  Description of Artificial Sequence: Synthetic oligonucleotide
augucugcaaauaaaauac

SEQ ID NO: 3160840 - RNA, 19 nt, Artificial Sequence
  Description of Artificial Sequence: Synthetic oligonucleotide
aagaaauggguggaaaugg

SEQ ID NO: 3160841 - RNA, 19 nt, Artificial Sequence
  Description of Artificial Sequence: Synthetic oligonucleotide
ucugcaaauaaaauacuga

SEQ ID NO: 3160842 - RNA, 19 nt, Artificial Sequence
  Description of Artificial Sequence: Synthetic oligonucleotide
ugcucgauagcuuuuauca

SEQ ID NO: 3160843 - RNA, 19 nt, Artificial Sequence
  Description of Artificial Sequence: Synthetic oligonucleotide
auauuauuguguuuggaug

SEQ ID NO: 3160844 - RNA, 19 nt, Artificial Sequence
  Description of Artificial Sequence: Synthetic oligonucleotide
ugcaaauaaaauacugacc

SEQ ID NO: 3160845 - RNA, 19 nt, Artificial Sequence
  Description of Artificial Sequence: Synthetic oligonucleotide
uccaggaacagaaauggag

SEQ ID NO: 3160846 - RNA, 19 nt, Artificial Sequence
  Description of Artificial Sequence: Synthetic oligonucleotide
ugccacacaauaauaacag

SEQ ID NO: 3160847 - RNA, 19 nt, Artificial Sequence
  Description of Artificial Sequence: Synthetic oligonucleotide
gaccaaacaaaucauugag

SEQ ID NO: 3160848 - RNA, 19 nt, Artificial Sequence
  Description of Artificial Sequence: Synthetic oligonucleotide
auugaggagaccuaccaag

SEQ ID NO: 3160849 - RNA, 19 nt, Artificial Sequence
  Description of Artificial Sequence: Synthetic oligonucleotide
aacugugauccacacagag

SEQ ID NO: 3160850 - RNA, 19 nt, Artificial Sequence
  Description of Artificial Sequence: Synthetic oligonucleotide
uauuguguuuggaugagca

SEQ ID NO: 3160851 - RNA, 19 nt, Artificial Sequence
  Description of Artificial Sequence: Synthetic oligonucleotide
ugccacauaagacaguccc

SEQ ID NO: 3160852 - RNA, 19 nt, Artificial Sequence
  Description of Artificial Sequence: Synthetic oligonucleotide
uuuuaucaugccuaagccc

SEQ ID NO: 3160853 - RNA, 19 nt, Artificial Sequence
  Description of Artificial Sequence: Synthetic oligonucleotide
aaagaaauggguggaaaug

SEQ ID NO: 3160854 - RNA, 19 nt, Artificial Sequence
  Description of Artificial Sequence: Synthetic oligonucleotide
cuuuuaucaugccuaagcc

SEQ ID NO: 3160855 - RNA, 19 nt, Artificial Sequence
  Description of Artificial Sequence: Synthetic oligonucleotide
ucgaccaaacaaaucauug

SEQ ID NO: 3160856 - RNA, 19 nt, Artificial Sequence
  Description of Artificial Sequence: Synthetic oligonucleotide
cugcaaauaaaauacugac

SEQ ID NO: 3160857 - RNA, 19 nt, Artificial Sequence
  Description of Artificial Sequence: Synthetic oligonucleotide
agugcugaucuucucacac

SEQ ID NO: 3160858 - RNA, 19 nt, Artificial Sequence
  Description of Artificial Sequence: Synthetic oligonucleotide
uguguuuggaugagcagag

SEQ ID NO: 3160859 - RNA, 19 nt, Artificial Sequence
  Description of Artificial Sequence: Synthetic oligonucleotide
uguuuggaugagcagagca

SEQ ID NO: 3160860 - RNA, 19 nt, Artificial Sequence
  Description of Artificial Sequence: Synthetic oligonucleotide
aacaaaucauugaggagac

SEQ ID NO: 3160861 - RNA, 19 nt, Artificial Sequence
  Description of Artificial Sequence: Synthetic oligonucleotide
cacaauaauaacagucucc

SEQ ID NO: 3160862 - RNA, 19 nt, Artificial Sequence
  Description of Artificial Sequence: Synthetic oligonucleotide
ucgauagcuuuuaucaugc

SEQ ID NO: 3160863 - RNA, 19 nt, Artificial Sequence
  Description of Artificial Sequence: Synthetic oligonucleotide
cuuugcaugcccaggaugc

SEQ ID NO: 3160864 - RNA, 19 nt, Artificial Sequence
  Description of Artificial Sequence: Synthetic oligonucleotide
acacaauaauaacagucuc

SEQ ID NO: 3160865 - RNA, 19 nt, Artificial Sequence
  Description of Artificial Sequence: Synthetic oligonucleotide
aguaaaggaaagaaauggg

SEQ ID NO: 3160866 - RNA, 19 nt, Artificial Sequence
  Description of Artificial Sequence: Synthetic oligonucleotide
gaccucuucaaucugcugc

SEQ ID NO: 3160867 - RNA, 19 nt, Artificial Sequence
  Description of Artificial Sequence: Synthetic oligonucleotide
acuacaaauauuauugugu

SEQ ID NO: 3160868 - RNA, 19 nt, Artificial Sequence
  Description of Artificial Sequence: Synthetic oligonucleotide
ugaauaacugugauccaca

SEQ ID NO: 3160869 - RNA, 19 nt, Artificial Sequence
  Description of Artificial Sequence: Synthetic oligonucleotide
aaugcagcaguaggcaugg

SEQ ID NO: 3160870 - RNA, 19 nt, Artificial Sequence
  Description of Artificial Sequence: Synthetic oligonucleotide
uuggucuccucacacaacc

SEQ ID NO: 3160871 - RNA, 19 nt, Artificial Sequence
  Description of Artificial Sequence: Synthetic oligonucleotide
aaccccgacacgcauguuc

SEQ ID NO: 3160872 - RNA, 19 nt, Artificial Sequence
  Description of Artificial Sequence: Synthetic oligonucleotide
gagauuagggcugaaauga

SEQ ID NO: 3160873 - RNA, 19 nt, Artificial Sequence
  Description of Artificial Sequence: Synthetic oligonucleotide
cauccaggaacagaaaugg

SEQ ID NO: 3160874 - RNA, 19 nt, Artificial Sequence
  Description of Artificial Sequence: Synthetic oligonucleotide
ucauugaggagaccuacca

SEQ ID NO: 3160875 - RNA, 19 nt, Artificial Sequence
  Description of Artificial Sequence: Synthetic oligonucleotide
agagauuagggcugaaaug

SEQ ID NO: 3160876 - RNA, 19 nt, Artificial Sequence
  Description of Artificial Sequence: Synthetic oligonucleotide
ugcugcaucuuaaaagggc

SEQ ID NO: 3160877 - RNA, 19 nt, Artificial Sequence
  Description of Artificial Sequence: Synthetic oligonucleotide
agagugcugaucuucucac

SEQ ID NO: 3160878 - RNA, 19 nt, Artificial Sequence
  Description of Artificial Sequence: Synthetic oligonucleotide
auaauaacagucucccaga

SEQ ID NO: 3160879 - RNA, 19 nt, Artificial Sequence
  Description of Artificial Sequence: Synthetic oligonucleotide
uaauaacagucucccagag

SEQ ID NO: 3160880 - RNA, 19 nt, Artificial Sequence
  Description of Artificial Sequence: Synthetic oligonucleotide
ucauacacucuuugcaugc

SEQ ID NO: 3160881 - RNA, 19 nt, Artificial Sequence
  Description of Artificial Sequence: Synthetic oligonucleotide
ucuuaaaagggcggaaugc

SEQ ID NO: 3160882 - RNA, 19 nt, Artificial Sequence
  Description of Artificial Sequence: Synthetic oligonucleotide
aagcccauuucaaugcagc

SEQ ID NO: 3160883 - RNA, 19 nt, Artificial Sequence
  Description of Artificial Sequence: Synthetic oligonucleotide
ucucccagagugcugaucu

SEQ ID NO: 3160884 - RNA, 19 nt, Artificial Sequence
  Description of Artificial Sequence: Synthetic oligonucleotide
auacacucuuugcaugccc

SEQ ID NO: 3160885 - RNA, 19 nt, Artificial Sequence
  Description of Artificial Sequence: Synthetic oligonucleotide
ucaaaucgaccaaacaaau

SEQ ID NO: 3160886 - RNA, 19 nt, Artificial Sequence
  Description of Artificial Sequence: Synthetic oligonucleotide
ucaacgcugccucauacac

SEQ ID NO: 3160887 - RNA, 19 nt, Artificial Sequence
  Description of Artificial Sequence: Synthetic oligonucleotide
aauaacagucucccagagu

SEQ ID NO: 3160888 - RNA, 19 nt, Artificial Sequence
  Description of Artificial Sequence: Synthetic oligonucleotide
ggaggugcuagauagcacg

SEQ ID NO: 3160889 - RNA, 19 nt, Artificial Sequence
  Description of Artificial Sequence: Synthetic oligonucleotide
aaauggacccugaauaacu

SEQ ID NO: 3160890 - RNA, 19 nt, Artificial Sequence
  Description of Artificial Sequence: Synthetic oligonucleotide
uuggugaagcccacgaugu

SEQ ID NO: 3160891 - RNA, 19 nt, Artificial Sequence
  Description of Artificial Sequence: Synthetic oligonucleotide
uggacccugaauaacugug

SEQ ID NO: 3160892 - RNA, 19 nt, Artificial Sequence
  Description of Artificial Sequence: Synthetic oligonucleotide
cucgauagcuuuuaucaug

SEQ ID NO: 3160893 - RNA, 19 nt, Artificial Sequence
  Description of Artificial Sequence: Synthetic oligonucleotide
caaacaaaucauugaggag

SEQ ID NO: 3160894 - RNA, 19 nt, Artificial Sequence
  Description of Artificial Sequence: Synthetic oligonucleotide
gcuuuuaucaugccuaagc

SEQ ID NO: 3160895 - RNA, 19 nt, Artificial Sequence
  Description of Artificial Sequence: Synthetic oligonucleotide
auacugaccucuucaaucu

SEQ ID NO: 3160896 - RNA, 19 nt, Artificial Sequence
  Description of Artificial Sequence: Synthetic oligonucleotide
cacuacaaauauuauugug

SEQ ID NO: 3160897 - RNA, 19 nt, Artificial Sequence
  Description of Artificial Sequence: Synthetic oligonucleotide
uagauagcacgccagccug

SEQ ID NO: 3160898 - RNA, 19 nt, Artificial Sequence
  Description of Artificial Sequence: Synthetic oligonucleotide
aucuuaaaagggcggaaug

SEQ ID NO: 3160899 - RNA, 19 nt, Artificial Sequence
  Description of Artificial Sequence: Synthetic oligonucleotide
uggcagaacugcucgauag

SEQ ID NO: 3160900 - RNA, 19 nt, Artificial Sequence
  Description of Artificial Sequence: Synthetic oligonucleotide
ucuuugcaugcccaggaug

SEQ ID NO: 3160901 - RNA, 19 nt, Artificial Sequence
  Description of Artificial Sequence: Synthetic oligonucleotide
caugacaccacauccagga

SEQ ID NO: 3160902 - RNA, 19 nt, Artificial Sequence
  Description of Artificial Sequence: Synthetic oligonucleotide
ugacaccacauccaggaac

SEQ ID NO: 3160903 - RNA, 19 nt, Artificial Sequence
  Description of Artificial Sequence: Synthetic oligonucleotide
aaauacugaccucuucaau

SEQ ID NO: 3160904 - RNA, 19 nt, Artificial Sequence
  Description of Artificial Sequence: Synthetic oligonucleotide
uccacacagagauuagggc

SEQ ID NO: 3160905 - RNA, 19 nt, Artificial Sequence
  Description of Artificial Sequence: Synthetic oligonucleotide
gaucuucucacacuugguc

SEQ ID NO: 3160906 - RNA, 19 nt, Artificial Sequence
  Description of Artificial Sequence: Synthetic oligonucleotide
cccugaauaacugugaucc

SEQ ID NO: 3160907 - RNA, 19 nt, Artificial Sequence
  Description of Artificial Sequence: Synthetic oligonucleotide
uucaaugcagcaguaggca

SEQ ID NO: 3160908 - RNA, 19 nt, Artificial Sequence
  Description of Artificial Sequence: Synthetic oligonucleotide
auuguguuuggaugagcag

SEQ ID NO: 3160909 - RNA, 19 nt, Artificial Sequence
  Description of Artificial Sequence: Synthetic oligonucleotide
gagcagagcaccucggcag

SEQ ID NO: 3160910 - RNA, 19 nt, Artificial Sequence
  Description of Artificial Sequence: Synthetic oligonucleotide
accaaacaaaucauugagg

SEQ ID NO: 3160911 - RNA, 19 nt, Artificial Sequence
  Description of Artificial Sequence: Synthetic oligonucleotide
augagcagagcaccucggc

SEQ ID NO: 3160912 - RNA, 19 nt, Artificial Sequence
  Description of Artificial Sequence: Synthetic oligonucleotide
ugaggagaccuaccaaggc

SEQ ID NO: 3160913 - RNA, 19 nt, Artificial Sequence
  Description of Artificial Sequence: Synthetic oligonucleotide
uaagcccauuucaaugcag

SEQ ID NO: 3160914 - RNA, 19 nt, Artificial Sequence
  Description of Artificial Sequence: Synthetic oligonucleotide
acauaagacaguccccgug

SEQ ID NO: 3160915 - RNA, 19 nt, Artificial Sequence
  Description of Artificial Sequence: Synthetic oligonucleotide
gcaugagcggauuuguugg

SEQ ID NO: 3160916 - RNA, 19 nt, Artificial Sequence
  Description of Artificial Sequence: Synthetic oligonucleotide
caaauaaaauacugaccuc

SEQ ID NO: 3160917 - RNA, 19 nt, Artificial Sequence
  Description of Artificial Sequence: Synthetic oligonucleotide
uacacucuuugcaugccca

SEQ ID NO: 3160918 - RNA, 19 nt, Artificial Sequence
  Description of Artificial Sequence: Synthetic oligonucleotide
aaagggaguaaaggaaaga

SEQ ID NO: 3160919 - RNA, 19 nt, Artificial Sequence
  Description of Artificial Sequence: Synthetic oligonucleotide
gauuagggcugaaaugacc

SEQ ID NO: 3160920 - RNA, 19 nt, Artificial Sequence
  Description of Artificial Sequence: Synthetic oligonucleotide
ugagcagagcaccucggca

SEQ ID NO: 3160921 - RNA, 19 nt, Artificial Sequence
  Description of Artificial Sequence: Synthetic oligonucleotide
ugcaaugacagccaauccc

SEQ ID NO: 3160922 - RNA, 19 nt, Artificial Sequence
  Description of Artificial Sequence: Synthetic oligonucleotide
uuugucuaauugcaguucc

SEQ ID NO: 3160923 - RNA, 19 nt, Artificial Sequence
  Description of Artificial Sequence: Synthetic oligonucleotide
aacuuugucuaauugcagu

SEQ ID NO: 3160924 - RNA, 19 nt, Artificial Sequence
  Description of Artificial Sequence: Synthetic oligonucleotide
cuggcuuuguuucuuaugg

SEQ ID NO: 3160925 - RNA, 19 nt, Artificial Sequence
  Description of Artificial Sequence: Synthetic oligonucleotide
ucuaauugcaguuccugug

SEQ ID NO: 3160926 - RNA, 19 nt, Artificial Sequence
  Description of Artificial Sequence: Synthetic oligonucleotide
uguguguacggccuugggg

SEQ ID NO: 3160927 - RNA, 19 nt, Artificial Sequence
  Description of Artificial Sequence: Synthetic oligonucleotide
uuuaugguagguccguaug

SEQ ID NO: 3160928 - RNA, 19 nt, Artificial Sequence
  Description of Artificial Sequence: Synthetic oligonucleotide
uucuuauggcuucagaaaa

SEQ ID NO: 3160929 - RNA, 19 nt, Artificial Sequence
  Description of Artificial Sequence: Synthetic oligonucleotide
gauaaccuggcuuuguuuc

SEQ ID NO: 3160930 - RNA, 19 nt, Artificial Sequence
  Description of Artificial Sequence: Synthetic oligonucleotide
aguuccuguguguacggcc

SEQ ID NO: 3160931 - RNA, 19 nt, Artificial Sequence
  Description of Artificial Sequence: Synthetic oligonucleotide
uccguaugcaaugacagcc

SEQ ID NO: 3160932 - RNA, 19 nt, Artificial Sequence
  Description of Artificial Sequence: Synthetic oligonucleotide
uuucuuauggcuucagaaa

SEQ ID NO: 3160933 - RNA, 19 nt, Artificial Sequence
  Description of Artificial Sequence: Synthetic oligonucleotide
uuaugguagguccguaugc

SEQ ID NO: 3160934 - RNA, 19 nt, Artificial Sequence
  Description of Artificial Sequence: Synthetic oligonucleotide
uaugcaaugacagccaauc

SEQ ID NO: 3160935 - RNA, 19 nt, Artificial Sequence
  Description of Artificial Sequence: Synthetic oligonucleotide
augacagccaaucccgaac

SEQ ID NO: 3160936 - RNA, 19 nt, Artificial Sequence
  Description of Artificial Sequence: Synthetic oligonucleotide
guguguacggccuuggggc

SEQ ID NO: 3160937 - RNA, 19 nt, Artificial Sequence
  Description of Artificial Sequence: Synthetic oligonucleotide
ugcaguuccuguguguacg

SEQ ID NO: 3160938 - RNA, 19 nt, Artificial Sequence
  Description of Artificial Sequence: Synthetic oligonucleotide
guuucuuauggcuucagaa

SEQ ID NO: 3160939 - RNA, 19 nt, Artificial Sequence
  Description of Artificial Sequence: Synthetic oligonucleotide
ugauggauaaccuggcuuu

SEQ ID NO: 3160940 - RNA, 19 nt, Artificial Sequence
  Description of Artificial Sequence: Synthetic oligonucleotide
uucucucccacacucccag

SEQ ID NO: 3160941 - RNA, 19 nt, Artificial Sequence
  Description of Artificial Sequence: Synthetic oligonucleotide
augcaaugacagccaaucc

SEQ ID NO: 3160942 - RNA, 19 nt, Artificial Sequence
  Description of Artificial Sequence: Synthetic oligonucleotide
aauugcaguuccugugugu

SEQ ID NO: 3160943 - RNA, 19 nt, Artificial Sequence
  Description of Artificial Sequence: Synthetic oligonucleotide
cuuuguuucuuauggcuuc

SEQ ID NO: 3160944 - RNA, 19 nt, Artificial Sequence
  Description of Artificial Sequence: Synthetic oligonucleotide
ccagugauggauaaccugg

SEQ ID NO: 3160945 - RNA, 19 nt, Artificial Sequence
  Description of Artificial Sequence: Synthetic oligonucleotide
uguuucuuauggcuucaga

SEQ ID NO: 3160946 - RNA, 19 nt, Artificial Sequence
  Description of Artificial Sequence: Synthetic oligonucleotide
ugucuaauugcaguuccug

SEQ ID NO: 3160947 - RNA, 19 nt, Artificial Sequence
  Description of Artificial Sequence: Synthetic oligonucleotide
uaauugcaguuccugugug

SEQ ID NO: 3160948 - RNA, 19 nt, Artificial Sequence
  Description of Artificial Sequence: Synthetic oligonucleotide
ugacagccaaucccgaacu

SEQ ID NO: 3160949 - RNA, 19 nt, Artificial Sequence
  Description of Artificial Sequence: Synthetic oligonucleotide
aaugacagccaaucccgaa

SEQ ID NO: 3160950 - RNA, 19 nt, Artificial Sequence
  Description of Artificial Sequence: Synthetic oligonucleotide
uuuuaugguagguccguau

SEQ ID NO: 3160951 - RNA, 19 nt, Artificial Sequence
  Description of Artificial Sequence: Synthetic oligonucleotide
cucccagugauggauaacc

SEQ ID NO: 3160952 - RNA, 19 nt, Artificial Sequence
  Description of Artificial Sequence: Synthetic oligonucleotide
gcaaugacagccaaucccg

SEQ ID NO: 3160953 - RNA, 19 nt, Artificial Sequence
  Description of Artificial Sequence: Synthetic oligonucleotide
uaugguagguccguaugca

SEQ ID NO: 3160954 - RNA, 19 nt, Artificial Sequence
  Description of Artificial Sequence: Synthetic oligonucleotide
acuuugucuaauugcaguu

SEQ ID NO: 3160955 - RNA, 19 nt, Artificial Sequence
  Description of Artificial Sequence: Synthetic oligonucleotide
acggccuuggggcagucgg

SEQ ID NO: 3160956 - RNA, 19 nt, Artificial Sequence
  Description of Artificial Sequence: Synthetic oligonucleotide
gaacuuugucuaauugcag

SEQ ID NO: 3160957 - RNA, 19 nt, Artificial Sequence
  Description of Artificial Sequence: Synthetic oligonucleotide
auaaccuggcuuuguuucu

SEQ ID NO: 3160958 - RNA, 19 nt, Artificial Sequence
  Description of Artificial Sequence: Synthetic oligonucleotide
ccgaacuuugucuaauugc

SEQ ID NO: 3160959 - RNA, 19 nt, Artificial Sequence
  Description of Artificial Sequence: Synthetic oligonucleotide
uugucuaauugcaguuccu

SEQ ID NO: 3160960 - RNA, 19 nt, Artificial Sequence
  Description of Artificial Sequence: Synthetic oligonucleotide
cagccaaucccgaacuuug

SEQ ID NO: 3160961 - RNA, 19 nt, Artificial Sequence
  Description of Artificial Sequence: Synthetic oligonucleotide
uuuguuucuuauggcuuca

SEQ ID NO: 3160962 - RNA, 19 nt, Artificial Sequence
  Description of Artificial Sequence: Synthetic oligonucleotide
agugauggauaaccuggcu

SEQ ID NO: 3160963 - RNA, 19 nt, Artificial Sequence
  Description of Artificial Sequence: Synthetic oligonucleotide
ugguagguccguaugcaau

SEQ ID NO: 3160964 - RNA, 19 nt, Artificial Sequence
  Description of Artificial Sequence: Synthetic oligonucleotide
cagugauggauaaccuggc

SEQ ID NO: 3160965 - RNA, 19 nt, Artificial Sequence
  Description of Artificial Sequence: Synthetic oligonucleotide
uggcuuuguuucuuauggc

SEQ ID NO: 3160966 - RNA, 19 nt, Artificial Sequence
  Description of Artificial Sequence: Synthetic oligonucleotide
ucucccacacucccaguga

SEQ ID NO: 3160967 - RNA, 19 nt, Artificial Sequence
  Description of Artificial Sequence: Synthetic oligonucleotide
gguccguaugcaaugacag

SEQ ID NO: 3160968 - RNA, 19 nt, Artificial Sequence
  Description of Artificial Sequence: Synthetic oligonucleotide
gguagguccguaugcaaug

SEQ ID NO: 3160969 - RNA, 19 nt, Artificial Sequence
  Description of Artificial Sequence: Synthetic oligonucleotide
aaucccgaacuuugucuaa

SEQ ID NO: 3160970 - RNA, 19 nt, Artificial Sequence
  Description of Artificial Sequence: Synthetic oligonucleotide
cuuugucuaauugcaguuc

SEQ ID NO: 3160971 - RNA, 19 nt, Artificial Sequence
  Description of Artificial Sequence: Synthetic oligonucleotide
cacacggccguucucuccc

SEQ ID NO: 3160972 - RNA, 19 nt, Artificial Sequence
  Description of Artificial Sequence: Synthetic oligonucleotide
uggauaaccuggcuuuguu

SEQ ID NO: 3160973 - RNA, 19 nt, Artificial Sequence
  Description of Artificial Sequence: Synthetic oligonucleotide
gauggauaaccuggcuuug

SEQ ID NO: 3160974 - RNA, 19 nt, Artificial Sequence
  Description of Artificial Sequence: Synthetic oligonucleotide
ucccagugauggauaaccu

SEQ ID NO: 3160975 - RNA, 19 nt, Artificial Sequence
  Description of Artificial Sequence: Synthetic oligonucleotide
uguguacggccuuggggca

SEQ ID NO: 3160976 - RNA, 19 nt, Artificial Sequence
  Description of Artificial Sequence: Synthetic oligonucleotide
cucucccacacucccagug

SEQ ID NO: 3160977 - RNA, 19 nt, Artificial Sequence
  Description of Artificial Sequence: Synthetic oligonucleotide
guccguaugcaaugacagc

SEQ ID NO: 3160978 - RNA, 19 nt, Artificial Sequence
  Description of Artificial Sequence: Synthetic oligonucleotide
auugcaguuccugugugua

SEQ ID NO: 3160979 - RNA, 19 nt, Artificial Sequence
  Description of Artificial Sequence: Synthetic oligonucleotide
uuguuucuuauggcuucag

SEQ ID NO: 3160980 - RNA, 19 nt, Artificial Sequence
  Description of Artificial Sequence: Synthetic oligonucleotide
cuaauugcaguuccugugu

SEQ ID NO: 3160981 - RNA, 19 nt, Artificial Sequence
  Description of Artificial Sequence: Synthetic oligonucleotide
uagguccguaugcaaugac

SEQ ID NO: 3160982 - RNA, 19 nt, Artificial Sequence
  Description of Artificial Sequence: Synthetic oligonucleotide
uugcaguuccuguguguac

SEQ ID NO: 3160983 - RNA, 19 nt, Artificial Sequence
  Description of Artificial Sequence: Synthetic oligonucleotide
cgaacuuugucuaauugca

SEQ ID NO: 3160984 - RNA, 19 nt, Artificial Sequence
  Description of Artificial Sequence: Synthetic oligonucleotide
ucccacacucccagugaug

SEQ ID NO: 3160985 - RNA, 19 nt, Artificial Sequence
  Description of Artificial Sequence: Synthetic oligonucleotide
agcacacggccguucucuc

SEQ ID NO: 3160986 - RNA, 19 nt, Artificial Sequence
  Description of Artificial Sequence: Synthetic oligonucleotide
gucuaauugcaguuccugu

SEQ ID NO: 3160987 - RNA, 19 nt, Artificial Sequence
  Description of Artificial Sequence: Synthetic oligonucleotide
caaucccgaacuuugucua

SEQ ID NO: 3160988 - RNA, 19 nt, Artificial Sequence
  Description of Artificial Sequence: Synthetic oligonucleotide
cuguguguacggccuuggg

SEQ ID NO: 3160989 - RNA, 19 nt, Artificial Sequence
  Description of Artificial Sequence: Synthetic oligonucleotide
augguagguccguaugcaa

SEQ ID NO: 3160990 - RNA, 19 nt, Artificial Sequence
  Description of Artificial Sequence: Synthetic oligonucleotide
agguccguaugcaaugaca

SEQ ID NO: 3160991 - RNA, 19 nt, Artificial Sequence
  Description of Artificial Sequence: Synthetic oligonucleotide
cccacacucccagugaugg

SEQ ID NO: 3160992 - RNA, 19 nt, Artificial Sequence
  Description of Artificial Sequence: Synthetic oligonucleotide
acucccagugauggauaac

SEQ ID NO: 3160993 - RNA, 19 nt, Artificial Sequence
  Description of Artificial Sequence: Synthetic oligonucleotide
aaccuggcuuuguuucuua

SEQ ID NO: 3160994 - RNA, 19 nt, Artificial Sequence
  Description of Artificial Sequence: Synthetic oligonucleotide
ggcuuuguuucuuauggcu

SEQ ID NO: 3160995 - RNA, 19 nt, Artificial Sequence
  Description of Artificial Sequence: Synthetic oligonucleotide
auggauaaccuggcuuugu

SEQ ID NO: 3160996 - RNA, 19 nt, Artificial Sequence
  Description of Artificial Sequence: Synthetic oligonucleotide
gcaguuccuguguguacgg

SEQ ID NO: 3160997 - RNA, 19 nt, Artificial Sequence
  Description of Artificial Sequence: Synthetic oligonucleotide
acagccaaucccgaacuuu

SEQ ID NO: 3160998 - RNA, 19 nt, Artificial Sequence
  Description of Artificial Sequence: Synthetic oligonucleotide
uccuguguguacggccuug

SEQ ID NO: 3160999 - RNA, 19 nt, Artificial Sequence
  Description of Artificial Sequence: Synthetic oligonucleotide
gugauggauaaccuggcuu

SEQ ID NO: 3161000 - RNA, 19 nt, Artificial Sequence
  Description of Artificial Sequence: Synthetic oligonucleotide
cccagugauggauaaccug

SEQ ID NO: 3161001 - RNA, 19 nt, Artificial Sequence
  Description of Artificial Sequence: Synthetic oligonucleotide
ucagcacacggccguucuc

SEQ ID NO: 3161002 - RNA, 19 nt, Artificial Sequence
  Description of Artificial Sequence: Synthetic oligonucleotide
ucccgaacuuugucuaauu

SEQ ID NO: 3161003 - RNA, 19 nt, Artificial Sequence
  Description of Artificial Sequence: Synthetic oligonucleotide
caaugacagccaaucccga

SEQ ID NO: 3161004 - RNA, 19 nt, Artificial Sequence
  Description of Artificial Sequence: Synthetic oligonucleotide
uaaccuggcuuuguuucuu

SEQ ID NO: 3161005 - RNA, 19 nt, Artificial Sequence
  Description of Artificial Sequence: Synthetic oligonucleotide
gccguucucucccacacuc

SEQ ID NO: 3161006 - RNA, 19 nt, Artificial Sequence
  Description of Artificial Sequence: Synthetic oligonucleotide
ccuggcuuuguuucuuaug

SEQ ID NO: 3161007 - RNA, 19 nt, Artificial Sequence
  Description of Artificial Sequence: Synthetic oligonucleotide
guagguccguaugcaauga

SEQ ID NO: 3161008 - RNA, 19 nt, Artificial Sequence
  Description of Artificial Sequence: Synthetic oligonucleotide
cccgaacuuugucuaauug

SEQ ID NO: 3161009 - RNA, 19 nt, Artificial Sequence
  Description of Artificial Sequence: Synthetic oligonucleotide
uguacggccuuggggcagu

SEQ ID NO: 3161010 - RNA, 19 nt, Artificial Sequence
  Description of Artificial Sequence: Synthetic oligonucleotide
accuggcuuuguuucuuau

SEQ ID NO: 3161011 - RNA, 19 nt, Artificial Sequence
  Description of Artificial Sequence: Synthetic oligonucleotide
aucccgaacuuugucuaau

SEQ ID NO: 3161012 - RNA, 19 nt, Artificial Sequence
  Description of Artificial Sequence: Synthetic oligonucleotide
uacggccuuggggcagucg

SEQ ID NO: 3161013 - RNA, 19 nt, Artificial Sequence
  Description of Artificial Sequence: Synthetic oligonucleotide
caguuccuguguguacggc

SEQ ID NO: 3161014 - RNA, 19 nt, Artificial Sequence
  Description of Artificial Sequence: Synthetic oligonucleotide
cguucucucccacacuccc

SEQ ID NO: 3161015 - RNA, 19 nt, Artificial Sequence
  Description of Artificial Sequence: Synthetic oligonucleotide
acggccguucucucccaca

SEQ ID NO: 3161016 - RNA, 19 nt, Artificial Sequence
  Description of Artificial Sequence: Synthetic oligonucleotide
ucucucccacacucccagu

SEQ ID NO: 3161017 - RNA, 19 nt, Artificial Sequence
  Description of Artificial Sequence: Synthetic oligonucleotide
gccaaucccgaacuuuguc

SEQ ID NO: 3161018 - RNA, 19 nt, Artificial Sequence
  Description of Artificial Sequence: Synthetic oligonucleotide
guuccuguguguacggccu

SEQ ID NO: 3161019 - RNA, 19 nt, Artificial Sequence
  Description of Artificial Sequence: Synthetic oligonucleotide
uuccuguguguacggccuu

SEQ ID NO: 3161020 - RNA, 19 nt, Artificial Sequence
  Description of Artificial Sequence: Synthetic oligonucleotide
ggccuuggggcagucgggg

SEQ ID NO: 3161021 - RNA, 19 nt, Artificial Sequence
  Description of Artificial Sequence: Synthetic oligonucleotide
augacuaucauccagggag

SEQ ID NO: 3161022 - RNA, 19 nt, Artificial Sequence
  Description of Artificial Sequence: Synthetic oligonucleotide
uuuagaucuaucuugaacu

SEQ ID NO: 3161023 - RNA, 19 nt, Artificial Sequence
  Description of Artificial Sequence: Synthetic oligonucleotide
cuucacaugacuaucaucc

SEQ ID NO: 3161024 - RNA, 19 nt, Artificial Sequence
  Description of Artificial Sequence: Synthetic oligonucleotide
ucaagaacaucucugaccc

SEQ ID NO: 3161025 - RNA, 19 nt, Artificial Sequence
  Description of Artificial Sequence: Synthetic oligonucleotide
aaagucucuacguguagcc

SEQ ID NO: 3161026 - RNA, 19 nt, Artificial Sequence
  Description of Artificial Sequence: Synthetic oligonucleotide
cugauuuucaaauugggag

SEQ ID NO: 3161027 - RNA, 19 nt, Artificial Sequence
  Description of Artificial Sequence: Synthetic oligonucleotide
ugauuuucaaauugggagg

SEQ ID NO: 3161028 - RNA, 19 nt, Artificial Sequence
  Description of Artificial Sequence: Synthetic oligonucleotide
ugauacgugauuccaagcg

SEQ ID NO: 3161029 - RNA, 19 nt, Artificial Sequence
  Description of Artificial Sequence: Synthetic oligonucleotide
aucaagaacaucucugacc

SEQ ID NO: 3161030 - RNA, 19 nt, Artificial Sequence
  Description of Artificial Sequence: Synthetic oligonucleotide
uaucuugccaauuacuagg

SEQ ID NO: 3161031 - RNA, 19 nt, Artificial Sequence
  Description of Artificial Sequence: Synthetic oligonucleotide
auuuagaucuaucuugaac

SEQ ID NO: 3161032 - RNA, 19 nt, Artificial Sequence
  Description of Artificial Sequence: Synthetic oligonucleotide
aguucaucaaauuuagauc

SEQ ID NO: 3161033 - RNA, 19 nt, Artificial Sequence
  Description of Artificial Sequence: Synthetic oligonucleotide
ucuaucuugaacuggaaca

SEQ ID NO: 3161034 - RNA, 19 nt, Artificial Sequence
  Description of Artificial Sequence: Synthetic oligonucleotide
ugugccaagagucugaacu

SEQ ID NO: 3161035 - RNA, 19 nt, Artificial Sequence
  Description of Artificial Sequence: Synthetic oligonucleotide
aauuacuaggaagagauga

SEQ ID NO: 3161036 - RNA, 19 nt, Artificial Sequence
  Description of Artificial Sequence: Synthetic oligonucleotide
aagggagccuuccacagcc

SEQ ID NO: 3161037 - RNA, 19 nt, Artificial Sequence
  Description of Artificial Sequence: Synthetic oligonucleotide
gaagagaugaaccaagaac

SEQ ID NO: 3161038 - RNA, 19 nt, Artificial Sequence
  Description of Artificial Sequence: Synthetic oligonucleotide
ugaaccaagaacuucuuug

SEQ ID NO: 3161039 - RNA, 19 nt, Artificial Sequence
  Description of Artificial Sequence: Synthetic oligonucleotide
aagagaugaaccaagaacu

SEQ ID NO: 3161040 - RNA, 19 nt, Artificial Sequence
  Description of Artificial Sequence: Synthetic oligonucleotide
aacacuauagaaaucaaga

SEQ ID NO: 3161041 - RNA, 19 nt, Artificial Sequence
  Description of Artificial Sequence: Synthetic oligonucleotide
acuauagaaaucaagaaca

SEQ ID NO: 3161042 - RNA, 19 nt, Artificial Sequence
  Description of Artificial Sequence: Synthetic oligonucleotide
aaaucaagaacaucucuga

SEQ ID NO: 3161043 - RNA, 19 nt, Artificial Sequence
  Description of Artificial Sequence: Synthetic oligonucleotide
aaucaagaacaucucugac

SEQ ID NO: 3161044 - RNA, 19 nt, Artificial Sequence
  Description of Artificial Sequence: Synthetic oligonucleotide
uugaacuggaacacuauag

SEQ ID NO: 3161045 - RNA, 19 nt, Artificial Sequence
  Description of Artificial Sequence: Synthetic oligonucleotide
aucaaauuuagaucuaucu

SEQ ID NO: 3161046 - RNA, 19 nt, Artificial Sequence
  Description of Artificial Sequence: Synthetic oligonucleotide
gagaccaaaagucucuacg

SEQ ID NO: 3161047 - RNA, 19 nt, Artificial Sequence
  Description of Artificial Sequence: Synthetic oligonucleotide
aaaagucucuacguguagc

SEQ ID NO: 3161048 - RNA, 19 nt, Artificial Sequence
  Description of Artificial Sequence: Synthetic oligonucleotide
uuugauacgugauuccaag

SEQ ID NO: 3161049 - RNA, 19 nt, Artificial Sequence
  Description of Artificial Sequence: Synthetic oligonucleotide
ucuggagaccgucaggugg

SEQ ID NO: 3161050 - RNA, 19 nt, Artificial Sequence
  Description of Artificial Sequence: Synthetic oligonucleotide
gaagccuggaguuagguac

SEQ ID NO: 3161051 - RNA, 19 nt, Artificial Sequence
  Description of Artificial Sequence: Synthetic oligonucleotide
aagagucugaacuucacau

SEQ ID NO: 3161052 - RNA, 19 nt, Artificial Sequence
  Description of Artificial Sequence: Synthetic oligonucleotide
aaccggcauacacagagcg

SEQ ID NO: 3161053 - RNA, 19 nt, Artificial Sequence
  Description of Artificial Sequence: Synthetic oligonucleotide
uugccaauuacuaggaaga

SEQ ID NO: 3161054 - RNA, 19 nt, Artificial Sequence
  Description of Artificial Sequence: Synthetic oligonucleotide
aguuagguacugcauggcc

SEQ ID NO: 3161055 - RNA, 19 nt, Artificial Sequence
  Description of Artificial Sequence: Synthetic oligonucleotide
uacuaggaagagaugaacc

SEQ ID NO: 3161056 - RNA, 19 nt, Artificial Sequence
  Description of Artificial Sequence: Synthetic oligonucleotide
gaaaucaagaacaucucug

SEQ ID NO: 3161057 - RNA, 19 nt, Artificial Sequence
  Description of Artificial Sequence: Synthetic oligonucleotide
ucuggaucgagaccaaaag

SEQ ID NO: 3161058 - RNA, 19 nt, Artificial Sequence
  Description of Artificial Sequence: Synthetic oligonucleotide
uggaacacuauagaaauca

SEQ ID NO: 3161059 - RNA, 19 nt, Artificial Sequence
  Description of Artificial Sequence: Synthetic oligonucleotide
ugaacuggaacacuauaga

SEQ ID NO: 3161060 - RNA, 19 nt, Artificial Sequence
  Description of Artificial Sequence: Synthetic oligonucleotide
cuugccaauuacuaggaag

SEQ ID NO: 3161061 - RNA, 19 nt, Artificial Sequence
  Description of Artificial Sequence: Synthetic oligonucleotide
ucaaauuuagaucuaucuu

SEQ ID NO: 3161062 - RNA, 19 nt, Artificial Sequence
  Description of Artificial Sequence: Synthetic oligonucleotide
uggaucgagaccaaaaguc

SEQ ID NO: 3161063 - RNA, 19 nt, Artificial Sequence
  Description of Artificial Sequence: Synthetic oligonucleotide
uguacgaucggcuucguaa

SEQ ID NO: 3161064 - RNA, 19 nt, Artificial Sequence
  Description of Artificial Sequence: Synthetic oligonucleotide
cacuauagaaaucaagaac

SEQ ID NO: 3161065 - RNA, 19 nt, Artificial Sequence
  Description of Artificial Sequence: Synthetic oligonucleotide
auuacuggcaaugaguuca

SEQ ID NO: 3161066 - RNA, 19 nt, Artificial Sequence
  Description of Artificial Sequence: Synthetic oligonucleotide
cuacguguagccaagggag

SEQ ID NO: 3161067 - RNA, 19 nt, Artificial Sequence
  Description of Artificial Sequence: Synthetic oligonucleotide
aagaacuucuuugauacgu

SEQ ID NO: 3161068 - RNA, 19 nt, Artificial Sequence
  Description of Artificial Sequence: Synthetic oligonucleotide
acuggaacacuauagaaau

SEQ ID NO: 3161069 - RNA, 19 nt, Artificial Sequence
  Description of Artificial Sequence: Synthetic oligonucleotide
caaaccggcauacacagag

SEQ ID NO: 3161070 - RNA, 19 nt, Artificial Sequence
  Description of Artificial Sequence: Synthetic oligonucleotide
aauuacuggcaaugaguuc

SEQ ID NO: 3161071 - RNA, 19 nt, Artificial Sequence
  Description of Artificial Sequence: Synthetic oligonucleotide
uacugcauggcccaaguca

SEQ ID NO: 3161072 - RNA, 19 nt, Artificial Sequence
  Description of Artificial Sequence: Synthetic oligonucleotide
aaugaguucaucaaauuua

SEQ ID NO: 3161073 - RNA, 19 nt, Artificial Sequence
  Description of Artificial Sequence: Synthetic oligonucleotide
aaauugggaggcaaauuac

SEQ ID NO: 3161074 - RNA, 19 nt, Artificial Sequence
  Description of Artificial Sequence: Synthetic oligonucleotide
auuugaugaagccuggagu

SEQ ID NO: 3161075 - RNA, 19 nt, Artificial Sequence
  Description of Artificial Sequence: Synthetic oligonucleotide
aucuaucuugaacuggaac

SEQ ID NO: 3161076 - RNA, 19 nt, Artificial Sequence
  Description of Artificial Sequence: Synthetic oligonucleotide
uugggaggcaaauuacugg

SEQ ID NO: 3161077 - RNA, 19 nt, Artificial Sequence
  Description of Artificial Sequence: Synthetic oligonucleotide
caacugauuuucaaauugg

SEQ ID NO: 3161078 - RNA, 19 nt, Artificial Sequence
  Description of Artificial Sequence: Synthetic oligonucleotide
ucuacguguagccaaggga

SEQ ID NO: 3161079 - RNA, 19 nt, Artificial Sequence
  Description of Artificial Sequence: Synthetic oligonucleotide
auaucuugccaauuacuag

SEQ ID NO: 3161080 - RNA, 19 nt, Artificial Sequence
  Description of Artificial Sequence: Synthetic oligonucleotide
cacaugacuaucauccagg

SEQ ID NO: 3161081 - RNA, 19 nt, Artificial Sequence
  Description of Artificial Sequence: Synthetic oligonucleotide
aacugauuuucaaauuggg

SEQ ID NO: 3161082 - RNA, 19 nt, Artificial Sequence
  Description of Artificial Sequence: Synthetic oligonucleotide
ugcucaguaaccccaacug

SEQ ID NO: 3161083 - RNA, 19 nt, Artificial Sequence
  Description of Artificial Sequence: Synthetic oligonucleotide
aacaucucugacccugcac

SEQ ID NO: 3161084 - RNA, 19 nt, Artificial Sequence
  Description of Artificial Sequence: Synthetic oligonucleotide
ugcuaaaugugccaagagu

SEQ ID NO: 3161085 - RNA, 19 nt, Artificial Sequence
  Description of Artificial Sequence: Synthetic oligonucleotide
ucacaugacuaucauccag

SEQ ID NO: 3161086 - RNA, 19 nt, Artificial Sequence
  Description of Artificial Sequence: Synthetic oligonucleotide
agcaaaccggcauacacag

SEQ ID NO: 3161087 - RNA, 19 nt, Artificial Sequence
  Description of Artificial Sequence: Synthetic oligonucleotide
uuccaagcgacucuggaga

SEQ ID NO: 3161088 - RNA, 19 nt, Artificial Sequence
  Description of Artificial Sequence: Synthetic oligonucleotide
acuaggaagagaugaacca

SEQ ID NO: 3161089 - RNA, 19 nt, Artificial Sequence
  Description of Artificial Sequence: Synthetic oligonucleotide
uuagaucuaucuugaacug

SEQ ID NO: 3161090 - RNA, 19 nt, Artificial Sequence
  Description of Artificial Sequence: Synthetic oligonucleotide
aagaacaucucugacccug

SEQ ID NO: 3161091 - RNA, 19 nt, Artificial Sequence
  Description of Artificial Sequence: Synthetic oligonucleotide
uuugaugaagccuggaguu

SEQ ID NO: 3161092 - RNA, 19 nt, Artificial Sequence
  Description of Artificial Sequence: Synthetic oligonucleotide
uggaguuagguacugcaug

SEQ ID NO: 3161093 - RNA, 19 nt, Artificial Sequence
  Description of Artificial Sequence: Synthetic oligonucleotide
agaaaucaagaacaucucu

SEQ ID NO: 3161094 - RNA, 19 nt, Artificial Sequence
  Description of Artificial Sequence: Synthetic oligonucleotide
gauuuucaaauugggaggc

SEQ ID NO: 3161095 - RNA, 19 nt, Artificial Sequence
  Description of Artificial Sequence: Synthetic oligonucleotide
ugggaggcaaauuacuggc

SEQ ID NO: 3161096 - RNA, 19 nt, Artificial Sequence
  Description of Artificial Sequence: Synthetic oligonucleotide
gacacaccaaaacagguuc

SEQ ID NO: 3161097 - RNA, 19 nt, Artificial Sequence
  Description of Artificial Sequence: Synthetic oligonucleotide
cuuucuccuuucuggaucg

SEQ ID NO: 3161098 - RNA, 19 nt, Artificial Sequence
  Description of Artificial Sequence: Synthetic oligonucleotide
aaauuacuggcaaugaguu

SEQ ID NO: 3161099 - RNA, 19 nt, Artificial Sequence
  Description of Artificial Sequence: Synthetic oligonucleotide
acagccagccucuuccagc

SEQ ID NO: 3161100 - RNA, 19 nt, Artificial Sequence
  Description of Artificial Sequence: Synthetic oligonucleotide
gaacacuauagaaaucaag

SEQ ID NO: 3161101 - RNA, 19 nt, Artificial Sequence
  Description of Artificial Sequence: Synthetic oligonucleotide
gagucugaacuucacauga

SEQ ID NO: 3161102 - RNA, 19 nt, Artificial Sequence
  Description of Artificial Sequence: Synthetic oligonucleotide
aggguggacacaccaaaac

SEQ ID NO: 3161103 - RNA, 19 nt, Artificial Sequence
  Description of Artificial Sequence: Synthetic oligonucleotide
gaguucaucaaauuuagau

SEQ ID NO: 3161104 - RNA, 19 nt, Artificial Sequence
  Description of Artificial Sequence: Synthetic oligonucleotide
ucuuucuccuuucuggauc

SEQ ID NO: 3161105 - RNA, 19 nt, Artificial Sequence
  Description of Artificial Sequence: Synthetic oligonucleotide
acaucucugacccugcaca

SEQ ID NO: 3161106 - RNA, 19 nt, Artificial Sequence
  Description of Artificial Sequence: Synthetic oligonucleotide
ccaagaacuucuuugauac

SEQ ID NO: 3161107 - RNA, 19 nt, Artificial Sequence
  Description of Artificial Sequence: Synthetic oligonucleotide
uuagguacugcauggccca

SEQ ID NO: 3161108 - RNA, 19 nt, Artificial Sequence
  Description of Artificial Sequence: Synthetic oligonucleotide
cauuugaugaagccuggag

SEQ ID NO: 3161109 - RNA, 19 nt, Artificial Sequence
  Description of Artificial Sequence: Synthetic oligonucleotide
acaugacuaucauccaggg

SEQ ID NO: 3161110 - RNA, 19 nt, Artificial Sequence
  Description of Artificial Sequence: Synthetic oligonucleotide
accaaaagucucuacgugu

SEQ ID NO: 3161111 - RNA, 19 nt, Artificial Sequence
  Description of Artificial Sequence: Synthetic oligonucleotide
gaaccaagaacuucuuuga

SEQ ID NO: 3161112 - RNA, 19 nt, Artificial Sequence
  Description of Artificial Sequence: Synthetic oligonucleotide
acuucacaugacuaucauc

SEQ ID NO: 3161113 - RNA, 19 nt, Artificial Sequence
  Description of Artificial Sequence: Synthetic oligonucleotide
ugacccugcacauuugaug

SEQ ID NO: 3161114 - RNA, 19 nt, Artificial Sequence
  Description of Artificial Sequence: Synthetic oligonucleotide
uuucacuucuuccacuguc

SEQ ID NO: 3161115 - RNA, 19 nt, Artificial Sequence
  Description of Artificial Sequence: Synthetic oligonucleotide
ucugaacuucacaugacua

SEQ ID NO: 3161116 - RNA, 19 nt, Artificial Sequence
  Description of Artificial Sequence: Synthetic oligonucleotide
auuccaagcgacucuggag

SEQ ID NO: 3161117 - RNA, 19 nt, Artificial Sequence
  Description of Artificial Sequence: Synthetic oligonucleotide
uagaucuaucuugaacugg

SEQ ID NO: 3161118 - RNA, 19 nt, Artificial Sequence
  Description of Artificial Sequence: Synthetic oligonucleotide
uagaaaucaagaacaucuc

SEQ ID NO: 3161119 - RNA, 19 nt, Artificial Sequence
  Description of Artificial Sequence: Synthetic oligonucleotide
caggugguguguacgaucg

SEQ ID NO: 3161120 - RNA, 19 nt, Artificial Sequence
  Description of Artificial Sequence: Synthetic oligonucleotide
ggaguuagguacugcaugg

SEQ ID NO: 3161121 - RNA, 19 nt, Artificial Sequence
  Description of Artificial Sequence: Synthetic oligonucleotide
uuaguguagaaguugaggg

SEQ ID NO: 3161122 - RNA, 19 nt, Artificial Sequence
  Description of Artificial Sequence: Synthetic oligonucleotide
uucaggaccacuuuaaacc

SEQ ID NO: 3161123 - RNA, 19 nt, Artificial Sequence
  Description of Artificial Sequence: Synthetic oligonucleotide
aaugaaaggggcuucucuc

SEQ ID NO: 3161124 - RNA, 19 nt, Artificial Sequence
  Description of Artificial Sequence: Synthetic oligonucleotide
ucaaaugugcccaugcucc

SEQ ID NO: 3161125 - RNA, 19 nt, Artificial Sequence
  Description of Artificial Sequence: Synthetic oligonucleotide
augacaaacugguaguagc

SEQ ID NO: 3161126 - RNA, 19 nt, Artificial Sequence
  Description of Artificial Sequence: Synthetic oligonucleotide
ugggaugacaaacugguag

SEQ ID NO: 3161127 - RNA, 19 nt, Artificial Sequence
  Description of Artificial Sequence: Synthetic oligonucleotide
gaugucuccagaaugaaag

SEQ ID NO: 3161128 - RNA, 19 nt, Artificial Sequence
  Description of Artificial Sequence: Synthetic oligonucleotide
aauggaccgauaccaaggg

SEQ ID NO: 3161129 - RNA, 19 nt, Artificial Sequence
  Description of Artificial Sequence: Synthetic oligonucleotide
gaaguugagggacaacugg

SEQ ID NO: 3161130 - RNA, 19 nt, Artificial Sequence
  Description of Artificial Sequence: Synthetic oligonucleotide
uucacaaucacugugcugu

SEQ ID NO: 3161131 - RNA, 19 nt, Artificial Sequence
  Description of Artificial Sequence: Synthetic oligonucleotide
cuguagaagugguagaugg

SEQ ID NO: 3161132 - RNA, 19 nt, Artificial Sequence
  Description of Artificial Sequence: Synthetic oligonucleotide
uuggcauuaguguagaagu

SEQ ID NO: 3161133 - RNA, 19 nt, Artificial Sequence
  Description of Artificial Sequence: Synthetic oligonucleotide
gauaccaagggguacauga

SEQ ID NO: 3161134 - RNA, 19 nt, Artificial Sequence
  Description of Artificial Sequence: Synthetic oligonucleotide
aaaacuuggcauuagugua

SEQ ID NO: 3161135 - RNA, 19 nt, Artificial Sequence
  Description of Artificial Sequence: Synthetic oligonucleotide
ucugggaugacaaacuggu

SEQ ID NO: 3161136 - RNA, 19 nt, Artificial Sequence
  Description of Artificial Sequence: Synthetic oligonucleotide
cuugacaugaacaguggcc

SEQ ID NO: 3161137 - RNA, 19 nt, Artificial Sequence
  Description of Artificial Sequence: Synthetic oligonucleotide
auuaguguagaaguugagg

SEQ ID NO: 3161138 - RNA, 19 nt, Artificial Sequence
  Description of Artificial Sequence: Synthetic oligonucleotide
aguguagaaguugagggac

SEQ ID NO: 3161139 - RNA, 19 nt, Artificial Sequence
  Description of Artificial Sequence: Synthetic oligonucleotide
ucaggaccacuuuaaaccg

SEQ ID NO: 3161140 - RNA, 19 nt, Artificial Sequence
  Description of Artificial Sequence: Synthetic oligonucleotide
uucuucacaaucacugugc

SEQ ID NO: 3161141 - RNA, 19 nt, Artificial Sequence
  Description of Artificial Sequence: Synthetic oligonucleotide
acaacuggcucucaaaugu

SEQ ID NO: 3161142 - RNA, 19 nt, Artificial Sequence
  Description of Artificial Sequence: Synthetic oligonucleotide
aaguugagggacaacuggc

SEQ ID NO: 3161143 - RNA, 19 nt, Artificial Sequence
  Description of Artificial Sequence: Synthetic oligonucleotide
ucauuggacacgauguggc

SEQ ID NO: 3161144 - RNA, 19 nt, Artificial Sequence
  Description of Artificial Sequence: Synthetic oligonucleotide
caugaagucagcugagggg

SEQ ID NO: 3161145 - RNA, 19 nt, Artificial Sequence
  Description of Artificial Sequence: Synthetic oligonucleotide
gagaaggaguaguugacag

SEQ ID NO: 3161146 - RNA, 19 nt, Artificial Sequence
  Description of Artificial Sequence: Synthetic oligonucleotide
acaugaagucagcugaggg

SEQ ID NO: 3161147 - RNA, 19 nt, Artificial Sequence
  Description of Artificial Sequence: Synthetic oligonucleotide
acugguaguagccuccuuc

SEQ ID NO: 3161148 - RNA, 19 nt, Artificial Sequence
  Description of Artificial Sequence: Synthetic oligonucleotide
uguagaagugguagauggg

SEQ ID NO: 3161149 - RNA, 19 nt, Artificial Sequence
  Description of Artificial Sequence: Synthetic oligonucleotide
ugacaaacugguaguagcc

SEQ ID NO: 3161150 - RNA, 19 nt, Artificial Sequence
  Description of Artificial Sequence: Synthetic oligonucleotide
agaagugguagaugggagg

SEQ ID NO: 3161151 - RNA, 19 nt, Artificial Sequence
  Description of Artificial Sequence: Synthetic oligonucleotide
aaagcagccugguucacca

SEQ ID NO: 3161152 - RNA, 19 nt, Artificial Sequence
  Description of Artificial Sequence: Synthetic oligonucleotide
ucaaaagcagccugguuca

SEQ ID NO: 3161153 - RNA, 19 nt, Artificial Sequence
  Description of Artificial Sequence: Synthetic oligonucleotide
gaauggaccgauaccaagg

SEQ ID NO: 3161154 - RNA, 19 nt, Artificial Sequence
  Description of Artificial Sequence: Synthetic oligonucleotide
gucaaaagcagccugguuc

SEQ ID NO: 3161155 - RNA, 19 nt, Artificial Sequence
  Description of Artificial Sequence: Synthetic oligonucleotide
ugugaacaggucugaaccg

SEQ ID NO: 3161156 - RNA, 19 nt, Artificial Sequence
  Description of Artificial Sequence: Synthetic oligonucleotide
ucuccagaaugaaaggggc

SEQ ID NO: 3161157 - RNA, 19 nt, Artificial Sequence
  Description of Artificial Sequence: Synthetic oligonucleotide
uggaccgauaccaaggggu

SEQ ID NO: 3161158 - RNA, 19 nt, Artificial Sequence
  Description of Artificial Sequence: Synthetic oligonucleotide
aaaagcagccugguucacc

SEQ ID NO: 3161159 - RNA, 19 nt, Artificial Sequence
  Description of Artificial Sequence: Synthetic oligonucleotide
ugucuccagaaugaaaggg

SEQ ID NO: 3161160 - RNA, 19 nt, Artificial Sequence
  Description of Artificial Sequence: Synthetic oligonucleotide
gaaaacuuggcauuagugu

SEQ ID NO: 3161161 - RNA, 19 nt, Artificial Sequence
  Description of Artificial Sequence: Synthetic oligonucleotide
uucuugacaugaacagugg

SEQ ID NO: 3161162 - RNA, 19 nt, Artificial Sequence
  Description of Artificial Sequence: Synthetic oligonucleotide
uagaaguugagggacaacu

SEQ ID NO: 3161163 - RNA, 19 nt, Artificial Sequence
  Description of Artificial Sequence: Synthetic oligonucleotide
aaucacugugcugucauug

SEQ ID NO: 3161164 - RNA, 19 nt, Artificial Sequence
  Description of Artificial Sequence: Synthetic oligonucleotide
aacaguggccacucucugg

SEQ ID NO: 3161165 - RNA, 19 nt, Artificial Sequence
  Description of Artificial Sequence: Synthetic oligonucleotide
auucuugacaugaacagug

SEQ ID NO: 3161166 - RNA, 19 nt, Artificial Sequence
  Description of Artificial Sequence: Synthetic oligonucleotide
uuaaaccgggugcuuagcc

SEQ ID NO: 3161167 - RNA, 19 nt, Artificial Sequence
  Description of Artificial Sequence: Synthetic oligonucleotide
uuggcuuccacuccuguga

SEQ ID NO: 3161168 - RNA, 19 nt, Artificial Sequence
  Description of Artificial Sequence: Synthetic oligonucleotide
uugacaugaacaguggcca

SEQ ID NO: 3161169 - RNA, 19 nt, Artificial Sequence
  Description of Artificial Sequence: Synthetic oligonucleotide
ugaacaguggccacucucu

SEQ ID NO: 3161170 - RNA, 19 nt, Artificial Sequence
  Description of Artificial Sequence: Synthetic oligonucleotide
uagaagugguagaugggag

SEQ ID NO: 3161171 - RNA, 19 nt, Artificial Sequence
  Description of Artificial Sequence: Synthetic oligonucleotide
ugugcugucauuggacacg

SEQ ID NO: 3161172 - RNA, 19 nt, Artificial Sequence
  Description of Artificial Sequence: Synthetic oligonucleotide
accgauuuccgaugucucc

SEQ ID NO: 3161173 - RNA, 19 nt, Artificial Sequence
  Description of Artificial Sequence: Synthetic oligonucleotide
uguucuuaggugauagguc

SEQ ID NO: 3161174 - RNA, 19 nt, Artificial Sequence
  Description of Artificial Sequence: Synthetic oligonucleotide
aacuggcucucaaaugugc

SEQ ID NO: 3161175 - RNA, 19 nt, Artificial Sequence
  Description of Artificial Sequence: Synthetic oligonucleotide
aguaggaccuguucuuagg

SEQ ID NO: 3161176 - RNA, 19 nt, Artificial Sequence
  Description of Artificial Sequence: Synthetic oligonucleotide
uaggugauaggucugggau

SEQ ID NO: 3161177 - RNA, 19 nt, Artificial Sequence
  Description of Artificial Sequence: Synthetic oligonucleotide
ucuugacaugaacaguggc

SEQ ID NO: 3161178 - RNA, 19 nt, Artificial Sequence
  Description of Artificial Sequence: Synthetic oligonucleotide
agcccuuuggcuuccacuc

SEQ ID NO: 3161179 - RNA, 19 nt, Artificial Sequence
  Description of Artificial Sequence: Synthetic oligonucleotide
uguacucugacuggguucc

SEQ ID NO: 3161180 - RNA, 19 nt, Artificial Sequence
  Description of Artificial Sequence: Synthetic oligonucleotide
aaacuuggcauuaguguag

SEQ ID NO: 3161181 - RNA, 19 nt, Artificial Sequence
  Description of Artificial Sequence: Synthetic oligonucleotide
agaauggaccgauaccaag

SEQ ID NO: 3161182 - RNA, 19 nt, Artificial Sequence
  Description of Artificial Sequence: Synthetic oligonucleotide
aaaccgggugcuuagcccu

SEQ ID NO: 3161183 - RNA, 19 nt, Artificial Sequence
  Description of Artificial Sequence: Synthetic oligonucleotide
uccgaugucuccagaauga

SEQ ID NO: 3161184 - RNA, 19 nt, Artificial Sequence
  Description of Artificial Sequence: Synthetic oligonucleotide
augaacaguggccacucuc

SEQ ID NO: 3161185 - RNA, 19 nt, Artificial Sequence
  Description of Artificial Sequence: Synthetic oligonucleotide
aagggguacaugaagucag

SEQ ID NO: 3161186 - RNA, 19 nt, Artificial Sequence
  Description of Artificial Sequence: Synthetic oligonucleotide
gauguggcuguagaagugg

SEQ ID NO: 3161187 - RNA, 19 nt, Artificial Sequence
  Description of Artificial Sequence: Synthetic oligonucleotide
uuccgaugucuccagaaug

SEQ ID NO: 3161188 - RNA, 19 nt, Artificial Sequence
  Description of Artificial Sequence: Synthetic oligonucleotide
cuuggcauuaguguagaag

SEQ ID NO: 3161189 - RNA, 19 nt, Artificial Sequence
  Description of Artificial Sequence: Synthetic oligonucleotide
ucuuaggugauaggucugg

SEQ ID NO: 3161190 - RNA, 19 nt, Artificial Sequence
  Description of Artificial Sequence: Synthetic oligonucleotide
guaguugacaggcugguuc

SEQ ID NO: 3161191 - RNA, 19 nt, Artificial Sequence
  Description of Artificial Sequence: Synthetic oligonucleotide
gguacaugaagucagcuga

SEQ ID NO: 3161192 - RNA, 19 nt, Artificial Sequence
  Description of Artificial Sequence: Synthetic oligonucleotide
uugguggaaaacuuggcau

SEQ ID NO: 3161193 - RNA, 19 nt, Artificial Sequence
  Description of Artificial Sequence: Synthetic oligonucleotide
ucucuugguggaaaacuug

SEQ ID NO: 3161194 - RNA, 19 nt, Artificial Sequence
  Description of Artificial Sequence: Synthetic oligonucleotide
uaccaagggguacaugaag

SEQ ID NO: 3161195 - RNA, 19 nt, Artificial Sequence
  Description of Artificial Sequence: Synthetic oligonucleotide
ugguaggugcaggagaagg

SEQ ID NO: 3161196 - RNA, 19 nt, Artificial Sequence
  Description of Artificial Sequence: Synthetic oligonucleotide
agaugggaggcuuguacuc

SEQ ID NO: 3161197 - RNA, 19 nt, Artificial Sequence
  Description of Artificial Sequence: Synthetic oligonucleotide
caaacugguaguagccucc

SEQ ID NO: 3161198 - RNA, 19 nt, Artificial Sequence
  Description of Artificial Sequence: Synthetic oligonucleotide
cuuuaaaccgggugcuuag

SEQ ID NO: 3161199 - RNA, 19 nt, Artificial Sequence
  Description of Artificial Sequence: Synthetic oligonucleotide
gaugacaaacugguaguag

SEQ ID NO: 3161200 - RNA, 19 nt, Artificial Sequence
  Description of Artificial Sequence: Synthetic oligonucleotide
uaguguagaaguugaggga

SEQ ID NO: 3161201 - RNA, 19 nt, Artificial Sequence
  Description of Artificial Sequence: Synthetic oligonucleotide
gaagugguagaugggaggc

SEQ ID NO: 3161202 - RNA, 19 nt, Artificial Sequence
  Description of Artificial Sequence: Synthetic oligonucleotide
ugucauuggacacgaugug

SEQ ID NO: 3161203 - RNA, 19 nt, Artificial Sequence
  Description of Artificial Sequence: Synthetic oligonucleotide
aucacugugcugucauugg

SEQ ID NO: 3161204 - RNA, 19 nt, Artificial Sequence
  Description of Artificial Sequence: Synthetic oligonucleotide
uaaaccgggugcuuagccc

SEQ ID NO: 3161205 - RNA, 19 nt, Artificial Sequence
  Description of Artificial Sequence: Synthetic oligonucleotide
guucuucacaaucacugug

SEQ ID NO: 3161206 - RNA, 19 nt, Artificial Sequence
  Description of Artificial Sequence: Synthetic oligonucleotide
ucugaaccgauuuccgaug

SEQ ID NO: 3161207 - RNA, 19 nt, Artificial Sequence
  Description of Artificial Sequence: Synthetic oligonucleotide
aggaguaguugacaggcug

SEQ ID NO: 3161208 - RNA, 19 nt, Artificial Sequence
  Description of Artificial Sequence: Synthetic oligonucleotide
gucuccagaaugaaagggg

SEQ ID NO: 3161209 - RNA, 19 nt, Artificial Sequence
  Description of Artificial Sequence: Synthetic oligonucleotide
augucuccagaaugaaagg

SEQ ID NO: 3161210 - RNA, 19 nt, Artificial Sequence
  Description of Artificial Sequence: Synthetic oligonucleotide
aggaccuguucuuagguga

SEQ ID NO: 3161211 - RNA, 19 nt, Artificial Sequence
  Description of Artificial Sequence: Synthetic oligonucleotide
gacaacuggcucucaaaug

SEQ ID NO: 3161212 - RNA, 19 nt, Artificial Sequence
  Description of Artificial Sequence: Synthetic oligonucleotide
uggaaaacuuggcauuagu

SEQ ID NO: 3161213 - RNA, 19 nt, Artificial Sequence
  Description of Artificial Sequence: Synthetic oligonucleotide
gaccacuuuaaaccgggug

SEQ ID NO: 3161214 - RNA, 19 nt, Artificial Sequence
  Description of Artificial Sequence: Synthetic oligonucleotide
uugagggacaacuggcucu

SEQ ID NO: 3161215 - RNA, 19 nt, Artificial Sequence
  Description of Artificial Sequence: Synthetic oligonucleotide
guagaugggaggcuuguac

SEQ ID NO: 3161216 - RNA, 19 nt, Artificial Sequence
  Description of Artificial Sequence: Synthetic oligonucleotide
uuaggugauaggucuggga

SEQ ID NO: 3161217 - RNA, 19 nt, Artificial Sequence
  Description of Artificial Sequence: Synthetic oligonucleotide
guucaggaccacuuuaaac

SEQ ID NO: 3161218 - RNA, 19 nt, Artificial Sequence
  Description of Artificial Sequence: Synthetic oligonucleotide
ucucaaaugugcccaugcu

SEQ ID NO: 3161219 - RNA, 19 nt, Artificial Sequence
  Description of Artificial Sequence: Synthetic oligonucleotide
uagguggagugguaggugc

SEQ ID NO: 3161220 - RNA, 19 nt, Artificial Sequence
  Description of Artificial Sequence: Synthetic oligonucleotide
cucucaaaugugcccaugc

SEQ ID NO: 3161221 - RNA, 19 nt, Artificial Sequence
  Description of Artificial Sequence: Synthetic oligonucleotide
aguuguuauauucagugcc

SEQ ID NO: 3161222 - RNA, 19 nt, Artificial Sequence
  Description of Artificial Sequence: Synthetic oligonucleotide
  modified_base (2)..(2): a, c, u, g, unknown or other
  modified_base (6)..(6): a, c, u, g, unknown or other
unuuunuuuauuuauuaag

SEQ ID NO: 3161223 - RNA, 19 nt, Artificial Sequence
  Description of Artificial Sequence: Synthetic oligonucleotide
  modified_base (2)..(2): a, c, u, g, unknown or other
unuuuauuuauuaagugaa

SEQ ID NO: 3161224 - RNA, 19 nt, Artificial Sequence
  Description of Artificial Sequence: Synthetic oligonucleotide
  modified_base (3)..(3): a, c, u, g, unknown or other
uunuuuauuuauuaaguga

SEQ ID NO: 3161225 - RNA, 19 nt, Artificial Sequence
  Description of Artificial Sequence: Synthetic oligonucleotide
  modified_base (4)..(4): a, c, u, g, unknown or other
uuunuuuauuuauuaagug

SEQ ID NO: 3161226 - RNA, 19 nt, Artificial Sequence
  Description of Artificial Sequence: Synthetic oligonucleotide
uauuaagugaauuuaguac

SEQ ID NO: 3161227 - RNA, 19 nt, Artificial Sequence
  Description of Artificial Sequence: Synthetic oligonucleotide
aagugaauuuaguacacuc

SEQ ID NO: 3161228 - RNA, 19 nt, Artificial Sequence
  Description of Artificial Sequence: Synthetic oligonucleotide
auuaagugaauuuaguaca

SEQ ID NO: 3161229 - RNA, 19 nt, Artificial Sequence
  Description of Artificial Sequence: Synthetic oligonucleotide
  modified_base (2)..(2): a, c, u, g, unknown or other
  modified_base (6)..(6): a, c, u, g, unknown or other
  modified_base (10)..(10): a, c, u, g, unknown or other
  modified_base (14)..(14): a, c, u, g, unknown or other
unuuunuuunuuunuuuau

SEQ ID NO: 3161230 - RNA, 19 nt, Artificial Sequence
  Description of Artificial Sequence: Synthetic oligonucleotide
  modified_base (6)..(6): a, c, u, g, unknown or other
  modified_base (10)..(10): a, c, u, g, unknown or other
  modified_base (14)..(14): a, c, u, g, unknown or other
  modified_base (18)..(18): a, c, u, g, unknown or other
uauuunuuunuuunuuunu

SEQ ID NO: 3161231 - RNA, 19 nt, Artificial Sequence
  Description of Artificial Sequence: Synthetic oligonucleotide
  modified_base (2)..(2): a, c, u, g, unknown or other
  modified_base (6)..(6): a, c, u, g, unknown or other
  modified_base (10)..(10): a, c, u, g, unknown or other
unuuunuuunuuuauuuau

SEQ ID NO: 3161232 - RNA, 19 nt, Artificial Sequence
  Description of Artificial Sequence: Synthetic oligonucleotide
aaguuguuauauucagugc

SEQ ID NO: 3161233 - RNA, 19 nt, Artificial Sequence
  Description of Artificial Sequence: Synthetic oligonucleotide
uuuaguacacucuugcuac

SEQ ID NO: 3161234 - RNA, 19 nt, Artificial Sequence
  Description of Artificial Sequence: Synthetic oligonucleotide
acacucuugcuacaaaucc

SEQ ID NO: 3161235 - RNA, 19 nt, Artificial Sequence
  Description of Artificial Sequence: Synthetic oligonucleotide
gaauuuaguacacucuugc

SEQ ID NO: 3161236 - RNA, 19 nt, Artificial Sequence
  Description of Artificial Sequence: Synthetic oligonucleotide
  modified_base (4)..(4): a, c, u, g, unknown or other
  modified_base (8)..(8): a, c, u, g, unknown or other
uuunuuunuuuauuuauua

SEQ ID NO: 3161237 - RNA, 19 nt, Artificial Sequence
  Description of Artificial Sequence: Synthetic oligonucleotide
caaguuguuauauucagug

SEQ ID NO: 3161238 - RNA, 19 nt, Artificial Sequence
  Description of Artificial Sequence: Synthetic oligonucleotide
aauuccagcuccuccgggc

SEQ ID NO: 3161239 - RNA, 19 nt, Artificial Sequence
  Description of Artificial Sequence: Synthetic oligonucleotide
  modified_base (4)..(4): a, c, u, g, unknown or other
  modified_base (8)..(8): a, c, u, g, unknown or other
  modified_base (12)..(12): a, c, u, g, unknown or other
  modified_base (16)..(16): a, c, u, g, unknown or other
uuunuuunuuunuuunuuu

SEQ ID NO: 3161240 - RNA, 19 nt, Artificial Sequence
  Description of Artificial Sequence: Synthetic oligonucleotide
uuuauuaagugaauuuagu

SEQ ID NO: 3161241 - RNA, 19 nt, Artificial Sequence
  Description of Artificial Sequence: Synthetic oligonucleotide
agaaauuccagcuccuccg

SEQ ID NO: 3161242 - RNA, 19 nt, Artificial Sequence
  Description of Artificial Sequence: Synthetic oligonucleotide
  modified_base (8)..(8): a, c, u, g, unknown or other
  modified_base (12)..(12): a, c, u, g, unknown or other
  modified_base (16)..(16): a, c, u, g, unknown or other
uuuauuunuuunuuunuuu

SEQ ID NO: 3161243 - RNA, 19 nt, Artificial Sequence
  Description of Artificial Sequence: Synthetic oligonucleotide
  modified_base (4)..(4): a, c, u, g, unknown or other
  modified_base (8)..(8): a, c, u, g, unknown or other
  modified_base (12)..(12): a, c, u, g, unknown or other
uuunuuunuuunuuuauuu

SEQ ID NO: 3161244 - RNA, 19 nt, Artificial Sequence
  Description of Artificial Sequence: Synthetic oligonucleotide
  modified_base (3)..(3): a, c, u, g, unknown or other
  modified_base (7)..(7): a, c, u, g, unknown or other
uunuuunuuuauuuauuaa

SEQ ID NO: 3161245 - RNA, 19 nt, Artificial Sequence
  Description of Artificial Sequence: Synthetic oligonucleotide
gucacugccacucagguag

SEQ ID NO: 3161246 - RNA, 19 nt, Artificial Sequence
  Description of Artificial Sequence: Synthetic oligonucleotide
gaaucaaguuguuauauuc

SEQ ID NO: 3161247 - RNA, 19 nt, Artificial Sequence
  Description of Artificial Sequence: Synthetic oligonucleotide
  modified_base (3)..(3): a, c, u, g, unknown or other
  modified_base (7)..(7): a, c, u, g, unknown or other
  modified_base (11)..(11): a, c, u, g, unknown or other
  modified_base (15)..(15): a, c, u, g, unknown or other
uunuuunuuunuuunuuua

SEQ ID NO: 3161248 - RNA, 19 nt, Artificial Sequence
  Description of Artificial Sequence: Synthetic oligonucleotide
  modified_base (7)..(7): a, c, u, g, unknown or other
  modified_base (11)..(11): a, c, u, g, unknown or other
  modified_base (15)..(15): a, c, u, g, unknown or other
  modified_base (19)..(19): a, c, u, g, unknown or other
uuauuunuuunuuunuuun

SEQ ID NO: 3161249 - RNA, 19 nt, Artificial Sequence
  Description of Artificial Sequence: Synthetic oligonucleotide
  modified_base (3)..(3): a, c, u, g, unknown or other
  modified_base (7)..(7): a, c, u, g, unknown or other
  modified_base (11)..(11): a, c, u, g, unknown or other
uunuuunuuunuuuauuua

SEQ ID NO: 3161250 - RNA, 19 nt, Artificial Sequence
  Description of Artificial Sequence: Synthetic oligonucleotide
uuauuuauuaagugaauuu

SEQ ID NO: 3161251 - RNA, 19 nt, Artificial Sequence
  Description of Artificial Sequence: Synthetic oligonucleotide
uccaauggugcucugagga

SEQ ID NO: 3161252 - RNA, 19 nt, Artificial Sequence
  Description of Artificial Sequence: Synthetic oligonucleotide
uuauuaagugaauuuagua

SEQ ID NO: 3161253 - RNA, 19 nt, Artificial Sequence
  Description of Artificial Sequence: Synthetic oligonucleotide
aucaaguuguuauauucag

SEQ ID NO: 3161254 - RNA, 19 nt, Artificial Sequence
  Description of Artificial Sequence: Synthetic oligonucleotide
aauuuaguacacucuugcu

SEQ ID NO: 3161255 - RNA, 19 nt, Artificial Sequence
  Description of Artificial Sequence: Synthetic oligonucleotide
uuaagugaauuuaguacac

SEQ ID NO: 3161256 - RNA, 19 nt, Artificial Sequence
  Description of Artificial Sequence: Synthetic oligonucleotide
uauuuauuaagugaauuua

SEQ ID NO: 3161257 - RNA, 19 nt, Artificial Sequence
  Description of Artificial Sequence: Synthetic oligonucleotide
cuucagaaauuccagcucc

SEQ ID NO: 3161258 - RNA, 19 nt, Artificial Sequence
  Description of Artificial Sequence: Synthetic oligonucleotide
auuuauuaagugaauuuag

SEQ ID NO: 3161259 - RNA, 19 nt, Artificial Sequence
  Description of Artificial Sequence: Synthetic oligonucleotide
uauaguuccugccacugcu

SEQ ID NO: 3161260 - RNA, 19 nt, Artificial Sequence
  Description of Artificial Sequence: Synthetic oligonucleotide
ugaauuuaguacacucuug

SEQ ID NO: 3161261 - RNA, 19 nt, Artificial Sequence
  Description of Artificial Sequence: Synthetic oligonucleotide
uacaaauccaccuccugug

SEQ ID NO: 3161262 - RNA, 19 nt, Artificial Sequence
  Description of Artificial Sequence: Synthetic oligonucleotide
uuauauucagugccgucug

SEQ ID NO: 3161263 - RNA, 19 nt, Artificial Sequence
  Description of Artificial Sequence: Synthetic oligonucleotide
uuucuguggaggccgaucc

SEQ ID NO: 3161264 - RNA, 19 nt, Artificial Sequence
  Description of Artificial Sequence: Synthetic oligonucleotide
ucuugcuacaaauccaccu

SEQ ID NO: 3161265 - RNA, 19 nt, Artificial Sequence
  Description of Artificial Sequence: Synthetic oligonucleotide
uuuauuuauuaagugaauu

SEQ ID NO: 3161266 - RNA, 19 nt, Artificial Sequence
  Description of Artificial Sequence: Synthetic oligonucleotide
uaccucuucagaaauucca

SEQ ID NO: 3161267 - RNA, 19 nt, Artificial Sequence
  Description of Artificial Sequence: Synthetic oligonucleotide
aaucaaguuguuauauuca

SEQ ID NO: 3161268 - RNA, 19 nt, Artificial Sequence
  Description of Artificial Sequence: Synthetic oligonucleotide
auuuaguacacucuugcua

SEQ ID NO: 3161269 - RNA, 19 nt, Artificial Sequence
  Description of Artificial Sequence: Synthetic oligonucleotide
ugaguauaguuccugccac

SEQ ID NO: 3161270 - RNA, 19 nt, Artificial Sequence
  Description of Artificial Sequence: Synthetic oligonucleotide
ugugaguauaguuccugcc

SEQ ID NO: 3161271 - RNA, 19 nt, Artificial Sequence
  Description of Artificial Sequence: Synthetic oligonucleotide
guuguuauauucagugccg

SEQ ID NO: 3161272 - RNA, 19 nt, Artificial Sequence
  Description of Artificial Sequence: Synthetic oligonucleotide
ucugaggacuuucugugga

SEQ ID NO: 3161273 - RNA, 19 nt, Artificial Sequence
  Description of Artificial Sequence: Synthetic oligonucleotide
gaaauuccagcuccuccgg

SEQ ID NO: 3161274 - RNA, 19 nt, Artificial Sequence
  Description of Artificial Sequence: Synthetic oligonucleotide
aaauccaccuccugugagu

SEQ ID NO: 3161275 - RNA, 19 nt, Artificial Sequence
  Description of Artificial Sequence: Synthetic oligonucleotide
aaauuccagcuccuccggg

SEQ ID NO: 3161276 - RNA, 19 nt, Artificial Sequence
  Description of Artificial Sequence: Synthetic oligonucleotide
ucaaguuguuauauucagu

SEQ ID NO: 3161277 - RNA, 19 nt, Artificial Sequence
  Description of Artificial Sequence: Synthetic oligonucleotide
uugcuacaaauccaccucc

SEQ ID NO: 3161278 - RNA, 19 nt, Artificial Sequence
  Description of Artificial Sequence: Synthetic oligonucleotide
ucuucagaaauuccagcuc

SEQ ID NO: 3161279 - RNA, 19 nt, Artificial Sequence
  Description of Artificial Sequence: Synthetic oligonucleotide
uauucagugccgucugucc

SEQ ID NO: 3161280 - RNA, 19 nt, Artificial Sequence
  Description of Artificial Sequence: Synthetic oligonucleotide
acucuugcuacaaauccac

SEQ ID NO: 3161281 - RNA, 19 nt, Artificial Sequence
  Description of Artificial Sequence: Synthetic oligonucleotide
cuccugugaguauaguucc

SEQ ID NO: 3161282 - RNA, 19 nt, Artificial Sequence
  Description of Artificial Sequence: Synthetic oligonucleotide
cuugcuacaaauccaccuc

SEQ ID NO: 3161283 - RNA, 19 nt, Artificial Sequence
  Description of Artificial Sequence: Synthetic oligonucleotide
uguaccucuucagaaauuc

SEQ ID NO: 3161284 - RNA, 19 nt, Artificial Sequence
  Description of Artificial Sequence: Synthetic oligonucleotide
ucuguccacauccaauggu

SEQ ID NO: 3161285 - RNA, 19 nt, Artificial Sequence
  Description of Artificial Sequence: Synthetic oligonucleotide
uacacucuugcuacaaauc

SEQ ID NO: 3161286 - RNA, 19 nt, Artificial Sequence
  Description of Artificial Sequence: Synthetic oligonucleotide
ucagguaggcacacucucc

SEQ ID NO: 3161287 - RNA, 19 nt, Artificial Sequence
  Description of Artificial Sequence: Synthetic oligonucleotide
cagaaauuccagcuccucc

SEQ ID NO: 3161288 - RNA, 19 nt, Artificial Sequence
  Description of Artificial Sequence: Synthetic oligonucleotide
gaugucacugccacucagg

SEQ ID NO: 3161289 - RNA, 19 nt, Artificial Sequence
  Description of Artificial Sequence: Synthetic oligonucleotide
ugcucugaggacuuucugu

SEQ ID NO: 3161290 - RNA, 19 nt, Artificial Sequence
  Description of Artificial Sequence: Synthetic oligonucleotide
aggcacacucuccuucucc

SEQ ID NO: 3161291 - RNA, 19 nt, Artificial Sequence
  Description of Artificial Sequence: Synthetic oligonucleotide
ugaugucacugccacucag

SEQ ID NO: 3161292 - RNA, 19 nt, Artificial Sequence
  Description of Artificial Sequence: Synthetic oligonucleotide
cauccaauggugcucugag

SEQ ID NO: 3161293 - RNA, 19 nt, Artificial Sequence
  Description of Artificial Sequence: Synthetic oligonucleotide
uguccacauccaauggugc

SEQ ID NO: 3161294 - RNA, 19 nt, Artificial Sequence
  Description of Artificial Sequence: Synthetic oligonucleotide
  modified_base (5)..(5): a, c, u, g, unknown or other
  modified_base (9)..(9): a, c, u, g, unknown or other
  modified_base (13)..(13): a, c, u, g, unknown or other
  modified_base (17)..(17): a, c, u, g, unknown or other
auuunuuunuuunuuunuu

SEQ ID NO: 3161295 - RNA, 19 nt, Artificial Sequence
  Description of Artificial Sequence: Synthetic oligonucleotide
ugaggacuuucuguggagg

SEQ ID NO: 3161296 - RNA, 19 nt, Artificial Sequence
  Description of Artificial Sequence: Synthetic oligonucleotide
cuguccacauccaauggug

SEQ ID NO: 3161297 - RNA, 19 nt, Artificial Sequence
  Description of Artificial Sequence: Synthetic oligonucleotide
agugaauuuaguacacucu

SEQ ID NO: 3161298 - RNA, 19 nt, Artificial Sequence
  Description of Artificial Sequence: Synthetic oligonucleotide
ucaugccuccccuuguacc

SEQ ID NO: 3161299 - RNA, 19 nt, Artificial Sequence
  Description of Artificial Sequence: Synthetic oligonucleotide
gaggacuuucuguggaggc

SEQ ID NO: 3161300 - RNA, 19 nt, Artificial Sequence
  Description of Artificial Sequence: Synthetic oligonucleotide
aggacuuucuguggaggcc

SEQ ID NO: 3161301 - RNA, 19 nt, Artificial Sequence
  Description of Artificial Sequence: Synthetic oligonucleotide
cacacucuccuucuccucg

SEQ ID NO: 3161302 - RNA, 19 nt, Artificial Sequence
  Description of Artificial Sequence: Synthetic oligonucleotide
auauucagugccgucuguc

SEQ ID NO: 3161303 - RNA, 19 nt, Artificial Sequence
  Description of Artificial Sequence: Synthetic oligonucleotide
gugaguauaguuccugcca

SEQ ID NO: 3161304 - RNA, 19 nt, Artificial Sequence
  Description of Artificial Sequence: Synthetic oligonucleotide
aguauaguuccugccacug

SEQ ID NO: 3161305 - RNA, 19 nt, Artificial Sequence
  Description of Artificial Sequence: Synthetic oligonucleotide
uucagaaauuccagcuccu

SEQ ID NO: 3161306 - RNA, 19 nt, Artificial Sequence
  Description of Artificial Sequence: Synthetic oligonucleotide
cugugaguauaguuccugc

SEQ ID NO: 3161307 - RNA, 19 nt, Artificial Sequence
  Description of Artificial Sequence: Synthetic oligonucleotide
ucuguggaggccgauccag

SEQ ID NO: 3161308 - RNA, 19 nt, Artificial Sequence
  Description of Artificial Sequence: Synthetic oligonucleotide
uguuauauucagugccguc

SEQ ID NO: 3161309 - RNA, 19 nt, Artificial Sequence
  Description of Artificial Sequence: Synthetic oligonucleotide
gugccgucuguccacaucc

SEQ ID NO: 3161310 - RNA, 19 nt, Artificial Sequence
  Description of Artificial Sequence: Synthetic oligonucleotide
uggaggccgauccaguggu

SEQ ID NO: 3161311 - RNA, 19 nt, Artificial Sequence
  Description of Artificial Sequence: Synthetic oligonucleotide
gauccaguggucaugccuc

SEQ ID NO: 3161312 - RNA, 19 nt, Artificial Sequence
  Description of Artificial Sequence: Synthetic oligonucleotide
uauauucagugccgucugu

SEQ ID NO: 3161313 - RNA, 19 nt, Artificial Sequence
  Description of Artificial Sequence: Synthetic oligonucleotide
uguggaggccgauccagug

SEQ ID NO: 3161314 - RNA, 19 nt, Artificial Sequence
  Description of Artificial Sequence: Synthetic oligonucleotide
caaauccaccuccugugag

SEQ ID NO: 3161315 - RNA, 19 nt, Artificial Sequence
  Description of Artificial Sequence: Synthetic oligonucleotide
ugcuacaaauccaccuccu

SEQ ID NO: 3161316 - RNA, 19 nt, Artificial Sequence
  Description of Artificial Sequence: Synthetic oligonucleotide
uaagugaauuuaguacacu

SEQ ID NO: 3161317 - RNA, 19 nt, Artificial Sequence
  Description of Artificial Sequence: Synthetic oligonucleotide
uccccuuguaccucuucag

SEQ ID NO: 3161318 - RNA, 19 nt, Artificial Sequence
  Description of Artificial Sequence: Synthetic oligonucleotide
auccaauggugcucugagg

SEQ ID NO: 3161319 - RNA, 19 nt, Artificial Sequence
  Description of Artificial Sequence: Synthetic oligonucleotide
auucagugccgucugucca

SEQ ID NO: 3161320 - RNA, 19 nt, Artificial Sequence
  Description of Artificial Sequence: Synthetic oligonucleotide
auccaguggucaugccucc

SEQ ID NO: 3161321 - RNA, 19 nt, Artificial Sequence
  Description of Artificial Sequence: Synthetic oligonucleotide
agaguuacaagauaaacac

SEQ ID NO: 3161322 - RNA, 19 nt, Artificial Sequence
  Description of Artificial Sequence: Synthetic oligonucleotide
aaugagaaugaucauuccc

SEQ ID NO: 3161323 - RNA, 19 nt, Artificial Sequence
  Description of Artificial Sequence: Synthetic oligonucleotide
acaauuuggagcuugaagg

SEQ ID NO: 3161324 - RNA, 19 nt, Artificial Sequence
  Description of Artificial Sequence: Synthetic oligonucleotide
aaagaugucagacaacauc

SEQ ID NO: 3161325 - RNA, 19 nt, Artificial Sequence
  Description of Artificial Sequence: Synthetic oligonucleotide
aauaaacaaagcuggacag

SEQ ID NO: 3161326 - RNA, 19 nt, Artificial Sequence
  Description of Artificial Sequence: Synthetic oligonucleotide
aaagcuggacagcacaacc

SEQ ID NO: 3161327 - RNA, 19 nt, Artificial Sequence
  Description of Artificial Sequence: Synthetic oligonucleotide
aaugaucauucccagguuc

SEQ ID NO: 3161328 - RNA, 19 nt, Artificial Sequence
  Description of Artificial Sequence: Synthetic oligonucleotide
acaagauaaacacagaaaa

SEQ ID NO: 3161329 - RNA, 19 nt, Artificial Sequence
  Description of Artificial Sequence: Synthetic oligonucleotide
aagaggacaauuuggagcu

SEQ ID NO: 3161330 - RNA, 19 nt, Artificial Sequence
  Description of Artificial Sequence: Synthetic oligonucleotide
gaagaggacaauuuggagc

SEQ ID NO: 3161331 - RNA, 19 nt, Artificial Sequence
  Description of Artificial Sequence: Synthetic oligonucleotide
aacaucuuagggcugauga

SEQ ID NO: 3161332 - RNA, 19 nt, Artificial Sequence
  Description of Artificial Sequence: Synthetic oligonucleotide
gacagcacaaccuaagaag

SEQ ID NO: 3161333 - RNA, 19 nt, Artificial Sequence
  Description of Artificial Sequence: Synthetic oligonucleotide
ucagacaacaucuuagggc

SEQ ID NO: 3161334 - RNA, 19 nt, Artificial Sequence
  Description of Artificial Sequence: Synthetic oligonucleotide
aguuacaagauaaacacag

SEQ ID NO: 3161335 - RNA, 19 nt, Artificial Sequence
  Description of Artificial Sequence: Synthetic oligonucleotide
gaauaaacaaagcuggaca

SEQ ID NO: 3161336 - RNA, 19 nt, Artificial Sequence
  Description of Artificial Sequence: Synthetic oligonucleotide
agaaugaucauucccaggu

SEQ ID NO: 3161337 - RNA, 19 nt, Artificial Sequence
  Description of Artificial Sequence: Synthetic oligonucleotide
aagaagaacucagucacgg

SEQ ID NO: 3161338 - RNA, 19 nt, Artificial Sequence
  Description of Artificial Sequence: Synthetic oligonucleotide
uuacaagauaaacacagaa

SEQ ID NO: 3161339 - RNA, 19 nt, Artificial Sequence
  Description of Artificial Sequence: Synthetic oligonucleotide
aaucccacgaagaagaacu

SEQ ID NO: 3161340 - RNA, 19 nt, Artificial Sequence
  Description of Artificial Sequence: Synthetic oligonucleotide
aagaggagcaggcauccac

SEQ ID NO: 3161341 - RNA, 19 nt, Artificial Sequence
  Description of Artificial Sequence: Synthetic oligonucleotide
gacaauuuggagcuugaag

SEQ ID NO: 3161342 - RNA, 19 nt, Artificial Sequence
  Description of Artificial Sequence: Synthetic oligonucleotide
uucuccacaaagaugucag

SEQ ID NO: 3161343 - RNA, 19 nt, Artificial Sequence
  Description of Artificial Sequence: Synthetic oligonucleotide
ugucagacaacaucuuagg

SEQ ID NO: 3161344 - RNA, 19 nt, Artificial Sequence
  Description of Artificial Sequence: Synthetic oligonucleotide
aaaauaucaggaagaggac

SEQ ID NO: 3161345 - RNA, 19 nt, Artificial Sequence
  Description of Artificial Sequence: Synthetic oligonucleotide
aagaugucagacaacaucu

SEQ ID NO: 3161346 - RNA, 19 nt, Artificial Sequence
  Description of Artificial Sequence: Synthetic oligonucleotide
aacaaagcuggacagcaca

SEQ ID NO: 3161347 - RNA, 19 nt, Artificial Sequence
  Description of Artificial Sequence: Synthetic oligonucleotide
uacaagauaaacacagaaa

SEQ ID NO: 3161348 - RNA, 19 nt, Artificial Sequence
  Description of Artificial Sequence: Synthetic oligonucleotide
gaaggaguugguuaauccc

SEQ ID NO: 3161349 - RNA, 19 nt, Artificial Sequence
  Description of Artificial Sequence: Synthetic oligonucleotide
agacgaaugagaaugauca

SEQ ID NO: 3161350 - RNA, 19 nt, Artificial Sequence
  Description of Artificial Sequence: Synthetic oligonucleotide
uccacaagggacaagugac

SEQ ID NO: 3161351 - RNA, 19 nt, Artificial Sequence
  Description of Artificial Sequence: Synthetic oligonucleotide
gcugaauaaacaaagcugg

SEQ ID NO: 3161352 - RNA, 19 nt, Artificial Sequence
  Description of Artificial Sequence: Synthetic oligonucleotide
ucaggaagaggacaauuug

SEQ ID NO: 3161353 - RNA, 19 nt, Artificial Sequence
  Description of Artificial Sequence: Synthetic oligonucleotide
uaaacaaagcuggacagca

SEQ ID NO: 3161354 - RNA, 19 nt, Artificial Sequence
  Description of Artificial Sequence: Synthetic oligonucleotide
uggcugaauaaacaaagcu

SEQ ID NO: 3161355 - RNA, 19 nt, Artificial Sequence
  Description of Artificial Sequence: Synthetic oligonucleotide
uugguuaaucccacgaaga

SEQ ID NO: 3161356 - RNA, 19 nt, Artificial Sequence
  Description of Artificial Sequence: Synthetic oligonucleotide
uggagcuugaaggaguugg

SEQ ID NO: 3161357 - RNA, 19 nt, Artificial Sequence
  Description of Artificial Sequence: Synthetic oligonucleotide
ugaaggaguugguuaaucc

SEQ ID NO: 3161358 - RNA, 19 nt, Artificial Sequence
  Description of Artificial Sequence: Synthetic oligonucleotide
auaaacaaagcuggacagc

SEQ ID NO: 3161359 - RNA, 19 nt, Artificial Sequence
  Description of Artificial Sequence: Synthetic oligonucleotide
aaauaucaggaagaggaca

SEQ ID NO: 3161360 - RNA, 19 nt, Artificial Sequence
  Description of Artificial Sequence: Synthetic oligonucleotide
acaaagaugucagacaaca

SEQ ID NO: 3161361 - RNA, 19 nt, Artificial Sequence
  Description of Artificial Sequence: Synthetic oligonucleotide
guugguuaaucccacgaag

SEQ ID NO: 3161362 - RNA, 19 nt, Artificial Sequence
  Description of Artificial Sequence: Synthetic oligonucleotide
aaacuggcugaauaaacaa

SEQ ID NO: 3161363 - RNA, 19 nt, Artificial Sequence
  Description of Artificial Sequence: Synthetic oligonucleotide
gaagaacucagucacggca

SEQ ID NO: 3161364 - RNA, 19 nt, Artificial Sequence
  Description of Artificial Sequence: Synthetic oligonucleotide
caggaagaggacaauuugg

SEQ ID NO: 3161365 - RNA, 19 nt, Artificial Sequence
  Description of Artificial Sequence: Synthetic oligonucleotide
ugagaaugaucauucccag

SEQ ID NO: 3161366 - RNA, 19 nt, Artificial Sequence
  Description of Artificial Sequence: Synthetic oligonucleotide
ugaauaaacaaagcuggac

SEQ ID NO: 3161367 - RNA, 19 nt, Artificial Sequence
  Description of Artificial Sequence: Synthetic oligonucleotide
auuucugugcuucauuccu

SEQ ID NO: 3161368 - RNA, 19 nt, Artificial Sequence
  Description of Artificial Sequence: Synthetic oligonucleotide
aaccuaagaaggugaucac

SEQ ID NO: 3161369 - RNA, 19 nt, Artificial Sequence
  Description of Artificial Sequence: Synthetic oligonucleotide
guuaaucccacgaagaaga

SEQ ID NO: 3161370 - RNA, 19 nt, Artificial Sequence
  Description of Artificial Sequence: Synthetic oligonucleotide
aauuuggagcuugaaggag

SEQ ID NO: 3161371 - RNA, 19 nt, Artificial Sequence
  Description of Artificial Sequence: Synthetic oligonucleotide
aguuugauuucugugcuuc

SEQ ID NO: 3161372 - RNA, 19 nt, Artificial Sequence
  Description of Artificial Sequence: Synthetic oligonucleotide
ggagcaggcauccacaagg

SEQ ID NO: 3161373 - RNA, 19 nt, Artificial Sequence
  Description of Artificial Sequence: Synthetic oligonucleotide
aauaucaggaagaggacaa

SEQ ID NO: 3161374 - RNA, 19 nt, Artificial Sequence
  Description of Artificial Sequence: Synthetic oligonucleotide
gagaguuacaagauaaaca

SEQ ID NO: 3161375 - RNA, 19 nt, Artificial Sequence
  Description of Artificial Sequence: Synthetic oligonucleotide
acgaagaagaacucaguca

SEQ ID NO: 3161376 - RNA, 19 nt, Artificial Sequence
  Description of Artificial Sequence: Synthetic oligonucleotide
ugaugacugaagaggagca

SEQ ID NO: 3161377 - RNA, 19 nt, Artificial Sequence
  Description of Artificial Sequence: Synthetic oligonucleotide
acuggcugaauaaacaaag

SEQ ID NO: 3161378 - RNA, 19 nt, Artificial Sequence
  Description of Artificial Sequence: Synthetic oligonucleotide
agaagaacucagucacggc

SEQ ID NO: 3161379 - RNA, 19 nt, Artificial Sequence
  Description of Artificial Sequence: Synthetic oligonucleotide
ugauuucugugcuucauuc

SEQ ID NO: 3161380 - RNA, 19 nt, Artificial Sequence
  Description of Artificial Sequence: Synthetic oligonucleotide
acuacaaacuggcugaaua

SEQ ID NO: 3161381 - RNA, 19 nt, Artificial Sequence
  Description of Artificial Sequence: Synthetic oligonucleotide
uccacaaagaugucagaca

SEQ ID NO: 3161382 - RNA, 19 nt, Artificial Sequence
  Description of Artificial Sequence: Synthetic oligonucleotide
acaucuuagggcugaugac

SEQ ID NO: 3161383 - RNA, 19 nt, Artificial Sequence
  Description of Artificial Sequence: Synthetic oligonucleotide
ugugcuucauuccucugga

SEQ ID NO: 3161384 - RNA, 19 nt, Artificial Sequence
  Description of Artificial Sequence: Synthetic oligonucleotide
acagcacaaccuaagaagg

SEQ ID NO: 3161385 - RNA, 19 nt, Artificial Sequence
  Description of Artificial Sequence: Synthetic oligonucleotide
gauuucugugcuucauucc

SEQ ID NO: 3161386 - RNA, 19 nt, Artificial Sequence
  Description of Artificial Sequence: Synthetic oligonucleotide
acaaacuggcugaauaaac

SEQ ID NO: 3161387 - RNA, 19 nt, Artificial Sequence
  Description of Artificial Sequence: Synthetic oligonucleotide
guccagacgaaugagaaug

SEQ ID NO: 3161388 - RNA, 19 nt, Artificial Sequence
  Description of Artificial Sequence: Synthetic oligonucleotide
uuccucuggaucaaugugu

SEQ ID NO: 3161389 - RNA, 19 nt, Artificial Sequence
  Description of Artificial Sequence: Synthetic oligonucleotide
agucacggcaguuugauuu

SEQ ID NO: 3161390 - RNA, 19 nt, Artificial Sequence
  Description of Artificial Sequence: Synthetic oligonucleotide
gagaaugaucauucccagg

SEQ ID NO: 3161391 - RNA, 19 nt, Artificial Sequence
  Description of Artificial Sequence: Synthetic oligonucleotide
gucacuacaaacuggcuga

SEQ ID NO: 3161392 - RNA, 19 nt, Artificial Sequence
  Description of Artificial Sequence: Synthetic oligonucleotide
ugacugaagaggagcaggc

SEQ ID NO: 3161393 - RNA, 19 nt, Artificial Sequence
  Description of Artificial Sequence: Synthetic oligonucleotide
aaaguacauggggaugugg

SEQ ID NO: 3161394 - RNA, 19 nt, Artificial Sequence
  Description of Artificial Sequence: Synthetic oligonucleotide
aagaacucagucacggcag

SEQ ID NO: 3161395 - RNA, 19 nt, Artificial Sequence
  Description of Artificial Sequence: Synthetic oligonucleotide
augaucauucccagguucc

SEQ ID NO: 3161396 - RNA, 19 nt, Artificial Sequence
  Description of Artificial Sequence: Synthetic oligonucleotide
augagaaugaucauuccca

SEQ ID NO: 3161397 - RNA, 19 nt, Artificial Sequence
  Description of Artificial Sequence: Synthetic oligonucleotide
ucgaguguccagacgaaug

SEQ ID NO: 3161398 - RNA, 19 nt, Artificial Sequence
  Description of Artificial Sequence: Synthetic oligonucleotide
agggacaagugacugagca

SEQ ID NO: 3161399 - RNA, 19 nt, Artificial Sequence
  Description of Artificial Sequence: Synthetic oligonucleotide
gucagacaacaucuuaggg

SEQ ID NO: 3161400 - RNA, 19 nt, Artificial Sequence
  Description of Artificial Sequence: Synthetic oligonucleotide
ggcaguuugauuucugugc

SEQ ID NO: 3161401 - RNA, 19 nt, Artificial Sequence
  Description of Artificial Sequence: Synthetic oligonucleotide
aaggaguugguuaauccca

SEQ ID NO: 3161402 - RNA, 19 nt, Artificial Sequence
  Description of Artificial Sequence: Synthetic oligonucleotide
aguacauggggauguggag

SEQ ID NO: 3161403 - RNA, 19 nt, Artificial Sequence
  Description of Artificial Sequence: Synthetic oligonucleotide
gaaugagaaugaucauucc

SEQ ID NO: 3161404 - RNA, 19 nt, Artificial Sequence
  Description of Artificial Sequence: Synthetic oligonucleotide
augacugaagaggagcagg

SEQ ID NO: 3161405 - RNA, 19 nt, Artificial Sequence
  Description of Artificial Sequence: Synthetic oligonucleotide
ugcuucauuccucuggauc

SEQ ID NO: 3161406 - RNA, 19 nt, Artificial Sequence
  Description of Artificial Sequence: Synthetic oligonucleotide
auuccucuggaucaaugug

SEQ ID NO: 3161407 - RNA, 19 nt, Artificial Sequence
  Description of Artificial Sequence: Synthetic oligonucleotide
gagucgaguguccagacga

SEQ ID NO: 3161408 - RNA, 19 nt, Artificial Sequence
  Description of Artificial Sequence: Synthetic oligonucleotide
uaagaaggugaucacuuuu

SEQ ID NO: 3161409 - RNA, 19 nt, Artificial Sequence
  Description of Artificial Sequence: Synthetic oligonucleotide
caaccuaagaaggugauca

SEQ ID NO: 3161410 - RNA, 19 nt, Artificial Sequence
  Description of Artificial Sequence: Synthetic oligonucleotide
cugaugacugaagaggagc

SEQ ID NO: 3161411 - RNA, 19 nt, Artificial Sequence
  Description of Artificial Sequence: Synthetic oligonucleotide
ugguuaaucccacgaagaa

SEQ ID NO: 3161412 - RNA, 19 nt, Artificial Sequence
  Description of Artificial Sequence: Synthetic oligonucleotide
aaguacauggggaugugga

SEQ ID NO: 3161413 - RNA, 19 nt, Artificial Sequence
  Description of Artificial Sequence: Synthetic oligonucleotide
cugugcuucauuccucugg

SEQ ID NO: 3161414 - RNA, 19 nt, Artificial Sequence
  Description of Artificial Sequence: Synthetic oligonucleotide
augucagacaacaucuuag

SEQ ID NO: 3161415 - RNA, 19 nt, Artificial Sequence
  Description of Artificial Sequence: Synthetic oligonucleotide
caaacuggcugaauaaaca

SEQ ID NO: 3161416 - RNA, 19 nt, Artificial Sequence
  Description of Artificial Sequence: Synthetic oligonucleotide
ucauuccucuggaucaaug

SEQ ID NO: 3161417 - RNA, 19 nt, Artificial Sequence
  Description of Artificial Sequence: Synthetic oligonucleotide
uagggcugaugacugaaga

SEQ ID NO: 3161418 - RNA, 19 nt, Artificial Sequence
  Description of Artificial Sequence: Synthetic oligonucleotide
cuggcugaauaaacaaagc

SEQ ID NO: 3161419 - RNA, 19 nt, Artificial Sequence
  Description of Artificial Sequence: Synthetic oligonucleotide
acugaagaggagcaggcau

SEQ ID NO: 3161420 - RNA, 19 nt, Artificial Sequence
  Description of Artificial Sequence: Synthetic oligonucleotide
auccacaagggacaaguga

SEQ ID NO: 3161421 - RNA, 19 nt, Artificial Sequence
  Description of Artificial Sequence: Synthetic oligonucleotide
aacauuguccccuaauacc

SEQ ID NO: 3161422 - RNA, 19 nt, Artificial Sequence
  Description of Artificial Sequence: Synthetic oligonucleotide
aaagcacacacacacacac

SEQ ID NO: 3161423 - RNA, 19 nt, Artificial Sequence
  Description of Artificial Sequence: Synthetic oligonucleotide
aaauguuugcuguuagggc

SEQ ID NO: 3161424 - RNA, 19 nt, Artificial Sequence
  Description of Artificial Sequence: Synthetic oligonucleotide
acauaaauugucuaggcuc

SEQ ID NO: 3161425 - RNA, 19 nt, Artificial Sequence
  Description of Artificial Sequence: Synthetic oligonucleotide
uuugaggcgacgcagauag

SEQ ID NO: 3161426 - RNA, 19 nt, Artificial Sequence
  Description of Artificial Sequence: Synthetic oligonucleotide
uguacucuugauuuuaucc

SEQ ID NO: 3161427 - RNA, 19 nt, Artificial Sequence
  Description of Artificial Sequence: Synthetic oligonucleotide
accaccaccacacacacac

SEQ ID NO: 3161428 - RNA, 19 nt, Artificial Sequence
  Description of Artificial Sequence: Synthetic oligonucleotide
ucuuucauggacaucagcu

SEQ ID NO: 3161429 - RNA, 19 nt, Artificial Sequence
  Description of Artificial Sequence: Synthetic oligonucleotide
aucagcucuuguuugaggc

SEQ ID NO: 3161430 - RNA, 19 nt, Artificial Sequence
  Description of Artificial Sequence: Synthetic oligonucleotide
ugacuugagaaagauaggg

SEQ ID NO: 3161431 - RNA, 19 nt, Artificial Sequence
  Description of Artificial Sequence: Synthetic oligonucleotide
ucauagaaaugcuuggugc

SEQ ID NO: 3161432 - RNA, 19 nt, Artificial Sequence
  Description of Artificial Sequence: Synthetic oligonucleotide
aaauugucuaggcucuccg

SEQ ID NO: 3161433 - RNA, 19 nt, Artificial Sequence
  Description of Artificial Sequence: Synthetic oligonucleotide
aaaugcuuggugcuggcag

SEQ ID NO: 3161434 - RNA, 19 nt, Artificial Sequence
  Description of Artificial Sequence: Synthetic oligonucleotide
acacauaaauugucuaggc

SEQ ID NO: 3161435 - RNA, 19 nt, Artificial Sequence
  Description of Artificial Sequence: Synthetic oligonucleotide
agcacacacacacacacac

SEQ ID NO: 3161436 - RNA, 19 nt, Artificial Sequence
  Description of Artificial Sequence: Synthetic oligonucleotide
caugcaguucaucugaucc

SEQ ID NO: 3161437 - RNA, 19 nt, Artificial Sequence
  Description of Artificial Sequence: Synthetic oligonucleotide
caggaauucauagaaaugc

SEQ ID NO: 3161438 - RNA, 19 nt, Artificial Sequence
  Description of Artificial Sequence: Synthetic oligonucleotide
aaaggcuccucuucuuggc

SEQ ID NO: 3161439 - RNA, 19 nt, Artificial Sequence
  Description of Artificial Sequence: Synthetic oligonucleotide
accacacacacacacacac

SEQ ID NO: 3161440 - RNA, 19 nt, Artificial Sequence
  Description of Artificial Sequence: Synthetic oligonucleotide
uauggcauggaaacuuggg

SEQ ID NO: 3161441 - RNA, 19 nt, Artificial Sequence
  Description of Artificial Sequence: Synthetic oligonucleotide
gagaaaguagaguucuuag

SEQ ID NO: 3161442 - RNA, 19 nt, Artificial Sequence
  Description of Artificial Sequence: Synthetic oligonucleotide
uucauagaaaugcuuggug

SEQ ID NO: 3161443 - RNA, 19 nt, Artificial Sequence
  Description of Artificial Sequence: Synthetic oligonucleotide
cacacacacacauaaauug

SEQ ID NO: 3161444 - RNA, 19 nt, Artificial Sequence
  Description of Artificial Sequence: Synthetic oligonucleotide
uuuucggggcagcugaagg

SEQ ID NO: 3161445 - RNA, 19 nt, Artificial Sequence
  Description of Artificial Sequence: Synthetic oligonucleotide
aauugucuaggcucuccgg

SEQ ID NO: 3161446 - RNA, 19 nt, Artificial Sequence
  Description of Artificial Sequence: Synthetic oligonucleotide
uggauucuuauuuacuuga

SEQ ID NO: 3161447 - RNA, 19 nt, Artificial Sequence
  Description of Artificial Sequence: Synthetic oligonucleotide
agaucaggaauucauagaa

SEQ ID NO: 3161448 - RNA, 19 nt, Artificial Sequence
  Description of Artificial Sequence: Synthetic oligonucleotide
ugcagugcacccaucaugc

SEQ ID NO: 3161449 - RNA, 19 nt, Artificial Sequence
  Description of Artificial Sequence: Synthetic oligonucleotide
acacacauaaauugucuag

SEQ ID NO: 3161450 - RNA, 19 nt, Artificial Sequence
  Description of Artificial Sequence: Synthetic oligonucleotide
uuucauggacaucagcucu

SEQ ID NO: 3161451 - RNA, 19 nt, Artificial Sequence
  Description of Artificial Sequence: Synthetic oligonucleotide
gucugcaaaacauuguccc

SEQ ID NO: 3161452 - RNA, 19 nt, Artificial Sequence
  Description of Artificial Sequence: Synthetic oligonucleotide
ucaggaauucauagaaaug

SEQ ID NO: 3161453 - RNA, 19 nt, Artificial Sequence
  Description of Artificial Sequence: Synthetic oligonucleotide
ucuuagugcgcuccuagcc

SEQ ID NO: 3161454 - RNA, 19 nt, Artificial Sequence
  Description of Artificial Sequence: Synthetic oligonucleotide
aucaggaauucauagaaau

SEQ ID NO: 3161455 - RNA, 19 nt, Artificial Sequence
  Description of Artificial Sequence: Synthetic oligonucleotide
aauggacacuucuccagag

SEQ ID NO: 3161456 - RNA, 19 nt, Artificial Sequence
  Description of Artificial Sequence: Synthetic oligonucleotide
aagauaggguccucucugg

SEQ ID NO: 3161457 - RNA, 19 nt, Artificial Sequence
  Description of Artificial Sequence: Synthetic oligonucleotide
gucaaaagaaggcuggaug

SEQ ID NO: 3161458 - RNA, 19 nt, Artificial Sequence
  Description of Artificial Sequence: Synthetic oligonucleotide
ucauucgcccauuugccgg

SEQ ID NO: 3161459 - RNA, 19 nt, Artificial Sequence
  Description of Artificial Sequence: Synthetic oligonucleotide
gacucagagaccaugggag

SEQ ID NO: 3161460 - RNA, 19 nt, Artificial Sequence
  Description of Artificial Sequence: Synthetic oligonucleotide
aaaagaaggcuggauggag

SEQ ID NO: 3161461 - RNA, 19 nt, Artificial Sequence
  Description of Artificial Sequence: Synthetic oligonucleotide
gguaagucuagccaguugc

SEQ ID NO: 3161462 - RNA, 19 nt, Artificial Sequence
  Description of Artificial Sequence: Synthetic oligonucleotide
guuagggcaaacuugcgac

SEQ ID NO: 3161463 - RNA, 19 nt, Artificial Sequence
  Description of Artificial Sequence: Synthetic oligonucleotide
uguuagggcaaacuugcga

SEQ ID NO: 3161464 - RNA, 19 nt, Artificial Sequence
  Description of Artificial Sequence: Synthetic oligonucleotide
augggagucauccagccug

SEQ ID NO: 3161465 - RNA, 19 nt, Artificial Sequence
  Description of Artificial Sequence: Synthetic oligonucleotide
uuuccagcuguuccaaugc

SEQ ID NO: 3161466 - RNA, 19 nt, Artificial Sequence
  Description of Artificial Sequence: Synthetic oligonucleotide
ugcuguuagggcaaacuug

SEQ ID NO: 3161467 - RNA, 19 nt, Artificial Sequence
  Description of Artificial Sequence: Synthetic oligonucleotide
cugcucgugacucagagac

SEQ ID NO: 3161468 - RNA, 19 nt, Artificial Sequence
  Description of Artificial Sequence: Synthetic oligonucleotide
agcaagauccuucccacag

SEQ ID NO: 3161469 - RNA, 19 nt, Artificial Sequence
  Description of Artificial Sequence: Synthetic oligonucleotide
ggaaggaugggccauaggc

SEQ ID NO: 3161470 - RNA, 19 nt, Artificial Sequence
  Description of Artificial Sequence: Synthetic oligonucleotide
uucacacgagaguagagga

SEQ ID NO: 3161471 - RNA, 19 nt, Artificial Sequence
  Description of Artificial Sequence: Synthetic oligonucleotide
gcuauugugcuccugaagc

SEQ ID NO: 3161472 - RNA, 19 nt, Artificial Sequence
  Description of Artificial Sequence: Synthetic oligonucleotide
cacacauaaauugucuagg

SEQ ID NO: 3161473 - RNA, 19 nt, Artificial Sequence
  Description of Artificial Sequence: Synthetic oligonucleotide
cuggauggaggaaggaugg

SEQ ID NO: 3161474 - RNA, 19 nt, Artificial Sequence
  Description of Artificial Sequence: Synthetic oligonucleotide
acacacacacaccugccac

SEQ ID NO: 3161475 - RNA, 19 nt, Artificial Sequence
  Description of Artificial Sequence: Synthetic oligonucleotide
ugacucagagaccauggga

SEQ ID NO: 3161476 - RNA, 19 nt, Artificial Sequence
  Description of Artificial Sequence: Synthetic oligonucleotide
uagccaguugcccaccagg

SEQ ID NO: 3161477 - RNA, 19 nt, Artificial Sequence
  Description of Artificial Sequence: Synthetic oligonucleotide
agaguucuuagugcgcucc

SEQ ID NO: 3161478 - RNA, 19 nt, Artificial Sequence
  Description of Artificial Sequence: Synthetic oligonucleotide
cacacacacacacacacac

SEQ ID NO: 3161479 - RNA, 19 nt, Artificial Sequence
  Description of Artificial Sequence: Synthetic oligonucleotide
ugggccauaggcccgguag

SEQ ID NO: 3161480 - RNA, 19 nt, Artificial Sequence
  Description of Artificial Sequence: Synthetic oligonucleotide
ucagcucuuguuugaggcg

SEQ ID NO: 3161481 - RNA, 19 nt, Artificial Sequence
  Description of Artificial Sequence: Synthetic oligonucleotide
aaugcuuggugcuggcaga

SEQ ID NO: 3161482 - RNA, 19 nt, Artificial Sequence
  Description of Artificial Sequence: Synthetic oligonucleotide
ucuuauuuacuugacucuc

SEQ ID NO: 3161483 - RNA, 19 nt, Artificial Sequence
  Description of Artificial Sequence: Synthetic oligonucleotide
uuccaaugcuguuugcacc

SEQ ID NO: 3161484 - RNA, 19 nt, Artificial Sequence
  Description of Artificial Sequence: Synthetic oligonucleotide
uugcagugcacccaucaug

SEQ ID NO: 3161485 - RNA, 19 nt, Artificial Sequence
  Description of Artificial Sequence: Synthetic oligonucleotide
cuucacacgagaguagagg

SEQ ID NO: 3161486 - RNA, 19 nt, Artificial Sequence
  Description of Artificial Sequence: Synthetic oligonucleotide
cuuagugcgcuccuagccc

SEQ ID NO: 3161487 - RNA, 19 nt, Artificial Sequence
  Description of Artificial Sequence: Synthetic oligonucleotide
accaccaccaccaccacac

SEQ ID NO: 3161488 - RNA, 19 nt, Artificial Sequence
  Description of Artificial Sequence: Synthetic oligonucleotide
auugucuaggcucuccgga

SEQ ID NO: 3161489 - RNA, 19 nt, Artificial Sequence
  Description of Artificial Sequence: Synthetic oligonucleotide
ucuuguuugaggcgacgca

SEQ ID NO: 3161490 - RNA, 19 nt, Artificial Sequence
  Description of Artificial Sequence: Synthetic oligonucleotide
uuggaaaggcuccucuucu

SEQ ID NO: 3161491 - RNA, 19 nt, Artificial Sequence
  Description of Artificial Sequence: Synthetic oligonucleotide
cacacacacacacaccugc

SEQ ID NO: 3161492 - RNA, 19 nt, Artificial Sequence
  Description of Artificial Sequence: Synthetic oligonucleotide
uccaguucugguaagucua

SEQ ID NO: 3161493 - RNA, 19 nt, Artificial Sequence
  Description of Artificial Sequence: Synthetic oligonucleotide
uccaaugcuguuugcaccu

SEQ ID NO: 3161494 - RNA, 19 nt, Artificial Sequence
  Description of Artificial Sequence: Synthetic oligonucleotide
aguagaggaggcuccaaca

SEQ ID NO: 3161495 - RNA, 19 nt, Artificial Sequence
  Description of Artificial Sequence: Synthetic oligonucleotide
ugggucuggauucuuauuu

SEQ ID NO: 3161496 - RNA, 19 nt, Artificial Sequence
  Description of Artificial Sequence: Synthetic oligonucleotide
guagaggaggcuccaacag

SEQ ID NO: 3161497 - RNA, 19 nt, Artificial Sequence
  Description of Artificial Sequence: Synthetic oligonucleotide
cacacgagaguagaggagg

SEQ ID NO: 3161498 - RNA, 19 nt, Artificial Sequence
  Description of Artificial Sequence: Synthetic oligonucleotide
ucacacgagaguagaggag

SEQ ID NO: 3161499 - RNA, 19 nt, Artificial Sequence
  Description of Artificial Sequence: Synthetic oligonucleotide
cuuucauggacaucagcuc

SEQ ID NO: 3161500 - RNA, 19 nt, Artificial Sequence
  Description of Artificial Sequence: Synthetic oligonucleotide
ggcagaaacuccuaacugc

SEQ ID NO: 3161501 - RNA, 19 nt, Artificial Sequence
  Description of Artificial Sequence: Synthetic oligonucleotide
uacgcaagaacuuccuaaa

SEQ ID NO: 3161502 - RNA, 19 nt, Artificial Sequence
  Description of Artificial Sequence: Synthetic oligonucleotide
uuagugcgcuccuagcccc

SEQ ID NO: 3161503 - RNA, 19 nt, Artificial Sequence
  Description of Artificial Sequence: Synthetic oligonucleotide
uguuccaaugcuguuugca

SEQ ID NO: 3161504 - RNA, 19 nt, Artificial Sequence
  Description of Artificial Sequence: Synthetic oligonucleotide
uaaauugucuaggcucucc

SEQ ID NO: 3161505 - RNA, 19 nt, Artificial Sequence
  Description of Artificial Sequence: Synthetic oligonucleotide
uuuauccugcagagaaugu

SEQ ID NO: 3161506 - RNA, 19 nt, Artificial Sequence
  Description of Artificial Sequence: Synthetic oligonucleotide
uugucuaggcucuccggag

SEQ ID NO: 3161507 - RNA, 19 nt, Artificial Sequence
  Description of Artificial Sequence: Synthetic oligonucleotide
agggcauuccggcuguuuc

SEQ ID NO: 3161508 - RNA, 19 nt, Artificial Sequence
  Description of Artificial Sequence: Synthetic oligonucleotide
cuuguuugaggcgacgcag

SEQ ID NO: 3161509 - RNA, 19 nt, Artificial Sequence
  Description of Artificial Sequence: Synthetic oligonucleotide
cuccuuuggguucacuggg

SEQ ID NO: 3161510 - RNA, 19 nt, Artificial Sequence
  Description of Artificial Sequence: Synthetic oligonucleotide
uuagggcaaacuugcgacc

SEQ ID NO: 3161511 - RNA, 19 nt, Artificial Sequence
  Description of Artificial Sequence: Synthetic oligonucleotide
ugaagcugugucuuaggaa

SEQ ID NO: 3161512 - RNA, 19 nt, Artificial Sequence
  Description of Artificial Sequence: Synthetic oligonucleotide
cuuuggguucacugggucc

SEQ ID NO: 3161513 - RNA, 19 nt, Artificial Sequence
  Description of Artificial Sequence: Synthetic oligonucleotide
caagauccuucccacagac

SEQ ID NO: 3161514 - RNA, 19 nt, Artificial Sequence
  Description of Artificial Sequence: Synthetic oligonucleotide
gaaacuccuaacugcccug

SEQ ID NO: 3161515 - RNA, 19 nt, Artificial Sequence
  Description of Artificial Sequence: Synthetic oligonucleotide
uccuaacugcccugguugg

SEQ ID NO: 3161516 - RNA, 19 nt, Artificial Sequence
  Description of Artificial Sequence: Synthetic oligonucleotide
ugcucaggcucacacaaaa

SEQ ID NO: 3161517 - RNA, 19 nt, Artificial Sequence
  Description of Artificial Sequence: Synthetic oligonucleotide
cucauucgcccauuugccg

SEQ ID NO: 3161518 - RNA, 19 nt, Artificial Sequence
  Description of Artificial Sequence: Synthetic oligonucleotide
gguacagcuauugugcucc

SEQ ID NO: 3161519 - RNA, 19 nt, Artificial Sequence
  Description of Artificial Sequence: Synthetic oligonucleotide
cuauggcauggaaacuugg

SEQ ID NO: 3161520 - RNA, 19 nt, Artificial Sequence
  Description of Artificial Sequence: Synthetic oligonucleotide
agauagcaguccauguccc

SEQ ID NO: 3161521 - RNA, 19 nt, Artificial Sequence
  Description of Artificial Sequence: Synthetic oligonucleotide
aaagaugagacgcaugucc

SEQ ID NO: 3161522 - RNA, 19 nt, Artificial Sequence
  Description of Artificial Sequence: Synthetic oligonucleotide
uuauaaauuauccuguggu

SEQ ID NO: 3161523 - RNA, 19 nt, Artificial Sequence
  Description of Artificial Sequence: Synthetic oligonucleotide
auuuuguucaaccacaugu

SEQ ID NO: 3161524 - RNA, 19 nt, Artificial Sequence
  Description of Artificial Sequence: Synthetic oligonucleotide
uaugucuuccuauucagcc

SEQ ID NO: 3161525 - RNA, 19 nt, Artificial Sequence
  Description of Artificial Sequence: Synthetic oligonucleotide
uaaauuauccugugguucc

SEQ ID NO: 3161526 - RNA, 19 nt, Artificial Sequence
  Description of Artificial Sequence: Synthetic oligonucleotide
aaauguuguaccgaaaggu

SEQ ID NO: 3161527 - RNA, 19 nt, Artificial Sequence
  Description of Artificial Sequence: Synthetic oligonucleotide
gaaauguuguaccgaaagg

SEQ ID NO: 3161528 - RNA, 19 nt, Artificial Sequence
  Description of Artificial Sequence: Synthetic oligonucleotide
uuuucuuugguuuggagau

SEQ ID NO: 3161529 - RNA, 19 nt, Artificial Sequence
  Description of Artificial Sequence: Synthetic oligonucleotide
auaaauuauccugugguuc

SEQ ID NO: 3161530 - RNA, 19 nt, Artificial Sequence
  Description of Artificial Sequence: Synthetic oligonucleotide
uugauuuuguucaaccaca

SEQ ID NO: 3161531 - RNA, 19 nt, Artificial Sequence
  Description of Artificial Sequence: Synthetic oligonucleotide
uuuuguucaaccacaugug

SEQ ID NO: 3161532 - RNA, 19 nt, Artificial Sequence
  Description of Artificial Sequence: Synthetic oligonucleotide
uucacgaaauguuguaccg

SEQ ID NO: 3161533 - RNA, 19 nt, Artificial Sequence
  Description of Artificial Sequence: Synthetic oligonucleotide
uauccugugguuccaaaag

SEQ ID NO: 3161534 - RNA, 19 nt, Artificial Sequence
  Description of Artificial Sequence: Synthetic oligonucleotide
ugaaugucuggaaaguucu

SEQ ID NO: 3161535 - RNA, 19 nt, Artificial Sequence
  Description of Artificial Sequence: Synthetic oligonucleotide
uguaccgaaagguaugucu

SEQ ID NO: 3161536 - RNA, 19 nt, Artificial Sequence
  Description of Artificial Sequence: Synthetic oligonucleotide
guuccaaaagaugagacgc

SEQ ID NO: 3161537 - RNA, 19 nt, Artificial Sequence
  Description of Artificial Sequence: Synthetic oligonucleotide
uuuguucaaccacaugugc

SEQ ID NO: 3161538 - RNA, 19 nt, Artificial Sequence
  Description of Artificial Sequence: Synthetic oligonucleotide
cuugauuuuguucaaccac

SEQ ID NO: 3161539 - RNA, 19 nt, Artificial Sequence
  Description of Artificial Sequence: Synthetic oligonucleotide
aaaguucucuuuccuuuuc

SEQ ID NO: 3161540 - RNA, 19 nt, Artificial Sequence
  Description of Artificial Sequence: Synthetic oligonucleotide
uucucuuuccuuuucuuug

SEQ ID NO: 3161541 - RNA, 19 nt, Artificial Sequence
  Description of Artificial Sequence: Synthetic oligonucleotide
uuccuauucagccuguacu

SEQ ID NO: 3161542 - RNA, 19 nt, Artificial Sequence
  Description of Artificial Sequence: Synthetic oligonucleotide
uacuugauuuuguucaacc

SEQ ID NO: 3161543 - RNA, 19 nt, Artificial Sequence
  Description of Artificial Sequence: Synthetic oligonucleotide
aagguaugucuuccuauuc

SEQ ID NO: 3161544 - RNA, 19 nt, Artificial Sequence
  Description of Artificial Sequence: Synthetic oligonucleotide
ugugguuccaaaagaugag

SEQ ID NO: 3161545 - RNA, 19 nt, Artificial Sequence
  Description of Artificial Sequence: Synthetic oligonucleotide
uguuguaccgaaagguaug

SEQ ID NO: 3161546 - RNA, 19 nt, Artificial Sequence
  Description of Artificial Sequence: Synthetic oligonucleotide
cuucacgaaauguuguacc

SEQ ID NO: 3161547 - RNA, 19 nt, Artificial Sequence
  Description of Artificial Sequence: Synthetic oligonucleotide
uguccuucacgaaauguug

SEQ ID NO: 3161548 - RNA, 19 nt, Artificial Sequence
  Description of Artificial Sequence: Synthetic oligonucleotide
ucucuuuccuuuucuuugg

SEQ ID NO: 3161549 - RNA, 19 nt, Artificial Sequence
  Description of Artificial Sequence: Synthetic oligonucleotide
cuguacuugauuuuguuca

SEQ ID NO: 3161550 - RNA, 19 nt, Artificial Sequence
  Description of Artificial Sequence: Synthetic oligonucleotide
ugucuuccuauucagccug

SEQ ID NO: 3161551 - RNA, 19 nt, Artificial Sequence
  Description of Artificial Sequence: Synthetic oligonucleotide
aaagguaugucuuccuauu

SEQ ID NO: 3161552 - RNA, 19 nt, Artificial Sequence
  Description of Artificial Sequence: Synthetic oligonucleotide
ucuggaaaguucucuuucc

SEQ ID NO: 3161553 - RNA, 19 nt, Artificial Sequence
  Description of Artificial Sequence: Synthetic oligonucleotide
aaugucuggaaaguucucu

SEQ ID NO: 3161554 - RNA, 19 nt, Artificial Sequence
  Description of Artificial Sequence: Synthetic oligonucleotide
uuuccuuuucuuugguuug

SEQ ID NO: 3161555 - RNA, 19 nt, Artificial Sequence
  Description of Artificial Sequence: Synthetic oligonucleotide
uuguucaaccacaugugcu

SEQ ID NO: 3161556 - RNA, 19 nt, Artificial Sequence
  Description of Artificial Sequence: Synthetic oligonucleotide
uguucaaccacaugugcuc

SEQ ID NO: 3161557 - RNA, 19 nt, Artificial Sequence
  Description of Artificial Sequence: Synthetic oligonucleotide
uauaaauuauccugugguu

SEQ ID NO: 3161558 - RNA, 19 nt, Artificial Sequence
  Description of Artificial Sequence: Synthetic oligonucleotide
aaaagaugagacgcauguc

SEQ ID NO: 3161559 - RNA, 19 nt, Artificial Sequence
  Description of Artificial Sequence: Synthetic oligonucleotide
cuuuucuuugguuuggaga

SEQ ID NO: 3161560 - RNA, 19 nt, Artificial Sequence
  Description of Artificial Sequence: Synthetic oligonucleotide
ugguuccaaaagaugagac

SEQ ID NO: 3161561 - RNA, 19 nt, Artificial Sequence
  Description of Artificial Sequence: Synthetic oligonucleotide
acuugauuuuguucaacca

SEQ ID NO: 3161562 - RNA, 19 nt, Artificial Sequence
  Description of Artificial Sequence: Synthetic oligonucleotide
agacgcauguccuucacga

SEQ ID NO: 3161563 - RNA, 19 nt, Artificial Sequence
  Description of Artificial Sequence: Synthetic oligonucleotide
gguuccaaaagaugagacg

SEQ ID NO: 3161564 - RNA, 19 nt, Artificial Sequence
  Description of Artificial Sequence: Synthetic oligonucleotide
cugaaugucuggaaaguuc

SEQ ID NO: 3161565 - RNA, 19 nt, Artificial Sequence
  Description of Artificial Sequence: Synthetic oligonucleotide
accgaaagguaugucuucc

SEQ ID NO: 3161566 - RNA, 19 nt, Artificial Sequence
  Description of Artificial Sequence: Synthetic oligonucleotide
aaguucucuuuccuuuucu

SEQ ID NO: 3161567 - RNA, 19 nt, Artificial Sequence
  Description of Artificial Sequence: Synthetic oligonucleotide
cugugguuccaaaagauga

SEQ ID NO: 3161568 - RNA, 19 nt, Artificial Sequence
  Description of Artificial Sequence: Synthetic oligonucleotide
agguaugucuuccuauuca

SEQ ID NO: 3161569 - RNA, 19 nt, Artificial Sequence
  Description of Artificial Sequence: Synthetic oligonucleotide
gauuuuguucaaccacaug

SEQ ID NO: 3161570 - RNA, 19 nt, Artificial Sequence
  Description of Artificial Sequence: Synthetic oligonucleotide
uuccaaaagaugagacgca

SEQ ID NO: 3161571 - RNA, 19 nt, Artificial Sequence
  Description of Artificial Sequence: Synthetic oligonucleotide
aauguuguaccgaaaggua

SEQ ID NO: 3161572 - RNA, 19 nt, Artificial Sequence
  Description of Artificial Sequence: Synthetic oligonucleotide
ugauuuuguucaaccacau

SEQ ID NO: 3161573 - RNA, 19 nt, Artificial Sequence
  Description of Artificial Sequence: Synthetic oligonucleotide
cuccugaaugucuggaaag

SEQ ID NO: 3161574 - RNA, 19 nt, Artificial Sequence
  Description of Artificial Sequence: Synthetic oligonucleotide
gguaugucuuccuauucag

SEQ ID NO: 3161575 - RNA, 19 nt, Artificial Sequence
  Description of Artificial Sequence: Synthetic oligonucleotide
uucagccuguacuugauuu

SEQ ID NO: 3161576 - RNA, 19 nt, Artificial Sequence
  Description of Artificial Sequence: Synthetic oligonucleotide
uuauccugugguuccaaaa

SEQ ID NO: 3161577 - RNA, 19 nt, Artificial Sequence
  Description of Artificial Sequence: Synthetic oligonucleotide
aagaugagacgcauguccu

SEQ ID NO: 3161578 - RNA, 19 nt, Artificial Sequence
  Description of Artificial Sequence: Synthetic oligonucleotide
ugugcuccugaaugucugg

SEQ ID NO: 3161579 - RNA, 19 nt, Artificial Sequence
  Description of Artificial Sequence: Synthetic oligonucleotide
uguacuugauuuuguucaa

SEQ ID NO: 3161580 - RNA, 19 nt, Artificial Sequence
  Description of Artificial Sequence: Synthetic oligonucleotide
uccugugguuccaaaagau

SEQ ID NO: 3161581 - RNA, 19 nt, Artificial Sequence
  Description of Artificial Sequence: Synthetic oligonucleotide
uuccuuuucuuugguuugg

SEQ ID NO: 3161582 - RNA, 19 nt, Artificial Sequence
  Description of Artificial Sequence: Synthetic oligonucleotide
caaaagaugagacgcaugu

SEQ ID NO: 3161583 - RNA, 19 nt, Artificial Sequence
  Description of Artificial Sequence: Synthetic oligonucleotide
uccuauucagccuguacuu

SEQ ID NO: 3161584 - RNA, 19 nt, Artificial Sequence
  Description of Artificial Sequence: Synthetic oligonucleotide
gagacgcauguccuucacg

SEQ ID NO: 3161585 - RNA, 19 nt, Artificial Sequence
  Description of Artificial Sequence: Synthetic oligonucleotide
uucuuugguuuggagauaa

SEQ ID NO: 3161586 - RNA, 19 nt, Artificial Sequence
  Description of Artificial Sequence: Synthetic oligonucleotide
augucuuccuauucagccu

SEQ ID NO: 3161587 - RNA, 19 nt, Artificial Sequence
  Description of Artificial Sequence: Synthetic oligonucleotide
auccugugguuccaaaaga

SEQ ID NO: 3161588 - RNA, 19 nt, Artificial Sequence
  Description of Artificial Sequence: Synthetic oligonucleotide
aaauuauccugugguucca

SEQ ID NO: 3161589 - RNA, 19 nt, Artificial Sequence
  Description of Artificial Sequence: Synthetic oligonucleotide
gaugagacgcauguccuuc

SEQ ID NO: 3161590 - RNA, 19 nt, Artificial Sequence
  Description of Artificial Sequence: Synthetic oligonucleotide
uauucagccuguacuugau

SEQ ID NO: 3161591 - RNA, 19 nt, Artificial Sequence
  Description of Artificial Sequence: Synthetic oligonucleotide
acaugugcuccugaauguc

SEQ ID NO: 3161592 - RNA, 19 nt, Artificial Sequence
  Description of Artificial Sequence: Synthetic oligonucleotide
aaccacaugugcuccugaa

SEQ ID NO: 3161593 - RNA, 19 nt, Artificial Sequence
  Description of Artificial Sequence: Synthetic oligonucleotide
gucuggaaaguucucuuuc

SEQ ID NO: 3161594 - RNA, 19 nt, Artificial Sequence
  Description of Artificial Sequence: Synthetic oligonucleotide
ucacgaaauguuguaccga

SEQ ID NO: 3161595 - RNA, 19 nt, Artificial Sequence
  Description of Artificial Sequence: Synthetic oligonucleotide
uccugaaugucuggaaagu

SEQ ID NO: 3161596 - RNA, 19 nt, Artificial Sequence
  Description of Artificial Sequence: Synthetic oligonucleotide
cuauucagccuguacuuga

SEQ ID NO: 3161597 - RNA, 19 nt, Artificial Sequence
  Description of Artificial Sequence: Synthetic oligonucleotide
cuuccuauucagccuguac

SEQ ID NO: 3161598 - RNA, 19 nt, Artificial Sequence
  Description of Artificial Sequence: Synthetic oligonucleotide
cgaaauguuguaccgaaag

SEQ ID NO: 3161599 - RNA, 19 nt, Artificial Sequence
  Description of Artificial Sequence: Synthetic oligonucleotide
uggaaaguucucuuuccuu

SEQ ID NO: 3161600 - RNA, 19 nt, Artificial Sequence
  Description of Artificial Sequence: Synthetic oligonucleotide
uccaaaagaugagacgcau

SEQ ID NO: 3161601 - RNA, 19 nt, Artificial Sequence
  Description of Artificial Sequence: Synthetic oligonucleotide
gaaagguaugucuuccuau

SEQ ID NO: 3161602 - RNA, 19 nt, Artificial Sequence
  Description of Artificial Sequence: Synthetic oligonucleotide
uccuucacgaaauguugua

SEQ ID NO: 3161603 - RNA, 19 nt, Artificial Sequence
  Description of Artificial Sequence: Synthetic oligonucleotide
ugucuggaaaguucucuuu

SEQ ID NO: 3161604 - RNA, 19 nt, Artificial Sequence
  Description of Artificial Sequence: Synthetic oligonucleotide
cacgaaauguuguaccgaa

SEQ ID NO: 3161605 - RNA, 19 nt, Artificial Sequence
  Description of Artificial Sequence: Synthetic oligonucleotide
acgcauguccuucacgaaa

SEQ ID NO: 3161606 - RNA, 19 nt, Artificial Sequence
  Description of Artificial Sequence: Synthetic oligonucleotide
ucaaccacaugugcuccug

SEQ ID NO: 3161607 - RNA, 19 nt, Artificial Sequence
  Description of Artificial Sequence: Synthetic oligonucleotide
augucuggaaaguucucuu

SEQ ID NO: 3161608 - RNA, 19 nt, Artificial Sequence
  Description of Artificial Sequence: Synthetic oligonucleotide
ccacaugugcuccugaaug

SEQ ID NO: 3161609 - RNA, 19 nt, Artificial Sequence
  Description of Artificial Sequence: Synthetic oligonucleotide
cuuugguuuggagauaaaa

SEQ ID NO: 3161610 - RNA, 19 nt, Artificial Sequence
  Description of Artificial Sequence: Synthetic oligonucleotide
aguucucuuuccuuuucuu

SEQ ID NO: 3161611 - RNA, 19 nt, Artificial Sequence
  Description of Artificial Sequence: Synthetic oligonucleotide
ugagacgcauguccuucac

SEQ ID NO: 3161612 - RNA, 19 nt, Artificial Sequence
  Description of Artificial Sequence: Synthetic oligonucleotide
guaugucuuccuauucagc

SEQ ID NO: 3161613 - RNA, 19 nt, Artificial Sequence
  Description of Artificial Sequence: Synthetic oligonucleotide
ucagccuguacuugauuuu

SEQ ID NO: 3161614 - RNA, 19 nt, Artificial Sequence
  Description of Artificial Sequence: Synthetic oligonucleotide
uaccgaaagguaugucuuc

SEQ ID NO: 3161615 - RNA, 19 nt, Artificial Sequence
  Description of Artificial Sequence: Synthetic oligonucleotide
auuauccugugguuccaaa

SEQ ID NO: 3161616 - RNA, 19 nt, Artificial Sequence
  Description of Artificial Sequence: Synthetic oligonucleotide
ucuuuccuuuucuuugguu

SEQ ID NO: 3161617 - RNA, 19 nt, Artificial Sequence
  Description of Artificial Sequence: Synthetic oligonucleotide
uucaaccacaugugcuccu

SEQ ID NO: 3161618 - RNA, 19 nt, Artificial Sequence
  Description of Artificial Sequence: Synthetic oligonucleotide
guucaaccacaugugcucc

SEQ ID NO: 3161619 - RNA, 19 nt, Artificial Sequence
  Description of Artificial Sequence: Synthetic oligonucleotide
auguuguaccgaaagguau

SEQ ID NO: 3161620 - RNA, 19 nt, Artificial Sequence
  Description of Artificial Sequence: Synthetic oligonucleotide
cuuuccuuuucuuugguuu

SEQ ID NO: 3161621 - RNA, 19 nt, Artificial Sequence
  Description of Artificial Sequence: Synthetic oligonucleotide
gaacaguaggacuacagcg

SEQ ID NO: 3161622 - RNA, 19 nt, Artificial Sequence
  Description of Artificial Sequence: Synthetic oligonucleotide
aagugugaggcccaggaag

SEQ ID NO: 3161623 - RNA, 19 nt, Artificial Sequence
  Description of Artificial Sequence: Synthetic oligonucleotide
ugagcccagaucuucagcg

SEQ ID NO: 3161624 - RNA, 19 nt, Artificial Sequence
  Description of Artificial Sequence: Synthetic oligonucleotide
aacaguaggacuacagcgg

SEQ ID NO: 3161625 - RNA, 19 nt, Artificial Sequence
  Description of Artificial Sequence: Synthetic oligonucleotide
uagagcagcggauugagug

SEQ ID NO: 3161626 - RNA, 19 nt, Artificial Sequence
  Description of Artificial Sequence: Synthetic oligonucleotide
agaucuucagcgcguaggc

SEQ ID NO: 3161627 - RNA, 19 nt, Artificial Sequence
  Description of Artificial Sequence: Synthetic oligonucleotide
acaguaggacuacagcggc

SEQ ID NO: 3161628 - RNA, 19 nt, Artificial Sequence
  Description of Artificial Sequence: Synthetic oligonucleotide
aucuucagcgcguaggcgg

SEQ ID NO: 3161629 - RNA, 19 nt, Artificial Sequence
  Description of Artificial Sequence: Synthetic oligonucleotide
uggagcaccaggaacagcu

SEQ ID NO: 3161630 - RNA, 19 nt, Artificial Sequence
  Description of Artificial Sequence: Synthetic oligonucleotide
accaggaacagcuggauug

SEQ ID NO: 3161631 - RNA, 19 nt, Artificial Sequence
  Description of Artificial Sequence: Synthetic oligonucleotide
guugcuguaggacaugcag

SEQ ID NO: 3161632 - RNA, 19 nt, Artificial Sequence
  Description of Artificial Sequence: Synthetic oligonucleotide
ugaagugugaggcccagga

SEQ ID NO: 3161633 - RNA, 19 nt, Artificial Sequence
  Description of Artificial Sequence: Synthetic oligonucleotide
agagcagcggauugagugc

SEQ ID NO: 3161634 - RNA, 19 nt, Artificial Sequence
  Description of Artificial Sequence: Synthetic oligonucleotide
ugagagugcagacccgugg

SEQ ID NO: 3161635 - RNA, 19 nt, Artificial Sequence
  Description of Artificial Sequence: Synthetic oligonucleotide
uggauugggccccagcagg

SEQ ID NO: 3161636 - RNA, 19 nt, Artificial Sequence
  Description of Artificial Sequence: Synthetic oligonucleotide
uacgcacugcuccagcucg

SEQ ID NO: 3161637 - RNA, 19 nt, Artificial Sequence
  Description of Artificial Sequence: Synthetic oligonucleotide
ugcuguaggacaugcagug

SEQ ID NO: 3161638 - RNA, 19 nt, Artificial Sequence
  Description of Artificial Sequence: Synthetic oligonucleotide
acuacagcggccaccagcc

SEQ ID NO: 3161639 - RNA, 19 nt, Artificial Sequence
  Description of Artificial Sequence: Synthetic oligonucleotide
agccgggagaccuugguac

SEQ ID NO: 3161640 - RNA, 19 nt, Artificial Sequence
  Description of Artificial Sequence: Synthetic oligonucleotide
aacagcuggauugggcccc

SEQ ID NO: 3161641 - RNA, 19 nt, Artificial Sequence
  Description of Artificial Sequence: Synthetic oligonucleotide
augcagugagcccagaucu

SEQ ID NO: 3161642 - RNA, 19 nt, Artificial Sequence
  Description of Artificial Sequence: Synthetic oligonucleotide
uuggggcucggucugagag

SEQ ID NO: 3161643 - RNA, 19 nt, Artificial Sequence
  Description of Artificial Sequence: Synthetic oligonucleotide
gaaggcauagagcagcgga

SEQ ID NO: 3161644 - RNA, 19 nt, Artificial Sequence
  Description of Artificial Sequence: Synthetic oligonucleotide
gagagugcagacccguggg

SEQ ID NO: 3161645 - RNA, 19 nt, Artificial Sequence
  Description of Artificial Sequence: Synthetic oligonucleotide
uugagugccgaguugcugu

SEQ ID NO: 3161646 - RNA, 19 nt, Artificial Sequence
  Description of Artificial Sequence: Synthetic oligonucleotide
uacagcggccaccagccgg

SEQ ID NO: 3161647 - RNA, 19 nt, Artificial Sequence
  Description of Artificial Sequence: Synthetic oligonucleotide
uguaggacaugcagugagc

SEQ ID NO: 3161648 - RNA, 19 nt, Artificial Sequence
  Description of Artificial Sequence: Synthetic oligonucleotide
cuguaggacaugcagugag

SEQ ID NO: 3161649 - RNA, 19 nt, Artificial Sequence
  Description of Artificial Sequence: Synthetic oligonucleotide
ugucugaagugugaggccc

SEQ ID NO: 3161650 - RNA, 19 nt, Artificial Sequence
  Description of Artificial Sequence: Synthetic oligonucleotide
gacuacagcggccaccagc

SEQ ID NO: 3161651 - RNA, 19 nt, Artificial Sequence
  Description of Artificial Sequence: Synthetic oligonucleotide
uggccagaaagccugucug

SEQ ID NO: 3161652 - RNA, 19 nt, Artificial Sequence
  Description of Artificial Sequence: Synthetic oligonucleotide
gagaccuugguacgcacug

SEQ ID NO: 3161653 - RNA, 19 nt, Artificial Sequence
  Description of Artificial Sequence: Synthetic oligonucleotide
agugccgaguugcuguagg

SEQ ID NO: 3161654 - RNA, 19 nt, Artificial Sequence
  Description of Artificial Sequence: Synthetic oligonucleotide
ggaacagcuggauugggcc

SEQ ID NO: 3161655 - RNA, 19 nt, Artificial Sequence
  Description of Artificial Sequence: Synthetic oligonucleotide
ugaguuggggcucggucug

SEQ ID NO: 3161656 - RNA, 19 nt, Artificial Sequence
  Description of Artificial Sequence: Synthetic oligonucleotide
ugugaguuggggcucgguc

SEQ ID NO: 3161657 - RNA, 19 nt, Artificial Sequence
  Description of Artificial Sequence: Synthetic oligonucleotide
gacgucgugggccgcaagg

SEQ ID NO: 3161658 - RNA, 19 nt, Artificial Sequence
  Description of Artificial Sequence: Synthetic oligonucleotide
gagcaccaggaacagcugg

SEQ ID NO: 3161659 - RNA, 19 nt, Artificial Sequence
  Description of Artificial Sequence: Synthetic oligonucleotide
uugcuguaggacaugcagu

SEQ ID NO: 3161660 - RNA, 19 nt, Artificial Sequence
  Description of Artificial Sequence: Synthetic oligonucleotide
agcccagaucuucagcgcg

SEQ ID NO: 3161661 - RNA, 19 nt, Artificial Sequence
  Description of Artificial Sequence: Synthetic oligonucleotide
agcucgcugugccagcagc

SEQ ID NO: 3161662 - RNA, 19 nt, Artificial Sequence
  Description of Artificial Sequence: Synthetic oligonucleotide
ggucugagagugcagaccc

SEQ ID NO: 3161663 - RNA, 19 nt, Artificial Sequence
  Description of Artificial Sequence: Synthetic oligonucleotide
agugugaggcccaggaagg

SEQ ID NO: 3161664 - RNA, 19 nt, Artificial Sequence
  Description of Artificial Sequence: Synthetic oligonucleotide
cagaucuucagcgcguagg

SEQ ID NO: 3161665 - RNA, 19 nt, Artificial Sequence
  Description of Artificial Sequence: Synthetic oligonucleotide
cacguggccagaaagccug

SEQ ID NO: 3161666 - RNA, 19 nt, Artificial Sequence
  Description of Artificial Sequence: Synthetic oligonucleotide
agacccguggggucggcgc

SEQ ID NO: 3161667 - RNA, 19 nt, Artificial Sequence
  Description of Artificial Sequence: Synthetic oligonucleotide
gaacagcuggauugggccc

SEQ ID NO: 3161668 - RNA, 19 nt, Artificial Sequence
  Description of Artificial Sequence: Synthetic oligonucleotide
caggaaggcauagagcagc

SEQ ID NO: 3161669 - RNA, 19 nt, Artificial Sequence
  Description of Artificial Sequence: Synthetic oligonucleotide
agaaagccugucugaagug

SEQ ID NO: 3161670 - RNA, 19 nt, Artificial Sequence
  Description of Artificial Sequence: Synthetic oligonucleotide
aggacaugcagugagccca

SEQ ID NO: 3161671 - RNA, 19 nt, Artificial Sequence
  Description of Artificial Sequence: Synthetic oligonucleotide
agugcagacccgugggguc

SEQ ID NO: 3161672 - RNA, 19 nt, Artificial Sequence
  Description of Artificial Sequence: Synthetic oligonucleotide
ugcuccagcucgcugugcc

SEQ ID NO: 3161673 - RNA, 19 nt, Artificial Sequence
  Description of Artificial Sequence: Synthetic oligonucleotide
ucuucagcgcguaggcggc

SEQ ID NO: 3161674 - RNA, 19 nt, Artificial Sequence
  Description of Artificial Sequence: Synthetic oligonucleotide
aggaacagcuggauugggc

SEQ ID NO: 3161675 - RNA, 19 nt, Artificial Sequence
  Description of Artificial Sequence: Synthetic oligonucleotide
aaagccugucugaagugug

SEQ ID NO: 3161676 - RNA, 19 nt, Artificial Sequence
  Description of Artificial Sequence: Synthetic oligonucleotide
ugugccagcagcugucccu

SEQ ID NO: 3161677 - RNA, 19 nt, Artificial Sequence
  Description of Artificial Sequence: Synthetic oligonucleotide
cauagagcagcggauugag

SEQ ID NO: 3161678 - RNA, 19 nt, Artificial Sequence
  Description of Artificial Sequence: Synthetic oligonucleotide
aguaggacuacagcggcca

SEQ ID NO: 3161679 - RNA, 19 nt, Artificial Sequence
  Description of Artificial Sequence: Synthetic oligonucleotide
agagugcagacccgugggg

SEQ ID NO: 3161680 - RNA, 19 nt, Artificial Sequence
  Description of Artificial Sequence: Synthetic oligonucleotide
caugcagugagcccagauc

SEQ ID NO: 3161681 - RNA, 19 nt, Artificial Sequence
  Description of Artificial Sequence: Synthetic oligonucleotide
guaggacaugcagugagcc

SEQ ID NO: 3161682 - RNA, 19 nt, Artificial Sequence
  Description of Artificial Sequence: Synthetic oligonucleotide
auugggccccagcaggcgg

SEQ ID NO: 3161683 - RNA, 19 nt, Artificial Sequence
  Description of Artificial Sequence: Synthetic oligonucleotide
uaggacaugcagugagccc

SEQ ID NO: 3161684 - RNA, 19 nt, Artificial Sequence
  Description of Artificial Sequence: Synthetic oligonucleotide
agugagcccagaucuucag

SEQ ID NO: 3161685 - RNA, 19 nt, Artificial Sequence
  Description of Artificial Sequence: Synthetic oligonucleotide
agcagcugucccugcaggg

SEQ ID NO: 3161686 - RNA, 19 nt, Artificial Sequence
  Description of Artificial Sequence: Synthetic oligonucleotide
cacacguggccagaaagcc

SEQ ID NO: 3161687 - RNA, 19 nt, Artificial Sequence
  Description of Artificial Sequence: Synthetic oligonucleotide
guagcugcgagggugccag

SEQ ID NO: 3161688 - RNA, 19 nt, Artificial Sequence
  Description of Artificial Sequence: Synthetic oligonucleotide
ucugagagugcagacccgu

SEQ ID NO: 3161689 - RNA, 19 nt, Artificial Sequence
  Description of Artificial Sequence: Synthetic oligonucleotide
agcuggauugggccccagc

SEQ ID NO: 3161690 - RNA, 19 nt, Artificial Sequence
  Description of Artificial Sequence: Synthetic oligonucleotide
gccgcaagggcacacgugg

SEQ ID NO: 3161691 - RNA, 19 nt, Artificial Sequence
  Description of Artificial Sequence: Synthetic oligonucleotide
ucggcgcugacgucguggg

SEQ ID NO: 3161692 - RNA, 19 nt, Artificial Sequence
  Description of Artificial Sequence: Synthetic oligonucleotide
cugucugaagugugaggcc

SEQ ID NO: 3161693 - RNA, 19 nt, Artificial Sequence
  Description of Artificial Sequence: Synthetic oligonucleotide
gaucuucagcgcguaggcg

SEQ ID NO: 3161694 - RNA, 19 nt, Artificial Sequence
  Description of Artificial Sequence: Synthetic oligonucleotide
ccugucugaagugugaggc

SEQ ID NO: 3161695 - RNA, 19 nt, Artificial Sequence
  Description of Artificial Sequence: Synthetic oligonucleotide
cagggcuuggagcaccagg

SEQ ID NO: 3161696 - RNA, 19 nt, Artificial Sequence
  Description of Artificial Sequence: Synthetic oligonucleotide
uaggcggcguagcugcgag

SEQ ID NO: 3161697 - RNA, 19 nt, Artificial Sequence
  Description of Artificial Sequence: Synthetic oligonucleotide
ggauugagugccgaguugc

SEQ ID NO: 3161698 - RNA, 19 nt, Artificial Sequence
  Description of Artificial Sequence: Synthetic oligonucleotide
cccaggaaggcauagagca

SEQ ID NO: 3161699 - RNA, 19 nt, Artificial Sequence
  Description of Artificial Sequence: Synthetic oligonucleotide
gaguugcuguaggacaugc

SEQ ID NO: 3161700 - RNA, 19 nt, Artificial Sequence
  Description of Artificial Sequence: Synthetic oligonucleotide
ggugccaggccccugcggg

SEQ ID NO: 3161701 - RNA, 19 nt, Artificial Sequence
  Description of Artificial Sequence: Synthetic oligonucleotide
ggcacacguggccagaaag

SEQ ID NO: 3161702 - RNA, 19 nt, Artificial Sequence
  Description of Artificial Sequence: Synthetic oligonucleotide
agaccuugguacgcacugc

SEQ ID NO: 3161703 - RNA, 19 nt, Artificial Sequence
  Description of Artificial Sequence: Synthetic oligonucleotide
cuggauugggccccagcag

SEQ ID NO: 3161704 - RNA, 19 nt, Artificial Sequence
  Description of Artificial Sequence: Synthetic oligonucleotide
ccuugguacgcacugcucc

SEQ ID NO: 3161705 - RNA, 19 nt, Artificial Sequence
  Description of Artificial Sequence: Synthetic oligonucleotide
cagcugucccugcagggcg

SEQ ID NO: 3161706 - RNA, 19 nt, Artificial Sequence
  Description of Artificial Sequence: Synthetic oligonucleotide
aaggcauagagcagcggau

SEQ ID NO: 3161707 - RNA, 19 nt, Artificial Sequence
  Description of Artificial Sequence: Synthetic oligonucleotide
gagcccagaucuucagcgc

SEQ ID NO: 3161708 - RNA, 19 nt, Artificial Sequence
  Description of Artificial Sequence: Synthetic oligonucleotide
agcugcgagggugccaggc

SEQ ID NO: 3161709 - RNA, 19 nt, Artificial Sequence
  Description of Artificial Sequence: Synthetic oligonucleotide
aggacuacagcggccacca

SEQ ID NO: 3161710 - RNA, 19 nt, Artificial Sequence
  Description of Artificial Sequence: Synthetic oligonucleotide
ucugaagugugaggcccag

SEQ ID NO: 3161711 - RNA, 19 nt, Artificial Sequence
  Description of Artificial Sequence: Synthetic oligonucleotide
ugugaggcccaggaaggca

SEQ ID NO: 3161712 - RNA, 19 nt, Artificial Sequence
  Description of Artificial Sequence: Synthetic oligonucleotide
ggcccaggaaggcauagag

SEQ ID NO: 3161713 - RNA, 19 nt, Artificial Sequence
  Description of Artificial Sequence: Synthetic oligonucleotide
auugagugccgaguugcug

SEQ ID NO: 3161714 - RNA, 19 nt, Artificial Sequence
  Description of Artificial Sequence: Synthetic oligonucleotide
gcaggcggcgaacaguagg

SEQ ID NO: 3161715 - RNA, 19 nt, Artificial Sequence
  Description of Artificial Sequence: Synthetic oligonucleotide
gauugggccccagcaggcg

SEQ ID NO: 3161716 - RNA, 19 nt, Artificial Sequence
  Description of Artificial Sequence: Synthetic oligonucleotide
ugguacgcacugcuccagc

SEQ ID NO: 3161717 - RNA, 19 nt, Artificial Sequence
  Description of Artificial Sequence: Synthetic oligonucleotide
cagaaagccugucugaagu

SEQ ID NO: 3161718 - RNA, 19 nt, Artificial Sequence
  Description of Artificial Sequence: Synthetic oligonucleotide
uaggacuacagcggccacc

SEQ ID NO: 3161719 - RNA, 19 nt, Artificial Sequence
  Description of Artificial Sequence: Synthetic oligonucleotide
gagcagcggauugagugcc

SEQ ID NO: 3161720 - RNA, 19 nt, Artificial Sequence
  Description of Artificial Sequence: Synthetic oligonucleotide
gagggugccaggccccugc

SEQ ID NO: 3161721 - RNA, 19 nt, Artificial Sequence
  Description of Artificial Sequence: Synthetic oligonucleotide
uuuugaucauuuaaaacag

SEQ ID NO: 3161722 - RNA, 19 nt, Artificial Sequence
  Description of Artificial Sequence: Synthetic oligonucleotide
guuuugaucauuuaaaaca

SEQ ID NO: 3161723 - RNA, 19 nt, Artificial Sequence
  Description of Artificial Sequence: Synthetic oligonucleotide
auauuauccauacacaugu

SEQ ID NO: 3161724 - RNA, 19 nt, Artificial Sequence
  Description of Artificial Sequence: Synthetic oligonucleotide
auuuaaaacagguuuccuc

SEQ ID NO: 3161725 - RNA, 19 nt, Artificial Sequence
  Description of Artificial Sequence: Synthetic oligonucleotide
cuugguguugguuuuaugg

SEQ ID NO: 3161726 - RNA, 19 nt, Artificial Sequence
  Description of Artificial Sequence: Synthetic oligonucleotide
uauggguggauuaugaaca

SEQ ID NO: 3161727 - RNA, 19 nt, Artificial Sequence
  Description of Artificial Sequence: Synthetic oligonucleotide
uauugcaccaauuauuaug

SEQ ID NO: 3161728 - RNA, 19 nt, Artificial Sequence
  Description of Artificial Sequence: Synthetic oligonucleotide
aacaguguacuuuugcuug

SEQ ID NO: 3161729 - RNA, 19 nt, Artificial Sequence
  Description of Artificial Sequence: Synthetic oligonucleotide
uauuauggcagcuaauuca

SEQ ID NO: 3161730 - RNA, 19 nt, Artificial Sequence
  Description of Artificial Sequence: Synthetic oligonucleotide
aauaaauccuugguguugg

SEQ ID NO: 3161731 - RNA, 19 nt, Artificial Sequence
  Description of Artificial Sequence: Synthetic oligonucleotide
auuaugaacagucuguggu

SEQ ID NO: 3161732 - RNA, 19 nt, Artificial Sequence
  Description of Artificial Sequence: Synthetic oligonucleotide
ugguguuucuccaucagcg

SEQ ID NO: 3161733 - RNA, 19 nt, Artificial Sequence
  Description of Artificial Sequence: Synthetic oligonucleotide
uaagugaaacaacugaugu

SEQ ID NO: 3161734 - RNA, 19 nt, Artificial Sequence
  Description of Artificial Sequence: Synthetic oligonucleotide
aguauagcuaccaacauag

SEQ ID NO: 3161735 - RNA, 19 nt, Artificial Sequence
  Description of Artificial Sequence: Synthetic oligonucleotide
uggaaguauagacaagagg

SEQ ID NO: 3161736 - RNA, 19 nt, Artificial Sequence
  Description of Artificial Sequence: Synthetic oligonucleotide
uggaauguuccuuugugcg

SEQ ID NO: 3161737 - RNA, 19 nt, Artificial Sequence
  Description of Artificial Sequence: Synthetic oligonucleotide
uauuuccacaguauaauca

SEQ ID NO: 3161738 - RNA, 19 nt, Artificial Sequence
  Description of Artificial Sequence: Synthetic oligonucleotide
uugaucauuuaaaacaggu

SEQ ID NO: 3161739 - RNA, 19 nt, Artificial Sequence
  Description of Artificial Sequence: Synthetic oligonucleotide
uccuuuaucacucuuuggu

SEQ ID NO: 3161740 - RNA, 19 nt, Artificial Sequence
  Description of Artificial Sequence: Synthetic oligonucleotide
uagacaagaggucuuagug

SEQ ID NO: 3161741 - RNA, 19 nt, Artificial Sequence
  Description of Artificial Sequence: Synthetic oligonucleotide
uuauccauacacaugucug

SEQ ID NO: 3161742 - RNA, 19 nt, Artificial Sequence
  Description of Artificial Sequence: Synthetic oligonucleotide
uuuccuaagucauaaguga

SEQ ID NO: 3161743 - RNA, 19 nt, Artificial Sequence
  Description of Artificial Sequence: Synthetic oligonucleotide
aguauaaucaugaguauag

SEQ ID NO: 3161744 - RNA, 19 nt, Artificial Sequence
  Description of Artificial Sequence: Synthetic oligonucleotide
uaaucaugaguauagcuac

SEQ ID NO: 3161745 - RNA, 19 nt, Artificial Sequence
  Description of Artificial Sequence: Synthetic oligonucleotide
auagaaguuauuauugcac

SEQ ID NO: 3161746 - RNA, 19 nt, Artificial Sequence
  Description of Artificial Sequence: Synthetic oligonucleotide
uauaaucaugaguauagcu

SEQ ID NO: 3161747 - RNA, 19 nt, Artificial Sequence
  Description of Artificial Sequence: Synthetic oligonucleotide
uauuauugcaccaauuauu

SEQ ID NO: 3161748 - RNA, 19 nt, Artificial Sequence
  Description of Artificial Sequence: Synthetic oligonucleotide
uaacuucuaagucaucugc

SEQ ID NO: 3161749 - RNA, 19 nt, Artificial Sequence
  Description of Artificial Sequence: Synthetic oligonucleotide
ccuaauauuauccauacac

SEQ ID NO: 3161750 - RNA, 19 nt, Artificial Sequence
  Description of Artificial Sequence: Synthetic oligonucleotide
uaauauuauccauacacau

SEQ ID NO: 3161751 - RNA, 19 nt, Artificial Sequence
  Description of Artificial Sequence: Synthetic oligonucleotide
uccagaaucgguaggaaca

SEQ ID NO: 3161752 - RNA, 19 nt, Artificial Sequence
  Description of Artificial Sequence: Synthetic oligonucleotide
uagaaguuauuauugcacc

SEQ ID NO: 3161753 - RNA, 19 nt, Artificial Sequence
  Description of Artificial Sequence: Synthetic oligonucleotide
uuugaucauuuaaaacagg

SEQ ID NO: 3161754 - RNA, 19 nt, Artificial Sequence
  Description of Artificial Sequence: Synthetic oligonucleotide
uauccauacacaugucugg

SEQ ID NO: 3161755 - RNA, 19 nt, Artificial Sequence
  Description of Artificial Sequence: Synthetic oligonucleotide
ugaugugucgcuuugugga

SEQ ID NO: 3161756 - RNA, 19 nt, Artificial Sequence
  Description of Artificial Sequence: Synthetic oligonucleotide
aaaacagguuuccucaagu

SEQ ID NO: 3161757 - RNA, 19 nt, Artificial Sequence
  Description of Artificial Sequence: Synthetic oligonucleotide
aauauuauccauacacaug

SEQ ID NO: 3161758 - RNA, 19 nt, Artificial Sequence
  Description of Artificial Sequence: Synthetic oligonucleotide
auugcaccaauuauuaugg

SEQ ID NO: 3161759 - RNA, 19 nt, Artificial Sequence
  Description of Artificial Sequence: Synthetic oligonucleotide
uguguggaaguauagacaa

SEQ ID NO: 3161760 - RNA, 19 nt, Artificial Sequence
  Description of Artificial Sequence: Synthetic oligonucleotide
auggaauguuccuuugugc

SEQ ID NO: 3161761 - RNA, 19 nt, Artificial Sequence
  Description of Artificial Sequence: Synthetic oligonucleotide
uugguguugguuuuauggg

SEQ ID NO: 3161762 - RNA, 19 nt, Artificial Sequence
  Description of Artificial Sequence: Synthetic oligonucleotide
agugaaacaacugaugugu

SEQ ID NO: 3161763 - RNA, 19 nt, Artificial Sequence
  Description of Artificial Sequence: Synthetic oligonucleotide
uuuuauggguggauuauga

SEQ ID NO: 3161764 - RNA, 19 nt, Artificial Sequence
  Description of Artificial Sequence: Synthetic oligonucleotide
ugugguugguuuuaugugc

SEQ ID NO: 3161765 - RNA, 19 nt, Artificial Sequence
  Description of Artificial Sequence: Synthetic oligonucleotide
agacaagaggucuuagugg

SEQ ID NO: 3161766 - RNA, 19 nt, Artificial Sequence
  Description of Artificial Sequence: Synthetic oligonucleotide
aauucauugugguugguuu

SEQ ID NO: 3161767 - RNA, 19 nt, Artificial Sequence
  Description of Artificial Sequence: Synthetic oligonucleotide
aauggagaccuacccgccc

SEQ ID NO: 3161768 - RNA, 19 nt, Artificial Sequence
  Description of Artificial Sequence: Synthetic oligonucleotide
aagugaaacaacugaugug

SEQ ID NO: 3161769 - RNA, 19 nt, Artificial Sequence
  Description of Artificial Sequence: Synthetic oligonucleotide
uuccacaguauaaucauga

SEQ ID NO: 3161770 - RNA, 19 nt, Artificial Sequence
  Description of Artificial Sequence: Synthetic oligonucleotide
cacaguauaaucaugagua

SEQ ID NO: 3161771 - RNA, 19 nt, Artificial Sequence
  Description of Artificial Sequence: Synthetic oligonucleotide
agcgaauggagaccuaccc

SEQ ID NO: 3161772 - RNA, 19 nt, Artificial Sequence
  Description of Artificial Sequence: Synthetic oligonucleotide
uggauuaugaacagucugu

SEQ ID NO: 3161773 - RNA, 19 nt, Artificial Sequence
  Description of Artificial Sequence: Synthetic oligonucleotide
uuagugguugucuagugga

SEQ ID NO: 3161774 - RNA, 19 nt, Artificial Sequence
  Description of Artificial Sequence: Synthetic oligonucleotide
uuauuauugcaccaauuau

SEQ ID NO: 3161775 - RNA, 19 nt, Artificial Sequence
  Description of Artificial Sequence: Synthetic oligonucleotide
gauuaugaacagucugugg

SEQ ID NO: 3161776 - RNA, 19 nt, Artificial Sequence
  Description of Artificial Sequence: Synthetic oligonucleotide
ugugguacugguuuuccag

SEQ ID NO: 3161777 - RNA, 19 nt, Artificial Sequence
  Description of Artificial Sequence: Synthetic oligonucleotide
uccucaaguauuuccacag

SEQ ID NO: 3161778 - RNA, 19 nt, Artificial Sequence
  Description of Artificial Sequence: Synthetic oligonucleotide
aacagguaaccguggcugc

SEQ ID NO: 3161779 - RNA, 19 nt, Artificial Sequence
  Description of Artificial Sequence: Synthetic oligonucleotide
uuauggguggauuaugaac

SEQ ID NO: 3161780 - RNA, 19 nt, Artificial Sequence
  Description of Artificial Sequence: Synthetic oligonucleotide
uguacuuuugcuugguuuc

SEQ ID NO: 3161781 - RNA, 19 nt, Artificial Sequence
  Description of Artificial Sequence: Synthetic oligonucleotide
gaaacaacugaugugucgc

SEQ ID NO: 3161782 - RNA, 19 nt, Artificial Sequence
  Description of Artificial Sequence: Synthetic oligonucleotide
ugguuuuaugugcaguucc

SEQ ID NO: 3161783 - RNA, 19 nt, Artificial Sequence
  Description of Artificial Sequence: Synthetic oligonucleotide
gauggaauguuccuuugug

SEQ ID NO: 3161784 - RNA, 19 nt, Artificial Sequence
  Description of Artificial Sequence: Synthetic oligonucleotide
uaggugaauaaauccuugg

SEQ ID NO: 3161785 - RNA, 19 nt, Artificial Sequence
  Description of Artificial Sequence: Synthetic oligonucleotide
agcuaauucauugugguug

SEQ ID NO: 3161786 - RNA, 19 nt, Artificial Sequence
  Description of Artificial Sequence: Synthetic oligonucleotide
aaguauagacaagaggucu

SEQ ID NO: 3161787 - RNA, 19 nt, Artificial Sequence
  Description of Artificial Sequence: Synthetic oligonucleotide
uguggaaguauagacaaga

SEQ ID NO: 3161788 - RNA, 19 nt, Artificial Sequence
  Description of Artificial Sequence: Synthetic oligonucleotide
aaucgguaggaacagguaa

SEQ ID NO: 3161789 - RNA, 19 nt, Artificial Sequence
  Description of Artificial Sequence: Synthetic oligonucleotide
uccuaggugaauaaauccu

SEQ ID NO: 3161790 - RNA, 19 nt, Artificial Sequence
  Description of Artificial Sequence: Synthetic oligonucleotide
auuauccauacacaugucu

SEQ ID NO: 3161791 - RNA, 19 nt, Artificial Sequence
  Description of Artificial Sequence: Synthetic oligonucleotide
uuaacuucuaagucaucug

SEQ ID NO: 3161792 - RNA, 19 nt, Artificial Sequence
  Description of Artificial Sequence: Synthetic oligonucleotide
guuuugaagugaacgaugg

SEQ ID NO: 3161793 - RNA, 19 nt, Artificial Sequence
  Description of Artificial Sequence: Synthetic oligonucleotide
ucauuuaaaacagguuucc

SEQ ID NO: 3161794 - RNA, 19 nt, Artificial Sequence
  Description of Artificial Sequence: Synthetic oligonucleotide
acaugucugguguuucucc

SEQ ID NO: 3161795 - RNA, 19 nt, Artificial Sequence
  Description of Artificial Sequence: Synthetic oligonucleotide
uacugguuuuccagaaucg

SEQ ID NO: 3161796 - RNA, 19 nt, Artificial Sequence
  Description of Artificial Sequence: Synthetic oligonucleotide
aucauuuaaaacagguuuc

SEQ ID NO: 3161797 - RNA, 19 nt, Artificial Sequence
  Description of Artificial Sequence: Synthetic oligonucleotide
ucuccaucagcgaauggag

SEQ ID NO: 3161798 - RNA, 19 nt, Artificial Sequence
  Description of Artificial Sequence: Synthetic oligonucleotide
ugaagugaacgauggaaug

SEQ ID NO: 3161799 - RNA, 19 nt, Artificial Sequence
  Description of Artificial Sequence: Synthetic oligonucleotide
gaucauuuaaaacagguuu

SEQ ID NO: 3161800 - RNA, 19 nt, Artificial Sequence
  Description of Artificial Sequence: Synthetic oligonucleotide
cuuugugcgaugcuagucc

SEQ ID NO: 3161801 - RNA, 19 nt, Artificial Sequence
  Description of Artificial Sequence: Synthetic oligonucleotide
ugcaccaauuauuauggca

SEQ ID NO: 3161802 - RNA, 19 nt, Artificial Sequence
  Description of Artificial Sequence: Synthetic oligonucleotide
caugaguauagcuaccaac

SEQ ID NO: 3161803 - RNA, 19 nt, Artificial Sequence
  Description of Artificial Sequence: Synthetic oligonucleotide
uuauuauggcagcuaauuc

SEQ ID NO: 3161804 - RNA, 19 nt, Artificial Sequence
  Description of Artificial Sequence: Synthetic oligonucleotide
aacagguuuccucaaguau

SEQ ID NO: 3161805 - RNA, 19 nt, Artificial Sequence
  Description of Artificial Sequence: Synthetic oligonucleotide
aaucaugaguauagcuacc

SEQ ID NO: 3161806 - RNA, 19 nt, Artificial Sequence
  Description of Artificial Sequence: Synthetic oligonucleotide
ucacucuuugguuuugaag

SEQ ID NO: 3161807 - RNA, 19 nt, Artificial Sequence
  Description of Artificial Sequence: Synthetic oligonucleotide
ugcaguuccuuuaucacuc

SEQ ID NO: 3161808 - RNA, 19 nt, Artificial Sequence
  Description of Artificial Sequence: Synthetic oligonucleotide
guuauuauugcaccaauua

SEQ ID NO: 3161809 - RNA, 19 nt, Artificial Sequence
  Description of Artificial Sequence: Synthetic oligonucleotide
uugaagugaacgauggaau

SEQ ID NO: 3161810 - RNA, 19 nt, Artificial Sequence
  Description of Artificial Sequence: Synthetic oligonucleotide
cuaauauuauccauacaca

SEQ ID NO: 3161811 - RNA, 19 nt, Artificial Sequence
  Description of Artificial Sequence: Synthetic oligonucleotide
cuuagugguugucuagugg

SEQ ID NO: 3161812 - RNA, 19 nt, Artificial Sequence
  Description of Artificial Sequence: Synthetic oligonucleotide
ggugaauaaauccuuggug

SEQ ID NO: 3161813 - RNA, 19 nt, Artificial Sequence
  Description of Artificial Sequence: Synthetic oligonucleotide
acucucccuaauauuaucc

SEQ ID NO: 3161814 - RNA, 19 nt, Artificial Sequence
  Description of Artificial Sequence: Synthetic oligonucleotide
agaaguuauuauugcacca

SEQ ID NO: 3161815 - RNA, 19 nt, Artificial Sequence
  Description of Artificial Sequence: Synthetic oligonucleotide
guuuccuaagucauaagug

SEQ ID NO: 3161816 - RNA, 19 nt, Artificial Sequence
  Description of Artificial Sequence: Synthetic oligonucleotide
ucaucugcuaacaguguac

SEQ ID NO: 3161817 - RNA, 19 nt, Artificial Sequence
  Description of Artificial Sequence: Synthetic oligonucleotide
ucccuaauauuauccauac

SEQ ID NO: 3161818 - RNA, 19 nt, Artificial Sequence
  Description of Artificial Sequence: Synthetic oligonucleotide
agucauaagugaaacaacu

SEQ ID NO: 3161819 - RNA, 19 nt, Artificial Sequence
  Description of Artificial Sequence: Synthetic oligonucleotide
auuauuauggcagcuaauu

SEQ ID NO: 3161820 - RNA, 19 nt, Artificial Sequence
  Description of Artificial Sequence: Synthetic oligonucleotide
uuccuuugugcgaugcuag

SEQ ID NO: 3161821 - RNA, 19 nt, Artificial Sequence
  Description of Artificial Sequence: Synthetic oligonucleotide
aaggugaugaccuaggacc

SEQ ID NO: 3161822 - RNA, 19 nt, Artificial Sequence
  Description of Artificial Sequence: Synthetic oligonucleotide
uuugcuacggaaaagacgg

SEQ ID NO: 3161823 - RNA, 19 nt, Artificial Sequence
  Description of Artificial Sequence: Synthetic oligonucleotide
aaagagaugagucauuauc

SEQ ID NO: 3161824 - RNA, 19 nt, Artificial Sequence
  Description of Artificial Sequence: Synthetic oligonucleotide
aagauaggucauuagaagg

SEQ ID NO: 3161825 - RNA, 19 nt, Artificial Sequence
  Description of Artificial Sequence: Synthetic oligonucleotide
cauuagaaggguuugaggg

SEQ ID NO: 3161826 - RNA, 19 nt, Artificial Sequence
  Description of Artificial Sequence: Synthetic oligonucleotide
ucaccuaugaacaaguggc

SEQ ID NO: 3161827 - RNA, 19 nt, Artificial Sequence
  Description of Artificial Sequence: Synthetic oligonucleotide
uuugagggcauuuacagag

SEQ ID NO: 3161828 - RNA, 19 nt, Artificial Sequence
  Description of Artificial Sequence: Synthetic oligonucleotide
aaaugagcagcccaacccc

SEQ ID NO: 3161829 - RNA, 19 nt, Artificial Sequence
  Description of Artificial Sequence: Synthetic oligonucleotide
aaaucagagaugcugcagg

SEQ ID NO: 3161830 - RNA, 19 nt, Artificial Sequence
  Description of Artificial Sequence: Synthetic oligonucleotide
uuuggcugaacaaacauug

SEQ ID NO: 3161831 - RNA, 19 nt, Artificial Sequence
  Description of Artificial Sequence: Synthetic oligonucleotide
aagagaugagucauuaucc

SEQ ID NO: 3161832 - RNA, 19 nt, Artificial Sequence
  Description of Artificial Sequence: Synthetic oligonucleotide
gauacuauauaagaguucc

SEQ ID NO: 3161833 - RNA, 19 nt, Artificial Sequence
  Description of Artificial Sequence: Synthetic oligonucleotide
aacauugccauguucacug

SEQ ID NO: 3161834 - RNA, 19 nt, Artificial Sequence
  Description of Artificial Sequence: Synthetic oligonucleotide
aaagaaaagagaugaguca

SEQ ID NO: 3161835 - RNA, 19 nt, Artificial Sequence
  Description of Artificial Sequence: Synthetic oligonucleotide
uuuacagagagcccaagcc

SEQ ID NO: 3161836 - RNA, 19 nt, Artificial Sequence
  Description of Artificial Sequence: Synthetic oligonucleotide
agggcauuuacagagagcc

SEQ ID NO: 3161837 - RNA, 19 nt, Artificial Sequence
  Description of Artificial Sequence: Synthetic oligonucleotide
auuagaaggguuugagggc

SEQ ID NO: 3161838 - RNA, 19 nt, Artificial Sequence
  Description of Artificial Sequence: Synthetic oligonucleotide
ugcuuuauugacuugguca

SEQ ID NO: 3161839 - RNA, 19 nt, Artificial Sequence
  Description of Artificial Sequence: Synthetic oligonucleotide
agaagaauggcugggauac

SEQ ID NO: 3161840 - RNA, 19 nt, Artificial Sequence
  Description of Artificial Sequence: Synthetic oligonucleotide
accaucugagaccaggucc

SEQ ID NO: 3161841 - RNA, 19 nt, Artificial Sequence
  Description of Artificial Sequence: Synthetic oligonucleotide
agagaugagucauuauccc

SEQ ID NO: 3161842 - RNA, 19 nt, Artificial Sequence
  Description of Artificial Sequence: Synthetic oligonucleotide
uauagaaaugagcagccca

SEQ ID NO: 3161843 - RNA, 19 nt, Artificial Sequence
  Description of Artificial Sequence: Synthetic oligonucleotide
ucuauagaaaugagcagcc

SEQ ID NO: 3161844 - RNA, 19 nt, Artificial Sequence
  Description of Artificial Sequence: Synthetic oligonucleotide
aaagacggaggcucugugc

SEQ ID NO: 3161845 - RNA, 19 nt, Artificial Sequence
  Description of Artificial Sequence: Synthetic oligonucleotide
caaagaaaagagaugaguc

SEQ ID NO: 3161846 - RNA, 19 nt, Artificial Sequence
  Description of Artificial Sequence: Synthetic oligonucleotide
uaaugcuuuauugacuugg

SEQ ID NO: 3161847 - RNA, 19 nt, Artificial Sequence
  Description of Artificial Sequence: Synthetic oligonucleotide
acgaguagaaaucagagau

SEQ ID NO: 3161848 - RNA, 19 nt, Artificial Sequence
  Description of Artificial Sequence: Synthetic oligonucleotide
auuuacagagagcccaagc

SEQ ID NO: 3161849 - RNA, 19 nt, Artificial Sequence
  Description of Artificial Sequence: Synthetic oligonucleotide
gaaaugagcagcccaaccc

SEQ ID NO: 3161850 - RNA, 19 nt, Artificial Sequence
  Description of Artificial Sequence: Synthetic oligonucleotide
ucagucuauagaaaugagc

SEQ ID NO: 3161851 - RNA, 19 nt, Artificial Sequence
  Description of Artificial Sequence: Synthetic oligonucleotide
uagaaaucagagaugcugc

SEQ ID NO: 3161852 - RNA, 19 nt, Artificial Sequence
  Description of Artificial Sequence: Synthetic oligonucleotide
ucagagaugcugcaggaag

SEQ ID NO: 3161853 - RNA, 19 nt, Artificial Sequence
  Description of Artificial Sequence: Synthetic oligonucleotide
agaaaugagcagcccaacc

SEQ ID NO: 3161854 - RNA, 19 nt, Artificial Sequence
  Description of Artificial Sequence: Synthetic oligonucleotide
ugaacaaacauugccaugu

SEQ ID NO: 3161855 - RNA, 19 nt, Artificial Sequence
  Description of Artificial Sequence: Synthetic oligonucleotide
ugggauacuauauaagagu

SEQ ID NO: 3161856 - RNA, 19 nt, Artificial Sequence
  Description of Artificial Sequence: Synthetic oligonucleotide
aacaaacauugccauguuc

SEQ ID NO: 3161857 - RNA, 19 nt, Artificial Sequence
  Description of Artificial Sequence: Synthetic oligonucleotide
uacuauauaagaguucccc

SEQ ID NO: 3161858 - RNA, 19 nt, Artificial Sequence
  Description of Artificial Sequence: Synthetic oligonucleotide
gaguagaaaucagagaugc

SEQ ID NO: 3161859 - RNA, 19 nt, Artificial Sequence
  Description of Artificial Sequence: Synthetic oligonucleotide
augaccuaggaccuucugc

SEQ ID NO: 3161860 - RNA, 19 nt, Artificial Sequence
  Description of Artificial Sequence: Synthetic oligonucleotide
cuuugcuacggaaaagacg

SEQ ID NO: 3161861 - RNA, 19 nt, Artificial Sequence
  Description of Artificial Sequence: Synthetic oligonucleotide
ucauuagaaggguuugagg

SEQ ID NO: 3161862 - RNA, 19 nt, Artificial Sequence
  Description of Artificial Sequence: Synthetic oligonucleotide
cagucuauagaaaugagca

SEQ ID NO: 3161863 - RNA, 19 nt, Artificial Sequence
  Description of Artificial Sequence: Synthetic oligonucleotide
guagaaaucagagaugcug

SEQ ID NO: 3161864 - RNA, 19 nt, Artificial Sequence
  Description of Artificial Sequence: Synthetic oligonucleotide
gacuuggucaccuaugaac

SEQ ID NO: 3161865 - RNA, 19 nt, Artificial Sequence
  Description of Artificial Sequence: Synthetic oligonucleotide
acaucuucuguuuuggcug

SEQ ID NO: 3161866 - RNA, 19 nt, Artificial Sequence
  Description of Artificial Sequence: Synthetic oligonucleotide
caagauaggucauuagaag

SEQ ID NO: 3161867 - RNA, 19 nt, Artificial Sequence
  Description of Artificial Sequence: Synthetic oligonucleotide
uagguaaugcuuuauugac

SEQ ID NO: 3161868 - RNA, 19 nt, Artificial Sequence
  Description of Artificial Sequence: Synthetic oligonucleotide
ugaccuaggaccuucugca

SEQ ID NO: 3161869 - RNA, 19 nt, Artificial Sequence
  Description of Artificial Sequence: Synthetic oligonucleotide
gucuauagaaaugagcagc

SEQ ID NO: 3161870 - RNA, 19 nt, Artificial Sequence
  Description of Artificial Sequence: Synthetic oligonucleotide
agauaggucauuagaaggg

SEQ ID NO: 3161871 - RNA, 19 nt, Artificial Sequence
  Description of Artificial Sequence: Synthetic oligonucleotide
aagaaaagagaugagucau

SEQ ID NO: 3161872 - RNA, 19 nt, Artificial Sequence
  Description of Artificial Sequence: Synthetic oligonucleotide
uggcugaacaaacauugcc

SEQ ID NO: 3161873 - RNA, 19 nt, Artificial Sequence
  Description of Artificial Sequence: Synthetic oligonucleotide
agaugagucauuaucccac

SEQ ID NO: 3161874 - RNA, 19 nt, Artificial Sequence
  Description of Artificial Sequence: Synthetic oligonucleotide
gucaccuaugaacaagugg

SEQ ID NO: 3161875 - RNA, 19 nt, Artificial Sequence
  Description of Artificial Sequence: Synthetic oligonucleotide
aagacggaggcucugugcu

SEQ ID NO: 3161876 - RNA, 19 nt, Artificial Sequence
  Description of Artificial Sequence: Synthetic oligonucleotide
uuacagagagcccaagccu

SEQ ID NO: 3161877 - RNA, 19 nt, Artificial Sequence
  Description of Artificial Sequence: Synthetic oligonucleotide
uggguggagagaagaaugg

SEQ ID NO: 3161878 - RNA, 19 nt, Artificial Sequence
  Description of Artificial Sequence: Synthetic oligonucleotide
gagagcccaagccucaugg

SEQ ID NO: 3161879 - RNA, 19 nt, Artificial Sequence
  Description of Artificial Sequence: Synthetic oligonucleotide
ugaacaaguggccgcaggc

SEQ ID NO: 3161880 - RNA, 19 nt, Artificial Sequence
  Description of Artificial Sequence: Synthetic oligonucleotide
cugggauacuauauaagag

SEQ ID NO: 3161881 - RNA, 19 nt, Artificial Sequence
  Description of Artificial Sequence: Synthetic oligonucleotide
acaaacauugccauguuca

SEQ ID NO: 3161882 - RNA, 19 nt, Artificial Sequence
  Description of Artificial Sequence: Synthetic oligonucleotide
accaagauaggucauuaga

SEQ ID NO: 3161883 - RNA, 19 nt, Artificial Sequence
  Description of Artificial Sequence: Synthetic oligonucleotide
agucuauagaaaugagcag

SEQ ID NO: 3161884 - RNA, 19 nt, Artificial Sequence
  Description of Artificial Sequence: Synthetic oligonucleotide
uggagagaagaauggcugg

SEQ ID NO: 3161885 - RNA, 19 nt, Artificial Sequence
  Description of Artificial Sequence: Synthetic oligonucleotide
uugacuuggucaccuauga

SEQ ID NO: 3161886 - RNA, 19 nt, Artificial Sequence
  Description of Artificial Sequence: Synthetic oligonucleotide
gucauuaucccacaucuuc

SEQ ID NO: 3161887 - RNA, 19 nt, Artificial Sequence
  Description of Artificial Sequence: Synthetic oligonucleotide
uuuauugacuuggucaccu

SEQ ID NO: 3161888 - RNA, 19 nt, Artificial Sequence
  Description of Artificial Sequence: Synthetic oligonucleotide
ugagggcauuuacagagag

SEQ ID NO: 3161889 - RNA, 19 nt, Artificial Sequence
  Description of Artificial Sequence: Synthetic oligonucleotide
guagguaaugcuuuauuga

SEQ ID NO: 3161890 - RNA, 19 nt, Artificial Sequence
  Description of Artificial Sequence: Synthetic oligonucleotide
gguuugagggcauuuacag

SEQ ID NO: 3161891 - RNA, 19 nt, Artificial Sequence
  Description of Artificial Sequence: Synthetic oligonucleotide
aaucagagaugcugcagga

SEQ ID NO: 3161892 - RNA, 19 nt, Artificial Sequence
  Description of Artificial Sequence: Synthetic oligonucleotide
acggaaaagacggaggcuc

SEQ ID NO: 3161893 - RNA, 19 nt, Artificial Sequence
  Description of Artificial Sequence: Synthetic oligonucleotide
cuacggaaaagacggaggc

SEQ ID NO: 3161894 - RNA, 19 nt, Artificial Sequence
  Description of Artificial Sequence: Synthetic oligonucleotide
aacaaguggccgcaggccu

SEQ ID NO: 3161895 - RNA, 19 nt, Artificial Sequence
  Description of Artificial Sequence: Synthetic oligonucleotide
uguuuuggcugaacaaaca

SEQ ID NO: 3161896 - RNA, 19 nt, Artificial Sequence
  Description of Artificial Sequence: Synthetic oligonucleotide
uucuuugcuacggaaaaga

SEQ ID NO: 3161897 - RNA, 19 nt, Artificial Sequence
  Description of Artificial Sequence: Synthetic oligonucleotide
ucuguuuuggcugaacaaa

SEQ ID NO: 3161898 - RNA, 19 nt, Artificial Sequence
  Description of Artificial Sequence: Synthetic oligonucleotide
uuagaaggguuugagggca

SEQ ID NO: 3161899 - RNA, 19 nt, Artificial Sequence
  Description of Artificial Sequence: Synthetic oligonucleotide
aggguuugagggcauuuac

SEQ ID NO: 3161900 - RNA, 19 nt, Artificial Sequence
  Description of Artificial Sequence: Synthetic oligonucleotide
aaaagacggaggcucugug

SEQ ID NO: 3161901 - RNA, 19 nt, Artificial Sequence
  Description of Artificial Sequence: Synthetic oligonucleotide
gguagguaaugcuuuauug

SEQ ID NO: 3161902 - RNA, 19 nt, Artificial Sequence
  Description of Artificial Sequence: Synthetic oligonucleotide
gagucauuaucccacaucu

SEQ ID NO: 3161903 - RNA, 19 nt, Artificial Sequence
  Description of Artificial Sequence: Synthetic oligonucleotide
ugagucauuaucccacauc

SEQ ID NO: 3161904 - RNA, 19 nt, Artificial Sequence
  Description of Artificial Sequence: Synthetic oligonucleotide
gaaggugaugaccuaggac

SEQ ID NO: 3161905 - RNA, 19 nt, Artificial Sequence
  Description of Artificial Sequence: Synthetic oligonucleotide
aaaagagaugagucauuau

SEQ ID NO: 3161906 - RNA, 19 nt, Artificial Sequence
  Description of Artificial Sequence: Synthetic oligonucleotide
ucuuugcuacggaaaagac

SEQ ID NO: 3161907 - RNA, 19 nt, Artificial Sequence
  Description of Artificial Sequence: Synthetic oligonucleotide
cauggauauggguggagag

SEQ ID NO: 3161908 - RNA, 19 nt, Artificial Sequence
  Description of Artificial Sequence: Synthetic oligonucleotide
gaaaucagagaugcugcag

SEQ ID NO: 3161909 - RNA, 19 nt, Artificial Sequence
  Description of Artificial Sequence: Synthetic oligonucleotide
uuuucagccgagcaccauc

SEQ ID NO: 3161910 - RNA, 19 nt, Artificial Sequence
  Description of Artificial Sequence: Synthetic oligonucleotide
uacagagagcccaagccuc

SEQ ID NO: 3161911 - RNA, 19 nt, Artificial Sequence
  Description of Artificial Sequence: Synthetic oligonucleotide
agcagggaaggugaugacc

SEQ ID NO: 3161912 - RNA, 19 nt, Artificial Sequence
  Description of Artificial Sequence: Synthetic oligonucleotide
uuuuggcugaacaaacauu

SEQ ID NO: 3161913 - RNA, 19 nt, Artificial Sequence
  Description of Artificial Sequence: Synthetic oligonucleotide
gauauggguggagagaaga

SEQ ID NO: 3161914 - RNA, 19 nt, Artificial Sequence
  Description of Artificial Sequence: Synthetic oligonucleotide
cagagaugcugcaggaagg

SEQ ID NO: 3161915 - RNA, 19 nt, Artificial Sequence
  Description of Artificial Sequence: Synthetic oligonucleotide
cuguuuuggcugaacaaac

SEQ ID NO: 3161916 - RNA, 19 nt, Artificial Sequence
  Description of Artificial Sequence: Synthetic oligonucleotide
uuucagccgagcaccaucu

SEQ ID NO: 3161917 - RNA, 19 nt, Artificial Sequence
  Description of Artificial Sequence: Synthetic oligonucleotide
cagguccucacccagcagg

SEQ ID NO: 3161918 - RNA, 19 nt, Artificial Sequence
  Description of Artificial Sequence: Synthetic oligonucleotide
uauugacuuggucaccuau

SEQ ID NO: 3161919 - RNA, 19 nt, Artificial Sequence
  Description of Artificial Sequence: Synthetic oligonucleotide
uucuguuuuggcugaacaa

SEQ ID NO: 3161920 - RNA, 19 nt, Artificial Sequence
  Description of Artificial Sequence: Synthetic oligonucleotide
augaacaaguggccgcagg

SEQ ID NO: 3161921 - RNA, 19 nt, Artificial Sequence
  Description of Artificial Sequence: Synthetic oligonucleotide
uuuaauuaaacauucagaa

SEQ ID NO: 3161922 - RNA, 19 nt, Artificial Sequence
  Description of Artificial Sequence: Synthetic oligonucleotide
aauaucuuugcuuucacug

SEQ ID NO: 3161923 - RNA, 19 nt, Artificial Sequence
  Description of Artificial Sequence: Synthetic oligonucleotide
aaagaguaaagauacuuuc

SEQ ID NO: 3161924 - RNA, 19 nt, Artificial Sequence
  Description of Artificial Sequence: Synthetic oligonucleotide
auagugaaauauuugagac

SEQ ID NO: 3161925 - RNA, 19 nt, Artificial Sequence
  Description of Artificial Sequence: Synthetic oligonucleotide
uauaauuugauauucauuu

SEQ ID NO: 3161926 - RNA, 19 nt, Artificial Sequence
  Description of Artificial Sequence: Synthetic oligonucleotide
aguuaugagucucuaaugc

SEQ ID NO: 3161927 - RNA, 19 nt, Artificial Sequence
  Description of Artificial Sequence: Synthetic oligonucleotide
aacauuaacaaccauuacu

SEQ ID NO: 3161928 - RNA, 19 nt, Artificial Sequence
  Description of Artificial Sequence: Synthetic oligonucleotide
uuugcauuagacaucauug

SEQ ID NO: 3161929 - RNA, 19 nt, Artificial Sequence
  Description of Artificial Sequence: Synthetic oligonucleotide
uuuuaauuaaacauucaga

SEQ ID NO: 3161930 - RNA, 19 nt, Artificial Sequence
  Description of Artificial Sequence: Synthetic oligonucleotide
ucuuggauagugaagacag

SEQ ID NO: 3161931 - RNA, 19 nt, Artificial Sequence
  Description of Artificial Sequence: Synthetic oligonucleotide
aauguacacuacuuaaggg

SEQ ID NO: 3161932 - RNA, 19 nt, Artificial Sequence
  Description of Artificial Sequence: Synthetic oligonucleotide
uuugcuaccaaacuguaga

SEQ ID NO: 3161933 - RNA, 19 nt, Artificial Sequence
  Description of Artificial Sequence: Synthetic oligonucleotide
aaagcuuugaaguguuuuc

SEQ ID NO: 3161934 - RNA, 19 nt, Artificial Sequence
  Description of Artificial Sequence: Synthetic oligonucleotide
uauaauacaaagauuuuau

SEQ ID NO: 3161935 - RNA, 19 nt, Artificial Sequence
  Description of Artificial Sequence: Synthetic oligonucleotide
acauagguuaauuaaaaug

SEQ ID NO: 3161936 - RNA, 19 nt, Artificial Sequence
  Description of Artificial Sequence: Synthetic oligonucleotide
acuacuuuugagcucuucc

SEQ ID NO: 3161937 - RNA, 19 nt, Artificial Sequence
  Description of Artificial Sequence: Synthetic oligonucleotide
uuaagguaguaaaaggaag

SEQ ID NO: 3161938 - RNA, 19 nt, Artificial Sequence
  Description of Artificial Sequence: Synthetic oligonucleotide
cucacuaguauucuuaagg

SEQ ID NO: 3161939 - RNA, 19 nt, Artificial Sequence
  Description of Artificial Sequence: Synthetic oligonucleotide
ugaauugauauuuuacuca

SEQ ID NO: 3161940 - RNA, 19 nt, Artificial Sequence
  Description of Artificial Sequence: Synthetic oligonucleotide
uauaugcuggagcaggugg

SEQ ID NO: 3161941 - RNA, 19 nt, Artificial Sequence
  Description of Artificial Sequence: Synthetic oligonucleotide
aauucuuuugcaaguacac

SEQ ID NO: 3161942 - RNA, 19 nt, Artificial Sequence
  Description of Artificial Sequence: Synthetic oligonucleotide
uuagguccaaauaaugaag

SEQ ID NO: 3161943 - RNA, 19 nt, Artificial Sequence
  Description of Artificial Sequence: Synthetic oligonucleotide
uauuaacuacuuuugagcu

SEQ ID NO: 3161944 - RNA, 19 nt, Artificial Sequence
  Description of Artificial Sequence: Synthetic oligonucleotide
aaaccuguuaacucuaggu

SEQ ID NO: 3161945 - RNA, 19 nt, Artificial Sequence
  Description of Artificial Sequence: Synthetic oligonucleotide
uuaugagucucuaaugcug

SEQ ID NO: 3161946 - RNA, 19 nt, Artificial Sequence
  Description of Artificial Sequence: Synthetic oligonucleotide
auuuauuucuucugaaugu

SEQ ID NO: 3161947 - RNA, 19 nt, Artificial Sequence
  Description of Artificial Sequence: Synthetic oligonucleotide
ugcaaaaugcaaauauccc

SEQ ID NO: 3161948 - RNA, 19 nt, Artificial Sequence
  Description of Artificial Sequence: Synthetic oligonucleotide
gaaaagggaaucgauaccc

SEQ ID NO: 3161949 - RNA, 19 nt, Artificial Sequence
  Description of Artificial Sequence: Synthetic oligonucleotide
uucuaaacgguauuacugc

SEQ ID NO: 3161950 - RNA, 19 nt, Artificial Sequence
  Description of Artificial Sequence: Synthetic oligonucleotide
ugaauugcugcacaaccag

SEQ ID NO: 3161951 - RNA, 19 nt, Artificial Sequence
  Description of Artificial Sequence: Synthetic oligonucleotide
uagaggauggagaagaguc

SEQ ID NO: 3161952 - RNA, 19 nt, Artificial Sequence
  Description of Artificial Sequence: Synthetic oligonucleotide
auaguaagaaaccuguuaa

SEQ ID NO: 3161953 - RNA, 19 nt, Artificial Sequence
  Description of Artificial Sequence: Synthetic oligonucleotide
gaugcaaagaucuucugga

SEQ ID NO: 3161954 - RNA, 19 nt, Artificial Sequence
  Description of Artificial Sequence: Synthetic oligonucleotide
cauuuauuucuucugaaug

SEQ ID NO: 3161955 - RNA, 19 nt, Artificial Sequence
  Description of Artificial Sequence: Synthetic oligonucleotide
aaguuugaauuucuugcag

SEQ ID NO: 3161956 - RNA, 19 nt, Artificial Sequence
  Description of Artificial Sequence: Synthetic oligonucleotide
ugaagagaaaccagucuag

SEQ ID NO: 3161957 - RNA, 19 nt, Artificial Sequence
  Description of Artificial Sequence: Synthetic oligonucleotide
uuaacuacuuuugagcucu

SEQ ID NO: 3161958 - RNA, 19 nt, Artificial Sequence
  Description of Artificial Sequence: Synthetic oligonucleotide
ugacuuaccaugcugcucu

SEQ ID NO: 3161959 - RNA, 19 nt, Artificial Sequence
  Description of Artificial Sequence: Synthetic oligonucleotide
aaaggaagauguaaguuug

SEQ ID NO: 3161960 - RNA, 19 nt, Artificial Sequence
  Description of Artificial Sequence: Synthetic oligonucleotide
ugaaauauuugagacacaa

SEQ ID NO: 3161961 - RNA, 19 nt, Artificial Sequence
  Description of Artificial Sequence: Synthetic oligonucleotide
uuguaagaugcaaugcugc

SEQ ID NO: 3161962 - RNA, 19 nt, Artificial Sequence
  Description of Artificial Sequence: Synthetic oligonucleotide
auguacacuacuuaagggu

SEQ ID NO: 3161963 - RNA, 19 nt, Artificial Sequence
  Description of Artificial Sequence: Synthetic oligonucleotide
gauaauuucucagagaccu

SEQ ID NO: 3161964 - RNA, 19 nt, Artificial Sequence
  Description of Artificial Sequence: Synthetic oligonucleotide
ucaacauugugucccaugu

SEQ ID NO: 3161965 - RNA, 19 nt, Artificial Sequence
  Description of Artificial Sequence: Synthetic oligonucleotide
uacaucuugaacagucucc

SEQ ID NO: 3161966 - RNA, 19 nt, Artificial Sequence
  Description of Artificial Sequence: Synthetic oligonucleotide
agguauagcagcuguaaag

SEQ ID NO: 3161967 - RNA, 19 nt, Artificial Sequence
  Description of Artificial Sequence: Synthetic oligonucleotide
uacugauaaauaacccagg

SEQ ID NO: 3161968 - RNA, 19 nt, Artificial Sequence
  Description of Artificial Sequence: Synthetic oligonucleotide
uugaagcuaauguccaagg

SEQ ID NO: 3161969 - RNA, 19 nt, Artificial Sequence
  Description of Artificial Sequence: Synthetic oligonucleotide
uaccaugcugcucuagucg

SEQ ID NO: 3161970 - RNA, 19 nt, Artificial Sequence
  Description of Artificial Sequence: Synthetic oligonucleotide
ugucacugaguuaucaaca

SEQ ID NO: 3161971 - RNA, 19 nt, Artificial Sequence
  Description of Artificial Sequence: Synthetic oligonucleotide
uagucuucugugcagagcu

SEQ ID NO: 3161972 - RNA, 19 nt, Artificial Sequence
  Description of Artificial Sequence: Synthetic oligonucleotide
aaaauuaacuuuaggucca

SEQ ID NO: 3161973 - RNA, 19 nt, Artificial Sequence
  Description of Artificial Sequence: Synthetic oligonucleotide
uugcagaaaaguuaugagu

SEQ ID NO: 3161974 - RNA, 19 nt, Artificial Sequence
  Description of Artificial Sequence: Synthetic oligonucleotide
auuaacuacuuuugagcuc

SEQ ID NO: 3161975 - RNA, 19 nt, Artificial Sequence
  Description of Artificial Sequence: Synthetic oligonucleotide
gaguuaucaacauuaacaa

SEQ ID NO: 3161976 - RNA, 19 nt, Artificial Sequence
  Description of Artificial Sequence: Synthetic oligonucleotide
gaaucaauuacagcugugc

SEQ ID NO: 3161977 - RNA, 19 nt, Artificial Sequence
  Description of Artificial Sequence: Synthetic oligonucleotide
ugaaaagggaaucgauacc

SEQ ID NO: 3161978 - RNA, 19 nt, Artificial Sequence
  Description of Artificial Sequence: Synthetic oligonucleotide
gaaagugcaucccacgaug

SEQ ID NO: 3161979 - RNA, 19 nt, Artificial Sequence
  Description of Artificial Sequence: Synthetic oligonucleotide
aguuauuuuacagauuacu

SEQ ID NO: 3161980 - RNA, 19 nt, Artificial Sequence
  Description of Artificial Sequence: Synthetic oligonucleotide
cuugcagaaaaguuaugag

SEQ ID NO: 3161981 - RNA, 19 nt, Artificial Sequence
  Description of Artificial Sequence: Synthetic oligonucleotide
gaaguuaggauggucacug

SEQ ID NO: 3161982 - RNA, 19 nt, Artificial Sequence
  Description of Artificial Sequence: Synthetic oligonucleotide
cucuuuucuguaaugcagg

SEQ ID NO: 3161983 - RNA, 19 nt, Artificial Sequence
  Description of Artificial Sequence: Synthetic oligonucleotide
uagguccaaauaaugaaga

SEQ ID NO: 3161984 - RNA, 19 nt, Artificial Sequence
  Description of Artificial Sequence: Synthetic oligonucleotide
ucagccuagaucauacaca

SEQ ID NO: 3161985 - RNA, 19 nt, Artificial Sequence
  Description of Artificial Sequence: Synthetic oligonucleotide
aguuaacugcccuggauag

SEQ ID NO: 3161986 - RNA, 19 nt, Artificial Sequence
  Description of Artificial Sequence: Synthetic oligonucleotide
aaauaucuuugcuuucacu

SEQ ID NO: 3161987 - RNA, 19 nt, Artificial Sequence
  Description of Artificial Sequence: Synthetic oligonucleotide
cucaacagcaaaugcacag

SEQ ID NO: 3161988 - RNA, 19 nt, Artificial Sequence
  Description of Artificial Sequence: Synthetic oligonucleotide
aaagggaaucgauacccug

SEQ ID NO: 3161989 - RNA, 19 nt, Artificial Sequence
  Description of Artificial Sequence: Synthetic oligonucleotide
aacauagguuaauuaaaau

SEQ ID NO: 3161990 - RNA, 19 nt, Artificial Sequence
  Description of Artificial Sequence: Synthetic oligonucleotide
uauuuacacagguauacau

SEQ ID NO: 3161991 - RNA, 19 nt, Artificial Sequence
  Description of Artificial Sequence: Synthetic oligonucleotide
uguaucaccgaugacagau

SEQ ID NO: 3161992 - RNA, 19 nt, Artificial Sequence
  Description of Artificial Sequence: Synthetic oligonucleotide
auuacagcugugcuuguag

SEQ ID NO: 3161993 - RNA, 19 nt, Artificial Sequence
  Description of Artificial Sequence: Synthetic oligonucleotide
ucuauuauuugcuucccau

SEQ ID NO: 3161994 - RNA, 19 nt, Artificial Sequence
  Description of Artificial Sequence: Synthetic oligonucleotide
ugugcaaaaugcaaauauc

SEQ ID NO: 3161995 - RNA, 19 nt, Artificial Sequence
  Description of Artificial Sequence: Synthetic oligonucleotide
uuuucucagggacagguaa

SEQ ID NO: 3161996 - RNA, 19 nt, Artificial Sequence
  Description of Artificial Sequence: Synthetic oligonucleotide
guauggaacaaguggcugg

SEQ ID NO: 3161997 - RNA, 19 nt, Artificial Sequence
  Description of Artificial Sequence: Synthetic oligonucleotide
acuguuuucuaauccgcuc

SEQ ID NO: 3161998 - RNA, 19 nt, Artificial Sequence
  Description of Artificial Sequence: Synthetic oligonucleotide
aguaucauaaagacaaugu

SEQ ID NO: 3161999 - RNA, 19 nt, Artificial Sequence
  Description of Artificial Sequence: Synthetic oligonucleotide
acaauuagguucuugguua

SEQ ID NO: 3162000 - RNA, 19 nt, Artificial Sequence
  Description of Artificial Sequence: Synthetic oligonucleotide
ggauagugaagacagcugg

SEQ ID NO: 3162001 - RNA, 19 nt, Artificial Sequence
  Description of Artificial Sequence: Synthetic oligonucleotide
cauagugaaauauuugaga

SEQ ID NO: 3162002 - RNA, 19 nt, Artificial Sequence
  Description of Artificial Sequence: Synthetic oligonucleotide
aacuguaagguuaaggcau

SEQ ID NO: 3162003 - RNA, 19 nt, Artificial Sequence
  Description of Artificial Sequence: Synthetic oligonucleotide
auucuaaacgguauuacug

SEQ ID NO: 3162004 - RNA, 19 nt, Artificial Sequence
  Description of Artificial Sequence: Synthetic oligonucleotide
uucagccuagaucauacac

SEQ ID NO: 3162005 - RNA, 19 nt, Artificial Sequence
  Description of Artificial Sequence: Synthetic oligonucleotide
aacaugauuuccacacuac

SEQ ID NO: 3162006 - RNA, 19 nt, Artificial Sequence
  Description of Artificial Sequence: Synthetic oligonucleotide
aaguucaguaucauaaaga

SEQ ID NO: 3162007 - RNA, 19 nt, Artificial Sequence
  Description of Artificial Sequence: Synthetic oligonucleotide
accuuuauaugcuggagca

SEQ ID NO: 3162008 - RNA, 19 nt, Artificial Sequence
  Description of Artificial Sequence: Synthetic oligonucleotide
aggaaaagcuuucaaacau

SEQ ID NO: 3162009 - RNA, 19 nt, Artificial Sequence
  Description of Artificial Sequence: Synthetic oligonucleotide
gugcaaaaugcaaauaucc

SEQ ID NO: 3162010 - RNA, 19 nt, Artificial Sequence
  Description of Artificial Sequence: Synthetic oligonucleotide
aaaggguagggcaugggag

SEQ ID NO: 3162011 - RNA, 19 nt, Artificial Sequence
  Description of Artificial Sequence: Synthetic oligonucleotide
caaauaguuacaauaguaa

SEQ ID NO: 3162012 - RNA, 19 nt, Artificial Sequence
  Description of Artificial Sequence: Synthetic oligonucleotide
aguguuuucacuuccuuuu

SEQ ID NO: 3162013 - RNA, 19 nt, Artificial Sequence
  Description of Artificial Sequence: Synthetic oligonucleotide
uuucucagagaccuguagu

SEQ ID NO: 3162014 - RNA, 19 nt, Artificial Sequence
  Description of Artificial Sequence: Synthetic oligonucleotide
gaaaccuguuaacucuagg

SEQ ID NO: 3162015 - RNA, 19 nt, Artificial Sequence
  Description of Artificial Sequence: Synthetic oligonucleotide
acuaguagaggauggagaa

SEQ ID NO: 3162016 - RNA, 19 nt, Artificial Sequence
  Description of Artificial Sequence: Synthetic oligonucleotide
aacgguauuacugcugaug

SEQ ID NO: 3162017 - RNA, 19 nt, Artificial Sequence
  Description of Artificial Sequence: Synthetic oligonucleotide
aagaugauuuguaaacaug

SEQ ID NO: 3162018 - RNA, 19 nt, Artificial Sequence
  Description of Artificial Sequence: Synthetic oligonucleotide
agcuuugaaguguuuucac

SEQ ID NO: 3162019 - RNA, 19 nt, Artificial Sequence
  Description of Artificial Sequence: Synthetic oligonucleotide
acccuguacuuguuuaacc

SEQ ID NO: 3162020 - RNA, 19 nt, Artificial Sequence
  Description of Artificial Sequence: Synthetic oligonucleotide
acaguaaacggguuuauuu

SEQ ID NO: 3162021 - RNA, 19 nt, Artificial Sequence
  Description of Artificial Sequence: Synthetic oligonucleotide
ucugcugacaggauggagg

SEQ ID NO: 3162022 - RNA, 19 nt, Artificial Sequence
  Description of Artificial Sequence: Synthetic oligonucleotide
gaggacaaggcuuuggagg

SEQ ID NO: 3162023 - RNA, 19 nt, Artificial Sequence
  Description of Artificial Sequence: Synthetic oligonucleotide
uuuucuucucuucucuugg

SEQ ID NO: 3162024 - RNA, 19 nt, Artificial Sequence
  Description of Artificial Sequence: Synthetic oligonucleotide
augguaguaggugagaugg

SEQ ID NO: 3162025 - RNA, 19 nt, Artificial Sequence
  Description of Artificial Sequence: Synthetic oligonucleotide
gagguggacacacaggagg

SEQ ID NO: 3162026 - RNA, 19 nt, Artificial Sequence
  Description of Artificial Sequence: Synthetic oligonucleotide
uuuggagguggacacacag

SEQ ID NO: 3162027 - RNA, 19 nt, Artificial Sequence
  Description of Artificial Sequence: Synthetic oligonucleotide
ugagaugguauuuucuucu

SEQ ID NO: 3162028 - RNA, 19 nt, Artificial Sequence
  Description of Artificial Sequence: Synthetic oligonucleotide
uguugaagcacuccacuug

SEQ ID NO: 3162029 - RNA, 19 nt, Artificial Sequence
  Description of Artificial Sequence: Synthetic oligonucleotide
gaggagguugcacaggagg

SEQ ID NO: 3162030 - RNA, 19 nt, Artificial Sequence
  Description of Artificial Sequence: Synthetic oligonucleotide
uggagguggacacacagga

SEQ ID NO: 3162031 - RNA, 19 nt, Artificial Sequence
  Description of Artificial Sequence: Synthetic oligonucleotide
ucuucucuucucuuggucc

SEQ ID NO: 3162032 - RNA, 19 nt, Artificial Sequence
  Description of Artificial Sequence: Synthetic oligonucleotide
uccacuugcucuugggugg

SEQ ID NO: 3162033 - RNA, 19 nt, Artificial Sequence
  Description of Artificial Sequence: Synthetic oligonucleotide
auuuucuucucuucucuug

SEQ ID NO: 3162034 - RNA, 19 nt, Artificial Sequence
  Description of Artificial Sequence: Synthetic oligonucleotide
ugacuguugaagcacucca

SEQ ID NO: 3162035 - RNA, 19 nt, Artificial Sequence
  Description of Artificial Sequence: Synthetic oligonucleotide
ugguauuuucuucucuucu

SEQ ID NO: 3162036 - RNA, 19 nt, Artificial Sequence
  Description of Artificial Sequence: Synthetic oligonucleotide
guugcuaugguaguaggug

SEQ ID NO: 3162037 - RNA, 19 nt, Artificial Sequence
  Description of Artificial Sequence: Synthetic oligonucleotide
gauggaggagguugcacag

SEQ ID NO: 3162038 - RNA, 19 nt, Artificial Sequence
  Description of Artificial Sequence: Synthetic oligonucleotide
guugaagcacuccacuugc

SEQ ID NO: 3162039 - RNA, 19 nt, Artificial Sequence
  Description of Artificial Sequence: Synthetic oligonucleotide
augguauuuucuucucuuc

SEQ ID NO: 3162040 - RNA, 19 nt, Artificial Sequence
  Description of Artificial Sequence: Synthetic oligonucleotide
ugcuaugguaguaggugag

SEQ ID NO: 3162041 - RNA, 19 nt, Artificial Sequence
  Description of Artificial Sequence: Synthetic oligonucleotide
gacaggauggaggagguug

SEQ ID NO: 3162042 - RNA, 19 nt, Artificial Sequence
  Description of Artificial Sequence: Synthetic oligonucleotide
cacaggaggaggcugacag

SEQ ID NO: 3162043 - RNA, 19 nt, Artificial Sequence
  Description of Artificial Sequence: Synthetic oligonucleotide
acuucugcugacaggaugg

SEQ ID NO: 3162044 - RNA, 19 nt, Artificial Sequence
  Description of Artificial Sequence: Synthetic oligonucleotide
uaugguaguaggugagaug

SEQ ID NO: 3162045 - RNA, 19 nt, Artificial Sequence
  Description of Artificial Sequence: Synthetic oligonucleotide
uuggagguggacacacagg

SEQ ID NO: 3162046 - RNA, 19 nt, Artificial Sequence
  Description of Artificial Sequence: Synthetic oligonucleotide
aggcuuuggagguggacac

SEQ ID NO: 3162047 - RNA, 19 nt, Artificial Sequence
  Description of Artificial Sequence: Synthetic oligonucleotide
aaggcuuuggagguggaca

SEQ ID NO: 3162048 - RNA, 19 nt, Artificial Sequence
  Description of Artificial Sequence: Synthetic oligonucleotide
acuguugaagcacuccacu

SEQ ID NO: 3162049 - RNA, 19 nt, Artificial Sequence
  Description of Artificial Sequence: Synthetic oligonucleotide
aggagggcauuucugcugg

SEQ ID NO: 3162050 - RNA, 19 nt, Artificial Sequence
  Description of Artificial Sequence: Synthetic oligonucleotide
cacaggagggcauuucugc

SEQ ID NO: 3162051 - RNA, 19 nt, Artificial Sequence
  Description of Artificial Sequence: Synthetic oligonucleotide
aggacaaggcuuuggaggu

SEQ ID NO: 3162052 - RNA, 19 nt, Artificial Sequence
  Description of Artificial Sequence: Synthetic oligonucleotide
uggacacacaggaggaggc

SEQ ID NO: 3162053 - RNA, 19 nt, Artificial Sequence
  Description of Artificial Sequence: Synthetic oligonucleotide
uugcuaugguaguagguga

SEQ ID NO: 3162054 - RNA, 19 nt, Artificial Sequence
  Description of Artificial Sequence: Synthetic oligonucleotide
auggcugaggaggacaagg

SEQ ID NO: 3162055 - RNA, 19 nt, Artificial Sequence
  Description of Artificial Sequence: Synthetic oligonucleotide
uggaggagguugcacagga

SEQ ID NO: 3162056 - RNA, 19 nt, Artificial Sequence
  Description of Artificial Sequence: Synthetic oligonucleotide
gacaaggcuuuggaggugg

SEQ ID NO: 3162057 - RNA, 19 nt, Artificial Sequence
  Description of Artificial Sequence: Synthetic oligonucleotide
uuggguggggcacuucugc

SEQ ID NO: 3162058 - RNA, 19 nt, Artificial Sequence
  Description of Artificial Sequence: Synthetic oligonucleotide
uccuggugacuguugaagc

SEQ ID NO: 3162059 - RNA, 19 nt, Artificial Sequence
  Description of Artificial Sequence: Synthetic oligonucleotide
ugaagcacuccacuugcuc

SEQ ID NO: 3162060 - RNA, 19 nt, Artificial Sequence
  Description of Artificial Sequence: Synthetic oligonucleotide
ucuuggguggggcacuucu

SEQ ID NO: 3162061 - RNA, 19 nt, Artificial Sequence
  Description of Artificial Sequence: Synthetic oligonucleotide
auuucugcuggcauggcug

SEQ ID NO: 3162062 - RNA, 19 nt, Artificial Sequence
  Description of Artificial Sequence: Synthetic oligonucleotide
caggaggaggcugacaggg

SEQ ID NO: 3162063 - RNA, 19 nt, Artificial Sequence
  Description of Artificial Sequence: Synthetic oligonucleotide
ucuucucuugguccuggug

SEQ ID NO: 3162064 - RNA, 19 nt, Artificial Sequence
  Description of Artificial Sequence: Synthetic oligonucleotide
ugcacaggagggcauuucu

SEQ ID NO: 3162065 - RNA, 19 nt, Artificial Sequence
  Description of Artificial Sequence: Synthetic oligonucleotide
cuucucuugguccugguga

SEQ ID NO: 3162066 - RNA, 19 nt, Artificial Sequence
  Description of Artificial Sequence: Synthetic oligonucleotide
gcuggcauggcugaggagg

SEQ ID NO: 3162067 - RNA, 19 nt, Artificial Sequence
  Description of Artificial Sequence: Synthetic oligonucleotide
agaugguauuuucuucucu

SEQ ID NO: 3162068 - RNA, 19 nt, Artificial Sequence
  Description of Artificial Sequence: Synthetic oligonucleotide
cuccacuugcucuugggug

SEQ ID NO: 3162069 - RNA, 19 nt, Artificial Sequence
  Description of Artificial Sequence: Synthetic oligonucleotide
acaggauggaggagguugc

SEQ ID NO: 3162070 - RNA, 19 nt, Artificial Sequence
  Description of Artificial Sequence: Synthetic oligonucleotide
uucuucucuucucuugguc

SEQ ID NO: 3162071 - RNA, 19 nt, Artificial Sequence
  Description of Artificial Sequence: Synthetic oligonucleotide
ucugcuggcauggcugagg

SEQ ID NO: 3162072 - RNA, 19 nt, Artificial Sequence
  Description of Artificial Sequence: Synthetic oligonucleotide
uggcugaggaggacaaggc

SEQ ID NO: 3162073 - RNA, 19 nt, Artificial Sequence
  Description of Artificial Sequence: Synthetic oligonucleotide
gcugacaggauggaggagg

SEQ ID NO: 3162074 - RNA, 19 nt, Artificial Sequence
  Description of Artificial Sequence: Synthetic oligonucleotide
aggaggacaaggcuuugga

SEQ ID NO: 3162075 - RNA, 19 nt, Artificial Sequence
  Description of Artificial Sequence: Synthetic oligonucleotide
aggagguugcacaggaggg

SEQ ID NO: 3162076 - RNA, 19 nt, Artificial Sequence
  Description of Artificial Sequence: Synthetic oligonucleotide
uucucuugguccuggugac

SEQ ID NO: 3162077 - RNA, 19 nt, Artificial Sequence
  Description of Artificial Sequence: Synthetic oligonucleotide
guggacacacaggaggagg

SEQ ID NO: 3162078 - RNA, 19 nt, Artificial Sequence
  Description of Artificial Sequence: Synthetic oligonucleotide
gugagaugguauuuucuuc

SEQ ID NO: 3162079 - RNA, 19 nt, Artificial Sequence
  Description of Artificial Sequence: Synthetic oligonucleotide
gguauuuucuucucuucuc

SEQ ID NO: 3162080 - RNA, 19 nt, Artificial Sequence
  Description of Artificial Sequence: Synthetic oligonucleotide
uuucugcuggcauggcuga

SEQ ID NO: 3162081 - RNA, 19 nt, Artificial Sequence
  Description of Artificial Sequence: Synthetic oligonucleotide
acuugcucuuggguggggc

SEQ ID NO: 3162082 - RNA, 19 nt, Artificial Sequence
  Description of Artificial Sequence: Synthetic oligonucleotide
uauuuucuucucuucucuu

SEQ ID NO: 3162083 - RNA, 19 nt, Artificial Sequence
  Description of Artificial Sequence: Synthetic oligonucleotide
ugguccuggugacuguuga

SEQ ID NO: 3162084 - RNA, 19 nt, Artificial Sequence
  Description of Artificial Sequence: Synthetic oligonucleotide
uaggugagaugguauuuuc

SEQ ID NO: 3162085 - RNA, 19 nt, Artificial Sequence
  Description of Artificial Sequence: Synthetic oligonucleotide
uuucuucucuucucuuggu

SEQ ID NO: 3162086 - RNA, 19 nt, Artificial Sequence
  Description of Artificial Sequence: Synthetic oligonucleotide
gagaugguauuuucuucuc

SEQ ID NO: 3162087 - RNA, 19 nt, Artificial Sequence
  Description of Artificial Sequence: Synthetic oligonucleotide
acaggaggaggcugacagg

SEQ ID NO: 3162088 - RNA, 19 nt, Artificial Sequence
  Description of Artificial Sequence: Synthetic oligonucleotide
gaagcacuccacuugcucu

SEQ ID NO: 3162089 - RNA, 19 nt, Artificial Sequence
  Description of Artificial Sequence: Synthetic oligonucleotide
uaguaggugagaugguauu

SEQ ID NO: 3162090 - RNA, 19 nt, Artificial Sequence
  Description of Artificial Sequence: Synthetic oligonucleotide
ucucuucucuugguccugg

SEQ ID NO: 3162091 - RNA, 19 nt, Artificial Sequence
  Description of Artificial Sequence: Synthetic oligonucleotide
uggugacuguugaagcacu

SEQ ID NO: 3162092 - RNA, 19 nt, Artificial Sequence
  Description of Artificial Sequence: Synthetic oligonucleotide
cacuucugcugacaggaug

SEQ ID NO: 3162093 - RNA, 19 nt, Artificial Sequence
  Description of Artificial Sequence: Synthetic oligonucleotide
gaugguauuuucuucucuu

SEQ ID NO: 3162094 - RNA, 19 nt, Artificial Sequence
  Description of Artificial Sequence: Synthetic oligonucleotide
acaggagggcauuucugcu

SEQ ID NO: 3162095 - RNA, 19 nt, Artificial Sequence
  Description of Artificial Sequence: Synthetic oligonucleotide
ggcauuucugcuggcaugg

SEQ ID NO: 3162096 - RNA, 19 nt, Artificial Sequence
  Description of Artificial Sequence: Synthetic oligonucleotide
aagcacuccacuugcucuu

SEQ ID NO: 3162097 - RNA, 19 nt, Artificial Sequence
  Description of Artificial Sequence: Synthetic oligonucleotide
guccuggugacuguugaag

SEQ ID NO: 3162098 - RNA, 19 nt, Artificial Sequence
  Description of Artificial Sequence: Synthetic oligonucleotide
guauuuucuucucuucucu

SEQ ID NO: 3162099 - RNA, 19 nt, Artificial Sequence
  Description of Artificial Sequence: Synthetic oligonucleotide
gaggaggacaaggcuuugg

SEQ ID NO: 3162100 - RNA, 19 nt, Artificial Sequence
  Description of Artificial Sequence: Synthetic oligonucleotide
acuccacuugcucuugggu

SEQ ID NO: 3162101 - RNA, 19 nt, Artificial Sequence
  Description of Artificial Sequence: Synthetic oligonucleotide
gacacacaggaggaggcug

SEQ ID NO: 3162102 - RNA, 19 nt, Artificial Sequence
  Description of Artificial Sequence: Synthetic oligonucleotide
aggauggaggagguugcac

SEQ ID NO: 3162103 - RNA, 19 nt, Artificial Sequence
  Description of Artificial Sequence: Synthetic oligonucleotide
cacuccacuugcucuuggg

SEQ ID NO: 3162104 - RNA, 19 nt, Artificial Sequence
  Description of Artificial Sequence: Synthetic oligonucleotide
cuggugacuguugaagcac

SEQ ID NO: 3162105 - RNA, 19 nt, Artificial Sequence
  Description of Artificial Sequence: Synthetic oligonucleotide
caggagggcauuucugcug

SEQ ID NO: 3162106 - RNA, 19 nt, Artificial Sequence
  Description of Artificial Sequence: Synthetic oligonucleotide
uugaagcacuccacuugcu

SEQ ID NO: 3162107 - RNA, 19 nt, Artificial Sequence
  Description of Artificial Sequence: Synthetic oligonucleotide
gacuguugaagcacuccac

SEQ ID NO: 3162108 - RNA, 19 nt, Artificial Sequence
  Description of Artificial Sequence: Synthetic oligonucleotide
ggaggacaaggcuuuggag

SEQ ID NO: 3162109 - RNA, 19 nt, Artificial Sequence
  Description of Artificial Sequence: Synthetic oligonucleotide
uugguccuggugacuguug

SEQ ID NO: 3162110 - RNA, 19 nt, Artificial Sequence
  Description of Artificial Sequence: Synthetic oligonucleotide
gugacuguugaagcacucc

SEQ ID NO: 3162111 - RNA, 19 nt, Artificial Sequence
  Description of Artificial Sequence: Synthetic oligonucleotide
uucugcugacaggauggag

SEQ ID NO: 3162112 - RNA, 19 nt, Artificial Sequence
  Description of Artificial Sequence: Synthetic oligonucleotide
cucuugguccuggugacug

SEQ ID NO: 3162113 - RNA, 19 nt, Artificial Sequence
  Description of Artificial Sequence: Synthetic oligonucleotide
ggauggaggagguugcaca

SEQ ID NO: 3162114 - RNA, 19 nt, Artificial Sequence
  Description of Artificial Sequence: Synthetic oligonucleotide
agggcauuucugcuggcau

SEQ ID NO: 3162115 - RNA, 19 nt, Artificial Sequence
  Description of Artificial Sequence: Synthetic oligonucleotide
ggcacuucugcugacagga

SEQ ID NO: 3162116 - RNA, 19 nt, Artificial Sequence
  Description of Artificial Sequence: Synthetic oligonucleotide
cugcugacaggauggagga

SEQ ID NO: 3162117 - RNA, 19 nt, Artificial Sequence
  Description of Artificial Sequence: Synthetic oligonucleotide
ugguaguaggugagauggu

SEQ ID NO: 3162118 - RNA, 19 nt, Artificial Sequence
  Description of Artificial Sequence: Synthetic oligonucleotide
gagguugcacaggagggca

SEQ ID NO: 3162119 - RNA, 19 nt, Artificial Sequence
  Description of Artificial Sequence: Synthetic oligonucleotide
aguaggugagaugguauuu

SEQ ID NO: 3162120 - RNA, 19 nt, Artificial Sequence
  Description of Artificial Sequence: Synthetic oligonucleotide
cuuggguggggcacuucug

SEQ ID NO: 3162121 - RNA, 19 nt, Artificial Sequence
  Description of Artificial Sequence: Synthetic oligonucleotide
uuagagaaaacccacaucu

SEQ ID NO: 3162122 - RNA, 19 nt, Artificial Sequence
  Description of Artificial Sequence: Synthetic oligonucleotide
aaaggcucaggcuacagcg

SEQ ID NO: 3162123 - RNA, 19 nt, Artificial Sequence
  Description of Artificial Sequence: Synthetic oligonucleotide
aaugcaauaaccagaggcc

SEQ ID NO: 3162124 - RNA, 19 nt, Artificial Sequence
  Description of Artificial Sequence: Synthetic oligonucleotide
auaaccagaggccaaggcc

SEQ ID NO: 3162125 - RNA, 19 nt, Artificial Sequence
  Description of Artificial Sequence: Synthetic oligonucleotide
aauaaccagaggccaaggc

SEQ ID NO: 3162126 - RNA, 19 nt, Artificial Sequence
  Description of Artificial Sequence: Synthetic oligonucleotide
caaugcaauaaccagaggc

SEQ ID NO: 3162127 - RNA, 19 nt, Artificial Sequence
  Description of Artificial Sequence: Synthetic oligonucleotide
aggagugacaucuaguguc

SEQ ID NO: 3162128 - RNA, 19 nt, Artificial Sequence
  Description of Artificial Sequence: Synthetic oligonucleotide
agagaaaacccacaucuuc

SEQ ID NO: 3162129 - RNA, 19 nt, Artificial Sequence
  Description of Artificial Sequence: Synthetic oligonucleotide
agaaaacccacaucuuccc

SEQ ID NO: 3162130 - RNA, 19 nt, Artificial Sequence
  Description of Artificial Sequence: Synthetic oligonucleotide
uuguccuugucacagcagg

SEQ ID NO: 3162131 - RNA, 19 nt, Artificial Sequence
  Description of Artificial Sequence: Synthetic oligonucleotide
cucaaugcaauaaccagag

SEQ ID NO: 3162132 - RNA, 19 nt, Artificial Sequence
  Description of Artificial Sequence: Synthetic oligonucleotide
ucucaaugcaauaaccaga

SEQ ID NO: 3162133 - RNA, 19 nt, Artificial Sequence
  Description of Artificial Sequence: Synthetic oligonucleotide
uguagcaggagugacaucu

SEQ ID NO: 3162134 - RNA, 19 nt, Artificial Sequence
  Description of Artificial Sequence: Synthetic oligonucleotide
agcacggggaccuuguagc

SEQ ID NO: 3162135 - RNA, 19 nt, Artificial Sequence
  Description of Artificial Sequence: Synthetic oligonucleotide
guugguuugguugaaagcc

SEQ ID NO: 3162136 - RNA, 19 nt, Artificial Sequence
  Description of Artificial Sequence: Synthetic oligonucleotide
uaaccagaggccaaggcca

SEQ ID NO: 3162137 - RNA, 19 nt, Artificial Sequence
  Description of Artificial Sequence: Synthetic oligonucleotide
uuugguugaaagccucccg

SEQ ID NO: 3162138 - RNA, 19 nt, Artificial Sequence
  Description of Artificial Sequence: Synthetic oligonucleotide
acuggcgauccacacaccc

SEQ ID NO: 3162139 - RNA, 19 nt, Artificial Sequence
  Description of Artificial Sequence: Synthetic oligonucleotide
cuugugguugguuugguug

SEQ ID NO: 3162140 - RNA, 19 nt, Artificial Sequence
  Description of Artificial Sequence: Synthetic oligonucleotide
ucuggugugccacagcgca

SEQ ID NO: 3162141 - RNA, 19 nt, Artificial Sequence
  Description of Artificial Sequence: Synthetic oligonucleotide
agugacaucuagugucagc

SEQ ID NO: 3162142 - RNA, 19 nt, Artificial Sequence
  Description of Artificial Sequence: Synthetic oligonucleotide
gguguuguaguucaggccc

SEQ ID NO: 3162143 - RNA, 19 nt, Artificial Sequence
  Description of Artificial Sequence: Synthetic oligonucleotide
cauggagcgacucucaaug

SEQ ID NO: 3162144 - RNA, 19 nt, Artificial Sequence
  Description of Artificial Sequence: Synthetic oligonucleotide
uccuugucacagcaggugg

SEQ ID NO: 3162145 - RNA, 19 nt, Artificial Sequence
  Description of Artificial Sequence: Synthetic oligonucleotide
cucucaaugcaauaaccag

SEQ ID NO: 3162146 - RNA, 19 nt, Artificial Sequence
  Description of Artificial Sequence: Synthetic oligonucleotide
aaggaggugagggagagga

SEQ ID NO: 3162147 - RNA, 19 nt, Artificial Sequence
  Description of Artificial Sequence: Synthetic oligonucleotide
aaaacccacaucuucccaa

SEQ ID NO: 3162148 - RNA, 19 nt, Artificial Sequence
  Description of Artificial Sequence: Synthetic oligonucleotide
gagaaaacccacaucuucc

SEQ ID NO: 3162149 - RNA, 19 nt, Artificial Sequence
  Description of Artificial Sequence: Synthetic oligonucleotide
aaacccacaucuucccaag

SEQ ID NO: 3162150 - RNA, 19 nt, Artificial Sequence
  Description of Artificial Sequence: Synthetic oligonucleotide
aaagccucccgacaaggcu

SEQ ID NO: 3162151 - RNA, 19 nt, Artificial Sequence
  Description of Artificial Sequence: Synthetic oligonucleotide
ucaggcuacagcguguggg

SEQ ID NO: 3162152 - RNA, 19 nt, Artificial Sequence
  Description of Artificial Sequence: Synthetic oligonucleotide
auccacacaccccagcacg

SEQ ID NO: 3162153 - RNA, 19 nt, Artificial Sequence
  Description of Artificial Sequence: Synthetic oligonucleotide
uggucaggcaucuuuggcc

SEQ ID NO: 3162154 - RNA, 19 nt, Artificial Sequence
  Description of Artificial Sequence: Synthetic oligonucleotide
uugguugaaagccucccga

SEQ ID NO: 3162155 - RNA, 19 nt, Artificial Sequence
  Description of Artificial Sequence: Synthetic oligonucleotide
ugugccacagcgcagguua

SEQ ID NO: 3162156 - RNA, 19 nt, Artificial Sequence
  Description of Artificial Sequence: Synthetic oligonucleotide
uuguaguucaggcccagcu

SEQ ID NO: 3162157 - RNA, 19 nt, Artificial Sequence
  Description of Artificial Sequence: Synthetic oligonucleotide
ugguugguuugguugaaag

SEQ ID NO: 3162158 - RNA, 19 nt, Artificial Sequence
  Description of Artificial Sequence: Synthetic oligonucleotide
uuuguggucaggcaucuuu

SEQ ID NO: 3162159 - RNA, 19 nt, Artificial Sequence
  Description of Artificial Sequence: Synthetic oligonucleotide
guaguucaggcccagcuug

SEQ ID NO: 3162160 - RNA, 19 nt, Artificial Sequence
  Description of Artificial Sequence: Synthetic oligonucleotide
aagguacacguuugugguc

SEQ ID NO: 3162161 - RNA, 19 nt, Artificial Sequence
  Description of Artificial Sequence: Synthetic oligonucleotide
gaggcgugcagacauggag

SEQ ID NO: 3162162 - RNA, 19 nt, Artificial Sequence
  Description of Artificial Sequence: Synthetic oligonucleotide
uuuggccuggcuccagacg

SEQ ID NO: 3162163 - RNA, 19 nt, Artificial Sequence
  Description of Artificial Sequence: Synthetic oligonucleotide
uuggccuggcuccagacga

SEQ ID NO: 3162164 - RNA, 19 nt, Artificial Sequence
  Description of Artificial Sequence: Synthetic oligonucleotide
uguggucaggcaucuuugg

SEQ ID NO: 3162165 - RNA, 19 nt, Artificial Sequence
  Description of Artificial Sequence: Synthetic oligonucleotide
ugaaagccucccgacaagg

SEQ ID NO: 3162166 - RNA, 19 nt, Artificial Sequence
  Description of Artificial Sequence: Synthetic oligonucleotide
cagguuagagaaaacccac

SEQ ID NO: 3162167 - RNA, 19 nt, Artificial Sequence
  Description of Artificial Sequence: Synthetic oligonucleotide
ucaaugcaauaaccagagg

SEQ ID NO: 3162168 - RNA, 19 nt, Artificial Sequence
  Description of Artificial Sequence: Synthetic oligonucleotide
uuguggucaggcaucuuug

SEQ ID NO: 3162169 - RNA, 19 nt, Artificial Sequence
  Description of Artificial Sequence: Synthetic oligonucleotide
gacucucaaugcaauaacc

SEQ ID NO: 3162170 - RNA, 19 nt, Artificial Sequence
  Description of Artificial Sequence: Synthetic oligonucleotide
uacacguuuguggucaggc

SEQ ID NO: 3162171 - RNA, 19 nt, Artificial Sequence
  Description of Artificial Sequence: Synthetic oligonucleotide
guugcaguuguccuuguca

SEQ ID NO: 3162172 - RNA, 19 nt, Artificial Sequence
  Description of Artificial Sequence: Synthetic oligonucleotide
uugguuugguugaaagccu

SEQ ID NO: 3162173 - RNA, 19 nt, Artificial Sequence
  Description of Artificial Sequence: Synthetic oligonucleotide
gaaaggcucaggcuacagc

SEQ ID NO: 3162174 - RNA, 19 nt, Artificial Sequence
  Description of Artificial Sequence: Synthetic oligonucleotide
uugugguugguuugguuga

SEQ ID NO: 3162175 - RNA, 19 nt, Artificial Sequence
  Description of Artificial Sequence: Synthetic oligonucleotide
gugguguuguaguucaggc

SEQ ID NO: 3162176 - RNA, 19 nt, Artificial Sequence
  Description of Artificial Sequence: Synthetic oligonucleotide
uugcaguuguccuugucac

SEQ ID NO: 3162177 - RNA, 19 nt, Artificial Sequence
  Description of Artificial Sequence: Synthetic oligonucleotide
ugguguuguaguucaggcc

SEQ ID NO: 3162178 - RNA, 19 nt, Artificial Sequence
  Description of Artificial Sequence: Synthetic oligonucleotide
ccaagguacacguuugugg

SEQ ID NO: 3162179 - RNA, 19 nt, Artificial Sequence
  Description of Artificial Sequence: Synthetic oligonucleotide
uugaaagccucccgacaag

SEQ ID NO: 3162180 - RNA, 19 nt, Artificial Sequence
  Description of Artificial Sequence: Synthetic oligonucleotide
acggggaccuuguagcagg

SEQ ID NO: 3162181 - RNA, 19 nt, Artificial Sequence
  Description of Artificial Sequence: Synthetic oligonucleotide
auggagcgacucucaaugc

SEQ ID NO: 3162182 - RNA, 19 nt, Artificial Sequence
  Description of Artificial Sequence: Synthetic oligonucleotide
uggcgauccacacacccca

SEQ ID NO: 3162183 - RNA, 19 nt, Artificial Sequence
  Description of Artificial Sequence: Synthetic oligonucleotide
aguuguccuugucacagca

SEQ ID NO: 3162184 - RNA, 19 nt, Artificial Sequence
  Description of Artificial Sequence: Synthetic oligonucleotide
ugagggagaggagagccag

SEQ ID NO: 3162185 - RNA, 19 nt, Artificial Sequence
  Description of Artificial Sequence: Synthetic oligonucleotide
uggagcgacucucaaugca

SEQ ID NO: 3162186 - RNA, 19 nt, Artificial Sequence
  Description of Artificial Sequence: Synthetic oligonucleotide
uucccaagguacacguuug

SEQ ID NO: 3162187 - RNA, 19 nt, Artificial Sequence
  Description of Artificial Sequence: Synthetic oligonucleotide
guuagagaaaacccacauc

SEQ ID NO: 3162188 - RNA, 19 nt, Artificial Sequence
  Description of Artificial Sequence: Synthetic oligonucleotide
uccacacaccccagcacgg

SEQ ID NO: 3162189 - RNA, 19 nt, Artificial Sequence
  Description of Artificial Sequence: Synthetic oligonucleotide
aacccacaucuucccaagg

SEQ ID NO: 3162190 - RNA, 19 nt, Artificial Sequence
  Description of Artificial Sequence: Synthetic oligonucleotide
aucuucccaagguacacgu

SEQ ID NO: 3162191 - RNA, 19 nt, Artificial Sequence
  Description of Artificial Sequence: Synthetic oligonucleotide
aagccucccgacaaggcuc

SEQ ID NO: 3162192 - RNA, 19 nt, Artificial Sequence
  Description of Artificial Sequence: Synthetic oligonucleotide
uagcaggagugacaucuag

SEQ ID NO: 3162193 - RNA, 19 nt, Artificial Sequence
  Description of Artificial Sequence: Synthetic oligonucleotide
acaucuucccaagguacac

SEQ ID NO: 3162194 - RNA, 19 nt, Artificial Sequence
  Description of Artificial Sequence: Synthetic oligonucleotide
uucaggcccagcuuguggu

SEQ ID NO: 3162195 - RNA, 19 nt, Artificial Sequence
  Description of Artificial Sequence: Synthetic oligonucleotide
gcaggagugacaucuagug

SEQ ID NO: 3162196 - RNA, 19 nt, Artificial Sequence
  Description of Artificial Sequence: Synthetic oligonucleotide
ugcaauaaccagaggccaa

SEQ ID NO: 3162197 - RNA, 19 nt, Artificial Sequence
  Description of Artificial Sequence: Synthetic oligonucleotide
ugggcuguugcaguugucc

SEQ ID NO: 3162198 - RNA, 19 nt, Artificial Sequence
  Description of Artificial Sequence: Synthetic oligonucleotide
caggugugggccuuggcgc

SEQ ID NO: 3162199 - RNA, 19 nt, Artificial Sequence
  Description of Artificial Sequence: Synthetic oligonucleotide
acucucaaugcaauaacca

SEQ ID NO: 3162200 - RNA, 19 nt, Artificial Sequence
  Description of Artificial Sequence: Synthetic oligonucleotide
aggcgugcagacauggagc

SEQ ID NO: 3162201 - RNA, 19 nt, Artificial Sequence
  Description of Artificial Sequence: Synthetic oligonucleotide
guugaaagccucccgacaa

SEQ ID NO: 3162202 - RNA, 19 nt, Artificial Sequence
  Description of Artificial Sequence: Synthetic oligonucleotide
ucaggcaucuuuggccugg

SEQ ID NO: 3162203 - RNA, 19 nt, Artificial Sequence
  Description of Artificial Sequence: Synthetic oligonucleotide
ugggccuuggcgcugggcu

SEQ ID NO: 3162204 - RNA, 19 nt, Artificial Sequence
  Description of Artificial Sequence: Synthetic oligonucleotide
uguaguucaggcccagcuu

SEQ ID NO: 3162205 - RNA, 19 nt, Artificial Sequence
  Description of Artificial Sequence: Synthetic oligonucleotide
gcaucuuuggccuggcucc

SEQ ID NO: 3162206 - RNA, 19 nt, Artificial Sequence
  Description of Artificial Sequence: Synthetic oligonucleotide
cacagcgcagguuagagaa

SEQ ID NO: 3162207 - RNA, 19 nt, Artificial Sequence
  Description of Artificial Sequence: Synthetic oligonucleotide
uggugugccacagcgcagg

SEQ ID NO: 3162208 - RNA, 19 nt, Artificial Sequence
  Description of Artificial Sequence: Synthetic oligonucleotide
agggagaggagagccagcg

SEQ ID NO: 3162209 - RNA, 19 nt, Artificial Sequence
  Description of Artificial Sequence: Synthetic oligonucleotide
acgacaggacuggcgaucc

SEQ ID NO: 3162210 - RNA, 19 nt, Artificial Sequence
  Description of Artificial Sequence: Synthetic oligonucleotide
guucaggcccagcuugugg

SEQ ID NO: 3162211 - RNA, 19 nt, Artificial Sequence
  Description of Artificial Sequence: Synthetic oligonucleotide
gguugguuugguugaaagc

SEQ ID NO: 3162212 - RNA, 19 nt, Artificial Sequence
  Description of Artificial Sequence: Synthetic oligonucleotide
aaggcuccucuggugugcc

SEQ ID NO: 3162213 - RNA, 19 nt, Artificial Sequence
  Description of Artificial Sequence: Synthetic oligonucleotide
ugguugaaagccucccgac

SEQ ID NO: 3162214 - RNA, 19 nt, Artificial Sequence
  Description of Artificial Sequence: Synthetic oligonucleotide
gcaggugugggccuuggcg

SEQ ID NO: 3162215 - RNA, 19 nt, Artificial Sequence
  Description of Artificial Sequence: Synthetic oligonucleotide
uguccuugucacagcaggu

SEQ ID NO: 3162216 - RNA, 19 nt, Artificial Sequence
  Description of Artificial Sequence: Synthetic oligonucleotide
ugguuugguugaaagccuc

SEQ ID NO: 3162217 - RNA, 19 nt, Artificial Sequence
  Description of Artificial Sequence: Synthetic oligonucleotide
agggagaaaggcucaggcu

SEQ ID NO: 3162218 - RNA, 19 nt, Artificial Sequence
  Description of Artificial Sequence: Synthetic oligonucleotide
gaggugagggagaggagag

SEQ ID NO: 3162219 - RNA, 19 nt, Artificial Sequence
  Description of Artificial Sequence: Synthetic oligonucleotide
agguacacguuugugguca

SEQ ID NO: 3162220 - RNA, 19 nt, Artificial Sequence
  Description of Artificial Sequence: Synthetic oligonucleotide
gaaaacccacaucuuccca

SEQ ID NO: 3162221 - RNA, 19 nt, Artificial Sequence
  Description of Artificial Sequence: Synthetic oligonucleotide
gauaagggcaguuugaggc

SEQ ID NO: 3162222 - RNA, 19 nt, Artificial Sequence
  Description of Artificial Sequence: Synthetic oligonucleotide
aaaggcggaggccagcucc

SEQ ID NO: 3162223 - RNA, 19 nt, Artificial Sequence
  Description of Artificial Sequence: Synthetic oligonucleotide
ugaguaguguuccagcagg

SEQ ID NO: 3162224 - RNA, 19 nt, Artificial Sequence
  Description of Artificial Sequence: Synthetic oligonucleotide
acagacacuggauaagggc

SEQ ID NO: 3162225 - RNA, 19 nt, Artificial Sequence
  Description of Artificial Sequence: Synthetic oligonucleotide
aaggucaagggcuucuugg

SEQ ID NO: 3162226 - RNA, 19 nt, Artificial Sequence
  Description of Artificial Sequence: Synthetic oligonucleotide
ucaugauugccccaggaag

SEQ ID NO: 3162227 - RNA, 19 nt, Artificial Sequence
  Description of Artificial Sequence: Synthetic oligonucleotide
gaugcuagaagugagaguc

SEQ ID NO: 3162228 - RNA, 19 nt, Artificial Sequence
  Description of Artificial Sequence: Synthetic oligonucleotide
uguggauccacugaaaggc

SEQ ID NO: 3162229 - RNA, 19 nt, Artificial Sequence
  Description of Artificial Sequence: Synthetic oligonucleotide
uucgguaaaggucaagggc

SEQ ID NO: 3162230 - RNA, 19 nt, Artificial Sequence
  Description of Artificial Sequence: Synthetic oligonucleotide
agaagugagagucacugug

SEQ ID NO: 3162231 - RNA, 19 nt, Artificial Sequence
  Description of Artificial Sequence: Synthetic oligonucleotide
ucgguaaaggucaagggcu

SEQ ID NO: 3162232 - RNA, 19 nt, Artificial Sequence
  Description of Artificial Sequence: Synthetic oligonucleotide
uccaguggggugaagacag

SEQ ID NO: 3162233 - RNA, 19 nt, Artificial Sequence
  Description of Artificial Sequence: Synthetic oligonucleotide
uuggaagacagccugcagc

SEQ ID NO: 3162234 - RNA, 19 nt, Artificial Sequence
  Description of Artificial Sequence: Synthetic oligonucleotide
gugagagucacuguggugg

SEQ ID NO: 3162235 - RNA, 19 nt, Artificial Sequence
  Description of Artificial Sequence: Synthetic oligonucleotide
caugauugccccaggaagg

SEQ ID NO: 3162236 - RNA, 19 nt, Artificial Sequence
  Description of Artificial Sequence: Synthetic oligonucleotide
gauuccugagaccacacac

SEQ ID NO: 3162237 - RNA, 19 nt, Artificial Sequence
  Description of Artificial Sequence: Synthetic oligonucleotide
gacaguguaggugaggaag

SEQ ID NO: 3162238 - RNA, 19 nt, Artificial Sequence
  Description of Artificial Sequence: Synthetic oligonucleotide
ugagaccacacacauguga

SEQ ID NO: 3162239 - RNA, 19 nt, Artificial Sequence
  Description of Artificial Sequence: Synthetic oligonucleotide
auucgguaaaggucaaggg

SEQ ID NO: 3162240 - RNA, 19 nt, Artificial Sequence
  Description of Artificial Sequence: Synthetic oligonucleotide
guugcuggcuuccagcugg

SEQ ID NO: 3162241 - RNA, 19 nt, Artificial Sequence
  Description of Artificial Sequence: Synthetic oligonucleotide
gaccacacacaugugaugg

SEQ ID NO: 3162242 - RNA, 19 nt, Artificial Sequence
  Description of Artificial Sequence: Synthetic oligonucleotide
uccacugaaaggcggaggc

SEQ ID NO: 3162243 - RNA, 19 nt, Artificial Sequence
  Description of Artificial Sequence: Synthetic oligonucleotide
uugcuggagaccaacauuc

SEQ ID NO: 3162244 - RNA, 19 nt, Artificial Sequence
  Description of Artificial Sequence: Synthetic oligonucleotide
uggaagacagccugcagcc

SEQ ID NO: 3162245 - RNA, 19 nt, Artificial Sequence
  Description of Artificial Sequence: Synthetic oligonucleotide
ugauggguggcuccagugg

SEQ ID NO: 3162246 - RNA, 19 nt, Artificial Sequence
  Description of Artificial Sequence: Synthetic oligonucleotide
agccguguuagcugcagcc

SEQ ID NO: 3162247 - RNA, 19 nt, Artificial Sequence
  Description of Artificial Sequence: Synthetic oligonucleotide
cuagaagugagagucacug

SEQ ID NO: 3162248 - RNA, 19 nt, Artificial Sequence
  Description of Artificial Sequence: Synthetic oligonucleotide
cauucgguaaaggucaagg

SEQ ID NO: 3162249 - RNA, 19 nt, Artificial Sequence
  Description of Artificial Sequence: Synthetic oligonucleotide
gagacgacaguguagguga

SEQ ID NO: 3162250 - RNA, 19 nt, Artificial Sequence
  Description of Artificial Sequence: Synthetic oligonucleotide
guuagcugcagccauccag

SEQ ID NO: 3162251 - RNA, 19 nt, Artificial Sequence
  Description of Artificial Sequence: Synthetic oligonucleotide
acacacaugugaugggugg

SEQ ID NO: 3162252 - RNA, 19 nt, Artificial Sequence
  Description of Artificial Sequence: Synthetic oligonucleotide
uuagcugcagccauccagu

SEQ ID NO: 3162253 - RNA, 19 nt, Artificial Sequence
  Description of Artificial Sequence: Synthetic oligonucleotide
gauggguggcuccaguggg

SEQ ID NO: 3162254 - RNA, 19 nt, Artificial Sequence
  Description of Artificial Sequence: Synthetic oligonucleotide
acuggauaagggcaguuug

SEQ ID NO: 3162255 - RNA, 19 nt, Artificial Sequence
  Description of Artificial Sequence: Synthetic oligonucleotide
caacauucgguaaagguca

SEQ ID NO: 3162256 - RNA, 19 nt, Artificial Sequence
  Description of Artificial Sequence: Synthetic oligonucleotide
uguaggugaggaaggcagg

SEQ ID NO: 3162257 - RNA, 19 nt, Artificial Sequence
  Description of Artificial Sequence: Synthetic oligonucleotide
cuguucggcacccagcugg

SEQ ID NO: 3162258 - RNA, 19 nt, Artificial Sequence
  Description of Artificial Sequence: Synthetic oligonucleotide
gaagugagagucacugugg

SEQ ID NO: 3162259 - RNA, 19 nt, Artificial Sequence
  Description of Artificial Sequence: Synthetic oligonucleotide
uggauccacugaaaggcgg

SEQ ID NO: 3162260 - RNA, 19 nt, Artificial Sequence
  Description of Artificial Sequence: Synthetic oligonucleotide
ucugaguaguguuccagca

SEQ ID NO: 3162261 - RNA, 19 nt, Artificial Sequence
  Description of Artificial Sequence: Synthetic oligonucleotide
guaguguuccagcagggcc

SEQ ID NO: 3162262 - RNA, 19 nt, Artificial Sequence
  Description of Artificial Sequence: Synthetic oligonucleotide
acaugugauggguggcucc

SEQ ID NO: 3162263 - RNA, 19 nt, Artificial Sequence
  Description of Artificial Sequence: Synthetic oligonucleotide
cuucuuggaagacagccug

SEQ ID NO: 3162264 - RNA, 19 nt, Artificial Sequence
  Description of Artificial Sequence: Synthetic oligonucleotide
aagugagagucacuguggu

SEQ ID NO: 3162265 - RNA, 19 nt, Artificial Sequence
  Description of Artificial Sequence: Synthetic oligonucleotide
gaagacaggagcuggccac

SEQ ID NO: 3162266 - RNA, 19 nt, Artificial Sequence
  Description of Artificial Sequence: Synthetic oligonucleotide
ucgaugcuagaagugagag

SEQ ID NO: 3162267 - RNA, 19 nt, Artificial Sequence
  Description of Artificial Sequence: Synthetic oligonucleotide
cuguggauccacugaaagg

SEQ ID NO: 3162268 - RNA, 19 nt, Artificial Sequence
  Description of Artificial Sequence: Synthetic oligonucleotide
uuugaggcuggcucgggcc

SEQ ID NO: 3162269 - RNA, 19 nt, Artificial Sequence
  Description of Artificial Sequence: Synthetic oligonucleotide
uggccuucgaugcuagaag

SEQ ID NO: 3162270 - RNA, 19 nt, Artificial Sequence
  Description of Artificial Sequence: Synthetic oligonucleotide
gaagacagccugcagccug

SEQ ID NO: 3162271 - RNA, 19 nt, Artificial Sequence
  Description of Artificial Sequence: Synthetic oligonucleotide
agacugauuccugagacca

SEQ ID NO: 3162272 - RNA, 19 nt, Artificial Sequence
  Description of Artificial Sequence: Synthetic oligonucleotide
uggauaagggcaguuugag

SEQ ID NO: 3162273 - RNA, 19 nt, Artificial Sequence
  Description of Artificial Sequence: Synthetic oligonucleotide
ugaagacaggagcuggcca

SEQ ID NO: 3162274 - RNA, 19 nt, Artificial Sequence
  Description of Artificial Sequence: Synthetic oligonucleotide
caggagacgacaguguagg

SEQ ID NO: 3162275 - RNA, 19 nt, Artificial Sequence
  Description of Artificial Sequence: Synthetic oligonucleotide
gucaagggcuucuuggaag

SEQ ID NO: 3162276 - RNA, 19 nt, Artificial Sequence
  Description of Artificial Sequence: Synthetic oligonucleotide
ucaagggcuucuuggaaga

SEQ ID NO: 3162277 - RNA, 19 nt, Artificial Sequence
  Description of Artificial Sequence: Synthetic oligonucleotide
uggggugaagacaggagcu

SEQ ID NO: 3162278 - RNA, 19 nt, Artificial Sequence
  Description of Artificial Sequence: Synthetic oligonucleotide
uuugggcuggccaggagac

SEQ ID NO: 3162279 - RNA, 19 nt, Artificial Sequence
  Description of Artificial Sequence: Synthetic oligonucleotide
aguaguguuccagcagggc

SEQ ID NO: 3162280 - RNA, 19 nt, Artificial Sequence
  Description of Artificial Sequence: Synthetic oligonucleotide
gcugcagccauccaguugc

SEQ ID NO: 3162281 - RNA, 19 nt, Artificial Sequence
  Description of Artificial Sequence: Synthetic oligonucleotide
uucgaugcuagaagugaga

SEQ ID NO: 3162282 - RNA, 19 nt, Artificial Sequence
  Description of Artificial Sequence: Synthetic oligonucleotide
aggaaggcauggcaggauc

SEQ ID NO: 3162283 - RNA, 19 nt, Artificial Sequence
  Description of Artificial Sequence: Synthetic oligonucleotide
augauugccccaggaaggc

SEQ ID NO: 3162284 - RNA, 19 nt, Artificial Sequence
  Description of Artificial Sequence: Synthetic oligonucleotide
cuucgaugcuagaagugag

SEQ ID NO: 3162285 - RNA, 19 nt, Artificial Sequence
  Description of Artificial Sequence: Synthetic oligonucleotide
ugagagucacugugguggg

SEQ ID NO: 3162286 - RNA, 19 nt, Artificial Sequence
  Description of Artificial Sequence: Synthetic oligonucleotide
uucggcacccagcugguug

SEQ ID NO: 3162287 - RNA, 19 nt, Artificial Sequence
  Description of Artificial Sequence: Synthetic oligonucleotide
gucacugugguggggaugg

SEQ ID NO: 3162288 - RNA, 19 nt, Artificial Sequence
  Description of Artificial Sequence: Synthetic oligonucleotide
guguaggugaggaaggcag

SEQ ID NO: 3162289 - RNA, 19 nt, Artificial Sequence
  Description of Artificial Sequence: Synthetic oligonucleotide
ugcuggagaccaacauucg

SEQ ID NO: 3162290 - RNA, 19 nt, Artificial Sequence
  Description of Artificial Sequence: Synthetic oligonucleotide
gauggccugggguuccugg

SEQ ID NO: 3162291 - RNA, 19 nt, Artificial Sequence
  Description of Artificial Sequence: Synthetic oligonucleotide
ugcuguucggcacccagcu

SEQ ID NO: 3162292 - RNA, 19 nt, Artificial Sequence
  Description of Artificial Sequence: Synthetic oligonucleotide
guggggugaagacaggagc

SEQ ID NO: 3162293 - RNA, 19 nt, Artificial Sequence
  Description of Artificial Sequence: Synthetic oligonucleotide
gagacugauuccugagacc

SEQ ID NO: 3162294 - RNA, 19 nt, Artificial Sequence
  Description of Artificial Sequence: Synthetic oligonucleotide
ugcgagacugauuccugag

SEQ ID NO: 3162295 - RNA, 19 nt, Artificial Sequence
  Description of Artificial Sequence: Synthetic oligonucleotide
auaagggcaguuugaggcu

SEQ ID NO: 3162296 - RNA, 19 nt, Artificial Sequence
  Description of Artificial Sequence: Synthetic oligonucleotide
cacagacacuggauaaggg

SEQ ID NO: 3162297 - RNA, 19 nt, Artificial Sequence
  Description of Artificial Sequence: Synthetic oligonucleotide
ugugcgagacugauuccug

SEQ ID NO: 3162298 - RNA, 19 nt, Artificial Sequence
  Description of Artificial Sequence: Synthetic oligonucleotide
gagaccaacauucgguaaa

SEQ ID NO: 3162299 - RNA, 19 nt, Artificial Sequence
  Description of Artificial Sequence: Synthetic oligonucleotide
uuccugagaccacacacau

SEQ ID NO: 3162300 - RNA, 19 nt, Artificial Sequence
  Description of Artificial Sequence: Synthetic oligonucleotide
cagacacuggauaagggca

SEQ ID NO: 3162301 - RNA, 19 nt, Artificial Sequence
  Description of Artificial Sequence: Synthetic oligonucleotide
gcagccauccaguugcugg

SEQ ID NO: 3162302 - RNA, 19 nt, Artificial Sequence
  Description of Artificial Sequence: Synthetic oligonucleotide
uaggcagugucuggggugg

SEQ ID NO: 3162303 - RNA, 19 nt, Artificial Sequence
  Description of Artificial Sequence: Synthetic oligonucleotide
uucuuggaagacagccugc

SEQ ID NO: 3162304 - RNA, 19 nt, Artificial Sequence
  Description of Artificial Sequence: Synthetic oligonucleotide
aggugaggaaggcaggcug

SEQ ID NO: 3162305 - RNA, 19 nt, Artificial Sequence
  Description of Artificial Sequence: Synthetic oligonucleotide
auggccugggguuccuggc

SEQ ID NO: 3162306 - RNA, 19 nt, Artificial Sequence
  Description of Artificial Sequence: Synthetic oligonucleotide
uccaguugcuggcuuccag

SEQ ID NO: 3162307 - RNA, 19 nt, Artificial Sequence
  Description of Artificial Sequence: Synthetic oligonucleotide
ugauuccugagaccacaca

SEQ ID NO: 3162308 - RNA, 19 nt, Artificial Sequence
  Description of Artificial Sequence: Synthetic oligonucleotide
aggauccuggccuucgaug

SEQ ID NO: 3162309 - RNA, 19 nt, Artificial Sequence
  Description of Artificial Sequence: Synthetic oligonucleotide
ucuuggaagacagccugca

SEQ ID NO: 3162310 - RNA, 19 nt, Artificial Sequence
  Description of Artificial Sequence: Synthetic oligonucleotide
cugaguaguguuccagcag

SEQ ID NO: 3162311 - RNA, 19 nt, Artificial Sequence
  Description of Artificial Sequence: Synthetic oligonucleotide
agggcuucuuggaagacag

SEQ ID NO: 3162312 - RNA, 19 nt, Artificial Sequence
  Description of Artificial Sequence: Synthetic oligonucleotide
ugcuagaagugagagucac

SEQ ID NO: 3162313 - RNA, 19 nt, Artificial Sequence
  Description of Artificial Sequence: Synthetic oligonucleotide
accacacacaugugauggg

SEQ ID NO: 3162314 - RNA, 19 nt, Artificial Sequence
  Description of Artificial Sequence: Synthetic oligonucleotide
ggauccuggccuucgaugc

SEQ ID NO: 3162315 - RNA, 19 nt, Artificial Sequence
  Description of Artificial Sequence: Synthetic oligonucleotide
ggauaagggcaguuugagg

SEQ ID NO: 3162316 - RNA, 19 nt, Artificial Sequence
  Description of Artificial Sequence: Synthetic oligonucleotide
gcaguuugaggcuggcucg

SEQ ID NO: 3162317 - RNA, 19 nt, Artificial Sequence
  Description of Artificial Sequence: Synthetic oligonucleotide
ugugccugcugcuguucgg

SEQ ID NO: 3162318 - RNA, 19 nt, Artificial Sequence
  Description of Artificial Sequence: Synthetic oligonucleotide
ugggguggagccguguuag

SEQ ID NO: 3162319 - RNA, 19 nt, Artificial Sequence
  Description of Artificial Sequence: Synthetic oligonucleotide
uggagaccaacauucggua

SEQ ID NO: 3162320 - RNA, 19 nt, Artificial Sequence
  Description of Artificial Sequence: Synthetic oligonucleotide
agugagagucacuguggug

SEQ ID NO: 3162321 - RNA, 19 nt, Artificial Sequence
  Description of Artificial Sequence: Synthetic oligonucleotide
aaaggcaauacacacacac

SEQ ID NO: 3162322 - RNA, 19 nt, Artificial Sequence
  Description of Artificial Sequence: Synthetic oligonucleotide
cuaacaauguacuaaaggc

SEQ ID NO: 3162323 - RNA, 19 nt, Artificial Sequence
  Description of Artificial Sequence: Synthetic oligonucleotide
aaagagauuucuuagggug

SEQ ID NO: 3162324 - RNA, 19 nt, Artificial Sequence
  Description of Artificial Sequence: Synthetic oligonucleotide
uuugguaacaagaucuugg

SEQ ID NO: 3162325 - RNA, 19 nt, Artificial Sequence
  Description of Artificial Sequence: Synthetic oligonucleotide
uguacuaaaggcaauacac

SEQ ID NO: 3162326 - RNA, 19 nt, Artificial Sequence
  Description of Artificial Sequence: Synthetic oligonucleotide
aaauauugacauuauuuag

SEQ ID NO: 3162327 - RNA, 19 nt, Artificial Sequence
  Description of Artificial Sequence: Synthetic oligonucleotide
uuuacagcaacacauguug

SEQ ID NO: 3162328 - RNA, 19 nt, Artificial Sequence
  Description of Artificial Sequence: Synthetic oligonucleotide
cuugaaacagaaaagcacg

SEQ ID NO: 3162329 - RNA, 19 nt, Artificial Sequence
  Description of Artificial Sequence: Synthetic oligonucleotide
acauagaagacauacugac

SEQ ID NO: 3162330 - RNA, 19 nt, Artificial Sequence
  Description of Artificial Sequence: Synthetic oligonucleotide
acuaacaauguacuaaagg

SEQ ID NO: 3162331 - RNA, 19 nt, Artificial Sequence
  Description of Artificial Sequence: Synthetic oligonucleotide
aauuaauacacaguguuug

SEQ ID NO: 3162332 - RNA, 19 nt, Artificial Sequence
  Description of Artificial Sequence: Synthetic oligonucleotide
uaucacuugaaacagaaaa

SEQ ID NO: 3162333 - RNA, 19 nt, Artificial Sequence
  Description of Artificial Sequence: Synthetic oligonucleotide
aaauguaguucucaugguc

SEQ ID NO: 3162334 - RNA, 19 nt, Artificial Sequence
  Description of Artificial Sequence: Synthetic oligonucleotide
auauaaagugcacaacccc

SEQ ID NO: 3162335 - RNA, 19 nt, Artificial Sequence
  Description of Artificial Sequence: Synthetic oligonucleotide
auggcuaccacauagaaga

SEQ ID NO: 3162336 - RNA, 19 nt, Artificial Sequence
  Description of Artificial Sequence: Synthetic oligonucleotide
ugagaacuggaacagaugc

SEQ ID NO: 3162337 - RNA, 19 nt, Artificial Sequence
  Description of Artificial Sequence: Synthetic oligonucleotide
agaaacaccauuugguaac

SEQ ID NO: 3162338 - RNA, 19 nt, Artificial Sequence
  Description of Artificial Sequence: Synthetic oligonucleotide
uauguucucuauaagagcu

SEQ ID NO: 3162339 - RNA, 19 nt, Artificial Sequence
  Description of Artificial Sequence: Synthetic oligonucleotide
caauauaaagugcacaacc

SEQ ID NO: 3162340 - RNA, 19 nt, Artificial Sequence
  Description of Artificial Sequence: Synthetic oligonucleotide
uaagagcugauguacaggg

SEQ ID NO: 3162341 - RNA, 19 nt, Artificial Sequence
  Description of Artificial Sequence: Synthetic oligonucleotide
uuuauucugucuuuuagca

SEQ ID NO: 3162342 - RNA, 19 nt, Artificial Sequence
  Description of Artificial Sequence: Synthetic oligonucleotide
acaaagagauuucuuaggg

SEQ ID NO: 3162343 - RNA, 19 nt, Artificial Sequence
  Description of Artificial Sequence: Synthetic oligonucleotide
auuaauacacaguguuugc

SEQ ID NO: 3162344 - RNA, 19 nt, Artificial Sequence
  Description of Artificial Sequence: Synthetic oligonucleotide
ucaaaguucaauauggcua

SEQ ID NO: 3162345 - RNA, 19 nt, Artificial Sequence
  Description of Artificial Sequence: Synthetic oligonucleotide
ugauguacagggcauacag

SEQ ID NO: 3162346 - RNA, 19 nt, Artificial Sequence
  Description of Artificial Sequence: Synthetic oligonucleotide
ugcaacaccacacaaguca

SEQ ID NO: 3162347 - RNA, 19 nt, Artificial Sequence
  Description of Artificial Sequence: Synthetic oligonucleotide
aaacagaaaagcacgugcc

SEQ ID NO: 3162348 - RNA, 19 nt, Artificial Sequence
  Description of Artificial Sequence: Synthetic oligonucleotide
uuugcaacaccacacaagu

SEQ ID NO: 3162349 - RNA, 19 nt, Artificial Sequence
  Description of Artificial Sequence: Synthetic oligonucleotide
aauauugacauuauuuaga

SEQ ID NO: 3162350 - RNA, 19 nt, Artificial Sequence
  Description of Artificial Sequence: Synthetic oligonucleotide
ugugcaagcuuuuacagca

SEQ ID NO: 3162351 - RNA, 19 nt, Artificial Sequence
  Description of Artificial Sequence: Synthetic oligonucleotide
uauaaagugcacaacccca

SEQ ID NO: 3162352 - RNA, 19 nt, Artificial Sequence
  Description of Artificial Sequence: Synthetic oligonucleotide
auagaagacauacugacaa

SEQ ID NO: 3162353 - RNA, 19 nt, Artificial Sequence
  Description of Artificial Sequence: Synthetic oligonucleotide
uuuaucacuugaaacagaa

SEQ ID NO: 3162354 - RNA, 19 nt, Artificial Sequence
  Description of Artificial Sequence: Synthetic oligonucleotide
gcaaauguaguucucaugg

SEQ ID NO: 3162355 - RNA, 19 nt, Artificial Sequence
  Description of Artificial Sequence: Synthetic oligonucleotide
aaaagcacgugccauuuug

SEQ ID NO: 3162356 - RNA, 19 nt, Artificial Sequence
  Description of Artificial Sequence: Synthetic oligonucleotide
uuauuuagaaacaccauuu

SEQ ID NO: 3162357 - RNA, 19 nt, Artificial Sequence
  Description of Artificial Sequence: Synthetic oligonucleotide
uucaauauggcuaccacau

SEQ ID NO: 3162358 - RNA, 19 nt, Artificial Sequence
  Description of Artificial Sequence: Synthetic oligonucleotide
uuagcugagguuauguucu

SEQ ID NO: 3162359 - RNA, 19 nt, Artificial Sequence
  Description of Artificial Sequence: Synthetic oligonucleotide
acacauguugauuugcaac

SEQ ID NO: 3162360 - RNA, 19 nt, Artificial Sequence
  Description of Artificial Sequence: Synthetic oligonucleotide
cuaaaggcaauacacacac

SEQ ID NO: 3162361 - RNA, 19 nt, Artificial Sequence
  Description of Artificial Sequence: Synthetic oligonucleotide
agggcauacagcuugggac

SEQ ID NO: 3162362 - RNA, 19 nt, Artificial Sequence
  Description of Artificial Sequence: Synthetic oligonucleotide
gaaauauugacauuauuua

SEQ ID NO: 3162363 - RNA, 19 nt, Artificial Sequence
  Description of Artificial Sequence: Synthetic oligonucleotide
uuuagcaauagaaggggug

SEQ ID NO: 3162364 - RNA, 19 nt, Artificial Sequence
  Description of Artificial Sequence: Synthetic oligonucleotide
aguguuugcauuuaucacu

SEQ ID NO: 3162365 - RNA, 19 nt, Artificial Sequence
  Description of Artificial Sequence: Synthetic oligonucleotide
ucucaaagcucaaaguuca

SEQ ID NO: 3162366 - RNA, 19 nt, Artificial Sequence
  Description of Artificial Sequence: Synthetic oligonucleotide
acuugaaacagaaaagcac

SEQ ID NO: 3162367 - RNA, 19 nt, Artificial Sequence
  Description of Artificial Sequence: Synthetic oligonucleotide
ucacaaagagauuucuuag

SEQ ID NO: 3162368 - RNA, 19 nt, Artificial Sequence
  Description of Artificial Sequence: Synthetic oligonucleotide
guuauguucucuauaagag

SEQ ID NO: 3162369 - RNA, 19 nt, Artificial Sequence
  Description of Artificial Sequence: Synthetic oligonucleotide
aaagugcacaaccccaauc

SEQ ID NO: 3162370 - RNA, 19 nt, Artificial Sequence
  Description of Artificial Sequence: Synthetic oligonucleotide
ucucuauaagagcugaugu

SEQ ID NO: 3162371 - RNA, 19 nt, Artificial Sequence
  Description of Artificial Sequence: Synthetic oligonucleotide
aacaccauuugguaacaag

SEQ ID NO: 3162372 - RNA, 19 nt, Artificial Sequence
  Description of Artificial Sequence: Synthetic oligonucleotide
aagugcacaaccccaaucu

SEQ ID NO: 3162373 - RNA, 19 nt, Artificial Sequence
  Description of Artificial Sequence: Synthetic oligonucleotide
uguucgaucacagaauuca

SEQ ID NO: 3162374 - RNA, 19 nt, Artificial Sequence
  Description of Artificial Sequence: Synthetic oligonucleotide
uugauuugcaacaccacac

SEQ ID NO: 3162375 - RNA, 19 nt, Artificial Sequence
  Description of Artificial Sequence: Synthetic oligonucleotide
auuauuuagaaacaccauu

SEQ ID NO: 3162376 - RNA, 19 nt, Artificial Sequence
  Description of Artificial Sequence: Synthetic oligonucleotide
aaagcucaaaguucaauau

SEQ ID NO: 3162377 - RNA, 19 nt, Artificial Sequence
  Description of Artificial Sequence: Synthetic oligonucleotide
uacacacacacauacacac

SEQ ID NO: 3162378 - RNA, 19 nt, Artificial Sequence
  Description of Artificial Sequence: Synthetic oligonucleotide
ucacuugaaacagaaaagc

SEQ ID NO: 3162379 - RNA, 19 nt, Artificial Sequence
  Description of Artificial Sequence: Synthetic oligonucleotide
ucuauaagagcugauguac

SEQ ID NO: 3162380 - RNA, 19 nt, Artificial Sequence
  Description of Artificial Sequence: Synthetic oligonucleotide
uauaagagcugauguacag

SEQ ID NO: 3162381 - RNA, 19 nt, Artificial Sequence
  Description of Artificial Sequence: Synthetic oligonucleotide
acaguguuugcauuuauca

SEQ ID NO: 3162382 - RNA, 19 nt, Artificial Sequence
  Description of Artificial Sequence: Synthetic oligonucleotide
uauucugucuuuuagcaau

SEQ ID NO: 3162383 - RNA, 19 nt, Artificial Sequence
  Description of Artificial Sequence: Synthetic oligonucleotide
gacaguacuaacaauguac

SEQ ID NO: 3162384 - RNA, 19 nt, Artificial Sequence
  Description of Artificial Sequence: Synthetic oligonucleotide
uacuaaaggcaauacacac

SEQ ID NO: 3162385 - RNA, 19 nt, Artificial Sequence
  Description of Artificial Sequence: Synthetic oligonucleotide
caauauggcuaccacauag

SEQ ID NO: 3162386 - RNA, 19 nt, Artificial Sequence
  Description of Artificial Sequence: Synthetic oligonucleotide
aagacauacugacaauugu

SEQ ID NO: 3162387 - RNA, 19 nt, Artificial Sequence
  Description of Artificial Sequence: Synthetic oligonucleotide
cuuuuagcaauagaagggg

SEQ ID NO: 3162388 - RNA, 19 nt, Artificial Sequence
  Description of Artificial Sequence: Synthetic oligonucleotide
gguaacaagaucuuggcac

SEQ ID NO: 3162389 - RNA, 19 nt, Artificial Sequence
  Description of Artificial Sequence: Synthetic oligonucleotide
ugacaagacaguacuaaca

SEQ ID NO: 3162390 - RNA, 19 nt, Artificial Sequence
  Description of Artificial Sequence: Synthetic oligonucleotide
uacagcuugggacagggug

SEQ ID NO: 3162391 - RNA, 19 nt, Artificial Sequence
  Description of Artificial Sequence: Synthetic oligonucleotide
agcucaaaguucaauaugg

SEQ ID NO: 3162392 - RNA, 19 nt, Artificial Sequence
  Description of Artificial Sequence: Synthetic oligonucleotide
aguucaauauggcuaccac

SEQ ID NO: 3162393 - RNA, 19 nt, Artificial Sequence
  Description of Artificial Sequence: Synthetic oligonucleotide
uucacaaagagauuucuua

SEQ ID NO: 3162394 - RNA, 19 nt, Artificial Sequence
  Description of Artificial Sequence: Synthetic oligonucleotide
caaaguucaauauggcuac

SEQ ID NO: 3162395 - RNA, 19 nt, Artificial Sequence
  Description of Artificial Sequence: Synthetic oligonucleotide
acauuauuuagaaacacca

SEQ ID NO: 3162396 - RNA, 19 nt, Artificial Sequence
  Description of Artificial Sequence: Synthetic oligonucleotide
aagcucaaaguucaauaug

SEQ ID NO: 3162397 - RNA, 19 nt, Artificial Sequence
  Description of Artificial Sequence: Synthetic oligonucleotide
aauagaaggggugcugggg

SEQ ID NO: 3162398 - RNA, 19 nt, Artificial Sequence
  Description of Artificial Sequence: Synthetic oligonucleotide
uucucauggucucaaagcu

SEQ ID NO: 3162399 - RNA, 19 nt, Artificial Sequence
  Description of Artificial Sequence: Synthetic oligonucleotide
acagaugcaaauguaguuc

SEQ ID NO: 3162400 - RNA, 19 nt, Artificial Sequence
  Description of Artificial Sequence: Synthetic oligonucleotide
auguacagggcauacagcu

SEQ ID NO: 3162401 - RNA, 19 nt, Artificial Sequence
  Description of Artificial Sequence: Synthetic oligonucleotide
agaggugagaacuggaaca

SEQ ID NO: 3162402 - RNA, 19 nt, Artificial Sequence
  Description of Artificial Sequence: Synthetic oligonucleotide
auauugacauuauuuagaa

SEQ ID NO: 3162403 - RNA, 19 nt, Artificial Sequence
  Description of Artificial Sequence: Synthetic oligonucleotide
cacaaagagauuucuuagg

SEQ ID NO: 3162404 - RNA, 19 nt, Artificial Sequence
  Description of Artificial Sequence: Synthetic oligonucleotide
uuagcaauagaaggggugc

SEQ ID NO: 3162405 - RNA, 19 nt, Artificial Sequence
  Description of Artificial Sequence: Synthetic oligonucleotide
uauggcuaccacauagaag

SEQ ID NO: 3162406 - RNA, 19 nt, Artificial Sequence
  Description of Artificial Sequence: Synthetic oligonucleotide
aacaauguacuaaaggcaa

SEQ ID NO: 3162407 - RNA, 19 nt, Artificial Sequence
  Description of Artificial Sequence: Synthetic oligonucleotide
aguacuaacaauguacuaa

SEQ ID NO: 3162408 - RNA, 19 nt, Artificial Sequence
  Description of Artificial Sequence: Synthetic oligonucleotide
caagucaauauaaagugca

SEQ ID NO: 3162409 - RNA, 19 nt, Artificial Sequence
  Description of Artificial Sequence: Synthetic oligonucleotide
uuagaaacaccauuuggua

SEQ ID NO: 3162410 - RNA, 19 nt, Artificial Sequence
  Description of Artificial Sequence: Synthetic oligonucleotide
auggucucaaagcucaaag

SEQ ID NO: 3162411 - RNA, 19 nt, Artificial Sequence
  Description of Artificial Sequence: Synthetic oligonucleotide
uacacacacauacacacau

SEQ ID NO: 3162412 - RNA, 19 nt, Artificial Sequence
  Description of Artificial Sequence: Synthetic oligonucleotide
gacauacugacaauugugc

SEQ ID NO: 3162413 - RNA, 19 nt, Artificial Sequence
  Description of Artificial Sequence: Synthetic oligonucleotide
uugguaacaagaucuuggc

SEQ ID NO: 3162414 - RNA, 19 nt, Artificial Sequence
  Description of Artificial Sequence: Synthetic oligonucleotide
aacagaaaagcacgugcca

SEQ ID NO: 3162415 - RNA, 19 nt, Artificial Sequence
  Description of Artificial Sequence: Synthetic oligonucleotide
accauuugguaacaagauc

SEQ ID NO: 3162416 - RNA, 19 nt, Artificial Sequence
  Description of Artificial Sequence: Synthetic oligonucleotide
aauucacaaagagauuucu

SEQ ID NO: 3162417 - RNA, 19 nt, Artificial Sequence
  Description of Artificial Sequence: Synthetic oligonucleotide
aaucugaggugacaagaca

SEQ ID NO: 3162418 - RNA, 19 nt, Artificial Sequence
  Description of Artificial Sequence: Synthetic oligonucleotide
aacuggaacagaugcaaau

SEQ ID NO: 3162419 - RNA, 19 nt, Artificial Sequence
  Description of Artificial Sequence: Synthetic oligonucleotide
ugauuugcaacaccacaca

SEQ ID NO: 3162420 - RNA, 19 nt, Artificial Sequence
  Description of Artificial Sequence: Synthetic oligonucleotide
aagucaauauaaagugcac

SEQ ID NO: 3162421 - RNA, 19 nt, Artificial Sequence
  Description of Artificial Sequence: Synthetic oligonucleotide
acugaagaagacuggaccc

SEQ ID NO: 3162422 - RNA, 19 nt, Artificial Sequence
  Description of Artificial Sequence: Synthetic oligonucleotide
ucuggguucaucaggaacc

SEQ ID NO: 3162423 - RNA, 19 nt, Artificial Sequence
  Description of Artificial Sequence: Synthetic oligonucleotide
uuguggauauccuugguag

SEQ ID NO: 3162424 - RNA, 19 nt, Artificial Sequence
  Description of Artificial Sequence: Synthetic oligonucleotide
aacaacaccgcaccugccg

SEQ ID NO: 3162425 - RNA, 19 nt, Artificial Sequence
  Description of Artificial Sequence: Synthetic oligonucleotide
cauauuguggauauccuug

SEQ ID NO: 3162426 - RNA, 19 nt, Artificial Sequence
  Description of Artificial Sequence: Synthetic oligonucleotide
gacuacgccaacaacaccg

SEQ ID NO: 3162427 - RNA, 19 nt, Artificial Sequence
  Description of Artificial Sequence: Synthetic oligonucleotide
agccauauuguggauaucc

SEQ ID NO: 3162428 - RNA, 19 nt, Artificial Sequence
  Description of Artificial Sequence: Synthetic oligonucleotide
gacugaagaagacuggacc

SEQ ID NO: 3162429 - RNA, 19 nt, Artificial Sequence
  Description of Artificial Sequence: Synthetic oligonucleotide
gauaagguggguauggggc

SEQ ID NO: 3162430 - RNA, 19 nt, Artificial Sequence
  Description of Artificial Sequence: Synthetic oligonucleotide
ucucgacugaagaagacug

SEQ ID NO: 3162431 - RNA, 19 nt, Artificial Sequence
  Description of Artificial Sequence: Synthetic oligonucleotide
uucaucaggaaccuggcaa

SEQ ID NO: 3162432 - RNA, 19 nt, Artificial Sequence
  Description of Artificial Sequence: Synthetic oligonucleotide
auauuguggauauccuugg

SEQ ID NO: 3162433 - RNA, 19 nt, Artificial Sequence
  Description of Artificial Sequence: Synthetic oligonucleotide
ucuuaggaggcuccugagg

SEQ ID NO: 3162434 - RNA, 19 nt, Artificial Sequence
  Description of Artificial Sequence: Synthetic oligonucleotide
uuggcuguuguggauaagg

SEQ ID NO: 3162435 - RNA, 19 nt, Artificial Sequence
  Description of Artificial Sequence: Synthetic oligonucleotide
auucucuggguucaucagg

SEQ ID NO: 3162436 - RNA, 19 nt, Artificial Sequence
  Description of Artificial Sequence: Synthetic oligonucleotide
acgccaacaacaccgcacc

SEQ ID NO: 3162437 - RNA, 19 nt, Artificial Sequence
  Description of Artificial Sequence: Synthetic oligonucleotide
gcuguuguggauaaggugg

SEQ ID NO: 3162438 - RNA, 19 nt, Artificial Sequence
  Description of Artificial Sequence: Synthetic oligonucleotide
uguggauauccuugguagg

SEQ ID NO: 3162439 - RNA, 19 nt, Artificial Sequence
  Description of Artificial Sequence: Synthetic oligonucleotide
guggguauggggcuguugg

SEQ ID NO: 3162440 - RNA, 19 nt, Artificial Sequence
  Description of Artificial Sequence: Synthetic oligonucleotide
caaugcaccucucugcucc

SEQ ID NO: 3162441 - RNA, 19 nt, Artificial Sequence
  Description of Artificial Sequence: Synthetic oligonucleotide
uucucuggguucaucagga

SEQ ID NO: 3162442 - RNA, 19 nt, Artificial Sequence
  Description of Artificial Sequence: Synthetic oligonucleotide
aagacuggacccgacuacg

SEQ ID NO: 3162443 - RNA, 19 nt, Artificial Sequence
  Description of Artificial Sequence: Synthetic oligonucleotide
acaacaccgcaccugccgc

SEQ ID NO: 3162444 - RNA, 19 nt, Artificial Sequence
  Description of Artificial Sequence: Synthetic oligonucleotide
auauccuugguagggguac

SEQ ID NO: 3162445 - RNA, 19 nt, Artificial Sequence
  Description of Artificial Sequence: Synthetic oligonucleotide
gauucucuggguucaucag

SEQ ID NO: 3162446 - RNA, 19 nt, Artificial Sequence
  Description of Artificial Sequence: Synthetic oligonucleotide
aagaagacuggacccgacu

SEQ ID NO: 3162447 - RNA, 19 nt, Artificial Sequence
  Description of Artificial Sequence: Synthetic oligonucleotide
ucaggaaccuggcaaugca

SEQ ID NO: 3162448 - RNA, 19 nt, Artificial Sequence
  Description of Artificial Sequence: Synthetic oligonucleotide
cacccugccagccauauug

SEQ ID NO: 3162449 - RNA, 19 nt, Artificial Sequence
  Description of Artificial Sequence: Synthetic oligonucleotide
aaccgccgggugcugaccc

SEQ ID NO: 3162450 - RNA, 19 nt, Artificial Sequence
  Description of Artificial Sequence: Synthetic oligonucleotide
uacgccaacaacaccgcac

SEQ ID NO: 3162451 - RNA, 19 nt, Artificial Sequence
  Description of Artificial Sequence: Synthetic oligonucleotide
guggauauccuugguaggg

SEQ ID NO: 3162452 - RNA, 19 nt, Artificial Sequence
  Description of Artificial Sequence: Synthetic oligonucleotide
cugagguccacccugccag

SEQ ID NO: 3162453 - RNA, 19 nt, Artificial Sequence
  Description of Artificial Sequence: Synthetic oligonucleotide
aaccuggcaaugcaccucu

SEQ ID NO: 3162454 - RNA, 19 nt, Artificial Sequence
  Description of Artificial Sequence: Synthetic oligonucleotide
ucccauaggccccauuggc

SEQ ID NO: 3162455 - RNA, 19 nt, Artificial Sequence
  Description of Artificial Sequence: Synthetic oligonucleotide
agggguaccccugaggagg

SEQ ID NO: 3162456 - RNA, 19 nt, Artificial Sequence
  Description of Artificial Sequence: Synthetic oligonucleotide
aggaaccuggcaaugcacc

SEQ ID NO: 3162457 - RNA, 19 nt, Artificial Sequence
  Description of Artificial Sequence: Synthetic oligonucleotide
uguggucuuaggaggcucc

SEQ ID NO: 3162458 - RNA, 19 nt, Artificial Sequence
  Description of Artificial Sequence: Synthetic oligonucleotide
aucaggaaccuggcaaugc

SEQ ID NO: 3162459 - RNA, 19 nt, Artificial Sequence
  Description of Artificial Sequence: Synthetic oligonucleotide
cuguuguggauaagguggg

SEQ ID NO: 3162460 - RNA, 19 nt, Artificial Sequence
  Description of Artificial Sequence: Synthetic oligonucleotide
uuguggauaagguggguau

SEQ ID NO: 3162461 - RNA, 19 nt, Artificial Sequence
  Description of Artificial Sequence: Synthetic oligonucleotide
auaagguggguauggggcu

SEQ ID NO: 3162462 - RNA, 19 nt, Artificial Sequence
  Description of Artificial Sequence: Synthetic oligonucleotide
uggauauccuugguagggg

SEQ ID NO: 3162463 - RNA, 19 nt, Artificial Sequence
  Description of Artificial Sequence: Synthetic oligonucleotide
ugcaccucucugcuccucg

SEQ ID NO: 3162464 - RNA, 19 nt, Artificial Sequence
  Description of Artificial Sequence: Synthetic oligonucleotide
guggauaagguggguaugg

SEQ ID NO: 3162465 - RNA, 19 nt, Artificial Sequence
  Description of Artificial Sequence: Synthetic oligonucleotide
auuguggauauccuuggua

SEQ ID NO: 3162466 - RNA, 19 nt, Artificial Sequence
  Description of Artificial Sequence: Synthetic oligonucleotide
uggcaaugcaccucucugc

SEQ ID NO: 3162467 - RNA, 19 nt, Artificial Sequence
  Description of Artificial Sequence: Synthetic oligonucleotide
gaagacuggacccgacuac

SEQ ID NO: 3162468 - RNA, 19 nt, Artificial Sequence
  Description of Artificial Sequence: Synthetic oligonucleotide
cugaagaagacuggacccg

SEQ ID NO: 3162469 - RNA, 19 nt, Artificial Sequence
  Description of Artificial Sequence: Synthetic oligonucleotide
cucgacugaagaagacugg

SEQ ID NO: 3162470 - RNA, 19 nt, Artificial Sequence
  Description of Artificial Sequence: Synthetic oligonucleotide
guagggguaccccugagga

SEQ ID NO: 3162471 - RNA, 19 nt, Artificial Sequence
  Description of Artificial Sequence: Synthetic oligonucleotide
ucaucaggaaccuggcaau

SEQ ID NO: 3162472 - RNA, 19 nt, Artificial Sequence
  Description of Artificial Sequence: Synthetic oligonucleotide
ggauaagguggguaugggg

SEQ ID NO: 3162473 - RNA, 19 nt, Artificial Sequence
  Description of Artificial Sequence: Synthetic oligonucleotide
uauuguggauauccuuggu

SEQ ID NO: 3162474 - RNA, 19 nt, Artificial Sequence
  Description of Artificial Sequence: Synthetic oligonucleotide
ucgacugaagaagacugga

SEQ ID NO: 3162475 - RNA, 19 nt, Artificial Sequence
  Description of Artificial Sequence: Synthetic oligonucleotide
ugaggagguggguaggggu

SEQ ID NO: 3162476 - RNA, 19 nt, Artificial Sequence
  Description of Artificial Sequence: Synthetic oligonucleotide
gagccacugagccgcagcg

SEQ ID NO: 3162477 - RNA, 19 nt, Artificial Sequence
  Description of Artificial Sequence: Synthetic oligonucleotide
ggguucaucaggaaccugg

SEQ ID NO: 3162478 - RNA, 19 nt, Artificial Sequence
  Description of Artificial Sequence: Synthetic oligonucleotide
ugccgcgagccacugagcc

SEQ ID NO: 3162479 - RNA, 19 nt, Artificial Sequence
  Description of Artificial Sequence: Synthetic oligonucleotide
uggauaagguggguauggg

SEQ ID NO: 3162480 - RNA, 19 nt, Artificial Sequence
  Description of Artificial Sequence: Synthetic oligonucleotide
uacgguggaggauucucug

SEQ ID NO: 3162481 - RNA, 19 nt, Artificial Sequence
  Description of Artificial Sequence: Synthetic oligonucleotide
ucugcuccucgcaaccgcc

SEQ ID NO: 3162482 - RNA, 19 nt, Artificial Sequence
  Description of Artificial Sequence: Synthetic oligonucleotide
uaggaggcuccugaggucc

SEQ ID NO: 3162483 - RNA, 19 nt, Artificial Sequence
  Description of Artificial Sequence: Synthetic oligonucleotide
aggcuccugagguccaccc

SEQ ID NO: 3162484 - RNA, 19 nt, Artificial Sequence
  Description of Artificial Sequence: Synthetic oligonucleotide
cuugguagggguaccccug

SEQ ID NO: 3162485 - RNA, 19 nt, Artificial Sequence
  Description of Artificial Sequence: Synthetic oligonucleotide
acgguggaggauucucugg

SEQ ID NO: 3162486 - RNA, 19 nt, Artificial Sequence
  Description of Artificial Sequence: Synthetic oligonucleotide
uauacgguggaggauucuc

SEQ ID NO: 3162487 - RNA, 19 nt, Artificial Sequence
  Description of Artificial Sequence: Synthetic oligonucleotide
acuggacccgacuacgcca

SEQ ID NO: 3162488 - RNA, 19 nt, Artificial Sequence
  Description of Artificial Sequence: Synthetic oligonucleotide
uggguauggggcuguuggg

SEQ ID NO: 3162489 - RNA, 19 nt, Artificial Sequence
  Description of Artificial Sequence: Synthetic oligonucleotide
agaagacuggacccgacua

SEQ ID NO: 3162490 - RNA, 19 nt, Artificial Sequence
  Description of Artificial Sequence: Synthetic oligonucleotide
acuacgccaacaacaccgc

SEQ ID NO: 3162491 - RNA, 19 nt, Artificial Sequence
  Description of Artificial Sequence: Synthetic oligonucleotide
cuggcaaugcaccucucug

SEQ ID NO: 3162492 - RNA, 19 nt, Artificial Sequence
  Description of Artificial Sequence: Synthetic oligonucleotide
uguggauaagguggguaug

SEQ ID NO: 3162493 - RNA, 19 nt, Artificial Sequence
  Description of Artificial Sequence: Synthetic oligonucleotide
uggcuguuguggauaaggu

SEQ ID NO: 3162494 - RNA, 19 nt, Artificial Sequence
  Description of Artificial Sequence: Synthetic oligonucleotide
cucuggguucaucaggaac

SEQ ID NO: 3162495 - RNA, 19 nt, Artificial Sequence
  Description of Artificial Sequence: Synthetic oligonucleotide
uggaggauucucuggguuc

SEQ ID NO: 3162496 - RNA, 19 nt, Artificial Sequence
  Description of Artificial Sequence: Synthetic oligonucleotide
gaggagguggggcucccgg

SEQ ID NO: 3162497 - RNA, 19 nt, Artificial Sequence
  Description of Artificial Sequence: Synthetic oligonucleotide
ugaagaagacuggacccga

SEQ ID NO: 3162498 - RNA, 19 nt, Artificial Sequence
  Description of Artificial Sequence: Synthetic oligonucleotide
gacuggacccgacuacgcc

SEQ ID NO: 3162499 - RNA, 19 nt, Artificial Sequence
  Description of Artificial Sequence: Synthetic oligonucleotide
ugcuccucgcaaccgccgg

SEQ ID NO: 3162500 - RNA, 19 nt, Artificial Sequence
  Description of Artificial Sequence: Synthetic oligonucleotide
aggagguggggcucccggc

SEQ ID NO: 3162501 - RNA, 19 nt, Artificial Sequence
  Description of Artificial Sequence: Synthetic oligonucleotide
guauggggcuguugggccg

SEQ ID NO: 3162502 - RNA, 19 nt, Artificial Sequence
  Description of Artificial Sequence: Synthetic oligonucleotide
ccugccagccauauugugg

SEQ ID NO: 3162503 - RNA, 19 nt, Artificial Sequence
  Description of Artificial Sequence: Synthetic oligonucleotide
cucccauaggccccauugg

SEQ ID NO: 3162504 - RNA, 19 nt, Artificial Sequence
  Description of Artificial Sequence: Synthetic oligonucleotide
cucucugcuccucgcaacc

SEQ ID NO: 3162505 - RNA, 19 nt, Artificial Sequence
  Description of Artificial Sequence: Synthetic oligonucleotide
cugccagccauauugugga

SEQ ID NO: 3162506 - RNA, 19 nt, Artificial Sequence
  Description of Artificial Sequence: Synthetic oligonucleotide
accccugaggagguggggc

SEQ ID NO: 3162507 - RNA, 19 nt, Artificial Sequence
  Description of Artificial Sequence: Synthetic oligonucleotide
cuuaggaggcuccugaggu

SEQ ID NO: 3162508 - RNA, 19 nt, Artificial Sequence
  Description of Artificial Sequence: Synthetic oligonucleotide
auccuugguagggguaccc

SEQ ID NO: 3162509 - RNA, 19 nt, Artificial Sequence
  Description of Artificial Sequence: Synthetic oligonucleotide
uugguagggguaccccuga

SEQ ID NO: 3162510 - RNA, 19 nt, Artificial Sequence
  Description of Artificial Sequence: Synthetic oligonucleotide
ggauucucuggguucauca

SEQ ID NO: 3162511 - RNA, 19 nt, Artificial Sequence
  Description of Artificial Sequence: Synthetic oligonucleotide
aaugcaccucucugcuccu

SEQ ID NO: 3162512 - RNA, 19 nt, Artificial Sequence
  Description of Artificial Sequence: Synthetic oligonucleotide
gguagggguaccccugagg

SEQ ID NO: 3162513 - RNA, 19 nt, Artificial Sequence
  Description of Artificial Sequence: Synthetic oligonucleotide
uagggguaccccugaggag

SEQ ID NO: 3162514 - RNA, 19 nt, Artificial Sequence
  Description of Artificial Sequence: Synthetic oligonucleotide
ccaacaacaccgcaccugc

SEQ ID NO: 3162515 - RNA, 19 nt, Artificial Sequence
  Description of Artificial Sequence: Synthetic oligonucleotide
gguauggggcuguugggcc

SEQ ID NO: 3162516 - RNA, 19 nt, Artificial Sequence
  Description of Artificial Sequence: Synthetic oligonucleotide
uauggggcuguugggccgg

SEQ ID NO: 3162517 - RNA, 19 nt, Artificial Sequence
  Description of Artificial Sequence: Synthetic oligonucleotide
gucuuaggaggcuccugag

SEQ ID NO: 3162518 - RNA, 19 nt, Artificial Sequence
  Description of Artificial Sequence: Synthetic oligonucleotide
ucccggcucccauaggccc

SEQ ID NO: 3162519 - RNA, 19 nt, Artificial Sequence
  Description of Artificial Sequence: Synthetic oligonucleotide
ucucugcuccucgcaaccg

SEQ ID NO: 3162520 - RNA, 19 nt, Artificial Sequence
  Description of Artificial Sequence: Synthetic oligonucleotide
uuaggaggcuccugagguc

SEQ ID NO: 3162521 - RNA, 19 nt, Artificial Sequence
  Description of Artificial Sequence: Synthetic oligonucleotide
aaaauaaauauucagguag

SEQ ID NO: 3162522 - RNA, 19 nt, Artificial Sequence
  Description of Artificial Sequence: Synthetic oligonucleotide
aauaaaauuauauuuuaca

SEQ ID NO: 3162523 - RNA, 19 nt, Artificial Sequence
  Description of Artificial Sequence: Synthetic oligonucleotide
aagugucccacuuagagcc

SEQ ID NO: 3162524 - RNA, 19 nt, Artificial Sequence
  Description of Artificial Sequence: Synthetic oligonucleotide
uauaaauuuaauaaaauua

SEQ ID NO: 3162525 - RNA, 19 nt, Artificial Sequence
  Description of Artificial Sequence: Synthetic oligonucleotide
aaaauuauauuuuacagua

SEQ ID NO: 3162526 - RNA, 19 nt, Artificial Sequence
  Description of Artificial Sequence: Synthetic oligonucleotide
auugauauaaauuuaauaa

SEQ ID NO: 3162527 - RNA, 19 nt, Artificial Sequence
  Description of Artificial Sequence: Synthetic oligonucleotide
uuauauuuuacaguaaugg

SEQ ID NO: 3162528 - RNA, 19 nt, Artificial Sequence
  Description of Artificial Sequence: Synthetic oligonucleotide
auuaacaaaagauucacag

SEQ ID NO: 3162529 - RNA, 19 nt, Artificial Sequence
  Description of Artificial Sequence: Synthetic oligonucleotide
aagauucacagacaguugc

SEQ ID NO: 3162530 - RNA, 19 nt, Artificial Sequence
  Description of Artificial Sequence: Synthetic oligonucleotide
auaaaauuauauuuuacag

SEQ ID NO: 3162531 - RNA, 19 nt, Artificial Sequence
  Description of Artificial Sequence: Synthetic oligonucleotide
uaacaaaagauucacagac

SEQ ID NO: 3162532 - RNA, 19 nt, Artificial Sequence
  Description of Artificial Sequence: Synthetic oligonucleotide
uaauauuaacaaaagauuc

SEQ ID NO: 3162533 - RNA, 19 nt, Artificial Sequence
  Description of Artificial Sequence: Synthetic oligonucleotide
uuuaauaaaauuauauuuu

SEQ ID NO: 3162534 - RNA, 19 nt, Artificial Sequence
  Description of Artificial Sequence: Synthetic oligonucleotide
auuuaauaaaauuauauuu

SEQ ID NO: 3162535 - RNA, 19 nt, Artificial Sequence
  Description of Artificial Sequence: Synthetic oligonucleotide
agccauauaauuuaaagug

SEQ ID NO: 3162536 - RNA, 19 nt, Artificial Sequence
  Description of Artificial Sequence: Synthetic oligonucleotide
aauuuaauaaaauuauauu

SEQ ID NO: 3162537 - RNA, 19 nt, Artificial Sequence
  Description of Artificial Sequence: Synthetic oligonucleotide
ugauauaaauuuaauaaaa

SEQ ID NO: 3162538 - RNA, 19 nt, Artificial Sequence
  Description of Artificial Sequence: Synthetic oligonucleotide
aauuauauuuuacaguaau

SEQ ID NO: 3162539 - RNA, 19 nt, Artificial Sequence
  Description of Artificial Sequence: Synthetic oligonucleotide
uaaauauucagguagcuaa

SEQ ID NO: 3162540 - RNA, 19 nt, Artificial Sequence
  Description of Artificial Sequence: Synthetic oligonucleotide
uuuacaguaauggauauug

SEQ ID NO: 3162541 - RNA, 19 nt, Artificial Sequence
  Description of Artificial Sequence: Synthetic oligonucleotide
aaauuaacaagugucccac

SEQ ID NO: 3162542 - RNA, 19 nt, Artificial Sequence
  Description of Artificial Sequence: Synthetic oligonucleotide
aaauaaauauucagguagc

SEQ ID NO: 3162543 - RNA, 19 nt, Artificial Sequence
  Description of Artificial Sequence: Synthetic oligonucleotide
aaauuuaauaaaauuauau

SEQ ID NO: 3162544 - RNA, 19 nt, Artificial Sequence
  Description of Artificial Sequence: Synthetic oligonucleotide
uaaaauuauauuuuacagu

SEQ ID NO: 3162545 - RNA, 19 nt, Artificial Sequence
  Description of Artificial Sequence: Synthetic oligonucleotide
uaauuuaaagugaggauug

SEQ ID NO: 3162546 - RNA, 19 nt, Artificial Sequence
  Description of Artificial Sequence: Synthetic oligonucleotide
acaaaagauucacagacag

SEQ ID NO: 3162547 - RNA, 19 nt, Artificial Sequence
  Description of Artificial Sequence: Synthetic oligonucleotide
agaaaagggaaucuaaaug

SEQ ID NO: 3162548 - RNA, 19 nt, Artificial Sequence
  Description of Artificial Sequence: Synthetic oligonucleotide
uccagcaaaauaaauauuc

SEQ ID NO: 3162549 - RNA, 19 nt, Artificial Sequence
  Description of Artificial Sequence: Synthetic oligonucleotide
aaaauaaaugcaaacaaau

SEQ ID NO: 3162550 - RNA, 19 nt, Artificial Sequence
  Description of Artificial Sequence: Synthetic oligonucleotide
aaaagauucacagacaguu

SEQ ID NO: 3162551 - RNA, 19 nt, Artificial Sequence
  Description of Artificial Sequence: Synthetic oligonucleotide
auauuaacaaaagauucac

SEQ ID NO: 3162552 - RNA, 19 nt, Artificial Sequence
  Description of Artificial Sequence: Synthetic oligonucleotide
ugaggauugauauaaauuu

SEQ ID NO: 3162553 - RNA, 19 nt, Artificial Sequence
  Description of Artificial Sequence: Synthetic oligonucleotide
agcaaaauaaauauucagg

SEQ ID NO: 3162554 - RNA, 19 nt, Artificial Sequence
  Description of Artificial Sequence: Synthetic oligonucleotide
agagccauauaauuuaaag

SEQ ID NO: 3162555 - RNA, 19 nt, Artificial Sequence
  Description of Artificial Sequence: Synthetic oligonucleotide
uuaaagugaggauugauau

SEQ ID NO: 3162556 - RNA, 19 nt, Artificial Sequence
  Description of Artificial Sequence: Synthetic oligonucleotide
uauauuuuacaguaaugga

SEQ ID NO: 3162557 - RNA, 19 nt, Artificial Sequence
  Description of Artificial Sequence: Synthetic oligonucleotide
aauauuaacaaaagauuca

SEQ ID NO: 3162558 - RNA, 19 nt, Artificial Sequence
  Description of Artificial Sequence: Synthetic oligonucleotide
auauaauuuaaagugagga

SEQ ID NO: 3162559 - RNA, 19 nt, Artificial Sequence
  Description of Artificial Sequence: Synthetic oligonucleotide
uauuuuacaguaauggaua

SEQ ID NO: 3162560 - RNA, 19 nt, Artificial Sequence
  Description of Artificial Sequence: Synthetic oligonucleotide
uaauaaaauuauauuuuac

SEQ ID NO: 3162561 - RNA, 19 nt, Artificial Sequence
  Description of Artificial Sequence: Synthetic oligonucleotide
uugauauaaauuuaauaaa

SEQ ID NO: 3162562 - RNA, 19 nt, Artificial Sequence
  Description of Artificial Sequence: Synthetic oligonucleotide
uuaauaaaauuauauuuua

SEQ ID NO: 3162563 - RNA, 19 nt, Artificial Sequence
  Description of Artificial Sequence: Synthetic oligonucleotide
auauaaauuuaauaaaauu

SEQ ID NO: 3162564 - RNA, 19 nt, Artificial Sequence
  Description of Artificial Sequence: Synthetic oligonucleotide
aaagugaggauugauauaa

SEQ ID NO: 3162565 - RNA, 19 nt, Artificial Sequence
  Description of Artificial Sequence: Synthetic oligonucleotide
agcuaaauuaacaaguguc

SEQ ID NO: 3162566 - RNA, 19 nt, Artificial Sequence
  Description of Artificial Sequence: Synthetic oligonucleotide
acaguugccuccuuacucc

SEQ ID NO: 3162567 - RNA, 19 nt, Artificial Sequence
  Description of Artificial Sequence: Synthetic oligonucleotide
auaaauuuaauaaaauuau

SEQ ID NO: 3162568 - RNA, 19 nt, Artificial Sequence
  Description of Artificial Sequence: Synthetic oligonucleotide
acaagugucccacuuagag

SEQ ID NO: 3162569 - RNA, 19 nt, Artificial Sequence
  Description of Artificial Sequence: Synthetic oligonucleotide
uuuaaagugaggauugaua

SEQ ID NO: 3162570 - RNA, 19 nt, Artificial Sequence
  Description of Artificial Sequence: Synthetic oligonucleotide
ucagguagcuaaauuaaca

SEQ ID NO: 3162571 - RNA, 19 nt, Artificial Sequence
  Description of Artificial Sequence: Synthetic oligonucleotide
uuaacaaaagauucacaga

SEQ ID NO: 3162572 - RNA, 19 nt, Artificial Sequence
  Description of Artificial Sequence: Synthetic oligonucleotide
uaaauuaacaaguguccca

SEQ ID NO: 3162573 - RNA, 19 nt, Artificial Sequence
  Description of Artificial Sequence: Synthetic oligonucleotide
aaaaggaccagaaaaggga

SEQ ID NO: 3162574 - RNA, 19 nt, Artificial Sequence
  Description of Artificial Sequence: Synthetic oligonucleotide
uaacaagugucccacuuag

SEQ ID NO: 3162575 - RNA, 19 nt, Artificial Sequence
  Description of Artificial Sequence: Synthetic oligonucleotide
uauucagguagcuaaauua

SEQ ID NO: 3162576 - RNA, 19 nt, Artificial Sequence
  Description of Artificial Sequence: Synthetic oligonucleotide
aagggaaucuaaauguuuc

SEQ ID NO: 3162577 - RNA, 19 nt, Artificial Sequence
  Description of Artificial Sequence: Synthetic oligonucleotide
uauaauuuaaagugaggau

SEQ ID NO: 3162578 - RNA, 19 nt, Artificial Sequence
  Description of Artificial Sequence: Synthetic oligonucleotide
cauauaauuuaaagugagg

SEQ ID NO: 3162579 - RNA, 19 nt, Artificial Sequence
  Description of Artificial Sequence: Synthetic oligonucleotide
gaaaagggaaucuaaaugu

SEQ ID NO: 3162580 - RNA, 19 nt, Artificial Sequence
  Description of Artificial Sequence: Synthetic oligonucleotide
uaaauuuaauaaaauuaua

SEQ ID NO: 3162581 - RNA, 19 nt, Artificial Sequence
  Description of Artificial Sequence: Synthetic oligonucleotide
ucaaaauucugugauaaaa

SEQ ID NO: 3162582 - RNA, 19 nt, Artificial Sequence
  Description of Artificial Sequence: Synthetic oligonucleotide
auugaucuccucaaaauuc

SEQ ID NO: 3162583 - RNA, 19 nt, Artificial Sequence
  Description of Artificial Sequence: Synthetic oligonucleotide
gauugauauaaauuuaaua

SEQ ID NO: 3162584 - RNA, 19 nt, Artificial Sequence
  Description of Artificial Sequence: Synthetic oligonucleotide
acuccagcaaaauaaauau

SEQ ID NO: 3162585 - RNA, 19 nt, Artificial Sequence
  Description of Artificial Sequence: Synthetic oligonucleotide
acaguaauggauauugauc

SEQ ID NO: 3162586 - RNA, 19 nt, Artificial Sequence
  Description of Artificial Sequence: Synthetic oligonucleotide
auaauuuaaagugaggauu

SEQ ID NO: 3162587 - RNA, 19 nt, Artificial Sequence
  Description of Artificial Sequence: Synthetic oligonucleotide
uauuaacaaaagauucaca

SEQ ID NO: 3162588 - RNA, 19 nt, Artificial Sequence
  Description of Artificial Sequence: Synthetic oligonucleotide
auggauauugaucuccuca

SEQ ID NO: 3162589 - RNA, 19 nt, Artificial Sequence
  Description of Artificial Sequence: Synthetic oligonucleotide
cuaaauuaacaaguguccc

SEQ ID NO: 3162590 - RNA, 19 nt, Artificial Sequence
  Description of Artificial Sequence: Synthetic oligonucleotide
uaaauguuucaguuuaaaa

SEQ ID NO: 3162591 - RNA, 19 nt, Artificial Sequence
  Description of Artificial Sequence: Synthetic oligonucleotide
cagcaaaauaaauauucag

SEQ ID NO: 3162592 - RNA, 19 nt, Artificial Sequence
  Description of Artificial Sequence: Synthetic oligonucleotide
aauaaauauucagguagcu

SEQ ID NO: 3162593 - RNA, 19 nt, Artificial Sequence
  Description of Artificial Sequence: Synthetic oligonucleotide
aucuaaauguuucaguuua

SEQ ID NO: 3162594 - RNA, 19 nt, Artificial Sequence
  Description of Artificial Sequence: Synthetic oligonucleotide
aauggauauugaucuccuc

SEQ ID NO: 3162595 - RNA, 19 nt, Artificial Sequence
  Description of Artificial Sequence: Synthetic oligonucleotide
uacuccagcaaaauaaaua

SEQ ID NO: 3162596 - RNA, 19 nt, Artificial Sequence
  Description of Artificial Sequence: Synthetic oligonucleotide
uugaucuccucaaaauucu

SEQ ID NO: 3162597 - RNA, 19 nt, Artificial Sequence
  Description of Artificial Sequence: Synthetic oligonucleotide
aaucuaaauguuucaguuu

SEQ ID NO: 3162598 - RNA, 19 nt, Artificial Sequence
  Description of Artificial Sequence: Synthetic oligonucleotide
uauugaucuccucaaaauu

SEQ ID NO: 3162599 - RNA, 19 nt, Artificial Sequence
  Description of Artificial Sequence: Synthetic oligonucleotide
auauuuuacaguaauggau

SEQ ID NO: 3162600 - RNA, 19 nt, Artificial Sequence
  Description of Artificial Sequence: Synthetic oligonucleotide
auauugaucuccucaaaau

SEQ ID NO: 3162601 - RNA, 19 nt, Artificial Sequence
  Description of Artificial Sequence: Synthetic oligonucleotide
uucacagacaguugccucc

SEQ ID NO: 3162602 - RNA, 19 nt, Artificial Sequence
  Description of Artificial Sequence: Synthetic oligonucleotide
agguagcuaaauuaacaag

SEQ ID NO: 3162603 - RNA, 19 nt, Artificial Sequence
  Description of Artificial Sequence: Synthetic oligonucleotide
uacaguaauggauauugau

SEQ ID NO: 3162604 - RNA, 19 nt, Artificial Sequence
  Description of Artificial Sequence: Synthetic oligonucleotide
gauauugaucuccucaaaa

SEQ ID NO: 3162605 - RNA, 19 nt, Artificial Sequence
  Description of Artificial Sequence: Synthetic oligonucleotide
aguaauggauauugaucuc

SEQ ID NO: 3162606 - RNA, 19 nt, Artificial Sequence
  Description of Artificial Sequence: Synthetic oligonucleotide
aaauaaaugcaaacaaauu

SEQ ID NO: 3162607 - RNA, 19 nt, Artificial Sequence
  Description of Artificial Sequence: Synthetic oligonucleotide
guaauggauauugaucucc

SEQ ID NO: 3162608 - RNA, 19 nt, Artificial Sequence
  Description of Artificial Sequence: Synthetic oligonucleotide
aucuccucaaaauucugug

SEQ ID NO: 3162609 - RNA, 19 nt, Artificial Sequence
  Description of Artificial Sequence: Synthetic oligonucleotide
uaauggauauugaucuccu

SEQ ID NO: 3162610 - RNA, 19 nt, Artificial Sequence
  Description of Artificial Sequence: Synthetic oligonucleotide
auuauauuuuacaguaaug

SEQ ID NO: 3162611 - RNA, 19 nt, Artificial Sequence
  Description of Artificial Sequence: Synthetic oligonucleotide
auucacagacaguugccuc

SEQ ID NO: 3162612 - RNA, 19 nt, Artificial Sequence
  Description of Artificial Sequence: Synthetic oligonucleotide
uagcuaaauuaacaagugu

SEQ ID NO: 3162613 - RNA, 19 nt, Artificial Sequence
  Description of Artificial Sequence: Synthetic oligonucleotide
uggauauugaucuccucaa

SEQ ID NO: 3162614 - RNA, 19 nt, Artificial Sequence
  Description of Artificial Sequence: Synthetic oligonucleotide
guagcuaaauuaacaagug

SEQ ID NO: 3162615 - RNA, 19 nt, Artificial Sequence
  Description of Artificial Sequence: Synthetic oligonucleotide
uucagguagcuaaauuaac

SEQ ID NO: 3162616 - RNA, 19 nt, Artificial Sequence
  Description of Artificial Sequence: Synthetic oligonucleotide
cuuagagccauauaauuua

SEQ ID NO: 3162617 - RNA, 19 nt, Artificial Sequence
  Description of Artificial Sequence: Synthetic oligonucleotide
ccauauaauuuaaagugag

SEQ ID NO: 3162618 - RNA, 19 nt, Artificial Sequence
  Description of Artificial Sequence: Synthetic oligonucleotide
gaaucuaaauguuucaguu

SEQ ID NO: 3162619 - RNA, 19 nt, Artificial Sequence
  Description of Artificial Sequence: Synthetic oligonucleotide
caagugucccacuuagagc

SEQ ID NO: 3162620 - RNA, 19 nt, Artificial Sequence
  Description of Artificial Sequence: Synthetic oligonucleotide
agugaggauugauauaaau

SEQ ID NO: 3162621 - RNA, 19 nt, Artificial Sequence
  Description of Artificial Sequence: Synthetic oligonucleotide
guaucauuggccuugaugc

SEQ ID NO: 3162622 - RNA, 19 nt, Artificial Sequence
  Description of Artificial Sequence: Synthetic oligonucleotide
uaaaaguuggcauuggugu

SEQ ID NO: 3162623 - RNA, 19 nt, Artificial Sequence
  Description of Artificial Sequence: Synthetic oligonucleotide
agacauaugggcaagugcc

SEQ ID NO: 3162624 - RNA, 19 nt, Artificial Sequence
  Description of Artificial Sequence: Synthetic oligonucleotide
gaauccuuguaaaaguugg

SEQ ID NO: 3162625 - RNA, 19 nt, Artificial Sequence
  Description of Artificial Sequence: Synthetic oligonucleotide
cuugggaugaccucguugc

SEQ ID NO: 3162626 - RNA, 19 nt, Artificial Sequence
  Description of Artificial Sequence: Synthetic oligonucleotide
aaugacuaguguuggggag

SEQ ID NO: 3162627 - RNA, 19 nt, Artificial Sequence
  Description of Artificial Sequence: Synthetic oligonucleotide
uaggcaaugacuaguguug

SEQ ID NO: 3162628 - RNA, 19 nt, Artificial Sequence
  Description of Artificial Sequence: Synthetic oligonucleotide
ugccuugugacacugggag

SEQ ID NO: 3162629 - RNA, 19 nt, Artificial Sequence
  Description of Artificial Sequence: Synthetic oligonucleotide
aaaguaggcgcugagguug

SEQ ID NO: 3162630 - RNA, 19 nt, Artificial Sequence
  Description of Artificial Sequence: Synthetic oligonucleotide
augggacagacauaugggc

SEQ ID NO: 3162631 - RNA, 19 nt, Artificial Sequence
  Description of Artificial Sequence: Synthetic oligonucleotide
ugagaucuugcaccgagag

SEQ ID NO: 3162632 - RNA, 19 nt, Artificial Sequence
  Description of Artificial Sequence: Synthetic oligonucleotide
uagucuggcauugagcugg

SEQ ID NO: 3162633 - RNA, 19 nt, Artificial Sequence
  Description of Artificial Sequence: Synthetic oligonucleotide
uacacuguguuuccuaagc

SEQ ID NO: 3162634 - RNA, 19 nt, Artificial Sequence
  Description of Artificial Sequence: Synthetic oligonucleotide
uuguuguaagccaaggccu

SEQ ID NO: 3162635 - RNA, 19 nt, Artificial Sequence
  Description of Artificial Sequence: Synthetic oligonucleotide
acggcaauggacaagcacc

SEQ ID NO: 3162636 - RNA, 19 nt, Artificial Sequence
  Description of Artificial Sequence: Synthetic oligonucleotide
acaugcaugaaggaccugc

SEQ ID NO: 3162637 - RNA, 19 nt, Artificial Sequence
  Description of Artificial Sequence: Synthetic oligonucleotide
aggaaaccgucauuggggc

SEQ ID NO: 3162638 - RNA, 19 nt, Artificial Sequence
  Description of Artificial Sequence: Synthetic oligonucleotide
caggaaaccgucauugggg

SEQ ID NO: 3162639 - RNA, 19 nt, Artificial Sequence
  Description of Artificial Sequence: Synthetic oligonucleotide
gaaaccgucauuggggccg

SEQ ID NO: 3162640 - RNA, 19 nt, Artificial Sequence
  Description of Artificial Sequence: Synthetic oligonucleotide
gucguugagaucuugcacc

SEQ ID NO: 3162641 - RNA, 19 nt, Artificial Sequence
  Description of Artificial Sequence: Synthetic oligonucleotide
aauccuuguaaaaguuggc

SEQ ID NO: 3162642 - RNA, 19 nt, Artificial Sequence
  Description of Artificial Sequence: Synthetic oligonucleotide
acuccugcguaucauuggc

SEQ ID NO: 3162643 - RNA, 19 nt, Artificial Sequence
  Description of Artificial Sequence: Synthetic oligonucleotide
augccaaaguagaugaugc

SEQ ID NO: 3162644 - RNA, 19 nt, Artificial Sequence
  Description of Artificial Sequence: Synthetic oligonucleotide
aacuccugcguaucauugg

SEQ ID NO: 3162645 - RNA, 19 nt, Artificial Sequence
  Description of Artificial Sequence: Synthetic oligonucleotide
ugccucacgaugcucaaag

SEQ ID NO: 3162646 - RNA, 19 nt, Artificial Sequence
  Description of Artificial Sequence: Synthetic oligonucleotide
aaguagaugaugccggaau

SEQ ID NO: 3162647 - RNA, 19 nt, Artificial Sequence
  Description of Artificial Sequence: Synthetic oligonucleotide
acuaguguuggggagcggc

SEQ ID NO: 3162648 - RNA, 19 nt, Artificial Sequence
  Description of Artificial Sequence: Synthetic oligonucleotide
uguaaaaguuggcauuggu

SEQ ID NO: 3162649 - RNA, 19 nt, Artificial Sequence
  Description of Artificial Sequence: Synthetic oligonucleotide
ugcaugaaggaccugcccu

SEQ ID NO: 3162650 - RNA, 19 nt, Artificial Sequence
  Description of Artificial Sequence: Synthetic oligonucleotide
gaucucacgauucugccuc

SEQ ID NO: 3162651 - RNA, 19 nt, Artificial Sequence
  Description of Artificial Sequence: Synthetic oligonucleotide
gaacgagccggacauggcg

SEQ ID NO: 3162652 - RNA, 19 nt, Artificial Sequence
  Description of Artificial Sequence: Synthetic oligonucleotide
uggucgaugaagucugcgg

SEQ ID NO: 3162653 - RNA, 19 nt, Artificial Sequence
  Description of Artificial Sequence: Synthetic oligonucleotide
gauccuugggaugaccucg

SEQ ID NO: 3162654 - RNA, 19 nt, Artificial Sequence
  Description of Artificial Sequence: Synthetic oligonucleotide
guugagaucuugcaccgag

SEQ ID NO: 3162655 - RNA, 19 nt, Artificial Sequence
  Description of Artificial Sequence: Synthetic oligonucleotide
gagagcucgaacgagccgg

SEQ ID NO: 3162656 - RNA, 19 nt, Artificial Sequence
  Description of Artificial Sequence: Synthetic oligonucleotide
ucacgauucugccucacga

SEQ ID NO: 3162657 - RNA, 19 nt, Artificial Sequence
  Description of Artificial Sequence: Synthetic oligonucleotide
gcucaaagcagauuugacg

SEQ ID NO: 3162658 - RNA, 19 nt, Artificial Sequence
  Description of Artificial Sequence: Synthetic oligonucleotide
uguuguaagccaaggccug

SEQ ID NO: 3162659 - RNA, 19 nt, Artificial Sequence
  Description of Artificial Sequence: Synthetic oligonucleotide
ucguugagaucuugcaccg

SEQ ID NO: 3162660 - RNA, 19 nt, Artificial Sequence
  Description of Artificial Sequence: Synthetic oligonucleotide
guaaaaguuggcauuggug

SEQ ID NO: 3162661 - RNA, 19 nt, Artificial Sequence
  Description of Artificial Sequence: Synthetic oligonucleotide
ugggacagacauaugggca

SEQ ID NO: 3162662 - RNA, 19 nt, Artificial Sequence
  Description of Artificial Sequence: Synthetic oligonucleotide
ugagguugaacuccugcgu

SEQ ID NO: 3162663 - RNA, 19 nt, Artificial Sequence
  Description of Artificial Sequence: Synthetic oligonucleotide
caauggacaagcaccggcc

SEQ ID NO: 3162664 - RNA, 19 nt, Artificial Sequence
  Description of Artificial Sequence: Synthetic oligonucleotide
augacuaguguuggggagc

SEQ ID NO: 3162665 - RNA, 19 nt, Artificial Sequence
  Description of Artificial Sequence: Synthetic oligonucleotide
cuagaguuucaccuugccc

SEQ ID NO: 3162666 - RNA, 19 nt, Artificial Sequence
  Description of Artificial Sequence: Synthetic oligonucleotide
agacgcguugcccacgugg

SEQ ID NO: 3162667 - RNA, 19 nt, Artificial Sequence
  Description of Artificial Sequence: Synthetic oligonucleotide
ucagaccucugcaggagag

SEQ ID NO: 3162668 - RNA, 19 nt, Artificial Sequence
  Description of Artificial Sequence: Synthetic oligonucleotide
aauggacaagcaccggcca

SEQ ID NO: 3162669 - RNA, 19 nt, Artificial Sequence
  Description of Artificial Sequence: Synthetic oligonucleotide
uaagccaaggccuggucga

SEQ ID NO: 3162670 - RNA, 19 nt, Artificial Sequence
  Description of Artificial Sequence: Synthetic oligonucleotide
ugccgcaucaugagguagg

SEQ ID NO: 3162671 - RNA, 19 nt, Artificial Sequence
  Description of Artificial Sequence: Synthetic oligonucleotide
auuggggccgaucucacga

SEQ ID NO: 3162672 - RNA, 19 nt, Artificial Sequence
  Description of Artificial Sequence: Synthetic oligonucleotide
augcaugaaggaccugccc

SEQ ID NO: 3162673 - RNA, 19 nt, Artificial Sequence
  Description of Artificial Sequence: Synthetic oligonucleotide
ucgaacgagccggacaugg

SEQ ID NO: 3162674 - RNA, 19 nt, Artificial Sequence
  Description of Artificial Sequence: Synthetic oligonucleotide
ugacaugcaugaaggaccu

SEQ ID NO: 3162675 - RNA, 19 nt, Artificial Sequence
  Description of Artificial Sequence: Synthetic oligonucleotide
uuuccuaagcauggcagcc

SEQ ID NO: 3162676 - RNA, 19 nt, Artificial Sequence
  Description of Artificial Sequence: Synthetic oligonucleotide
uucugccucacgaugcuca

SEQ ID NO: 3162677 - RNA, 19 nt, Artificial Sequence
  Description of Artificial Sequence: Synthetic oligonucleotide
uccuaagcauggcagccag

SEQ ID NO: 3162678 - RNA, 19 nt, Artificial Sequence
  Description of Artificial Sequence: Synthetic oligonucleotide
cagacauaugggcaagugc

SEQ ID NO: 3162679 - RNA, 19 nt, Artificial Sequence
  Description of Artificial Sequence: Synthetic oligonucleotide
gaaggaccugcccucggcg

SEQ ID NO: 3162680 - RNA, 19 nt, Artificial Sequence
  Description of Artificial Sequence: Synthetic oligonucleotide
guugacaugcaugaaggac

SEQ ID NO: 3162681 - RNA, 19 nt, Artificial Sequence
  Description of Artificial Sequence: Synthetic oligonucleotide
uaucauuggccuugaugcc

SEQ ID NO: 3162682 - RNA, 19 nt, Artificial Sequence
  Description of Artificial Sequence: Synthetic oligonucleotide
cucaaagcagauuugacgu

SEQ ID NO: 3162683 - RNA, 19 nt, Artificial Sequence
  Description of Artificial Sequence: Synthetic oligonucleotide
ugagcuggcagaguugggc

SEQ ID NO: 3162684 - RNA, 19 nt, Artificial Sequence
  Description of Artificial Sequence: Synthetic oligonucleotide
aagucugcggcccuuucaa

SEQ ID NO: 3162685 - RNA, 19 nt, Artificial Sequence
  Description of Artificial Sequence: Synthetic oligonucleotide
gaugccggaauccuuguaa

SEQ ID NO: 3162686 - RNA, 19 nt, Artificial Sequence
  Description of Artificial Sequence: Synthetic oligonucleotide
uggauccuugggaugaccu

SEQ ID NO: 3162687 - RNA, 19 nt, Artificial Sequence
  Description of Artificial Sequence: Synthetic oligonucleotide
ugacuaguguuggggagcg

SEQ ID NO: 3162688 - RNA, 19 nt, Artificial Sequence
  Description of Artificial Sequence: Synthetic oligonucleotide
uuguaaaaguuggcauugg

SEQ ID NO: 3162689 - RNA, 19 nt, Artificial Sequence
  Description of Artificial Sequence: Synthetic oligonucleotide
caugcaugaaggaccugcc

SEQ ID NO: 3162690 - RNA, 19 nt, Artificial Sequence
  Description of Artificial Sequence: Synthetic oligonucleotide
ugcucaaagcagauuugac

SEQ ID NO: 3162691 - RNA, 19 nt, Artificial Sequence
  Description of Artificial Sequence: Synthetic oligonucleotide
aacgagccggacauggcgg

SEQ ID NO: 3162692 - RNA, 19 nt, Artificial Sequence
  Description of Artificial Sequence: Synthetic oligonucleotide
guagaugaugccggaaucc

SEQ ID NO: 3162693 - RNA, 19 nt, Artificial Sequence
  Description of Artificial Sequence: Synthetic oligonucleotide
uccugcguaucauuggccu

SEQ ID NO: 3162694 - RNA, 19 nt, Artificial Sequence
  Description of Artificial Sequence: Synthetic oligonucleotide
agaguugggccaggaaacc

SEQ ID NO: 3162695 - RNA, 19 nt, Artificial Sequence
  Description of Artificial Sequence: Synthetic oligonucleotide
ugaaggaccugcccucggc

SEQ ID NO: 3162696 - RNA, 19 nt, Artificial Sequence
  Description of Artificial Sequence: Synthetic oligonucleotide
gcaaugacuaguguugggg

SEQ ID NO: 3162697 - RNA, 19 nt, Artificial Sequence
  Description of Artificial Sequence: Synthetic oligonucleotide
gccaaaguagaugaugccg

SEQ ID NO: 3162698 - RNA, 19 nt, Artificial Sequence
  Description of Artificial Sequence: Synthetic oligonucleotide
ugccaaaguagaugaugcc

SEQ ID NO: 3162699 - RNA, 19 nt, Artificial Sequence
  Description of Artificial Sequence: Synthetic oligonucleotide
auccuuguaaaaguuggca

SEQ ID NO: 3162700 - RNA, 19 nt, Artificial Sequence
  Description of Artificial Sequence: Synthetic oligonucleotide
agcagauuugacguccauc

SEQ ID NO: 3162701 - RNA, 19 nt, Artificial Sequence
  Description of Artificial Sequence: Synthetic oligonucleotide
uggcuagucuggcauugag

SEQ ID NO: 3162702 - RNA, 19 nt, Artificial Sequence
  Description of Artificial Sequence: Synthetic oligonucleotide
gagaucuugcaccgagagc

SEQ ID NO: 3162703 - RNA, 19 nt, Artificial Sequence
  Description of Artificial Sequence: Synthetic oligonucleotide
ucugcggcccuuucaaagu

SEQ ID NO: 3162704 - RNA, 19 nt, Artificial Sequence
  Description of Artificial Sequence: Synthetic oligonucleotide
gucgaugaagucugcggcc

SEQ ID NO: 3162705 - RNA, 19 nt, Artificial Sequence
  Description of Artificial Sequence: Synthetic oligonucleotide
gucugcggcccuuucaaag

SEQ ID NO: 3162706 - RNA, 19 nt, Artificial Sequence
  Description of Artificial Sequence: Synthetic oligonucleotide
gaugcucaaagcagauuug

SEQ ID NO: 3162707 - RNA, 19 nt, Artificial Sequence
  Description of Artificial Sequence: Synthetic oligonucleotide
ugacguccaucuucugccg

SEQ ID NO: 3162708 - RNA, 19 nt, Artificial Sequence
  Description of Artificial Sequence: Synthetic oligonucleotide
gaacuccugcguaucauug

SEQ ID NO: 3162709 - RNA, 19 nt, Artificial Sequence
  Description of Artificial Sequence: Synthetic oligonucleotide
uugagaucuugcaccgaga

SEQ ID NO: 3162710 - RNA, 19 nt, Artificial Sequence
  Description of Artificial Sequence: Synthetic oligonucleotide
aggucguugagaucuugca

SEQ ID NO: 3162711 - RNA, 19 nt, Artificial Sequence
  Description of Artificial Sequence: Synthetic oligonucleotide
ggucgaugaagucugcggc

SEQ ID NO: 3162712 - RNA, 19 nt, Artificial Sequence
  Description of Artificial Sequence: Synthetic oligonucleotide
cauaugggcaagugccuug

SEQ ID NO: 3162713 - RNA, 19 nt, Artificial Sequence
  Description of Artificial Sequence: Synthetic oligonucleotide
aggaccugcccucggcggc

SEQ ID NO: 3162714 - RNA, 19 nt, Artificial Sequence
  Description of Artificial Sequence: Synthetic oligonucleotide
uguguuuccuaagcauggc

SEQ ID NO: 3162715 - RNA, 19 nt, Artificial Sequence
  Description of Artificial Sequence: Synthetic oligonucleotide
augggugaugccuaauuuu

SEQ ID NO: 3162716 - RNA, 19 nt, Artificial Sequence
  Description of Artificial Sequence: Synthetic oligonucleotide
ggcccuuucaaaguaggcg

SEQ ID NO: 3162717 - RNA, 19 nt, Artificial Sequence
  Description of Artificial Sequence: Synthetic oligonucleotide
ucauuggccuugaugccaa

SEQ ID NO: 3162718 - RNA, 19 nt, Artificial Sequence
  Description of Artificial Sequence: Synthetic oligonucleotide
gaguugggccaggaaaccg

SEQ ID NO: 3162719 - RNA, 19 nt, Artificial Sequence
  Description of Artificial Sequence: Synthetic oligonucleotide
augggcaagugccuuguga

SEQ ID NO: 3162720 - RNA, 19 nt, Artificial Sequence
  Description of Artificial Sequence: Synthetic oligonucleotide
ggcauugguguugacaugc

SEQ ID NO: 3162721 - RNA, 19 nt, Artificial Sequence
  Description of Artificial Sequence: Synthetic oligonucleotide
aagaagaggcacucggggc

SEQ ID NO: 3162722 - RNA, 19 nt, Artificial Sequence
  Description of Artificial Sequence: Synthetic oligonucleotide
aagcucacaggccacgugc

SEQ ID NO: 3162723 - RNA, 19 nt, Artificial Sequence
  Description of Artificial Sequence: Synthetic oligonucleotide
aaagccaccaccgucucgc

SEQ ID NO: 3162724 - RNA, 19 nt, Artificial Sequence
  Description of Artificial Sequence: Synthetic oligonucleotide
ugguguaaagccaccaccg

SEQ ID NO: 3162725 - RNA, 19 nt, Artificial Sequence
  Description of Artificial Sequence: Synthetic oligonucleotide
uuuguccucacccagcagc

SEQ ID NO: 3162726 - RNA, 19 nt, Artificial Sequence
  Description of Artificial Sequence: Synthetic oligonucleotide
uguaaagccaccaccgucu

SEQ ID NO: 3162727 - RNA, 19 nt, Artificial Sequence
  Description of Artificial Sequence: Synthetic oligonucleotide
gacacagcuccucaggugg

SEQ ID NO: 3162728 - RNA, 19 nt, Artificial Sequence
  Description of Artificial Sequence: Synthetic oligonucleotide
uuugguguacagcaccagg

SEQ ID NO: 3162729 - RNA, 19 nt, Artificial Sequence
  Description of Artificial Sequence: Synthetic oligonucleotide
ugugccaccgcccuccacg

SEQ ID NO: 3162730 - RNA, 19 nt, Artificial Sequence
  Description of Artificial Sequence: Synthetic oligonucleotide
agcaagaagaggcacucgg

SEQ ID NO: 3162731 - RNA, 19 nt, Artificial Sequence
  Description of Artificial Sequence: Synthetic oligonucleotide
agaagaggcacucggggcg

SEQ ID NO: 3162732 - RNA, 19 nt, Artificial Sequence
  Description of Artificial Sequence: Synthetic oligonucleotide
aauuuguccucacccagca

SEQ ID NO: 3162733 - RNA, 19 nt, Artificial Sequence
  Description of Artificial Sequence: Synthetic oligonucleotide
cuggaauuuguccucaccc

SEQ ID NO: 3162734 - RNA, 19 nt, Artificial Sequence
  Description of Artificial Sequence: Synthetic oligonucleotide
uggccgagcagcaagaaga

SEQ ID NO: 3162735 - RNA, 19 nt, Artificial Sequence
  Description of Artificial Sequence: Synthetic oligonucleotide
acuggaauuuguccucacc

SEQ ID NO: 3162736 - RNA, 19 nt, Artificial Sequence
  Description of Artificial Sequence: Synthetic oligonucleotide
cucccagcagcucacaucg

SEQ ID NO: 3162737 - RNA, 19 nt, Artificial Sequence
  Description of Artificial Sequence: Synthetic oligonucleotide
caagaagaggcacucgggg

SEQ ID NO: 3162738 - RNA, 19 nt, Artificial Sequence
  Description of Artificial Sequence: Synthetic oligonucleotide
agugguguaaagccaccac

SEQ ID NO: 3162739 - RNA, 19 nt, Artificial Sequence
  Description of Artificial Sequence: Synthetic oligonucleotide
ucaagcagcagcaggcggc

SEQ ID NO: 3162740 - RNA, 19 nt, Artificial Sequence
  Description of Artificial Sequence: Synthetic oligonucleotide
uugguguacagcaccagga

SEQ ID NO: 3162741 - RNA, 19 nt, Artificial Sequence
  Description of Artificial Sequence: Synthetic oligonucleotide
gaggucaagcagcagcagg

SEQ ID NO: 3162742 - RNA, 19 nt, Artificial Sequence
  Description of Artificial Sequence: Synthetic oligonucleotide
ucacccagcagccuuugcc

SEQ ID NO: 3162743 - RNA, 19 nt, Artificial Sequence
  Description of Artificial Sequence: Synthetic oligonucleotide
aagcuggcgcagcagcagc

SEQ ID NO: 3162744 - RNA, 19 nt, Artificial Sequence
  Description of Artificial Sequence: Synthetic oligonucleotide
ucacaggccacgugcaggg

SEQ ID NO: 3162745 - RNA, 19 nt, Artificial Sequence
  Description of Artificial Sequence: Synthetic oligonucleotide
uggagaagcuccguggccg

SEQ ID NO: 3162746 - RNA, 19 nt, Artificial Sequence
  Description of Artificial Sequence: Synthetic oligonucleotide
ugguguacagcaccaggag

SEQ ID NO: 3162747 - RNA, 19 nt, Artificial Sequence
  Description of Artificial Sequence: Synthetic oligonucleotide
uggaauuuguccucaccca

SEQ ID NO: 3162748 - RNA, 19 nt, Artificial Sequence
  Description of Artificial Sequence: Synthetic oligonucleotide
aggucaagcagcagcaggc

SEQ ID NO: 3162749 - RNA, 19 nt, Artificial Sequence
  Description of Artificial Sequence: Synthetic oligonucleotide
cagcagcucacaucgagcg

SEQ ID NO: 3162750 - RNA, 19 nt, Artificial Sequence
  Description of Artificial Sequence: Synthetic oligonucleotide
agcuccagugguguaaagc

SEQ ID NO: 3162751 - RNA, 19 nt, Artificial Sequence
  Description of Artificial Sequence: Synthetic oligonucleotide
uccagugguguaaagccac

SEQ ID NO: 3162752 - RNA, 19 nt, Artificial Sequence
  Description of Artificial Sequence: Synthetic oligonucleotide
caggaggucaagcagcagc

SEQ ID NO: 3162753 - RNA, 19 nt, Artificial Sequence
  Description of Artificial Sequence: Synthetic oligonucleotide
guaguggccgcguugccgg

SEQ ID NO: 3162754 - RNA, 19 nt, Artificial Sequence
  Description of Artificial Sequence: Synthetic oligonucleotide
gugguguaaagccaccacc

SEQ ID NO: 3162755 - RNA, 19 nt, Artificial Sequence
  Description of Artificial Sequence: Synthetic oligonucleotide
cacuuugguguacagcacc

SEQ ID NO: 3162756 - RNA, 19 nt, Artificial Sequence
  Description of Artificial Sequence: Synthetic oligonucleotide
agcuccguggccgagcagc

SEQ ID NO: 3162757 - RNA, 19 nt, Artificial Sequence
  Description of Artificial Sequence: Synthetic oligonucleotide
ucagguggaguggugcugg

SEQ ID NO: 3162758 - RNA, 19 nt, Artificial Sequence
  Description of Artificial Sequence: Synthetic oligonucleotide
agccacuggaauuuguccu

SEQ ID NO: 3162759 - RNA, 19 nt, Artificial Sequence
  Description of Artificial Sequence: Synthetic oligonucleotide
uugccgguggcagaggagg

SEQ ID NO: 3162760 - RNA, 19 nt, Artificial Sequence
  Description of Artificial Sequence: Synthetic oligonucleotide
uuguccucacccagcagcc

SEQ ID NO: 3162761 - RNA, 19 nt, Artificial Sequence
  Description of Artificial Sequence: Synthetic oligonucleotide
agcaccaggaggucaagca

SEQ ID NO: 3162762 - RNA, 19 nt, Artificial Sequence
  Description of Artificial Sequence: Synthetic oligonucleotide
ccgagcagcaagaagaggc

SEQ ID NO: 3162763 - RNA, 19 nt, Artificial Sequence
  Description of Artificial Sequence: Synthetic oligonucleotide
ugagcuggcgucccggcca

SEQ ID NO: 3162764 - RNA, 19 nt, Artificial Sequence
  Description of Artificial Sequence: Synthetic oligonucleotide
uagccggucucccagcagc

SEQ ID NO: 3162765 - RNA, 19 nt, Artificial Sequence
  Description of Artificial Sequence: Synthetic oligonucleotide
uccguggccgagcagcaag

SEQ ID NO: 3162766 - RNA, 19 nt, Artificial Sequence
  Description of Artificial Sequence: Synthetic oligonucleotide
ggaauuuguccucacccag

SEQ ID NO: 3162767 - RNA, 19 nt, Artificial Sequence
  Description of Artificial Sequence: Synthetic oligonucleotide
gaauuuguccucacccagc

SEQ ID NO: 3162768 - RNA, 19 nt, Artificial Sequence
  Description of Artificial Sequence: Synthetic oligonucleotide
uaaagccaccaccgucucg

SEQ ID NO: 3162769 - RNA, 19 nt, Artificial Sequence
  Description of Artificial Sequence: Synthetic oligonucleotide
gguggaguggugcugguag

SEQ ID NO: 3162770 - RNA, 19 nt, Artificial Sequence
  Description of Artificial Sequence: Synthetic oligonucleotide
gcuccagugguguaaagcc

SEQ ID NO: 3162771 - RNA, 19 nt, Artificial Sequence
  Description of Artificial Sequence: Synthetic oligonucleotide
caccaggaggucaagcagc

SEQ ID NO: 3162772 - RNA, 19 nt, Artificial Sequence
  Description of Artificial Sequence: Synthetic oligonucleotide
gguguacagcaccaggagg

SEQ ID NO: 3162773 - RNA, 19 nt, Artificial Sequence
  Description of Artificial Sequence: Synthetic oligonucleotide
agccuuugccagcguagcc

SEQ ID NO: 3162774 - RNA, 19 nt, Artificial Sequence
  Description of Artificial Sequence: Synthetic oligonucleotide
cagaggaggccacagcagc

SEQ ID NO: 3162775 - RNA, 19 nt, Artificial Sequence
  Description of Artificial Sequence: Synthetic oligonucleotide
ugacacagcuccucaggug

SEQ ID NO: 3162776 - RNA, 19 nt, Artificial Sequence
  Description of Artificial Sequence: Synthetic oligonucleotide
uacagcaccaggaggucaa

SEQ ID NO: 3162777 - RNA, 19 nt, Artificial Sequence
  Description of Artificial Sequence: Synthetic oligonucleotide
aguggugcugguaguggcc

SEQ ID NO: 3162778 - RNA, 19 nt, Artificial Sequence
  Description of Artificial Sequence: Synthetic oligonucleotide
gaguggugcugguaguggc

SEQ ID NO: 3162779 - RNA, 19 nt, Artificial Sequence
  Description of Artificial Sequence: Synthetic oligonucleotide
accaccgucucgcaggccu

SEQ ID NO: 3162780 - RNA, 19 nt, Artificial Sequence
  Description of Artificial Sequence: Synthetic oligonucleotide
gucaagcagcagcaggcgg

SEQ ID NO: 3162781 - RNA, 19 nt, Artificial Sequence
  Description of Artificial Sequence: Synthetic oligonucleotide
agcguagccggucucccag

SEQ ID NO: 3162782 - RNA, 19 nt, Artificial Sequence
  Description of Artificial Sequence: Synthetic oligonucleotide
gccacgucgguccaggagg

SEQ ID NO: 3162783 - RNA, 19 nt, Artificial Sequence
  Description of Artificial Sequence: Synthetic oligonucleotide
aggaggccacagcagcagc

SEQ ID NO: 3162784 - RNA, 19 nt, Artificial Sequence
  Description of Artificial Sequence: Synthetic oligonucleotide
acccacuuugguguacagc

SEQ ID NO: 3162785 - RNA, 19 nt, Artificial Sequence
  Description of Artificial Sequence: Synthetic oligonucleotide
agaagcuccguggccgagc

SEQ ID NO: 3162786 - RNA, 19 nt, Artificial Sequence
  Description of Artificial Sequence: Synthetic oligonucleotide
caucgagcggggcuggcgg

SEQ ID NO: 3162787 - RNA, 19 nt, Artificial Sequence
  Description of Artificial Sequence: Synthetic oligonucleotide
ugcaagcucacaggccacg

SEQ ID NO: 3162788 - RNA, 19 nt, Artificial Sequence
  Description of Artificial Sequence: Synthetic oligonucleotide
agcagcucacaucgagcgg

SEQ ID NO: 3162789 - RNA, 19 nt, Artificial Sequence
  Description of Artificial Sequence: Synthetic oligonucleotide
gcugacacagcuccucagg

SEQ ID NO: 3162790 - RNA, 19 nt, Artificial Sequence
  Description of Artificial Sequence: Synthetic oligonucleotide
guguaaagccaccaccguc

SEQ ID NO: 3162791 - RNA, 19 nt, Artificial Sequence
  Description of Artificial Sequence: Synthetic oligonucleotide
acgucgguccaggaggcgc

SEQ ID NO: 3162792 - RNA, 19 nt, Artificial Sequence
  Description of Artificial Sequence: Synthetic oligonucleotide
acgugcagggaugugccac

SEQ ID NO: 3162793 - RNA, 19 nt, Artificial Sequence
  Description of Artificial Sequence: Synthetic oligonucleotide
gcugcagccacgucggucc

SEQ ID NO: 3162794 - RNA, 19 nt, Artificial Sequence
  Description of Artificial Sequence: Synthetic oligonucleotide
ucucccagcagcucacauc

SEQ ID NO: 3162795 - RNA, 19 nt, Artificial Sequence
  Description of Artificial Sequence: Synthetic oligonucleotide
uccucagguggaguggugc

SEQ ID NO: 3162796 - RNA, 19 nt, Artificial Sequence
  Description of Artificial Sequence: Synthetic oligonucleotide
cucacaggccacgugcagg

SEQ ID NO: 3162797 - RNA, 19 nt, Artificial Sequence
  Description of Artificial Sequence: Synthetic oligonucleotide
gcagcucacaucgagcggg

SEQ ID NO: 3162798 - RNA, 19 nt, Artificial Sequence
  Description of Artificial Sequence: Synthetic oligonucleotide
gaggccacagcagcagcgg

SEQ ID NO: 3162799 - RNA, 19 nt, Artificial Sequence
  Description of Artificial Sequence: Synthetic oligonucleotide
cucgcaggccuggagaagc

SEQ ID NO: 3162800 - RNA, 19 nt, Artificial Sequence
  Description of Artificial Sequence: Synthetic oligonucleotide
cugguaguggccgcguugc

SEQ ID NO: 3162801 - RNA, 19 nt, Artificial Sequence
  Description of Artificial Sequence: Synthetic oligonucleotide
cccacuuugguguacagca

SEQ ID NO: 3162802 - RNA, 19 nt, Artificial Sequence
  Description of Artificial Sequence: Synthetic oligonucleotide
auuuguccucacccagcag

SEQ ID NO: 3162803 - RNA, 19 nt, Artificial Sequence
  Description of Artificial Sequence: Synthetic oligonucleotide
gcagcagcagcuccagugg

SEQ ID NO: 3162804 - RNA, 19 nt, Artificial Sequence
  Description of Artificial Sequence: Synthetic oligonucleotide
acucggggcgugcaagcuc

SEQ ID NO: 3162805 - RNA, 19 nt, Artificial Sequence
  Description of Artificial Sequence: Synthetic oligonucleotide
gccaccaccgucucgcagg

SEQ ID NO: 3162806 - RNA, 19 nt, Artificial Sequence
  Description of Artificial Sequence: Synthetic oligonucleotide
cucacaucgagcggggcug

SEQ ID NO: 3162807 - RNA, 19 nt, Artificial Sequence
  Description of Artificial Sequence: Synthetic oligonucleotide
agggaugugccaccgcccu

SEQ ID NO: 3162808 - RNA, 19 nt, Artificial Sequence
  Description of Artificial Sequence: Synthetic oligonucleotide
aucgagcggggcuggcggc

SEQ ID NO: 3162809 - RNA, 19 nt, Artificial Sequence
  Description of Artificial Sequence: Synthetic oligonucleotide
uggaguggugcugguagug

SEQ ID NO: 3162810 - RNA, 19 nt, Artificial Sequence
  Description of Artificial Sequence: Synthetic oligonucleotide
cuggagaagcuccguggcc

SEQ ID NO: 3162811 - RNA, 19 nt, Artificial Sequence
  Description of Artificial Sequence: Synthetic oligonucleotide
gaggaggccacagcagcag

SEQ ID NO: 3162812 - RNA, 19 nt, Artificial Sequence
  Description of Artificial Sequence: Synthetic oligonucleotide
agccacgucgguccaggag

SEQ ID NO: 3162813 - RNA, 19 nt, Artificial Sequence
  Description of Artificial Sequence: Synthetic oligonucleotide
guggugcugguaguggccg

SEQ ID NO: 3162814 - RNA, 19 nt, Artificial Sequence
  Description of Artificial Sequence: Synthetic oligonucleotide
caggccuggagaagcuccg

SEQ ID NO: 3162815 - RNA, 19 nt, Artificial Sequence
  Description of Artificial Sequence: Synthetic oligonucleotide
ggggcgugcaagcucacag

SEQ ID NO: 3162816 - RNA, 19 nt, Artificial Sequence
  Description of Artificial Sequence: Synthetic oligonucleotide
ggcgugcaagcucacaggc

SEQ ID NO: 3162817 - RNA, 19 nt, Artificial Sequence
  Description of Artificial Sequence: Synthetic oligonucleotide
caagcagcagcaggcggcg

SEQ ID NO: 3162818 - RNA, 19 nt, Artificial Sequence
  Description of Artificial Sequence: Synthetic oligonucleotide
gccuggagaagcuccgugg

SEQ ID NO: 3162819 - RNA, 19 nt, Artificial Sequence
  Description of Artificial Sequence: Synthetic oligonucleotide
acuuugguguacagcacca

SEQ ID NO: 3162820 - RNA, 19 nt, Artificial Sequence
  Description of Artificial Sequence: Synthetic oligonucleotide
gaagcuccguggccgagca

SEQ ID NO: 3162821 - RNA, 19 nt, Artificial Sequence
  Description of Artificial Sequence: Synthetic oligonucleotide
uauuuuacuauaaaacacc

SEQ ID NO: 3162822 - RNA, 19 nt, Artificial Sequence
  Description of Artificial Sequence: Synthetic oligonucleotide
aaaccucucagcuuccucc

SEQ ID NO: 3162823 - RNA, 19 nt, Artificial Sequence
  Description of Artificial Sequence: Synthetic oligonucleotide
uuuaccugguggauaaacc

SEQ ID NO: 3162824 - RNA, 19 nt, Artificial Sequence
  Description of Artificial Sequence: Synthetic oligonucleotide
ugguggauaaaccucucag

SEQ ID NO: 3162825 - RNA, 19 nt, Artificial Sequence
  Description of Artificial Sequence: Synthetic oligonucleotide
uuuuacuauaaaacaccug

SEQ ID NO: 3162826 - RNA, 19 nt, Artificial Sequence
  Description of Artificial Sequence: Synthetic oligonucleotide
uuucuuggcuccugcaugg

SEQ ID NO: 3162827 - RNA, 19 nt, Artificial Sequence
  Description of Artificial Sequence: Synthetic oligonucleotide
uuacuauaaaacaccugca

SEQ ID NO: 3162828 - RNA, 19 nt, Artificial Sequence
  Description of Artificial Sequence: Synthetic oligonucleotide
uguugcaguuccugaaugg

SEQ ID NO: 3162829 - RNA, 19 nt, Artificial Sequence
  Description of Artificial Sequence: Synthetic oligonucleotide
aguaacuuccuuccgccuc

SEQ ID NO: 3162830 - RNA, 19 nt, Artificial Sequence
  Description of Artificial Sequence: Synthetic oligonucleotide
ucaguaacuuccuuccgcc

SEQ ID NO: 3162831 - RNA, 19 nt, Artificial Sequence
  Description of Artificial Sequence: Synthetic oligonucleotide
agggcuuucagcuccaucu

SEQ ID NO: 3162832 - RNA, 19 nt, Artificial Sequence
  Description of Artificial Sequence: Synthetic oligonucleotide
uacuugucccgcaacacgc

SEQ ID NO: 3162833 - RNA, 19 nt, Artificial Sequence
  Description of Artificial Sequence: Synthetic oligonucleotide
auacuugucccgcaacacg

SEQ ID NO: 3162834 - RNA, 19 nt, Artificial Sequence
  Description of Artificial Sequence: Synthetic oligonucleotide
ugcaguuccugaauggcug

SEQ ID NO: 3162835 - RNA, 19 nt, Artificial Sequence
  Description of Artificial Sequence: Synthetic oligonucleotide
acugccaccagagaaguuc

SEQ ID NO: 3162836 - RNA, 19 nt, Artificial Sequence
  Description of Artificial Sequence: Synthetic oligonucleotide
uuaccugguggauaaaccu

SEQ ID NO: 3162837 - RNA, 19 nt, Artificial Sequence
  Description of Artificial Sequence: Synthetic oligonucleotide
ucugcuucaggcuugguuu

SEQ ID NO: 3162838 - RNA, 19 nt, Artificial Sequence
  Description of Artificial Sequence: Synthetic oligonucleotide
uauaaaacaccugcaggca

SEQ ID NO: 3162839 - RNA, 19 nt, Artificial Sequence
  Description of Artificial Sequence: Synthetic oligonucleotide
cuuugaguuucuuggcucc

SEQ ID NO: 3162840 - RNA, 19 nt, Artificial Sequence
  Description of Artificial Sequence: Synthetic oligonucleotide
uguccuggugcucuggucu

SEQ ID NO: 3162841 - RNA, 19 nt, Artificial Sequence
  Description of Artificial Sequence: Synthetic oligonucleotide
agguguucgaggcuugccg

SEQ ID NO: 3162842 - RNA, 19 nt, Artificial Sequence
  Description of Artificial Sequence: Synthetic oligonucleotide
ugcagguccagaagguucc

SEQ ID NO: 3162843 - RNA, 19 nt, Artificial Sequence
  Description of Artificial Sequence: Synthetic oligonucleotide
cucaguaacuuccuuccgc

SEQ ID NO: 3162844 - RNA, 19 nt, Artificial Sequence
  Description of Artificial Sequence: Synthetic oligonucleotide
acuuccuuccgccucagca

SEQ ID NO: 3162845 - RNA, 19 nt, Artificial Sequence
  Description of Artificial Sequence: Synthetic oligonucleotide
uuucggaucucuuccuuca

SEQ ID NO: 3162846 - RNA, 19 nt, Artificial Sequence
  Description of Artificial Sequence: Synthetic oligonucleotide
auuuuacuauaaaacaccu

SEQ ID NO: 3162847 - RNA, 19 nt, Artificial Sequence
  Description of Artificial Sequence: Synthetic oligonucleotide
ugaggggugccucucacac

SEQ ID NO: 3162848 - RNA, 19 nt, Artificial Sequence
  Description of Artificial Sequence: Synthetic oligonucleotide
ugcccugcugcucagggcc

SEQ ID NO: 3162849 - RNA, 19 nt, Artificial Sequence
  Description of Artificial Sequence: Synthetic oligonucleotide
ucguuucuguugcaguucc

SEQ ID NO: 3162850 - RNA, 19 nt, Artificial Sequence
  Description of Artificial Sequence: Synthetic oligonucleotide
cuugcugucuccuccugcc

SEQ ID NO: 3162851 - RNA, 19 nt, Artificial Sequence
  Description of Artificial Sequence: Synthetic oligonucleotide
ccuucuuaggcacagcugg

SEQ ID NO: 3162852 - RNA, 19 nt, Artificial Sequence
  Description of Artificial Sequence: Synthetic oligonucleotide
ugaguuucuuggcuccugc

SEQ ID NO: 3162853 - RNA, 19 nt, Artificial Sequence
  Description of Artificial Sequence: Synthetic oligonucleotide
ucuuaggcacagcuggcca

SEQ ID NO: 3162854 - RNA, 19 nt, Artificial Sequence
  Description of Artificial Sequence: Synthetic oligonucleotide
uuucuguugcaguuccuga

SEQ ID NO: 3162855 - RNA, 19 nt, Artificial Sequence
  Description of Artificial Sequence: Synthetic oligonucleotide
aaguucuuccgaggcuucc

SEQ ID NO: 3162856 - RNA, 19 nt, Artificial Sequence
  Description of Artificial Sequence: Synthetic oligonucleotide
ugguuuaccugguggauaa

SEQ ID NO: 3162857 - RNA, 19 nt, Artificial Sequence
  Description of Artificial Sequence: Synthetic oligonucleotide
cuuccuuccgccucagcag

SEQ ID NO: 3162858 - RNA, 19 nt, Artificial Sequence
  Description of Artificial Sequence: Synthetic oligonucleotide
uuggcgucucuguaccugg

SEQ ID NO: 3162859 - RNA, 19 nt, Artificial Sequence
  Description of Artificial Sequence: Synthetic oligonucleotide
ucgcuuggacgccagcagg

SEQ ID NO: 3162860 - RNA, 19 nt, Artificial Sequence
  Description of Artificial Sequence: Synthetic oligonucleotide
auaaaacaccugcaggcau

SEQ ID NO: 3162861 - RNA, 19 nt, Artificial Sequence
  Description of Artificial Sequence: Synthetic oligonucleotide
cagagaaguucuuccgagg

SEQ ID NO: 3162862 - RNA, 19 nt, Artificial Sequence
  Description of Artificial Sequence: Synthetic oligonucleotide
ugggguuccaugaggggug

SEQ ID NO: 3162863 - RNA, 19 nt, Artificial Sequence
  Description of Artificial Sequence: Synthetic oligonucleotide
uggagugacugccaccaga

SEQ ID NO: 3162864 - RNA, 19 nt, Artificial Sequence
  Description of Artificial Sequence: Synthetic oligonucleotide
ucuguugcaguuccugaau

SEQ ID NO: 3162865 - RNA, 19 nt, Artificial Sequence
  Description of Artificial Sequence: Synthetic oligonucleotide
uccuucuuaggcacagcug

SEQ ID NO: 3162866 - RNA, 19 nt, Artificial Sequence
  Description of Artificial Sequence: Synthetic oligonucleotide
caccagagaaguucuuccg

SEQ ID NO: 3162867 - RNA, 19 nt, Artificial Sequence
  Description of Artificial Sequence: Synthetic oligonucleotide
aguucuuccgaggcuuccc

SEQ ID NO: 3162868 - RNA, 19 nt, Artificial Sequence
  Description of Artificial Sequence: Synthetic oligonucleotide
uuuucggaucucuuccuuc

SEQ ID NO: 3162869 - RNA, 19 nt, Artificial Sequence
  Description of Artificial Sequence: Synthetic oligonucleotide
gguggauaaaccucucagc

SEQ ID NO: 3162870 - RNA, 19 nt, Artificial Sequence
  Description of Artificial Sequence: Synthetic oligonucleotide
ucuuccuucaguucccguu

SEQ ID NO: 3162871 - RNA, 19 nt, Artificial Sequence
  Description of Artificial Sequence: Synthetic oligonucleotide
guugccucugccccucucg

SEQ ID NO: 3162872 - RNA, 19 nt, Artificial Sequence
  Description of Artificial Sequence: Synthetic oligonucleotide
ucuccggucuguccuuagg

SEQ ID NO: 3162873 - RNA, 19 nt, Artificial Sequence
  Description of Artificial Sequence: Synthetic oligonucleotide
uucuguugcaguuccugaa

SEQ ID NO: 3162874 - RNA, 19 nt, Artificial Sequence
  Description of Artificial Sequence: Synthetic oligonucleotide
guggauaaaccucucagcu

SEQ ID NO: 3162875 - RNA, 19 nt, Artificial Sequence
  Description of Artificial Sequence: Synthetic oligonucleotide
uccgaggcuucccaaaguc

SEQ ID NO: 3162876 - RNA, 19 nt, Artificial Sequence
  Description of Artificial Sequence: Synthetic oligonucleotide
ugccccucucgcuuggacg

SEQ ID NO: 3162877 - RNA, 19 nt, Artificial Sequence
  Description of Artificial Sequence: Synthetic oligonucleotide
uaccugguggauaaaccuc

SEQ ID NO: 3162878 - RNA, 19 nt, Artificial Sequence
  Description of Artificial Sequence: Synthetic oligonucleotide
aguuucuuggcuccugcau

SEQ ID NO: 3162879 - RNA, 19 nt, Artificial Sequence
  Description of Artificial Sequence: Synthetic oligonucleotide
uucaguucccguucccugu

SEQ ID NO: 3162880 - RNA, 19 nt, Artificial Sequence
  Description of Artificial Sequence: Synthetic oligonucleotide
ucugggcucguuucuguug

SEQ ID NO: 3162881 - RNA, 19 nt, Artificial Sequence
  Description of Artificial Sequence: Synthetic oligonucleotide
guugcaguuccugaauggc

SEQ ID NO: 3162882 - RNA, 19 nt, Artificial Sequence
  Description of Artificial Sequence: Synthetic oligonucleotide
accagagaaguucuuccga

SEQ ID NO: 3162883 - RNA, 19 nt, Artificial Sequence
  Description of Artificial Sequence: Synthetic oligonucleotide
uuccgccucagcaggcugg

SEQ ID NO: 3162884 - RNA, 19 nt, Artificial Sequence
  Description of Artificial Sequence: Synthetic oligonucleotide
gucgaggcuguccuggugc

SEQ ID NO: 3162885 - RNA, 19 nt, Artificial Sequence
  Description of Artificial Sequence: Synthetic oligonucleotide
uccuuagguggccugugcu

SEQ ID NO: 3162886 - RNA, 19 nt, Artificial Sequence
  Description of Artificial Sequence: Synthetic oligonucleotide
uucuuaggcacagcuggcc

SEQ ID NO: 3162887 - RNA, 19 nt, Artificial Sequence
  Description of Artificial Sequence: Synthetic oligonucleotide
cuucuuaggcacagcuggc

SEQ ID NO: 3162888 - RNA, 19 nt, Artificial Sequence
  Description of Artificial Sequence: Synthetic oligonucleotide
cugggcucguuucuguugc

SEQ ID NO: 3162889 - RNA, 19 nt, Artificial Sequence
  Description of Artificial Sequence: Synthetic oligonucleotide
gugacugccaccagagaag

SEQ ID NO: 3162890 - RNA, 19 nt, Artificial Sequence
  Description of Artificial Sequence: Synthetic oligonucleotide
acugccgccugguuuaccu

SEQ ID NO: 3162891 - RNA, 19 nt, Artificial Sequence
  Description of Artificial Sequence: Synthetic oligonucleotide
uucggaucucuuccuucag

SEQ ID NO: 3162892 - RNA, 19 nt, Artificial Sequence
  Description of Artificial Sequence: Synthetic oligonucleotide
uaaaccucucagcuuccuc

SEQ ID NO: 3162893 - RNA, 19 nt, Artificial Sequence
  Description of Artificial Sequence: Synthetic oligonucleotide
ugggucgaggcuguccugg

SEQ ID NO: 3162894 - RNA, 19 nt, Artificial Sequence
  Description of Artificial Sequence: Synthetic oligonucleotide
uggccugugcucagccucg

SEQ ID NO: 3162895 - RNA, 19 nt, Artificial Sequence
  Description of Artificial Sequence: Synthetic oligonucleotide
ucccgcaacacgcuuucac

SEQ ID NO: 3162896 - RNA, 19 nt, Artificial Sequence
  Description of Artificial Sequence: Synthetic oligonucleotide
cuuccgaggcuucccaaag

SEQ ID NO: 3162897 - RNA, 19 nt, Artificial Sequence
  Description of Artificial Sequence: Synthetic oligonucleotide
cuuaggcacagcuggccac

SEQ ID NO: 3162898 - RNA, 19 nt, Artificial Sequence
  Description of Artificial Sequence: Synthetic oligonucleotide
ucggaucucuuccuucagu

SEQ ID NO: 3162899 - RNA, 19 nt, Artificial Sequence
  Description of Artificial Sequence: Synthetic oligonucleotide
uccugcaugggucgaggcu

SEQ ID NO: 3162900 - RNA, 19 nt, Artificial Sequence
  Description of Artificial Sequence: Synthetic oligonucleotide
uuaggcacagcuggccacc

SEQ ID NO: 3162901 - RNA, 19 nt, Artificial Sequence
  Description of Artificial Sequence: Synthetic oligonucleotide
agaaguucuuccgaggcuu

SEQ ID NO: 3162902 - RNA, 19 nt, Artificial Sequence
  Description of Artificial Sequence: Synthetic oligonucleotide
cuguugcaguuccugaaug

SEQ ID NO: 3162903 - RNA, 19 nt, Artificial Sequence
  Description of Artificial Sequence: Synthetic oligonucleotide
guaacuuccuuccgccuca

SEQ ID NO: 3162904 - RNA, 19 nt, Artificial Sequence
  Description of Artificial Sequence: Synthetic oligonucleotide
ugugcucagccucgcuugc

SEQ ID NO: 3162905 - RNA, 19 nt, Artificial Sequence
  Description of Artificial Sequence: Synthetic oligonucleotide
cauacuugucccgcaacac

SEQ ID NO: 3162906 - RNA, 19 nt, Artificial Sequence
  Description of Artificial Sequence: Synthetic oligonucleotide
accagcgcuggauggugac

SEQ ID NO: 3162907 - RNA, 19 nt, Artificial Sequence
  Description of Artificial Sequence: Synthetic oligonucleotide
uguaccuggcggcgguacc

SEQ ID NO: 3162908 - RNA, 19 nt, Artificial Sequence
  Description of Artificial Sequence: Synthetic oligonucleotide
ucuuccgaggcuucccaaa

SEQ ID NO: 3162909 - RNA, 19 nt, Artificial Sequence
  Description of Artificial Sequence: Synthetic oligonucleotide
gauaaaccucucagcuucc

SEQ ID NO: 3162910 - RNA, 19 nt, Artificial Sequence
  Description of Artificial Sequence: Synthetic oligonucleotide
gccuuuucggaucucuucc

SEQ ID NO: 3162911 - RNA, 19 nt, Artificial Sequence
  Description of Artificial Sequence: Synthetic oligonucleotide
ucuguccuuagguggccug

SEQ ID NO: 3162912 - RNA, 19 nt, Artificial Sequence
  Description of Artificial Sequence: Synthetic oligonucleotide
ucucgcuuggacgccagca

SEQ ID NO: 3162913 - RNA, 19 nt, Artificial Sequence
  Description of Artificial Sequence: Synthetic oligonucleotide
agcgcuggauggugacugc

SEQ ID NO: 3162914 - RNA, 19 nt, Artificial Sequence
  Description of Artificial Sequence: Synthetic oligonucleotide
uggauggugacugccgccu

SEQ ID NO: 3162915 - RNA, 19 nt, Artificial Sequence
  Description of Artificial Sequence: Synthetic oligonucleotide
uccuccucaguaacuuccu

SEQ ID NO: 3162916 - RNA, 19 nt, Artificial Sequence
  Description of Artificial Sequence: Synthetic oligonucleotide
uuagguggccugugcucag

SEQ ID NO: 3162917 - RNA, 19 nt, Artificial Sequence
  Description of Artificial Sequence: Synthetic oligonucleotide
cucgcuuggacgccagcag

SEQ ID NO: 3162918 - RNA, 19 nt, Artificial Sequence
  Description of Artificial Sequence: Synthetic oligonucleotide
ugucccgcaacacgcuuuc

SEQ ID NO: 3162919 - RNA, 19 nt, Artificial Sequence
  Description of Artificial Sequence: Synthetic oligonucleotide
uugccucugccccucucgc

SEQ ID NO: 3162920 - RNA, 19 nt, Artificial Sequence
  Description of Artificial Sequence: Synthetic oligonucleotide
ccagagaaguucuuccgag

SEQ ID NO: 3162921 - RNA, 19 nt, Artificial Sequence
  Description of Artificial Sequence: Synthetic oligonucleotide
uaagacuugagauauaugg

SEQ ID NO: 3162922 - RNA, 19 nt, Artificial Sequence
  Description of Artificial Sequence: Synthetic oligonucleotide
aaggauuucucacauuuac

SEQ ID NO: 3162923 - RNA, 19 nt, Artificial Sequence
  Description of Artificial Sequence: Synthetic oligonucleotide
uguaugaagggucugaugu

SEQ ID NO: 3162924 - RNA, 19 nt, Artificial Sequence
  Description of Artificial Sequence: Synthetic oligonucleotide
auucauuacauuuguaagg

SEQ ID NO: 3162925 - RNA, 19 nt, Artificial Sequence
  Description of Artificial Sequence: Synthetic oligonucleotide
aaggauuucucacauucac

SEQ ID NO: 3162926 - RNA, 19 nt, Artificial Sequence
  Description of Artificial Sequence: Synthetic oligonucleotide
auuuguaagguuucucucc

SEQ ID NO: 3162927 - RNA, 19 nt, Artificial Sequence
  Description of Artificial Sequence: Synthetic oligonucleotide
auuuacuacaucuguaagg

SEQ ID NO: 3162928 - RNA, 19 nt, Artificial Sequence
  Description of Artificial Sequence: Synthetic oligonucleotide
uuuauuacauucauuacau

SEQ ID NO: 3162929 - RNA, 19 nt, Artificial Sequence
  Description of Artificial Sequence: Synthetic oligonucleotide
uguaugacuucucuuaugc

SEQ ID NO: 3162930 - RNA, 19 nt, Artificial Sequence
  Description of Artificial Sequence: Synthetic oligonucleotide
uuucucuccuguaugaagg

SEQ ID NO: 3162931 - RNA, 19 nt, Artificial Sequence
  Description of Artificial Sequence: Synthetic oligonucleotide
auucacuacauuuguaagg

SEQ ID NO: 3162932 - RNA, 19 nt, Artificial Sequence
  Description of Artificial Sequence: Synthetic oligonucleotide
gaaaggauuucucacauuc

SEQ ID NO: 3162933 - RNA, 19 nt, Artificial Sequence
  Description of Artificial Sequence: Synthetic oligonucleotide
uauuacauucauuacauuu

SEQ ID NO: 3162934 - RNA, 19 nt, Artificial Sequence
  Description of Artificial Sequence: Synthetic oligonucleotide
uuuacuacaucuguaaggu

SEQ ID NO: 3162935 - RNA, 19 nt, Artificial Sequence
  Description of Artificial Sequence: Synthetic oligonucleotide
aucuguaagguuucucucc

SEQ ID NO: 3162936 - RNA, 19 nt, Artificial Sequence
  Description of Artificial Sequence: Synthetic oligonucleotide
ucucacauuuacuacaucu

SEQ ID NO: 3162937 - RNA, 19 nt, Artificial Sequence
  Description of Artificial Sequence: Synthetic oligonucleotide
uaaaggauuucucacauuu

SEQ ID NO: 3162938 - RNA, 19 nt, Artificial Sequence
  Description of Artificial Sequence: Synthetic oligonucleotide
cauucauuacauuuguaag

SEQ ID NO: 3162939 - RNA, 19 nt, Artificial Sequence
  Description of Artificial Sequence: Synthetic oligonucleotide
guuuauuacauucauuaca

SEQ ID NO: 3162940 - RNA, 19 nt, Artificial Sequence
  Description of Artificial Sequence: Synthetic oligonucleotide
uaaaggguuuauuacauuc

SEQ ID NO: 3162941 - RNA, 19 nt, Artificial Sequence
  Description of Artificial Sequence: Synthetic oligonucleotide
ucugauguugucuuaggug

SEQ ID NO: 3162942 - RNA, 19 nt, Artificial Sequence
  Description of Artificial Sequence: Synthetic oligonucleotide
acuugagauauauggaaag

SEQ ID NO: 3162943 - RNA, 19 nt, Artificial Sequence
  Description of Artificial Sequence: Synthetic oligonucleotide
uguguaaaggauuucucac

SEQ ID NO: 3162944 - RNA, 19 nt, Artificial Sequence
  Description of Artificial Sequence: Synthetic oligonucleotide
acauucauuacauuuguaa

SEQ ID NO: 3162945 - RNA, 19 nt, Artificial Sequence
  Description of Artificial Sequence: Synthetic oligonucleotide
uauggaaaggauuucucac

SEQ ID NO: 3162946 - RNA, 19 nt, Artificial Sequence
  Description of Artificial Sequence: Synthetic oligonucleotide
auuucucacauuuacuaca

SEQ ID NO: 3162947 - RNA, 19 nt, Artificial Sequence
  Description of Artificial Sequence: Synthetic oligonucleotide
uucucuuaugcuuucuaag

SEQ ID NO: 3162948 - RNA, 19 nt, Artificial Sequence
  Description of Artificial Sequence: Synthetic oligonucleotide
ucucuuaugcuuucuaaga

SEQ ID NO: 3162949 - RNA, 19 nt, Artificial Sequence
  Description of Artificial Sequence: Synthetic oligonucleotide
ugagauauauggaaaggau

SEQ ID NO: 3162950 - RNA, 19 nt, Artificial Sequence
  Description of Artificial Sequence: Synthetic oligonucleotide
uuacauucauuacauuugu

SEQ ID NO: 3162951 - RNA, 19 nt, Artificial Sequence
  Description of Artificial Sequence: Synthetic oligonucleotide
uucauuacauuuguaaggu

SEQ ID NO: 3162952 - RNA, 19 nt, Artificial Sequence
  Description of Artificial Sequence: Synthetic oligonucleotide
acauuuguaagguuucucu

SEQ ID NO: 3162953 - RNA, 19 nt, Artificial Sequence
  Description of Artificial Sequence: Synthetic oligonucleotide
auuacauucauuacauuug

SEQ ID NO: 3162954 - RNA, 19 nt, Artificial Sequence
  Description of Artificial Sequence: Synthetic oligonucleotide
uuaggugugaacccugugu

SEQ ID NO: 3162955 - RNA, 19 nt, Artificial Sequence
  Description of Artificial Sequence: Synthetic oligonucleotide
uguaaaggauuucucacau

SEQ ID NO: 3162956 - RNA, 19 nt, Artificial Sequence
  Description of Artificial Sequence: Synthetic oligonucleotide
uacuacaucuguaagguuu

SEQ ID NO: 3162957 - RNA, 19 nt, Artificial Sequence
  Description of Artificial Sequence: Synthetic oligonucleotide
guugucuuaggugugaacc

SEQ ID NO: 3162958 - RNA, 19 nt, Artificial Sequence
  Description of Artificial Sequence: Synthetic oligonucleotide
cucacauucacuacauuug

SEQ ID NO: 3162959 - RNA, 19 nt, Artificial Sequence
  Description of Artificial Sequence: Synthetic oligonucleotide
ucacauuuacuacaucugu

SEQ ID NO: 3162960 - RNA, 19 nt, Artificial Sequence
  Description of Artificial Sequence: Synthetic oligonucleotide
ucuuaugcuuucuaagacu

SEQ ID NO: 3162961 - RNA, 19 nt, Artificial Sequence
  Description of Artificial Sequence: Synthetic oligonucleotide
auuucucacauucacuaca

SEQ ID NO: 3162962 - RNA, 19 nt, Artificial Sequence
  Description of Artificial Sequence: Synthetic oligonucleotide
uuuguaagguuucucuccu

SEQ ID NO: 3162963 - RNA, 19 nt, Artificial Sequence
  Description of Artificial Sequence: Synthetic oligonucleotide
uucacuacauuuguaaggu

SEQ ID NO: 3162964 - RNA, 19 nt, Artificial Sequence
  Description of Artificial Sequence: Synthetic oligonucleotide
acaucuguaagguuucucu

SEQ ID NO: 3162965 - RNA, 19 nt, Artificial Sequence
  Description of Artificial Sequence: Synthetic oligonucleotide
uuucuaagacuugagauau

SEQ ID NO: 3162966 - RNA, 19 nt, Artificial Sequence
  Description of Artificial Sequence: Synthetic oligonucleotide
aagguuucucuccuguaug

SEQ ID NO: 3162967 - RNA, 19 nt, Artificial Sequence
  Description of Artificial Sequence: Synthetic oligonucleotide
acauucacuacauuuguaa

SEQ ID NO: 3162968 - RNA, 19 nt, Artificial Sequence
  Description of Artificial Sequence: Synthetic oligonucleotide
auauggaaaggauuucuca

SEQ ID NO: 3162969 - RNA, 19 nt, Artificial Sequence
  Description of Artificial Sequence: Synthetic oligonucleotide
uugagauauauggaaagga

SEQ ID NO: 3162970 - RNA, 19 nt, Artificial Sequence
  Description of Artificial Sequence: Synthetic oligonucleotide
gauuucucacauuuacuac

SEQ ID NO: 3162971 - RNA, 19 nt, Artificial Sequence
  Description of Artificial Sequence: Synthetic oligonucleotide
auuacauuuguaagguuuc

SEQ ID NO: 3162972 - RNA, 19 nt, Artificial Sequence
  Description of Artificial Sequence: Synthetic oligonucleotide
uguaagguuucucuccugu

SEQ ID NO: 3162973 - RNA, 19 nt, Artificial Sequence
  Description of Artificial Sequence: Synthetic oligonucleotide
uaugacuucucuuaugcuu

SEQ ID NO: 3162974 - RNA, 19 nt, Artificial Sequence
  Description of Artificial Sequence: Synthetic oligonucleotide
uaugcuuucuaagacuuga

SEQ ID NO: 3162975 - RNA, 19 nt, Artificial Sequence
  Description of Artificial Sequence: Synthetic oligonucleotide
ucucacauucacuacauuu

SEQ ID NO: 3162976 - RNA, 19 nt, Artificial Sequence
  Description of Artificial Sequence: Synthetic oligonucleotide
uauauggaaaggauuucuc

SEQ ID NO: 3162977 - RNA, 19 nt, Artificial Sequence
  Description of Artificial Sequence: Synthetic oligonucleotide
acauuuacuacaucuguaa

SEQ ID NO: 3162978 - RNA, 19 nt, Artificial Sequence
  Description of Artificial Sequence: Synthetic oligonucleotide
cuugagauauauggaaagg

SEQ ID NO: 3162979 - RNA, 19 nt, Artificial Sequence
  Description of Artificial Sequence: Synthetic oligonucleotide
agacuugagauauauggaa

SEQ ID NO: 3162980 - RNA, 19 nt, Artificial Sequence
  Description of Artificial Sequence: Synthetic oligonucleotide
ucacauucacuacauuugu

SEQ ID NO: 3162981 - RNA, 19 nt, Artificial Sequence
  Description of Artificial Sequence: Synthetic oligonucleotide
cauucacuacauuuguaag

SEQ ID NO: 3162982 - RNA, 19 nt, Artificial Sequence
  Description of Artificial Sequence: Synthetic oligonucleotide
aaggguuuauuacauucau

SEQ ID NO: 3162983 - RNA, 19 nt, Artificial Sequence
  Description of Artificial Sequence: Synthetic oligonucleotide
ucuguaagguuucucuccu

SEQ ID NO: 3162984 - RNA, 19 nt, Artificial Sequence
  Description of Artificial Sequence: Synthetic oligonucleotide
ucuaagacuugagauauau

SEQ ID NO: 3162985 - RNA, 19 nt, Artificial Sequence
  Description of Artificial Sequence: Synthetic oligonucleotide
cucacauuuacuacaucug

SEQ ID NO: 3162986 - RNA, 19 nt, Artificial Sequence
  Description of Artificial Sequence: Synthetic oligonucleotide
ugcuuucuaagacuugaga

SEQ ID NO: 3162987 - RNA, 19 nt, Artificial Sequence
  Description of Artificial Sequence: Synthetic oligonucleotide
uaugaagggucugauguug

SEQ ID NO: 3162988 - RNA, 19 nt, Artificial Sequence
  Description of Artificial Sequence: Synthetic oligonucleotide
uugucuuaggugugaaccc

SEQ ID NO: 3162989 - RNA, 19 nt, Artificial Sequence
  Description of Artificial Sequence: Synthetic oligonucleotide
ugugaacccuguguaaagg

SEQ ID NO: 3162990 - RNA, 19 nt, Artificial Sequence
  Description of Artificial Sequence: Synthetic oligonucleotide
uuucucuccuguaugacuu

SEQ ID NO: 3162991 - RNA, 19 nt, Artificial Sequence
  Description of Artificial Sequence: Synthetic oligonucleotide
aaaggguuuauuacauuca

SEQ ID NO: 3162992 - RNA, 19 nt, Artificial Sequence
  Description of Artificial Sequence: Synthetic oligonucleotide
agauauauggaaaggauuu

SEQ ID NO: 3162993 - RNA, 19 nt, Artificial Sequence
  Description of Artificial Sequence: Synthetic oligonucleotide
aagacuugagauauaugga

SEQ ID NO: 3162994 - RNA, 19 nt, Artificial Sequence
  Description of Artificial Sequence: Synthetic oligonucleotide
uaagguuucucuccuguau

SEQ ID NO: 3162995 - RNA, 19 nt, Artificial Sequence
  Description of Artificial Sequence: Synthetic oligonucleotide
uccuguaugacuucucuua

SEQ ID NO: 3162996 - RNA, 19 nt, Artificial Sequence
  Description of Artificial Sequence: Synthetic oligonucleotide
cauuuacuacaucuguaag

SEQ ID NO: 3162997 - RNA, 19 nt, Artificial Sequence
  Description of Artificial Sequence: Synthetic oligonucleotide
auggaaaggauuucucaca

SEQ ID NO: 3162998 - RNA, 19 nt, Artificial Sequence
  Description of Artificial Sequence: Synthetic oligonucleotide
auauauggaaaggauuucu

SEQ ID NO: 3162999 - RNA, 19 nt, Artificial Sequence
  Description of Artificial Sequence: Synthetic oligonucleotide
guuucucuccuguaugaag

SEQ ID NO: 3163000 - RNA, 19 nt, Artificial Sequence
  Description of Artificial Sequence: Synthetic oligonucleotide
uuucucacauuuacuacau

SEQ ID NO: 3163001 - RNA, 19 nt, Artificial Sequence
  Description of Artificial Sequence: Synthetic oligonucleotide
cucuuaugcuuucuaagac

SEQ ID NO: 3163002 - RNA, 19 nt, Artificial Sequence
  Description of Artificial Sequence: Synthetic oligonucleotide
uggaaaggauuucucacau

SEQ ID NO: 3163003 - RNA, 19 nt, Artificial Sequence
  Description of Artificial Sequence: Synthetic oligonucleotide
ucuccuguaugacuucucu

SEQ ID NO: 3163004 - RNA, 19 nt, Artificial Sequence
  Description of Artificial Sequence: Synthetic oligonucleotide
uucucuccuguaugaaggg

SEQ ID NO: 3163005 - RNA, 19 nt, Artificial Sequence
  Description of Artificial Sequence: Synthetic oligonucleotide
ggguuuauuacauucauua

SEQ ID NO: 3163006 - RNA, 19 nt, Artificial Sequence
  Description of Artificial Sequence: Synthetic oligonucleotide
cauuuguaagguuucucuc

SEQ ID NO: 3163007 - RNA, 19 nt, Artificial Sequence
  Description of Artificial Sequence: Synthetic oligonucleotide
uuucucacauucacuacau

SEQ ID NO: 3163008 - RNA, 19 nt, Artificial Sequence
  Description of Artificial Sequence: Synthetic oligonucleotide
gauuucucacauucacuac

SEQ ID NO: 3163009 - RNA, 19 nt, Artificial Sequence
  Description of Artificial Sequence: Synthetic oligonucleotide
ucuccuguaugaagggucu

SEQ ID NO: 3163010 - RNA, 19 nt, Artificial Sequence
  Description of Artificial Sequence: Synthetic oligonucleotide
acuacaucuguaagguuuc

SEQ ID NO: 3163011 - RNA, 19 nt, Artificial Sequence
  Description of Artificial Sequence: Synthetic oligonucleotide
uuaugcuuucuaagacuug

SEQ ID NO: 3163012 - RNA, 19 nt, Artificial Sequence
  Description of Artificial Sequence: Synthetic oligonucleotide
cuuucuaagacuugagaua

SEQ ID NO: 3163013 - RNA, 19 nt, Artificial Sequence
  Description of Artificial Sequence: Synthetic oligonucleotide
uaggugugaacccugugua

SEQ ID NO: 3163014 - RNA, 19 nt, Artificial Sequence
  Description of Artificial Sequence: Synthetic oligonucleotide
aagggucugauguugucuu

SEQ ID NO: 3163015 - RNA, 19 nt, Artificial Sequence
  Description of Artificial Sequence: Synthetic oligonucleotide
ugauguugucuuaggugug

SEQ ID NO: 3163016 - RNA, 19 nt, Artificial Sequence
  Description of Artificial Sequence: Synthetic oligonucleotide
ugaacccuguguaaaggau

SEQ ID NO: 3163017 - RNA, 19 nt, Artificial Sequence
  Description of Artificial Sequence: Synthetic oligonucleotide
cuguguaaaggauuucuca

SEQ ID NO: 3163018 - RNA, 19 nt, Artificial Sequence
  Description of Artificial Sequence: Synthetic oligonucleotide
gauauauggaaaggauuuc

SEQ ID NO: 3163019 - RNA, 19 nt, Artificial Sequence
  Description of Artificial Sequence: Synthetic oligonucleotide
aaaggauuucucacauuca

SEQ ID NO: 3163020 - RNA, 19 nt, Artificial Sequence
  Description of Artificial Sequence: Synthetic oligonucleotide
guguaaaggauuucucaca

SEQ ID NO: 3163021 - RNA, 19 nt, Artificial Sequence
  Description of Artificial Sequence: Synthetic oligonucleotide
ugagaaaauggacacaggg

SEQ ID NO: 3163022 - RNA, 19 nt, Artificial Sequence
  Description of Artificial Sequence: Synthetic oligonucleotide
ugaauacugaccuggaugg

SEQ ID NO: 3163023 - RNA, 19 nt, Artificial Sequence
  Description of Artificial Sequence: Synthetic oligonucleotide
aaagguuugaauacugacc

SEQ ID NO: 3163024 - RNA, 19 nt, Artificial Sequence
  Description of Artificial Sequence: Synthetic oligonucleotide
aagguuugaauacugaccu

SEQ ID NO: 3163025 - RNA, 19 nt, Artificial Sequence
  Description of Artificial Sequence: Synthetic oligonucleotide
ucuuccaucagccccaggg

SEQ ID NO: 3163026 - RNA, 19 nt, Artificial Sequence
  Description of Artificial Sequence: Synthetic oligonucleotide
agaugaaagguuugaauac

SEQ ID NO: 3163027 - RNA, 19 nt, Artificial Sequence
  Description of Artificial Sequence: Synthetic oligonucleotide
ugagcuguuucccugaucc

SEQ ID NO: 3163028 - RNA, 19 nt, Artificial Sequence
  Description of Artificial Sequence: Synthetic oligonucleotide
agaaaauggacacagggcu

SEQ ID NO: 3163029 - RNA, 19 nt, Artificial Sequence
  Description of Artificial Sequence: Synthetic oligonucleotide
aagaugaaagguuugaaua

SEQ ID NO: 3163030 - RNA, 19 nt, Artificial Sequence
  Description of Artificial Sequence: Synthetic oligonucleotide
uugaauacugaccuggaug

SEQ ID NO: 3163031 - RNA, 19 nt, Artificial Sequence
  Description of Artificial Sequence: Synthetic oligonucleotide
gauagaguaagugucgacg

SEQ ID NO: 3163032 - RNA, 19 nt, Artificial Sequence
  Description of Artificial Sequence: Synthetic oligonucleotide
uguggcagugagaaaaugg

SEQ ID NO: 3163033 - RNA, 19 nt, Artificial Sequence
  Description of Artificial Sequence: Synthetic oligonucleotide
aaagaugaaagguuugaau

SEQ ID NO: 3163034 - RNA, 19 nt, Artificial Sequence
  Description of Artificial Sequence: Synthetic oligonucleotide
agugagaaaauggacacag

SEQ ID NO: 3163035 - RNA, 19 nt, Artificial Sequence
  Description of Artificial Sequence: Synthetic oligonucleotide
gaaagguuugaauacugac

SEQ ID NO: 3163036 - RNA, 19 nt, Artificial Sequence
  Description of Artificial Sequence: Synthetic oligonucleotide
uccaucaucaccucugcug

SEQ ID NO: 3163037 - RNA, 19 nt, Artificial Sequence
  Description of Artificial Sequence: Synthetic oligonucleotide
cuuugugggauccuggggc

SEQ ID NO: 3163038 - RNA, 19 nt, Artificial Sequence
  Description of Artificial Sequence: Synthetic oligonucleotide
uaagugucgacgauccacc

SEQ ID NO: 3163039 - RNA, 19 nt, Artificial Sequence
  Description of Artificial Sequence: Synthetic oligonucleotide
uccacgauagaguaagugu

SEQ ID NO: 3163040 - RNA, 19 nt, Artificial Sequence
  Description of Artificial Sequence: Synthetic oligonucleotide
ucgacgauccaccugaguc

SEQ ID NO: 3163041 - RNA, 19 nt, Artificial Sequence
  Description of Artificial Sequence: Synthetic oligonucleotide
auuugccugagcuguuucc

SEQ ID NO: 3163042 - RNA, 19 nt, Artificial Sequence
  Description of Artificial Sequence: Synthetic oligonucleotide
cugggcuccaaauaugggg

SEQ ID NO: 3163043 - RNA, 19 nt, Artificial Sequence
  Description of Artificial Sequence: Synthetic oligonucleotide
uccugggcuccaaauaugg

SEQ ID NO: 3163044 - RNA, 19 nt, Artificial Sequence
  Description of Artificial Sequence: Synthetic oligonucleotide
uucaaagaugaaagguuug

SEQ ID NO: 3163045 - RNA, 19 nt, Artificial Sequence
  Description of Artificial Sequence: Synthetic oligonucleotide
gaggauguccaucaucacc

SEQ ID NO: 3163046 - RNA, 19 nt, Artificial Sequence
  Description of Artificial Sequence: Synthetic oligonucleotide
ugaaagguuugaauacuga

SEQ ID NO: 3163047 - RNA, 19 nt, Artificial Sequence
  Description of Artificial Sequence: Synthetic oligonucleotide
aagccuccagaguccaugc

SEQ ID NO: 3163048 - RNA, 19 nt, Artificial Sequence
  Description of Artificial Sequence: Synthetic oligonucleotide
guuucccugauccugcccg

SEQ ID NO: 3163049 - RNA, 19 nt, Artificial Sequence
  Description of Artificial Sequence: Synthetic oligonucleotide
gagaaaauggacacagggc

SEQ ID NO: 3163050 - RNA, 19 nt, Artificial Sequence
  Description of Artificial Sequence: Synthetic oligonucleotide
auagaguaagugucgacga

SEQ ID NO: 3163051 - RNA, 19 nt, Artificial Sequence
  Description of Artificial Sequence: Synthetic oligonucleotide
ugcugcauuugccugagcu

SEQ ID NO: 3163052 - RNA, 19 nt, Artificial Sequence
  Description of Artificial Sequence: Synthetic oligonucleotide
ucaaagaugaaagguuuga

SEQ ID NO: 3163053 - RNA, 19 nt, Artificial Sequence
  Description of Artificial Sequence: Synthetic oligonucleotide
cacgauagaguaagugucg

SEQ ID NO: 3163054 - RNA, 19 nt, Artificial Sequence
  Description of Artificial Sequence: Synthetic oligonucleotide
uggacacagggcuuugugg

SEQ ID NO: 3163055 - RNA, 19 nt, Artificial Sequence
  Description of Artificial Sequence: Synthetic oligonucleotide
ucugguguggcagugagaa

SEQ ID NO: 3163056 - RNA, 19 nt, Artificial Sequence
  Description of Artificial Sequence: Synthetic oligonucleotide
augccacucugcuuguucc

SEQ ID NO: 3163057 - RNA, 19 nt, Artificial Sequence
  Description of Artificial Sequence: Synthetic oligonucleotide
aauacugaccuggaugggu

SEQ ID NO: 3163058 - RNA, 19 nt, Artificial Sequence
  Description of Artificial Sequence: Synthetic oligonucleotide
gguuugaauacugaccugg

SEQ ID NO: 3163059 - RNA, 19 nt, Artificial Sequence
  Description of Artificial Sequence: Synthetic oligonucleotide
ugcggaagccuccagaguc

SEQ ID NO: 3163060 - RNA, 19 nt, Artificial Sequence
  Description of Artificial Sequence: Synthetic oligonucleotide
cccacuucaaagaugaaag

SEQ ID NO: 3163061 - RNA, 19 nt, Artificial Sequence
  Description of Artificial Sequence: Synthetic oligonucleotide
cugaggauguccaucauca

SEQ ID NO: 3163062 - RNA, 19 nt, Artificial Sequence
  Description of Artificial Sequence: Synthetic oligonucleotide
aggaccgacaccaugcugg

SEQ ID NO: 3163063 - RNA, 19 nt, Artificial Sequence
  Description of Artificial Sequence: Synthetic oligonucleotide
agaguaagugucgacgauc

SEQ ID NO: 3163064 - RNA, 19 nt, Artificial Sequence
  Description of Artificial Sequence: Synthetic oligonucleotide
gaguaagugucgacgaucc

SEQ ID NO: 3163065 - RNA, 19 nt, Artificial Sequence
  Description of Artificial Sequence: Synthetic oligonucleotide
ugccugguguccacgauag

SEQ ID NO: 3163066 - RNA, 19 nt, Artificial Sequence
  Description of Artificial Sequence: Synthetic oligonucleotide
ccagaguccaugcagaugc

SEQ ID NO: 3163067 - RNA, 19 nt, Artificial Sequence
  Description of Artificial Sequence: Synthetic oligonucleotide
accgacaccaugcuggcug

SEQ ID NO: 3163068 - RNA, 19 nt, Artificial Sequence
  Description of Artificial Sequence: Synthetic oligonucleotide
gauccgaacaggguccugg

SEQ ID NO: 3163069 - RNA, 19 nt, Artificial Sequence
  Description of Artificial Sequence: Synthetic oligonucleotide
accaugcuggcuguggugc

SEQ ID NO: 3163070 - RNA, 19 nt, Artificial Sequence
  Description of Artificial Sequence: Synthetic oligonucleotide
accuggaugggucuggugu

SEQ ID NO: 3163071 - RNA, 19 nt, Artificial Sequence
  Description of Artificial Sequence: Synthetic oligonucleotide
gcagaugccacucugcuug

SEQ ID NO: 3163072 - RNA, 19 nt, Artificial Sequence
  Description of Artificial Sequence: Synthetic oligonucleotide
ggacacagggcuuuguggg

SEQ ID NO: 3163073 - RNA, 19 nt, Artificial Sequence
  Description of Artificial Sequence: Synthetic oligonucleotide
uuccugaggauguccauca

SEQ ID NO: 3163074 - RNA, 19 nt, Artificial Sequence
  Description of Artificial Sequence: Synthetic oligonucleotide
ugguguggcagugagaaaa

SEQ ID NO: 3163075 - RNA, 19 nt, Artificial Sequence
  Description of Artificial Sequence: Synthetic oligonucleotide
guguccacgauagaguaag

SEQ ID NO: 3163076 - RNA, 19 nt, Artificial Sequence
  Description of Artificial Sequence: Synthetic oligonucleotide
uuugaauacugaccuggau

SEQ ID NO: 3163077 - RNA, 19 nt, Artificial Sequence
  Description of Artificial Sequence: Synthetic oligonucleotide
aggauguccaucaucaccu

SEQ ID NO: 3163078 - RNA, 19 nt, Artificial Sequence
  Description of Artificial Sequence: Synthetic oligonucleotide
uuugccugagcuguuuccc

SEQ ID NO: 3163079 - RNA, 19 nt, Artificial Sequence
  Description of Artificial Sequence: Synthetic oligonucleotide
uuguuccugaggaugucca

SEQ ID NO: 3163080 - RNA, 19 nt, Artificial Sequence
  Description of Artificial Sequence: Synthetic oligonucleotide
ugcuuguuccugaggaugu

SEQ ID NO: 3163081 - RNA, 19 nt, Artificial Sequence
  Description of Artificial Sequence: Synthetic oligonucleotide
guaagugucgacgauccac

SEQ ID NO: 3163082 - RNA, 19 nt, Artificial Sequence
  Description of Artificial Sequence: Synthetic oligonucleotide
aaaauggacacagggcuuu

SEQ ID NO: 3163083 - RNA, 19 nt, Artificial Sequence
  Description of Artificial Sequence: Synthetic oligonucleotide
caugcagaugccacucugc

SEQ ID NO: 3163084 - RNA, 19 nt, Artificial Sequence
  Description of Artificial Sequence: Synthetic oligonucleotide
uguccaucaucaccucugc

SEQ ID NO: 3163085 - RNA, 19 nt, Artificial Sequence
  Description of Artificial Sequence: Synthetic oligonucleotide
uggggcaggaccgacacca

SEQ ID NO: 3163086 - RNA, 19 nt, Artificial Sequence
  Description of Artificial Sequence: Synthetic oligonucleotide
gaugggucugguguggcag

SEQ ID NO: 3163087 - RNA, 19 nt, Artificial Sequence
  Description of Artificial Sequence: Synthetic oligonucleotide
ugcccgucuuccaucagcc

SEQ ID NO: 3163088 - RNA, 19 nt, Artificial Sequence
  Description of Artificial Sequence: Synthetic oligonucleotide
uuugugggauccuggggca

SEQ ID NO: 3163089 - RNA, 19 nt, Artificial Sequence
  Description of Artificial Sequence: Synthetic oligonucleotide
acuucaaagaugaaagguu

SEQ ID NO: 3163090 - RNA, 19 nt, Artificial Sequence
  Description of Artificial Sequence: Synthetic oligonucleotide
uggcagugagaaaauggac

SEQ ID NO: 3163091 - RNA, 19 nt, Artificial Sequence
  Description of Artificial Sequence: Synthetic oligonucleotide
uccaccugagucuggaauc

SEQ ID NO: 3163092 - RNA, 19 nt, Artificial Sequence
  Description of Artificial Sequence: Synthetic oligonucleotide
uuccaucagccccagggcu

SEQ ID NO: 3163093 - RNA, 19 nt, Artificial Sequence
  Description of Artificial Sequence: Synthetic oligonucleotide
gugucgacgauccaccuga

SEQ ID NO: 3163094 - RNA, 19 nt, Artificial Sequence
  Description of Artificial Sequence: Synthetic oligonucleotide
gaagccuccagaguccaug

SEQ ID NO: 3163095 - RNA, 19 nt, Artificial Sequence
  Description of Artificial Sequence: Synthetic oligonucleotide
gcagugagaaaauggacac

SEQ ID NO: 3163096 - RNA, 19 nt, Artificial Sequence
  Description of Artificial Sequence: Synthetic oligonucleotide
uccaucagccccagggcug

SEQ ID NO: 3163097 - RNA, 19 nt, Artificial Sequence
  Description of Artificial Sequence: Synthetic oligonucleotide
cuggcuguggugcggaagc

SEQ ID NO: 3163098 - RNA, 19 nt, Artificial Sequence
  Description of Artificial Sequence: Synthetic oligonucleotide
gaggauccgaacagggucc

SEQ ID NO: 3163099 - RNA, 19 nt, Artificial Sequence
  Description of Artificial Sequence: Synthetic oligonucleotide
caccccacuucaaagauga

SEQ ID NO: 3163100 - RNA, 19 nt, Artificial Sequence
  Description of Artificial Sequence: Synthetic oligonucleotide
cuuccaucagccccagggc

SEQ ID NO: 3163101 - RNA, 19 nt, Artificial Sequence
  Description of Artificial Sequence: Synthetic oligonucleotide
auggacacagggcuuugug

SEQ ID NO: 3163102 - RNA, 19 nt, Artificial Sequence
  Description of Artificial Sequence: Synthetic oligonucleotide
gaugccacucugcuuguuc

SEQ ID NO: 3163103 - RNA, 19 nt, Artificial Sequence
  Description of Artificial Sequence: Synthetic oligonucleotide
augaaagguuugaauacug

SEQ ID NO: 3163104 - RNA, 19 nt, Artificial Sequence
  Description of Artificial Sequence: Synthetic oligonucleotide
auacugaccuggauggguc

SEQ ID NO: 3163105 - RNA, 19 nt, Artificial Sequence
  Description of Artificial Sequence: Synthetic oligonucleotide
gacaccaugcuggcugugg

SEQ ID NO: 3163106 - RNA, 19 nt, Artificial Sequence
  Description of Artificial Sequence: Synthetic oligonucleotide
cucugcuuguuccugagga

SEQ ID NO: 3163107 - RNA, 19 nt, Artificial Sequence
  Description of Artificial Sequence: Synthetic oligonucleotide
cuuguuccugaggaugucc

SEQ ID NO: 3163108 - RNA, 19 nt, Artificial Sequence
  Description of Artificial Sequence: Synthetic oligonucleotide
augcagaugccacucugcu

SEQ ID NO: 3163109 - RNA, 19 nt, Artificial Sequence
  Description of Artificial Sequence: Synthetic oligonucleotide
ugguguccacgauagagua

SEQ ID NO: 3163110 - RNA, 19 nt, Artificial Sequence
  Description of Artificial Sequence: Synthetic oligonucleotide
gaauacugaccuggauggg

SEQ ID NO: 3163111 - RNA, 19 nt, Artificial Sequence
  Description of Artificial Sequence: Synthetic oligonucleotide
ggugcggaagccuccagag

SEQ ID NO: 3163112 - RNA, 19 nt, Artificial Sequence
  Description of Artificial Sequence: Synthetic oligonucleotide
uagaguaagugucgacgau

SEQ ID NO: 3163113 - RNA, 19 nt, Artificial Sequence
  Description of Artificial Sequence: Synthetic oligonucleotide
ggaggauccgaacaggguc

SEQ ID NO: 3163114 - RNA, 19 nt, Artificial Sequence
  Description of Artificial Sequence: Synthetic oligonucleotide
uguuucccugauccugccc

SEQ ID NO: 3163115 - RNA, 19 nt, Artificial Sequence
  Description of Artificial Sequence: Synthetic oligonucleotide
gaugaaagguuugaauacu

SEQ ID NO: 3163116 - RNA, 19 nt, Artificial Sequence
  Description of Artificial Sequence: Synthetic oligonucleotide
agugucgacgauccaccug

SEQ ID NO: 3163117 - RNA, 19 nt, Artificial Sequence
  Description of Artificial Sequence: Synthetic oligonucleotide
acagggcuuugugggaucc

SEQ ID NO: 3163118 - RNA, 19 nt, Artificial Sequence
  Description of Artificial Sequence: Synthetic oligonucleotide
auccgaacaggguccuggg

SEQ ID NO: 3163119 - RNA, 19 nt, Artificial Sequence
  Description of Artificial Sequence: Synthetic oligonucleotide
auguccaucaucaccucug

SEQ ID NO: 3163120 - RNA, 19 nt, Artificial Sequence
  Description of Artificial Sequence: Synthetic oligonucleotide
agcuguuucccugauccug

SEQ ID NO: 3163121 - RNA, 19 nt, Artificial Sequence
  Description of Artificial Sequence: Synthetic oligonucleotide
aaguuaaagaaauagaggg

SEQ ID NO: 3163122 - RNA, 19 nt, Artificial Sequence
  Description of Artificial Sequence: Synthetic oligonucleotide
aacaugaagccacaaaacc

SEQ ID NO: 3163123 - RNA, 19 nt, Artificial Sequence
  Description of Artificial Sequence: Synthetic oligonucleotide
uucuguauaauaaaggaag

SEQ ID NO: 3163124 - RNA, 19 nt, Artificial Sequence
  Description of Artificial Sequence: Synthetic oligonucleotide
uuuuguaggagaaaguagg

SEQ ID NO: 3163125 - RNA, 19 nt, Artificial Sequence
  Description of Artificial Sequence: Synthetic oligonucleotide
aaugacauggaauacacca

SEQ ID NO: 3163126 - RNA, 19 nt, Artificial Sequence
  Description of Artificial Sequence: Synthetic oligonucleotide
aaaugcaaccagcagaagg

SEQ ID NO: 3163127 - RNA, 19 nt, Artificial Sequence
  Description of Artificial Sequence: Synthetic oligonucleotide
uguaaaagcaaaauacagc

SEQ ID NO: 3163128 - RNA, 19 nt, Artificial Sequence
  Description of Artificial Sequence: Synthetic oligonucleotide
aaaacaguaaacgagaaaa

SEQ ID NO: 3163129 - RNA, 19 nt, Artificial Sequence
  Description of Artificial Sequence: Synthetic oligonucleotide
aaaauacugagacuuaaca

SEQ ID NO: 3163130 - RNA, 19 nt, Artificial Sequence
  Description of Artificial Sequence: Synthetic oligonucleotide
gaaaauggucccuuaaugg

SEQ ID NO: 3163131 - RNA, 19 nt, Artificial Sequence
  Description of Artificial Sequence: Synthetic oligonucleotide
uuaacauaaucacagagaa

SEQ ID NO: 3163132 - RNA, 19 nt, Artificial Sequence
  Description of Artificial Sequence: Synthetic oligonucleotide
agcagaaggauguagggcc

SEQ ID NO: 3163133 - RNA, 19 nt, Artificial Sequence
  Description of Artificial Sequence: Synthetic oligonucleotide
uaauaaaggaaguuaaaga

SEQ ID NO: 3163134 - RNA, 19 nt, Artificial Sequence
  Description of Artificial Sequence: Synthetic oligonucleotide
aauacugagacuuaacaua

SEQ ID NO: 3163135 - RNA, 19 nt, Artificial Sequence
  Description of Artificial Sequence: Synthetic oligonucleotide
aaugaaaacaggcuucaug

SEQ ID NO: 3163136 - RNA, 19 nt, Artificial Sequence
  Description of Artificial Sequence: Synthetic oligonucleotide
gagugaagaacacagaccc

SEQ ID NO: 3163137 - RNA, 19 nt, Artificial Sequence
  Description of Artificial Sequence: Synthetic oligonucleotide
gaugauauuggucugacga

SEQ ID NO: 3163138 - RNA, 19 nt, Artificial Sequence
  Description of Artificial Sequence: Synthetic oligonucleotide
uaaagacacaucaaguaag

SEQ ID NO: 3163139 - RNA, 19 nt, Artificial Sequence
  Description of Artificial Sequence: Synthetic oligonucleotide
augauugccauaaagacac

SEQ ID NO: 3163140 - RNA, 19 nt, Artificial Sequence
  Description of Artificial Sequence: Synthetic oligonucleotide
aaucacagagaacugaacu

SEQ ID NO: 3163141 - RNA, 19 nt, Artificial Sequence
  Description of Artificial Sequence: Synthetic oligonucleotide
ugaguucugaaaauggucc

SEQ ID NO: 3163142 - RNA, 19 nt, Artificial Sequence
  Description of Artificial Sequence: Synthetic oligonucleotide
uucaugacuacuccgauca

SEQ ID NO: 3163143 - RNA, 19 nt, Artificial Sequence
  Description of Artificial Sequence: Synthetic oligonucleotide
aaaaguagaauaacugggg

SEQ ID NO: 3163144 - RNA, 19 nt, Artificial Sequence
  Description of Artificial Sequence: Synthetic oligonucleotide
aaauagaaguugccaacac

SEQ ID NO: 3163145 - RNA, 19 nt, Artificial Sequence
  Description of Artificial Sequence: Synthetic oligonucleotide
uguaggagaaaguagguga

SEQ ID NO: 3163146 - RNA, 19 nt, Artificial Sequence
  Description of Artificial Sequence: Synthetic oligonucleotide
uaaaggaaguuaaagaaau

SEQ ID NO: 3163147 - RNA, 19 nt, Artificial Sequence
  Description of Artificial Sequence: Synthetic oligonucleotide
auaauaaaggaaguuaaag

SEQ ID NO: 3163148 - RNA, 19 nt, Artificial Sequence
  Description of Artificial Sequence: Synthetic oligonucleotide
uacguuuccaaauuaaacu

SEQ ID NO: 3163149 - RNA, 19 nt, Artificial Sequence
  Description of Artificial Sequence: Synthetic oligonucleotide
ugaaaauggucccuuaaug

SEQ ID NO: 3163150 - RNA, 19 nt, Artificial Sequence
  Description of Artificial Sequence: Synthetic oligonucleotide
ucuggauacuugaagaagc

SEQ ID NO: 3163151 - RNA, 19 nt, Artificial Sequence
  Description of Artificial Sequence: Synthetic oligonucleotide
aaugaugugucccgcacag

SEQ ID NO: 3163152 - RNA, 19 nt, Artificial Sequence
  Description of Artificial Sequence: Synthetic oligonucleotide
augaaaacaggcuucauga

SEQ ID NO: 3163153 - RNA, 19 nt, Artificial Sequence
  Description of Artificial Sequence: Synthetic oligonucleotide
guuaauguugacaagauuc

SEQ ID NO: 3163154 - RNA, 19 nt, Artificial Sequence
  Description of Artificial Sequence: Synthetic oligonucleotide
aaagaaauagaggguacgg

SEQ ID NO: 3163155 - RNA, 19 nt, Artificial Sequence
  Description of Artificial Sequence: Synthetic oligonucleotide
acuuaacauaaucacagag

SEQ ID NO: 3163156 - RNA, 19 nt, Artificial Sequence
  Description of Artificial Sequence: Synthetic oligonucleotide
ugagacuuaacauaaucac

SEQ ID NO: 3163157 - RNA, 19 nt, Artificial Sequence
  Description of Artificial Sequence: Synthetic oligonucleotide
aaagacacaucaaguaagc

SEQ ID NO: 3163158 - RNA, 19 nt, Artificial Sequence
  Description of Artificial Sequence: Synthetic oligonucleotide
uguaucuuucuguaaaagc

SEQ ID NO: 3163159 - RNA, 19 nt, Artificial Sequence
  Description of Artificial Sequence: Synthetic oligonucleotide
uaagugaauuuccaaacca

SEQ ID NO: 3163160 - RNA, 19 nt, Artificial Sequence
  Description of Artificial Sequence: Synthetic oligonucleotide
uugccauaaagacacauca

SEQ ID NO: 3163161 - RNA, 19 nt, Artificial Sequence
  Description of Artificial Sequence: Synthetic oligonucleotide
uaugauugccauaaagaca

SEQ ID NO: 3163162 - RNA, 19 nt, Artificial Sequence
  Description of Artificial Sequence: Synthetic oligonucleotide
uucugaguucugaaaaugg

SEQ ID NO: 3163163 - RNA, 19 nt, Artificial Sequence
  Description of Artificial Sequence: Synthetic oligonucleotide
ugacauggaauacaccagg

SEQ ID NO: 3163164 - RNA, 19 nt, Artificial Sequence
  Description of Artificial Sequence: Synthetic oligonucleotide
cuaugauugccauaaagac

SEQ ID NO: 3163165 - RNA, 19 nt, Artificial Sequence
  Description of Artificial Sequence: Synthetic oligonucleotide
ucuugaaugacauggaaua

SEQ ID NO: 3163166 - RNA, 19 nt, Artificial Sequence
  Description of Artificial Sequence: Synthetic oligonucleotide
aaaguagaauaacugggga

SEQ ID NO: 3163167 - RNA, 19 nt, Artificial Sequence
  Description of Artificial Sequence: Synthetic oligonucleotide
cuguaaaagcaaaauacag

SEQ ID NO: 3163168 - RNA, 19 nt, Artificial Sequence
  Description of Artificial Sequence: Synthetic oligonucleotide
agguucuugaaugacaugg

SEQ ID NO: 3163169 - RNA, 19 nt, Artificial Sequence
  Description of Artificial Sequence: Synthetic oligonucleotide
aaacaugaagccacaaaac

SEQ ID NO: 3163170 - RNA, 19 nt, Artificial Sequence
  Description of Artificial Sequence: Synthetic oligonucleotide
aggaaaagcauacucaggu

SEQ ID NO: 3163171 - RNA, 19 nt, Artificial Sequence
  Description of Artificial Sequence: Synthetic oligonucleotide
gaaacaugaagccacaaaa

SEQ ID NO: 3163172 - RNA, 19 nt, Artificial Sequence
  Description of Artificial Sequence: Synthetic oligonucleotide
aacuggggaaaaugaaaac

SEQ ID NO: 3163173 - RNA, 19 nt, Artificial Sequence
  Description of Artificial Sequence: Synthetic oligonucleotide
ugugcaaugaugugucccg

SEQ ID NO: 3163174 - RNA, 19 nt, Artificial Sequence
  Description of Artificial Sequence: Synthetic oligonucleotide
aaucccaccauugacuauc

SEQ ID NO: 3163175 - RNA, 19 nt, Artificial Sequence
  Description of Artificial Sequence: Synthetic oligonucleotide
aauagaaguugccaacacu

SEQ ID NO: 3163176 - RNA, 19 nt, Artificial Sequence
  Description of Artificial Sequence: Synthetic oligonucleotide
ugaaugacauggaauacac

SEQ ID NO: 3163177 - RNA, 19 nt, Artificial Sequence
  Description of Artificial Sequence: Synthetic oligonucleotide
uguauaauaaaggaaguua

SEQ ID NO: 3163178 - RNA, 19 nt, Artificial Sequence
  Description of Artificial Sequence: Synthetic oligonucleotide
acaggaaaagcauacucag

SEQ ID NO: 3163179 - RNA, 19 nt, Artificial Sequence
  Description of Artificial Sequence: Synthetic oligonucleotide
aucacagagaacugaacuc

SEQ ID NO: 3163180 - RNA, 19 nt, Artificial Sequence
  Description of Artificial Sequence: Synthetic oligonucleotide
gaagccacaaaacccaagc

SEQ ID NO: 3163181 - RNA, 19 nt, Artificial Sequence
  Description of Artificial Sequence: Synthetic oligonucleotide
acaugaagccacaaaaccc

SEQ ID NO: 3163182 - RNA, 19 nt, Artificial Sequence
  Description of Artificial Sequence: Synthetic oligonucleotide
uaaagaaauagaggguacg

SEQ ID NO: 3163183 - RNA, 19 nt, Artificial Sequence
  Description of Artificial Sequence: Synthetic oligonucleotide
aauaacaaucccaccauug

SEQ ID NO: 3163184 - RNA, 19 nt, Artificial Sequence
  Description of Artificial Sequence: Synthetic oligonucleotide
ggaaguuaaagaaauagag

SEQ ID NO: 3163185 - RNA, 19 nt, Artificial Sequence
  Description of Artificial Sequence: Synthetic oligonucleotide
acagcaaaauagaaguugc

SEQ ID NO: 3163186 - RNA, 19 nt, Artificial Sequence
  Description of Artificial Sequence: Synthetic oligonucleotide
gaaaagcauacucagguuc

SEQ ID NO: 3163187 - RNA, 19 nt, Artificial Sequence
  Description of Artificial Sequence: Synthetic oligonucleotide
uccuaugauugccauaaag

SEQ ID NO: 3163188 - RNA, 19 nt, Artificial Sequence
  Description of Artificial Sequence: Synthetic oligonucleotide
aggguacggaaauagugcc

SEQ ID NO: 3163189 - RNA, 19 nt, Artificial Sequence
  Description of Artificial Sequence: Synthetic oligonucleotide
ugacgaaacaugaagccac

SEQ ID NO: 3163190 - RNA, 19 nt, Artificial Sequence
  Description of Artificial Sequence: Synthetic oligonucleotide
auaaagacacaucaaguaa

SEQ ID NO: 3163191 - RNA, 19 nt, Artificial Sequence
  Description of Artificial Sequence: Synthetic oligonucleotide
cuugaagaagccuuguuuc

SEQ ID NO: 3163192 - RNA, 19 nt, Artificial Sequence
  Description of Artificial Sequence: Synthetic oligonucleotide
aacugaacucuacguuucc

SEQ ID NO: 3163193 - RNA, 19 nt, Artificial Sequence
  Description of Artificial Sequence: Synthetic oligonucleotide
aaauagaggguacggaaau

SEQ ID NO: 3163194 - RNA, 19 nt, Artificial Sequence
  Description of Artificial Sequence: Synthetic oligonucleotide
aaaauagaaguugccaaca

SEQ ID NO: 3163195 - RNA, 19 nt, Artificial Sequence
  Description of Artificial Sequence: Synthetic oligonucleotide
ugaagaacucuucugaguu

SEQ ID NO: 3163196 - RNA, 19 nt, Artificial Sequence
  Description of Artificial Sequence: Synthetic oligonucleotide
cuggggaaaaugaaaacag

SEQ ID NO: 3163197 - RNA, 19 nt, Artificial Sequence
  Description of Artificial Sequence: Synthetic oligonucleotide
ucuguauaauaaaggaagu

SEQ ID NO: 3163198 - RNA, 19 nt, Artificial Sequence
  Description of Artificial Sequence: Synthetic oligonucleotide
auacucagguucuugaaug

SEQ ID NO: 3163199 - RNA, 19 nt, Artificial Sequence
  Description of Artificial Sequence: Synthetic oligonucleotide
aaugcaaccagcagaagga

SEQ ID NO: 3163200 - RNA, 19 nt, Artificial Sequence
  Description of Artificial Sequence: Synthetic oligonucleotide
aauguugacaagauucucu

SEQ ID NO: 3163201 - RNA, 19 nt, Artificial Sequence
  Description of Artificial Sequence: Synthetic oligonucleotide
augugucccgcacagaagg

SEQ ID NO: 3163202 - RNA, 19 nt, Artificial Sequence
  Description of Artificial Sequence: Synthetic oligonucleotide
aauacaccaggagaaacug

SEQ ID NO: 3163203 - RNA, 19 nt, Artificial Sequence
  Description of Artificial Sequence: Synthetic oligonucleotide
ucuuuugcagcucaguuuu

SEQ ID NO: 3163204 - RNA, 19 nt, Artificial Sequence
  Description of Artificial Sequence: Synthetic oligonucleotide
cuuaacauaaucacagaga

SEQ ID NO: 3163205 - RNA, 19 nt, Artificial Sequence
  Description of Artificial Sequence: Synthetic oligonucleotide
caaaauagaaguugccaac

SEQ ID NO: 3163206 - RNA, 19 nt, Artificial Sequence
  Description of Artificial Sequence: Synthetic oligonucleotide
uucacugaacuucugugca

SEQ ID NO: 3163207 - RNA, 19 nt, Artificial Sequence
  Description of Artificial Sequence: Synthetic oligonucleotide
uaacuggggaaaaugaaaa

SEQ ID NO: 3163208 - RNA, 19 nt, Artificial Sequence
  Description of Artificial Sequence: Synthetic oligonucleotide
aaaaugaaaacaggcuuca

SEQ ID NO: 3163209 - RNA, 19 nt, Artificial Sequence
  Description of Artificial Sequence: Synthetic oligonucleotide
auagaaguugccaacacug

SEQ ID NO: 3163210 - RNA, 19 nt, Artificial Sequence
  Description of Artificial Sequence: Synthetic oligonucleotide
aaguagaauaacuggggaa

SEQ ID NO: 3163211 - RNA, 19 nt, Artificial Sequence
  Description of Artificial Sequence: Synthetic oligonucleotide
cuacguuuccaaauuaaac

SEQ ID NO: 3163212 - RNA, 19 nt, Artificial Sequence
  Description of Artificial Sequence: Synthetic oligonucleotide
agaaauagaggguacggaa

SEQ ID NO: 3163213 - RNA, 19 nt, Artificial Sequence
  Description of Artificial Sequence: Synthetic oligonucleotide
aacaggaaaagcauacuca

SEQ ID NO: 3163214 - RNA, 19 nt, Artificial Sequence
  Description of Artificial Sequence: Synthetic oligonucleotide
acuccgaucaccaauaaca

SEQ ID NO: 3163215 - RNA, 19 nt, Artificial Sequence
  Description of Artificial Sequence: Synthetic oligonucleotide
gaaaaugaaaacaggcuuc

SEQ ID NO: 3163216 - RNA, 19 nt, Artificial Sequence
  Description of Artificial Sequence: Synthetic oligonucleotide
ucugaguucugaaaauggu

SEQ ID NO: 3163217 - RNA, 19 nt, Artificial Sequence
  Description of Artificial Sequence: Synthetic oligonucleotide
caaaacccaagcaaggcug

SEQ ID NO: 3163218 - RNA, 19 nt, Artificial Sequence
  Description of Artificial Sequence: Synthetic oligonucleotide
uaucuuucuguaaaagcaa

SEQ ID NO: 3163219 - RNA, 19 nt, Artificial Sequence
  Description of Artificial Sequence: Synthetic oligonucleotide
ugcagcucaguuuuccagg

SEQ ID NO: 3163220 - RNA, 19 nt, Artificial Sequence
  Description of Artificial Sequence: Synthetic oligonucleotide
guaucuuucuguaaaagca

SEQ ID NO: 3163221 - RNA, 19 nt, Artificial Sequence
  Description of Artificial Sequence: Synthetic oligonucleotide
uccugugaaauccagaagg

SEQ ID NO: 3163222 - RNA, 19 nt, Artificial Sequence
  Description of Artificial Sequence: Synthetic oligonucleotide
  modified_base (11)..(11): a, c, u, g, unknown or other
uucaucaauancuuucucg

SEQ ID NO: 3163223 - RNA, 19 nt, Artificial Sequence
  Description of Artificial Sequence: Synthetic oligonucleotide
uucaagacacuccagaucc

SEQ ID NO: 3163224 - RNA, 19 nt, Artificial Sequence
  Description of Artificial Sequence: Synthetic oligonucleotide
  modified_base (10)..(10): a, c, u, g, unknown or other
ucaucaauancuuucucgc

SEQ ID NO: 3163225 - RNA, 19 nt, Artificial Sequence
  Description of Artificial Sequence: Synthetic oligonucleotide
  modified_base (4)..(4): a, c, u, g, unknown or other
auancuuucucgcaauggc

SEQ ID NO: 3163226 - RNA, 19 nt, Artificial Sequence
  Description of Artificial Sequence: Synthetic oligonucleotide
aacacggagacucaacaac

SEQ ID NO: 3163227 - RNA, 19 nt, Artificial Sequence
  Description of Artificial Sequence: Synthetic oligonucleotide
aaauacauuaacauuuauc

SEQ ID NO: 3163228 - RNA, 19 nt, Artificial Sequence
  Description of Artificial Sequence: Synthetic oligonucleotide
ucuuaaggcacauucauca

SEQ ID NO: 3163229 - RNA, 19 nt, Artificial Sequence
  Description of Artificial Sequence: Synthetic oligonucleotide
agacacauuuguuaggagc

SEQ ID NO: 3163230 - RNA, 19 nt, Artificial Sequence
  Description of Artificial Sequence: Synthetic oligonucleotide
acuguguuggugcagaugg

SEQ ID NO: 3163231 - RNA, 19 nt, Artificial Sequence
  Description of Artificial Sequence: Synthetic oligonucleotide
aauacuucaauuauuuuca

SEQ ID NO: 3163232 - RNA, 19 nt, Artificial Sequence
  Description of Artificial Sequence: Synthetic oligonucleotide
ugauuuacaacacggagac

SEQ ID NO: 3163233 - RNA, 19 nt, Artificial Sequence
  Description of Artificial Sequence: Synthetic oligonucleotide
auaggcaauauuaucagcc

SEQ ID NO: 3163234 - RNA, 19 nt, Artificial Sequence
  Description of Artificial Sequence: Synthetic oligonucleotide
uuauuuucaagacacucca

SEQ ID NO: 3163235 - RNA, 19 nt, Artificial Sequence
  Description of Artificial Sequence: Synthetic oligonucleotide
auuuacagguuguacaggg

SEQ ID NO: 3163236 - RNA, 19 nt, Artificial Sequence
  Description of Artificial Sequence: Synthetic oligonucleotide
uuuuaaauacuucaauuau

SEQ ID NO: 3163237 - RNA, 19 nt, Artificial Sequence
  Description of Artificial Sequence: Synthetic oligonucleotide
auuauuuucaagacacucc

SEQ ID NO: 3163238 - RNA, 19 nt, Artificial Sequence
  Description of Artificial Sequence: Synthetic oligonucleotide
  modified_base (5)..(5): a, c, u, g, unknown or other
aauancuuucucgcaaugg

SEQ ID NO: 3163239 - RNA, 19 nt, Artificial Sequence
  Description of Artificial Sequence: Synthetic oligonucleotide
uugacugugguuaacaaaa

SEQ ID NO: 3163240 - RNA, 19 nt, Artificial Sequence
  Description of Artificial Sequence: Synthetic oligonucleotide
auuauguuaguacacaaaa

SEQ ID NO: 3163241 - RNA, 19 nt, Artificial Sequence
  Description of Artificial Sequence: Synthetic oligonucleotide
agacucaacaaccauugac

SEQ ID NO: 3163242 - RNA, 19 nt, Artificial Sequence
  Description of Artificial Sequence: Synthetic oligonucleotide
auuaacauuuaucauggga

SEQ ID NO: 3163243 - RNA, 19 nt, Artificial Sequence
  Description of Artificial Sequence: Synthetic oligonucleotide
uuccauuuuaaauacuuca

SEQ ID NO: 3163244 - RNA, 19 nt, Artificial Sequence
  Description of Artificial Sequence: Synthetic oligonucleotide
gauccuuuaaauguauccg

SEQ ID NO: 3163245 - RNA, 19 nt, Artificial Sequence
  Description of Artificial Sequence: Synthetic oligonucleotide
acauuaacauuuaucaugg

SEQ ID NO: 3163246 - RNA, 19 nt, Artificial Sequence
  Description of Artificial Sequence: Synthetic oligonucleotide
aaggugauuuacaacacgg

SEQ ID NO: 3163247 - RNA, 19 nt, Artificial Sequence
  Description of Artificial Sequence: Synthetic oligonucleotide
caaccauugacugaaaugc

SEQ ID NO: 3163248 - RNA, 19 nt, Artificial Sequence
  Description of Artificial Sequence: Synthetic oligonucleotide
aaacaccguccucagaugg

SEQ ID NO: 3163249 - RNA, 19 nt, Artificial Sequence
  Description of Artificial Sequence: Synthetic oligonucleotide
ucuagacuaggucagcaag

SEQ ID NO: 3163250 - RNA, 19 nt, Artificial Sequence
  Description of Artificial Sequence: Synthetic oligonucleotide
aauaccagagcuguccagg

SEQ ID NO: 3163251 - RNA, 19 nt, Artificial Sequence
  Description of Artificial Sequence: Synthetic oligonucleotide
aaugcacagcacugcaggc

SEQ ID NO: 3163252 - RNA, 19 nt, Artificial Sequence
  Description of Artificial Sequence: Synthetic oligonucleotide
uuacagguuguacagggag

SEQ ID NO: 3163253 - RNA, 19 nt, Artificial Sequence
  Description of Artificial Sequence: Synthetic oligonucleotide
ucucuauuauguuaguaca

SEQ ID NO: 3163254 - RNA, 19 nt, Artificial Sequence
  Description of Artificial Sequence: Synthetic oligonucleotide
ugaaauaccagagcugucc

SEQ ID NO: 3163255 - RNA, 19 nt, Artificial Sequence
  Description of Artificial Sequence: Synthetic oligonucleotide
aaaucagccccucuuccuc

SEQ ID NO: 3163256 - RNA, 19 nt, Artificial Sequence
  Description of Artificial Sequence: Synthetic oligonucleotide
ucauaggcaauauuaucag

SEQ ID NO: 3163257 - RNA, 19 nt, Artificial Sequence
  Description of Artificial Sequence: Synthetic oligonucleotide
uguauucacagcucaaaca

SEQ ID NO: 3163258 - RNA, 19 nt, Artificial Sequence
  Description of Artificial Sequence: Synthetic oligonucleotide
uuuaaauacuucaauuauu

SEQ ID NO: 3163259 - RNA, 19 nt, Artificial Sequence
  Description of Artificial Sequence: Synthetic oligonucleotide
aagauggcuguguauucac

SEQ ID NO: 3163260 - RNA, 19 nt, Artificial Sequence
  Description of Artificial Sequence: Synthetic oligonucleotide
uuaucagccaggcaggggu

SEQ ID NO: 3163261 - RNA, 19 nt, Artificial Sequence
  Description of Artificial Sequence: Synthetic oligonucleotide
ugagcaaaguggcuaaggc

SEQ ID NO: 3163262 - RNA, 19 nt, Artificial Sequence
  Description of Artificial Sequence: Synthetic oligonucleotide
uuucugaugucauaggcaa

SEQ ID NO: 3163263 - RNA, 19 nt, Artificial Sequence
  Description of Artificial Sequence: Synthetic oligonucleotide
ucagcaaggaugagcaaag

SEQ ID NO: 3163264 - RNA, 19 nt, Artificial Sequence
  Description of Artificial Sequence: Synthetic oligonucleotide
aaucagccccucuuccucc

SEQ ID NO: 3163265 - RNA, 19 nt, Artificial Sequence
  Description of Artificial Sequence: Synthetic oligonucleotide
aauguauccgcaugaucug

SEQ ID NO: 3163266 - RNA, 19 nt, Artificial Sequence
  Description of Artificial Sequence: Synthetic oligonucleotide
gaaggugauuuacaacacg

SEQ ID NO: 3163267 - RNA, 19 nt, Artificial Sequence
  Description of Artificial Sequence: Synthetic oligonucleotide
acaaccauugacugaaaug

SEQ ID NO: 3163268 - RNA, 19 nt, Artificial Sequence
  Description of Artificial Sequence: Synthetic oligonucleotide
agacuuugguaauugacug

SEQ ID NO: 3163269 - RNA, 19 nt, Artificial Sequence
  Description of Artificial Sequence: Synthetic oligonucleotide
cagaaugcucugcagaugg

SEQ ID NO: 3163270 - RNA, 19 nt, Artificial Sequence
  Description of Artificial Sequence: Synthetic oligonucleotide
caaggaugagcaaaguggc

SEQ ID NO: 3163271 - RNA, 19 nt, Artificial Sequence
  Description of Artificial Sequence: Synthetic oligonucleotide
uaaggccacccaaacaccg

SEQ ID NO: 3163272 - RNA, 19 nt, Artificial Sequence
  Description of Artificial Sequence: Synthetic oligonucleotide
ucuauuauguuaguacaca

SEQ ID NO: 3163273 - RNA, 19 nt, Artificial Sequence
  Description of Artificial Sequence: Synthetic oligonucleotide
uauuauguuaguacacaaa

SEQ ID NO: 3163274 - RNA, 19 nt, Artificial Sequence
  Description of Artificial Sequence: Synthetic oligonucleotide
gucucuauuauguuaguac

SEQ ID NO: 3163275 - RNA, 19 nt, Artificial Sequence
  Description of Artificial Sequence: Synthetic oligonucleotide
ucaacaaccauugacugaa

SEQ ID NO: 3163276 - RNA, 19 nt, Artificial Sequence
  Description of Artificial Sequence: Synthetic oligonucleotide
aaaguggcuaaggccaccc

SEQ ID NO: 3163277 - RNA, 19 nt, Artificial Sequence
  Description of Artificial Sequence: Synthetic oligonucleotide
cuagacuaggucagcaagg

SEQ ID NO: 3163278 - RNA, 19 nt, Artificial Sequence
  Description of Artificial Sequence: Synthetic oligonucleotide
gacuaggucagcaaggaug

SEQ ID NO: 3163279 - RNA, 19 nt, Artificial Sequence
  Description of Artificial Sequence: Synthetic oligonucleotide
gaugucauaggcaauauua

SEQ ID NO: 3163280 - RNA, 19 nt, Artificial Sequence
  Description of Artificial Sequence: Synthetic oligonucleotide
uccaugaugaguuccauuu

SEQ ID NO: 3163281 - RNA, 19 nt, Artificial Sequence
  Description of Artificial Sequence: Synthetic oligonucleotide
gcaggugugagucuuaagg

SEQ ID NO: 3163282 - RNA, 19 nt, Artificial Sequence
  Description of Artificial Sequence: Synthetic oligonucleotide
ugaaaugcacagcacugca

SEQ ID NO: 3163283 - RNA, 19 nt, Artificial Sequence
  Description of Artificial Sequence: Synthetic oligonucleotide
uauuccaugaugaguucca

SEQ ID NO: 3163284 - RNA, 19 nt, Artificial Sequence
  Description of Artificial Sequence: Synthetic oligonucleotide
aaaaucagccccucuuccu

SEQ ID NO: 3163285 - RNA, 19 nt, Artificial Sequence
  Description of Artificial Sequence: Synthetic oligonucleotide
aaugcaggacuccccggac

SEQ ID NO: 3163286 - RNA, 19 nt, Artificial Sequence
  Description of Artificial Sequence: Synthetic oligonucleotide
aaaauacauuaacauuuau

SEQ ID NO: 3163287 - RNA, 19 nt, Artificial Sequence
  Description of Artificial Sequence: Synthetic oligonucleotide
gcaaggaugagcaaagugg

SEQ ID NO: 3163288 - RNA, 19 nt, Artificial Sequence
  Description of Artificial Sequence: Synthetic oligonucleotide
aacacuccccuucaaagau

SEQ ID NO: 3163289 - RNA, 19 nt, Artificial Sequence
  Description of Artificial Sequence: Synthetic oligonucleotide
uuauguuaguacacaaaau

SEQ ID NO: 3163290 - RNA, 19 nt, Artificial Sequence
  Description of Artificial Sequence: Synthetic oligonucleotide
caaacagagucauuccagc

SEQ ID NO: 3163291 - RNA, 19 nt, Artificial Sequence
  Description of Artificial Sequence: Synthetic oligonucleotide
ucccucugcacauucauca

SEQ ID NO: 3163292 - RNA, 19 nt, Artificial Sequence
  Description of Artificial Sequence: Synthetic oligonucleotide
uccagauccaccgagcagc

SEQ ID NO: 3163293 - RNA, 19 nt, Artificial Sequence
  Description of Artificial Sequence: Synthetic oligonucleotide
uugucaacaaguuguuucu

SEQ ID NO: 3163294 - RNA, 19 nt, Artificial Sequence
  Description of Artificial Sequence: Synthetic oligonucleotide
  modified_base (3)..(3): a, c, u, g, unknown or other
uancuuucucgcaauggcu

SEQ ID NO: 3163295 - RNA, 19 nt, Artificial Sequence
  Description of Artificial Sequence: Synthetic oligonucleotide
cauucuugcauuuacaggu

SEQ ID NO: 3163296 - RNA, 19 nt, Artificial Sequence
  Description of Artificial Sequence: Synthetic oligonucleotide
uccccuucaaagauggcug

SEQ ID NO: 3163297 - RNA, 19 nt, Artificial Sequence
  Description of Artificial Sequence: Synthetic oligonucleotide
uuucaagacacuccagauc

SEQ ID NO: 3163298 - RNA, 19 nt, Artificial Sequence
  Description of Artificial Sequence: Synthetic oligonucleotide
gagcaaaguggcuaaggcc

SEQ ID NO: 3163299 - RNA, 19 nt, Artificial Sequence
  Description of Artificial Sequence: Synthetic oligonucleotide
ucaagucucuauuauguua

SEQ ID NO: 3163300 - RNA, 19 nt, Artificial Sequence
  Description of Artificial Sequence: Synthetic oligonucleotide
gucauaggcaauauuauca

SEQ ID NO: 3163301 - RNA, 19 nt, Artificial Sequence
  Description of Artificial Sequence: Synthetic oligonucleotide
auaccagagcuguccaggc

SEQ ID NO: 3163302 - RNA, 19 nt, Artificial Sequence
  Description of Artificial Sequence: Synthetic oligonucleotide
aacacagcgggagugguug

SEQ ID NO: 3163303 - RNA, 19 nt, Artificial Sequence
  Description of Artificial Sequence: Synthetic oligonucleotide
ggauccuuuaaauguaucc

SEQ ID NO: 3163304 - RNA, 19 nt, Artificial Sequence
  Description of Artificial Sequence: Synthetic oligonucleotide
gggaaggugauuuacaaca

SEQ ID NO: 3163305 - RNA, 19 nt, Artificial Sequence
  Description of Artificial Sequence: Synthetic oligonucleotide
uuuacaacacggagacuca

SEQ ID NO: 3163306 - RNA, 19 nt, Artificial Sequence
  Description of Artificial Sequence: Synthetic oligonucleotide
acucaacaaccauugacug

SEQ ID NO: 3163307 - RNA, 19 nt, Artificial Sequence
  Description of Artificial Sequence: Synthetic oligonucleotide
gacagacacauuuguuagg

SEQ ID NO: 3163308 - RNA, 19 nt, Artificial Sequence
  Description of Artificial Sequence: Synthetic oligonucleotide
gucaaugcaggacuccccg

SEQ ID NO: 3163309 - RNA, 19 nt, Artificial Sequence
  Description of Artificial Sequence: Synthetic oligonucleotide
ugcagauggugccauuucc

SEQ ID NO: 3163310 - RNA, 19 nt, Artificial Sequence
  Description of Artificial Sequence: Synthetic oligonucleotide
agcaaaguggcuaaggcca

SEQ ID NO: 3163311 - RNA, 19 nt, Artificial Sequence
  Description of Artificial Sequence: Synthetic oligonucleotide
cucuauuauguuaguacac

SEQ ID NO: 3163312 - RNA, 19 nt, Artificial Sequence
  Description of Artificial Sequence: Synthetic oligonucleotide
accgcuucugcacucacag

SEQ ID NO: 3163313 - RNA, 19 nt, Artificial Sequence
  Description of Artificial Sequence: Synthetic oligonucleotide
ugucauaggcaauauuauc

SEQ ID NO: 3163314 - RNA, 19 nt, Artificial Sequence
  Description of Artificial Sequence: Synthetic oligonucleotide
uaauugacugugguuaaca

SEQ ID NO: 3163315 - RNA, 19 nt, Artificial Sequence
  Description of Artificial Sequence: Synthetic oligonucleotide
acuuugguaauugacugug

SEQ ID NO: 3163316 - RNA, 19 nt, Artificial Sequence
  Description of Artificial Sequence: Synthetic oligonucleotide
guacacaaaauaaacaaaa

SEQ ID NO: 3163317 - RNA, 19 nt, Artificial Sequence
  Description of Artificial Sequence: Synthetic oligonucleotide
acaacacggagacucaaca

SEQ ID NO: 3163318 - RNA, 19 nt, Artificial Sequence
  Description of Artificial Sequence: Synthetic oligonucleotide
acacggagacucaacaacc

SEQ ID NO: 3163319 - RNA, 19 nt, Artificial Sequence
  Description of Artificial Sequence: Synthetic oligonucleotide
  modified_base (7)..(7): a, c, u, g, unknown or other
ucaauancuuucucgcaau

SEQ ID NO: 3163320 - RNA, 19 nt, Artificial Sequence
  Description of Artificial Sequence: Synthetic oligonucleotide
aggcaucuagacuagguca

SEQ ID NO: 3163321 - RNA, 19 nt, Artificial Sequence
  Description of Artificial Sequence: Synthetic oligonucleotide
uguuggggagggcacaugg

SEQ ID NO: 3163322 - RNA, 19 nt, Artificial Sequence
  Description of Artificial Sequence: Synthetic oligonucleotide
caugggcugagccaaaucc

SEQ ID NO: 3163323 - RNA, 19 nt, Artificial Sequence
  Description of Artificial Sequence: Synthetic oligonucleotide
uuggggagggcacaugggc

SEQ ID NO: 3163324 - RNA, 19 nt, Artificial Sequence
  Description of Artificial Sequence: Synthetic oligonucleotide
agggcacaugggcugagcc

SEQ ID NO: 3163325 - RNA, 19 nt, Artificial Sequence
  Description of Artificial Sequence: Synthetic oligonucleotide
uuggcgccccucuacaagg

SEQ ID NO: 3163326 - RNA, 19 nt, Artificial Sequence
  Description of Artificial Sequence: Synthetic oligonucleotide
gugguugguaaccagccug

SEQ ID NO: 3163327 - RNA, 19 nt, Artificial Sequence
  Description of Artificial Sequence: Synthetic oligonucleotide
cugagccaaauccugcucc

SEQ ID NO: 3163328 - RNA, 19 nt, Artificial Sequence
  Description of Artificial Sequence: Synthetic oligonucleotide
ugggcugagccaaauccug

SEQ ID NO: 3163329 - RNA, 19 nt, Artificial Sequence
  Description of Artificial Sequence: Synthetic oligonucleotide
ugagccaaauccugcuccc

SEQ ID NO: 3163330 - RNA, 19 nt, Artificial Sequence
  Description of Artificial Sequence: Synthetic oligonucleotide
ugaguuggcgccccucuac

SEQ ID NO: 3163331 - RNA, 19 nt, Artificial Sequence
  Description of Artificial Sequence: Synthetic oligonucleotide
ucuucccuggggugguugg

SEQ ID NO: 3163332 - RNA, 19 nt, Artificial Sequence
  Description of Artificial Sequence: Synthetic oligonucleotide
cccucuacaaggaagccag

SEQ ID NO: 3163333 - RNA, 19 nt, Artificial Sequence
  Description of Artificial Sequence: Synthetic oligonucleotide
acaugggcugagccaaauc

SEQ ID NO: 3163334 - RNA, 19 nt, Artificial Sequence
  Description of Artificial Sequence: Synthetic oligonucleotide
guuggcgccccucuacaag

SEQ ID NO: 3163335 - RNA, 19 nt, Artificial Sequence
  Description of Artificial Sequence: Synthetic oligonucleotide
uggggagggcacaugggcu

SEQ ID NO: 3163336 - RNA, 19 nt, Artificial Sequence
  Description of Artificial Sequence: Synthetic oligonucleotide
agccaaauccugcucccgu

SEQ ID NO: 3163337 - RNA, 19 nt, Artificial Sequence
  Description of Artificial Sequence: Synthetic oligonucleotide
uggggugguugguaaccag

SEQ ID NO: 3163338 - RNA, 19 nt, Artificial Sequence
  Description of Artificial Sequence: Synthetic oligonucleotide
gagccaaauccugcucccg

SEQ ID NO: 3163339 - RNA, 19 nt, Artificial Sequence
  Description of Artificial Sequence: Synthetic oligonucleotide
guuggggagggcacauggg

SEQ ID NO: 3163340 - RNA, 19 nt, Artificial Sequence
  Description of Artificial Sequence: Synthetic oligonucleotide
agguguguuggggagggca

SEQ ID NO: 3163341 - RNA, 19 nt, Artificial Sequence
  Description of Artificial Sequence: Synthetic oligonucleotide
gaguuggcgccccucuaca

SEQ ID NO: 3163342 - RNA, 19 nt, Artificial Sequence
  Description of Artificial Sequence: Synthetic oligonucleotide
augggcugagccaaauccu

SEQ ID NO: 3163343 - RNA, 19 nt, Artificial Sequence
  Description of Artificial Sequence: Synthetic oligonucleotide
uguguuggggagggcacau

SEQ ID NO: 3163344 - RNA, 19 nt, Artificial Sequence
  Description of Artificial Sequence: Synthetic oligonucleotide
gcagguguguuggggaggg

SEQ ID NO: 3163345 - RNA, 19 nt, Artificial Sequence
  Description of Artificial Sequence: Synthetic oligonucleotide
gggugguugguaaccagcc

SEQ ID NO: 3163346 - RNA, 19 nt, Artificial Sequence
  Description of Artificial Sequence: Synthetic oligonucleotide
ucccuggggugguugguaa

SEQ ID NO: 3163347 - RNA, 19 nt, Artificial Sequence
  Description of Artificial Sequence: Synthetic oligonucleotide
ggggagggcacaugggcug

SEQ ID NO: 3163348 - RNA, 19 nt, Artificial Sequence
  Description of Artificial Sequence: Synthetic oligonucleotide
aguuggcgccccucuacaa

SEQ ID NO: 3163349 - RNA, 19 nt, Artificial Sequence
  Description of Artificial Sequence: Synthetic oligonucleotide
gccaaauccugcucccgug

SEQ ID NO: 3163350 - RNA, 19 nt, Artificial Sequence
  Description of Artificial Sequence: Synthetic oligonucleotide
uggcgccccucuacaagga

SEQ ID NO: 3163351 - RNA, 19 nt, Artificial Sequence
  Description of Artificial Sequence: Synthetic oligonucleotide
ggggugguugguaaccagc

SEQ ID NO: 3163352 - RNA, 19 nt, Artificial Sequence
  Description of Artificial Sequence: Synthetic oligonucleotide
aggugaguuggcgccccuc

SEQ ID NO: 3163353 - RNA, 19 nt, Artificial Sequence
  Description of Artificial Sequence: Synthetic oligonucleotide
aucuucccuggggugguug

SEQ ID NO: 3163354 - RNA, 19 nt, Artificial Sequence
  Description of Artificial Sequence: Synthetic oligonucleotide
ggcacaugggcugagccaa

SEQ ID NO: 3163355 - RNA, 19 nt, Artificial Sequence
  Description of Artificial Sequence: Synthetic oligonucleotide
gagggcacaugggcugagc

SEQ ID NO: 3163356 - RNA, 19 nt, Artificial Sequence
  Description of Artificial Sequence: Synthetic oligonucleotide
ccuggggugguugguaacc

SEQ ID NO: 3163357 - RNA, 19 nt, Artificial Sequence
  Description of Artificial Sequence: Synthetic oligonucleotide
gguguguuggggagggcac

SEQ ID NO: 3163358 - RNA, 19 nt, Artificial Sequence
  Description of Artificial Sequence: Synthetic oligonucleotide
cgccccucuacaaggaagc

SEQ ID NO: 3163359 - RNA, 19 nt, Artificial Sequence
  Description of Artificial Sequence: Synthetic oligonucleotide
gcugagccaaauccugcuc

SEQ ID NO: 3163360 - RNA, 19 nt, Artificial Sequence
  Description of Artificial Sequence: Synthetic oligonucleotide
uucccuggggugguuggua

SEQ ID NO: 3163361 - RNA, 19 nt, Artificial Sequence
  Description of Artificial Sequence: Synthetic oligonucleotide
gggcacaugggcugagcca

SEQ ID NO: 3163362 - RNA, 19 nt, Artificial Sequence
  Description of Artificial Sequence: Synthetic oligonucleotide
gggcugagccaaauccugc

SEQ ID NO: 3163363 - RNA, 19 nt, Artificial Sequence
  Description of Artificial Sequence: Synthetic oligonucleotide
guguguuggggagggcaca

SEQ ID NO: 3163364 - RNA, 19 nt, Artificial Sequence
  Description of Artificial Sequence: Synthetic oligonucleotide
ggugaguuggcgccccucu

SEQ ID NO: 3163365 - RNA, 19 nt, Artificial Sequence
  Description of Artificial Sequence: Synthetic oligonucleotide
ggaggugaguuggcgcccc

SEQ ID NO: 3163366 - RNA, 19 nt, Artificial Sequence
  Description of Artificial Sequence: Synthetic oligonucleotide
cuggggugguugguaacca

SEQ ID NO: 3163367 - RNA, 19 nt, Artificial Sequence
  Description of Artificial Sequence: Synthetic oligonucleotide
gcgccccucuacaaggaag

SEQ ID NO: 3163368 - RNA, 19 nt, Artificial Sequence
  Description of Artificial Sequence: Synthetic oligonucleotide
ggcugagccaaauccugcu

SEQ ID NO: 3163369 - RNA, 19 nt, Artificial Sequence
  Description of Artificial Sequence: Synthetic oligonucleotide
guguuggggagggcacaug

SEQ ID NO: 3163370 - RNA, 19 nt, Artificial Sequence
  Description of Artificial Sequence: Synthetic oligonucleotide
gugaguuggcgccccucua

SEQ ID NO: 3163371 - RNA, 19 nt, Artificial Sequence
  Description of Artificial Sequence: Synthetic oligonucleotide
ggugguugguaaccagccu

SEQ ID NO: 3163372 - RNA, 19 nt, Artificial Sequence
  Description of Artificial Sequence: Synthetic oligonucleotide
cagguguguuggggagggc

SEQ ID NO: 3163373 - RNA, 19 nt, Artificial Sequence
  Description of Artificial Sequence: Synthetic oligonucleotide
ggagggcacaugggcugag

SEQ ID NO: 3163374 - RNA, 19 nt, Artificial Sequence
  Description of Artificial Sequence: Synthetic oligonucleotide
gccccucuacaaggaagcc

SEQ ID NO: 3163375 - RNA, 19 nt, Artificial Sequence
  Description of Artificial Sequence: Synthetic oligonucleotide
cccuggggugguugguaac

SEQ ID NO: 3163376 - RNA, 19 nt, Artificial Sequence
  Description of Artificial Sequence: Synthetic oligonucleotide
ccccucuacaaggaagcca

SEQ ID NO: 3163377 - RNA, 19 nt, Artificial Sequence
  Description of Artificial Sequence: Synthetic oligonucleotide
gaggugaguuggcgccccu

SEQ ID NO: 3163378 - RNA, 19 nt, Artificial Sequence
  Description of Artificial Sequence: Synthetic oligonucleotide
gggagggcacaugggcuga

SEQ ID NO: 3163379 - RNA, 19 nt, Artificial Sequence
  Description of Artificial Sequence: Synthetic oligonucleotide
ggcgccccucuacaaggaa

SEQ ID NO: 3163380 - RNA, 19 nt, Artificial Sequence
  Description of Artificial Sequence: Synthetic oligonucleotide
cacaugggcugagccaaau

SEQ ID NO: 3163381 - RNA, 19 nt, Artificial Sequence
  Description of Artificial Sequence: Synthetic oligonucleotide
cuucccuggggugguuggu

SEQ ID NO: 3163382 - RNA, 19 nt, Artificial Sequence
  Description of Artificial Sequence: Synthetic oligonucleotide
gcacaugggcugagccaaa

SEQ ID NO: 3163383 - RNA, 19 nt, Artificial Sequence
  Description of Artificial Sequence: Synthetic oligonucleotide
ccaucuucccugggguggu

SEQ ID NO: 3163384 - RNA, 19 nt, Artificial Sequence
  Description of Artificial Sequence: Synthetic oligonucleotide
ucauauuaaauuuuguagc

SEQ ID NO: 3163385 - RNA, 19 nt, Artificial Sequence
  Description of Artificial Sequence: Synthetic oligonucleotide
gacacuuagacauaggcgc

SEQ ID NO: 3163386 - RNA, 19 nt, Artificial Sequence
  Description of Artificial Sequence: Synthetic oligonucleotide
uuuguagcgauuccaaagg

SEQ ID NO: 3163387 - RNA, 19 nt, Artificial Sequence
  Description of Artificial Sequence: Synthetic oligonucleotide
cauauuaaauuuuguagcg

SEQ ID NO: 3163388 - RNA, 19 nt, Artificial Sequence
  Description of Artificial Sequence: Synthetic oligonucleotide
ugacauauaguugagaaug

SEQ ID NO: 3163389 - RNA, 19 nt, Artificial Sequence
  Description of Artificial Sequence: Synthetic oligonucleotide
ugagguuuaggucugagcu

SEQ ID NO: 3163390 - RNA, 19 nt, Artificial Sequence
  Description of Artificial Sequence: Synthetic oligonucleotide
uuuuguagcgauuccaaag

SEQ ID NO: 3163391 - RNA, 19 nt, Artificial Sequence
  Description of Artificial Sequence: Synthetic oligonucleotide
aaugugucugcucagcucu

SEQ ID NO: 3163392 - RNA, 19 nt, Artificial Sequence
  Description of Artificial Sequence: Synthetic oligonucleotide
auggcaauacuucucuucc

SEQ ID NO: 3163393 - RNA, 19 nt, Artificial Sequence
  Description of Artificial Sequence: Synthetic oligonucleotide
gauaggauguuccuggcag

SEQ ID NO: 3163394 - RNA, 19 nt, Artificial Sequence
  Description of Artificial Sequence: Synthetic oligonucleotide
uuugaauggggacacuuag

SEQ ID NO: 3163395 - RNA, 19 nt, Artificial Sequence
  Description of Artificial Sequence: Synthetic oligonucleotide
uccagaacuugacauauag

SEQ ID NO: 3163396 - RNA, 19 nt, Artificial Sequence
  Description of Artificial Sequence: Synthetic oligonucleotide
cauugugugucuuugaaug

SEQ ID NO: 3163397 - RNA, 19 nt, Artificial Sequence
  Description of Artificial Sequence: Synthetic oligonucleotide
gaacuugacauauaguuga

SEQ ID NO: 3163398 - RNA, 19 nt, Artificial Sequence
  Description of Artificial Sequence: Synthetic oligonucleotide
acaggagggacccaucucc

SEQ ID NO: 3163399 - RNA, 19 nt, Artificial Sequence
  Description of Artificial Sequence: Synthetic oligonucleotide
augagcaaagcaucaagac

SEQ ID NO: 3163400 - RNA, 19 nt, Artificial Sequence
  Description of Artificial Sequence: Synthetic oligonucleotide
aaagcaucaagacucccca

SEQ ID NO: 3163401 - RNA, 19 nt, Artificial Sequence
  Description of Artificial Sequence: Synthetic oligonucleotide
ugaauggggacacuuagac

SEQ ID NO: 3163402 - RNA, 19 nt, Artificial Sequence
  Description of Artificial Sequence: Synthetic oligonucleotide
uuaaauuuuguagcgauuc

SEQ ID NO: 3163403 - RNA, 19 nt, Artificial Sequence
  Description of Artificial Sequence: Synthetic oligonucleotide
uuaagucucauauuaaauu

SEQ ID NO: 3163404 - RNA, 19 nt, Artificial Sequence
  Description of Artificial Sequence: Synthetic oligonucleotide
uuaggucugagcuaaguga

SEQ ID NO: 3163405 - RNA, 19 nt, Artificial Sequence
  Description of Artificial Sequence: Synthetic oligonucleotide
ucaagugcagcuuauggcu

SEQ ID NO: 3163406 - RNA, 19 nt, Artificial Sequence
  Description of Artificial Sequence: Synthetic oligonucleotide
cagucuauauagcagagag

SEQ ID NO: 3163407 - RNA, 19 nt, Artificial Sequence
  Description of Artificial Sequence: Synthetic oligonucleotide
uauuaaauuuuguagcgau

SEQ ID NO: 3163408 - RNA, 19 nt, Artificial Sequence
  Description of Artificial Sequence: Synthetic oligonucleotide
auauaguugagaauguguc

SEQ ID NO: 3163409 - RNA, 19 nt, Artificial Sequence
  Description of Artificial Sequence: Synthetic oligonucleotide
agaggacaagcucacaccg

SEQ ID NO: 3163410 - RNA, 19 nt, Artificial Sequence
  Description of Artificial Sequence: Synthetic oligonucleotide
caacauuuauguaauuggc

SEQ ID NO: 3163411 - RNA, 19 nt, Artificial Sequence
  Description of Artificial Sequence: Synthetic oligonucleotide
ucucauauuaaauuuugua

SEQ ID NO: 3163412 - RNA, 19 nt, Artificial Sequence
  Description of Artificial Sequence: Synthetic oligonucleotide
ugagcaaagcaucaagacu

SEQ ID NO: 3163413 - RNA, 19 nt, Artificial Sequence
  Description of Artificial Sequence: Synthetic oligonucleotide
aacugccacacaucauucc

SEQ ID NO: 3163414 - RNA, 19 nt, Artificial Sequence
  Description of Artificial Sequence: Synthetic oligonucleotide
cucgauaggauguuccugg

SEQ ID NO: 3163415 - RNA, 19 nt, Artificial Sequence
  Description of Artificial Sequence: Synthetic oligonucleotide
uaaauuuuguagcgauucc

SEQ ID NO: 3163416 - RNA, 19 nt, Artificial Sequence
  Description of Artificial Sequence: Synthetic oligonucleotide
uaagucucauauuaaauuu

SEQ ID NO: 3163417 - RNA, 19 nt, Artificial Sequence
  Description of Artificial Sequence: Synthetic oligonucleotide
aaauuuuguagcgauucca

SEQ ID NO: 3163418 - RNA, 19 nt, Artificial Sequence
  Description of Artificial Sequence: Synthetic oligonucleotide
acugccacacaucauuccg

SEQ ID NO: 3163419 - RNA, 19 nt, Artificial Sequence
  Description of Artificial Sequence: Synthetic oligonucleotide
uguagcgauuccaaaggcc

SEQ ID NO: 3163420 - RNA, 19 nt, Artificial Sequence
  Description of Artificial Sequence: Synthetic oligonucleotide
acauuuauguaauuggcuu

SEQ ID NO: 3163421 - RNA, 19 nt, Artificial Sequence
  Description of Artificial Sequence: Synthetic oligonucleotide
gagcaaagcaucaagacuc

SEQ ID NO: 3163422 - RNA, 19 nt, Artificial Sequence
  Description of Artificial Sequence: Synthetic oligonucleotide
acaagcucacaccguagcc

SEQ ID NO: 3163423 - RNA, 19 nt, Artificial Sequence
  Description of Artificial Sequence: Synthetic oligonucleotide
auugugugucuuugaaugg

SEQ ID NO: 3163424 - RNA, 19 nt, Artificial Sequence
  Description of Artificial Sequence: Synthetic oligonucleotide
aacauuuauguaauuggcu

SEQ ID NO: 3163425 - RNA, 19 nt, Artificial Sequence
  Description of Artificial Sequence: Synthetic oligonucleotide
uugauggcaauacuucucu

SEQ ID NO: 3163426 - RNA, 19 nt, Artificial Sequence
  Description of Artificial Sequence: Synthetic oligonucleotide
aagcucagucuauauagca

SEQ ID NO: 3163427 - RNA, 19 nt, Artificial Sequence
  Description of Artificial Sequence: Synthetic oligonucleotide
aaugagcaaagcaucaaga

SEQ ID NO: 3163428 - RNA, 19 nt, Artificial Sequence
  Description of Artificial Sequence: Synthetic oligonucleotide
cuugacauauaguugagaa

SEQ ID NO: 3163429 - RNA, 19 nt, Artificial Sequence
  Description of Artificial Sequence: Synthetic oligonucleotide
uuauguaauuggcuucuga

SEQ ID NO: 3163430 - RNA, 19 nt, Artificial Sequence
  Description of Artificial Sequence: Synthetic oligonucleotide
ucuccguaguccaaggaca

SEQ ID NO: 3163431 - RNA, 19 nt, Artificial Sequence
  Description of Artificial Sequence: Synthetic oligonucleotide
gauggcaauacuucucuuc

SEQ ID NO: 3163432 - RNA, 19 nt, Artificial Sequence
  Description of Artificial Sequence: Synthetic oligonucleotide
aggauaucuucugaggagg

SEQ ID NO: 3163433 - RNA, 19 nt, Artificial Sequence
  Description of Artificial Sequence: Synthetic oligonucleotide
ucuuccuucucccagugua

SEQ ID NO: 3163434 - RNA, 19 nt, Artificial Sequence
  Description of Artificial Sequence: Synthetic oligonucleotide
auuccgucgcagcauggcc

SEQ ID NO: 3163435 - RNA, 19 nt, Artificial Sequence
  Description of Artificial Sequence: Synthetic oligonucleotide
uucauugugugucuuugaa

SEQ ID NO: 3163436 - RNA, 19 nt, Artificial Sequence
  Description of Artificial Sequence: Synthetic oligonucleotide
ccauuuuccauuuucuggg

SEQ ID NO: 3163437 - RNA, 19 nt, Artificial Sequence
  Description of Artificial Sequence: Synthetic oligonucleotide
uauauagcagagagguuaa

SEQ ID NO: 3163438 - RNA, 19 nt, Artificial Sequence
  Description of Artificial Sequence: Synthetic oligonucleotide
cauuuauguaauuggcuuc

SEQ ID NO: 3163439 - RNA, 19 nt, Artificial Sequence
  Description of Artificial Sequence: Synthetic oligonucleotide
ucugagcuaagugaggcca

SEQ ID NO: 3163440 - RNA, 19 nt, Artificial Sequence
  Description of Artificial Sequence: Synthetic oligonucleotide
guagcgauuccaaaggccc

SEQ ID NO: 3163441 - RNA, 19 nt, Artificial Sequence
  Description of Artificial Sequence: Synthetic oligonucleotide
auaucuucugaggaggcag

SEQ ID NO: 3163442 - RNA, 19 nt, Artificial Sequence
  Description of Artificial Sequence: Synthetic oligonucleotide
acuuggucgcccuugucuc

SEQ ID NO: 3163443 - RNA, 19 nt, Artificial Sequence
  Description of Artificial Sequence: Synthetic oligonucleotide
auuuauguaauuggcuucu

SEQ ID NO: 3163444 - RNA, 19 nt, Artificial Sequence
  Description of Artificial Sequence: Synthetic oligonucleotide
uauagcagagagguuaagu

SEQ ID NO: 3163445 - RNA, 19 nt, Artificial Sequence
  Description of Artificial Sequence: Synthetic oligonucleotide
ugugucuuugaauggggac

SEQ ID NO: 3163446 - RNA, 19 nt, Artificial Sequence
  Description of Artificial Sequence: Synthetic oligonucleotide
aauuuuguagcgauuccaa

SEQ ID NO: 3163447 - RNA, 19 nt, Artificial Sequence
  Description of Artificial Sequence: Synthetic oligonucleotide
cccaguguagacuuggucg

SEQ ID NO: 3163448 - RNA, 19 nt, Artificial Sequence
  Description of Artificial Sequence: Synthetic oligonucleotide
agaacuugacauauaguug

SEQ ID NO: 3163449 - RNA, 19 nt, Artificial Sequence
  Description of Artificial Sequence: Synthetic oligonucleotide
gucuauauagcagagaggu

SEQ ID NO: 3163450 - RNA, 19 nt, Artificial Sequence
  Description of Artificial Sequence: Synthetic oligonucleotide
gacaagcucacaccguagc

SEQ ID NO: 3163451 - RNA, 19 nt, Artificial Sequence
  Description of Artificial Sequence: Synthetic oligonucleotide
ucugaggaggcagaggaca

SEQ ID NO: 3163452 - RNA, 19 nt, Artificial Sequence
  Description of Artificial Sequence: Synthetic oligonucleotide
caggauaucuucugaggag

SEQ ID NO: 3163453 - RNA, 19 nt, Artificial Sequence
  Description of Artificial Sequence: Synthetic oligonucleotide
uuguagcgauuccaaaggc

SEQ ID NO: 3163454 - RNA, 19 nt, Artificial Sequence
  Description of Artificial Sequence: Synthetic oligonucleotide
cuugauggcaauacuucuc

SEQ ID NO: 3163455 - RNA, 19 nt, Artificial Sequence
  Description of Artificial Sequence: Synthetic oligonucleotide
uauggcuugauggcaauac

SEQ ID NO: 3163456 - RNA, 19 nt, Artificial Sequence
  Description of Artificial Sequence: Synthetic oligonucleotide
gagcauggugaguagcucc

SEQ ID NO: 3163457 - RNA, 19 nt, Artificial Sequence
  Description of Artificial Sequence: Synthetic oligonucleotide
auaggauguuccuggcagg

SEQ ID NO: 3163458 - RNA, 19 nt, Artificial Sequence
  Description of Artificial Sequence: Synthetic oligonucleotide
uccaaggacaggagggacc

SEQ ID NO: 3163459 - RNA, 19 nt, Artificial Sequence
  Description of Artificial Sequence: Synthetic oligonucleotide
auuccaaaggcccacccaa

SEQ ID NO: 3163460 - RNA, 19 nt, Artificial Sequence
  Description of Artificial Sequence: Synthetic oligonucleotide
gagagguuaagucucauau

SEQ ID NO: 3163461 - RNA, 19 nt, Artificial Sequence
  Description of Artificial Sequence: Synthetic oligonucleotide
uuagacauaggcgcccgag

SEQ ID NO: 3163462 - RNA, 19 nt, Artificial Sequence
  Description of Artificial Sequence: Synthetic oligonucleotide
uccccagccaacauuuaug

SEQ ID NO: 3163463 - RNA, 19 nt, Artificial Sequence
  Description of Artificial Sequence: Synthetic oligonucleotide
uugaauggggacacuuaga

SEQ ID NO: 3163464 - RNA, 19 nt, Artificial Sequence
  Description of Artificial Sequence: Synthetic oligonucleotide
cuauauagcagagagguua

SEQ ID NO: 3163465 - RNA, 19 nt, Artificial Sequence
  Description of Artificial Sequence: Synthetic oligonucleotide
ucugggcucauuucuaaaa

SEQ ID NO: 3163466 - RNA, 19 nt, Artificial Sequence
  Description of Artificial Sequence: Synthetic oligonucleotide
uugacauauaguugagaau

SEQ ID NO: 3163467 - RNA, 19 nt, Artificial Sequence
  Description of Artificial Sequence: Synthetic oligonucleotide
agucucauauuaaauuuug

SEQ ID NO: 3163468 - RNA, 19 nt, Artificial Sequence
  Description of Artificial Sequence: Synthetic oligonucleotide
ugagaaugugucugcucag

SEQ ID NO: 3163469 - RNA, 19 nt, Artificial Sequence
  Description of Artificial Sequence: Synthetic oligonucleotide
auauuaaauuuuguagcga

SEQ ID NO: 3163470 - RNA, 19 nt, Artificial Sequence
  Description of Artificial Sequence: Synthetic oligonucleotide
aguguagacuuggucgccc

SEQ ID NO: 3163471 - RNA, 19 nt, Artificial Sequence
  Description of Artificial Sequence: Synthetic oligonucleotide
acaccguagccugacgucc

SEQ ID NO: 3163472 - RNA, 19 nt, Artificial Sequence
  Description of Artificial Sequence: Synthetic oligonucleotide
ugaguagcuccucgauagg

SEQ ID NO: 3163473 - RNA, 19 nt, Artificial Sequence
  Description of Artificial Sequence: Synthetic oligonucleotide
agacauaggcgcccgagca

SEQ ID NO: 3163474 - RNA, 19 nt, Artificial Sequence
  Description of Artificial Sequence: Synthetic oligonucleotide
uaggauguuccuggcaggg

SEQ ID NO: 3163475 - RNA, 19 nt, Artificial Sequence
  Description of Artificial Sequence: Synthetic oligonucleotide
uagacauaggcgcccgagc

SEQ ID NO: 3163476 - RNA, 19 nt, Artificial Sequence
  Description of Artificial Sequence: Synthetic oligonucleotide
caggcuaggaagcucaguc

SEQ ID NO: 3163477 - RNA, 19 nt, Artificial Sequence
  Description of Artificial Sequence: Synthetic oligonucleotide
gaugcccaaagcugauucc

SEQ ID NO: 3163478 - RNA, 19 nt, Artificial Sequence
  Description of Artificial Sequence: Synthetic oligonucleotide
ugacguaggaacugccaca

SEQ ID NO: 3163479 - RNA, 19 nt, Artificial Sequence
  Description of Artificial Sequence: Synthetic oligonucleotide
aucaagacuccccagccaa

SEQ ID NO: 3163480 - RNA, 19 nt, Artificial Sequence
  Description of Artificial Sequence: Synthetic oligonucleotide
gggacacuuagacauaggc

SEQ ID NO: 3163481 - RNA, 19 nt, Artificial Sequence
  Description of Artificial Sequence: Synthetic oligonucleotide
acacuuagacauaggcgcc

SEQ ID NO: 3163482 - RNA, 19 nt, Artificial Sequence
  Description of Artificial Sequence: Synthetic oligonucleotide
ugcagcuuauggcuugaug

SEQ ID NO: 3163483 - RNA, 19 nt, Artificial Sequence
  Description of Artificial Sequence: Synthetic oligonucleotide
agaaugugucugcucagcu

SEQ ID NO: 3163484 - RNA, 19 nt, Artificial Sequence
  Description of Artificial Sequence: Synthetic oligonucleotide
aagaaguccaucaagagcc

SEQ ID NO: 3163485 - RNA, 19 nt, Artificial Sequence
  Description of Artificial Sequence: Synthetic oligonucleotide
aaagaaguccaucaagagc

SEQ ID NO: 3163486 - RNA, 19 nt, Artificial Sequence
  Description of Artificial Sequence: Synthetic oligonucleotide
auagacuguauuuaaaagc

SEQ ID NO: 3163487 - RNA, 19 nt, Artificial Sequence
  Description of Artificial Sequence: Synthetic oligonucleotide
aaaguugacagcuuuucgg

SEQ ID NO: 3163488 - RNA, 19 nt, Artificial Sequence
  Description of Artificial Sequence: Synthetic oligonucleotide
ucuacuuguaauccuaugg

SEQ ID NO: 3163489 - RNA, 19 nt, Artificial Sequence
  Description of Artificial Sequence: Synthetic oligonucleotide
uccaucaagagccugaaag

SEQ ID NO: 3163490 - RNA, 19 nt, Artificial Sequence
  Description of Artificial Sequence: Synthetic oligonucleotide
uagacuguauuuaaaagcc

SEQ ID NO: 3163491 - RNA, 19 nt, Artificial Sequence
  Description of Artificial Sequence: Synthetic oligonucleotide
uguauuuaaaagccgacug

SEQ ID NO: 3163492 - RNA, 19 nt, Artificial Sequence
  Description of Artificial Sequence: Synthetic oligonucleotide
aacucuguaaucuacuugu

SEQ ID NO: 3163493 - RNA, 19 nt, Artificial Sequence
  Description of Artificial Sequence: Synthetic oligonucleotide
uggagaaauaagauguugg

SEQ ID NO: 3163494 - RNA, 19 nt, Artificial Sequence
  Description of Artificial Sequence: Synthetic oligonucleotide
aaaauuuguagcuccuguc

SEQ ID NO: 3163495 - RNA, 19 nt, Artificial Sequence
  Description of Artificial Sequence: Synthetic oligonucleotide
aaguugacagcuuuucggg

SEQ ID NO: 3163496 - RNA, 19 nt, Artificial Sequence
  Description of Artificial Sequence: Synthetic oligonucleotide
gauaaagaaguccaucaag

SEQ ID NO: 3163497 - RNA, 19 nt, Artificial Sequence
  Description of Artificial Sequence: Synthetic oligonucleotide
agaaauaagauguugggaa

SEQ ID NO: 3163498 - RNA, 19 nt, Artificial Sequence
  Description of Artificial Sequence: Synthetic oligonucleotide
gauagacuguauuuaaaag

SEQ ID NO: 3163499 - RNA, 19 nt, Artificial Sequence
  Description of Artificial Sequence: Synthetic oligonucleotide
aaauuuguagcuccugucu

SEQ ID NO: 3163500 - RNA, 19 nt, Artificial Sequence
  Description of Artificial Sequence: Synthetic oligonucleotide
uggcucaugagauagacug

SEQ ID NO: 3163501 - RNA, 19 nt, Artificial Sequence
  Description of Artificial Sequence: Synthetic oligonucleotide
auaggaagacuucuucugc

SEQ ID NO: 3163502 - RNA, 19 nt, Artificial Sequence
  Description of Artificial Sequence: Synthetic oligonucleotide
gaaauaagauguugggaag

SEQ ID NO: 3163503 - RNA, 19 nt, Artificial Sequence
  Description of Artificial Sequence: Synthetic oligonucleotide
agagccugaaaguugacag

SEQ ID NO: 3163504 - RNA, 19 nt, Artificial Sequence
  Description of Artificial Sequence: Synthetic oligonucleotide
gauaggaagacuucuucug

SEQ ID NO: 3163505 - RNA, 19 nt, Artificial Sequence
  Description of Artificial Sequence: Synthetic oligonucleotide
gauguugggaaguauuggc

SEQ ID NO: 3163506 - RNA, 19 nt, Artificial Sequence
  Description of Artificial Sequence: Synthetic oligonucleotide
aauccuauggagaaauaag

SEQ ID NO: 3163507 - RNA, 19 nt, Artificial Sequence
  Description of Artificial Sequence: Synthetic oligonucleotide
uguaaucuacuuguaaucc

SEQ ID NO: 3163508 - RNA, 19 nt, Artificial Sequence
  Description of Artificial Sequence: Synthetic oligonucleotide
uaaagaaguccaucaagag

SEQ ID NO: 3163509 - RNA, 19 nt, Artificial Sequence
  Description of Artificial Sequence: Synthetic oligonucleotide
ugagaaagcuccuugcagc

SEQ ID NO: 3163510 - RNA, 19 nt, Artificial Sequence
  Description of Artificial Sequence: Synthetic oligonucleotide
uguauauguggaaggcugg

SEQ ID NO: 3163511 - RNA, 19 nt, Artificial Sequence
  Description of Artificial Sequence: Synthetic oligonucleotide
ucugcuaggaugagaaagc

SEQ ID NO: 3163512 - RNA, 19 nt, Artificial Sequence
  Description of Artificial Sequence: Synthetic oligonucleotide
gaaguauuggcucaugaga

SEQ ID NO: 3163513 - RNA, 19 nt, Artificial Sequence
  Description of Artificial Sequence: Synthetic oligonucleotide
uauuuaaaagccgacugug

SEQ ID NO: 3163514 - RNA, 19 nt, Artificial Sequence
  Description of Artificial Sequence: Synthetic oligonucleotide
ucuucugcuaggaugagaa

SEQ ID NO: 3163515 - RNA, 19 nt, Artificial Sequence
  Description of Artificial Sequence: Synthetic oligonucleotide
ucuguaaucuacuuguaau

SEQ ID NO: 3163516 - RNA, 19 nt, Artificial Sequence
  Description of Artificial Sequence: Synthetic oligonucleotide
aaacucuguaaucuacuug

SEQ ID NO: 3163517 - RNA, 19 nt, Artificial Sequence
  Description of Artificial Sequence: Synthetic oligonucleotide
gaaaguugacagcuuuucg

SEQ ID NO: 3163518 - RNA, 19 nt, Artificial Sequence
  Description of Artificial Sequence: Synthetic oligonucleotide
cuucuugucacaaaugcuc

SEQ ID NO: 3163519 - RNA, 19 nt, Artificial Sequence
  Description of Artificial Sequence: Synthetic oligonucleotide
uuuaaaagccgacugugau

SEQ ID NO: 3163520 - RNA, 19 nt, Artificial Sequence
  Description of Artificial Sequence: Synthetic oligonucleotide
aagucuguggcaugauagg

SEQ ID NO: 3163521 - RNA, 19 nt, Artificial Sequence
  Description of Artificial Sequence: Synthetic oligonucleotide
uauguggaaggcuggaugc

SEQ ID NO: 3163522 - RNA, 19 nt, Artificial Sequence
  Description of Artificial Sequence: Synthetic oligonucleotide
ucaagagccugaaaguuga

SEQ ID NO: 3163523 - RNA, 19 nt, Artificial Sequence
  Description of Artificial Sequence: Synthetic oligonucleotide
uacuuguaauccuauggag

SEQ ID NO: 3163524 - RNA, 19 nt, Artificial Sequence
  Description of Artificial Sequence: Synthetic oligonucleotide
augauaggaagacuucuuc

SEQ ID NO: 3163525 - RNA, 19 nt, Artificial Sequence
  Description of Artificial Sequence: Synthetic oligonucleotide
uucugcuaggaugagaaag

SEQ ID NO: 3163526 - RNA, 19 nt, Artificial Sequence
  Description of Artificial Sequence: Synthetic oligonucleotide
caagucuguggcaugauag

SEQ ID NO: 3163527 - RNA, 19 nt, Artificial Sequence
  Description of Artificial Sequence: Synthetic oligonucleotide
uuucgggagccaaagaaca

SEQ ID NO: 3163528 - RNA, 19 nt, Artificial Sequence
  Description of Artificial Sequence: Synthetic oligonucleotide
uaaaacucuguaaucuacu

SEQ ID NO: 3163529 - RNA, 19 nt, Artificial Sequence
  Description of Artificial Sequence: Synthetic oligonucleotide
aaagccgacugugauaaag

SEQ ID NO: 3163530 - RNA, 19 nt, Artificial Sequence
  Description of Artificial Sequence: Synthetic oligonucleotide
gacuucuucugcuaggaug

SEQ ID NO: 3163531 - RNA, 19 nt, Artificial Sequence
  Description of Artificial Sequence: Synthetic oligonucleotide
ucuguggcaugauaggaag

SEQ ID NO: 3163532 - RNA, 19 nt, Artificial Sequence
  Description of Artificial Sequence: Synthetic oligonucleotide
agcucuaaaacucuguaau

SEQ ID NO: 3163533 - RNA, 19 nt, Artificial Sequence
  Description of Artificial Sequence: Synthetic oligonucleotide
gucuucuugucacaaaugc

SEQ ID NO: 3163534 - RNA, 19 nt, Artificial Sequence
  Description of Artificial Sequence: Synthetic oligonucleotide
uaaaagccgacugugauaa

SEQ ID NO: 3163535 - RNA, 19 nt, Artificial Sequence
  Description of Artificial Sequence: Synthetic oligonucleotide
cuaaaacucuguaaucuac

SEQ ID NO: 3163536 - RNA, 19 nt, Artificial Sequence
  Description of Artificial Sequence: Synthetic oligonucleotide
ggagaaauaagauguuggg

SEQ ID NO: 3163537 - RNA, 19 nt, Artificial Sequence
  Description of Artificial Sequence: Synthetic oligonucleotide
cuauggagaaauaagaugu

SEQ ID NO: 3163538 - RNA, 19 nt, Artificial Sequence
  Description of Artificial Sequence: Synthetic oligonucleotide
agauagacuguauuuaaaa

SEQ ID NO: 3163539 - RNA, 19 nt, Artificial Sequence
  Description of Artificial Sequence: Synthetic oligonucleotide
auaaagaaguccaucaaga

SEQ ID NO: 3163540 - RNA, 19 nt, Artificial Sequence
  Description of Artificial Sequence: Synthetic oligonucleotide
aaggcuggaugcucaaguc

SEQ ID NO: 3163541 - RNA, 19 nt, Artificial Sequence
  Description of Artificial Sequence: Synthetic oligonucleotide
uuuucgggagccaaagaac

SEQ ID NO: 3163542 - RNA, 19 nt, Artificial Sequence
  Description of Artificial Sequence: Synthetic oligonucleotide
gugauaaagaaguccauca

SEQ ID NO: 3163543 - RNA, 19 nt, Artificial Sequence
  Description of Artificial Sequence: Synthetic oligonucleotide
aaauaagauguugggaagu

SEQ ID NO: 3163544 - RNA, 19 nt, Artificial Sequence
  Description of Artificial Sequence: Synthetic oligonucleotide
gaagacuucuucugcuagg

SEQ ID NO: 3163545 - RNA, 19 nt, Artificial Sequence
  Description of Artificial Sequence: Synthetic oligonucleotide
auuuguagcuccugucuuc

SEQ ID NO: 3163546 - RNA, 19 nt, Artificial Sequence
  Description of Artificial Sequence: Synthetic oligonucleotide
auauguggaaggcuggaug

SEQ ID NO: 3163547 - RNA, 19 nt, Artificial Sequence
  Description of Artificial Sequence: Synthetic oligonucleotide
ugauaggaagacuucuucu

SEQ ID NO: 3163548 - RNA, 19 nt, Artificial Sequence
  Description of Artificial Sequence: Synthetic oligonucleotide
aaaacucuguaaucuacuu

SEQ ID NO: 3163549 - RNA, 19 nt, Artificial Sequence
  Description of Artificial Sequence: Synthetic oligonucleotide
augagaaagcuccuugcag

SEQ ID NO: 3163550 - RNA, 19 nt, Artificial Sequence
  Description of Artificial Sequence: Synthetic oligonucleotide
ugauaaagaaguccaucaa

SEQ ID NO: 3163551 - RNA, 19 nt, Artificial Sequence
  Description of Artificial Sequence: Synthetic oligonucleotide
auuggcucaugagauagac

SEQ ID NO: 3163552 - RNA, 19 nt, Artificial Sequence
  Description of Artificial Sequence: Synthetic oligonucleotide
ugagauagacuguauuuaa

SEQ ID NO: 3163553 - RNA, 19 nt, Artificial Sequence
  Description of Artificial Sequence: Synthetic oligonucleotide
acugugauaaagaagucca

SEQ ID NO: 3163554 - RNA, 19 nt, Artificial Sequence
  Description of Artificial Sequence: Synthetic oligonucleotide
uucuugucacaaaugcuca

SEQ ID NO: 3163555 - RNA, 19 nt, Artificial Sequence
  Description of Artificial Sequence: Synthetic oligonucleotide
uguagcuccugucuucuug

SEQ ID NO: 3163556 - RNA, 19 nt, Artificial Sequence
  Description of Artificial Sequence: Synthetic oligonucleotide
uaaucuacuuguaauccua

SEQ ID NO: 3163557 - RNA, 19 nt, Artificial Sequence
  Description of Artificial Sequence: Synthetic oligonucleotide
uaagauguugggaaguauu

SEQ ID NO: 3163558 - RNA, 19 nt, Artificial Sequence
  Description of Artificial Sequence: Synthetic oligonucleotide
ucuucuugucacaaaugcu

SEQ ID NO: 3163559 - RNA, 19 nt, Artificial Sequence
  Description of Artificial Sequence: Synthetic oligonucleotide
uguaauccuauggagaaau

SEQ ID NO: 3163560 - RNA, 19 nt, Artificial Sequence
  Description of Artificial Sequence: Synthetic oligonucleotide
gacugugauaaagaagucc

SEQ ID NO: 3163561 - RNA, 19 nt, Artificial Sequence
  Description of Artificial Sequence: Synthetic oligonucleotide
uggugguguguauaugugg

SEQ ID NO: 3163562 - RNA, 19 nt, Artificial Sequence
  Description of Artificial Sequence: Synthetic oligonucleotide
uccuauggagaaauaagau

SEQ ID NO: 3163563 - RNA, 19 nt, Artificial Sequence
  Description of Artificial Sequence: Synthetic oligonucleotide
aagauguugggaaguauug

SEQ ID NO: 3163564 - RNA, 19 nt, Artificial Sequence
  Description of Artificial Sequence: Synthetic oligonucleotide
guugacagcuuuucgggag

SEQ ID NO: 3163565 - RNA, 19 nt, Artificial Sequence
  Description of Artificial Sequence: Synthetic oligonucleotide
aauuuguagcuccugucuu

SEQ ID NO: 3163566 - RNA, 19 nt, Artificial Sequence
  Description of Artificial Sequence: Synthetic oligonucleotide
gcuaggaugagaaagcucc

SEQ ID NO: 3163567 - RNA, 19 nt, Artificial Sequence
  Description of Artificial Sequence: Synthetic oligonucleotide
cuguaaucuacuuguaauc

SEQ ID NO: 3163568 - RNA, 19 nt, Artificial Sequence
  Description of Artificial Sequence: Synthetic oligonucleotide
ucuaaaacucuguaaucua

SEQ ID NO: 3163569 - RNA, 19 nt, Artificial Sequence
  Description of Artificial Sequence: Synthetic oligonucleotide
guauuggcucaugagauag

SEQ ID NO: 3163570 - RNA, 19 nt, Artificial Sequence
  Description of Artificial Sequence: Synthetic oligonucleotide
gguguguauauguggaagg

SEQ ID NO: 3163571 - RNA, 19 nt, Artificial Sequence
  Description of Artificial Sequence: Synthetic oligonucleotide
aaguauuggcucaugagau

SEQ ID NO: 3163572 - RNA, 19 nt, Artificial Sequence
  Description of Artificial Sequence: Synthetic oligonucleotide
agccaaagaacaaagaaaa

SEQ ID NO: 3163573 - RNA, 19 nt, Artificial Sequence
  Description of Artificial Sequence: Synthetic oligonucleotide
uaauccuauggagaaauaa

SEQ ID NO: 3163574 - RNA, 19 nt, Artificial Sequence
  Description of Artificial Sequence: Synthetic oligonucleotide
ugugauaaagaaguccauc

SEQ ID NO: 3163575 - RNA, 19 nt, Artificial Sequence
  Description of Artificial Sequence: Synthetic oligonucleotide
cuuguaauccuauggagaa

SEQ ID NO: 3163576 - RNA, 19 nt, Artificial Sequence
  Description of Artificial Sequence: Synthetic oligonucleotide
ugucuucuugucacaaaug

SEQ ID NO: 3163577 - RNA, 19 nt, Artificial Sequence
  Description of Artificial Sequence: Synthetic oligonucleotide
uggaugcucaagucugugg

SEQ ID NO: 3163578 - RNA, 19 nt, Artificial Sequence
  Description of Artificial Sequence: Synthetic oligonucleotide
acuguauuuaaaagccgac

SEQ ID NO: 3163579 - RNA, 19 nt, Artificial Sequence
  Description of Artificial Sequence: Synthetic oligonucleotide
uguugggaaguauuggcuc

SEQ ID NO: 3163580 - RNA, 19 nt, Artificial Sequence
  Description of Artificial Sequence: Synthetic oligonucleotide
gaugagaaagcuccuugca

SEQ ID NO: 3163581 - RNA, 19 nt, Artificial Sequence
  Description of Artificial Sequence: Synthetic oligonucleotide
uguggcaugauaggaagac

SEQ ID NO: 3163582 - RNA, 19 nt, Artificial Sequence
  Description of Artificial Sequence: Synthetic oligonucleotide
aggaugagaaagcuccuug

SEQ ID NO: 3163583 - RNA, 19 nt, Artificial Sequence
  Description of Artificial Sequence: Synthetic oligonucleotide
agauguugggaaguauugg

SEQ ID NO: 3163584 - RNA, 19 nt, Artificial Sequence
  Description of Artificial Sequence: Synthetic oligonucleotide
aaaguuaacaaaccaaggc

SEQ ID NO: 3163585 - RNA, 19 nt, Artificial Sequence
  Description of Artificial Sequence: Synthetic oligonucleotide
uauaauacagccagggugg

SEQ ID NO: 3163586 - RNA, 19 nt, Artificial Sequence
  Description of Artificial Sequence: Synthetic oligonucleotide
aaugcuaugaggcccuucc

SEQ ID NO: 3163587 - RNA, 19 nt, Artificial Sequence
  Description of Artificial Sequence: Synthetic oligonucleotide
agugaaagggcuuauugcc

SEQ ID NO: 3163588 - RNA, 19 nt, Artificial Sequence
  Description of Artificial Sequence: Synthetic oligonucleotide
ucuaauuuaggucaacacc

SEQ ID NO: 3163589 - RNA, 19 nt, Artificial Sequence
  Description of Artificial Sequence: Synthetic oligonucleotide
caauauuucaaucuggccc

SEQ ID NO: 3163590 - RNA, 19 nt, Artificial Sequence
  Description of Artificial Sequence: Synthetic oligonucleotide
uugauuauuuuccaaagug

SEQ ID NO: 3163591 - RNA, 19 nt, Artificial Sequence
  Description of Artificial Sequence: Synthetic oligonucleotide
aaacaaauggugugauucc

SEQ ID NO: 3163592 - RNA, 19 nt, Artificial Sequence
  Description of Artificial Sequence: Synthetic oligonucleotide
acauucgacaaacaaaugg

SEQ ID NO: 3163593 - RNA, 19 nt, Artificial Sequence
  Description of Artificial Sequence: Synthetic oligonucleotide
ucgaagauauuccacauag

SEQ ID NO: 3163594 - RNA, 19 nt, Artificial Sequence
  Description of Artificial Sequence: Synthetic oligonucleotide
acaaacaugacagugaaag

SEQ ID NO: 3163595 - RNA, 19 nt, Artificial Sequence
  Description of Artificial Sequence: Synthetic oligonucleotide
aaguuaacaaaccaaggcu

SEQ ID NO: 3163596 - RNA, 19 nt, Artificial Sequence
  Description of Artificial Sequence: Synthetic oligonucleotide
uauaaaguuaacaaaccaa

SEQ ID NO: 3163597 - RNA, 19 nt, Artificial Sequence
  Description of Artificial Sequence: Synthetic oligonucleotide
uuauaaaguuaacaaacca

SEQ ID NO: 3163598 - RNA, 19 nt, Artificial Sequence
  Description of Artificial Sequence: Synthetic oligonucleotide
gauaugauauucuagcuga

SEQ ID NO: 3163599 - RNA, 19 nt, Artificial Sequence
  Description of Artificial Sequence: Synthetic oligonucleotide
auaugggcugguuacagcc

SEQ ID NO: 3163600 - RNA, 19 nt, Artificial Sequence
  Description of Artificial Sequence: Synthetic oligonucleotide
guagaugcaagugagacgg

SEQ ID NO: 3163601 - RNA, 19 nt, Artificial Sequence
  Description of Artificial Sequence: Synthetic oligonucleotide
ugagacggggauuauaccg

SEQ ID NO: 3163602 - RNA, 19 nt, Artificial Sequence
  Description of Artificial Sequence: Synthetic oligonucleotide
uuuugguugaaagauuugg

SEQ ID NO: 3163603 - RNA, 19 nt, Artificial Sequence
  Description of Artificial Sequence: Synthetic oligonucleotide
guauaauacagccagggug

SEQ ID NO: 3163604 - RNA, 19 nt, Artificial Sequence
  Description of Artificial Sequence: Synthetic oligonucleotide
aaagagaagagccuuuagu

SEQ ID NO: 3163605 - RNA, 19 nt, Artificial Sequence
  Description of Artificial Sequence: Synthetic oligonucleotide
aggagaaaugcuaugaggc

SEQ ID NO: 3163606 - RNA, 19 nt, Artificial Sequence
  Description of Artificial Sequence: Synthetic oligonucleotide
uuauuuuccaaagugugag

SEQ ID NO: 3163607 - RNA, 19 nt, Artificial Sequence
  Description of Artificial Sequence: Synthetic oligonucleotide
gauuauaccggaaccaccg

SEQ ID NO: 3163608 - RNA, 19 nt, Artificial Sequence
  Description of Artificial Sequence: Synthetic oligonucleotide
agggguauaauacagccag

SEQ ID NO: 3163609 - RNA, 19 nt, Artificial Sequence
  Description of Artificial Sequence: Synthetic oligonucleotide
cugguuacagcccaaaggg

SEQ ID NO: 3163610 - RNA, 19 nt, Artificial Sequence
  Description of Artificial Sequence: Synthetic oligonucleotide
auaaaguuaacaaaccaag

SEQ ID NO: 3163611 - RNA, 19 nt, Artificial Sequence
  Description of Artificial Sequence: Synthetic oligonucleotide
aaggggaaacuuuugccac

SEQ ID NO: 3163612 - RNA, 19 nt, Artificial Sequence
  Description of Artificial Sequence: Synthetic oligonucleotide
uuuaggucaacaccauggg

SEQ ID NO: 3163613 - RNA, 19 nt, Artificial Sequence
  Description of Artificial Sequence: Synthetic oligonucleotide
gauuuggcacaguagaugc

SEQ ID NO: 3163614 - RNA, 19 nt, Artificial Sequence
  Description of Artificial Sequence: Synthetic oligonucleotide
cuaauuuaggucaacacca

SEQ ID NO: 3163615 - RNA, 19 nt, Artificial Sequence
  Description of Artificial Sequence: Synthetic oligonucleotide
uuuugugaaucgaaguacc

SEQ ID NO: 3163616 - RNA, 19 nt, Artificial Sequence
  Description of Artificial Sequence: Synthetic oligonucleotide
ugauuauuuuccaaagugu

SEQ ID NO: 3163617 - RNA, 19 nt, Artificial Sequence
  Description of Artificial Sequence: Synthetic oligonucleotide
aacaaauggugugauuccc

SEQ ID NO: 3163618 - RNA, 19 nt, Artificial Sequence
  Description of Artificial Sequence: Synthetic oligonucleotide
uucuaguugagcgaugugg

SEQ ID NO: 3163619 - RNA, 19 nt, Artificial Sequence
  Description of Artificial Sequence: Synthetic oligonucleotide
ugugaaucgaaguaccagc

SEQ ID NO: 3163620 - RNA, 19 nt, Artificial Sequence
  Description of Artificial Sequence: Synthetic oligonucleotide
ugaauuagaagcugauuug

SEQ ID NO: 3163621 - RNA, 19 nt, Artificial Sequence
  Description of Artificial Sequence: Synthetic oligonucleotide
gauuauuuuccaaagugug

SEQ ID NO: 3163622 - RNA, 19 nt, Artificial Sequence
  Description of Artificial Sequence: Synthetic oligonucleotide
augauauucuagcugaucu

SEQ ID NO: 3163623 - RNA, 19 nt, Artificial Sequence
  Description of Artificial Sequence: Synthetic oligonucleotide
auuuaggucaacaccaugg

SEQ ID NO: 3163624 - RNA, 19 nt, Artificial Sequence
  Description of Artificial Sequence: Synthetic oligonucleotide
auuuugugaaucgaaguac

SEQ ID NO: 3163625 - RNA, 19 nt, Artificial Sequence
  Description of Artificial Sequence: Synthetic oligonucleotide
caguaguagacacugagcc

SEQ ID NO: 3163626 - RNA, 19 nt, Artificial Sequence
  Description of Artificial Sequence: Synthetic oligonucleotide
aagugcugauucaagaugg

SEQ ID NO: 3163627 - RNA, 19 nt, Artificial Sequence
  Description of Artificial Sequence: Synthetic oligonucleotide
ucuaguugagcgauguggc

SEQ ID NO: 3163628 - RNA, 19 nt, Artificial Sequence
  Description of Artificial Sequence: Synthetic oligonucleotide
aggagcaacuguuucuucc

SEQ ID NO: 3163629 - RNA, 19 nt, Artificial Sequence
  Description of Artificial Sequence: Synthetic oligonucleotide
acuuuugccacaaacauga

SEQ ID NO: 3163630 - RNA, 19 nt, Artificial Sequence
  Description of Artificial Sequence: Synthetic oligonucleotide
ucgacaaacaaauggugug

SEQ ID NO: 3163631 - RNA, 19 nt, Artificial Sequence
  Description of Artificial Sequence: Synthetic oligonucleotide
uucaaucuggcccaguagu

SEQ ID NO: 3163632 - RNA, 19 nt, Artificial Sequence
  Description of Artificial Sequence: Synthetic oligonucleotide
ggaaccaccgcucagauac

SEQ ID NO: 3163633 - RNA, 19 nt, Artificial Sequence
  Description of Artificial Sequence: Synthetic oligonucleotide
uucgacaaacaaauggugu

SEQ ID NO: 3163634 - RNA, 19 nt, Artificial Sequence
  Description of Artificial Sequence: Synthetic oligonucleotide
ugcugauucaagauggccu

SEQ ID NO: 3163635 - RNA, 19 nt, Artificial Sequence
  Description of Artificial Sequence: Synthetic oligonucleotide
caaacaaauggugugauuc

SEQ ID NO: 3163636 - RNA, 19 nt, Artificial Sequence
  Description of Artificial Sequence: Synthetic oligonucleotide
ucuagcugaucuuuccggg

SEQ ID NO: 3163637 - RNA, 19 nt, Artificial Sequence
  Description of Artificial Sequence: Synthetic oligonucleotide
aguagaugcaagugagacg

SEQ ID NO: 3163638 - RNA, 19 nt, Artificial Sequence
  Description of Artificial Sequence: Synthetic oligonucleotide
ugaaagauuuggcacagua

SEQ ID NO: 3163639 - RNA, 19 nt, Artificial Sequence
  Description of Artificial Sequence: Synthetic oligonucleotide
uggugugauucccauaugc

SEQ ID NO: 3163640 - RNA, 19 nt, Artificial Sequence
  Description of Artificial Sequence: Synthetic oligonucleotide
uucucgaagauauuccaca

SEQ ID NO: 3163641 - RNA, 19 nt, Artificial Sequence
  Description of Artificial Sequence: Synthetic oligonucleotide
acagugaaagggcuuauug

SEQ ID NO: 3163642 - RNA, 19 nt, Artificial Sequence
  Description of Artificial Sequence: Synthetic oligonucleotide
agugagacggggauuauac

SEQ ID NO: 3163643 - RNA, 19 nt, Artificial Sequence
  Description of Artificial Sequence: Synthetic oligonucleotide
uauucuagcugaucuuucc

SEQ ID NO: 3163644 - RNA, 19 nt, Artificial Sequence
  Description of Artificial Sequence: Synthetic oligonucleotide
uauuuuccaaagugugagg

SEQ ID NO: 3163645 - RNA, 19 nt, Artificial Sequence
  Description of Artificial Sequence: Synthetic oligonucleotide
gacccucuaauuuagguca

SEQ ID NO: 3163646 - RNA, 19 nt, Artificial Sequence
  Description of Artificial Sequence: Synthetic oligonucleotide
aagcugauuugcuugauua

SEQ ID NO: 3163647 - RNA, 19 nt, Artificial Sequence
  Description of Artificial Sequence: Synthetic oligonucleotide
uguugacccucuaauuuag

SEQ ID NO: 3163648 - RNA, 19 nt, Artificial Sequence
  Description of Artificial Sequence: Synthetic oligonucleotide
uagacacugagccuugggc

SEQ ID NO: 3163649 - RNA, 19 nt, Artificial Sequence
  Description of Artificial Sequence: Synthetic oligonucleotide
cagacuucccuuuugguug

SEQ ID NO: 3163650 - RNA, 19 nt, Artificial Sequence
  Description of Artificial Sequence: Synthetic oligonucleotide
uggaaggggaaacuuuugc

SEQ ID NO: 3163651 - RNA, 19 nt, Artificial Sequence
  Description of Artificial Sequence: Synthetic oligonucleotide
gaaagauuuggcacaguag

SEQ ID NO: 3163652 - RNA, 19 nt, Artificial Sequence
  Description of Artificial Sequence: Synthetic oligonucleotide
aguuaacaaaccaaggcug

SEQ ID NO: 3163653 - RNA, 19 nt, Artificial Sequence
  Description of Artificial Sequence: Synthetic oligonucleotide
gaaggggaaacuuuugcca

SEQ ID NO: 3163654 - RNA, 19 nt, Artificial Sequence
  Description of Artificial Sequence: Synthetic oligonucleotide
uuucaaucuggcccaguag

SEQ ID NO: 3163655 - RNA, 19 nt, Artificial Sequence
  Description of Artificial Sequence: Synthetic oligonucleotide
ugagcgauguggcauuuug

SEQ ID NO: 3163656 - RNA, 19 nt, Artificial Sequence
  Description of Artificial Sequence: Synthetic oligonucleotide
uguucucgaagauauucca

SEQ ID NO: 3163657 - RNA, 19 nt, Artificial Sequence
  Description of Artificial Sequence: Synthetic oligonucleotide
aaagugugaggugggaaag

SEQ ID NO: 3163658 - RNA, 19 nt, Artificial Sequence
  Description of Artificial Sequence: Synthetic oligonucleotide
gagaaaugcuaugaggccc

SEQ ID NO: 3163659 - RNA, 19 nt, Artificial Sequence
  Description of Artificial Sequence: Synthetic oligonucleotide
auuauaccggaaccaccgc

SEQ ID NO: 3163660 - RNA, 19 nt, Artificial Sequence
  Description of Artificial Sequence: Synthetic oligonucleotide
cucuaauuuaggucaacac

SEQ ID NO: 3163661 - RNA, 19 nt, Artificial Sequence
  Description of Artificial Sequence: Synthetic oligonucleotide
ucgaaguaccagcccaugg

SEQ ID NO: 3163662 - RNA, 19 nt, Artificial Sequence
  Description of Artificial Sequence: Synthetic oligonucleotide
uuugugaaucgaaguacca

SEQ ID NO: 3163663 - RNA, 19 nt, Artificial Sequence
  Description of Artificial Sequence: Synthetic oligonucleotide
gaaucgaaguaccagccca

SEQ ID NO: 3163664 - RNA, 19 nt, Artificial Sequence
  Description of Artificial Sequence: Synthetic oligonucleotide
acggggauuauaccggaac

SEQ ID NO: 3163665 - RNA, 19 nt, Artificial Sequence
  Description of Artificial Sequence: Synthetic oligonucleotide
aauacagccagggugguuu

SEQ ID NO: 3163666 - RNA, 19 nt, Artificial Sequence
  Description of Artificial Sequence: Synthetic oligonucleotide
agcgauguggcauuuugug

SEQ ID NO: 3163667 - RNA, 19 nt, Artificial Sequence
  Description of Artificial Sequence: Synthetic oligonucleotide
gaugugacaguuguuucag

SEQ ID NO: 3163668 - RNA, 19 nt, Artificial Sequence
  Description of Artificial Sequence: Synthetic oligonucleotide
cagugaaagggcuuauugc

SEQ ID NO: 3163669 - RNA, 19 nt, Artificial Sequence
  Description of Artificial Sequence: Synthetic oligonucleotide
aacuguuucuuccugcgua

SEQ ID NO: 3163670 - RNA, 19 nt, Artificial Sequence
  Description of Artificial Sequence: Synthetic oligonucleotide
ugaaucgaaguaccagccc

SEQ ID NO: 3163671 - RNA, 19 nt, Artificial Sequence
  Description of Artificial Sequence: Synthetic oligonucleotide
uucaggagaaaugcuauga

SEQ ID NO: 3163672 - RNA, 19 nt, Artificial Sequence
  Description of Artificial Sequence: Synthetic oligonucleotide
gauuugcuugauuauuuuc

SEQ ID NO: 3163673 - RNA, 19 nt, Artificial Sequence
  Description of Artificial Sequence: Synthetic oligonucleotide
gaaagagaagagccuuuag

SEQ ID NO: 3163674 - RNA, 19 nt, Artificial Sequence
  Description of Artificial Sequence: Synthetic oligonucleotide
uaugaggcccuuccagggg

SEQ ID NO: 3163675 - RNA, 19 nt, Artificial Sequence
  Description of Artificial Sequence: Synthetic oligonucleotide
acaccaugggaacaucuuc

SEQ ID NO: 3163676 - RNA, 19 nt, Artificial Sequence
  Description of Artificial Sequence: Synthetic oligonucleotide
cuguucucgaagauauucc

SEQ ID NO: 3163677 - RNA, 19 nt, Artificial Sequence
  Description of Artificial Sequence: Synthetic oligonucleotide
uuucuuccugcguagguga

SEQ ID NO: 3163678 - RNA, 19 nt, Artificial Sequence
  Description of Artificial Sequence: Synthetic oligonucleotide
ugguuacagcccaaagggg

SEQ ID NO: 3163679 - RNA, 19 nt, Artificial Sequence
  Description of Artificial Sequence: Synthetic oligonucleotide
gacacugagccuugggcag

SEQ ID NO: 3163680 - RNA, 19 nt, Artificial Sequence
  Description of Artificial Sequence: Synthetic oligonucleotide
acacauucgacaaacaaau

SEQ ID NO: 3163681 - RNA, 19 nt, Artificial Sequence
  Description of Artificial Sequence: Synthetic oligonucleotide
uuauaccggaaccaccgcu

SEQ ID NO: 3163682 - RNA, 19 nt, Artificial Sequence
  Description of Artificial Sequence: Synthetic oligonucleotide
agaugugacaguuguuuca

SEQ ID NO: 3163683 - RNA, 19 nt, Artificial Sequence
  Description of Artificial Sequence: Synthetic oligonucleotide
ggauaugauauucuagcug

SEQ ID NO: 3163684 - RNA, 19 nt, Artificial Sequence
  Description of Artificial Sequence: Synthetic oligonucleotide
auacauacaaauuagacac

SEQ ID NO: 3163685 - RNA, 19 nt, Artificial Sequence
  Description of Artificial Sequence: Synthetic oligonucleotide
acaaacaacaaacaaaagc

SEQ ID NO: 3163686 - RNA, 19 nt, Artificial Sequence
  Description of Artificial Sequence: Synthetic oligonucleotide
uauaaaguaaaauacauac

SEQ ID NO: 3163687 - RNA, 19 nt, Artificial Sequence
  Description of Artificial Sequence: Synthetic oligonucleotide
aaaucuucaaaacuuuggc

SEQ ID NO: 3163688 - RNA, 19 nt, Artificial Sequence
  Description of Artificial Sequence: Synthetic oligonucleotide
caaacaacaaacaaaagcc

SEQ ID NO: 3163689 - RNA, 19 nt, Artificial Sequence
  Description of Artificial Sequence: Synthetic oligonucleotide
ucaaaauuagcuuacaaug

SEQ ID NO: 3163690 - RNA, 19 nt, Artificial Sequence
  Description of Artificial Sequence: Synthetic oligonucleotide
aauguuauaaaguaaaaua

SEQ ID NO: 3163691 - RNA, 19 nt, Artificial Sequence
  Description of Artificial Sequence: Synthetic oligonucleotide
aauaccaccaucaaauacc

SEQ ID NO: 3163692 - RNA, 19 nt, Artificial Sequence
  Description of Artificial Sequence: Synthetic oligonucleotide
aauacauacaaauuagaca

SEQ ID NO: 3163693 - RNA, 19 nt, Artificial Sequence
  Description of Artificial Sequence: Synthetic oligonucleotide
uaaaauacauacaaauuag

SEQ ID NO: 3163694 - RNA, 19 nt, Artificial Sequence
  Description of Artificial Sequence: Synthetic oligonucleotide
aucuucaaaacuuuggccc

SEQ ID NO: 3163695 - RNA, 19 nt, Artificial Sequence
  Description of Artificial Sequence: Synthetic oligonucleotide
uaaaguaaaauacauacaa

SEQ ID NO: 3163696 - RNA, 19 nt, Artificial Sequence
  Description of Artificial Sequence: Synthetic oligonucleotide
aaucuucaaaacuuuggcc

SEQ ID NO: 3163697 - RNA, 19 nt, Artificial Sequence
  Description of Artificial Sequence: Synthetic oligonucleotide
ugaaaguaauaacagaugc

SEQ ID NO: 3163698 - RNA, 19 nt, Artificial Sequence
  Description of Artificial Sequence: Synthetic oligonucleotide
uuaugaaugaacuacaaaa

SEQ ID NO: 3163699 - RNA, 19 nt, Artificial Sequence
  Description of Artificial Sequence: Synthetic oligonucleotide
aaaacaaagaauucaaaau

SEQ ID NO: 3163700 - RNA, 19 nt, Artificial Sequence
  Description of Artificial Sequence: Synthetic oligonucleotide
ugaaauaccaccaucaaau

SEQ ID NO: 3163701 - RNA, 19 nt, Artificial Sequence
  Description of Artificial Sequence: Synthetic oligonucleotide
aaaacuuuggcccuguuga

SEQ ID NO: 3163702 - RNA, 19 nt, Artificial Sequence
  Description of Artificial Sequence: Synthetic oligonucleotide
aauacaguacauucauggc

SEQ ID NO: 3163703 - RNA, 19 nt, Artificial Sequence
  Description of Artificial Sequence: Synthetic oligonucleotide
ugaacuacaaaacuacucc

SEQ ID NO: 3163704 - RNA, 19 nt, Artificial Sequence
  Description of Artificial Sequence: Synthetic oligonucleotide
aaauacauacaaauuagac

SEQ ID NO: 3163705 - RNA, 19 nt, Artificial Sequence
  Description of Artificial Sequence: Synthetic oligonucleotide
aaguaaaauacauacaaau

SEQ ID NO: 3163706 - RNA, 19 nt, Artificial Sequence
  Description of Artificial Sequence: Synthetic oligonucleotide
aaagaauucaaaauuagcu

SEQ ID NO: 3163707 - RNA, 19 nt, Artificial Sequence
  Description of Artificial Sequence: Synthetic oligonucleotide
uaaaucuucaaaacuuugg

SEQ ID NO: 3163708 - RNA, 19 nt, Artificial Sequence
  Description of Artificial Sequence: Synthetic oligonucleotide
aaauaccaccaucaaauac

SEQ ID NO: 3163709 - RNA, 19 nt, Artificial Sequence
  Description of Artificial Sequence: Synthetic oligonucleotide
aaagccuagagguaaaucu

SEQ ID NO: 3163710 - RNA, 19 nt, Artificial Sequence
  Description of Artificial Sequence: Synthetic oligonucleotide
caauacaguacauucaugg

SEQ ID NO: 3163711 - RNA, 19 nt, Artificial Sequence
  Description of Artificial Sequence: Synthetic oligonucleotide
uguuauaaaguaaaauaca

SEQ ID NO: 3163712 - RNA, 19 nt, Artificial Sequence
  Description of Artificial Sequence: Synthetic oligonucleotide
aaaguaauaacagaugcca

SEQ ID NO: 3163713 - RNA, 19 nt, Artificial Sequence
  Description of Artificial Sequence: Synthetic oligonucleotide
acaaacaaaagccuagagg

SEQ ID NO: 3163714 - RNA, 19 nt, Artificial Sequence
  Description of Artificial Sequence: Synthetic oligonucleotide
auacaaauuagacacaugu

SEQ ID NO: 3163715 - RNA, 19 nt, Artificial Sequence
  Description of Artificial Sequence: Synthetic oligonucleotide
aaacaaagaauucaaaauu

SEQ ID NO: 3163716 - RNA, 19 nt, Artificial Sequence
  Description of Artificial Sequence: Synthetic oligonucleotide
acaaauuagacacaugucu

SEQ ID NO: 3163717 - RNA, 19 nt, Artificial Sequence
  Description of Artificial Sequence: Synthetic oligonucleotide
ugacauacaauacaguaca

SEQ ID NO: 3163718 - RNA, 19 nt, Artificial Sequence
  Description of Artificial Sequence: Synthetic oligonucleotide
aaauuagacacaugucuuc

SEQ ID NO: 3163719 - RNA, 19 nt, Artificial Sequence
  Description of Artificial Sequence: Synthetic oligonucleotide
auguuauaaaguaaaauac

SEQ ID NO: 3163720 - RNA, 19 nt, Artificial Sequence
  Description of Artificial Sequence: Synthetic oligonucleotide
ugagcauugaaauaccacc

SEQ ID NO: 3163721 - RNA, 19 nt, Artificial Sequence
  Description of Artificial Sequence: Synthetic oligonucleotide
uaugaaugaacuacaaaac

SEQ ID NO: 3163722 - RNA, 19 nt, Artificial Sequence
  Description of Artificial Sequence: Synthetic oligonucleotide
uacaauguuauaaaguaaa

SEQ ID NO: 3163723 - RNA, 19 nt, Artificial Sequence
  Description of Artificial Sequence: Synthetic oligonucleotide
agagguaaaucuucaaaac

SEQ ID NO: 3163724 - RNA, 19 nt, Artificial Sequence
  Description of Artificial Sequence: Synthetic oligonucleotide
cauacaauacaguacauuc

SEQ ID NO: 3163725 - RNA, 19 nt, Artificial Sequence
  Description of Artificial Sequence: Synthetic oligonucleotide
aaacaaacaacaaacaaaa

SEQ ID NO: 3163726 - RNA, 19 nt, Artificial Sequence
  Description of Artificial Sequence: Synthetic oligonucleotide
auucauggcauuuuaucac

SEQ ID NO: 3163727 - RNA, 19 nt, Artificial Sequence
  Description of Artificial Sequence: Synthetic oligonucleotide
aaaacaaacaacaaacaaa

SEQ ID NO: 3163728 - RNA, 19 nt, Artificial Sequence
  Description of Artificial Sequence: Synthetic oligonucleotide
aagaauucaaaauuagcuu

SEQ ID NO: 3163729 - RNA, 19 nt, Artificial Sequence
  Description of Artificial Sequence: Synthetic oligonucleotide
uucaggaauaucuuggaug

SEQ ID NO: 3163730 - RNA, 19 nt, Artificial Sequence
  Description of Artificial Sequence: Synthetic oligonucleotide
ucacugaaaguaauaacag

SEQ ID NO: 3163731 - RNA, 19 nt, Artificial Sequence
  Description of Artificial Sequence: Synthetic oligonucleotide
guaaaauacauacaaauua

SEQ ID NO: 3163732 - RNA, 19 nt, Artificial Sequence
  Description of Artificial Sequence: Synthetic oligonucleotide
uuagcuuacaauguuauaa

SEQ ID NO: 3163733 - RNA, 19 nt, Artificial Sequence
  Description of Artificial Sequence: Synthetic oligonucleotide
caugucuucacauacucag

SEQ ID NO: 3163734 - RNA, 19 nt, Artificial Sequence
  Description of Artificial Sequence: Synthetic oligonucleotide
acauucauggcauuuuauc

SEQ ID NO: 3163735 - RNA, 19 nt, Artificial Sequence
  Description of Artificial Sequence: Synthetic oligonucleotide
ugaaugaacuacaaaacua

SEQ ID NO: 3163736 - RNA, 19 nt, Artificial Sequence
  Description of Artificial Sequence: Synthetic oligonucleotide
acuuuggcccuguugagcc

SEQ ID NO: 3163737 - RNA, 19 nt, Artificial Sequence
  Description of Artificial Sequence: Synthetic oligonucleotide
ucaggaauaucuuggaugu

SEQ ID NO: 3163738 - RNA, 19 nt, Artificial Sequence
  Description of Artificial Sequence: Synthetic oligonucleotide
caaagaauucaaaauuagc

SEQ ID NO: 3163739 - RNA, 19 nt, Artificial Sequence
  Description of Artificial Sequence: Synthetic oligonucleotide
aacaaacaaaagccuagag

SEQ ID NO: 3163740 - RNA, 19 nt, Artificial Sequence
  Description of Artificial Sequence: Synthetic oligonucleotide
uucaaaauuagcuuacaau

SEQ ID NO: 3163741 - RNA, 19 nt, Artificial Sequence
  Description of Artificial Sequence: Synthetic oligonucleotide
caagugacauacaauacag

SEQ ID NO: 3163742 - RNA, 19 nt, Artificial Sequence
  Description of Artificial Sequence: Synthetic oligonucleotide
aaaauuagcuuacaauguu

SEQ ID NO: 3163743 - RNA, 19 nt, Artificial Sequence
  Description of Artificial Sequence: Synthetic oligonucleotide
ucacaagugacauacaaua

SEQ ID NO: 3163744 - RNA, 19 nt, Artificial Sequence
  Description of Artificial Sequence: Synthetic oligonucleotide
aauaucuuggauguuuuca

SEQ ID NO: 3163745 - RNA, 19 nt, Artificial Sequence
  Description of Artificial Sequence: Synthetic oligonucleotide
ugucuucacauacucagcc

SEQ ID NO: 3163746 - RNA, 19 nt, Artificial Sequence
  Description of Artificial Sequence: Synthetic oligonucleotide
agaauucaaaauuagcuua

SEQ ID NO: 3163747 - RNA, 19 nt, Artificial Sequence
  Description of Artificial Sequence: Synthetic oligonucleotide
uuauaaaguaaaauacaua

SEQ ID NO: 3163748 - RNA, 19 nt, Artificial Sequence
  Description of Artificial Sequence: Synthetic oligonucleotide
auaucuuggauguuuucag

SEQ ID NO: 3163749 - RNA, 19 nt, Artificial Sequence
  Description of Artificial Sequence: Synthetic oligonucleotide
guagccuuuggcuugcucg

SEQ ID NO: 3163750 - RNA, 19 nt, Artificial Sequence
  Description of Artificial Sequence: Synthetic oligonucleotide
augaaugaacuacaaaacu

SEQ ID NO: 3163751 - RNA, 19 nt, Artificial Sequence
  Description of Artificial Sequence: Synthetic oligonucleotide
uacaauacaguacauucau

SEQ ID NO: 3163752 - RNA, 19 nt, Artificial Sequence
  Description of Artificial Sequence: Synthetic oligonucleotide
gaaugaacuacaaaacuac

SEQ ID NO: 3163753 - RNA, 19 nt, Artificial Sequence
  Description of Artificial Sequence: Synthetic oligonucleotide
caaacaaaagccuagaggu

SEQ ID NO: 3163754 - RNA, 19 nt, Artificial Sequence
  Description of Artificial Sequence: Synthetic oligonucleotide
uagagguaaaucuucaaaa

SEQ ID NO: 3163755 - RNA, 19 nt, Artificial Sequence
  Description of Artificial Sequence: Synthetic oligonucleotide
acaagugacauacaauaca

SEQ ID NO: 3163756 - RNA, 19 nt, Artificial Sequence
  Description of Artificial Sequence: Synthetic oligonucleotide
cuuacaauguuauaaagua

SEQ ID NO: 3163757 - RNA, 19 nt, Artificial Sequence
  Description of Artificial Sequence: Synthetic oligonucleotide
ucuucacauacucagccug

SEQ ID NO: 3163758 - RNA, 19 nt, Artificial Sequence
  Description of Artificial Sequence: Synthetic oligonucleotide
auacaguacauucauggca

SEQ ID NO: 3163759 - RNA, 19 nt, Artificial Sequence
  Description of Artificial Sequence: Synthetic oligonucleotide
cuuggauguuuucagauac

SEQ ID NO: 3163760 - RNA, 19 nt, Artificial Sequence
  Description of Artificial Sequence: Synthetic oligonucleotide
aucacugaaaguaauaaca

SEQ ID NO: 3163761 - RNA, 19 nt, Artificial Sequence
  Description of Artificial Sequence: Synthetic oligonucleotide
uuuaugaaugaacuacaaa

SEQ ID NO: 3163762 - RNA, 19 nt, Artificial Sequence
  Description of Artificial Sequence: Synthetic oligonucleotide
ggcauuuuaucacugaaag

SEQ ID NO: 3163763 - RNA, 19 nt, Artificial Sequence
  Description of Artificial Sequence: Synthetic oligonucleotide
agugacauacaauacagua

SEQ ID NO: 3163764 - RNA, 19 nt, Artificial Sequence
  Description of Artificial Sequence: Synthetic oligonucleotide
gaaaguaauaacagaugcc

SEQ ID NO: 3163765 - RNA, 19 nt, Artificial Sequence
  Description of Artificial Sequence: Synthetic oligonucleotide
acuuucaggaauaucuugg

SEQ ID NO: 3163766 - RNA, 19 nt, Artificial Sequence
  Description of Artificial Sequence: Synthetic oligonucleotide
aaaauacauacaaauuaga

SEQ ID NO: 3163767 - RNA, 19 nt, Artificial Sequence
  Description of Artificial Sequence: Synthetic oligonucleotide
uuagacacaugucuucaca

SEQ ID NO: 3163768 - RNA, 19 nt, Artificial Sequence
  Description of Artificial Sequence: Synthetic oligonucleotide
ugcucggacacuuucagga

SEQ ID NO: 3163769 - RNA, 19 nt, Artificial Sequence
  Description of Artificial Sequence: Synthetic oligonucleotide
cauuuuaucacugaaagua

SEQ ID NO: 3163770 - RNA, 19 nt, Artificial Sequence
  Description of Artificial Sequence: Synthetic oligonucleotide
uuuuaugaaugaacuacaa

SEQ ID NO: 3163771 - RNA, 19 nt, Artificial Sequence
  Description of Artificial Sequence: Synthetic oligonucleotide
uacaguacauucauggcau

SEQ ID NO: 3163772 - RNA, 19 nt, Artificial Sequence
  Description of Artificial Sequence: Synthetic oligonucleotide
aguaauaacagaugccaaa

SEQ ID NO: 3163773 - RNA, 19 nt, Artificial Sequence
  Description of Artificial Sequence: Synthetic oligonucleotide
gacacaugucuucacauac

SEQ ID NO: 3163774 - RNA, 19 nt, Artificial Sequence
  Description of Artificial Sequence: Synthetic oligonucleotide
aaaagccuagagguaaauc

SEQ ID NO: 3163775 - RNA, 19 nt, Artificial Sequence
  Description of Artificial Sequence: Synthetic oligonucleotide
cauugaaauaccaccauca

SEQ ID NO: 3163776 - RNA, 19 nt, Artificial Sequence
  Description of Artificial Sequence: Synthetic oligonucleotide
aacuuuggcccuguugagc

SEQ ID NO: 3163777 - RNA, 19 nt, Artificial Sequence
  Description of Artificial Sequence: Synthetic oligonucleotide
aacaaagaauucaaaauua

SEQ ID NO: 3163778 - RNA, 19 nt, Artificial Sequence
  Description of Artificial Sequence: Synthetic oligonucleotide
ucucugaggaccuaguguc

SEQ ID NO: 3163779 - RNA, 19 nt, Artificial Sequence
  Description of Artificial Sequence: Synthetic oligonucleotide
acugaaaguaauaacagau

SEQ ID NO: 3163780 - RNA, 19 nt, Artificial Sequence
  Description of Artificial Sequence: Synthetic oligonucleotide
aacaaaagccuagagguaa

SEQ ID NO: 3163781 - RNA, 19 nt, Artificial Sequence
  Description of Artificial Sequence: Synthetic oligonucleotide
agugccaccacacuucucu

SEQ ID NO: 3163782 - RNA, 19 nt, Artificial Sequence
  Description of Artificial Sequence: Synthetic oligonucleotide
aauuagacacaugucuuca

SEQ ID NO: 3163783 - RNA, 19 nt, Artificial Sequence
  Description of Artificial Sequence: Synthetic oligonucleotide
uuuaucacugaaaguaaua

SEQ ID NO: 3163784 - RNA, 19 nt, Artificial Sequence
  Description of Artificial Sequence: Synthetic oligonucleotide
aauauuaucaccgagucac

SEQ ID NO: 3163785 - RNA, 19 nt, Artificial Sequence
  Description of Artificial Sequence: Synthetic oligonucleotide
aaaauaaggugguggaggg

SEQ ID NO: 3163786 - RNA, 19 nt, Artificial Sequence
  Description of Artificial Sequence: Synthetic oligonucleotide
aacuguuaggcccaggagg

SEQ ID NO: 3163787 - RNA, 19 nt, Artificial Sequence
  Description of Artificial Sequence: Synthetic oligonucleotide
uguuuucuucuuaacaugg

SEQ ID NO: 3163788 - RNA, 19 nt, Artificial Sequence
  Description of Artificial Sequence: Synthetic oligonucleotide
acaagcacaaucaagggcc

SEQ ID NO: 3163789 - RNA, 19 nt, Artificial Sequence
  Description of Artificial Sequence: Synthetic oligonucleotide
agugauaugaacaggcucc

SEQ ID NO: 3163790 - RNA, 19 nt, Artificial Sequence
  Description of Artificial Sequence: Synthetic oligonucleotide
aacacagucccacaagcac

SEQ ID NO: 3163791 - RNA, 19 nt, Artificial Sequence
  Description of Artificial Sequence: Synthetic oligonucleotide
gaaaauaaggugguggagg

SEQ ID NO: 3163792 - RNA, 19 nt, Artificial Sequence
  Description of Artificial Sequence: Synthetic oligonucleotide
guaucugucucauucaggg

SEQ ID NO: 3163793 - RNA, 19 nt, Artificial Sequence
  Description of Artificial Sequence: Synthetic oligonucleotide
uacagugauaugaacaggc

SEQ ID NO: 3163794 - RNA, 19 nt, Artificial Sequence
  Description of Artificial Sequence: Synthetic oligonucleotide
uugaucaguguccuggugg

SEQ ID NO: 3163795 - RNA, 19 nt, Artificial Sequence
  Description of Artificial Sequence: Synthetic oligonucleotide
cuggucaggaacaagaccc

SEQ ID NO: 3163796 - RNA, 19 nt, Artificial Sequence
  Description of Artificial Sequence: Synthetic oligonucleotide
uuucuucuuaacaugggcc

SEQ ID NO: 3163797 - RNA, 19 nt, Artificial Sequence
  Description of Artificial Sequence: Synthetic oligonucleotide
aucugucucauucagggac

SEQ ID NO: 3163798 - RNA, 19 nt, Artificial Sequence
  Description of Artificial Sequence: Synthetic oligonucleotide
ugggccaccacaaagaaac

SEQ ID NO: 3163799 - RNA, 19 nt, Artificial Sequence
  Description of Artificial Sequence: Synthetic oligonucleotide
cauuucaggaguaugucgg

SEQ ID NO: 3163800 - RNA, 19 nt, Artificial Sequence
  Description of Artificial Sequence: Synthetic oligonucleotide
uuuucuucuuaacaugggc

SEQ ID NO: 3163801 - RNA, 19 nt, Artificial Sequence
  Description of Artificial Sequence: Synthetic oligonucleotide
cacaaagaaacacaguccc

SEQ ID NO: 3163802 - RNA, 19 nt, Artificial Sequence
  Description of Artificial Sequence: Synthetic oligonucleotide
aagacucaggaaaauaagg

SEQ ID NO: 3163803 - RNA, 19 nt, Artificial Sequence
  Description of Artificial Sequence: Synthetic oligonucleotide
aacucaaguuguuuucuuc

SEQ ID NO: 3163804 - RNA, 19 nt, Artificial Sequence
  Description of Artificial Sequence: Synthetic oligonucleotide
ugaagacucaggaaaauaa

SEQ ID NO: 3163805 - RNA, 19 nt, Artificial Sequence
  Description of Artificial Sequence: Synthetic oligonucleotide
auaugaacaggcuccguac

SEQ ID NO: 3163806 - RNA, 19 nt, Artificial Sequence
  Description of Artificial Sequence: Synthetic oligonucleotide
aggaacaagacccaagaug

SEQ ID NO: 3163807 - RNA, 19 nt, Artificial Sequence
  Description of Artificial Sequence: Synthetic oligonucleotide
uccaguaucugucucauuc

SEQ ID NO: 3163808 - RNA, 19 nt, Artificial Sequence
  Description of Artificial Sequence: Synthetic oligonucleotide
acaucugggccucugauuc

SEQ ID NO: 3163809 - RNA, 19 nt, Artificial Sequence
  Description of Artificial Sequence: Synthetic oligonucleotide
ucggcuugaacucaaguug

SEQ ID NO: 3163810 - RNA, 19 nt, Artificial Sequence
  Description of Artificial Sequence: Synthetic oligonucleotide
aacaugggccaccacaaag

SEQ ID NO: 3163811 - RNA, 19 nt, Artificial Sequence
  Description of Artificial Sequence: Synthetic oligonucleotide
aguaugucggcuugaacuc

SEQ ID NO: 3163812 - RNA, 19 nt, Artificial Sequence
  Description of Artificial Sequence: Synthetic oligonucleotide
acagacgaaggauugauca

SEQ ID NO: 3163813 - RNA, 19 nt, Artificial Sequence
  Description of Artificial Sequence: Synthetic oligonucleotide
acucaggaaaauaaggugg

SEQ ID NO: 3163814 - RNA, 19 nt, Artificial Sequence
  Description of Artificial Sequence: Synthetic oligonucleotide
gaaacacagucccacaagc

SEQ ID NO: 3163815 - RNA, 19 nt, Artificial Sequence
  Description of Artificial Sequence: Synthetic oligonucleotide
cauccaggcacccaaaugc

SEQ ID NO: 3163816 - RNA, 19 nt, Artificial Sequence
  Description of Artificial Sequence: Synthetic oligonucleotide
ucaggaacaagacccaaga

SEQ ID NO: 3163817 - RNA, 19 nt, Artificial Sequence
  Description of Artificial Sequence: Synthetic oligonucleotide
aguuguuuucuucuuaaca

SEQ ID NO: 3163818 - RNA, 19 nt, Artificial Sequence
  Description of Artificial Sequence: Synthetic oligonucleotide
aaguuguuuucuucuuaac

SEQ ID NO: 3163819 - RNA, 19 nt, Artificial Sequence
  Description of Artificial Sequence: Synthetic oligonucleotide
acuggucaggaacaagacc

SEQ ID NO: 3163820 - RNA, 19 nt, Artificial Sequence
  Description of Artificial Sequence: Synthetic oligonucleotide
gacucaggaaaauaaggug

SEQ ID NO: 3163821 - RNA, 19 nt, Artificial Sequence
  Description of Artificial Sequence: Synthetic oligonucleotide
uguggugcaaacuguuagg

SEQ ID NO: 3163822 - RNA, 19 nt, Artificial Sequence
  Description of Artificial Sequence: Synthetic oligonucleotide
auucagggacuccuguucc

SEQ ID NO: 3163823 - RNA, 19 nt, Artificial Sequence
  Description of Artificial Sequence: Synthetic oligonucleotide
uucuucuuaacaugggcca

SEQ ID NO: 3163824 - RNA, 19 nt, Artificial Sequence
  Description of Artificial Sequence: Synthetic oligonucleotide
uuaacaugggccaccacaa

SEQ ID NO: 3163825 - RNA, 19 nt, Artificial Sequence
  Description of Artificial Sequence: Synthetic oligonucleotide
uuguuuucuucuuaacaug

SEQ ID NO: 3163826 - RNA, 19 nt, Artificial Sequence
  Description of Artificial Sequence: Synthetic oligonucleotide
aaacuguuaggcccaggag

SEQ ID NO: 3163827 - RNA, 19 nt, Artificial Sequence
  Description of Artificial Sequence: Synthetic oligonucleotide
auuucaggaguaugucggc

SEQ ID NO: 3163828 - RNA, 19 nt, Artificial Sequence
  Description of Artificial Sequence: Synthetic oligonucleotide
uuccauuucaggaguaugu

SEQ ID NO: 3163829 - RNA, 19 nt, Artificial Sequence
  Description of Artificial Sequence: Synthetic oligonucleotide
uuaucaccgagucaccuac

SEQ ID NO: 3163830 - RNA, 19 nt, Artificial Sequence
  Description of Artificial Sequence: Synthetic oligonucleotide
gaaggauugaucagugucc

SEQ ID NO: 3163831 - RNA, 19 nt, Artificial Sequence
  Description of Artificial Sequence: Synthetic oligonucleotide
aagacccaagaugaggcac

SEQ ID NO: 3163832 - RNA, 19 nt, Artificial Sequence
  Description of Artificial Sequence: Synthetic oligonucleotide
caccgagucaccuacagug

SEQ ID NO: 3163833 - RNA, 19 nt, Artificial Sequence
  Description of Artificial Sequence: Synthetic oligonucleotide
ggugcaaacuguuaggccc

SEQ ID NO: 3163834 - RNA, 19 nt, Artificial Sequence
  Description of Artificial Sequence: Synthetic oligonucleotide
aggaaaauaagguggugga

SEQ ID NO: 3163835 - RNA, 19 nt, Artificial Sequence
  Description of Artificial Sequence: Synthetic oligonucleotide
ugauucuccaguaucuguc

SEQ ID NO: 3163836 - RNA, 19 nt, Artificial Sequence
  Description of Artificial Sequence: Synthetic oligonucleotide
caggaaaauaagguggugg

SEQ ID NO: 3163837 - RNA, 19 nt, Artificial Sequence
  Description of Artificial Sequence: Synthetic oligonucleotide
gaagacucaggaaaauaag

SEQ ID NO: 3163838 - RNA, 19 nt, Artificial Sequence
  Description of Artificial Sequence: Synthetic oligonucleotide
gaucugcagagacaggaag

SEQ ID NO: 3163839 - RNA, 19 nt, Artificial Sequence
  Description of Artificial Sequence: Synthetic oligonucleotide
gaguaugucggcuugaacu

SEQ ID NO: 3163840 - RNA, 19 nt, Artificial Sequence
  Description of Artificial Sequence: Synthetic oligonucleotide
augagcaugccacugguca

SEQ ID NO: 3163841 - RNA, 19 nt, Artificial Sequence
  Description of Artificial Sequence: Synthetic oligonucleotide
ugaggcacugggcaaacug

SEQ ID NO: 3163842 - RNA, 19 nt, Artificial Sequence
  Description of Artificial Sequence: Synthetic oligonucleotide
cccacaagcacaaucaagg

SEQ ID NO: 3163843 - RNA, 19 nt, Artificial Sequence
  Description of Artificial Sequence: Synthetic oligonucleotide
acaggcuccguacuguggg

SEQ ID NO: 3163844 - RNA, 19 nt, Artificial Sequence
  Description of Artificial Sequence: Synthetic oligonucleotide
acucaaguuguuuucuucu

SEQ ID NO: 3163845 - RNA, 19 nt, Artificial Sequence
  Description of Artificial Sequence: Synthetic oligonucleotide
cacccaaaugcccaguacg

SEQ ID NO: 3163846 - RNA, 19 nt, Artificial Sequence
  Description of Artificial Sequence: Synthetic oligonucleotide
cuuaacaugggccaccaca

SEQ ID NO: 3163847 - RNA, 19 nt, Artificial Sequence
  Description of Artificial Sequence: Synthetic oligonucleotide
agagacaggaagcugcaca

SEQ ID NO: 3163848 - RNA, 19 nt, Artificial Sequence
  Description of Artificial Sequence: Synthetic oligonucleotide
caaagaaacacagucccac

SEQ ID NO: 3163849 - RNA, 19 nt, Artificial Sequence
  Description of Artificial Sequence: Synthetic oligonucleotide
caugccacuggucaggaac

SEQ ID NO: 3163850 - RNA, 19 nt, Artificial Sequence
  Description of Artificial Sequence: Synthetic oligonucleotide
uccugcugaagacucagga

SEQ ID NO: 3163851 - RNA, 19 nt, Artificial Sequence
  Description of Artificial Sequence: Synthetic oligonucleotide
uuccccuuccauuucagga

SEQ ID NO: 3163852 - RNA, 19 nt, Artificial Sequence
  Description of Artificial Sequence: Synthetic oligonucleotide
cacaagcacaaucaagggc

SEQ ID NO: 3163853 - RNA, 19 nt, Artificial Sequence
  Description of Artificial Sequence: Synthetic oligonucleotide
aguacgcugaugagcaugc

SEQ ID NO: 3163854 - RNA, 19 nt, Artificial Sequence
  Description of Artificial Sequence: Synthetic oligonucleotide
ugaucaguguccugguggc

SEQ ID NO: 3163855 - RNA, 19 nt, Artificial Sequence
  Description of Artificial Sequence: Synthetic oligonucleotide
ggauugaucaguguccugg

SEQ ID NO: 3163856 - RNA, 19 nt, Artificial Sequence
  Description of Artificial Sequence: Synthetic oligonucleotide
ucccacaagcacaaucaag

SEQ ID NO: 3163857 - RNA, 19 nt, Artificial Sequence
  Description of Artificial Sequence: Synthetic oligonucleotide
uugaacucaaguuguuuuc

SEQ ID NO: 3163858 - RNA, 19 nt, Artificial Sequence
  Description of Artificial Sequence: Synthetic oligonucleotide
uguccugguggccucgccg

SEQ ID NO: 3163859 - RNA, 19 nt, Artificial Sequence
  Description of Artificial Sequence: Synthetic oligonucleotide
ggaacaagacccaagauga

SEQ ID NO: 3163860 - RNA, 19 nt, Artificial Sequence
  Description of Artificial Sequence: Synthetic oligonucleotide
guguggugcaaacuguuag

SEQ ID NO: 3163861 - RNA, 19 nt, Artificial Sequence
  Description of Artificial Sequence: Synthetic oligonucleotide
gucaccuacagugauauga

SEQ ID NO: 3163862 - RNA, 19 nt, Artificial Sequence
  Description of Artificial Sequence: Synthetic oligonucleotide
aaauaaggugguggagggg

SEQ ID NO: 3163863 - RNA, 19 nt, Artificial Sequence
  Description of Artificial Sequence: Synthetic oligonucleotide
uaugaacaggcuccguacu

SEQ ID NO: 3163864 - RNA, 19 nt, Artificial Sequence
  Description of Artificial Sequence: Synthetic oligonucleotide
ugagccacauccaggcacc

SEQ ID NO: 3163865 - RNA, 19 nt, Artificial Sequence
  Description of Artificial Sequence: Synthetic oligonucleotide
aaacuggcggcucucucca

SEQ ID NO: 3163866 - RNA, 19 nt, Artificial Sequence
  Description of Artificial Sequence: Synthetic oligonucleotide
gucugagccacauccaggc

SEQ ID NO: 3163867 - RNA, 19 nt, Artificial Sequence
  Description of Artificial Sequence: Synthetic oligonucleotide
ggaauauuaucaccgaguc

SEQ ID NO: 3163868 - RNA, 19 nt, Artificial Sequence
  Description of Artificial Sequence: Synthetic oligonucleotide
caaacuggcggcucucucc

SEQ ID NO: 3163869 - RNA, 19 nt, Artificial Sequence
  Description of Artificial Sequence: Synthetic oligonucleotide
augcccaguacgcugauga

SEQ ID NO: 3163870 - RNA, 19 nt, Artificial Sequence
  Description of Artificial Sequence: Synthetic oligonucleotide
ccuacagugauaugaacag

SEQ ID NO: 3163871 - RNA, 19 nt, Artificial Sequence
  Description of Artificial Sequence: Synthetic oligonucleotide
ucaccuacagugauaugaa

SEQ ID NO: 3163872 - RNA, 19 nt, Artificial Sequence
  Description of Artificial Sequence: Synthetic oligonucleotide
gauaugaacaggcuccgua

SEQ ID NO: 3163873 - RNA, 19 nt, Artificial Sequence
  Description of Artificial Sequence: Synthetic oligonucleotide
ucaggaguaugucggcuug

SEQ ID NO: 3163874 - RNA, 19 nt, Artificial Sequence
  Description of Artificial Sequence: Synthetic oligonucleotide
ucaaguuguuuucuucuua

SEQ ID NO: 3163875 - RNA, 19 nt, Artificial Sequence
  Description of Artificial Sequence: Synthetic oligonucleotide
uacgcugaugagcaugcca

SEQ ID NO: 3163876 - RNA, 19 nt, Artificial Sequence
  Description of Artificial Sequence: Synthetic oligonucleotide
guuguuuucuucuuaacau

SEQ ID NO: 3163877 - RNA, 19 nt, Artificial Sequence
  Description of Artificial Sequence: Synthetic oligonucleotide
augaucugcagagacagga

SEQ ID NO: 3163878 - RNA, 19 nt, Artificial Sequence
  Description of Artificial Sequence: Synthetic oligonucleotide
aaggauugaucaguguccu

SEQ ID NO: 3163879 - RNA, 19 nt, Artificial Sequence
  Description of Artificial Sequence: Synthetic oligonucleotide
ucaguguggugcaaacugu

SEQ ID NO: 3163880 - RNA, 19 nt, Artificial Sequence
  Description of Artificial Sequence: Synthetic oligonucleotide
agacucaggaaaauaaggu

SEQ ID NO: 3163881 - RNA, 19 nt, Artificial Sequence
  Description of Artificial Sequence: Synthetic oligonucleotide
caagaugaggcacugggca

SEQ ID NO: 3163882 - RNA, 19 nt, Artificial Sequence
  Description of Artificial Sequence: Synthetic oligonucleotide
gaauauuaucaccgaguca

SEQ ID NO: 3163883 - RNA, 19 nt, Artificial Sequence
  Description of Artificial Sequence: Synthetic oligonucleotide
ggcgggaauauuaucaccg

SEQ ID NO: 3163884 - RNA, 19 nt, Artificial Sequence
  Description of Artificial Sequence: Synthetic oligonucleotide
aucccugucacucagaagc

SEQ ID NO: 3163885 - RNA, 19 nt, Artificial Sequence
  Description of Artificial Sequence: Synthetic oligonucleotide
aagcagagaccauuugucc

SEQ ID NO: 3163886 - RNA, 19 nt, Artificial Sequence
  Description of Artificial Sequence: Synthetic oligonucleotide
agacacuuggcucacaaag

SEQ ID NO: 3163887 - RNA, 19 nt, Artificial Sequence
  Description of Artificial Sequence: Synthetic oligonucleotide
agaggaagcugccauggcc

SEQ ID NO: 3163888 - RNA, 19 nt, Artificial Sequence
  Description of Artificial Sequence: Synthetic oligonucleotide
agcagagaccauuuguccc

SEQ ID NO: 3163889 - RNA, 19 nt, Artificial Sequence
  Description of Artificial Sequence: Synthetic oligonucleotide
acaaagcugaccugguccc

SEQ ID NO: 3163890 - RNA, 19 nt, Artificial Sequence
  Description of Artificial Sequence: Synthetic oligonucleotide
aggagagcaccacagacac

SEQ ID NO: 3163891 - RNA, 19 nt, Artificial Sequence
  Description of Artificial Sequence: Synthetic oligonucleotide
ugcagcacgaugccaaugg

SEQ ID NO: 3163892 - RNA, 19 nt, Artificial Sequence
  Description of Artificial Sequence: Synthetic oligonucleotide
uuucgauagcacuugagcu

SEQ ID NO: 3163893 - RNA, 19 nt, Artificial Sequence
  Description of Artificial Sequence: Synthetic oligonucleotide
agaggagagcaccacagac

SEQ ID NO: 3163894 - RNA, 19 nt, Artificial Sequence
  Description of Artificial Sequence: Synthetic oligonucleotide
cuuucgauagcacuugagc

SEQ ID NO: 3163895 - RNA, 19 nt, Artificial Sequence
  Description of Artificial Sequence: Synthetic oligonucleotide
gaugcacugcucuucaucc

SEQ ID NO: 3163896 - RNA, 19 nt, Artificial Sequence
  Description of Artificial Sequence: Synthetic oligonucleotide
ucugucugaugucagggag

SEQ ID NO: 3163897 - RNA, 19 nt, Artificial Sequence
  Description of Artificial Sequence: Synthetic oligonucleotide
gagagcaccacagacacag

SEQ ID NO: 3163898 - RNA, 19 nt, Artificial Sequence
  Description of Artificial Sequence: Synthetic oligonucleotide
ugagcugaagagaggagag

SEQ ID NO: 3163899 - RNA, 19 nt, Artificial Sequence
  Description of Artificial Sequence: Synthetic oligonucleotide
ucugaugucagggaggaca

SEQ ID NO: 3163900 - RNA, 19 nt, Artificial Sequence
  Description of Artificial Sequence: Synthetic oligonucleotide
cuucaugcggccaugggcc

SEQ ID NO: 3163901 - RNA, 19 nt, Artificial Sequence
  Description of Artificial Sequence: Synthetic oligonucleotide
uucgauagcacuugagcug

SEQ ID NO: 3163902 - RNA, 19 nt, Artificial Sequence
  Description of Artificial Sequence: Synthetic oligonucleotide
ugugccaccaugccgagac

SEQ ID NO: 3163903 - RNA, 19 nt, Artificial Sequence
  Description of Artificial Sequence: Synthetic oligonucleotide
cauggcugcagcacgaugc

SEQ ID NO: 3163904 - RNA, 19 nt, Artificial Sequence
  Description of Artificial Sequence: Synthetic oligonucleotide
ucagggaggacagagacac

SEQ ID NO: 3163905 - RNA, 19 nt, Artificial Sequence
  Description of Artificial Sequence: Synthetic oligonucleotide
gaugccaaugggcaugaag

SEQ ID NO: 3163906 - RNA, 19 nt, Artificial Sequence
  Description of Artificial Sequence: Synthetic oligonucleotide
aaucccaccgacgaucauc

SEQ ID NO: 3163907 - RNA, 19 nt, Artificial Sequence
  Description of Artificial Sequence: Synthetic oligonucleotide
uagcacuugagcugaagag

SEQ ID NO: 3163908 - RNA, 19 nt, Artificial Sequence
  Description of Artificial Sequence: Synthetic oligonucleotide
cugggaugcacucaggggc

SEQ ID NO: 3163909 - RNA, 19 nt, Artificial Sequence
  Description of Artificial Sequence: Synthetic oligonucleotide
ugucagggaggacagagac

SEQ ID NO: 3163910 - RNA, 19 nt, Artificial Sequence
  Description of Artificial Sequence: Synthetic oligonucleotide
cacaaagcugaccuggucc

SEQ ID NO: 3163911 - RNA, 19 nt, Artificial Sequence
  Description of Artificial Sequence: Synthetic oligonucleotide
aacgugcacacuaaccugg

SEQ ID NO: 3163912 - RNA, 19 nt, Artificial Sequence
  Description of Artificial Sequence: Synthetic oligonucleotide
agaagcagagaccauuugu

SEQ ID NO: 3163913 - RNA, 19 nt, Artificial Sequence
  Description of Artificial Sequence: Synthetic oligonucleotide
ugggcaugaagacaccugc

SEQ ID NO: 3163914 - RNA, 19 nt, Artificial Sequence
  Description of Artificial Sequence: Synthetic oligonucleotide
aucauccauaccaacgugc

SEQ ID NO: 3163915 - RNA, 19 nt, Artificial Sequence
  Description of Artificial Sequence: Synthetic oligonucleotide
uggcucacaaagcugaccu

SEQ ID NO: 3163916 - RNA, 19 nt, Artificial Sequence
  Description of Artificial Sequence: Synthetic oligonucleotide
ugccucauaucucuccagg

SEQ ID NO: 3163917 - RNA, 19 nt, Artificial Sequence
  Description of Artificial Sequence: Synthetic oligonucleotide
ucauccauaccaacgugca

SEQ ID NO: 3163918 - RNA, 19 nt, Artificial Sequence
  Description of Artificial Sequence: Synthetic oligonucleotide
uaaccugggaugcacucag

SEQ ID NO: 3163919 - RNA, 19 nt, Artificial Sequence
  Description of Artificial Sequence: Synthetic oligonucleotide
accacagacacagaggaag

SEQ ID NO: 3163920 - RNA, 19 nt, Artificial Sequence
  Description of Artificial Sequence: Synthetic oligonucleotide
gaugucagggaggacagag

SEQ ID NO: 3163921 - RNA, 19 nt, Artificial Sequence
  Description of Artificial Sequence: Synthetic oligonucleotide
gucacucagaagcagagac

SEQ ID NO: 3163922 - RNA, 19 nt, Artificial Sequence
  Description of Artificial Sequence: Synthetic oligonucleotide
ugcugugccaccaugccga

SEQ ID NO: 3163923 - RNA, 19 nt, Artificial Sequence
  Description of Artificial Sequence: Synthetic oligonucleotide
agaugcacugcucuucauc

SEQ ID NO: 3163924 - RNA, 19 nt, Artificial Sequence
  Description of Artificial Sequence: Synthetic oligonucleotide
auaucucuccaggucaggc

SEQ ID NO: 3163925 - RNA, 19 nt, Artificial Sequence
  Description of Artificial Sequence: Synthetic oligonucleotide
aggacagagacacuuggcu

SEQ ID NO: 3163926 - RNA, 19 nt, Artificial Sequence
  Description of Artificial Sequence: Synthetic oligonucleotide
ucauaucucuccaggucag

SEQ ID NO: 3163927 - RNA, 19 nt, Artificial Sequence
  Description of Artificial Sequence: Synthetic oligonucleotide
ugcacacuaaccugggaug

SEQ ID NO: 3163928 - RNA, 19 nt, Artificial Sequence
  Description of Artificial Sequence: Synthetic oligonucleotide
gacagagacacuuggcuca

SEQ ID NO: 3163929 - RNA, 19 nt, Artificial Sequence
  Description of Artificial Sequence: Synthetic oligonucleotide
gaggaagcugccauggccg

SEQ ID NO: 3163930 - RNA, 19 nt, Artificial Sequence
  Description of Artificial Sequence: Synthetic oligonucleotide
uuuguccccauugucaucu

SEQ ID NO: 3163931 - RNA, 19 nt, Artificial Sequence
  Description of Artificial Sequence: Synthetic oligonucleotide
aggagaaucccaccgacga

SEQ ID NO: 3163932 - RNA, 19 nt, Artificial Sequence
  Description of Artificial Sequence: Synthetic oligonucleotide
agaccauuuguccccauug

SEQ ID NO: 3163933 - RNA, 19 nt, Artificial Sequence
  Description of Artificial Sequence: Synthetic oligonucleotide
acuaaccugggaugcacuc

SEQ ID NO: 3163934 - RNA, 19 nt, Artificial Sequence
  Description of Artificial Sequence: Synthetic oligonucleotide
auagcacuugagcugaaga

SEQ ID NO: 3163935 - RNA, 19 nt, Artificial Sequence
  Description of Artificial Sequence: Synthetic oligonucleotide
uaggagaaucccaccgacg

SEQ ID NO: 3163936 - RNA, 19 nt, Artificial Sequence
  Description of Artificial Sequence: Synthetic oligonucleotide
accauuuguccccauuguc

SEQ ID NO: 3163937 - RNA, 19 nt, Artificial Sequence
  Description of Artificial Sequence: Synthetic oligonucleotide
ugaagagaggagagcacca

SEQ ID NO: 3163938 - RNA, 19 nt, Artificial Sequence
  Description of Artificial Sequence: Synthetic oligonucleotide
cagacacagaggaagcugc

SEQ ID NO: 3163939 - RNA, 19 nt, Artificial Sequence
  Description of Artificial Sequence: Synthetic oligonucleotide
acgaucauccauaccaacg

SEQ ID NO: 3163940 - RNA, 19 nt, Artificial Sequence
  Description of Artificial Sequence: Synthetic oligonucleotide
ugcucuucaucccugucac

SEQ ID NO: 3163941 - RNA, 19 nt, Artificial Sequence
  Description of Artificial Sequence: Synthetic oligonucleotide
gagacagucugucugaugu

SEQ ID NO: 3163942 - RNA, 19 nt, Artificial Sequence
  Description of Artificial Sequence: Synthetic oligonucleotide
ucacucagaagcagagacc

SEQ ID NO: 3163943 - RNA, 19 nt, Artificial Sequence
  Description of Artificial Sequence: Synthetic oligonucleotide
gagcaccacagacacagag

SEQ ID NO: 3163944 - RNA, 19 nt, Artificial Sequence
  Description of Artificial Sequence: Synthetic oligonucleotide
ucaggcuuucgauagcacu

SEQ ID NO: 3163945 - RNA, 19 nt, Artificial Sequence
  Description of Artificial Sequence: Synthetic oligonucleotide
acacuuggcucacaaagcu

SEQ ID NO: 3163946 - RNA, 19 nt, Artificial Sequence
  Description of Artificial Sequence: Synthetic oligonucleotide
aaagcugaccuggucccac

SEQ ID NO: 3163947 - RNA, 19 nt, Artificial Sequence
  Description of Artificial Sequence: Synthetic oligonucleotide
uugagcugaagagaggaga

SEQ ID NO: 3163948 - RNA, 19 nt, Artificial Sequence
  Description of Artificial Sequence: Synthetic oligonucleotide
aagagaggagagcaccaca

SEQ ID NO: 3163949 - RNA, 19 nt, Artificial Sequence
  Description of Artificial Sequence: Synthetic oligonucleotide
ucagaugcacugcucuuca

SEQ ID NO: 3163950 - RNA, 19 nt, Artificial Sequence
  Description of Artificial Sequence: Synthetic oligonucleotide
ugugccucauaucucucca

SEQ ID NO: 3163951 - RNA, 19 nt, Artificial Sequence
  Description of Artificial Sequence: Synthetic oligonucleotide
gaagcagagaccauuuguc

SEQ ID NO: 3163952 - RNA, 19 nt, Artificial Sequence
  Description of Artificial Sequence: Synthetic oligonucleotide
ugccgagacagucugucug

SEQ ID NO: 3163953 - RNA, 19 nt, Artificial Sequence
  Description of Artificial Sequence: Synthetic oligonucleotide
accaacgugcacacuaacc

SEQ ID NO: 3163954 - RNA, 19 nt, Artificial Sequence
  Description of Artificial Sequence: Synthetic oligonucleotide
agucugucugaugucaggg

SEQ ID NO: 3163955 - RNA, 19 nt, Artificial Sequence
  Description of Artificial Sequence: Synthetic oligonucleotide
caggucaggcuuucgauag

SEQ ID NO: 3163956 - RNA, 19 nt, Artificial Sequence
  Description of Artificial Sequence: Synthetic oligonucleotide
ucugcugugccaccaugcc

SEQ ID NO: 3163957 - RNA, 19 nt, Artificial Sequence
  Description of Artificial Sequence: Synthetic oligonucleotide
acagaggaagcugccaugg

SEQ ID NO: 3163958 - RNA, 19 nt, Artificial Sequence
  Description of Artificial Sequence: Synthetic oligonucleotide
auugucaucugcugugcca

SEQ ID NO: 3163959 - RNA, 19 nt, Artificial Sequence
  Description of Artificial Sequence: Synthetic oligonucleotide
accugggaugcacucaggg

SEQ ID NO: 3163960 - RNA, 19 nt, Artificial Sequence
  Description of Artificial Sequence: Synthetic oligonucleotide
auggcugcagcacgaugcc

SEQ ID NO: 3163961 - RNA, 19 nt, Artificial Sequence
  Description of Artificial Sequence: Synthetic oligonucleotide
auccauaccaacgugcaca

SEQ ID NO: 3163962 - RNA, 19 nt, Artificial Sequence
  Description of Artificial Sequence: Synthetic oligonucleotide
augccaaugggcaugaaga

SEQ ID NO: 3163963 - RNA, 19 nt, Artificial Sequence
  Description of Artificial Sequence: Synthetic oligonucleotide
acuugagcugaagagagga

SEQ ID NO: 3163964 - RNA, 19 nt, Artificial Sequence
  Description of Artificial Sequence: Synthetic oligonucleotide
cugaagagaggagagcacc

SEQ ID NO: 3163965 - RNA, 19 nt, Artificial Sequence
  Description of Artificial Sequence: Synthetic oligonucleotide
aucccaccgacgaucaucc

SEQ ID NO: 3163966 - RNA, 19 nt, Artificial Sequence
  Description of Artificial Sequence: Synthetic oligonucleotide
gaucauccauaccaacgug

SEQ ID NO: 3163967 - RNA, 19 nt, Artificial Sequence
  Description of Artificial Sequence: Synthetic oligonucleotide
cugucugaugucagggagg

SEQ ID NO: 3163968 - RNA, 19 nt, Artificial Sequence
  Description of Artificial Sequence: Synthetic oligonucleotide
ugcacugcucuucaucccu

SEQ ID NO: 3163969 - RNA, 19 nt, Artificial Sequence
  Description of Artificial Sequence: Synthetic oligonucleotide
cugaccuggucccacgacg

SEQ ID NO: 3163970 - RNA, 19 nt, Artificial Sequence
  Description of Artificial Sequence: Synthetic oligonucleotide
cucauaucucuccagguca

SEQ ID NO: 3163971 - RNA, 19 nt, Artificial Sequence
  Description of Artificial Sequence: Synthetic oligonucleotide
ucgauagcacuugagcuga

SEQ ID NO: 3163972 - RNA, 19 nt, Artificial Sequence
  Description of Artificial Sequence: Synthetic oligonucleotide
gacacuuggcucacaaagc

SEQ ID NO: 3163973 - RNA, 19 nt, Artificial Sequence
  Description of Artificial Sequence: Synthetic oligonucleotide
cugucacucagaagcagag

SEQ ID NO: 3163974 - RNA, 19 nt, Artificial Sequence
  Description of Artificial Sequence: Synthetic oligonucleotide
ucagaagcagagaccauuu

SEQ ID NO: 3163975 - RNA, 19 nt, Artificial Sequence
  Description of Artificial Sequence: Synthetic oligonucleotide
acucaggggcuucaugcgg

SEQ ID NO: 3163976 - RNA, 19 nt, Artificial Sequence
  Description of Artificial Sequence: Synthetic oligonucleotide
aaugggcaugaagacaccu

SEQ ID NO: 3163977 - RNA, 19 nt, Artificial Sequence
  Description of Artificial Sequence: Synthetic oligonucleotide
cugaugucagggaggacag

SEQ ID NO: 3163978 - RNA, 19 nt, Artificial Sequence
  Description of Artificial Sequence: Synthetic oligonucleotide
ccaaugggcaugaagacac

SEQ ID NO: 3163979 - RNA, 19 nt, Artificial Sequence
  Description of Artificial Sequence: Synthetic oligonucleotide
auggccgcugagcccaucc

SEQ ID NO: 3163980 - RNA, 19 nt, Artificial Sequence
  Description of Artificial Sequence: Synthetic oligonucleotide
ggcaugaagacaccugcgg

SEQ ID NO: 3163981 - RNA, 19 nt, Artificial Sequence
  Description of Artificial Sequence: Synthetic oligonucleotide
ucaucccugucacucagaa

SEQ ID NO: 3163982 - RNA, 19 nt, Artificial Sequence
  Description of Artificial Sequence: Synthetic oligonucleotide
agcugaagagaggagagca

SEQ ID NO: 3163983 - RNA, 19 nt, Artificial Sequence
  Description of Artificial Sequence: Synthetic oligonucleotide
augcacugcucuucauccc

SEQ ID NO: 3163984 - RNA, 19 nt, Artificial Sequence
  Description of Artificial Sequence: Synthetic oligonucleotide
uuugguaggaggauaaggc

SEQ ID NO: 3163985 - RNA, 19 nt, Artificial Sequence
  Description of Artificial Sequence: Synthetic oligonucleotide
uaagacauuguguugaacu

SEQ ID NO: 3163986 - RNA, 19 nt, Artificial Sequence
  Description of Artificial Sequence: Synthetic oligonucleotide
aagacauuguguugaacuc

SEQ ID NO: 3163987 - RNA, 19 nt, Artificial Sequence
  Description of Artificial Sequence: Synthetic oligonucleotide
aacucucggaaucagguug

SEQ ID NO: 3163988 - RNA, 19 nt, Artificial Sequence
  Description of Artificial Sequence: Synthetic oligonucleotide
gagguggacacacaggagg

SEQ ID NO: 3163989 - RNA, 19 nt, Artificial Sequence
  Description of Artificial Sequence: Synthetic oligonucleotide
cucggaaucagguuguccg

SEQ ID NO: 3163990 - RNA, 19 nt, Artificial Sequence
  Description of Artificial Sequence: Synthetic oligonucleotide
uuuggagguggacacacag

SEQ ID NO: 3163991 - RNA, 19 nt, Artificial Sequence
  Description of Artificial Sequence: Synthetic oligonucleotide
ugaacucucggaaucaggu

SEQ ID NO: 3163992 - RNA, 19 nt, Artificial Sequence
  Description of Artificial Sequence: Synthetic oligonucleotide
gaggauaaggcucugggca

SEQ ID NO: 3163993 - RNA, 19 nt, Artificial Sequence
  Description of Artificial Sequence: Synthetic oligonucleotide
uggagguggacacacagga

SEQ ID NO: 3163994 - RNA, 19 nt, Artificial Sequence
  Description of Artificial Sequence: Synthetic oligonucleotide
uguugguaagacauugugu

SEQ ID NO: 3163995 - RNA, 19 nt, Artificial Sequence
  Description of Artificial Sequence: Synthetic oligonucleotide
aggaggauaaggcucuggg

SEQ ID NO: 3163996 - RNA, 19 nt, Artificial Sequence
  Description of Artificial Sequence: Synthetic oligonucleotide
uuguguugaacucucggaa

SEQ ID NO: 3163997 - RNA, 19 nt, Artificial Sequence
  Description of Artificial Sequence: Synthetic oligonucleotide
auuguguugaacucucgga

SEQ ID NO: 3163998 - RNA, 19 nt, Artificial Sequence
  Description of Artificial Sequence: Synthetic oligonucleotide
cauuguguugaacucucgg

SEQ ID NO: 3163999 - RNA, 19 nt, Artificial Sequence
  Description of Artificial Sequence: Synthetic oligonucleotide
uuuggaggaggacaaggcu

SEQ ID NO: 3164000 - RNA, 19 nt, Artificial Sequence
  Description of Artificial Sequence: Synthetic oligonucleotide
uugaacucucggaaucagg

SEQ ID NO: 3164001 - RNA, 19 nt, Artificial Sequence
  Description of Artificial Sequence: Synthetic oligonucleotide
ugguaagacauuguguuga

SEQ ID NO: 3164002 - RNA, 19 nt, Artificial Sequence
  Description of Artificial Sequence: Synthetic oligonucleotide
cuuuggaggaggacaaggc

SEQ ID NO: 3164003 - RNA, 19 nt, Artificial Sequence
  Description of Artificial Sequence: Synthetic oligonucleotide
aggauaaggcucugggcac

SEQ ID NO: 3164004 - RNA, 19 nt, Artificial Sequence
  Description of Artificial Sequence: Synthetic oligonucleotide
cuuugguaggaggauaagg

SEQ ID NO: 3164005 - RNA, 19 nt, Artificial Sequence
  Description of Artificial Sequence: Synthetic oligonucleotide
cacaggaggaggcugacag

SEQ ID NO: 3164006 - RNA, 19 nt, Artificial Sequence
  Description of Artificial Sequence: Synthetic oligonucleotide
gaggacaaggcucugggca

SEQ ID NO: 3164007 - RNA, 19 nt, Artificial Sequence
  Description of Artificial Sequence: Synthetic oligonucleotide
aggaggacaaggcucuggg

SEQ ID NO: 3164008 - RNA, 19 nt, Artificial Sequence
  Description of Artificial Sequence: Synthetic oligonucleotide
uuggagguggacacacagg

SEQ ID NO: 3164009 - RNA, 19 nt, Artificial Sequence
  Description of Artificial Sequence: Synthetic oligonucleotide
uuggaggaggacaaggcuc

SEQ ID NO: 3164010 - RNA, 19 nt, Artificial Sequence
  Description of Artificial Sequence: Synthetic oligonucleotide
ugguaggaggauaaggcuc

SEQ ID NO: 3164011 - RNA, 19 nt, Artificial Sequence
  Description of Artificial Sequence: Synthetic oligonucleotide
acuuuggaggaggacaagg

SEQ ID NO: 3164012 - RNA, 19 nt, Artificial Sequence
  Description of Artificial Sequence: Synthetic oligonucleotide
aggacaaggcucugggcac

SEQ ID NO: 3164013 - RNA, 19 nt, Artificial Sequence
  Description of Artificial Sequence: Synthetic oligonucleotide
acuuuggagguggacacac

SEQ ID NO: 3164014 - RNA, 19 nt, Artificial Sequence
  Description of Artificial Sequence: Synthetic oligonucleotide
uugguaggaggauaaggcu

SEQ ID NO: 3164015 - RNA, 19 nt, Artificial Sequence
  Description of Artificial Sequence: Synthetic oligonucleotide
uugguaagacauuguguug

SEQ ID NO: 3164016 - RNA, 19 nt, Artificial Sequence
  Description of Artificial Sequence: Synthetic oligonucleotide
uggacacacaggaggaggc

SEQ ID NO: 3164017 - RNA, 19 nt, Artificial Sequence
  Description of Artificial Sequence: Synthetic oligonucleotide
cuguugguaagacauugug

SEQ ID NO: 3164018 - RNA, 19 nt, Artificial Sequence
  Description of Artificial Sequence: Synthetic oligonucleotide
uggaggaggacaaggcucu

SEQ ID NO: 3164019 - RNA, 19 nt, Artificial Sequence
  Description of Artificial Sequence: Synthetic oligonucleotide
ugcuguugguaagacauug

SEQ ID NO: 3164020 - RNA, 19 nt, Artificial Sequence
  Description of Artificial Sequence: Synthetic oligonucleotide
uaaggcucugggcacuuug

SEQ ID NO: 3164021 - RNA, 19 nt, Artificial Sequence
  Description of Artificial Sequence: Synthetic oligonucleotide
ugggcacuuugguaggagg

SEQ ID NO: 3164022 - RNA, 19 nt, Artificial Sequence
  Description of Artificial Sequence: Synthetic oligonucleotide
cuugcacugcugcuguugg

SEQ ID NO: 3164023 - RNA, 19 nt, Artificial Sequence
  Description of Artificial Sequence: Synthetic oligonucleotide
uguguugaacucucggaau

SEQ ID NO: 3164024 - RNA, 19 nt, Artificial Sequence
  Description of Artificial Sequence: Synthetic oligonucleotide
guugguaagacauuguguu

SEQ ID NO: 3164025 - RNA, 19 nt, Artificial Sequence
  Description of Artificial Sequence: Synthetic oligonucleotide
caggaggaggcugacaggg

SEQ ID NO: 3164026 - RNA, 19 nt, Artificial Sequence
  Description of Artificial Sequence: Synthetic oligonucleotide
gcucugggcacuuuggagg

SEQ ID NO: 3164027 - RNA, 19 nt, Artificial Sequence
  Description of Artificial Sequence: Synthetic oligonucleotide
uguugaacucucggaauca

SEQ ID NO: 3164028 - RNA, 19 nt, Artificial Sequence
  Description of Artificial Sequence: Synthetic oligonucleotide
gcucugggcacuuugguag

SEQ ID NO: 3164029 - RNA, 19 nt, Artificial Sequence
  Description of Artificial Sequence: Synthetic oligonucleotide
gacagggcugcuugcacug

SEQ ID NO: 3164030 - RNA, 19 nt, Artificial Sequence
  Description of Artificial Sequence: Synthetic oligonucleotide
aaggcucugggcacuuugg

SEQ ID NO: 3164031 - RNA, 19 nt, Artificial Sequence
  Description of Artificial Sequence: Synthetic oligonucleotide
guggacacacaggaggagg

SEQ ID NO: 3164032 - RNA, 19 nt, Artificial Sequence
  Description of Artificial Sequence: Synthetic oligonucleotide
gacauuguguugaacucuc

SEQ ID NO: 3164033 - RNA, 19 nt, Artificial Sequence
  Description of Artificial Sequence: Synthetic oligonucleotide
guguugaacucucggaauc

SEQ ID NO: 3164034 - RNA, 19 nt, Artificial Sequence
  Description of Artificial Sequence: Synthetic oligonucleotide
agacauuguguugaacucu

SEQ ID NO: 3164035 - RNA, 19 nt, Artificial Sequence
  Description of Artificial Sequence: Synthetic oligonucleotide
acaggaggaggcugacagg

SEQ ID NO: 3164036 - RNA, 19 nt, Artificial Sequence
  Description of Artificial Sequence: Synthetic oligonucleotide
ugacagggcugcuugcacu

SEQ ID NO: 3164037 - RNA, 19 nt, Artificial Sequence
  Description of Artificial Sequence: Synthetic oligonucleotide
aggaggcugacagggcugc

SEQ ID NO: 3164038 - RNA, 19 nt, Artificial Sequence
  Description of Artificial Sequence: Synthetic oligonucleotide
gacacacaggaggaggcug

SEQ ID NO: 3164039 - RNA, 19 nt, Artificial Sequence
  Description of Artificial Sequence: Synthetic oligonucleotide
uaggaggauaaggcucugg

SEQ ID NO: 3164040 - RNA, 19 nt, Artificial Sequence
  Description of Artificial Sequence: Synthetic oligonucleotide
guugaacucucggaaucag

SEQ ID NO: 3164041 - RNA, 19 nt, Artificial Sequence
  Description of Artificial Sequence: Synthetic oligonucleotide
gaggaggacaaggcucugg

SEQ ID NO: 3164042 - RNA, 19 nt, Artificial Sequence
  Description of Artificial Sequence: Synthetic oligonucleotide
cugggcacuuuggaggugg

SEQ ID NO: 3164043 - RNA, 19 nt, Artificial Sequence
  Description of Artificial Sequence: Synthetic oligonucleotide
aggcugacagggcugcuug

SEQ ID NO: 3164044 - RNA, 19 nt, Artificial Sequence
  Description of Artificial Sequence: Synthetic oligonucleotide
ggaggauaaggcucugggc

SEQ ID NO: 3164045 - RNA, 19 nt, Artificial Sequence
  Description of Artificial Sequence: Synthetic oligonucleotide
cucugggcacuuugguagg

SEQ ID NO: 3164046 - RNA, 19 nt, Artificial Sequence
  Description of Artificial Sequence: Synthetic oligonucleotide
ucucggaaucagguugucc

SEQ ID NO: 3164047 - RNA, 19 nt, Artificial Sequence
  Description of Artificial Sequence: Synthetic oligonucleotide
caaggcucugggcacuuug

SEQ ID NO: 3164048 - RNA, 19 nt, Artificial Sequence
  Description of Artificial Sequence: Synthetic oligonucleotide
cugggcacuuuggaggagg

SEQ ID NO: 3164049 - RNA, 19 nt, Artificial Sequence
  Description of Artificial Sequence: Synthetic oligonucleotide
ugcugcuguugguaagaca

SEQ ID NO: 3164050 - RNA, 19 nt, Artificial Sequence
  Description of Artificial Sequence: Synthetic oligonucleotide
ugcacugcugcuguuggua

SEQ ID NO: 3164051 - RNA, 19 nt, Artificial Sequence
  Description of Artificial Sequence: Synthetic oligonucleotide
acugcugcuguugguaaga

SEQ ID NO: 3164052 - RNA, 19 nt, Artificial Sequence
  Description of Artificial Sequence: Synthetic oligonucleotide
acuuugguaggaggauaag

SEQ ID NO: 3164053 - RNA, 19 nt, Artificial Sequence
  Description of Artificial Sequence: Synthetic oligonucleotide
ggcacuuuggaggaggaca

SEQ ID NO: 3164054 - RNA, 19 nt, Artificial Sequence
  Description of Artificial Sequence: Synthetic oligonucleotide
cacuuugguaggaggauaa

SEQ ID NO: 3164055 - RNA, 19 nt, Artificial Sequence
  Description of Artificial Sequence: Synthetic oligonucleotide
acauuguguugaacucucg

SEQ ID NO: 3164056 - RNA, 19 nt, Artificial Sequence
  Description of Artificial Sequence: Synthetic oligonucleotide
ugggcacuuuggaggagga

SEQ ID NO: 3164057 - RNA, 19 nt, Artificial Sequence
  Description of Artificial Sequence: Synthetic oligonucleotide
gcacuuuggagguggacac

SEQ ID NO: 3164058 - RNA, 19 nt, Artificial Sequence
  Description of Artificial Sequence: Synthetic oligonucleotide
ggcucugggcacuuuggag

SEQ ID NO: 3164059 - RNA, 19 nt, Artificial Sequence
  Description of Artificial Sequence: Synthetic oligonucleotide
cacugcugcuguugguaag

SEQ ID NO: 3164060 - RNA, 19 nt, Artificial Sequence
  Description of Artificial Sequence: Synthetic oligonucleotide
cugacagggcugcuugcac

SEQ ID NO: 3164061 - RNA, 19 nt, Artificial Sequence
  Description of Artificial Sequence: Synthetic oligonucleotide
guaagacauuguguugaac

SEQ ID NO: 3164062 - RNA, 19 nt, Artificial Sequence
  Description of Artificial Sequence: Synthetic oligonucleotide
gacuuuggaggaggacaag

SEQ ID NO: 3164063 - RNA, 19 nt, Artificial Sequence
  Description of Artificial Sequence: Synthetic oligonucleotide
ggcacuuuggagguggaca

SEQ ID NO: 3164064 - RNA, 19 nt, Artificial Sequence
  Description of Artificial Sequence: Synthetic oligonucleotide
aggaggaggcugacagggc

SEQ ID NO: 3164065 - RNA, 19 nt, Artificial Sequence
  Description of Artificial Sequence: Synthetic oligonucleotide
cucugggcacuuuggagga

SEQ ID NO: 3164066 - RNA, 19 nt, Artificial Sequence
  Description of Artificial Sequence: Synthetic oligonucleotide
acagggcugcuugcacugc

SEQ ID NO: 3164067 - RNA, 19 nt, Artificial Sequence
  Description of Artificial Sequence: Synthetic oligonucleotide
aggcucugggcacuuugga

SEQ ID NO: 3164068 - RNA, 19 nt, Artificial Sequence
  Description of Artificial Sequence: Synthetic oligonucleotide
gaggaggcugacagggcug

SEQ ID NO: 3164069 - RNA, 19 nt, Artificial Sequence
  Description of Artificial Sequence: Synthetic oligonucleotide
aggcucugggcacuuuggu

SEQ ID NO: 3164070 - RNA, 19 nt, Artificial Sequence
  Description of Artificial Sequence: Synthetic oligonucleotide
agguggacacacaggagga

SEQ ID NO: 3164071 - RNA, 19 nt, Artificial Sequence
  Description of Artificial Sequence: Synthetic oligonucleotide
acucucggaaucagguugu

SEQ ID NO: 3164072 - RNA, 19 nt, Artificial Sequence
  Description of Artificial Sequence: Synthetic oligonucleotide
gcgacuuuggaggaggaca

SEQ ID NO: 3164073 - RNA, 19 nt, Artificial Sequence
  Description of Artificial Sequence: Synthetic oligonucleotide
gcugcuguugguaagacau

SEQ ID NO: 3164074 - RNA, 19 nt, Artificial Sequence
  Description of Artificial Sequence: Synthetic oligonucleotide
acacacaggaggaggcuga

SEQ ID NO: 3164075 - RNA, 19 nt, Artificial Sequence
  Description of Artificial Sequence: Synthetic oligonucleotide
gcugcuugcacugcugcug

SEQ ID NO: 3164076 - RNA, 19 nt, Artificial Sequence
  Description of Artificial Sequence: Synthetic oligonucleotide
ucugggcacuuugguagga

SEQ ID NO: 3164077 - RNA, 19 nt, Artificial Sequence
  Description of Artificial Sequence: Synthetic oligonucleotide
ggaggacaaggcucugggc

SEQ ID NO: 3164078 - RNA, 19 nt, Artificial Sequence
  Description of Artificial Sequence: Synthetic oligonucleotide
uugcacugcugcuguuggu

SEQ ID NO: 3164079 - RNA, 19 nt, Artificial Sequence
  Description of Artificial Sequence: Synthetic oligonucleotide
gguaagacauuguguugaa

SEQ ID NO: 3164080 - RNA, 19 nt, Artificial Sequence
  Description of Artificial Sequence: Synthetic oligonucleotide
ucugggcacuuuggaggag

SEQ ID NO: 3164081 - RNA, 19 nt, Artificial Sequence
  Description of Artificial Sequence: Synthetic oligonucleotide
cugggcacuuugguaggag

SEQ ID NO: 3164082 - RNA, 19 nt, Artificial Sequence
  Description of Artificial Sequence: Synthetic oligonucleotide
ugggcacuuuggaggugga

SEQ ID NO: 3164083 - RNA, 19 nt, Artificial Sequence
  Description of Artificial Sequence: Synthetic oligonucleotide
cuuuggagguggacacaca

SEQ ID NO: 3164084 - RNA, 19 nt, Artificial Sequence
  Description of Artificial Sequence: Synthetic oligonucleotide
cauagaauuauuuuguugc

SEQ ID NO: 3164085 - RNA, 19 nt, Artificial Sequence
  Description of Artificial Sequence: Synthetic oligonucleotide
ugaauuguaauguaaaugu

SEQ ID NO: 3164086 - RNA, 19 nt, Artificial Sequence
  Description of Artificial Sequence: Synthetic oligonucleotide
agaauuauuuuguugcuac

SEQ ID NO: 3164087 - RNA, 19 nt, Artificial Sequence
  Description of Artificial Sequence: Synthetic oligonucleotide
uuuaauucaguucuucaug

SEQ ID NO: 3164088 - RNA, 19 nt, Artificial Sequence
  Description of Artificial Sequence: Synthetic oligonucleotide
uuuuguugcuacuuuauag

SEQ ID NO: 3164089 - RNA, 19 nt, Artificial Sequence
  Description of Artificial Sequence: Synthetic oligonucleotide
uaaaugucugguauguagg

SEQ ID NO: 3164090 - RNA, 19 nt, Artificial Sequence
  Description of Artificial Sequence: Synthetic oligonucleotide
aauucaguucuucauguug

SEQ ID NO: 3164091 - RNA, 19 nt, Artificial Sequence
  Description of Artificial Sequence: Synthetic oligonucleotide
acuguuuugaauuguaaug

SEQ ID NO: 3164092 - RNA, 19 nt, Artificial Sequence
  Description of Artificial Sequence: Synthetic oligonucleotide
uuuucuacuguuuugaauu

SEQ ID NO: 3164093 - RNA, 19 nt, Artificial Sequence
  Description of Artificial Sequence: Synthetic oligonucleotide
uuuguugcuacuuuauagc

SEQ ID NO: 3164094 - RNA, 19 nt, Artificial Sequence
  Description of Artificial Sequence: Synthetic oligonucleotide
aauguaaaugucugguaug

SEQ ID NO: 3164095 - RNA, 19 nt, Artificial Sequence
  Description of Artificial Sequence: Synthetic oligonucleotide
uuuugaauuguaauguaaa

SEQ ID NO: 3164096 - RNA, 19 nt, Artificial Sequence
  Description of Artificial Sequence: Synthetic oligonucleotide
aauuguaauguaaaugucu

SEQ ID NO: 3164097 - RNA, 19 nt, Artificial Sequence
  Description of Artificial Sequence: Synthetic oligonucleotide
guaaaugucugguauguag

SEQ ID NO: 3164098 - RNA, 19 nt, Artificial Sequence
  Description of Artificial Sequence: Synthetic oligonucleotide
uaggauaucugauauguga

SEQ ID NO: 3164099 - RNA, 19 nt, Artificial Sequence
  Description of Artificial Sequence: Synthetic oligonucleotide
uguaggauaucugauaugu

SEQ ID NO: 3164100 - RNA, 19 nt, Artificial Sequence
  Description of Artificial Sequence: Synthetic oligonucleotide
uugaauuguaauguaaaug

SEQ ID NO: 3164101 - RNA, 19 nt, Artificial Sequence
  Description of Artificial Sequence: Synthetic oligonucleotide
uaauguaaaugucugguau

SEQ ID NO: 3164102 - RNA, 19 nt, Artificial Sequence
  Description of Artificial Sequence: Synthetic oligonucleotide
uuaauucaguucuucaugu

SEQ ID NO: 3164103 - RNA, 19 nt, Artificial Sequence
  Description of Artificial Sequence: Synthetic oligonucleotide
cuuccuauugcugugaccc

SEQ ID NO: 3164104 - RNA, 19 nt, Artificial Sequence
  Description of Artificial Sequence: Synthetic oligonucleotide
uguaauguaaaugucuggu

SEQ ID NO: 3164105 - RNA, 19 nt, Artificial Sequence
  Description of Artificial Sequence: Synthetic oligonucleotide
uauguaggauaucugauau

SEQ ID NO: 3164106 - RNA, 19 nt, Artificial Sequence
  Description of Artificial Sequence: Synthetic oligonucleotide
gauaucugauaugugaccc

SEQ ID NO: 3164107 - RNA, 19 nt, Artificial Sequence
  Description of Artificial Sequence: Synthetic oligonucleotide
uucucaauucuuccuauug

SEQ ID NO: 3164108 - RNA, 19 nt, Artificial Sequence
  Description of Artificial Sequence: Synthetic oligonucleotide
ucucaauucuuccuauugc

SEQ ID NO: 3164109 - RNA, 19 nt, Artificial Sequence
  Description of Artificial Sequence: Synthetic oligonucleotide
auaucugauaugugacccc

SEQ ID NO: 3164110 - RNA, 19 nt, Artificial Sequence
  Description of Artificial Sequence: Synthetic oligonucleotide
aauucuuccuauugcugug

SEQ ID NO: 3164111 - RNA, 19 nt, Artificial Sequence
  Description of Artificial Sequence: Synthetic oligonucleotide
uacagguugagaaccacug

SEQ ID NO: 3164112 - RNA, 19 nt, Artificial Sequence
  Description of Artificial Sequence: Synthetic oligonucleotide
uuguaauguaaaugucugg

SEQ ID NO: 3164113 - RNA, 19 nt, Artificial Sequence
  Description of Artificial Sequence: Synthetic oligonucleotide
ucugguauguaggauaucu

SEQ ID NO: 3164114 - RNA, 19 nt, Artificial Sequence
  Description of Artificial Sequence: Synthetic oligonucleotide
ugguauguaggauaucuga

SEQ ID NO: 3164115 - RNA, 19 nt, Artificial Sequence
  Description of Artificial Sequence: Synthetic oligonucleotide
aaaugucugguauguagga

SEQ ID NO: 3164116 - RNA, 19 nt, Artificial Sequence
  Description of Artificial Sequence: Synthetic oligonucleotide
uuugaauuguaauguaaau

SEQ ID NO: 3164117 - RNA, 19 nt, Artificial Sequence
  Description of Artificial Sequence: Synthetic oligonucleotide
uacuuuauagcuguaauuu

SEQ ID NO: 3164118 - RNA, 19 nt, Artificial Sequence
  Description of Artificial Sequence: Synthetic oligonucleotide
ucaauucuuccuauugcug

SEQ ID NO: 3164119 - RNA, 19 nt, Artificial Sequence
  Description of Artificial Sequence: Synthetic oligonucleotide
auugcugugacccuuuaau

SEQ ID NO: 3164120 - RNA, 19 nt, Artificial Sequence
  Description of Artificial Sequence: Synthetic oligonucleotide
auuguaauguaaaugucug

SEQ ID NO: 3164121 - RNA, 19 nt, Artificial Sequence
  Description of Artificial Sequence: Synthetic oligonucleotide
augacguacagguugagaa

SEQ ID NO: 3164122 - RNA, 19 nt, Artificial Sequence
  Description of Artificial Sequence: Synthetic oligonucleotide
uguugcuacuuuauagcug

SEQ ID NO: 3164123 - RNA, 19 nt, Artificial Sequence
  Description of Artificial Sequence: Synthetic oligonucleotide
aauuauuuuguugcuacuu

SEQ ID NO: 3164124 - RNA, 19 nt, Artificial Sequence
  Description of Artificial Sequence: Synthetic oligonucleotide
uauuuuguugcuacuuuau

SEQ ID NO: 3164125 - RNA, 19 nt, Artificial Sequence
  Description of Artificial Sequence: Synthetic oligonucleotide
aggauaucugauaugugac

SEQ ID NO: 3164126 - RNA, 19 nt, Artificial Sequence
  Description of Artificial Sequence: Synthetic oligonucleotide
cagccauagaauuauuuug

SEQ ID NO: 3164127 - RNA, 19 nt, Artificial Sequence
  Description of Artificial Sequence: Synthetic oligonucleotide
auagaauuauuuuguugcu

SEQ ID NO: 3164128 - RNA, 19 nt, Artificial Sequence
  Description of Artificial Sequence: Synthetic oligonucleotide
gacccuuuaauucaguucu

SEQ ID NO: 3164129 - RNA, 19 nt, Artificial Sequence
  Description of Artificial Sequence: Synthetic oligonucleotide
uacuguuuugaauuguaau

SEQ ID NO: 3164130 - RNA, 19 nt, Artificial Sequence
  Description of Artificial Sequence: Synthetic oligonucleotide
uuguugcuacuuuauagcu

SEQ ID NO: 3164131 - RNA, 19 nt, Artificial Sequence
  Description of Artificial Sequence: Synthetic oligonucleotide
uuucuacuguuuugaauug

SEQ ID NO: 3164132 - RNA, 19 nt, Artificial Sequence
  Description of Artificial Sequence: Synthetic oligonucleotide
ugcugugacccuuuaauuc

SEQ ID NO: 3164133 - RNA, 19 nt, Artificial Sequence
  Description of Artificial Sequence: Synthetic oligonucleotide
auuauuuuguugcuacuuu

SEQ ID NO: 3164134 - RNA, 19 nt, Artificial Sequence
  Description of Artificial Sequence: Synthetic oligonucleotide
gacguacagguugagaacc

SEQ ID NO: 3164135 - RNA, 19 nt, Artificial Sequence
  Description of Artificial Sequence: Synthetic oligonucleotide
uuauuuuguugcuacuuua

SEQ ID NO: 3164136 - RNA, 19 nt, Artificial Sequence
  Description of Artificial Sequence: Synthetic oligonucleotide
ucuacuguuuugaauugua

SEQ ID NO: 3164137 - RNA, 19 nt, Artificial Sequence
  Description of Artificial Sequence: Synthetic oligonucleotide
ucaguucuucauguugugg

SEQ ID NO: 3164138 - RNA, 19 nt, Artificial Sequence
  Description of Artificial Sequence: Synthetic oligonucleotide
acagguugagaaccacugg

SEQ ID NO: 3164139 - RNA, 19 nt, Artificial Sequence
  Description of Artificial Sequence: Synthetic oligonucleotide
ggucaugacguacagguug

SEQ ID NO: 3164140 - RNA, 19 nt, Artificial Sequence
  Description of Artificial Sequence: Synthetic oligonucleotide
cuucauguugugguggucc

SEQ ID NO: 3164141 - RNA, 19 nt, Artificial Sequence
  Description of Artificial Sequence: Synthetic oligonucleotide
guuguggugguccccagcc

SEQ ID NO: 3164142 - RNA, 19 nt, Artificial Sequence
  Description of Artificial Sequence: Synthetic oligonucleotide
aguucuucauguuguggug

SEQ ID NO: 3164143 - RNA, 19 nt, Artificial Sequence
  Description of Artificial Sequence: Synthetic oligonucleotide
uguuuugaauuguaaugua

SEQ ID NO: 3164144 - RNA, 19 nt, Artificial Sequence
  Description of Artificial Sequence: Synthetic oligonucleotide
ugacccuuuaauucaguuc

SEQ ID NO: 3164145 - RNA, 19 nt, Artificial Sequence
  Description of Artificial Sequence: Synthetic oligonucleotide
guugcuacuuuauagcugu

SEQ ID NO: 3164146 - RNA, 19 nt, Artificial Sequence
  Description of Artificial Sequence: Synthetic oligonucleotide
ugucugguauguaggauau

SEQ ID NO: 3164147 - RNA, 19 nt, Artificial Sequence
  Description of Artificial Sequence: Synthetic oligonucleotide
gaauuguaauguaaauguc

SEQ ID NO: 3164148 - RNA, 19 nt, Artificial Sequence
  Description of Artificial Sequence: Synthetic oligonucleotide
auguaaaugucugguaugu

SEQ ID NO: 3164149 - RNA, 19 nt, Artificial Sequence
  Description of Artificial Sequence: Synthetic oligonucleotide
guucuucauguuguggugg

SEQ ID NO: 3164150 - RNA, 19 nt, Artificial Sequence
  Description of Artificial Sequence: Synthetic oligonucleotide
uugagaaccacuggucuac

SEQ ID NO: 3164151 - RNA, 19 nt, Artificial Sequence
  Description of Artificial Sequence: Synthetic oligonucleotide
uucauguuguggugguccc

SEQ ID NO: 3164152 - RNA, 19 nt, Artificial Sequence
  Description of Artificial Sequence: Synthetic oligonucleotide
auucaguucuucauguugu

SEQ ID NO: 3164153 - RNA, 19 nt, Artificial Sequence
  Description of Artificial Sequence: Synthetic oligonucleotide
ugacguacagguugagaac

SEQ ID NO: 3164154 - RNA, 19 nt, Artificial Sequence
  Description of Artificial Sequence: Synthetic oligonucleotide
acuuuauagcuguaauuuu

SEQ ID NO: 3164155 - RNA, 19 nt, Artificial Sequence
  Description of Artificial Sequence: Synthetic oligonucleotide
agccauagaauuauuuugu

SEQ ID NO: 3164156 - RNA, 19 nt, Artificial Sequence
  Description of Artificial Sequence: Synthetic oligonucleotide
uucaguucuucauguugug

SEQ ID NO: 3164157 - RNA, 19 nt, Artificial Sequence
  Description of Artificial Sequence: Synthetic oligonucleotide
augucugguauguaggaua

SEQ ID NO: 3164158 - RNA, 19 nt, Artificial Sequence
  Description of Artificial Sequence: Synthetic oligonucleotide
ggauaucugauaugugacc

SEQ ID NO: 3164159 - RNA, 19 nt, Artificial Sequence
  Description of Artificial Sequence: Synthetic oligonucleotide
ucuuccuauugcugugacc

SEQ ID NO: 3164160 - RNA, 19 nt, Artificial Sequence
  Description of Artificial Sequence: Synthetic oligonucleotide
auuuuguugcuacuuuaua

SEQ ID NO: 3164161 - RNA, 19 nt, Artificial Sequence
  Description of Artificial Sequence: Synthetic oligonucleotide
aaugucugguauguaggau

SEQ ID NO: 3164162 - RNA, 19 nt, Artificial Sequence
  Description of Artificial Sequence: Synthetic oligonucleotide
uucuucauguugugguggu

SEQ ID NO: 3164163 - RNA, 19 nt, Artificial Sequence
  Description of Artificial Sequence: Synthetic oligonucleotide
auguaggauaucugauaug

SEQ ID NO: 3164164 - RNA, 19 nt, Artificial Sequence
  Description of Artificial Sequence: Synthetic oligonucleotide
guauguaggauaucugaua

SEQ ID NO: 3164165 - RNA, 19 nt, Artificial Sequence
  Description of Artificial Sequence: Synthetic oligonucleotide
guuuugaauuguaauguaa

SEQ ID NO: 3164166 - RNA, 19 nt, Artificial Sequence
  Description of Artificial Sequence: Synthetic oligonucleotide
uguggugguccccagccau

SEQ ID NO: 3164167 - RNA, 19 nt, Artificial Sequence
  Description of Artificial Sequence: Synthetic oligonucleotide
uagaauuauuuuguugcua

SEQ ID NO: 3164168 - RNA, 19 nt, Artificial Sequence
  Description of Artificial Sequence: Synthetic oligonucleotide
uguuguggugguccccagc

SEQ ID NO: 3164169 - RNA, 19 nt, Artificial Sequence
  Description of Artificial Sequence: Synthetic oligonucleotide
ccauagaauuauuuuguug

SEQ ID NO: 3164170 - RNA, 19 nt, Artificial Sequence
  Description of Artificial Sequence: Synthetic oligonucleotide
cugguauguaggauaucug

SEQ ID NO: 3164171 - RNA, 19 nt, Artificial Sequence
  Description of Artificial Sequence: Synthetic oligonucleotide
agguugagaaccacugguc

SEQ ID NO: 3164172 - RNA, 19 nt, Artificial Sequence
  Description of Artificial Sequence: Synthetic oligonucleotide
guaauguaaaugucuggua

SEQ ID NO: 3164173 - RNA, 19 nt, Artificial Sequence
  Description of Artificial Sequence: Synthetic oligonucleotide
uucuuccuauugcugugac

SEQ ID NO: 3164174 - RNA, 19 nt, Artificial Sequence
  Description of Artificial Sequence: Synthetic oligonucleotide
uauugcugugacccuuuaa

SEQ ID NO: 3164175 - RNA, 19 nt, Artificial Sequence
  Description of Artificial Sequence: Synthetic oligonucleotide
cuuuaauucaguucuucau

SEQ ID NO: 3164176 - RNA, 19 nt, Artificial Sequence
  Description of Artificial Sequence: Synthetic oligonucleotide
uucuacuguuuugaauugu

SEQ ID NO: 3164177 - RNA, 19 nt, Artificial Sequence
  Description of Artificial Sequence: Synthetic oligonucleotide
ugcuacuuuauagcuguaa

SEQ ID NO: 3164178 - RNA, 19 nt, Artificial Sequence
  Description of Artificial Sequence: Synthetic oligonucleotide
cugugacccuuuaauucag

SEQ ID NO: 3164179 - RNA, 19 nt, Artificial Sequence
  Description of Artificial Sequence: Synthetic oligonucleotide
cucaauucuuccuauugcu

SEQ ID NO: 3164180 - RNA, 19 nt, Artificial Sequence
  Description of Artificial Sequence: Synthetic oligonucleotide
caauucuuccuauugcugu

SEQ ID NO: 3164181 - RNA, 19 nt, Artificial Sequence
  Description of Artificial Sequence: Synthetic oligonucleotide
uaauucaguucuucauguu

SEQ ID NO: 3164182 - RNA, 19 nt, Artificial Sequence
  Description of Artificial Sequence: Synthetic oligonucleotide
gcugugacccuuuaauuca

SEQ ID NO: 3164183 - RNA, 19 nt, Artificial Sequence
  Description of Artificial Sequence: Synthetic oligonucleotide
ugugacccuuuaauucagu

SEQ ID NO: 3164184 - RNA, 19 nt, Artificial Sequence
  Description of Artificial Sequence: Synthetic oligonucleotide
aucaguacaaaauaggugc

SEQ ID NO: 3164185 - RNA, 19 nt, Artificial Sequence
  Description of Artificial Sequence: Synthetic oligonucleotide
aauaggugcuaccuaaacg

SEQ ID NO: 3164186 - RNA, 19 nt, Artificial Sequence
  Description of Artificial Sequence: Synthetic oligonucleotide
auauacuccagcuuguugg

SEQ ID NO: 3164187 - RNA, 19 nt, Artificial Sequence
  Description of Artificial Sequence: Synthetic oligonucleotide
aaaauggguaccuguaggg

SEQ ID NO: 3164188 - RNA, 19 nt, Artificial Sequence
  Description of Artificial Sequence: Synthetic oligonucleotide
aagaggguuggauaugggc

SEQ ID NO: 3164189 - RNA, 19 nt, Artificial Sequence
  Description of Artificial Sequence: Synthetic oligonucleotide
uauugugcugcuuaguuag

SEQ ID NO: 3164190 - RNA, 19 nt, Artificial Sequence
  Description of Artificial Sequence: Synthetic oligonucleotide
aaauaggugcuaccuaaac

SEQ ID NO: 3164191 - RNA, 19 nt, Artificial Sequence
  Description of Artificial Sequence: Synthetic oligonucleotide
ugggcauuucgccagaugg

SEQ ID NO: 3164192 - RNA, 19 nt, Artificial Sequence
  Description of Artificial Sequence: Synthetic oligonucleotide
accuuagcagcacagagac

SEQ ID NO: 3164193 - RNA, 19 nt, Artificial Sequence
  Description of Artificial Sequence: Synthetic oligonucleotide
aagucgguuauugugcugc

SEQ ID NO: 3164194 - RNA, 19 nt, Artificial Sequence
  Description of Artificial Sequence: Synthetic oligonucleotide
ucaagaguggcauuuauuc

SEQ ID NO: 3164195 - RNA, 19 nt, Artificial Sequence
  Description of Artificial Sequence: Synthetic oligonucleotide
cuuagcagcacagagacag

SEQ ID NO: 3164196 - RNA, 19 nt, Artificial Sequence
  Description of Artificial Sequence: Synthetic oligonucleotide
auaggugcuaccuaaacgu

SEQ ID NO: 3164197 - RNA, 19 nt, Artificial Sequence
  Description of Artificial Sequence: Synthetic oligonucleotide
ugcuauugugcuuaggaag

SEQ ID NO: 3164198 - RNA, 19 nt, Artificial Sequence
  Description of Artificial Sequence: Synthetic oligonucleotide
uacuuguagaaucaguaca

SEQ ID NO: 3164199 - RNA, 19 nt, Artificial Sequence
  Description of Artificial Sequence: Synthetic oligonucleotide
aggaguauguacaaggugg

SEQ ID NO: 3164200 - RNA, 19 nt, Artificial Sequence
  Description of Artificial Sequence: Synthetic oligonucleotide
uuuauucuccucguggagg

SEQ ID NO: 3164201 - RNA, 19 nt, Artificial Sequence
  Description of Artificial Sequence: Synthetic oligonucleotide
accugaauucgcuaagucg

SEQ ID NO: 3164202 - RNA, 19 nt, Artificial Sequence
  Description of Artificial Sequence: Synthetic oligonucleotide
agaaucaguacaaaauagg

SEQ ID NO: 3164203 - RNA, 19 nt, Artificial Sequence
  Description of Artificial Sequence: Synthetic oligonucleotide
guggcauuuauucuccucg

SEQ ID NO: 3164204 - RNA, 19 nt, Artificial Sequence
  Description of Artificial Sequence: Synthetic oligonucleotide
aaucaguacaaaauaggug

SEQ ID NO: 3164205 - RNA, 19 nt, Artificial Sequence
  Description of Artificial Sequence: Synthetic oligonucleotide
cuuguuggaccuuagcagc

SEQ ID NO: 3164206 - RNA, 19 nt, Artificial Sequence
  Description of Artificial Sequence: Synthetic oligonucleotide
uaaacguuccuucuaccug

SEQ ID NO: 3164207 - RNA, 19 nt, Artificial Sequence
  Description of Artificial Sequence: Synthetic oligonucleotide
aguauguacaagguggcgg

SEQ ID NO: 3164208 - RNA, 19 nt, Artificial Sequence
  Description of Artificial Sequence: Synthetic oligonucleotide
aauggguaccuguaggggu

SEQ ID NO: 3164209 - RNA, 19 nt, Artificial Sequence
  Description of Artificial Sequence: Synthetic oligonucleotide
agagccucguaucucaggg

SEQ ID NO: 3164210 - RNA, 19 nt, Artificial Sequence
  Description of Artificial Sequence: Synthetic oligonucleotide
guauguacaagguggcggg

SEQ ID NO: 3164211 - RNA, 19 nt, Artificial Sequence
  Description of Artificial Sequence: Synthetic oligonucleotide
accuaaacguuccuucuac

SEQ ID NO: 3164212 - RNA, 19 nt, Artificial Sequence
  Description of Artificial Sequence: Synthetic oligonucleotide
ugugcugcuuaguuagugg

SEQ ID NO: 3164213 - RNA, 19 nt, Artificial Sequence
  Description of Artificial Sequence: Synthetic oligonucleotide
ccugaauucgcuaagucgg

SEQ ID NO: 3164214 - RNA, 19 nt, Artificial Sequence
  Description of Artificial Sequence: Synthetic oligonucleotide
uuaggaaggaggucugucc

SEQ ID NO: 3164215 - RNA, 19 nt, Artificial Sequence
  Description of Artificial Sequence: Synthetic oligonucleotide
aaauggguaccuguagggg

SEQ ID NO: 3164216 - RNA, 19 nt, Artificial Sequence
  Description of Artificial Sequence: Synthetic oligonucleotide
uacaaaauaggugcuaccu

SEQ ID NO: 3164217 - RNA, 19 nt, Artificial Sequence
  Description of Artificial Sequence: Synthetic oligonucleotide
aaaaucccggccuguugcg

SEQ ID NO: 3164218 - RNA, 19 nt, Artificial Sequence
  Description of Artificial Sequence: Synthetic oligonucleotide
gauggaguaagaggguugg

SEQ ID NO: 3164219 - RNA, 19 nt, Artificial Sequence
  Description of Artificial Sequence: Synthetic oligonucleotide
aaggaggucuguccguccg

SEQ ID NO: 3164220 - RNA, 19 nt, Artificial Sequence
  Description of Artificial Sequence: Synthetic oligonucleotide
cuggccauaccauauacuc

SEQ ID NO: 3164221 - RNA, 19 nt, Artificial Sequence
  Description of Artificial Sequence: Synthetic oligonucleotide
agacccuaggaccuguccg

SEQ ID NO: 3164222 - RNA, 19 nt, Artificial Sequence
  Description of Artificial Sequence: Synthetic oligonucleotide
auuuauucuccucguggag

SEQ ID NO: 3164223 - RNA, 19 nt, Artificial Sequence
  Description of Artificial Sequence: Synthetic oligonucleotide
uucgcuaagucgguuauug

SEQ ID NO: 3164224 - RNA, 19 nt, Artificial Sequence
  Description of Artificial Sequence: Synthetic oligonucleotide
gcauuuauucuccucgugg

SEQ ID NO: 3164225 - RNA, 19 nt, Artificial Sequence
  Description of Artificial Sequence: Synthetic oligonucleotide
ugcuaugcuaggccugugg

SEQ ID NO: 3164226 - RNA, 19 nt, Artificial Sequence
  Description of Artificial Sequence: Synthetic oligonucleotide
ugcugcuuaguuagugggg

SEQ ID NO: 3164227 - RNA, 19 nt, Artificial Sequence
  Description of Artificial Sequence: Synthetic oligonucleotide
uuguagaaucaguacaaaa

SEQ ID NO: 3164228 - RNA, 19 nt, Artificial Sequence
  Description of Artificial Sequence: Synthetic oligonucleotide
aaucccggccuguugcggg

SEQ ID NO: 3164229 - RNA, 19 nt, Artificial Sequence
  Description of Artificial Sequence: Synthetic oligonucleotide
aauucgcuaagucgguuau

SEQ ID NO: 3164230 - RNA, 19 nt, Artificial Sequence
  Description of Artificial Sequence: Synthetic oligonucleotide
guaagaggguuggauaugg

SEQ ID NO: 3164231 - RNA, 19 nt, Artificial Sequence
  Description of Artificial Sequence: Synthetic oligonucleotide
ucaguacaaaauaggugcu

SEQ ID NO: 3164232 - RNA, 19 nt, Artificial Sequence
  Description of Artificial Sequence: Synthetic oligonucleotide
uugugcuuaggaaggaggu

SEQ ID NO: 3164233 - RNA, 19 nt, Artificial Sequence
  Description of Artificial Sequence: Synthetic oligonucleotide
auugugcuuaggaaggagg

SEQ ID NO: 3164234 - RNA, 19 nt, Artificial Sequence
  Description of Artificial Sequence: Synthetic oligonucleotide
uuauucuccucguggaggu

SEQ ID NO: 3164235 - RNA, 19 nt, Artificial Sequence
  Description of Artificial Sequence: Synthetic oligonucleotide
agaguggcauuuauucucc

SEQ ID NO: 3164236 - RNA, 19 nt, Artificial Sequence
  Description of Artificial Sequence: Synthetic oligonucleotide
uggauaugggcacugcuau

SEQ ID NO: 3164237 - RNA, 19 nt, Artificial Sequence
  Description of Artificial Sequence: Synthetic oligonucleotide
ugaagcugggcccggagac

SEQ ID NO: 3164238 - RNA, 19 nt, Artificial Sequence
  Description of Artificial Sequence: Synthetic oligonucleotide
aggaacugugggcauuucg

SEQ ID NO: 3164239 - RNA, 19 nt, Artificial Sequence
  Description of Artificial Sequence: Synthetic oligonucleotide
caaaauaggugcuaccuaa

SEQ ID NO: 3164240 - RNA, 19 nt, Artificial Sequence
  Description of Artificial Sequence: Synthetic oligonucleotide
gaacugugggcauuucgcc

SEQ ID NO: 3164241 - RNA, 19 nt, Artificial Sequence
  Description of Artificial Sequence: Synthetic oligonucleotide
ucgguuauugugcugcuua

SEQ ID NO: 3164242 - RNA, 19 nt, Artificial Sequence
  Description of Artificial Sequence: Synthetic oligonucleotide
aagguggcggggcgcaggc

SEQ ID NO: 3164243 - RNA, 19 nt, Artificial Sequence
  Description of Artificial Sequence: Synthetic oligonucleotide
ucuaucaagaguggcauuu

SEQ ID NO: 3164244 - RNA, 19 nt, Artificial Sequence
  Description of Artificial Sequence: Synthetic oligonucleotide
uaagaggguuggauauggg

SEQ ID NO: 3164245 - RNA, 19 nt, Artificial Sequence
  Description of Artificial Sequence: Synthetic oligonucleotide
aagcugggcccggagaccc

SEQ ID NO: 3164246 - RNA, 19 nt, Artificial Sequence
  Description of Artificial Sequence: Synthetic oligonucleotide
gugcugcuuaguuaguggg

SEQ ID NO: 3164247 - RNA, 19 nt, Artificial Sequence
  Description of Artificial Sequence: Synthetic oligonucleotide
uggccauaccauauacucc

SEQ ID NO: 3164248 - RNA, 19 nt, Artificial Sequence
  Description of Artificial Sequence: Synthetic oligonucleotide
uuggaccuuagcagcacag

SEQ ID NO: 3164249 - RNA, 19 nt, Artificial Sequence
  Description of Artificial Sequence: Synthetic oligonucleotide
uuggauaugggcacugcua

SEQ ID NO: 3164250 - RNA, 19 nt, Artificial Sequence
  Description of Artificial Sequence: Synthetic oligonucleotide
cagaagagggacacggccc

SEQ ID NO: 3164251 - RNA, 19 nt, Artificial Sequence
  Description of Artificial Sequence: Synthetic oligonucleotide
uauacuccagcuuguugga

SEQ ID NO: 3164252 - RNA, 19 nt, Artificial Sequence
  Description of Artificial Sequence: Synthetic oligonucleotide
ucugugugcgugugcaugc

SEQ ID NO: 3164253 - RNA, 19 nt, Artificial Sequence
  Description of Artificial Sequence: Synthetic oligonucleotide
gcuauugugcuuaggaagg

SEQ ID NO: 3164254 - RNA, 19 nt, Artificial Sequence
  Description of Artificial Sequence: Synthetic oligonucleotide
uaugcuaggccuguggguc

SEQ ID NO: 3164255 - RNA, 19 nt, Artificial Sequence
  Description of Artificial Sequence: Synthetic oligonucleotide
uggguccgcaccaggaggg

SEQ ID NO: 3164256 - RNA, 19 nt, Artificial Sequence
  Description of Artificial Sequence: Synthetic oligonucleotide
uuccuucuaccugaauucg

SEQ ID NO: 3164257 - RNA, 19 nt, Artificial Sequence
  Description of Artificial Sequence: Synthetic oligonucleotide
gaaucaguacaaaauaggu

SEQ ID NO: 3164258 - RNA, 19 nt, Artificial Sequence
  Description of Artificial Sequence: Synthetic oligonucleotide
uucuaccugaauucgcuaa

SEQ ID NO: 3164259 - RNA, 19 nt, Artificial Sequence
  Description of Artificial Sequence: Synthetic oligonucleotide
uguggguccgcaccaggag

SEQ ID NO: 3164260 - RNA, 19 nt, Artificial Sequence
  Description of Artificial Sequence: Synthetic oligonucleotide
cauuuauucuccucgugga

SEQ ID NO: 3164261 - RNA, 19 nt, Artificial Sequence
  Description of Artificial Sequence: Synthetic oligonucleotide
uauugugcuuaggaaggag

SEQ ID NO: 3164262 - RNA, 19 nt, Artificial Sequence
  Description of Artificial Sequence: Synthetic oligonucleotide
gaggguuggauaugggcac

SEQ ID NO: 3164263 - RNA, 19 nt, Artificial Sequence
  Description of Artificial Sequence: Synthetic oligonucleotide
uccuucuaccugaauucgc

SEQ ID NO: 3164264 - RNA, 19 nt, Artificial Sequence
  Description of Artificial Sequence: Synthetic oligonucleotide
auguacaagguggcggggc

SEQ ID NO: 3164265 - RNA, 19 nt, Artificial Sequence
  Description of Artificial Sequence: Synthetic oligonucleotide
agaggguuggauaugggca

SEQ ID NO: 3164266 - RNA, 19 nt, Artificial Sequence
  Description of Artificial Sequence: Synthetic oligonucleotide
ugugcaugcggcacaggcu

SEQ ID NO: 3164267 - RNA, 19 nt, Artificial Sequence
  Description of Artificial Sequence: Synthetic oligonucleotide
ugcuuaguuaguggggcag

SEQ ID NO: 3164268 - RNA, 19 nt, Artificial Sequence
  Description of Artificial Sequence: Synthetic oligonucleotide
aggucuguccguccguccg

SEQ ID NO: 3164269 - RNA, 19 nt, Artificial Sequence
  Description of Artificial Sequence: Synthetic oligonucleotide
uaucaagaguggcauuuau

SEQ ID NO: 3164270 - RNA, 19 nt, Artificial Sequence
  Description of Artificial Sequence: Synthetic oligonucleotide
uuguuggaccuuagcagca

SEQ ID NO: 3164271 - RNA, 19 nt, Artificial Sequence
  Description of Artificial Sequence: Synthetic oligonucleotide
acagcagagccucguaucu

SEQ ID NO: 3164272 - RNA, 19 nt, Artificial Sequence
  Description of Artificial Sequence: Synthetic oligonucleotide
gugugcaugcggcacaggc

SEQ ID NO: 3164273 - RNA, 19 nt, Artificial Sequence
  Description of Artificial Sequence: Synthetic oligonucleotide
ugcggcacaggcuggcagg

SEQ ID NO: 3164274 - RNA, 19 nt, Artificial Sequence
  Description of Artificial Sequence: Synthetic oligonucleotide
acaaaauaggugcuaccua

SEQ ID NO: 3164275 - RNA, 19 nt, Artificial Sequence
  Description of Artificial Sequence: Synthetic oligonucleotide
gaguauguacaagguggcg

SEQ ID NO: 3164276 - RNA, 19 nt, Artificial Sequence
  Description of Artificial Sequence: Synthetic oligonucleotide
aggaggguagccaagcuug

SEQ ID NO: 3164277 - RNA, 19 nt, Artificial Sequence
  Description of Artificial Sequence: Synthetic oligonucleotide
gugcaugcggcacaggcug

SEQ ID NO: 3164278 - RNA, 19 nt, Artificial Sequence
  Description of Artificial Sequence: Synthetic oligonucleotide
guagggguggcccugguga

SEQ ID NO: 3164279 - RNA, 19 nt, Artificial Sequence
  Description of Artificial Sequence: Synthetic oligonucleotide
cauaccauauacuccagcu

SEQ ID NO: 3164280 - RNA, 19 nt, Artificial Sequence
  Description of Artificial Sequence: Synthetic oligonucleotide
agcagagccucguaucuca

SEQ ID NO: 3164281 - RNA, 19 nt, Artificial Sequence
  Description of Artificial Sequence: Synthetic oligonucleotide
augggcacugcuaugcuag

SEQ ID NO: 3164282 - RNA, 19 nt, Artificial Sequence
  Description of Artificial Sequence: Synthetic oligonucleotide
uaccugaauucgcuaaguc

SEQ ID NO: 3164283 - RNA, 19 nt, Artificial Sequence
  Description of Artificial Sequence: Synthetic oligonucleotide
uucuccucguggaggugcg

SEQ ID NO: 3164284 - RNA, 19 nt, Artificial Sequence
  Description of Artificial Sequence: Synthetic oligonucleotide
uuagagaucaagaagauug

SEQ ID NO: 3164285 - RNA, 19 nt, Artificial Sequence
  Description of Artificial Sequence: Synthetic oligonucleotide
aaggcuucgagccaaaucc

SEQ ID NO: 3164286 - RNA, 19 nt, Artificial Sequence
  Description of Artificial Sequence: Synthetic oligonucleotide
aaagcauaaaauugugucg

SEQ ID NO: 3164287 - RNA, 19 nt, Artificial Sequence
  Description of Artificial Sequence: Synthetic oligonucleotide
ucacuuuccaugaagaggg

SEQ ID NO: 3164288 - RNA, 19 nt, Artificial Sequence
  Description of Artificial Sequence: Synthetic oligonucleotide
agaucaagaagauuggugg

SEQ ID NO: 3164289 - RNA, 19 nt, Artificial Sequence
  Description of Artificial Sequence: Synthetic oligonucleotide
uuuguuagagaucaagaag

SEQ ID NO: 3164290 - RNA, 19 nt, Artificial Sequence
  Description of Artificial Sequence: Synthetic oligonucleotide
aauccucugcuucagaaac

SEQ ID NO: 3164291 - RNA, 19 nt, Artificial Sequence
  Description of Artificial Sequence: Synthetic oligonucleotide
aauugugucguuuguguac

SEQ ID NO: 3164292 - RNA, 19 nt, Artificial Sequence
  Description of Artificial Sequence: Synthetic oligonucleotide
uaauauuaggcaaggaaag

SEQ ID NO: 3164293 - RNA, 19 nt, Artificial Sequence
  Description of Artificial Sequence: Synthetic oligonucleotide
uuguuagagaucaagaaga

SEQ ID NO: 3164294 - RNA, 19 nt, Artificial Sequence
  Description of Artificial Sequence: Synthetic oligonucleotide
aucauagucagauaaaugu

SEQ ID NO: 3164295 - RNA, 19 nt, Artificial Sequence
  Description of Artificial Sequence: Synthetic oligonucleotide
ucagauaaauguuuguuag

SEQ ID NO: 3164296 - RNA, 19 nt, Artificial Sequence
  Description of Artificial Sequence: Synthetic oligonucleotide
uguaauauuaggcaaggaa

SEQ ID NO: 3164297 - RNA, 19 nt, Artificial Sequence
  Description of Artificial Sequence: Synthetic oligonucleotide
aaauguuuguuagagauca

SEQ ID NO: 3164298 - RNA, 19 nt, Artificial Sequence
  Description of Artificial Sequence: Synthetic oligonucleotide
auaaauguuuguuagagau

SEQ ID NO: 3164299 - RNA, 19 nt, Artificial Sequence
  Description of Artificial Sequence: Synthetic oligonucleotide
gaaagcauaaaauuguguc

SEQ ID NO: 3164300 - RNA, 19 nt, Artificial Sequence
  Description of Artificial Sequence: Synthetic oligonucleotide
aauauuaggcaaggaaagc

SEQ ID NO: 3164301 - RNA, 19 nt, Artificial Sequence
  Description of Artificial Sequence: Synthetic oligonucleotide
ugcacuuguaauauuaggc

SEQ ID NO: 3164302 - RNA, 19 nt, Artificial Sequence
  Description of Artificial Sequence: Synthetic oligonucleotide
aaaauugugucguuugugu

SEQ ID NO: 3164303 - RNA, 19 nt, Artificial Sequence
  Description of Artificial Sequence: Synthetic oligonucleotide
ucaucuacuccaaacacug

SEQ ID NO: 3164304 - RNA, 19 nt, Artificial Sequence
  Description of Artificial Sequence: Synthetic oligonucleotide
uuuuccaucaggauuggga

SEQ ID NO: 3164305 - RNA, 19 nt, Artificial Sequence
  Description of Artificial Sequence: Synthetic oligonucleotide
agggaugauacucaguagg

SEQ ID NO: 3164306 - RNA, 19 nt, Artificial Sequence
  Description of Artificial Sequence: Synthetic oligonucleotide
caaggaaagcauaaaauug

SEQ ID NO: 3164307 - RNA, 19 nt, Artificial Sequence
  Description of Artificial Sequence: Synthetic oligonucleotide
auugggaaaucauagucag

SEQ ID NO: 3164308 - RNA, 19 nt, Artificial Sequence
  Description of Artificial Sequence: Synthetic oligonucleotide
uguuuguuagagaucaaga

SEQ ID NO: 3164309 - RNA, 19 nt, Artificial Sequence
  Description of Artificial Sequence: Synthetic oligonucleotide
agauaaauguuuguuagag

SEQ ID NO: 3164310 - RNA, 19 nt, Artificial Sequence
  Description of Artificial Sequence: Synthetic oligonucleotide
uuucaugcuuuucugaaga

SEQ ID NO: 3164311 - RNA, 19 nt, Artificial Sequence
  Description of Artificial Sequence: Synthetic oligonucleotide
aacuuuuccaucaggauug

SEQ ID NO: 3164312 - RNA, 19 nt, Artificial Sequence
  Description of Artificial Sequence: Synthetic oligonucleotide
aaggaugcaucaucuacuc

SEQ ID NO: 3164313 - RNA, 19 nt, Artificial Sequence
  Description of Artificial Sequence: Synthetic oligonucleotide
aaaggcuucgagccaaauc

SEQ ID NO: 3164314 - RNA, 19 nt, Artificial Sequence
  Description of Artificial Sequence: Synthetic oligonucleotide
uaguauuucaugcuuuucu

SEQ ID NO: 3164315 - RNA, 19 nt, Artificial Sequence
  Description of Artificial Sequence: Synthetic oligonucleotide
gaugauacucaguagguca

SEQ ID NO: 3164316 - RNA, 19 nt, Artificial Sequence
  Description of Artificial Sequence: Synthetic oligonucleotide
uguucgauaguauuucaug

SEQ ID NO: 3164317 - RNA, 19 nt, Artificial Sequence
  Description of Artificial Sequence: Synthetic oligonucleotide
uuuguguacagggagagca

SEQ ID NO: 3164318 - RNA, 19 nt, Artificial Sequence
  Description of Artificial Sequence: Synthetic oligonucleotide
uacucaguaggucaguccc

SEQ ID NO: 3164319 - RNA, 19 nt, Artificial Sequence
  Description of Artificial Sequence: Synthetic oligonucleotide
ucugcuucagaaacugccg

SEQ ID NO: 3164320 - RNA, 19 nt, Artificial Sequence
  Description of Artificial Sequence: Synthetic oligonucleotide
cauaaaauugugucguuug

SEQ ID NO: 3164321 - RNA, 19 nt, Artificial Sequence
  Description of Artificial Sequence: Synthetic oligonucleotide
uucaucaacuuuuccauca

SEQ ID NO: 3164322 - RNA, 19 nt, Artificial Sequence
  Description of Artificial Sequence: Synthetic oligonucleotide
uagagaucaagaagauugg

SEQ ID NO: 3164323 - RNA, 19 nt, Artificial Sequence
  Description of Artificial Sequence: Synthetic oligonucleotide
agggagagcauucaucaac

SEQ ID NO: 3164324 - RNA, 19 nt, Artificial Sequence
  Description of Artificial Sequence: Synthetic oligonucleotide
ucccaaaaggcuucgagcc

SEQ ID NO: 3164325 - RNA, 19 nt, Artificial Sequence
  Description of Artificial Sequence: Synthetic oligonucleotide
uuucugaagagucuccaca

SEQ ID NO: 3164326 - RNA, 19 nt, Artificial Sequence
  Description of Artificial Sequence: Synthetic oligonucleotide
aaggaaagcauaaaauugu

SEQ ID NO: 3164327 - RNA, 19 nt, Artificial Sequence
  Description of Artificial Sequence: Synthetic oligonucleotide
aagcauaaaauugugucgu

SEQ ID NO: 3164328 - RNA, 19 nt, Artificial Sequence
  Description of Artificial Sequence: Synthetic oligonucleotide
aguauuucaugcuuuucug

SEQ ID NO: 3164329 - RNA, 19 nt, Artificial Sequence
  Description of Artificial Sequence: Synthetic oligonucleotide
guucgauaguauuucaugc

SEQ ID NO: 3164330 - RNA, 19 nt, Artificial Sequence
  Description of Artificial Sequence: Synthetic oligonucleotide
caugcuuuucugaagaguc

SEQ ID NO: 3164331 - RNA, 19 nt, Artificial Sequence
  Description of Artificial Sequence: Synthetic oligonucleotide
ugaagagggucagugaagg

SEQ ID NO: 3164332 - RNA, 19 nt, Artificial Sequence
  Description of Artificial Sequence: Synthetic oligonucleotide
caggauugggaaaucauag

SEQ ID NO: 3164333 - RNA, 19 nt, Artificial Sequence
  Description of Artificial Sequence: Synthetic oligonucleotide
aucacuuuccaugaagagg

SEQ ID NO: 3164334 - RNA, 19 nt, Artificial Sequence
  Description of Artificial Sequence: Synthetic oligonucleotide
aaaucauagucagauaaau

SEQ ID NO: 3164335 - RNA, 19 nt, Artificial Sequence
  Description of Artificial Sequence: Synthetic oligonucleotide
auacucaguaggucagucc

SEQ ID NO: 3164336 - RNA, 19 nt, Artificial Sequence
  Description of Artificial Sequence: Synthetic oligonucleotide
uauuucaugcuuuucugaa

SEQ ID NO: 3164337 - RNA, 19 nt, Artificial Sequence
  Description of Artificial Sequence: Synthetic oligonucleotide
uaggucagucccaaaaggc

SEQ ID NO: 3164338 - RNA, 19 nt, Artificial Sequence
  Description of Artificial Sequence: Synthetic oligonucleotide
gugucguuuguguacaggg

SEQ ID NO: 3164339 - RNA, 19 nt, Artificial Sequence
  Description of Artificial Sequence: Synthetic oligonucleotide
acagggagagcauucauca

SEQ ID NO: 3164340 - RNA, 19 nt, Artificial Sequence
  Description of Artificial Sequence: Synthetic oligonucleotide
uccaaacacuguucgauag

SEQ ID NO: 3164341 - RNA, 19 nt, Artificial Sequence
  Description of Artificial Sequence: Synthetic oligonucleotide
gauuggugguucuucaaug

SEQ ID NO: 3164342 - RNA, 19 nt, Artificial Sequence
  Description of Artificial Sequence: Synthetic oligonucleotide
gaagggaugauacucagua

SEQ ID NO: 3164343 - RNA, 19 nt, Artificial Sequence
  Description of Artificial Sequence: Synthetic oligonucleotide
cucugcuucagaaacugcc

SEQ ID NO: 3164344 - RNA, 19 nt, Artificial Sequence
  Description of Artificial Sequence: Synthetic oligonucleotide
aacacuguucgauaguauu

SEQ ID NO: 3164345 - RNA, 19 nt, Artificial Sequence
  Description of Artificial Sequence: Synthetic oligonucleotide
aguaggucagucccaaaag

SEQ ID NO: 3164346 - RNA, 19 nt, Artificial Sequence
  Description of Artificial Sequence: Synthetic oligonucleotide
aauggcugcacuuguaaua

SEQ ID NO: 3164347 - RNA, 19 nt, Artificial Sequence
  Description of Artificial Sequence: Synthetic oligonucleotide
ugggaaaucauagucagau

SEQ ID NO: 3164348 - RNA, 19 nt, Artificial Sequence
  Description of Artificial Sequence: Synthetic oligonucleotide
guaggucagucccaaaagg

SEQ ID NO: 3164349 - RNA, 19 nt, Artificial Sequence
  Description of Artificial Sequence: Synthetic oligonucleotide
cuuguaauauuaggcaagg

SEQ ID NO: 3164350 - RNA, 19 nt, Artificial Sequence
  Description of Artificial Sequence: Synthetic oligonucleotide
aaucauagucagauaaaug

SEQ ID NO: 3164351 - RNA, 19 nt, Artificial Sequence
  Description of Artificial Sequence: Synthetic oligonucleotide
ugcaucaucuacuccaaac

SEQ ID NO: 3164352 - RNA, 19 nt, Artificial Sequence
  Description of Artificial Sequence: Synthetic oligonucleotide
uuuccaucaggauugggaa

SEQ ID NO: 3164353 - RNA, 19 nt, Artificial Sequence
  Description of Artificial Sequence: Synthetic oligonucleotide
uucgauaguauuucaugcu

SEQ ID NO: 3164354 - RNA, 19 nt, Artificial Sequence
  Description of Artificial Sequence: Synthetic oligonucleotide
uauuaggcaaggaaagcau

SEQ ID NO: 3164355 - RNA, 19 nt, Artificial Sequence
  Description of Artificial Sequence: Synthetic oligonucleotide
uuaggcaaggaaagcauaa

SEQ ID NO: 3164356 - RNA, 19 nt, Artificial Sequence
  Description of Artificial Sequence: Synthetic oligonucleotide
cuccacaucacuuuccaug

SEQ ID NO: 3164357 - RNA, 19 nt, Artificial Sequence
  Description of Artificial Sequence: Synthetic oligonucleotide
uaaaauugugucguuugug

SEQ ID NO: 3164358 - RNA, 19 nt, Artificial Sequence
  Description of Artificial Sequence: Synthetic oligonucleotide
guaauauuaggcaaggaaa

SEQ ID NO: 3164359 - RNA, 19 nt, Artificial Sequence
  Description of Artificial Sequence: Synthetic oligonucleotide
agcauucaucaacuuuucc

SEQ ID NO: 3164360 - RNA, 19 nt, Artificial Sequence
  Description of Artificial Sequence: Synthetic oligonucleotide
auuucaugcuuuucugaag

SEQ ID NO: 3164361 - RNA, 19 nt, Artificial Sequence
  Description of Artificial Sequence: Synthetic oligonucleotide
auaaaauugugucguuugu

SEQ ID NO: 3164362 - RNA, 19 nt, Artificial Sequence
  Description of Artificial Sequence: Synthetic oligonucleotide
gagaucaagaagauuggug

SEQ ID NO: 3164363 - RNA, 19 nt, Artificial Sequence
  Description of Artificial Sequence: Synthetic oligonucleotide
aagggaugauacucaguag

SEQ ID NO: 3164364 - RNA, 19 nt, Artificial Sequence
  Description of Artificial Sequence: Synthetic oligonucleotide
uccacaucacuuuccauga

SEQ ID NO: 3164365 - RNA, 19 nt, Artificial Sequence
  Description of Artificial Sequence: Synthetic oligonucleotide
cuacuccaaacacuguucg

SEQ ID NO: 3164366 - RNA, 19 nt, Artificial Sequence
  Description of Artificial Sequence: Synthetic oligonucleotide
uaaauguuuguuagagauc

SEQ ID NO: 3164367 - RNA, 19 nt, Artificial Sequence
  Description of Artificial Sequence: Synthetic oligonucleotide
auauuaggcaaggaaagca

SEQ ID NO: 3164368 - RNA, 19 nt, Artificial Sequence
  Description of Artificial Sequence: Synthetic oligonucleotide
aagagggucagugaaggga

SEQ ID NO: 3164369 - RNA, 19 nt, Artificial Sequence
  Description of Artificial Sequence: Synthetic oligonucleotide
ucuacuccaaacacuguuc

SEQ ID NO: 3164370 - RNA, 19 nt, Artificial Sequence
  Description of Artificial Sequence: Synthetic oligonucleotide
gucguuuguguacagggag

SEQ ID NO: 3164371 - RNA, 19 nt, Artificial Sequence
  Description of Artificial Sequence: Synthetic oligonucleotide
ucauagucagauaaauguu

SEQ ID NO: 3164372 - RNA, 19 nt, Artificial Sequence
  Description of Artificial Sequence: Synthetic oligonucleotide
gauaaauguuuguuagaga

SEQ ID NO: 3164373 - RNA, 19 nt, Artificial Sequence
  Description of Artificial Sequence: Synthetic oligonucleotide
ucaucaacuuuuccaucag

SEQ ID NO: 3164374 - RNA, 19 nt, Artificial Sequence
  Description of Artificial Sequence: Synthetic oligonucleotide
ggaaaucauagucagauaa

SEQ ID NO: 3164375 - RNA, 19 nt, Artificial Sequence
  Description of Artificial Sequence: Synthetic oligonucleotide
uccaugaagagggucagug

SEQ ID NO: 3164376 - RNA, 19 nt, Artificial Sequence
  Description of Artificial Sequence: Synthetic oligonucleotide
gaaacugccgcuuccuuuc

SEQ ID NO: 3164377 - RNA, 19 nt, Artificial Sequence
  Description of Artificial Sequence: Synthetic oligonucleotide
auucaucaacuuuuccauc

SEQ ID NO: 3164378 - RNA, 19 nt, Artificial Sequence
  Description of Artificial Sequence: Synthetic oligonucleotide
acuuguaauauuaggcaag

SEQ ID NO: 3164379 - RNA, 19 nt, Artificial Sequence
  Description of Artificial Sequence: Synthetic oligonucleotide
guuuguuagagaucaagaa

SEQ ID NO: 3164380 - RNA, 19 nt, Artificial Sequence
  Description of Artificial Sequence: Synthetic oligonucleotide
ucaggauugggaaaucaua

SEQ ID NO: 3164381 - RNA, 19 nt, Artificial Sequence
  Description of Artificial Sequence: Synthetic oligonucleotide
cugcacuuguaauauuagg

SEQ ID NO: 3164382 - RNA, 19 nt, Artificial Sequence
  Description of Artificial Sequence: Synthetic oligonucleotide
gauugggaaaucauaguca

SEQ ID NO: 3164383 - RNA, 19 nt, Artificial Sequence
  Description of Artificial Sequence: Synthetic oligonucleotide
agaagauuggugguucuuc

SEQ ID NO: 3164384 - RNA, 19 nt, Artificial Sequence
  Description of Artificial Sequence: Synthetic oligonucleotide
ucauaaacaacauaaguag

SEQ ID NO: 3164385 - RNA, 19 nt, Artificial Sequence
  Description of Artificial Sequence: Synthetic oligonucleotide
aacacuugugaauaaggcc

SEQ ID NO: 3164386 - RNA, 19 nt, Artificial Sequence
  Description of Artificial Sequence: Synthetic oligonucleotide
aagacaucuugacaaaacg

SEQ ID NO: 3164387 - RNA, 19 nt, Artificial Sequence
  Description of Artificial Sequence: Synthetic oligonucleotide
uucugugccaaccaaauag

SEQ ID NO: 3164388 - RNA, 19 nt, Artificial Sequence
  Description of Artificial Sequence: Synthetic oligonucleotide
cucaaaaccgguuugaaag

SEQ ID NO: 3164389 - RNA, 19 nt, Artificial Sequence
  Description of Artificial Sequence: Synthetic oligonucleotide
aaacaacauaaguaguugg

SEQ ID NO: 3164390 - RNA, 19 nt, Artificial Sequence
  Description of Artificial Sequence: Synthetic oligonucleotide
aacaucauaaacaacauaa

SEQ ID NO: 3164391 - RNA, 19 nt, Artificial Sequence
  Description of Artificial Sequence: Synthetic oligonucleotide
uuugaaagucuccugacgc

SEQ ID NO: 3164392 - RNA, 19 nt, Artificial Sequence
  Description of Artificial Sequence: Synthetic oligonucleotide
ugaaaagcaaagcacauuc

SEQ ID NO: 3164393 - RNA, 19 nt, Artificial Sequence
  Description of Artificial Sequence: Synthetic oligonucleotide
aagcaaagcacauuccagg

SEQ ID NO: 3164394 - RNA, 19 nt, Artificial Sequence
  Description of Artificial Sequence: Synthetic oligonucleotide
aauauaggcagauuuugga

SEQ ID NO: 3164395 - RNA, 19 nt, Artificial Sequence
  Description of Artificial Sequence: Synthetic oligonucleotide
aaaagcaaagcacauucca

SEQ ID NO: 3164396 - RNA, 19 nt, Artificial Sequence
  Description of Artificial Sequence: Synthetic oligonucleotide
agcagcaaaauauaggcag

SEQ ID NO: 3164397 - RNA, 19 nt, Artificial Sequence
  Description of Artificial Sequence: Synthetic oligonucleotide
uccucuauagguaucuagg

SEQ ID NO: 3164398 - RNA, 19 nt, Artificial Sequence
  Description of Artificial Sequence: Synthetic oligonucleotide
auuccaugugacuuuauac

SEQ ID NO: 3164399 - RNA, 19 nt, Artificial Sequence
  Description of Artificial Sequence: Synthetic oligonucleotide
ugacuuuauacacuggacc

SEQ ID NO: 3164400 - RNA, 19 nt, Artificial Sequence
  Description of Artificial Sequence: Synthetic oligonucleotide
aaaauauaggcagauuuug

SEQ ID NO: 3164401 - RNA, 19 nt, Artificial Sequence
  Description of Artificial Sequence: Synthetic oligonucleotide
accaaauagacauuggugu

SEQ ID NO: 3164402 - RNA, 19 nt, Artificial Sequence
  Description of Artificial Sequence: Synthetic oligonucleotide
aucuugacaaaacggauuc

SEQ ID NO: 3164403 - RNA, 19 nt, Artificial Sequence
  Description of Artificial Sequence: Synthetic oligonucleotide
gacuuuauacacuggaccc

SEQ ID NO: 3164404 - RNA, 19 nt, Artificial Sequence
  Description of Artificial Sequence: Synthetic oligonucleotide
ucuauagguaucuagguau

SEQ ID NO: 3164405 - RNA, 19 nt, Artificial Sequence
  Description of Artificial Sequence: Synthetic oligonucleotide
aaaacucaaaaccgguuug

SEQ ID NO: 3164406 - RNA, 19 nt, Artificial Sequence
  Description of Artificial Sequence: Synthetic oligonucleotide
uguaugaacaggaacacuu

SEQ ID NO: 3164407 - RNA, 19 nt, Artificial Sequence
  Description of Artificial Sequence: Synthetic oligonucleotide
ugaacaggaacacuuguga

SEQ ID NO: 3164408 - RNA, 19 nt, Artificial Sequence
  Description of Artificial Sequence: Synthetic oligonucleotide
aacaacauaaguaguuggg

SEQ ID NO: 3164409 - RNA, 19 nt, Artificial Sequence
  Description of Artificial Sequence: Synthetic oligonucleotide
ugugacuuuauacacugga

SEQ ID NO: 3164410 - RNA, 19 nt, Artificial Sequence
  Description of Artificial Sequence: Synthetic oligonucleotide
ugcagcagcaaaauauagg

SEQ ID NO: 3164411 - RNA, 19 nt, Artificial Sequence
  Description of Artificial Sequence: Synthetic oligonucleotide
aauaaggccuucuucugug

SEQ ID NO: 3164412 - RNA, 19 nt, Artificial Sequence
  Description of Artificial Sequence: Synthetic oligonucleotide
aaauauaggcagauuuugg

SEQ ID NO: 3164413 - RNA, 19 nt, Artificial Sequence
  Description of Artificial Sequence: Synthetic oligonucleotide
aacauaaguaguuggguaa

SEQ ID NO: 3164414 - RNA, 19 nt, Artificial Sequence
  Description of Artificial Sequence: Synthetic oligonucleotide
auaggcagauuuuggagac

SEQ ID NO: 3164415 - RNA, 19 nt, Artificial Sequence
  Description of Artificial Sequence: Synthetic oligonucleotide
auauaggcagauuuuggag

SEQ ID NO: 3164416 - RNA, 19 nt, Artificial Sequence
  Description of Artificial Sequence: Synthetic oligonucleotide
uuccaugugacuuuauaca

SEQ ID NO: 3164417 - RNA, 19 nt, Artificial Sequence
  Description of Artificial Sequence: Synthetic oligonucleotide
uauaggcagauuuuggaga

SEQ ID NO: 3164418 - RNA, 19 nt, Artificial Sequence
  Description of Artificial Sequence: Synthetic oligonucleotide
aaaacggauuccaugugac

SEQ ID NO: 3164419 - RNA, 19 nt, Artificial Sequence
  Description of Artificial Sequence: Synthetic oligonucleotide
gguaucuagguauugcucg

SEQ ID NO: 3164420 - RNA, 19 nt, Artificial Sequence
  Description of Artificial Sequence: Synthetic oligonucleotide
ucaagaagacaucuugaca

SEQ ID NO: 3164421 - RNA, 19 nt, Artificial Sequence
  Description of Artificial Sequence: Synthetic oligonucleotide
auagguaucuagguauugc

SEQ ID NO: 3164422 - RNA, 19 nt, Artificial Sequence
  Description of Artificial Sequence: Synthetic oligonucleotide
uaaacaacauaaguaguug

SEQ ID NO: 3164423 - RNA, 19 nt, Artificial Sequence
  Description of Artificial Sequence: Synthetic oligonucleotide
ugcagagcagcucaagaag

SEQ ID NO: 3164424 - RNA, 19 nt, Artificial Sequence
  Description of Artificial Sequence: Synthetic oligonucleotide
uggggugaaaagcaaagca

SEQ ID NO: 3164425 - RNA, 19 nt, Artificial Sequence
  Description of Artificial Sequence: Synthetic oligonucleotide
caaagcacauuccaggagc

SEQ ID NO: 3164426 - RNA, 19 nt, Artificial Sequence
  Description of Artificial Sequence: Synthetic oligonucleotide
caagaagacaucuugacaa

SEQ ID NO: 3164427 - RNA, 19 nt, Artificial Sequence
  Description of Artificial Sequence: Synthetic oligonucleotide
aaccaaauagacauuggug

SEQ ID NO: 3164428 - RNA, 19 nt, Artificial Sequence
  Description of Artificial Sequence: Synthetic oligonucleotide
caugugacuuuauacacug

SEQ ID NO: 3164429 - RNA, 19 nt, Artificial Sequence
  Description of Artificial Sequence: Synthetic oligonucleotide
ucugcucucauuugcagca

SEQ ID NO: 3164430 - RNA, 19 nt, Artificial Sequence
  Description of Artificial Sequence: Synthetic oligonucleotide
aaagcaaagcacauuccag

SEQ ID NO: 3164431 - RNA, 19 nt, Artificial Sequence
  Description of Artificial Sequence: Synthetic oligonucleotide
aacaggaacacuugugaau

SEQ ID NO: 3164432 - RNA, 19 nt, Artificial Sequence
  Description of Artificial Sequence: Synthetic oligonucleotide
uagacauugguguccuugg

SEQ ID NO: 3164433 - RNA, 19 nt, Artificial Sequence
  Description of Artificial Sequence: Synthetic oligonucleotide
aaagcacauuccaggagcc

SEQ ID NO: 3164434 - RNA, 19 nt, Artificial Sequence
  Description of Artificial Sequence: Synthetic oligonucleotide
ugacaaaacggauuccaug

SEQ ID NO: 3164435 - RNA, 19 nt, Artificial Sequence
  Description of Artificial Sequence: Synthetic oligonucleotide
gacauugguguccuugggg

SEQ ID NO: 3164436 - RNA, 19 nt, Artificial Sequence
  Description of Artificial Sequence: Synthetic oligonucleotide
aucugaaggucccaaaucu

SEQ ID NO: 3164437 - RNA, 19 nt, Artificial Sequence
  Description of Artificial Sequence: Synthetic oligonucleotide
ugugaauaaggccuucuuc

SEQ ID NO: 3164438 - RNA, 19 nt, Artificial Sequence
  Description of Artificial Sequence: Synthetic oligonucleotide
agcucaagaagacaucuug

SEQ ID NO: 3164439 - RNA, 19 nt, Artificial Sequence
  Description of Artificial Sequence: Synthetic oligonucleotide
guuugaaagucuccugacg

SEQ ID NO: 3164440 - RNA, 19 nt, Artificial Sequence
  Description of Artificial Sequence: Synthetic oligonucleotide
ugugccaaccaaauagaca

SEQ ID NO: 3164441 - RNA, 19 nt, Artificial Sequence
  Description of Artificial Sequence: Synthetic oligonucleotide
ugucgagauaucaaagccu

SEQ ID NO: 3164442 - RNA, 19 nt, Artificial Sequence
  Description of Artificial Sequence: Synthetic oligonucleotide
aucauaaacaacauaagua

SEQ ID NO: 3164443 - RNA, 19 nt, Artificial Sequence
  Description of Artificial Sequence: Synthetic oligonucleotide
uccaugugacuuuauacac

SEQ ID NO: 3164444 - RNA, 19 nt, Artificial Sequence
  Description of Artificial Sequence: Synthetic oligonucleotide
cagauuuuggagaccaggc

SEQ ID NO: 3164445 - RNA, 19 nt, Artificial Sequence
  Description of Artificial Sequence: Synthetic oligonucleotide
gcagcagcaaaauauaggc

SEQ ID NO: 3164446 - RNA, 19 nt, Artificial Sequence
  Description of Artificial Sequence: Synthetic oligonucleotide
uaugaacaggaacacuugu

SEQ ID NO: 3164447 - RNA, 19 nt, Artificial Sequence
  Description of Artificial Sequence: Synthetic oligonucleotide
cuuggggugaaaagcaaag

SEQ ID NO: 3164448 - RNA, 19 nt, Artificial Sequence
  Description of Artificial Sequence: Synthetic oligonucleotide
cugucgagauaucaaagcc

SEQ ID NO: 3164449 - RNA, 19 nt, Artificial Sequence
  Description of Artificial Sequence: Synthetic oligonucleotide
aaaucucuacucugcucuc

SEQ ID NO: 3164450 - RNA, 19 nt, Artificial Sequence
  Description of Artificial Sequence: Synthetic oligonucleotide
uuugcagcagcaaaauaua

SEQ ID NO: 3164451 - RNA, 19 nt, Artificial Sequence
  Description of Artificial Sequence: Synthetic oligonucleotide
acacuugugaauaaggccu

SEQ ID NO: 3164452 - RNA, 19 nt, Artificial Sequence
  Description of Artificial Sequence: Synthetic oligonucleotide
uuaucugaaggucccaaau

SEQ ID NO: 3164453 - RNA, 19 nt, Artificial Sequence
  Description of Artificial Sequence: Synthetic oligonucleotide
gaacacuugugaauaaggc

SEQ ID NO: 3164454 - RNA, 19 nt, Artificial Sequence
  Description of Artificial Sequence: Synthetic oligonucleotide
cucaagaagacaucuugac

SEQ ID NO: 3164455 - RNA, 19 nt, Artificial Sequence
  Description of Artificial Sequence: Synthetic oligonucleotide
auuugcagcagcaaaauau

SEQ ID NO: 3164456 - RNA, 19 nt, Artificial Sequence
  Description of Artificial Sequence: Synthetic oligonucleotide
gauuuuggagaccaggcaa

SEQ ID NO: 3164457 - RNA, 19 nt, Artificial Sequence
  Description of Artificial Sequence: Synthetic oligonucleotide
ugaauaaggccuucuucug

SEQ ID NO: 3164458 - RNA, 19 nt, Artificial Sequence
  Description of Artificial Sequence: Synthetic oligonucleotide
uggagaccaggcaacauca

SEQ ID NO: 3164459 - RNA, 19 nt, Artificial Sequence
  Description of Artificial Sequence: Synthetic oligonucleotide
agacaucuugacaaaacgg

SEQ ID NO: 3164460 - RNA, 19 nt, Artificial Sequence
  Description of Artificial Sequence: Synthetic oligonucleotide
ucugugccaaccaaauaga

SEQ ID NO: 3164461 - RNA, 19 nt, Artificial Sequence
  Description of Artificial Sequence: Synthetic oligonucleotide
gacaucuugacaaaacgga

SEQ ID NO: 3164462 - RNA, 19 nt, Artificial Sequence
  Description of Artificial Sequence: Synthetic oligonucleotide
gacaaaacggauuccaugu

SEQ ID NO: 3164463 - RNA, 19 nt, Artificial Sequence
  Description of Artificial Sequence: Synthetic oligonucleotide
ucucauuugcagcagcaaa

SEQ ID NO: 3164464 - RNA, 19 nt, Artificial Sequence
  Description of Artificial Sequence: Synthetic oligonucleotide
uguccuuggggugaaaagc

SEQ ID NO: 3164465 - RNA, 19 nt, Artificial Sequence
  Description of Artificial Sequence: Synthetic oligonucleotide
caaauagacauuggugucc

SEQ ID NO: 3164466 - RNA, 19 nt, Artificial Sequence
  Description of Artificial Sequence: Synthetic oligonucleotide
ucguuguaugaacaggaac

SEQ ID NO: 3164467 - RNA, 19 nt, Artificial Sequence
  Description of Artificial Sequence: Synthetic oligonucleotide
auacacuggacccuugugu

SEQ ID NO: 3164468 - RNA, 19 nt, Artificial Sequence
  Description of Artificial Sequence: Synthetic oligonucleotide
ggcaacaucauaaacaaca

SEQ ID NO: 3164469 - RNA, 19 nt, Artificial Sequence
  Description of Artificial Sequence: Synthetic oligonucleotide
agauaucaaagccucgccu

SEQ ID NO: 3164470 - RNA, 19 nt, Artificial Sequence
  Description of Artificial Sequence: Synthetic oligonucleotide
ucccaaaucucuacucugc

SEQ ID NO: 3164471 - RNA, 19 nt, Artificial Sequence
  Description of Artificial Sequence: Synthetic oligonucleotide
uaucugaaggucccaaauc

SEQ ID NO: 3164472 - RNA, 19 nt, Artificial Sequence
  Description of Artificial Sequence: Synthetic oligonucleotide
accaggcaacaucauaaac

SEQ ID NO: 3164473 - RNA, 19 nt, Artificial Sequence
  Description of Artificial Sequence: Synthetic oligonucleotide
aaauagacauugguguccu

SEQ ID NO: 3164474 - RNA, 19 nt, Artificial Sequence
  Description of Artificial Sequence: Synthetic oligonucleotide
acauugguguccuuggggu

SEQ ID NO: 3164475 - RNA, 19 nt, Artificial Sequence
  Description of Artificial Sequence: Synthetic oligonucleotide
uugaaagucuccugacgcc

SEQ ID NO: 3164476 - RNA, 19 nt, Artificial Sequence
  Description of Artificial Sequence: Synthetic oligonucleotide
uauacacuggacccuugug

SEQ ID NO: 3164477 - RNA, 19 nt, Artificial Sequence
  Description of Artificial Sequence: Synthetic oligonucleotide
uagguaucuagguauugcu

SEQ ID NO: 3164478 - RNA, 19 nt, Artificial Sequence
  Description of Artificial Sequence: Synthetic oligonucleotide
ugacgccagaccaugacac

SEQ ID NO: 3164479 - RNA, 19 nt, Artificial Sequence
  Description of Artificial Sequence: Synthetic oligonucleotide
uugcagcagcaaaauauag

SEQ ID NO: 3164480 - RNA, 19 nt, Artificial Sequence
  Description of Artificial Sequence: Synthetic oligonucleotide
auaaggccuucuucugugc

SEQ ID NO: 3164481 - RNA, 19 nt, Artificial Sequence
  Description of Artificial Sequence: Synthetic oligonucleotide
gagauaucaaagccucgcc

SEQ ID NO: 3164482 - RNA, 19 nt, Artificial Sequence
  Description of Artificial Sequence: Synthetic oligonucleotide
ucugcagagcagcucaaga

SEQ ID NO: 3164483 - RNA, 19 nt, Artificial Sequence
  Description of Artificial Sequence: Synthetic oligonucleotide
ucaaaaccgguuugaaagu

SEQ ID NO: 3164484 - RNA, 19 nt, Artificial Sequence
  Description of Artificial Sequence: Synthetic oligonucleotide
aauauuauaaauuccuuca

SEQ ID NO: 3164485 - RNA, 19 nt, Artificial Sequence
  Description of Artificial Sequence: Synthetic oligonucleotide
aaauauuauaaauuccuuc

SEQ ID NO: 3164486 - RNA, 19 nt, Artificial Sequence
  Description of Artificial Sequence: Synthetic oligonucleotide
caaauuaacucuaugauac

SEQ ID NO: 3164487 - RNA, 19 nt, Artificial Sequence
  Description of Artificial Sequence: Synthetic oligonucleotide
agguuugaaauuucgaugc

SEQ ID NO: 3164488 - RNA, 19 nt, Artificial Sequence
  Description of Artificial Sequence: Synthetic oligonucleotide
uuagaaauauuauaaauuc

SEQ ID NO: 3164489 - RNA, 19 nt, Artificial Sequence
  Description of Artificial Sequence: Synthetic oligonucleotide
auuauaaauuccuucacag

SEQ ID NO: 3164490 - RNA, 19 nt, Artificial Sequence
  Description of Artificial Sequence: Synthetic oligonucleotide
aacucuaugauacacuaca

SEQ ID NO: 3164491 - RNA, 19 nt, Artificial Sequence
  Description of Artificial Sequence: Synthetic oligonucleotide
uuuagaaauauuauaaauu

SEQ ID NO: 3164492 - RNA, 19 nt, Artificial Sequence
  Description of Artificial Sequence: Synthetic oligonucleotide
aauuucgaugcucaaauga

SEQ ID NO: 3164493 - RNA, 19 nt, Artificial Sequence
  Description of Artificial Sequence: Synthetic oligonucleotide
aauuaacucuaugauacac

SEQ ID NO: 3164494 - RNA, 19 nt, Artificial Sequence
  Description of Artificial Sequence: Synthetic oligonucleotide
ucuaugauacacuacaggu

SEQ ID NO: 3164495 - RNA, 19 nt, Artificial Sequence
  Description of Artificial Sequence: Synthetic oligonucleotide
uauuuguaauuucugagug

SEQ ID NO: 3164496 - RNA, 19 nt, Artificial Sequence
  Description of Artificial Sequence: Synthetic oligonucleotide
uauaaauuccuucacaguu

SEQ ID NO: 3164497 - RNA, 19 nt, Artificial Sequence
  Description of Artificial Sequence: Synthetic oligonucleotide
ugcuuuagaaauauuauaa

SEQ ID NO: 3164498 - RNA, 19 nt, Artificial Sequence
  Description of Artificial Sequence: Synthetic oligonucleotide
uucgaugcucaaaugaacg

SEQ ID NO: 3164499 - RNA, 19 nt, Artificial Sequence
  Description of Artificial Sequence: Synthetic oligonucleotide
uuugaaauuucgaugcuca

SEQ ID NO: 3164500 - RNA, 19 nt, Artificial Sequence
  Description of Artificial Sequence: Synthetic oligonucleotide
ucaaaugaacggaugaggc

SEQ ID NO: 3164501 - RNA, 19 nt, Artificial Sequence
  Description of Artificial Sequence: Synthetic oligonucleotide
uguaauuucugaguggcgg

SEQ ID NO: 3164502 - RNA, 19 nt, Artificial Sequence
  Description of Artificial Sequence: Synthetic oligonucleotide
uauuauaaauuccuucaca

SEQ ID NO: 3164503 - RNA, 19 nt, Artificial Sequence
  Description of Artificial Sequence: Synthetic oligonucleotide
uacacuacagguuugaaau

SEQ ID NO: 3164504 - RNA, 19 nt, Artificial Sequence
  Description of Artificial Sequence: Synthetic oligonucleotide
auauuauaaauuccuucac

SEQ ID NO: 3164505 - RNA, 19 nt, Artificial Sequence
  Description of Artificial Sequence: Synthetic oligonucleotide
uagaaauauuauaaauucc

SEQ ID NO: 3164506 - RNA, 19 nt, Artificial Sequence
  Description of Artificial Sequence: Synthetic oligonucleotide
uuuguaauuucugaguggc

SEQ ID NO: 3164507 - RNA, 19 nt, Artificial Sequence
  Description of Artificial Sequence: Synthetic oligonucleotide
agaaauauuauaaauuccu

SEQ ID NO: 3164508 - RNA, 19 nt, Artificial Sequence
  Description of Artificial Sequence: Synthetic oligonucleotide
ucuugcuuuagaaauauua

SEQ ID NO: 3164509 - RNA, 19 nt, Artificial Sequence
  Description of Artificial Sequence: Synthetic oligonucleotide
uaugauacacuacagguuu

SEQ ID NO: 3164510 - RNA, 19 nt, Artificial Sequence
  Description of Artificial Sequence: Synthetic oligonucleotide
aacugugacgguugcuucc

SEQ ID NO: 3164511 - RNA, 19 nt, Artificial Sequence
  Description of Artificial Sequence: Synthetic oligonucleotide
uccaaauuaacucuaugau

SEQ ID NO: 3164512 - RNA, 19 nt, Artificial Sequence
  Description of Artificial Sequence: Synthetic oligonucleotide
aaaugaacggaugaggcga

SEQ ID NO: 3164513 - RNA, 19 nt, Artificial Sequence
  Description of Artificial Sequence: Synthetic oligonucleotide
auguggagagaauaccugc

SEQ ID NO: 3164514 - RNA, 19 nt, Artificial Sequence
  Description of Artificial Sequence: Synthetic oligonucleotide
auuuguaauuucugagugg

SEQ ID NO: 3164515 - RNA, 19 nt, Artificial Sequence
  Description of Artificial Sequence: Synthetic oligonucleotide
uuugguccaaauuaacucu

SEQ ID NO: 3164516 - RNA, 19 nt, Artificial Sequence
  Description of Artificial Sequence: Synthetic oligonucleotide
uucucaaagggacaucuug

SEQ ID NO: 3164517 - RNA, 19 nt, Artificial Sequence
  Description of Artificial Sequence: Synthetic oligonucleotide
uaaauuccuucacaguuug

SEQ ID NO: 3164518 - RNA, 19 nt, Artificial Sequence
  Description of Artificial Sequence: Synthetic oligonucleotide
ucucaaagggacaucuugc

SEQ ID NO: 3164519 - RNA, 19 nt, Artificial Sequence
  Description of Artificial Sequence: Synthetic oligonucleotide
gaugaggcgaacugugacg

SEQ ID NO: 3164520 - RNA, 19 nt, Artificial Sequence
  Description of Artificial Sequence: Synthetic oligonucleotide
aauuccuucacaguuuggu

SEQ ID NO: 3164521 - RNA, 19 nt, Artificial Sequence
  Description of Artificial Sequence: Synthetic oligonucleotide
uuccuucacaguuuggucc

SEQ ID NO: 3164522 - RNA, 19 nt, Artificial Sequence
  Description of Artificial Sequence: Synthetic oligonucleotide
uuaacucuaugauacacua

SEQ ID NO: 3164523 - RNA, 19 nt, Artificial Sequence
  Description of Artificial Sequence: Synthetic oligonucleotide
caagcugguucucaaaggg

SEQ ID NO: 3164524 - RNA, 19 nt, Artificial Sequence
  Description of Artificial Sequence: Synthetic oligonucleotide
caaaugaacggaugaggcg

SEQ ID NO: 3164525 - RNA, 19 nt, Artificial Sequence
  Description of Artificial Sequence: Synthetic oligonucleotide
uuauaaauuccuucacagu

SEQ ID NO: 3164526 - RNA, 19 nt, Artificial Sequence
  Description of Artificial Sequence: Synthetic oligonucleotide
guuugguccaaauuaacuc

SEQ ID NO: 3164527 - RNA, 19 nt, Artificial Sequence
  Description of Artificial Sequence: Synthetic oligonucleotide
ugcucaaaugaacggauga

SEQ ID NO: 3164528 - RNA, 19 nt, Artificial Sequence
  Description of Artificial Sequence: Synthetic oligonucleotide
cucuaugauacacuacagg

SEQ ID NO: 3164529 - RNA, 19 nt, Artificial Sequence
  Description of Artificial Sequence: Synthetic oligonucleotide
ucgaugcucaaaugaacgg

SEQ ID NO: 3164530 - RNA, 19 nt, Artificial Sequence
  Description of Artificial Sequence: Synthetic oligonucleotide
aaauuucgaugcucaaaug

SEQ ID NO: 3164531 - RNA, 19 nt, Artificial Sequence
  Description of Artificial Sequence: Synthetic oligonucleotide
uuccucggcagccaugugg

SEQ ID NO: 3164532 - RNA, 19 nt, Artificial Sequence
  Description of Artificial Sequence: Synthetic oligonucleotide
aaauuaacucuaugauaca

SEQ ID NO: 3164533 - RNA, 19 nt, Artificial Sequence
  Description of Artificial Sequence: Synthetic oligonucleotide
acagguuugaaauuucgau

SEQ ID NO: 3164534 - RNA, 19 nt, Artificial Sequence
  Description of Artificial Sequence: Synthetic oligonucleotide
uggagagaauaccugcucc

SEQ ID NO: 3164535 - RNA, 19 nt, Artificial Sequence
  Description of Artificial Sequence: Synthetic oligonucleotide
cucaaaugaacggaugagg

SEQ ID NO: 3164536 - RNA, 19 nt, Artificial Sequence
  Description of Artificial Sequence: Synthetic oligonucleotide
cagguuugaaauuucgaug

SEQ ID NO: 3164537 - RNA, 19 nt, Artificial Sequence
  Description of Artificial Sequence: Synthetic oligonucleotide
cuacagguuugaaauuucg

SEQ ID NO: 3164538 - RNA, 19 nt, Artificial Sequence
  Description of Artificial Sequence: Synthetic oligonucleotide
guccaaauuaacucuauga

SEQ ID NO: 3164539 - RNA, 19 nt, Artificial Sequence
  Description of Artificial Sequence: Synthetic oligonucleotide
aauuucugaguggcggugg

SEQ ID NO: 3164540 - RNA, 19 nt, Artificial Sequence
  Description of Artificial Sequence: Synthetic oligonucleotide
auuccuucacaguuugguc

SEQ ID NO: 3164541 - RNA, 19 nt, Artificial Sequence
  Description of Artificial Sequence: Synthetic oligonucleotide
uuucgaugcucaaaugaac

SEQ ID NO: 3164542 - RNA, 19 nt, Artificial Sequence
  Description of Artificial Sequence: Synthetic oligonucleotide
gaaauuucgaugcucaaau

SEQ ID NO: 3164543 - RNA, 19 nt, Artificial Sequence
  Description of Artificial Sequence: Synthetic oligonucleotide
uuguaauuucugaguggcg

SEQ ID NO: 3164544 - RNA, 19 nt, Artificial Sequence
  Description of Artificial Sequence: Synthetic oligonucleotide
uacagguuugaaauuucga

SEQ ID NO: 3164545 - RNA, 19 nt, Artificial Sequence
  Description of Artificial Sequence: Synthetic oligonucleotide
aauaccugcucccggcgug

SEQ ID NO: 3164546 - RNA, 19 nt, Artificial Sequence
  Description of Artificial Sequence: Synthetic oligonucleotide
uugcuuuagaaauauuaua

SEQ ID NO: 3164547 - RNA, 19 nt, Artificial Sequence
  Description of Artificial Sequence: Synthetic oligonucleotide
auuucugaguggcgguggc

SEQ ID NO: 3164548 - RNA, 19 nt, Artificial Sequence
  Description of Artificial Sequence: Synthetic oligonucleotide
gacaucuugcuuuagaaau

SEQ ID NO: 3164549 - RNA, 19 nt, Artificial Sequence
  Description of Artificial Sequence: Synthetic oligonucleotide
uguggagagaauaccugcu

SEQ ID NO: 3164550 - RNA, 19 nt, Artificial Sequence
  Description of Artificial Sequence: Synthetic oligonucleotide
agagaauaccugcucccgg

SEQ ID NO: 3164551 - RNA, 19 nt, Artificial Sequence
  Description of Artificial Sequence: Synthetic oligonucleotide
ugugacgguugcuuccucg

SEQ ID NO: 3164552 - RNA, 19 nt, Artificial Sequence
  Description of Artificial Sequence: Synthetic oligonucleotide
gagaauaccugcucccggc

SEQ ID NO: 3164553 - RNA, 19 nt, Artificial Sequence
  Description of Artificial Sequence: Synthetic oligonucleotide
ucggcagccauguggagag

SEQ ID NO: 3164554 - RNA, 19 nt, Artificial Sequence
  Description of Artificial Sequence: Synthetic oligonucleotide
agcugguucucaaagggac

SEQ ID NO: 3164555 - RNA, 19 nt, Artificial Sequence
  Description of Artificial Sequence: Synthetic oligonucleotide
cuuuagaaauauuauaaau

SEQ ID NO: 3164556 - RNA, 19 nt, Artificial Sequence
  Description of Artificial Sequence: Synthetic oligonucleotide
ugaaauuucgaugcucaaa

SEQ ID NO: 3164557 - RNA, 19 nt, Artificial Sequence
  Description of Artificial Sequence: Synthetic oligonucleotide
cauguggagagaauaccug

SEQ ID NO: 3164558 - RNA, 19 nt, Artificial Sequence
  Description of Artificial Sequence: Synthetic oligonucleotide
augaggcgaacugugacgg

SEQ ID NO: 3164559 - RNA, 19 nt, Artificial Sequence
  Description of Artificial Sequence: Synthetic oligonucleotide
gaacggaugaggcgaacug

SEQ ID NO: 3164560 - RNA, 19 nt, Artificial Sequence
  Description of Artificial Sequence: Synthetic oligonucleotide
agaauaccugcucccggcg

SEQ ID NO: 3164561 - RNA, 19 nt, Artificial Sequence
  Description of Artificial Sequence: Synthetic oligonucleotide
gagagaauaccugcucccg

SEQ ID NO: 3164562 - RNA, 19 nt, Artificial Sequence
  Description of Artificial Sequence: Synthetic oligonucleotide
cacaguuugguccaaauua

SEQ ID NO: 3164563 - RNA, 19 nt, Artificial Sequence
  Description of Artificial Sequence: Synthetic oligonucleotide
auacacuacagguuugaaa

SEQ ID NO: 3164564 - RNA, 19 nt, Artificial Sequence
  Description of Artificial Sequence: Synthetic oligonucleotide
auuaacucuaugauacacu

SEQ ID NO: 3164565 - RNA, 19 nt, Artificial Sequence
  Description of Artificial Sequence: Synthetic oligonucleotide
uccuucacaguuuggucca

SEQ ID NO: 3164566 - RNA, 19 nt, Artificial Sequence
  Description of Artificial Sequence: Synthetic oligonucleotide
aguuugguccaaauuaacu

SEQ ID NO: 3164567 - RNA, 19 nt, Artificial Sequence
  Description of Artificial Sequence: Synthetic oligonucleotide
uaacucuaugauacacuac

SEQ ID NO: 3164568 - RNA, 19 nt, Artificial Sequence
  Description of Artificial Sequence: Synthetic oligonucleotide
aaagggacaucuugcuuua

SEQ ID NO: 3164569 - RNA, 19 nt, Artificial Sequence
  Description of Artificial Sequence: Synthetic oligonucleotide
uccucggcagccaugugga

SEQ ID NO: 3164570 - RNA, 19 nt, Artificial Sequence
  Description of Artificial Sequence: Synthetic oligonucleotide
ugauacacuacagguuuga

SEQ ID NO: 3164571 - RNA, 19 nt, Artificial Sequence
  Description of Artificial Sequence: Synthetic oligonucleotide
uaauuucugaguggcggug

SEQ ID NO: 3164572 - RNA, 19 nt, Artificial Sequence
  Description of Artificial Sequence: Synthetic oligonucleotide
gugacgguugcuuccucgg

SEQ ID NO: 3164573 - RNA, 19 nt, Artificial Sequence
  Description of Artificial Sequence: Synthetic oligonucleotide
acuacagguuugaaauuuc

SEQ ID NO: 3164574 - RNA, 19 nt, Artificial Sequence
  Description of Artificial Sequence: Synthetic oligonucleotide
auuucgaugcucaaaugaa

SEQ ID NO: 3164575 - RNA, 19 nt, Artificial Sequence
  Description of Artificial Sequence: Synthetic oligonucleotide
uugguccaaauuaacucua

SEQ ID NO: 3164576 - RNA, 19 nt, Artificial Sequence
  Description of Artificial Sequence: Synthetic oligonucleotide
aacggaugaggcgaacugu

SEQ ID NO: 3164577 - RNA, 19 nt, Artificial Sequence
  Description of Artificial Sequence: Synthetic oligonucleotide
aaauuccuucacaguuugg

SEQ ID NO: 3164578 - RNA, 19 nt, Artificial Sequence
  Description of Artificial Sequence: Synthetic oligonucleotide
ucaaagggacaucuugcuu

SEQ ID NO: 3164579 - RNA, 19 nt, Artificial Sequence
  Description of Artificial Sequence: Synthetic oligonucleotide
ucacaguuugguccaaauu

SEQ ID NO: 3164580 - RNA, 19 nt, Artificial Sequence
  Description of Artificial Sequence: Synthetic oligonucleotide
ggcaagcugguucucaaag

SEQ ID NO: 3164581 - RNA, 19 nt, Artificial Sequence
  Description of Artificial Sequence: Synthetic oligonucleotide
ggagagaauaccugcuccc

SEQ ID NO: 3164582 - RNA, 19 nt, Artificial Sequence
  Description of Artificial Sequence: Synthetic oligonucleotide
cuugcuuuagaaauauuau

SEQ ID NO: 3164583 - RNA, 19 nt, Artificial Sequence
  Description of Artificial Sequence: Synthetic oligonucleotide
agccauguggagagaauac

SEQ ID NO: 3164584 - RNA, 19 nt, Artificial Sequence
  Description of Artificial Sequence: Synthetic oligonucleotide
aaucgaagucgccauaugc

SEQ ID NO: 3164585 - RNA, 19 nt, Artificial Sequence
  Description of Artificial Sequence: Synthetic oligonucleotide
aacggaugcacccaaagug

SEQ ID NO: 3164586 - RNA, 19 nt, Artificial Sequence
  Description of Artificial Sequence: Synthetic oligonucleotide
agguagaccaaauaggguc

SEQ ID NO: 3164587 - RNA, 19 nt, Artificial Sequence
  Description of Artificial Sequence: Synthetic oligonucleotide
aauagggucucgaaaggcc

SEQ ID NO: 3164588 - RNA, 19 nt, Artificial Sequence
  Description of Artificial Sequence: Synthetic oligonucleotide
aguuguaguugacaaacgg

SEQ ID NO: 3164589 - RNA, 19 nt, Artificial Sequence
  Description of Artificial Sequence: Synthetic oligonucleotide
caugucaucgauuuccagg

SEQ ID NO: 3164590 - RNA, 19 nt, Artificial Sequence
  Description of Artificial Sequence: Synthetic oligonucleotide
aaauagggucucgaaaggc

SEQ ID NO: 3164591 - RNA, 19 nt, Artificial Sequence
  Description of Artificial Sequence: Synthetic oligonucleotide
cuuguucugguccacagcg

SEQ ID NO: 3164592 - RNA, 19 nt, Artificial Sequence
  Description of Artificial Sequence: Synthetic oligonucleotide
guaguugacaaacggaugc

SEQ ID NO: 3164593 - RNA, 19 nt, Artificial Sequence
  Description of Artificial Sequence: Synthetic oligonucleotide
aacagcucacgcuccacgc

SEQ ID NO: 3164594 - RNA, 19 nt, Artificial Sequence
  Description of Artificial Sequence: Synthetic oligonucleotide
uguucugguccacagcgcg

SEQ ID NO: 3164595 - RNA, 19 nt, Artificial Sequence
  Description of Artificial Sequence: Synthetic oligonucleotide
cucgaaaggccucugaugc

SEQ ID NO: 3164596 - RNA, 19 nt, Artificial Sequence
  Description of Artificial Sequence: Synthetic oligonucleotide
uuguaguugacaaacggau

SEQ ID NO: 3164597 - RNA, 19 nt, Artificial Sequence
  Description of Artificial Sequence: Synthetic oligonucleotide
caaagugugacgcggaagc

SEQ ID NO: 3164598 - RNA, 19 nt, Artificial Sequence
  Description of Artificial Sequence: Synthetic oligonucleotide
aaugccguuccaccagcgc

SEQ ID NO: 3164599 - RNA, 19 nt, Artificial Sequence
  Description of Artificial Sequence: Synthetic oligonucleotide
ugcuagguacccuggaugg

SEQ ID NO: 3164600 - RNA, 19 nt, Artificial Sequence
  Description of Artificial Sequence: Synthetic oligonucleotide
uaugcagguguguacaugu

SEQ ID NO: 3164601 - RNA, 19 nt, Artificial Sequence
  Description of Artificial Sequence: Synthetic oligonucleotide
uguaguugacaaacggaug

SEQ ID NO: 3164602 - RNA, 19 nt, Artificial Sequence
  Description of Artificial Sequence: Synthetic oligonucleotide
uccagcaccgcuccaaugc

SEQ ID NO: 3164603 - RNA, 19 nt, Artificial Sequence
  Description of Artificial Sequence: Synthetic oligonucleotide
guacaugucaucgauuucc

SEQ ID NO: 3164604 - RNA, 19 nt, Artificial Sequence
  Description of Artificial Sequence: Synthetic oligonucleotide
ucugaugcuagguacccug

SEQ ID NO: 3164605 - RNA, 19 nt, Artificial Sequence
  Description of Artificial Sequence: Synthetic oligonucleotide
ugcggaacaugucaguggc

SEQ ID NO: 3164606 - RNA, 19 nt, Artificial Sequence
  Description of Artificial Sequence: Synthetic oligonucleotide
gucaucgauuuccaggugg

SEQ ID NO: 3164607 - RNA, 19 nt, Artificial Sequence
  Description of Artificial Sequence: Synthetic oligonucleotide
aagccagccucucgcaggc

SEQ ID NO: 3164608 - RNA, 19 nt, Artificial Sequence
  Description of Artificial Sequence: Synthetic oligonucleotide
augucaucgauuuccaggu

SEQ ID NO: 3164609 - RNA, 19 nt, Artificial Sequence
  Description of Artificial Sequence: Synthetic oligonucleotide
guugaagcggugcuggcgg

SEQ ID NO: 3164610 - RNA, 19 nt, Artificial Sequence
  Description of Artificial Sequence: Synthetic oligonucleotide
ucgaagucgccauaugcag

SEQ ID NO: 3164611 - RNA, 19 nt, Artificial Sequence
  Description of Artificial Sequence: Synthetic oligonucleotide
caugucaguggcauugggg

SEQ ID NO: 3164612 - RNA, 19 nt, Artificial Sequence
  Description of Artificial Sequence: Synthetic oligonucleotide
aaagugugacgcggaagcc

SEQ ID NO: 3164613 - RNA, 19 nt, Artificial Sequence
  Description of Artificial Sequence: Synthetic oligonucleotide
aaacggaugcacccaaagu

SEQ ID NO: 3164614 - RNA, 19 nt, Artificial Sequence
  Description of Artificial Sequence: Synthetic oligonucleotide
ccaaauagggucucgaaag

SEQ ID NO: 3164615 - RNA, 19 nt, Artificial Sequence
  Description of Artificial Sequence: Synthetic oligonucleotide
cuugcccucgucgaaaucg

SEQ ID NO: 3164616 - RNA, 19 nt, Artificial Sequence
  Description of Artificial Sequence: Synthetic oligonucleotide
ucaucgauuuccagguggc

SEQ ID NO: 3164617 - RNA, 19 nt, Artificial Sequence
  Description of Artificial Sequence: Synthetic oligonucleotide
agguguguacaugucaucg

SEQ ID NO: 3164618 - RNA, 19 nt, Artificial Sequence
  Description of Artificial Sequence: Synthetic oligonucleotide
caaauagggucucgaaagg

SEQ ID NO: 3164619 - RNA, 19 nt, Artificial Sequence
  Description of Artificial Sequence: Synthetic oligonucleotide
ucgucgaaaucgaagucgc

SEQ ID NO: 3164620 - RNA, 19 nt, Artificial Sequence
  Description of Artificial Sequence: Synthetic oligonucleotide
agguggcuacuguugaagc

SEQ ID NO: 3164621 - RNA, 19 nt, Artificial Sequence
  Description of Artificial Sequence: Synthetic oligonucleotide
gaagccagccucucgcagg

SEQ ID NO: 3164622 - RNA, 19 nt, Artificial Sequence
  Description of Artificial Sequence: Synthetic oligonucleotide
cucgucgaaaucgaagucg

SEQ ID NO: 3164623 - RNA, 19 nt, Artificial Sequence
  Description of Artificial Sequence: Synthetic oligonucleotide
ugaaguccagcaccgcucc

SEQ ID NO: 3164624 - RNA, 19 nt, Artificial Sequence
  Description of Artificial Sequence: Synthetic oligonucleotide
aaaucgaagucgccauaug

SEQ ID NO: 3164625 - RNA, 19 nt, Artificial Sequence
  Description of Artificial Sequence: Synthetic oligonucleotide
gaacagcucacgcuccacg

SEQ ID NO: 3164626 - RNA, 19 nt, Artificial Sequence
  Description of Artificial Sequence: Synthetic oligonucleotide
uccaaugccguuccaccag

SEQ ID NO: 3164627 - RNA, 19 nt, Artificial Sequence
  Description of Artificial Sequence: Synthetic oligonucleotide
ucucgaaaggccucugaug

SEQ ID NO: 3164628 - RNA, 19 nt, Artificial Sequence
  Description of Artificial Sequence: Synthetic oligonucleotide
ccagguagaccaaauaggg

SEQ ID NO: 3164629 - RNA, 19 nt, Artificial Sequence
  Description of Artificial Sequence: Synthetic oligonucleotide
ugucccuggaaccagucuc

SEQ ID NO: 3164630 - RNA, 19 nt, Artificial Sequence
  Description of Artificial Sequence: Synthetic oligonucleotide
ugcagguguguacauguca

SEQ ID NO: 3164631 - RNA, 19 nt, Artificial Sequence
  Description of Artificial Sequence: Synthetic oligonucleotide
ucgauuuccagguggcuac

SEQ ID NO: 3164632 - RNA, 19 nt, Artificial Sequence
  Description of Artificial Sequence: Synthetic oligonucleotide
uguugaagcggugcuggcg

SEQ ID NO: 3164633 - RNA, 19 nt, Artificial Sequence
  Description of Artificial Sequence: Synthetic oligonucleotide
ugcacccaaagugugacgc

SEQ ID NO: 3164634 - RNA, 19 nt, Artificial Sequence
  Description of Artificial Sequence: Synthetic oligonucleotide
gacgaguuguaguugacaa

SEQ ID NO: 3164635 - RNA, 19 nt, Artificial Sequence
  Description of Artificial Sequence: Synthetic oligonucleotide
aguugacaaacggaugcac

SEQ ID NO: 3164636 - RNA, 19 nt, Artificial Sequence
  Description of Artificial Sequence: Synthetic oligonucleotide
uacaugucaucgauuucca

SEQ ID NO: 3164637 - RNA, 19 nt, Artificial Sequence
  Description of Artificial Sequence: Synthetic oligonucleotide
acagcucacgcuccacgcc

SEQ ID NO: 3164638 - RNA, 19 nt, Artificial Sequence
  Description of Artificial Sequence: Synthetic oligonucleotide
guggcuacuguugaagcgg

SEQ ID NO: 3164639 - RNA, 19 nt, Artificial Sequence
  Description of Artificial Sequence: Synthetic oligonucleotide
agcgcgcccguacagggcc

SEQ ID NO: 3164640 - RNA, 19 nt, Artificial Sequence
  Description of Artificial Sequence: Synthetic oligonucleotide
augcuagguacccuggaug

SEQ ID NO: 3164641 - RNA, 19 nt, Artificial Sequence
  Description of Artificial Sequence: Synthetic oligonucleotide
accgcuccaaugccguucc

SEQ ID NO: 3164642 - RNA, 19 nt, Artificial Sequence
  Description of Artificial Sequence: Synthetic oligonucleotide
uuccagguggcuacuguug

SEQ ID NO: 3164643 - RNA, 19 nt, Artificial Sequence
  Description of Artificial Sequence: Synthetic oligonucleotide
caaacggaugcacccaaag

SEQ ID NO: 3164644 - RNA, 19 nt, Artificial Sequence
  Description of Artificial Sequence: Synthetic oligonucleotide
acagggcccagguagacca

SEQ ID NO: 3164645 - RNA, 19 nt, Artificial Sequence
  Description of Artificial Sequence: Synthetic oligonucleotide
accaaauagggucucgaaa

SEQ ID NO: 3164646 - RNA, 19 nt, Artificial Sequence
  Description of Artificial Sequence: Synthetic oligonucleotide
aaaggccucugaugcuagg

SEQ ID NO: 3164647 - RNA, 19 nt, Artificial Sequence
  Description of Artificial Sequence: Synthetic oligonucleotide
guagcggaagcgcaggcgc

SEQ ID NO: 3164648 - RNA, 19 nt, Artificial Sequence
  Description of Artificial Sequence: Synthetic oligonucleotide
uguagcggaagcgcaggcg

SEQ ID NO: 3164649 - RNA, 19 nt, Artificial Sequence
  Description of Artificial Sequence: Synthetic oligonucleotide
ucgaaaucgaagucgccau

SEQ ID NO: 3164650 - RNA, 19 nt, Artificial Sequence
  Description of Artificial Sequence: Synthetic oligonucleotide
guugacaaacggaugcacc

SEQ ID NO: 3164651 - RNA, 19 nt, Artificial Sequence
  Description of Artificial Sequence: Synthetic oligonucleotide
gaugcacccaaagugugac

SEQ ID NO: 3164652 - RNA, 19 nt, Artificial Sequence
  Description of Artificial Sequence: Synthetic oligonucleotide
gaguuguaguugacaaacg

SEQ ID NO: 3164653 - RNA, 19 nt, Artificial Sequence
  Description of Artificial Sequence: Synthetic oligonucleotide
cugcggaacaugucagugg

SEQ ID NO: 3164654 - RNA, 19 nt, Artificial Sequence
  Description of Artificial Sequence: Synthetic oligonucleotide
uccagguggcuacuguuga

SEQ ID NO: 3164655 - RNA, 19 nt, Artificial Sequence
  Description of Artificial Sequence: Synthetic oligonucleotide
uggaaccagucucgggccg

SEQ ID NO: 3164656 - RNA, 19 nt, Artificial Sequence
  Description of Artificial Sequence: Synthetic oligonucleotide
guuguaguugacaaacgga

SEQ ID NO: 3164657 - RNA, 19 nt, Artificial Sequence
  Description of Artificial Sequence: Synthetic oligonucleotide
uccaccagcgcaccagcgc

SEQ ID NO: 3164658 - RNA, 19 nt, Artificial Sequence
  Description of Artificial Sequence: Synthetic oligonucleotide
acaugucaguggcauuggg

SEQ ID NO: 3164659 - RNA, 19 nt, Artificial Sequence
  Description of Artificial Sequence: Synthetic oligonucleotide
ugcugggcgaacugcagca

SEQ ID NO: 3164660 - RNA, 19 nt, Artificial Sequence
  Description of Artificial Sequence: Synthetic oligonucleotide
cccagguagaccaaauagg

SEQ ID NO: 3164661 - RNA, 19 nt, Artificial Sequence
  Description of Artificial Sequence: Synthetic oligonucleotide
gguggcuacuguugaagcg

SEQ ID NO: 3164662 - RNA, 19 nt, Artificial Sequence
  Description of Artificial Sequence: Synthetic oligonucleotide
uguacaugucaucgauuuc

SEQ ID NO: 3164663 - RNA, 19 nt, Artificial Sequence
  Description of Artificial Sequence: Synthetic oligonucleotide
aagugugacgcggaagcca

SEQ ID NO: 3164664 - RNA, 19 nt, Artificial Sequence
  Description of Artificial Sequence: Synthetic oligonucleotide
acagcgcgcccguacaggg

SEQ ID NO: 3164665 - RNA, 19 nt, Artificial Sequence
  Description of Artificial Sequence: Synthetic oligonucleotide
aagcgcgacgaguuguagu

SEQ ID NO: 3164666 - RNA, 19 nt, Artificial Sequence
  Description of Artificial Sequence: Synthetic oligonucleotide
accuuguucugguccacag

SEQ ID NO: 3164667 - RNA, 19 nt, Artificial Sequence
  Description of Artificial Sequence: Synthetic oligonucleotide
ugugacgcggaagccagcc

SEQ ID NO: 3164668 - RNA, 19 nt, Artificial Sequence
  Description of Artificial Sequence: Synthetic oligonucleotide
ugaugcuagguacccugga

SEQ ID NO: 3164669 - RNA, 19 nt, Artificial Sequence
  Description of Artificial Sequence: Synthetic oligonucleotide
aucgaagucgccauaugca

SEQ ID NO: 3164670 - RNA, 19 nt, Artificial Sequence
  Description of Artificial Sequence: Synthetic oligonucleotide
auuuccagguggcuacugu

SEQ ID NO: 3164671 - RNA, 19 nt, Artificial Sequence
  Description of Artificial Sequence: Synthetic oligonucleotide
cugaugcuagguacccugg

SEQ ID NO: 3164672 - RNA, 19 nt, Artificial Sequence
  Description of Artificial Sequence: Synthetic oligonucleotide
ccuggaaccagucucgggc

SEQ ID NO: 3164673 - RNA, 19 nt, Artificial Sequence
  Description of Artificial Sequence: Synthetic oligonucleotide
ugacgcggaagccagccuc

SEQ ID NO: 3164674 - RNA, 19 nt, Artificial Sequence
  Description of Artificial Sequence: Synthetic oligonucleotide
gcccagguagaccaaauag

SEQ ID NO: 3164675 - RNA, 19 nt, Artificial Sequence
  Description of Artificial Sequence: Synthetic oligonucleotide
gaagucgccauaugcaggu

SEQ ID NO: 3164676 - RNA, 19 nt, Artificial Sequence
  Description of Artificial Sequence: Synthetic oligonucleotide
cuggaaccagucucgggcc

SEQ ID NO: 3164677 - RNA, 19 nt, Artificial Sequence
  Description of Artificial Sequence: Synthetic oligonucleotide
uagaccaaauagggucucg

SEQ ID NO: 3164678 - RNA, 19 nt, Artificial Sequence
  Description of Artificial Sequence: Synthetic oligonucleotide
gucgaaaucgaagucgcca

SEQ ID NO: 3164679 - RNA, 19 nt, Artificial Sequence
  Description of Artificial Sequence: Synthetic oligonucleotide
uguguacaugucaucgauu

SEQ ID NO: 3164680 - RNA, 19 nt, Artificial Sequence
  Description of Artificial Sequence: Synthetic oligonucleotide
augccguuccaccagcgca

SEQ ID NO: 3164681 - RNA, 19 nt, Artificial Sequence
  Description of Artificial Sequence: Synthetic oligonucleotide
guggcauuggggaacuugc

SEQ ID NO: 3164682 - RNA, 19 nt, Artificial Sequence
  Description of Artificial Sequence: Synthetic oligonucleotide
agugugacgcggaagccag

SEQ ID NO: 3164683 - RNA, 19 nt, Artificial Sequence
  Description of Artificial Sequence: Synthetic oligonucleotide
aguggcauuggggaacuug

SEQ ID NO: 3164684 - RNA, 19 nt, Artificial Sequence
  Description of Artificial Sequence: Synthetic oligonucleotide
aaaucgaaggaccaaagac

SEQ ID NO: 3164685 - RNA, 19 nt, Artificial Sequence
  Description of Artificial Sequence: Synthetic oligonucleotide
acagaauaagcacacaugc

SEQ ID NO: 3164686 - RNA, 19 nt, Artificial Sequence
  Description of Artificial Sequence: Synthetic oligonucleotide
aaaucagagaaauaugcag

SEQ ID NO: 3164687 - RNA, 19 nt, Artificial Sequence
  Description of Artificial Sequence: Synthetic oligonucleotide
ucuagaauaaugcagagau

SEQ ID NO: 3164688 - RNA, 19 nt, Artificial Sequence
  Description of Artificial Sequence: Synthetic oligonucleotide
aagugaaagccacaguucc

SEQ ID NO: 3164689 - RNA, 19 nt, Artificial Sequence
  Description of Artificial Sequence: Synthetic oligonucleotide
aguaaaauguucuauagga

SEQ ID NO: 3164690 - RNA, 19 nt, Artificial Sequence
  Description of Artificial Sequence: Synthetic oligonucleotide
uauguuacacaacagaugu

SEQ ID NO: 3164691 - RNA, 19 nt, Artificial Sequence
  Description of Artificial Sequence: Synthetic oligonucleotide
agaauaagcacacaugcuc

SEQ ID NO: 3164692 - RNA, 19 nt, Artificial Sequence
  Description of Artificial Sequence: Synthetic oligonucleotide
aaagcaaagaacaacagca

SEQ ID NO: 3164693 - RNA, 19 nt, Artificial Sequence
  Description of Artificial Sequence: Synthetic oligonucleotide
uuuauuggaauucuguagu

SEQ ID NO: 3164694 - RNA, 19 nt, Artificial Sequence
  Description of Artificial Sequence: Synthetic oligonucleotide
aaugcagaaggucaagaag

SEQ ID NO: 3164695 - RNA, 19 nt, Artificial Sequence
  Description of Artificial Sequence: Synthetic oligonucleotide
auuuauuggaauucuguag

SEQ ID NO: 3164696 - RNA, 19 nt, Artificial Sequence
  Description of Artificial Sequence: Synthetic oligonucleotide
aaagaccgauucuagcagc

SEQ ID NO: 3164697 - RNA, 19 nt, Artificial Sequence
  Description of Artificial Sequence: Synthetic oligonucleotide
gucacaguuaaaucgaagg

SEQ ID NO: 3164698 - RNA, 19 nt, Artificial Sequence
  Description of Artificial Sequence: Synthetic oligonucleotide
aacuauguuacacaacaga

SEQ ID NO: 3164699 - RNA, 19 nt, Artificial Sequence
  Description of Artificial Sequence: Synthetic oligonucleotide
uaaagcaaagaacaacagc

SEQ ID NO: 3164700 - RNA, 19 nt, Artificial Sequence
  Description of Artificial Sequence: Synthetic oligonucleotide
agaaagugcucauagcaac

SEQ ID NO: 3164701 - RNA, 19 nt, Artificial Sequence
  Description of Artificial Sequence: Synthetic oligonucleotide
uggugaugcaaucaaagcc

SEQ ID NO: 3164702 - RNA, 19 nt, Artificial Sequence
  Description of Artificial Sequence: Synthetic oligonucleotide
aaaagcuucaggauugggg

SEQ ID NO: 3164703 - RNA, 19 nt, Artificial Sequence
  Description of Artificial Sequence: Synthetic oligonucleotide
uugauaaugccucuuucag

SEQ ID NO: 3164704 - RNA, 19 nt, Artificial Sequence
  Description of Artificial Sequence: Synthetic oligonucleotide
ucuguaguacagaauaagc

SEQ ID NO: 3164705 - RNA, 19 nt, Artificial Sequence
  Description of Artificial Sequence: Synthetic oligonucleotide
ugaaaucaacacaaguaag

SEQ ID NO: 3164706 - RNA, 19 nt, Artificial Sequence
  Description of Artificial Sequence: Synthetic oligonucleotide
uagaauaaugcagagauaa

SEQ ID NO: 3164707 - RNA, 19 nt, Artificial Sequence
  Description of Artificial Sequence: Synthetic oligonucleotide
agaguaaaauguucuauag

SEQ ID NO: 3164708 - RNA, 19 nt, Artificial Sequence
  Description of Artificial Sequence: Synthetic oligonucleotide
cuuugcucuagaauaaugc

SEQ ID NO: 3164709 - RNA, 19 nt, Artificial Sequence
  Description of Artificial Sequence: Synthetic oligonucleotide
uguuacaaaauaacuggca

SEQ ID NO: 3164710 - RNA, 19 nt, Artificial Sequence
  Description of Artificial Sequence: Synthetic oligonucleotide
aagauuaaacucaaggaca

SEQ ID NO: 3164711 - RNA, 19 nt, Artificial Sequence
  Description of Artificial Sequence: Synthetic oligonucleotide
aacguggagagagagugcc

SEQ ID NO: 3164712 - RNA, 19 nt, Artificial Sequence
  Description of Artificial Sequence: Synthetic oligonucleotide
uuauuuucagagauauuga

SEQ ID NO: 3164713 - RNA, 19 nt, Artificial Sequence
  Description of Artificial Sequence: Synthetic oligonucleotide
aaugacgccugcaaagagc

SEQ ID NO: 3164714 - RNA, 19 nt, Artificial Sequence
  Description of Artificial Sequence: Synthetic oligonucleotide
acguauugcagucagucuc

SEQ ID NO: 3164715 - RNA, 19 nt, Artificial Sequence
  Description of Artificial Sequence: Synthetic oligonucleotide
aaggaccaaagaccgauuc

SEQ ID NO: 3164716 - RNA, 19 nt, Artificial Sequence
  Description of Artificial Sequence: Synthetic oligonucleotide
uuucagagauauugaaagg

SEQ ID NO: 3164717 - RNA, 19 nt, Artificial Sequence
  Description of Artificial Sequence: Synthetic oligonucleotide
auagcaacguauugcaguc

SEQ ID NO: 3164718 - RNA, 19 nt, Artificial Sequence
  Description of Artificial Sequence: Synthetic oligonucleotide
augauggcgucccaggacc

SEQ ID NO: 3164719 - RNA, 19 nt, Artificial Sequence
  Description of Artificial Sequence: Synthetic oligonucleotide
accugcaugaaccuagaac

SEQ ID NO: 3164720 - RNA, 19 nt, Artificial Sequence
  Description of Artificial Sequence: Synthetic oligonucleotide
gagauuaugggguuggaca

SEQ ID NO: 3164721 - RNA, 19 nt, Artificial Sequence
  Description of Artificial Sequence: Synthetic oligonucleotide
gaacggauaucuucgaaug

SEQ ID NO: 3164722 - RNA, 19 nt, Artificial Sequence
  Description of Artificial Sequence: Synthetic oligonucleotide
gauaucuucgaauggagaa

SEQ ID NO: 3164723 - RNA, 19 nt, Artificial Sequence
  Description of Artificial Sequence: Synthetic oligonucleotide
ucauauagaggaaggccag

SEQ ID NO: 3164724 - RNA, 19 nt, Artificial Sequence
  Description of Artificial Sequence: Synthetic oligonucleotide
aauguucuauaggaacucg

SEQ ID NO: 3164725 - RNA, 19 nt, Artificial Sequence
  Description of Artificial Sequence: Synthetic oligonucleotide
accuagaacggauaucuuc

SEQ ID NO: 3164726 - RNA, 19 nt, Artificial Sequence
  Description of Artificial Sequence: Synthetic oligonucleotide
gagauaaugaacaccuaag

SEQ ID NO: 3164727 - RNA, 19 nt, Artificial Sequence
  Description of Artificial Sequence: Synthetic oligonucleotide
uguaaagacggucucuggu

SEQ ID NO: 3164728 - RNA, 19 nt, Artificial Sequence
  Description of Artificial Sequence: Synthetic oligonucleotide
caaagaacaacagcaaagc

SEQ ID NO: 3164729 - RNA, 19 nt, Artificial Sequence
  Description of Artificial Sequence: Synthetic oligonucleotide
aggagacugaaaucaacac

SEQ ID NO: 3164730 - RNA, 19 nt, Artificial Sequence
  Description of Artificial Sequence: Synthetic oligonucleotide
uuguuaaggauccgcagca

SEQ ID NO: 3164731 - RNA, 19 nt, Artificial Sequence
  Description of Artificial Sequence: Synthetic oligonucleotide
augcagaaggucaagaagg

SEQ ID NO: 3164732 - RNA, 19 nt, Artificial Sequence
  Description of Artificial Sequence: Synthetic oligonucleotide
aaggucaagaagguaguuc

SEQ ID NO: 3164733 - RNA, 19 nt, Artificial Sequence
  Description of Artificial Sequence: Synthetic oligonucleotide
auauagaggaaggccaggc

SEQ ID NO: 3164734 - RNA, 19 nt, Artificial Sequence
  Description of Artificial Sequence: Synthetic oligonucleotide
ucuacauguaaccaucuuu

SEQ ID NO: 3164735 - RNA, 19 nt, Artificial Sequence
  Description of Artificial Sequence: Synthetic oligonucleotide
aaaugcagaaggucaagaa

SEQ ID NO: 3164736 - RNA, 19 nt, Artificial Sequence
  Description of Artificial Sequence: Synthetic oligonucleotide
acuuuugugacuaucuuug

SEQ ID NO: 3164737 - RNA, 19 nt, Artificial Sequence
  Description of Artificial Sequence: Synthetic oligonucleotide
uuuugccgaggucagguag

SEQ ID NO: 3164738 - RNA, 19 nt, Artificial Sequence
  Description of Artificial Sequence: Synthetic oligonucleotide
gaugcucccaucaaaacac

SEQ ID NO: 3164739 - RNA, 19 nt, Artificial Sequence
  Description of Artificial Sequence: Synthetic oligonucleotide
aggucaagaagguaguuca

SEQ ID NO: 3164740 - RNA, 19 nt, Artificial Sequence
  Description of Artificial Sequence: Synthetic oligonucleotide
aguaggagaccacucaaug

SEQ ID NO: 3164741 - RNA, 19 nt, Artificial Sequence
  Description of Artificial Sequence: Synthetic oligonucleotide
cuauguuacacaacagaug

SEQ ID NO: 3164742 - RNA, 19 nt, Artificial Sequence
  Description of Artificial Sequence: Synthetic oligonucleotide
cagaacaagagccugcuac

SEQ ID NO: 3164743 - RNA, 19 nt, Artificial Sequence
  Description of Artificial Sequence: Synthetic oligonucleotide
uggcauguuacaaaauaac

SEQ ID NO: 3164744 - RNA, 19 nt, Artificial Sequence
  Description of Artificial Sequence: Synthetic oligonucleotide
cuaucuuugcucuagaaua

SEQ ID NO: 3164745 - RNA, 19 nt, Artificial Sequence
  Description of Artificial Sequence: Synthetic oligonucleotide
acauaagauggcccauugc

SEQ ID NO: 3164746 - RNA, 19 nt, Artificial Sequence
  Description of Artificial Sequence: Synthetic oligonucleotide
uaguacagaauaagcacac

SEQ ID NO: 3164747 - RNA, 19 nt, Artificial Sequence
  Description of Artificial Sequence: Synthetic oligonucleotide
aucgaaggaccaaagaccg

SEQ ID NO: 3164748 - RNA, 19 nt, Artificial Sequence
  Description of Artificial Sequence: Synthetic oligonucleotide
aacuuuugugacuaucuuu

SEQ ID NO: 3164749 - RNA, 19 nt, Artificial Sequence
  Description of Artificial Sequence: Synthetic oligonucleotide
gaucaaacaggaaagcuga

SEQ ID NO: 3164750 - RNA, 19 nt, Artificial Sequence
  Description of Artificial Sequence: Synthetic oligonucleotide
ccaaacuuagcuaacacug

SEQ ID NO: 3164751 - RNA, 19 nt, Artificial Sequence
  Description of Artificial Sequence: Synthetic oligonucleotide
ucagguaguuuguuaagga

SEQ ID NO: 3164752 - RNA, 19 nt, Artificial Sequence
  Description of Artificial Sequence: Synthetic oligonucleotide
ugacuuagguuagugagug

SEQ ID NO: 3164753 - RNA, 19 nt, Artificial Sequence
  Description of Artificial Sequence: Synthetic oligonucleotide
aacucgucaaaagaguccu

SEQ ID NO: 3164754 - RNA, 19 nt, Artificial Sequence
  Description of Artificial Sequence: Synthetic oligonucleotide
aaggaauuuugccgagguc

SEQ ID NO: 3164755 - RNA, 19 nt, Artificial Sequence
  Description of Artificial Sequence: Synthetic oligonucleotide
uggcccauugccacaaagg

SEQ ID NO: 3164756 - RNA, 19 nt, Artificial Sequence
  Description of Artificial Sequence: Synthetic oligonucleotide
uacauaagauggcccauug

SEQ ID NO: 3164757 - RNA, 19 nt, Artificial Sequence
  Description of Artificial Sequence: Synthetic oligonucleotide
cucaaggacaaagaaagug

SEQ ID NO: 3164758 - RNA, 19 nt, Artificial Sequence
  Description of Artificial Sequence: Synthetic oligonucleotide
agagccugcuaccaccagc

SEQ ID NO: 3164759 - RNA, 19 nt, Artificial Sequence
  Description of Artificial Sequence: Synthetic oligonucleotide
aauaacuggcaaaacaguu

SEQ ID NO: 3164760 - RNA, 19 nt, Artificial Sequence
  Description of Artificial Sequence: Synthetic oligonucleotide
uauagaggaaggccaggcc

SEQ ID NO: 3164761 - RNA, 19 nt, Artificial Sequence
  Description of Artificial Sequence: Synthetic oligonucleotide
agaugcucccaucaaaaca

SEQ ID NO: 3164762 - RNA, 19 nt, Artificial Sequence
  Description of Artificial Sequence: Synthetic oligonucleotide
aaauaacuggcaaaacagu

SEQ ID NO: 3164763 - RNA, 19 nt, Artificial Sequence
  Description of Artificial Sequence: Synthetic oligonucleotide
cacacacaagaucaaacag

SEQ ID NO: 3164764 - RNA, 19 nt, Artificial Sequence
  Description of Artificial Sequence: Synthetic oligonucleotide
aaacuuagcuaacacugua

SEQ ID NO: 3164765 - RNA, 19 nt, Artificial Sequence
  Description of Artificial Sequence: Synthetic oligonucleotide
uuuugcugacuuagguuag

SEQ ID NO: 3164766 - RNA, 19 nt, Artificial Sequence
  Description of Artificial Sequence: Synthetic oligonucleotide
agaucaaacaggaaagcug

SEQ ID NO: 3164767 - RNA, 19 nt, Artificial Sequence
  Description of Artificial Sequence: Synthetic oligonucleotide
uaacuggcaaaacaguuuu

SEQ ID NO: 3164768 - RNA, 19 nt, Artificial Sequence
  Description of Artificial Sequence: Synthetic oligonucleotide
aagugcaucaaaagugaag

SEQ ID NO: 3164769 - RNA, 19 nt, Artificial Sequence
  Description of Artificial Sequence: Synthetic oligonucleotide
agagcagacugacagagau

SEQ ID NO: 3164770 - RNA, 19 nt, Artificial Sequence
  Description of Artificial Sequence: Synthetic oligonucleotide
agguaguuuguuaaggauc

SEQ ID NO: 3164771 - RNA, 19 nt, Artificial Sequence
  Description of Artificial Sequence: Synthetic oligonucleotide
ugauaaugccucuuucaga

SEQ ID NO: 3164772 - RNA, 19 nt, Artificial Sequence
  Description of Artificial Sequence: Synthetic oligonucleotide
uguuagguugauuuucauc

SEQ ID NO: 3164773 - RNA, 19 nt, Artificial Sequence
  Description of Artificial Sequence: Synthetic oligonucleotide
caaaucggaaauacauaag

SEQ ID NO: 3164774 - RNA, 19 nt, Artificial Sequence
  Description of Artificial Sequence: Synthetic oligonucleotide
cuguaguacagaauaagca

SEQ ID NO: 3164775 - RNA, 19 nt, Artificial Sequence
  Description of Artificial Sequence: Synthetic oligonucleotide
aacguauugcagucagucu

SEQ ID NO: 3164776 - RNA, 19 nt, Artificial Sequence
  Description of Artificial Sequence: Synthetic oligonucleotide
agcaacguauugcagucag

SEQ ID NO: 3164777 - RNA, 19 nt, Artificial Sequence
  Description of Artificial Sequence: Synthetic oligonucleotide
uguaaccaucuuuugcuga

SEQ ID NO: 3164778 - RNA, 19 nt, Artificial Sequence
  Description of Artificial Sequence: Synthetic oligonucleotide
uuauaguaggagaccacuc

SEQ ID NO: 3164779 - RNA, 19 nt, Artificial Sequence
  Description of Artificial Sequence: Synthetic oligonucleotide
ugcagagauaaugaacacc

SEQ ID NO: 3164780 - RNA, 19 nt, Artificial Sequence
  Description of Artificial Sequence: Synthetic oligonucleotide
acugucauauagaggaagg

SEQ ID NO: 3164781 - RNA, 19 nt, Artificial Sequence
  Description of Artificial Sequence: Synthetic oligonucleotide
cagaccaguccgaacaagg

SEQ ID NO: 3164782 - RNA, 19 nt, Artificial Sequence
  Description of Artificial Sequence: Synthetic oligonucleotide
auguguuagguugauuuuc

SEQ ID NO: 3164783 - RNA, 19 nt, Artificial Sequence
  Description of Artificial Sequence: Synthetic oligonucleotide
caaagaccgauucuagcag

SEQ ID NO: 3164784 - RNA, 19 nt, Artificial Sequence
  Description of Artificial Sequence: Synthetic oligonucleotide
aaugucucgauacaccugc

SEQ ID NO: 3164785 - RNA, 19 nt, Artificial Sequence
  Description of Artificial Sequence: Synthetic oligonucleotide
ugaccaauaagaauagucg

SEQ ID NO: 3164786 - RNA, 19 nt, Artificial Sequence
  Description of Artificial Sequence: Synthetic oligonucleotide
aauaagaauagucgaaggu

SEQ ID NO: 3164787 - RNA, 19 nt, Artificial Sequence
  Description of Artificial Sequence: Synthetic oligonucleotide
ugugugaccaauaagaaua

SEQ ID NO: 3164788 - RNA, 19 nt, Artificial Sequence
  Description of Artificial Sequence: Synthetic oligonucleotide
uugggauugaugauggagg

SEQ ID NO: 3164789 - RNA, 19 nt, Artificial Sequence
  Description of Artificial Sequence: Synthetic oligonucleotide
uaagaauagucgaagguga

SEQ ID NO: 3164790 - RNA, 19 nt, Artificial Sequence
  Description of Artificial Sequence: Synthetic oligonucleotide
cacauuguagccuucaaag

SEQ ID NO: 3164791 - RNA, 19 nt, Artificial Sequence
  Description of Artificial Sequence: Synthetic oligonucleotide
ugcccauaggcaaagaugc

SEQ ID NO: 3164792 - RNA, 19 nt, Artificial Sequence
  Description of Artificial Sequence: Synthetic oligonucleotide
uguugagaugcaaacugcg

SEQ ID NO: 3164793 - RNA, 19 nt, Artificial Sequence
  Description of Artificial Sequence: Synthetic oligonucleotide
cucacugccacuuuuacug

SEQ ID NO: 3164794 - RNA, 19 nt, Artificial Sequence
  Description of Artificial Sequence: Synthetic oligonucleotide
gaaggugaagcucuugggg

SEQ ID NO: 3164795 - RNA, 19 nt, Artificial Sequence
  Description of Artificial Sequence: Synthetic oligonucleotide
aagugugugaccaauaaga

SEQ ID NO: 3164796 - RNA, 19 nt, Artificial Sequence
  Description of Artificial Sequence: Synthetic oligonucleotide
cauuguagccuucaaaggc

SEQ ID NO: 3164797 - RNA, 19 nt, Artificial Sequence
  Description of Artificial Sequence: Synthetic oligonucleotide
ucgaaggugaagcucuugg

SEQ ID NO: 3164798 - RNA, 19 nt, Artificial Sequence
  Description of Artificial Sequence: Synthetic oligonucleotide
auaagaauagucgaaggug

SEQ ID NO: 3164799 - RNA, 19 nt, Artificial Sequence
  Description of Artificial Sequence: Synthetic oligonucleotide
acaccugcuguugagaugc

SEQ ID NO: 3164800 - RNA, 19 nt, Artificial Sequence
  Description of Artificial Sequence: Synthetic oligonucleotide
uccaacucagagcugaggc

SEQ ID NO: 3164801 - RNA, 19 nt, Artificial Sequence
  Description of Artificial Sequence: Synthetic oligonucleotide
agaugcaaacugcggaucc

SEQ ID NO: 3164802 - RNA, 19 nt, Artificial Sequence
  Description of Artificial Sequence: Synthetic oligonucleotide
gaauagucgaaggugaagc

SEQ ID NO: 3164803 - RNA, 19 nt, Artificial Sequence
  Description of Artificial Sequence: Synthetic oligonucleotide
uuuuacugaggcaccagcc

SEQ ID NO: 3164804 - RNA, 19 nt, Artificial Sequence
  Description of Artificial Sequence: Synthetic oligonucleotide
uguaggacuucccagcccc

SEQ ID NO: 3164805 - RNA, 19 nt, Artificial Sequence
  Description of Artificial Sequence: Synthetic oligonucleotide
caauaagaauagucgaagg

SEQ ID NO: 3164806 - RNA, 19 nt, Artificial Sequence
  Description of Artificial Sequence: Synthetic oligonucleotide
uugagaugcaaacugcgga

SEQ ID NO: 3164807 - RNA, 19 nt, Artificial Sequence
  Description of Artificial Sequence: Synthetic oligonucleotide
uuugggauugaugauggag

SEQ ID NO: 3164808 - RNA, 19 nt, Artificial Sequence
  Description of Artificial Sequence: Synthetic oligonucleotide
aaaggcgugcagcagcauc

SEQ ID NO: 3164809 - RNA, 19 nt, Artificial Sequence
  Description of Artificial Sequence: Synthetic oligonucleotide
aaacugcggauccuccacc

SEQ ID NO: 3164810 - RNA, 19 nt, Artificial Sequence
  Description of Artificial Sequence: Synthetic oligonucleotide
uuacccugcaugcugacca

SEQ ID NO: 3164811 - RNA, 19 nt, Artificial Sequence
  Description of Artificial Sequence: Synthetic oligonucleotide
agggcaguaagggaaaccc

SEQ ID NO: 3164812 - RNA, 19 nt, Artificial Sequence
  Description of Artificial Sequence: Synthetic oligonucleotide
aauagucgaaggugaagcu

SEQ ID NO: 3164813 - RNA, 19 nt, Artificial Sequence
  Description of Artificial Sequence: Synthetic oligonucleotide
uuuacugaggcaccagcca

SEQ ID NO: 3164814 - RNA, 19 nt, Artificial Sequence
  Description of Artificial Sequence: Synthetic oligonucleotide
uucuccaaugucucgauac

SEQ ID NO: 3164815 - RNA, 19 nt, Artificial Sequence
  Description of Artificial Sequence: Synthetic oligonucleotide
uucaaaggcgugcagcagc

SEQ ID NO: 3164816 - RNA, 19 nt, Artificial Sequence
  Description of Artificial Sequence: Synthetic oligonucleotide
aguucuggcugccaccggc

SEQ ID NO: 3164817 - RNA, 19 nt, Artificial Sequence
  Description of Artificial Sequence: Synthetic oligonucleotide
agcuccauccuacacuugg

SEQ ID NO: 3164818 - RNA, 19 nt, Artificial Sequence
  Description of Artificial Sequence: Synthetic oligonucleotide
uaagggaaacccagauugg

SEQ ID NO: 3164819 - RNA, 19 nt, Artificial Sequence
  Description of Artificial Sequence: Synthetic oligonucleotide
ggauugaugauggaggugg

SEQ ID NO: 3164820 - RNA, 19 nt, Artificial Sequence
  Description of Artificial Sequence: Synthetic oligonucleotide
uacacuuggggccuggcca

SEQ ID NO: 3164821 - RNA, 19 nt, Artificial Sequence
  Description of Artificial Sequence: Synthetic oligonucleotide
aagggaaacccagauuggg

SEQ ID NO: 3164822 - RNA, 19 nt, Artificial Sequence
  Description of Artificial Sequence: Synthetic oligonucleotide
auuguagccuucaaaggcg

SEQ ID NO: 3164823 - RNA, 19 nt, Artificial Sequence
  Description of Artificial Sequence: Synthetic oligonucleotide
uagucgaaggugaagcucu

SEQ ID NO: 3164824 - RNA, 19 nt, Artificial Sequence
  Description of Artificial Sequence: Synthetic oligonucleotide
ucagagcugaggcacaacu

SEQ ID NO: 3164825 - RNA, 19 nt, Artificial Sequence
  Description of Artificial Sequence: Synthetic oligonucleotide
gaagugugugaccaauaag

SEQ ID NO: 3164826 - RNA, 19 nt, Artificial Sequence
  Description of Artificial Sequence: Synthetic oligonucleotide
aacugcggauccuccaccg

SEQ ID NO: 3164827 - RNA, 19 nt, Artificial Sequence
  Description of Artificial Sequence: Synthetic oligonucleotide
gaccaauaagaauagucga

SEQ ID NO: 3164828 - RNA, 19 nt, Artificial Sequence
  Description of Artificial Sequence: Synthetic oligonucleotide
aucaguucuggcugccacc

SEQ ID NO: 3164829 - RNA, 19 nt, Artificial Sequence
  Description of Artificial Sequence: Synthetic oligonucleotide
agagaagucaggaggcacc

SEQ ID NO: 3164830 - RNA, 19 nt, Artificial Sequence
  Description of Artificial Sequence: Synthetic oligonucleotide
acacuuggcauccuggcug

SEQ ID NO: 3164831 - RNA, 19 nt, Artificial Sequence
  Description of Artificial Sequence: Synthetic oligonucleotide
agcuccaaaguucugucug

SEQ ID NO: 3164832 - RNA, 19 nt, Artificial Sequence
  Description of Artificial Sequence: Synthetic oligonucleotide
aacuccugcccuccucagc

SEQ ID NO: 3164833 - RNA, 19 nt, Artificial Sequence
  Description of Artificial Sequence: Synthetic oligonucleotide
uugaugauggagguggugu

SEQ ID NO: 3164834 - RNA, 19 nt, Artificial Sequence
  Description of Artificial Sequence: Synthetic oligonucleotide
cuuuuacugaggcaccagc

SEQ ID NO: 3164835 - RNA, 19 nt, Artificial Sequence
  Description of Artificial Sequence: Synthetic oligonucleotide
ucaguucuggcugccaccg

SEQ ID NO: 3164836 - RNA, 19 nt, Artificial Sequence
  Description of Artificial Sequence: Synthetic oligonucleotide
uccuggucccagaucaggg

SEQ ID NO: 3164837 - RNA, 19 nt, Artificial Sequence
  Description of Artificial Sequence: Synthetic oligonucleotide
ugguguaggacuucccagc

SEQ ID NO: 3164838 - RNA, 19 nt, Artificial Sequence
  Description of Artificial Sequence: Synthetic oligonucleotide
uguagcuccaaaguucugu

SEQ ID NO: 3164839 - RNA, 19 nt, Artificial Sequence
  Description of Artificial Sequence: Synthetic oligonucleotide
uccaaaguucugucugggg

SEQ ID NO: 3164840 - RNA, 19 nt, Artificial Sequence
  Description of Artificial Sequence: Synthetic oligonucleotide
aaaguucugucuggggcuc

SEQ ID NO: 3164841 - RNA, 19 nt, Artificial Sequence
  Description of Artificial Sequence: Synthetic oligonucleotide
aagggccgaacccucacug

SEQ ID NO: 3164842 - RNA, 19 nt, Artificial Sequence
  Description of Artificial Sequence: Synthetic oligonucleotide
gcuguugagaugcaaacug

SEQ ID NO: 3164843 - RNA, 19 nt, Artificial Sequence
  Description of Artificial Sequence: Synthetic oligonucleotide
cuguugagaugcaaacugc

SEQ ID NO: 3164844 - RNA, 19 nt, Artificial Sequence
  Description of Artificial Sequence: Synthetic oligonucleotide
ugagaugcaaacugcggau

SEQ ID NO: 3164845 - RNA, 19 nt, Artificial Sequence
  Description of Artificial Sequence: Synthetic oligonucleotide
auagucgaaggugaagcuc

SEQ ID NO: 3164846 - RNA, 19 nt, Artificial Sequence
  Description of Artificial Sequence: Synthetic oligonucleotide
gugaccaauaagaauaguc

SEQ ID NO: 3164847 - RNA, 19 nt, Artificial Sequence
  Description of Artificial Sequence: Synthetic oligonucleotide
ucaaaggcgugcagcagca

SEQ ID NO: 3164848 - RNA, 19 nt, Artificial Sequence
  Description of Artificial Sequence: Synthetic oligonucleotide
ucuccaaugucucgauaca

SEQ ID NO: 3164849 - RNA, 19 nt, Artificial Sequence
  Description of Artificial Sequence: Synthetic oligonucleotide
augguguaggacuucccag

SEQ ID NO: 3164850 - RNA, 19 nt, Artificial Sequence
  Description of Artificial Sequence: Synthetic oligonucleotide
guugagaugcaaacugcgg

SEQ ID NO: 3164851 - RNA, 19 nt, Artificial Sequence
  Description of Artificial Sequence: Synthetic oligonucleotide
aggaggcaccuguagcucc

SEQ ID NO: 3164852 - RNA, 19 nt, Artificial Sequence
  Description of Artificial Sequence: Synthetic oligonucleotide
ggugguguuacccugcaug

SEQ ID NO: 3164853 - RNA, 19 nt, Artificial Sequence
  Description of Artificial Sequence: Synthetic oligonucleotide
gggcagagaagucaggagg

SEQ ID NO: 3164854 - RNA, 19 nt, Artificial Sequence
  Description of Artificial Sequence: Synthetic oligonucleotide
gauggaggugguguuaccc

SEQ ID NO: 3164855 - RNA, 19 nt, Artificial Sequence
  Description of Artificial Sequence: Synthetic oligonucleotide
accagcagggcaguaaggg

SEQ ID NO: 3164856 - RNA, 19 nt, Artificial Sequence
  Description of Artificial Sequence: Synthetic oligonucleotide
uuggcauccuggcuggucu

SEQ ID NO: 3164857 - RNA, 19 nt, Artificial Sequence
  Description of Artificial Sequence: Synthetic oligonucleotide
cacacacuuggcauccugg

SEQ ID NO: 3164858 - RNA, 19 nt, Artificial Sequence
  Description of Artificial Sequence: Synthetic oligonucleotide
ucucuucuccaaugucucg

SEQ ID NO: 3164859 - RNA, 19 nt, Artificial Sequence
  Description of Artificial Sequence: Synthetic oligonucleotide
ugggauugaugauggaggu

SEQ ID NO: 3164860 - RNA, 19 nt, Artificial Sequence
  Description of Artificial Sequence: Synthetic oligonucleotide
auccuggcuggucucacgg

SEQ ID NO: 3164861 - RNA, 19 nt, Artificial Sequence
  Description of Artificial Sequence: Synthetic oligonucleotide
uaugggaagcuccauccua

SEQ ID NO: 3164862 - RNA, 19 nt, Artificial Sequence
  Description of Artificial Sequence: Synthetic oligonucleotide
cagccaucgcuucagaaac

SEQ ID NO: 3164863 - RNA, 19 nt, Artificial Sequence
  Description of Artificial Sequence: Synthetic oligonucleotide
augauggaggugguguuac

SEQ ID NO: 3164864 - RNA, 19 nt, Artificial Sequence
  Description of Artificial Sequence: Synthetic oligonucleotide
agaauagucgaaggugaag

SEQ ID NO: 3164865 - RNA, 19 nt, Artificial Sequence
  Description of Artificial Sequence: Synthetic oligonucleotide
uuacugaggcaccagccau

SEQ ID NO: 3164866 - RNA, 19 nt, Artificial Sequence
  Description of Artificial Sequence: Synthetic oligonucleotide
agaaacuccugcccuccuc

SEQ ID NO: 3164867 - RNA, 19 nt, Artificial Sequence
  Description of Artificial Sequence: Synthetic oligonucleotide
acaccagcagggcaguaag

SEQ ID NO: 3164868 - RNA, 19 nt, Artificial Sequence
  Description of Artificial Sequence: Synthetic oligonucleotide
ucgcuucagaaacuccugc

SEQ ID NO: 3164869 - RNA, 19 nt, Artificial Sequence
  Description of Artificial Sequence: Synthetic oligonucleotide
ugucucgauacaccugcug

SEQ ID NO: 3164870 - RNA, 19 nt, Artificial Sequence
  Description of Artificial Sequence: Synthetic oligonucleotide
gcuguaucaguucuggcug

SEQ ID NO: 3164871 - RNA, 19 nt, Artificial Sequence
  Description of Artificial Sequence: Synthetic oligonucleotide
gaaacuccugcccuccuca

SEQ ID NO: 3164872 - RNA, 19 nt, Artificial Sequence
  Description of Artificial Sequence: Synthetic oligonucleotide
acacuuggggccuggccac

SEQ ID NO: 3164873 - RNA, 19 nt, Artificial Sequence
  Description of Artificial Sequence: Synthetic oligonucleotide
guguccuggucccagauca

SEQ ID NO: 3164874 - RNA, 19 nt, Artificial Sequence
  Description of Artificial Sequence: Synthetic oligonucleotide
acuccugcccuccucagcu

SEQ ID NO: 3164875 - RNA, 19 nt, Artificial Sequence
  Description of Artificial Sequence: Synthetic oligonucleotide
cuguuugggauugaugaug

SEQ ID NO: 3164876 - RNA, 19 nt, Artificial Sequence
  Description of Artificial Sequence: Synthetic oligonucleotide
cugcuguugagaugcaaac

SEQ ID NO: 3164877 - RNA, 19 nt, Artificial Sequence
  Description of Artificial Sequence: Synthetic oligonucleotide
agcaucucuucuccaaugu

SEQ ID NO: 3164878 - RNA, 19 nt, Artificial Sequence
  Description of Artificial Sequence: Synthetic oligonucleotide
acaacugcccucgcugccc

SEQ ID NO: 3164879 - RNA, 19 nt, Artificial Sequence
  Description of Artificial Sequence: Synthetic oligonucleotide
cucgccgccccacucaugg

SEQ ID NO: 3164880 - RNA, 19 nt, Artificial Sequence
  Description of Artificial Sequence: Synthetic oligonucleotide
cuccauccuacacuugggg

SEQ ID NO: 3164881 - RNA, 19 nt, Artificial Sequence
  Description of Artificial Sequence: Synthetic oligonucleotide
augggaagcuccauccuac

SEQ ID NO: 3164882 - RNA, 19 nt, Artificial Sequence
  Description of Artificial Sequence: Synthetic oligonucleotide
agucaggaggcaccuguag

SEQ ID NO: 3164883 - RNA, 19 nt, Artificial Sequence
  Description of Artificial Sequence: Synthetic oligonucleotide
caacucagagcugaggcac

SEQ ID NO: 3164884 - RNA, 19 nt, Artificial Sequence
  Description of Artificial Sequence: Synthetic oligonucleotide
agaagcauaggcuaagacc

SEQ ID NO: 3164885 - RNA, 19 nt, Artificial Sequence
  Description of Artificial Sequence: Synthetic oligonucleotide
cuuacuuaggccaaaaggc

SEQ ID NO: 3164886 - RNA, 19 nt, Artificial Sequence
  Description of Artificial Sequence: Synthetic oligonucleotide
ucagggacaauucaggagg

SEQ ID NO: 3164887 - RNA, 19 nt, Artificial Sequence
  Description of Artificial Sequence: Synthetic oligonucleotide
uguuuuaacaaucccagug

SEQ ID NO: 3164888 - RNA, 19 nt, Artificial Sequence
  Description of Artificial Sequence: Synthetic oligonucleotide
ucuguuuuaacaaucccag

SEQ ID NO: 3164889 - RNA, 19 nt, Artificial Sequence
  Description of Artificial Sequence: Synthetic oligonucleotide
uuaacaaucccagugacag

SEQ ID NO: 3164890 - RNA, 19 nt, Artificial Sequence
  Description of Artificial Sequence: Synthetic oligonucleotide
gaagcauaggcuaagaccc

SEQ ID NO: 3164891 - RNA, 19 nt, Artificial Sequence
  Description of Artificial Sequence: Synthetic oligonucleotide
uaggcuaagacccacaccu

SEQ ID NO: 3164892 - RNA, 19 nt, Artificial Sequence
  Description of Artificial Sequence: Synthetic oligonucleotide
aacccagugauaaugggcc

SEQ ID NO: 3164893 - RNA, 19 nt, Artificial Sequence
  Description of Artificial Sequence: Synthetic oligonucleotide
aggagaauggucugggugc

SEQ ID NO: 3164894 - RNA, 19 nt, Artificial Sequence
  Description of Artificial Sequence: Synthetic oligonucleotide
  modified_base (13)..(13): a, c, u, g, unknown or other
cuuugcugggaanagaccc

SEQ ID NO: 3164895 - RNA, 19 nt, Artificial Sequence
  Description of Artificial Sequence: Synthetic oligonucleotide
uucuguuuuaacaauccca

SEQ ID NO: 3164896 - RNA, 19 nt, Artificial Sequence
  Description of Artificial Sequence: Synthetic oligonucleotide
uaguguaugaagaugcugu

SEQ ID NO: 3164897 - RNA, 19 nt, Artificial Sequence
  Description of Artificial Sequence: Synthetic oligonucleotide
uuacuuaggccaaaaggcc

SEQ ID NO: 3164898 - RNA, 19 nt, Artificial Sequence
  Description of Artificial Sequence: Synthetic oligonucleotide
ucuucuguuuuaacaaucc

SEQ ID NO: 3164899 - RNA, 19 nt, Artificial Sequence
  Description of Artificial Sequence: Synthetic oligonucleotide
aaacccagugauaaugggc

SEQ ID NO: 3164900 - RNA, 19 nt, Artificial Sequence
  Description of Artificial Sequence: Synthetic oligonucleotide
uucaggaggaaucaccagc

SEQ ID NO: 3164901 - RNA, 19 nt, Artificial Sequence
  Description of Artificial Sequence: Synthetic oligonucleotide
gacagaacucuccagaaac

SEQ ID NO: 3164902 - RNA, 19 nt, Artificial Sequence
  Description of Artificial Sequence: Synthetic oligonucleotide
  modified_base (12)..(12): a, c, u, g, unknown or other
uuugcugggaanagacccg

SEQ ID NO: 3164903 - RNA, 19 nt, Artificial Sequence
  Description of Artificial Sequence: Synthetic oligonucleotide
acugagccgacuuugcugg

SEQ ID NO: 3164904 - RNA, 19 nt, Artificial Sequence
  Description of Artificial Sequence: Synthetic oligonucleotide
aagucaggaggccagggag

SEQ ID NO: 3164905 - RNA, 19 nt, Artificial Sequence
  Description of Artificial Sequence: Synthetic oligonucleotide
acuuucuucuguuuuaaca

SEQ ID NO: 3164906 - RNA, 19 nt, Artificial Sequence
  Description of Artificial Sequence: Synthetic oligonucleotide
gauaaugggccucugcuac

SEQ ID NO: 3164907 - RNA, 19 nt, Artificial Sequence
  Description of Artificial Sequence: Synthetic oligonucleotide
agugauaaugggccucugc

SEQ ID NO: 3164908 - RNA, 19 nt, Artificial Sequence
  Description of Artificial Sequence: Synthetic oligonucleotide
uccaaggcucccuagauca

SEQ ID NO: 3164909 - RNA, 19 nt, Artificial Sequence
  Description of Artificial Sequence: Synthetic oligonucleotide
uuuuaacaaucccagugac

SEQ ID NO: 3164910 - RNA, 19 nt, Artificial Sequence
  Description of Artificial Sequence: Synthetic oligonucleotide
gcuuacuuaggccaaaagg

SEQ ID NO: 3164911 - RNA, 19 nt, Artificial Sequence
  Description of Artificial Sequence: Synthetic oligonucleotide
ucaggaggaaucaccagcc

SEQ ID NO: 3164912 - RNA, 19 nt, Artificial Sequence
  Description of Artificial Sequence: Synthetic oligonucleotide
agccuuugggcacagcacc

SEQ ID NO: 3164913 - RNA, 19 nt, Artificial Sequence
  Description of Artificial Sequence: Synthetic oligonucleotide
uguaugaagaugcugucuu

SEQ ID NO: 3164914 - RNA, 19 nt, Artificial Sequence
  Description of Artificial Sequence: Synthetic oligonucleotide
cacaguuugguuuacuuuc

SEQ ID NO: 3164915 - RNA, 19 nt, Artificial Sequence
  Description of Artificial Sequence: Synthetic oligonucleotide
aaggccugaggacaggcag

SEQ ID NO: 3164916 - RNA, 19 nt, Artificial Sequence
  Description of Artificial Sequence: Synthetic oligonucleotide
aguuugguuuacuuucuuc

SEQ ID NO: 3164917 - RNA, 19 nt, Artificial Sequence
  Description of Artificial Sequence: Synthetic oligonucleotide
uuuaacaaucccagugaca

SEQ ID NO: 3164918 - RNA, 19 nt, Artificial Sequence
  Description of Artificial Sequence: Synthetic oligonucleotide
ucugcuacagagaagcaua

SEQ ID NO: 3164919 - RNA, 19 nt, Artificial Sequence
  Description of Artificial Sequence: Synthetic oligonucleotide
caauucaggaggaaucacc

SEQ ID NO: 3164920 - RNA, 19 nt, Artificial Sequence
  Description of Artificial Sequence: Synthetic oligonucleotide
uacuuaggccaaaaggccc

SEQ ID NO: 3164921 - RNA, 19 nt, Artificial Sequence
  Description of Artificial Sequence: Synthetic oligonucleotide
  modified_base (7)..(7): a, c, u, g, unknown or other
ugggaanagacccgaaguc

SEQ ID NO: 3164922 - RNA, 19 nt, Artificial Sequence
  Description of Artificial Sequence: Synthetic oligonucleotide
ucuccagaaacccagugau

SEQ ID NO: 3164923 - RNA, 19 nt, Artificial Sequence
  Description of Artificial Sequence: Synthetic oligonucleotide
uuugguuuacuuucuucug

SEQ ID NO: 3164924 - RNA, 19 nt, Artificial Sequence
  Description of Artificial Sequence: Synthetic oligonucleotide
agugacagaacucuccaga

SEQ ID NO: 3164925 - RNA, 19 nt, Artificial Sequence
  Description of Artificial Sequence: Synthetic oligonucleotide
aaaaggcccugguuguggg

SEQ ID NO: 3164926 - RNA, 19 nt, Artificial Sequence
  Description of Artificial Sequence: Synthetic oligonucleotide
aacaaucccagugacagaa

SEQ ID NO: 3164927 - RNA, 19 nt, Artificial Sequence
  Description of Artificial Sequence: Synthetic oligonucleotide
ggaaucaccagccuuuggg

SEQ ID NO: 3164928 - RNA, 19 nt, Artificial Sequence
  Description of Artificial Sequence: Synthetic oligonucleotide
aauucaggaggaaucacca

SEQ ID NO: 3164929 - RNA, 19 nt, Artificial Sequence
  Description of Artificial Sequence: Synthetic oligonucleotide
gaaacccagugauaauggg

SEQ ID NO: 3164930 - RNA, 19 nt, Artificial Sequence
  Description of Artificial Sequence: Synthetic oligonucleotide
auaggcuaagacccacacc

SEQ ID NO: 3164931 - RNA, 19 nt, Artificial Sequence
  Description of Artificial Sequence: Synthetic oligonucleotide
ucagugggaauccaaggcu

SEQ ID NO: 3164932 - RNA, 19 nt, Artificial Sequence
  Description of Artificial Sequence: Synthetic oligonucleotide
ucucagugggaauccaagg

SEQ ID NO: 3164933 - RNA, 19 nt, Artificial Sequence
  Description of Artificial Sequence: Synthetic oligonucleotide
gagagucuaguguaugaag

SEQ ID NO: 3164934 - RNA, 19 nt, Artificial Sequence
  Description of Artificial Sequence: Synthetic oligonucleotide
guuuuaacaaucccaguga

SEQ ID NO: 3164935 - RNA, 19 nt, Artificial Sequence
  Description of Artificial Sequence: Synthetic oligonucleotide
aguguaugaagaugcuguc

SEQ ID NO: 3164936 - RNA, 19 nt, Artificial Sequence
  Description of Artificial Sequence: Synthetic oligonucleotide
  modified_base (2)..(2): a, c, u, g, unknown or other
anagacccgaagucaggag

SEQ ID NO: 3164937 - RNA, 19 nt, Artificial Sequence
  Description of Artificial Sequence: Synthetic oligonucleotide
cuucugguccaucucaggg

SEQ ID NO: 3164938 - RNA, 19 nt, Artificial Sequence
  Description of Artificial Sequence: Synthetic oligonucleotide
uacagagaagcauaggcua

SEQ ID NO: 3164939 - RNA, 19 nt, Artificial Sequence
  Description of Artificial Sequence: Synthetic oligonucleotide
gucuaguguaugaagaugc

SEQ ID NO: 3164940 - RNA, 19 nt, Artificial Sequence
  Description of Artificial Sequence: Synthetic oligonucleotide
uugguuuacuuucuucugu

SEQ ID NO: 3164941 - RNA, 19 nt, Artificial Sequence
  Description of Artificial Sequence: Synthetic oligonucleotide
uuuacuuucuucuguuuua

SEQ ID NO: 3164942 - RNA, 19 nt, Artificial Sequence
  Description of Artificial Sequence: Synthetic oligonucleotide
uaugaagaugcugucuugc

SEQ ID NO: 3164943 - RNA, 19 nt, Artificial Sequence
  Description of Artificial Sequence: Synthetic oligonucleotide
gcuacagagaagcauaggc

SEQ ID NO: 3164944 - RNA, 19 nt, Artificial Sequence
  Description of Artificial Sequence: Synthetic oligonucleotide
uaagacccacaccuguggg

SEQ ID NO: 3164945 - RNA, 19 nt, Artificial Sequence
  Description of Artificial Sequence: Synthetic oligonucleotide
gaaucaccagccuuugggc

SEQ ID NO: 3164946 - RNA, 19 nt, Artificial Sequence
  Description of Artificial Sequence: Synthetic oligonucleotide
cugucuugcucucaguggg

SEQ ID NO: 3164947 - RNA, 19 nt, Artificial Sequence
  Description of Artificial Sequence: Synthetic oligonucleotide
aaucaccagccuuugggca

SEQ ID NO: 3164948 - RNA, 19 nt, Artificial Sequence
  Description of Artificial Sequence: Synthetic oligonucleotide
  modified_base (3)..(3): a, c, u, g, unknown or other
aanagacccgaagucagga

SEQ ID NO: 3164949 - RNA, 19 nt, Artificial Sequence
  Description of Artificial Sequence: Synthetic oligonucleotide
gaugcugucuugcucucag

SEQ ID NO: 3164950 - RNA, 19 nt, Artificial Sequence
  Description of Artificial Sequence: Synthetic oligonucleotide
cucagugggaauccaaggc

SEQ ID NO: 3164951 - RNA, 19 nt, Artificial Sequence
  Description of Artificial Sequence: Synthetic oligonucleotide
uccagaaacccagugauaa

SEQ ID NO: 3164952 - RNA, 19 nt, Artificial Sequence
  Description of Artificial Sequence: Synthetic oligonucleotide
cuuucuucuguuuuaacaa

SEQ ID NO: 3164953 - RNA, 19 nt, Artificial Sequence
  Description of Artificial Sequence: Synthetic oligonucleotide
uucuucuguuuuaacaauc

SEQ ID NO: 3164954 - RNA, 19 nt, Artificial Sequence
  Description of Artificial Sequence: Synthetic oligonucleotide
aucaccagccuuugggcac

SEQ ID NO: 3164955 - RNA, 19 nt, Artificial Sequence
  Description of Artificial Sequence: Synthetic oligonucleotide
ugcugucuugcucucagug

SEQ ID NO: 3164956 - RNA, 19 nt, Artificial Sequence
  Description of Artificial Sequence: Synthetic oligonucleotide
  modified_base (14)..(14): a, c, u, g, unknown or other
acuuugcugggaanagacc

SEQ ID NO: 3164957 - RNA, 19 nt, Artificial Sequence
  Description of Artificial Sequence: Synthetic oligonucleotide
ucugguccaucucagggac

SEQ ID NO: 3164958 - RNA, 19 nt, Artificial Sequence
  Description of Artificial Sequence: Synthetic oligonucleotide
cuaagacccacaccugugg

SEQ ID NO: 3164959 - RNA, 19 nt, Artificial Sequence
  Description of Artificial Sequence: Synthetic oligonucleotide
gaacucuccagaaacccag

SEQ ID NO: 3164960 - RNA, 19 nt, Artificial Sequence
  Description of Artificial Sequence: Synthetic oligonucleotide
caucucagggacaauucag

SEQ ID NO: 3164961 - RNA, 19 nt, Artificial Sequence
  Description of Artificial Sequence: Synthetic oligonucleotide
agaaacccagugauaaugg

SEQ ID NO: 3164962 - RNA, 19 nt, Artificial Sequence
  Description of Artificial Sequence: Synthetic oligonucleotide
aauccaaggcucccuagau

SEQ ID NO: 3164963 - RNA, 19 nt, Artificial Sequence
  Description of Artificial Sequence: Synthetic oligonucleotide
  modified_base (4)..(4): a, c, u, g, unknown or other
gaanagacccgaagucagg

SEQ ID NO: 3164964 - RNA, 19 nt, Artificial Sequence
  Description of Artificial Sequence: Synthetic oligonucleotide
uuugggcacagcaccacug

SEQ ID NO: 3164965 - RNA, 19 nt, Artificial Sequence
  Description of Artificial Sequence: Synthetic oligonucleotide
ugugggagagagucuagug

SEQ ID NO: 3164966 - RNA, 19 nt, Artificial Sequence
  Description of Artificial Sequence: Synthetic oligonucleotide
cuucuguuuuaacaauccc

SEQ ID NO: 3164967 - RNA, 19 nt, Artificial Sequence
  Description of Artificial Sequence: Synthetic oligonucleotide
ucuaguguaugaagaugcu

SEQ ID NO: 3164968 - RNA, 19 nt, Artificial Sequence
  Description of Artificial Sequence: Synthetic oligonucleotide
ugaagaugcugucuugcuc

SEQ ID NO: 3164969 - RNA, 19 nt, Artificial Sequence
  Description of Artificial Sequence: Synthetic oligonucleotide
gaagaugcugucuugcucu

SEQ ID NO: 3164970 - RNA, 19 nt, Artificial Sequence
  Description of Artificial Sequence: Synthetic oligonucleotide
aaucccagugacagaacuc

SEQ ID NO: 3164971 - RNA, 19 nt, Artificial Sequence
  Description of Artificial Sequence: Synthetic oligonucleotide
acagaacucuccagaaacc

SEQ ID NO: 3164972 - RNA, 19 nt, Artificial Sequence
  Description of Artificial Sequence: Synthetic oligonucleotide
cucagggacaauucaggag

SEQ ID NO: 3164973 - RNA, 19 nt, Artificial Sequence
  Description of Artificial Sequence: Synthetic oligonucleotide
ucucagggacaauucagga

SEQ ID NO: 3164974 - RNA, 19 nt, Artificial Sequence
  Description of Artificial Sequence: Synthetic oligonucleotide
aagaugcugucuugcucuc

SEQ ID NO: 3164975 - RNA, 19 nt, Artificial Sequence
  Description of Artificial Sequence: Synthetic oligonucleotide
uagaucacaguuugguuua

SEQ ID NO: 3164976 - RNA, 19 nt, Artificial Sequence
  Description of Artificial Sequence: Synthetic oligonucleotide
uuucuucuguuuuaacaau

SEQ ID NO: 3164977 - RNA, 19 nt, Artificial Sequence
  Description of Artificial Sequence: Synthetic oligonucleotide
ucuucugguccaucucagg

SEQ ID NO: 3164978 - RNA, 19 nt, Artificial Sequence
  Description of Artificial Sequence: Synthetic oligonucleotide
guuugguuuacuuucuucu

SEQ ID NO: 3164979 - RNA, 19 nt, Artificial Sequence
  Description of Artificial Sequence: Synthetic oligonucleotide
cagaaacccagugauaaug

SEQ ID NO: 3164980 - RNA, 19 nt, Artificial Sequence
  Description of Artificial Sequence: Synthetic oligonucleotide
agagucuaguguaugaaga

SEQ ID NO: 3164981 - RNA, 19 nt, Artificial Sequence
  Description of Artificial Sequence: Synthetic oligonucleotide
cucucagugggaauccaag

SEQ ID NO: 3164982 - RNA, 19 nt, Artificial Sequence
  Description of Artificial Sequence: Synthetic oligonucleotide
ugggagagagucuagugua

SEQ ID NO: 3164983 - RNA, 19 nt, Artificial Sequence
  Description of Artificial Sequence: Synthetic oligonucleotide
  modified_base (15)..(15): a, c, u, g, unknown or other
gacuuugcugggaanagac

SEQ ID NO: 3164984 - RNA, 19 nt, Artificial Sequence
  Description of Artificial Sequence: Synthetic oligonucleotide
aaaguagugaccuccaugc

SEQ ID NO: 3164985 - RNA, 19 nt, Artificial Sequence
  Description of Artificial Sequence: Synthetic oligonucleotide
acuuucaggaguuugaccc

SEQ ID NO: 3164986 - RNA, 19 nt, Artificial Sequence
  Description of Artificial Sequence: Synthetic oligonucleotide
uuggaauagaacauggugg

SEQ ID NO: 3164987 - RNA, 19 nt, Artificial Sequence
  Description of Artificial Sequence: Synthetic oligonucleotide
aagucuaaggaugagacac

SEQ ID NO: 3164988 - RNA, 19 nt, Artificial Sequence
  Description of Artificial Sequence: Synthetic oligonucleotide
aauguggucaagucuaagg

SEQ ID NO: 3164989 - RNA, 19 nt, Artificial Sequence
  Description of Artificial Sequence: Synthetic oligonucleotide
uuuacagucaucacaaugu

SEQ ID NO: 3164990 - RNA, 19 nt, Artificial Sequence
  Description of Artificial Sequence: Synthetic oligonucleotide
ucuucgauguucuuuacag

SEQ ID NO: 3164991 - RNA, 19 nt, Artificial Sequence
  Description of Artificial Sequence: Synthetic oligonucleotide
cuaaggaugagacacgggg

SEQ ID NO: 3164992 - RNA, 19 nt, Artificial Sequence
  Description of Artificial Sequence: Synthetic oligonucleotide
aacacaaugccuuccgguc

SEQ ID NO: 3164993 - RNA, 19 nt, Artificial Sequence
  Description of Artificial Sequence: Synthetic oligonucleotide
aguagugaccuccaugccc

SEQ ID NO: 3164994 - RNA, 19 nt, Artificial Sequence
  Description of Artificial Sequence: Synthetic oligonucleotide
aggaucuuggaauagaaca

SEQ ID NO: 3164995 - RNA, 19 nt, Artificial Sequence
  Description of Artificial Sequence: Synthetic oligonucleotide
ucaagucuaaggaugagac

SEQ ID NO: 3164996 - RNA, 19 nt, Artificial Sequence
  Description of Artificial Sequence: Synthetic oligonucleotide
aauagaacauggugguguc

SEQ ID NO: 3164997 - RNA, 19 nt, Artificial Sequence
  Description of Artificial Sequence: Synthetic oligonucleotide
ugcauaacugacuuucagg

SEQ ID NO: 3164998 - RNA, 19 nt, Artificial Sequence
  Description of Artificial Sequence: Synthetic oligonucleotide
uucuuuacagucaucacaa

SEQ ID NO: 3164999 - RNA, 19 nt, Artificial Sequence
  Description of Artificial Sequence: Synthetic oligonucleotide
auaacugacuuucaggagu

SEQ ID NO: 3165000 - RNA, 19 nt, Artificial Sequence
  Description of Artificial Sequence: Synthetic oligonucleotide
cuuggaauagaacauggug

SEQ ID NO: 3165001 - RNA, 19 nt, Artificial Sequence
  Description of Artificial Sequence: Synthetic oligonucleotide
aaaacacaaugccuuccgg

SEQ ID NO: 3165002 - RNA, 19 nt, Artificial Sequence
  Description of Artificial Sequence: Synthetic oligonucleotide
ucaaauuccuuucccaccu

SEQ ID NO: 3165003 - RNA, 19 nt, Artificial Sequence
  Description of Artificial Sequence: Synthetic oligonucleotide
aucacaauguggucaaguc

SEQ ID NO: 3165004 - RNA, 19 nt, Artificial Sequence
  Description of Artificial Sequence: Synthetic oligonucleotide
aaacacaaugccuuccggu

SEQ ID NO: 3165005 - RNA, 19 nt, Artificial Sequence
  Description of Artificial Sequence: Synthetic oligonucleotide
uucgauguucuuuacaguc

SEQ ID NO: 3165006 - RNA, 19 nt, Artificial Sequence
  Description of Artificial Sequence: Synthetic oligonucleotide
cuugaaaguagugaccucc

SEQ ID NO: 3165007 - RNA, 19 nt, Artificial Sequence
  Description of Artificial Sequence: Synthetic oligonucleotide
uggucuccaaaacacaaug

SEQ ID NO: 3165008 - RNA, 19 nt, Artificial Sequence
  Description of Artificial Sequence: Synthetic oligonucleotide
uacagucaucacaaugugg

SEQ ID NO: 3165009 - RNA, 19 nt, Artificial Sequence
  Description of Artificial Sequence: Synthetic oligonucleotide
gaaaguagugaccuccaug

SEQ ID NO: 3165010 - RNA, 19 nt, Artificial Sequence
  Description of Artificial Sequence: Synthetic oligonucleotide
uggaauagaacaugguggu

SEQ ID NO: 3165011 - RNA, 19 nt, Artificial Sequence
  Description of Artificial Sequence: Synthetic oligonucleotide
cugacugaugacuggaggg

SEQ ID NO: 3165012 - RNA, 19 nt, Artificial Sequence
  Description of Artificial Sequence: Synthetic oligonucleotide
ucuccaaaacacaaugccu

SEQ ID NO: 3165013 - RNA, 19 nt, Artificial Sequence
  Description of Artificial Sequence: Synthetic oligonucleotide
aaguagugaccuccaugcc

SEQ ID NO: 3165014 - RNA, 19 nt, Artificial Sequence
  Description of Artificial Sequence: Synthetic oligonucleotide
gucuccaaaacacaaugcc

SEQ ID NO: 3165015 - RNA, 19 nt, Artificial Sequence
  Description of Artificial Sequence: Synthetic oligonucleotide
cuuuacagucaucacaaug

SEQ ID NO: 3165016 - RNA, 19 nt, Artificial Sequence
  Description of Artificial Sequence: Synthetic oligonucleotide
uuuggucuccaaaacacaa

SEQ ID NO: 3165017 - RNA, 19 nt, Artificial Sequence
  Description of Artificial Sequence: Synthetic oligonucleotide
caaaacacaaugccuuccg

SEQ ID NO: 3165018 - RNA, 19 nt, Artificial Sequence
  Description of Artificial Sequence: Synthetic oligonucleotide
aggaguuugaccccacauc

SEQ ID NO: 3165019 - RNA, 19 nt, Artificial Sequence
  Description of Artificial Sequence: Synthetic oligonucleotide
uuacagucaucacaaugug

SEQ ID NO: 3165020 - RNA, 19 nt, Artificial Sequence
  Description of Artificial Sequence: Synthetic oligonucleotide
ugcuguuccugcauaacug

SEQ ID NO: 3165021 - RNA, 19 nt, Artificial Sequence
  Description of Artificial Sequence: Synthetic oligonucleotide
ugaccccacauccugacug

SEQ ID NO: 3165022 - RNA, 19 nt, Artificial Sequence
  Description of Artificial Sequence: Synthetic oligonucleotide
ucacaauguggucaagucu

SEQ ID NO: 3165023 - RNA, 19 nt, Artificial Sequence
  Description of Artificial Sequence: Synthetic oligonucleotide
aaauuccuuucccaccuca

SEQ ID NO: 3165024 - RNA, 19 nt, Artificial Sequence
  Description of Artificial Sequence: Synthetic oligonucleotide
guucuuuacagucaucaca

SEQ ID NO: 3165025 - RNA, 19 nt, Artificial Sequence
  Description of Artificial Sequence: Synthetic oligonucleotide
acagucaucacaauguggu

SEQ ID NO: 3165026 - RNA, 19 nt, Artificial Sequence
  Description of Artificial Sequence: Synthetic oligonucleotide
uuccuuucccaccucaugu

SEQ ID NO: 3165027 - RNA, 19 nt, Artificial Sequence
  Description of Artificial Sequence: Synthetic oligonucleotide
aaggaugagacacggggaa

SEQ ID NO: 3165028 - RNA, 19 nt, Artificial Sequence
  Description of Artificial Sequence: Synthetic oligonucleotide
uaaggaugagacacgggga

SEQ ID NO: 3165029 - RNA, 19 nt, Artificial Sequence
  Description of Artificial Sequence: Synthetic oligonucleotide
auguggucaagucuaagga

SEQ ID NO: 3165030 - RNA, 19 nt, Artificial Sequence
  Description of Artificial Sequence: Synthetic oligonucleotide
cucaaauuccuuucccacc

SEQ ID NO: 3165031 - RNA, 19 nt, Artificial Sequence
  Description of Artificial Sequence: Synthetic oligonucleotide
uuuuggucuccaaaacaca

SEQ ID NO: 3165032 - RNA, 19 nt, Artificial Sequence
  Description of Artificial Sequence: Synthetic oligonucleotide
ucuaaggaugagacacggg

SEQ ID NO: 3165033 - RNA, 19 nt, Artificial Sequence
  Description of Artificial Sequence: Synthetic oligonucleotide
ugcuuugggcucaaauucc

SEQ ID NO: 3165034 - RNA, 19 nt, Artificial Sequence
  Description of Artificial Sequence: Synthetic oligonucleotide
ggaguuugaccccacaucc

SEQ ID NO: 3165035 - RNA, 19 nt, Artificial Sequence
  Description of Artificial Sequence: Synthetic oligonucleotide
auguucuuuacagucauca

SEQ ID NO: 3165036 - RNA, 19 nt, Artificial Sequence
  Description of Artificial Sequence: Synthetic oligonucleotide
aguuugaccccacauccug

SEQ ID NO: 3165037 - RNA, 19 nt, Artificial Sequence
  Description of Artificial Sequence: Synthetic oligonucleotide
ucgauguucuuuacaguca

SEQ ID NO: 3165038 - RNA, 19 nt, Artificial Sequence
  Description of Artificial Sequence: Synthetic oligonucleotide
uguuccugcauaacugacu

SEQ ID NO: 3165039 - RNA, 19 nt, Artificial Sequence
  Description of Artificial Sequence: Synthetic oligonucleotide
uuccggucucccuugaaag

SEQ ID NO: 3165040 - RNA, 19 nt, Artificial Sequence
  Description of Artificial Sequence: Synthetic oligonucleotide
cucccuugaaaguagugac

SEQ ID NO: 3165041 - RNA, 19 nt, Artificial Sequence
  Description of Artificial Sequence: Synthetic oligonucleotide
cauaacugacuuucaggag

SEQ ID NO: 3165042 - RNA, 19 nt, Artificial Sequence
  Description of Artificial Sequence: Synthetic oligonucleotide
ucuuggaauagaacauggu

SEQ ID NO: 3165043 - RNA, 19 nt, Artificial Sequence
  Description of Artificial Sequence: Synthetic oligonucleotide
gaucuuggaauagaacaug

SEQ ID NO: 3165044 - RNA, 19 nt, Artificial Sequence
  Description of Artificial Sequence: Synthetic oligonucleotide
augguggugucuucgaugu

SEQ ID NO: 3165045 - RNA, 19 nt, Artificial Sequence
  Description of Artificial Sequence: Synthetic oligonucleotide
uugaaaguagugaccucca

SEQ ID NO: 3165046 - RNA, 19 nt, Artificial Sequence
  Description of Artificial Sequence: Synthetic oligonucleotide
aucuuggaauagaacaugg

SEQ ID NO: 3165047 - RNA, 19 nt, Artificial Sequence
  Description of Artificial Sequence: Synthetic oligonucleotide
ucucccuugaaaguaguga

SEQ ID NO: 3165048 - RNA, 19 nt, Artificial Sequence
  Description of Artificial Sequence: Synthetic oligonucleotide
uccaugcccaggaucuugg

SEQ ID NO: 3165049 - RNA, 19 nt, Artificial Sequence
  Description of Artificial Sequence: Synthetic oligonucleotide
ugagacacggggaaggguu

SEQ ID NO: 3165050 - RNA, 19 nt, Artificial Sequence
  Description of Artificial Sequence: Synthetic oligonucleotide
uggucaagucuaaggauga

SEQ ID NO: 3165051 - RNA, 19 nt, Artificial Sequence
  Description of Artificial Sequence: Synthetic oligonucleotide
uccugcauaacugacuuuc

SEQ ID NO: 3165052 - RNA, 19 nt, Artificial Sequence
  Description of Artificial Sequence: Synthetic oligonucleotide
ucccuugaaaguagugacc

SEQ ID NO: 3165053 - RNA, 19 nt, Artificial Sequence
  Description of Artificial Sequence: Synthetic oligonucleotide
uuucccaccucauguaagu

SEQ ID NO: 3165054 - RNA, 19 nt, Artificial Sequence
  Description of Artificial Sequence: Synthetic oligonucleotide
gaacaugguggugucuucg

SEQ ID NO: 3165055 - RNA, 19 nt, Artificial Sequence
  Description of Artificial Sequence: Synthetic oligonucleotide
gacuuucaggaguuugacc

SEQ ID NO: 3165056 - RNA, 19 nt, Artificial Sequence
  Description of Artificial Sequence: Synthetic oligonucleotide
agucaucacaaugugguca

SEQ ID NO: 3165057 - RNA, 19 nt, Artificial Sequence
  Description of Artificial Sequence: Synthetic oligonucleotide
uguggucaagucuaaggau

SEQ ID NO: 3165058 - RNA, 19 nt, Artificial Sequence
  Description of Artificial Sequence: Synthetic oligonucleotide
uguucuuuacagucaucac

SEQ ID NO: 3165059 - RNA, 19 nt, Artificial Sequence
  Description of Artificial Sequence: Synthetic oligonucleotide
gcauaacugacuuucagga

SEQ ID NO: 3165060 - RNA, 19 nt, Artificial Sequence
  Description of Artificial Sequence: Synthetic oligonucleotide
aacaugguggugucuucga

SEQ ID NO: 3165061 - RNA, 19 nt, Artificial Sequence
  Description of Artificial Sequence: Synthetic oligonucleotide
ugggcucaaauuccuuucc

SEQ ID NO: 3165062 - RNA, 19 nt, Artificial Sequence
  Description of Artificial Sequence: Synthetic oligonucleotide
gaauagaacaugguggugu

SEQ ID NO: 3165063 - RNA, 19 nt, Artificial Sequence
  Description of Artificial Sequence: Synthetic oligonucleotide
ugacugaugacuggagggc

SEQ ID NO: 3165064 - RNA, 19 nt, Artificial Sequence
  Description of Artificial Sequence: Synthetic oligonucleotide
guggucaagucuaaggaug

SEQ ID NO: 3165065 - RNA, 19 nt, Artificial Sequence
  Description of Artificial Sequence: Synthetic oligonucleotide
cuuucaggaguuugacccc

SEQ ID NO: 3165066 - RNA, 19 nt, Artificial Sequence
  Description of Artificial Sequence: Synthetic oligonucleotide
gucuaaggaugagacacgg

SEQ ID NO: 3165067 - RNA, 19 nt, Artificial Sequence
  Description of Artificial Sequence: Synthetic oligonucleotide
uuugggcucaaauuccuuu

SEQ ID NO: 3165068 - RNA, 19 nt, Artificial Sequence
  Description of Artificial Sequence: Synthetic oligonucleotide
cacaauguggucaagucua

SEQ ID NO: 3165069 - RNA, 19 nt, Artificial Sequence
  Description of Artificial Sequence: Synthetic oligonucleotide
caugguggugucuucgaug

SEQ ID NO: 3165070 - RNA, 19 nt, Artificial Sequence
  Description of Artificial Sequence: Synthetic oligonucleotide
aaugccuuccggucucccu

SEQ ID NO: 3165071 - RNA, 19 nt, Artificial Sequence
  Description of Artificial Sequence: Synthetic oligonucleotide
gaugagacacggggaaggg

SEQ ID NO: 3165072 - RNA, 19 nt, Artificial Sequence
  Description of Artificial Sequence: Synthetic oligonucleotide
augcccaggaucuuggaau

SEQ ID NO: 3165073 - RNA, 19 nt, Artificial Sequence
  Description of Artificial Sequence: Synthetic oligonucleotide
auuccuuucccaccucaug

SEQ ID NO: 3165074 - RNA, 19 nt, Artificial Sequence
  Description of Artificial Sequence: Synthetic oligonucleotide
agaacaugguggugucuuc

SEQ ID NO: 3165075 - RNA, 19 nt, Artificial Sequence
  Description of Artificial Sequence: Synthetic oligonucleotide
uuugaccccacauccugac

SEQ ID NO: 3165076 - RNA, 19 nt, Artificial Sequence
  Description of Artificial Sequence: Synthetic oligonucleotide
cuuucccaccucauguaag

SEQ ID NO: 3165077 - RNA, 19 nt, Artificial Sequence
  Description of Artificial Sequence: Synthetic oligonucleotide
cugcauaacugacuuucag

SEQ ID NO: 3165078 - RNA, 19 nt, Artificial Sequence
  Description of Artificial Sequence: Synthetic oligonucleotide
uccaaaacacaaugccuuc

SEQ ID NO: 3165079 - RNA, 19 nt, Artificial Sequence
  Description of Artificial Sequence: Synthetic oligonucleotide
accucauguaaguuaaauu

SEQ ID NO: 3165080 - RNA, 19 nt, Artificial Sequence
  Description of Artificial Sequence: Synthetic oligonucleotide
uaacugacuuucaggaguu

SEQ ID NO: 3165081 - RNA, 19 nt, Artificial Sequence
  Description of Artificial Sequence: Synthetic oligonucleotide
uugggcucaaauuccuuuc

SEQ ID NO: 3165082 - RNA, 19 nt, Artificial Sequence
  Description of Artificial Sequence: Synthetic oligonucleotide
acugacuuucaggaguuug

SEQ ID NO: 3165083 - RNA, 19 nt, Artificial Sequence
  Description of Artificial Sequence: Synthetic oligonucleotide
uccugacugaugacuggag

SEQ ID NO: 3165084 - RNA, 19 nt, Artificial Sequence
  Description of Artificial Sequence: Synthetic oligonucleotide
aaugaucucacucacuucc

SEQ ID NO: 3165085 - RNA, 19 nt, Artificial Sequence
  Description of Artificial Sequence: Synthetic oligonucleotide
guaauggaggccuaaaggg

SEQ ID NO: 3165086 - RNA, 19 nt, Artificial Sequence
  Description of Artificial Sequence: Synthetic oligonucleotide
uggaucaccaggaaagggg

SEQ ID NO: 3165087 - RNA, 19 nt, Artificial Sequence
  Description of Artificial Sequence: Synthetic oligonucleotide
uaauggaggccuaaagggg

SEQ ID NO: 3165088 - RNA, 19 nt, Artificial Sequence
  Description of Artificial Sequence: Synthetic oligonucleotide
auuucuccugcuccgaagc

SEQ ID NO: 3165089 - RNA, 19 nt, Artificial Sequence
  Description of Artificial Sequence: Synthetic oligonucleotide
aaaagaggagcccuguccu

SEQ ID NO: 3165090 - RNA, 19 nt, Artificial Sequence
  Description of Artificial Sequence: Synthetic oligonucleotide
gagaauggaagccccaggg

SEQ ID NO: 3165091 - RNA, 19 nt, Artificial Sequence
  Description of Artificial Sequence: Synthetic oligonucleotide
uacauugucucugaagccg

SEQ ID NO: 3165092 - RNA, 19 nt, Artificial Sequence
  Description of Artificial Sequence: Synthetic oligonucleotide
gguacauugucucugaagc

SEQ ID NO: 3165093 - RNA, 19 nt, Artificial Sequence
  Description of Artificial Sequence: Synthetic oligonucleotide
auauggaucaccaggaaag

SEQ ID NO: 3165094 - RNA, 19 nt, Artificial Sequence
  Description of Artificial Sequence: Synthetic oligonucleotide
cuacaugugguucaggcag

SEQ ID NO: 3165095 - RNA, 19 nt, Artificial Sequence
  Description of Artificial Sequence: Synthetic oligonucleotide
augugguucaggcaggagg

SEQ ID NO: 3165096 - RNA, 19 nt, Artificial Sequence
  Description of Artificial Sequence: Synthetic oligonucleotide
cauuguagcccucagcagg

SEQ ID NO: 3165097 - RNA, 19 nt, Artificial Sequence
  Description of Artificial Sequence: Synthetic oligonucleotide
ugugguucaggcaggaggc

SEQ ID NO: 3165098 - RNA, 19 nt, Artificial Sequence
  Description of Artificial Sequence: Synthetic oligonucleotide
gguaccuccagucucaggg

SEQ ID NO: 3165099 - RNA, 19 nt, Artificial Sequence
  Description of Artificial Sequence: Synthetic oligonucleotide
agggguauagccuggcccc

SEQ ID NO: 3165100 - RNA, 19 nt, Artificial Sequence
  Description of Artificial Sequence: Synthetic oligonucleotide
cuccauauggaucaccagg

SEQ ID NO: 3165101 - RNA, 19 nt, Artificial Sequence
  Description of Artificial Sequence: Synthetic oligonucleotide
acuuccuccagggugauac

SEQ ID NO: 3165102 - RNA, 19 nt, Artificial Sequence
  Description of Artificial Sequence: Synthetic oligonucleotide
cauucugcggauugaaggg

SEQ ID NO: 3165103 - RNA, 19 nt, Artificial Sequence
  Description of Artificial Sequence: Synthetic oligonucleotide
gacuacaugugguucaggc

SEQ ID NO: 3165104 - RNA, 19 nt, Artificial Sequence
  Description of Artificial Sequence: Synthetic oligonucleotide
gguaauggaggccuaaagg

SEQ ID NO: 3165105 - RNA, 19 nt, Artificial Sequence
  Description of Artificial Sequence: Synthetic oligonucleotide
uccauauggaucaccagga

SEQ ID NO: 3165106 - RNA, 19 nt, Artificial Sequence
  Description of Artificial Sequence: Synthetic oligonucleotide
ucagggaacauccgcaggc

SEQ ID NO: 3165107 - RNA, 19 nt, Artificial Sequence
  Description of Artificial Sequence: Synthetic oligonucleotide
gauugaaggggucuucgag

SEQ ID NO: 3165108 - RNA, 19 nt, Artificial Sequence
  Description of Artificial Sequence: Synthetic oligonucleotide
agucucagggaacauccgc

SEQ ID NO: 3165109 - RNA, 19 nt, Artificial Sequence
  Description of Artificial Sequence: Synthetic oligonucleotide
agcccuguccuccauaugg

SEQ ID NO: 3165110 - RNA, 19 nt, Artificial Sequence
  Description of Artificial Sequence: Synthetic oligonucleotide
agaauggaagccccagggc

SEQ ID NO: 3165111 - RNA, 19 nt, Artificial Sequence
  Description of Artificial Sequence: Synthetic oligonucleotide
agggugauacccuggauag

SEQ ID NO: 3165112 - RNA, 19 nt, Artificial Sequence
  Description of Artificial Sequence: Synthetic oligonucleotide
caaaagaggagcccugucc

SEQ ID NO: 3165113 - RNA, 19 nt, Artificial Sequence
  Description of Artificial Sequence: Synthetic oligonucleotide
aagaggagcccuguccucc

SEQ ID NO: 3165114 - RNA, 19 nt, Artificial Sequence
  Description of Artificial Sequence: Synthetic oligonucleotide
gauagguacauugucucug

SEQ ID NO: 3165115 - RNA, 19 nt, Artificial Sequence
  Description of Artificial Sequence: Synthetic oligonucleotide
ucacucacuuccuccaggg

SEQ ID NO: 3165116 - RNA, 19 nt, Artificial Sequence
  Description of Artificial Sequence: Synthetic oligonucleotide
aaagagaccggagguggac

SEQ ID NO: 3165117 - RNA, 19 nt, Artificial Sequence
  Description of Artificial Sequence: Synthetic oligonucleotide
gaauggaagccccagggca

SEQ ID NO: 3165118 - RNA, 19 nt, Artificial Sequence
  Description of Artificial Sequence: Synthetic oligonucleotide
acucacuuccuccagggug

SEQ ID NO: 3165119 - RNA, 19 nt, Artificial Sequence
  Description of Artificial Sequence: Synthetic oligonucleotide
uugaaggggucuucgagug

SEQ ID NO: 3165120 - RNA, 19 nt, Artificial Sequence
  Description of Artificial Sequence: Synthetic oligonucleotide
auugaaggggucuucgagu

SEQ ID NO: 3165121 - RNA, 19 nt, Artificial Sequence
  Description of Artificial Sequence: Synthetic oligonucleotide
uccuccauauggaucacca

SEQ ID NO: 3165122 - RNA, 19 nt, Artificial Sequence
  Description of Artificial Sequence: Synthetic oligonucleotide
cucauuguagcccucagca

SEQ ID NO: 3165123 - RNA, 19 nt, Artificial Sequence
  Description of Artificial Sequence: Synthetic oligonucleotide
gaucucacucacuuccucc

SEQ ID NO: 3165124 - RNA, 19 nt, Artificial Sequence
  Description of Artificial Sequence: Synthetic oligonucleotide
aaagaggagcccuguccuc

SEQ ID NO: 3165125 - RNA, 19 nt, Artificial Sequence
  Description of Artificial Sequence: Synthetic oligonucleotide
gcauucugcggauugaagg

SEQ ID NO: 3165126 - RNA, 19 nt, Artificial Sequence
  Description of Artificial Sequence: Synthetic oligonucleotide
ugcaggaagccacucaggu

SEQ ID NO: 3165127 - RNA, 19 nt, Artificial Sequence
  Description of Artificial Sequence: Synthetic oligonucleotide
uggauagguacauugucuc

SEQ ID NO: 3165128 - RNA, 19 nt, Artificial Sequence
  Description of Artificial Sequence: Synthetic oligonucleotide
uauggaucaccaggaaagg

SEQ ID NO: 3165129 - RNA, 19 nt, Artificial Sequence
  Description of Artificial Sequence: Synthetic oligonucleotide
agccacucaggucucggcc

SEQ ID NO: 3165130 - RNA, 19 nt, Artificial Sequence
  Description of Artificial Sequence: Synthetic oligonucleotide
aagccacucaggucucggc

SEQ ID NO: 3165131 - RNA, 19 nt, Artificial Sequence
  Description of Artificial Sequence: Synthetic oligonucleotide
ugugguaccuccagucuca

SEQ ID NO: 3165132 - RNA, 19 nt, Artificial Sequence
  Description of Artificial Sequence: Synthetic oligonucleotide
agguacauugucucugaag

SEQ ID NO: 3165133 - RNA, 19 nt, Artificial Sequence
  Description of Artificial Sequence: Synthetic oligonucleotide
ugauacccuggauagguac

SEQ ID NO: 3165134 - RNA, 19 nt, Artificial Sequence
  Description of Artificial Sequence: Synthetic oligonucleotide
accugugguaccuccaguc

SEQ ID NO: 3165135 - RNA, 19 nt, Artificial Sequence
  Description of Artificial Sequence: Synthetic oligonucleotide
uacaugugguucaggcagg

SEQ ID NO: 3165136 - RNA, 19 nt, Artificial Sequence
  Description of Artificial Sequence: Synthetic oligonucleotide
uccaggacgugcaggaagc

SEQ ID NO: 3165137 - RNA, 19 nt, Artificial Sequence
  Description of Artificial Sequence: Synthetic oligonucleotide
gauuucuccugcuccgaag

SEQ ID NO: 3165138 - RNA, 19 nt, Artificial Sequence
  Description of Artificial Sequence: Synthetic oligonucleotide
gacagcauucugcggauug

SEQ ID NO: 3165139 - RNA, 19 nt, Artificial Sequence
  Description of Artificial Sequence: Synthetic oligonucleotide
agguaauggaggccuaaag

SEQ ID NO: 3165140 - RNA, 19 nt, Artificial Sequence
  Description of Artificial Sequence: Synthetic oligonucleotide
cuggauuucuccugcuccg

SEQ ID NO: 3165141 - RNA, 19 nt, Artificial Sequence
  Description of Artificial Sequence: Synthetic oligonucleotide
ucggccaaugaucucacuc

SEQ ID NO: 3165142 - RNA, 19 nt, Artificial Sequence
  Description of Artificial Sequence: Synthetic oligonucleotide
uugucucugaagccgcugc

SEQ ID NO: 3165143 - RNA, 19 nt, Artificial Sequence
  Description of Artificial Sequence: Synthetic oligonucleotide
ucauuguagcccucagcag

SEQ ID NO: 3165144 - RNA, 19 nt, Artificial Sequence
  Description of Artificial Sequence: Synthetic oligonucleotide
uguagcccucagcagguag

SEQ ID NO: 3165145 - RNA, 19 nt, Artificial Sequence
  Description of Artificial Sequence: Synthetic oligonucleotide
gagguggacgggcacaacc

SEQ ID NO: 3165146 - RNA, 19 nt, Artificial Sequence
  Description of Artificial Sequence: Synthetic oligonucleotide
ucucagggaacauccgcag

SEQ ID NO: 3165147 - RNA, 19 nt, Artificial Sequence
  Description of Artificial Sequence: Synthetic oligonucleotide
ucugaagccgcugcuguag

SEQ ID NO: 3165148 - RNA, 19 nt, Artificial Sequence
  Description of Artificial Sequence: Synthetic oligonucleotide
acuacaugugguucaggca

SEQ ID NO: 3165149 - RNA, 19 nt, Artificial Sequence
  Description of Artificial Sequence: Synthetic oligonucleotide
acccuggauagguacauug

SEQ ID NO: 3165150 - RNA, 19 nt, Artificial Sequence
  Description of Artificial Sequence: Synthetic oligonucleotide
aagagaccggagguggacg

SEQ ID NO: 3165151 - RNA, 19 nt, Artificial Sequence
  Description of Artificial Sequence: Synthetic oligonucleotide
aaaggggcggggcaggaaa

SEQ ID NO: 3165152 - RNA, 19 nt, Artificial Sequence
  Description of Artificial Sequence: Synthetic oligonucleotide
ucuccugcuccgaagcccc

SEQ ID NO: 3165153 - RNA, 19 nt, Artificial Sequence
  Description of Artificial Sequence: Synthetic oligonucleotide
gcaggaaagagaccggagg

SEQ ID NO: 3165154 - RNA, 19 nt, Artificial Sequence
  Description of Artificial Sequence: Synthetic oligonucleotide
aagccgcugcuguagccac

SEQ ID NO: 3165155 - RNA, 19 nt, Artificial Sequence
  Description of Artificial Sequence: Synthetic oligonucleotide
agagaccggagguggacgg

SEQ ID NO: 3165156 - RNA, 19 nt, Artificial Sequence
  Description of Artificial Sequence: Synthetic oligonucleotide
ucucugaagccgcugcugu

SEQ ID NO: 3165157 - RNA, 19 nt, Artificial Sequence
  Description of Artificial Sequence: Synthetic oligonucleotide
guggggaggaagguaaugg

SEQ ID NO: 3165158 - RNA, 19 nt, Artificial Sequence
  Description of Artificial Sequence: Synthetic oligonucleotide
aggaagguaauggaggccu

SEQ ID NO: 3165159 - RNA, 19 nt, Artificial Sequence
  Description of Artificial Sequence: Synthetic oligonucleotide
guacauugucucugaagcc

SEQ ID NO: 3165160 - RNA, 19 nt, Artificial Sequence
  Description of Artificial Sequence: Synthetic oligonucleotide
cuguccuccauauggauca

SEQ ID NO: 3165161 - RNA, 19 nt, Artificial Sequence
  Description of Artificial Sequence: Synthetic oligonucleotide
acauugucucugaagccgc

SEQ ID NO: 3165162 - RNA, 19 nt, Artificial Sequence
  Description of Artificial Sequence: Synthetic oligonucleotide
cugaggggagaauggaagc

SEQ ID NO: 3165163 - RNA, 19 nt, Artificial Sequence
  Description of Artificial Sequence: Synthetic oligonucleotide
accccuggauuucuccugc

SEQ ID NO: 3165164 - RNA, 19 nt, Artificial Sequence
  Description of Artificial Sequence: Synthetic oligonucleotide
aucaccaggaaaggggcgg

SEQ ID NO: 3165165 - RNA, 19 nt, Artificial Sequence
  Description of Artificial Sequence: Synthetic oligonucleotide
auagguacauugucucuga

SEQ ID NO: 3165166 - RNA, 19 nt, Artificial Sequence
  Description of Artificial Sequence: Synthetic oligonucleotide
ugaggggagaauggaagcc

SEQ ID NO: 3165167 - RNA, 19 nt, Artificial Sequence
  Description of Artificial Sequence: Synthetic oligonucleotide
ugaaggggucuucgagugg

SEQ ID NO: 3165168 - RNA, 19 nt, Artificial Sequence
  Description of Artificial Sequence: Synthetic oligonucleotide
ggaaagagaccggaggugg

SEQ ID NO: 3165169 - RNA, 19 nt, Artificial Sequence
  Description of Artificial Sequence: Synthetic oligonucleotide
guggacagcauucugcgga

SEQ ID NO: 3165170 - RNA, 19 nt, Artificial Sequence
  Description of Artificial Sequence: Synthetic oligonucleotide
aggacgugcaggaagccac

SEQ ID NO: 3165171 - RNA, 19 nt, Artificial Sequence
  Description of Artificial Sequence: Synthetic oligonucleotide
cagggguauagccuggccc

SEQ ID NO: 3165172 - RNA, 19 nt, Artificial Sequence
  Description of Artificial Sequence: Synthetic oligonucleotide
ucuucgagugguggggagg

SEQ ID NO: 3165173 - RNA, 19 nt, Artificial Sequence
  Description of Artificial Sequence: Synthetic oligonucleotide
auucugcggauugaagggg

SEQ ID NO: 3165174 - RNA, 19 nt, Artificial Sequence
  Description of Artificial Sequence: Synthetic oligonucleotide
uccagggugauacccugga

SEQ ID NO: 3165175 - RNA, 19 nt, Artificial Sequence
  Description of Artificial Sequence: Synthetic oligonucleotide
ucaggucucggccaaugau

SEQ ID NO: 3165176 - RNA, 19 nt, Artificial Sequence
  Description of Artificial Sequence: Synthetic oligonucleotide
ggaggaagguaauggaggc

SEQ ID NO: 3165177 - RNA, 19 nt, Artificial Sequence
  Description of Artificial Sequence: Synthetic oligonucleotide
auagccuggccccaccuca

SEQ ID NO: 3165178 - RNA, 19 nt, Artificial Sequence
  Description of Artificial Sequence: Synthetic oligonucleotide
aucucacucacuuccucca

SEQ ID NO: 3165179 - RNA, 19 nt, Artificial Sequence
  Description of Artificial Sequence: Synthetic oligonucleotide
uuucuccugcuccgaagcc

SEQ ID NO: 3165180 - RNA, 19 nt, Artificial Sequence
  Description of Artificial Sequence: Synthetic oligonucleotide
gggaggaagguaauggagg

SEQ ID NO: 3165181 - RNA, 19 nt, Artificial Sequence
  Description of Artificial Sequence: Synthetic oligonucleotide
uggggaggaagguaaugga

SEQ ID NO: 3165182 - RNA, 19 nt, Artificial Sequence
  Description of Artificial Sequence: Synthetic oligonucleotide
auggaucaccaggaaaggg

SEQ ID NO: 3165183 - RNA, 19 nt, Artificial Sequence
  Description of Artificial Sequence: Synthetic oligonucleotide
ucucacucacuuccuccag

SEQ ID NO: 3165184 - RNA, 19 nt, Artificial Sequence
  Description of Artificial Sequence: Synthetic oligonucleotide
aaagcuuuccccuuccagc

SEQ ID NO: 3165185 - RNA, 19 nt, Artificial Sequence
  Description of Artificial Sequence: Synthetic oligonucleotide
aacaaagaguccuccagcc

SEQ ID NO: 3165186 - RNA, 19 nt, Artificial Sequence
  Description of Artificial Sequence: Synthetic oligonucleotide
aaggcugcaaucuuccugc

SEQ ID NO: 3165187 - RNA, 19 nt, Artificial Sequence
  Description of Artificial Sequence: Synthetic oligonucleotide
ucaucugcaacaaagaguc

SEQ ID NO: 3165188 - RNA, 19 nt, Artificial Sequence
  Description of Artificial Sequence: Synthetic oligonucleotide
auugaucacauucuucacc

SEQ ID NO: 3165189 - RNA, 19 nt, Artificial Sequence
  Description of Artificial Sequence: Synthetic oligonucleotide
aguauucuacaccaguggc

SEQ ID NO: 3165190 - RNA, 19 nt, Artificial Sequence
  Description of Artificial Sequence: Synthetic oligonucleotide
aaguauucuacaccagugg

SEQ ID NO: 3165191 - RNA, 19 nt, Artificial Sequence
  Description of Artificial Sequence: Synthetic oligonucleotide
ugggagaggagccacaugg

SEQ ID NO: 3165192 - RNA, 19 nt, Artificial Sequence
  Description of Artificial Sequence: Synthetic oligonucleotide
auauugaucacauucuuca

SEQ ID NO: 3165193 - RNA, 19 nt, Artificial Sequence
  Description of Artificial Sequence: Synthetic oligonucleotide
uuaaaggugggacaggaca

SEQ ID NO: 3165194 - RNA, 19 nt, Artificial Sequence
  Description of Artificial Sequence: Synthetic oligonucleotide
agaggagccacauggaccc

SEQ ID NO: 3165195 - RNA, 19 nt, Artificial Sequence
  Description of Artificial Sequence: Synthetic oligonucleotide
ugcgauauugaucacauuc

SEQ ID NO: 3165196 - RNA, 19 nt, Artificial Sequence
  Description of Artificial Sequence: Synthetic oligonucleotide
aaucuuccugccuuucucc

SEQ ID NO: 3165197 - RNA, 19 nt, Artificial Sequence
  Description of Artificial Sequence: Synthetic oligonucleotide
aauaugcucugccaccugg

SEQ ID NO: 3165198 - RNA, 19 nt, Artificial Sequence
  Description of Artificial Sequence: Synthetic oligonucleotide
uccugugcgauauugauca

SEQ ID NO: 3165199 - RNA, 19 nt, Artificial Sequence
  Description of Artificial Sequence: Synthetic oligonucleotide
uguugaaguauucuacacc

SEQ ID NO: 3165200 - RNA, 19 nt, Artificial Sequence
  Description of Artificial Sequence: Synthetic oligonucleotide
acauucuucaccucauugg

SEQ ID NO: 3165201 - RNA, 19 nt, Artificial Sequence
  Description of Artificial Sequence: Synthetic oligonucleotide
aaaagugcuugccuacccg

SEQ ID NO: 3165202 - RNA, 19 nt, Artificial Sequence
  Description of Artificial Sequence: Synthetic oligonucleotide
agagacucagcaaagaagg

SEQ ID NO: 3165203 - RNA, 19 nt, Artificial Sequence
  Description of Artificial Sequence: Synthetic oligonucleotide
aaagugcuugccuacccgg

SEQ ID NO: 3165204 - RNA, 19 nt, Artificial Sequence
  Description of Artificial Sequence: Synthetic oligonucleotide
gaucucaucugcaacaaag

SEQ ID NO: 3165205 - RNA, 19 nt, Artificial Sequence
  Description of Artificial Sequence: Synthetic oligonucleotide
guugaaguauucuacacca

SEQ ID NO: 3165206 - RNA, 19 nt, Artificial Sequence
  Description of Artificial Sequence: Synthetic oligonucleotide
ugaaguauucuacaccagu

SEQ ID NO: 3165207 - RNA, 19 nt, Artificial Sequence
  Description of Artificial Sequence: Synthetic oligonucleotide
uugaucacauucuucaccu

SEQ ID NO: 3165208 - RNA, 19 nt, Artificial Sequence
  Description of Artificial Sequence: Synthetic oligonucleotide
aaaugcucuugacacagcu

SEQ ID NO: 3165209 - RNA, 19 nt, Artificial Sequence
  Description of Artificial Sequence: Synthetic oligonucleotide
aagaaggcugcaaucuucc

SEQ ID NO: 3165210 - RNA, 19 nt, Artificial Sequence
  Description of Artificial Sequence: Synthetic oligonucleotide
cuugacacagcuuggguag

SEQ ID NO: 3165211 - RNA, 19 nt, Artificial Sequence
  Description of Artificial Sequence: Synthetic oligonucleotide
agccacacuggguagagac

SEQ ID NO: 3165212 - RNA, 19 nt, Artificial Sequence
  Description of Artificial Sequence: Synthetic oligonucleotide
uccccuuccagcuggaagg

SEQ ID NO: 3165213 - RNA, 19 nt, Artificial Sequence
  Description of Artificial Sequence: Synthetic oligonucleotide
gacaaugucggggacaaag

SEQ ID NO: 3165214 - RNA, 19 nt, Artificial Sequence
  Description of Artificial Sequence: Synthetic oligonucleotide
ucccauggugacaaugucg

SEQ ID NO: 3165215 - RNA, 19 nt, Artificial Sequence
  Description of Artificial Sequence: Synthetic oligonucleotide
uggcauaggccucugcugg

SEQ ID NO: 3165216 - RNA, 19 nt, Artificial Sequence
  Description of Artificial Sequence: Synthetic oligonucleotide
aauggacuuucccauggug

SEQ ID NO: 3165217 - RNA, 19 nt, Artificial Sequence
  Description of Artificial Sequence: Synthetic oligonucleotide
uggguugccaccaaacgug

SEQ ID NO: 3165218 - RNA, 19 nt, Artificial Sequence
  Description of Artificial Sequence: Synthetic oligonucleotide
aaagaaggcugcaaucuuc

SEQ ID NO: 3165219 - RNA, 19 nt, Artificial Sequence
  Description of Artificial Sequence: Synthetic oligonucleotide
accucauuggcauaggccu

SEQ ID NO: 3165220 - RNA, 19 nt, Artificial Sequence
  Description of Artificial Sequence: Synthetic oligonucleotide
augcucuugacacagcuug

SEQ ID NO: 3165221 - RNA, 19 nt, Artificial Sequence
  Description of Artificial Sequence: Synthetic oligonucleotide
cauucuucaccucauuggc

SEQ ID NO: 3165222 - RNA, 19 nt, Artificial Sequence
  Description of Artificial Sequence: Synthetic oligonucleotide
acaaagaguccuccagccc

SEQ ID NO: 3165223 - RNA, 19 nt, Artificial Sequence
  Description of Artificial Sequence: Synthetic oligonucleotide
agcaaagaaggcugcaauc

SEQ ID NO: 3165224 - RNA, 19 nt, Artificial Sequence
  Description of Artificial Sequence: Synthetic oligonucleotide
uggguagagacucagcaaa

SEQ ID NO: 3165225 - RNA, 19 nt, Artificial Sequence
  Description of Artificial Sequence: Synthetic oligonucleotide
uuucccauggugacaaugu

SEQ ID NO: 3165226 - RNA, 19 nt, Artificial Sequence
  Description of Artificial Sequence: Synthetic oligonucleotide
uuuuaaaggugggacagga

SEQ ID NO: 3165227 - RNA, 19 nt, Artificial Sequence
  Description of Artificial Sequence: Synthetic oligonucleotide
cacgcaggcaacaggaugg

SEQ ID NO: 3165228 - RNA, 19 nt, Artificial Sequence
  Description of Artificial Sequence: Synthetic oligonucleotide
uaaaggugggacaggacac

SEQ ID NO: 3165229 - RNA, 19 nt, Artificial Sequence
  Description of Artificial Sequence: Synthetic oligonucleotide
gaaguauucuacaccagug

SEQ ID NO: 3165230 - RNA, 19 nt, Artificial Sequence
  Description of Artificial Sequence: Synthetic oligonucleotide
ugugcgauauugaucacau

SEQ ID NO: 3165231 - RNA, 19 nt, Artificial Sequence
  Description of Artificial Sequence: Synthetic oligonucleotide
aacguguugaaguauucua

SEQ ID NO: 3165232 - RNA, 19 nt, Artificial Sequence
  Description of Artificial Sequence: Synthetic oligonucleotide
acuggguagagacucagca

SEQ ID NO: 3165233 - RNA, 19 nt, Artificial Sequence
  Description of Artificial Sequence: Synthetic oligonucleotide
uuggguaguggccacgcag

SEQ ID NO: 3165234 - RNA, 19 nt, Artificial Sequence
  Description of Artificial Sequence: Synthetic oligonucleotide
cauggugacaaugucgggg

SEQ ID NO: 3165235 - RNA, 19 nt, Artificial Sequence
  Description of Artificial Sequence: Synthetic oligonucleotide
uggguaguggccacgcagg

SEQ ID NO: 3165236 - RNA, 19 nt, Artificial Sequence
  Description of Artificial Sequence: Synthetic oligonucleotide
aacaggauggccauugcca

SEQ ID NO: 3165237 - RNA, 19 nt, Artificial Sequence
  Description of Artificial Sequence: Synthetic oligonucleotide
agccacauggacccauucc

SEQ ID NO: 3165238 - RNA, 19 nt, Artificial Sequence
  Description of Artificial Sequence: Synthetic oligonucleotide
acuggguugccaccaaacg

SEQ ID NO: 3165239 - RNA, 19 nt, Artificial Sequence
  Description of Artificial Sequence: Synthetic oligonucleotide
ugcgaauaugcucugccac

SEQ ID NO: 3165240 - RNA, 19 nt, Artificial Sequence
  Description of Artificial Sequence: Synthetic oligonucleotide
uugccaauggacuuuccca

SEQ ID NO: 3165241 - RNA, 19 nt, Artificial Sequence
  Description of Artificial Sequence: Synthetic oligonucleotide
aagcuuuccccuuccagcu

SEQ ID NO: 3165242 - RNA, 19 nt, Artificial Sequence
  Description of Artificial Sequence: Synthetic oligonucleotide
auuggcauaggccucugcu

SEQ ID NO: 3165243 - RNA, 19 nt, Artificial Sequence
  Description of Artificial Sequence: Synthetic oligonucleotide
agcuggaaggcccaaaagu

SEQ ID NO: 3165244 - RNA, 19 nt, Artificial Sequence
  Description of Artificial Sequence: Synthetic oligonucleotide
gaucacauucuucaccuca

SEQ ID NO: 3165245 - RNA, 19 nt, Artificial Sequence
  Description of Artificial Sequence: Synthetic oligonucleotide
auggccauugccaauggac

SEQ ID NO: 3165246 - RNA, 19 nt, Artificial Sequence
  Description of Artificial Sequence: Synthetic oligonucleotide
agugcuugccuacccggcc

SEQ ID NO: 3165247 - RNA, 19 nt, Artificial Sequence
  Description of Artificial Sequence: Synthetic oligonucleotide
aaggcccaaaagugcuugc

SEQ ID NO: 3165248 - RNA, 19 nt, Artificial Sequence
  Description of Artificial Sequence: Synthetic oligonucleotide
acaccaguggcuucaaaug

SEQ ID NO: 3165249 - RNA, 19 nt, Artificial Sequence
  Description of Artificial Sequence: Synthetic oligonucleotide
gacucagcaaagaaggcug

SEQ ID NO: 3165250 - RNA, 19 nt, Artificial Sequence
  Description of Artificial Sequence: Synthetic oligonucleotide
acacagcuuggguaguggc

SEQ ID NO: 3165251 - RNA, 19 nt, Artificial Sequence
  Description of Artificial Sequence: Synthetic oligonucleotide
uugaaguauucuacaccag

SEQ ID NO: 3165252 - RNA, 19 nt, Artificial Sequence
  Description of Artificial Sequence: Synthetic oligonucleotide
gggagaaguagccagcagg

SEQ ID NO: 3165253 - RNA, 19 nt, Artificial Sequence
  Description of Artificial Sequence: Synthetic oligonucleotide
uacaccaguggcuucaaau

SEQ ID NO: 3165254 - RNA, 19 nt, Artificial Sequence
  Description of Artificial Sequence: Synthetic oligonucleotide
uggaaggcccaaaagugcu

SEQ ID NO: 3165255 - RNA, 19 nt, Artificial Sequence
  Description of Artificial Sequence: Synthetic oligonucleotide
uucuucaccucauuggcau

SEQ ID NO: 3165256 - RNA, 19 nt, Artificial Sequence
  Description of Artificial Sequence: Synthetic oligonucleotide
caacaaagaguccuccagc

SEQ ID NO: 3165257 - RNA, 19 nt, Artificial Sequence
  Description of Artificial Sequence: Synthetic oligonucleotide
guugccaccaaacguguug

SEQ ID NO: 3165258 - RNA, 19 nt, Artificial Sequence
  Description of Artificial Sequence: Synthetic oligonucleotide
acguguugaaguauucuac

SEQ ID NO: 3165259 - RNA, 19 nt, Artificial Sequence
  Description of Artificial Sequence: Synthetic oligonucleotide
acaaugucggggacaaagc

SEQ ID NO: 3165260 - RNA, 19 nt, Artificial Sequence
  Description of Artificial Sequence: Synthetic oligonucleotide
gauauugaucacauucuuc

SEQ ID NO: 3165261 - RNA, 19 nt, Artificial Sequence
  Description of Artificial Sequence: Synthetic oligonucleotide
ucuugacacagcuugggua

SEQ ID NO: 3165262 - RNA, 19 nt, Artificial Sequence
  Description of Artificial Sequence: Synthetic oligonucleotide
cuggaaggcccaaaagugc

SEQ ID NO: 3165263 - RNA, 19 nt, Artificial Sequence
  Description of Artificial Sequence: Synthetic oligonucleotide
aaacguguugaaguauucu

SEQ ID NO: 3165264 - RNA, 19 nt, Artificial Sequence
  Description of Artificial Sequence: Synthetic oligonucleotide
accugggagaaguagccag

SEQ ID NO: 3165265 - RNA, 19 nt, Artificial Sequence
  Description of Artificial Sequence: Synthetic oligonucleotide
ucggggacaaagcuuuccc

SEQ ID NO: 3165266 - RNA, 19 nt, Artificial Sequence
  Description of Artificial Sequence: Synthetic oligonucleotide
uauugaucacauucuucac

SEQ ID NO: 3165267 - RNA, 19 nt, Artificial Sequence
  Description of Artificial Sequence: Synthetic oligonucleotide
uuuaaaggugggacaggac

SEQ ID NO: 3165268 - RNA, 19 nt, Artificial Sequence
  Description of Artificial Sequence: Synthetic oligonucleotide
aucugcaacaaagaguccu

SEQ ID NO: 3165269 - RNA, 19 nt, Artificial Sequence
  Description of Artificial Sequence: Synthetic oligonucleotide
aaagccaaccuggaucuca

SEQ ID NO: 3165270 - RNA, 19 nt, Artificial Sequence
  Description of Artificial Sequence: Synthetic oligonucleotide
uggccauugccaauggacu

SEQ ID NO: 3165271 - RNA, 19 nt, Artificial Sequence
  Description of Artificial Sequence: Synthetic oligonucleotide
uggacuuucccauggugac

SEQ ID NO: 3165272 - RNA, 19 nt, Artificial Sequence
  Description of Artificial Sequence: Synthetic oligonucleotide
ugggacaggacacuggguu

SEQ ID NO: 3165273 - RNA, 19 nt, Artificial Sequence
  Description of Artificial Sequence: Synthetic oligonucleotide
ucugcaacaaagaguccuc

SEQ ID NO: 3165274 - RNA, 19 nt, Artificial Sequence
  Description of Artificial Sequence: Synthetic oligonucleotide
ugcucuugacacagcuugg

SEQ ID NO: 3165275 - RNA, 19 nt, Artificial Sequence
  Description of Artificial Sequence: Synthetic oligonucleotide
uuccccuuccagcuggaag

SEQ ID NO: 3165276 - RNA, 19 nt, Artificial Sequence
  Description of Artificial Sequence: Synthetic oligonucleotide
uccagcccugcgaauaugc

SEQ ID NO: 3165277 - RNA, 19 nt, Artificial Sequence
  Description of Artificial Sequence: Synthetic oligonucleotide
uauucuacaccaguggcuu

SEQ ID NO: 3165278 - RNA, 19 nt, Artificial Sequence
  Description of Artificial Sequence: Synthetic oligonucleotide
cacauucuucaccucauug

SEQ ID NO: 3165279 - RNA, 19 nt, Artificial Sequence
  Description of Artificial Sequence: Synthetic oligonucleotide
auggugacaaugucgggga

SEQ ID NO: 3165280 - RNA, 19 nt, Artificial Sequence
  Description of Artificial Sequence: Synthetic oligonucleotide
caccucauuggcauaggcc

SEQ ID NO: 3165281 - RNA, 19 nt, Artificial Sequence
  Description of Artificial Sequence: Synthetic oligonucleotide
uuggcauaggccucugcug

SEQ ID NO: 3165282 - RNA, 19 nt, Artificial Sequence
  Description of Artificial Sequence: Synthetic oligonucleotide
ucugccaccugggagaagu

SEQ ID NO: 3165283 - RNA, 19 nt, Artificial Sequence
  Description of Artificial Sequence: Synthetic oligonucleotide
ucugcccagccacacuggg

SEQ ID NO: 3165284 - RNA, 19 nt, Artificial Sequence
  Description of Artificial Sequence: Synthetic oligonucleotide
uuauaaauaaguuagaaca

SEQ ID NO: 3165285 - RNA, 19 nt, Artificial Sequence
  Description of Artificial Sequence: Synthetic oligonucleotide
aauaaguuagaacacagac

SEQ ID NO: 3165286 - RNA, 19 nt, Artificial Sequence
  Description of Artificial Sequence: Synthetic oligonucleotide
uaaguuagaacacagacag

SEQ ID NO: 3165287 - RNA, 19 nt, Artificial Sequence
  Description of Artificial Sequence: Synthetic oligonucleotide
aacauccacacuuuggucc

SEQ ID NO: 3165288 - RNA, 19 nt, Artificial Sequence
  Description of Artificial Sequence: Synthetic oligonucleotide
aaacucaaaauacagccac

SEQ ID NO: 3165289 - RNA, 19 nt, Artificial Sequence
  Description of Artificial Sequence: Synthetic oligonucleotide
aaaagagacaaucguagac

SEQ ID NO: 3165290 - RNA, 19 nt, Artificial Sequence
  Description of Artificial Sequence: Synthetic oligonucleotide
ugaaacucaaaauacagcc

SEQ ID NO: 3165291 - RNA, 19 nt, Artificial Sequence
  Description of Artificial Sequence: Synthetic oligonucleotide
aaagggugcacccacagac

SEQ ID NO: 3165292 - RNA, 19 nt, Artificial Sequence
  Description of Artificial Sequence: Synthetic oligonucleotide
ugaaaagagacaaucguag

SEQ ID NO: 3165293 - RNA, 19 nt, Artificial Sequence
  Description of Artificial Sequence: Synthetic oligonucleotide
uuagaacacagacagagag

SEQ ID NO: 3165294 - RNA, 19 nt, Artificial Sequence
  Description of Artificial Sequence: Synthetic oligonucleotide
caaaauacagccaccaucc

SEQ ID NO: 3165295 - RNA, 19 nt, Artificial Sequence
  Description of Artificial Sequence: Synthetic oligonucleotide
agacgcuuaacucucaccc

SEQ ID NO: 3165296 - RNA, 19 nt, Artificial Sequence
  Description of Artificial Sequence: Synthetic oligonucleotide
uaaauaaguuagaacacag

SEQ ID NO: 3165297 - RNA, 19 nt, Artificial Sequence
  Description of Artificial Sequence: Synthetic oligonucleotide
uuuauaaauaaguuagaac

SEQ ID NO: 3165298 - RNA, 19 nt, Artificial Sequence
  Description of Artificial Sequence: Synthetic oligonucleotide
uuaacucucacccuuuucc

SEQ ID NO: 3165299 - RNA, 19 nt, Artificial Sequence
  Description of Artificial Sequence: Synthetic oligonucleotide
uauaaauaaguuagaacac

SEQ ID NO: 3165300 - RNA, 19 nt, Artificial Sequence
  Description of Artificial Sequence: Synthetic oligonucleotide
ccuuuuauaaauaaguuag

SEQ ID NO: 3165301 - RNA, 19 nt, Artificial Sequence
  Description of Artificial Sequence: Synthetic oligonucleotide
aguuagaacacagacagag

SEQ ID NO: 3165302 - RNA, 19 nt, Artificial Sequence
  Description of Artificial Sequence: Synthetic oligonucleotide
aagagacaaucguagacuc

SEQ ID NO: 3165303 - RNA, 19 nt, Artificial Sequence
  Description of Artificial Sequence: Synthetic oligonucleotide
caagucacauuaaacaugc

SEQ ID NO: 3165304 - RNA, 19 nt, Artificial Sequence
  Description of Artificial Sequence: Synthetic oligonucleotide
ucaaaauacagccaccauc

SEQ ID NO: 3165305 - RNA, 19 nt, Artificial Sequence
  Description of Artificial Sequence: Synthetic oligonucleotide
agaacacagacagagaggg

SEQ ID NO: 3165306 - RNA, 19 nt, Artificial Sequence
  Description of Artificial Sequence: Synthetic oligonucleotide
ugaagaaggaugagguggg

SEQ ID NO: 3165307 - RNA, 19 nt, Artificial Sequence
  Description of Artificial Sequence: Synthetic oligonucleotide
ucaacauccacacuuuggu

SEQ ID NO: 3165308 - RNA, 19 nt, Artificial Sequence
  Description of Artificial Sequence: Synthetic oligonucleotide
uuaaacaugcgaauuuccu

SEQ ID NO: 3165309 - RNA, 19 nt, Artificial Sequence
  Description of Artificial Sequence: Synthetic oligonucleotide
uuucucaacauccacacuu

SEQ ID NO: 3165310 - RNA, 19 nt, Artificial Sequence
  Description of Artificial Sequence: Synthetic oligonucleotide
uuuuauaaauaaguuagaa

SEQ ID NO: 3165311 - RNA, 19 nt, Artificial Sequence
  Description of Artificial Sequence: Synthetic oligonucleotide
aaagagacaaucguagacu

SEQ ID NO: 3165312 - RNA, 19 nt, Artificial Sequence
  Description of Artificial Sequence: Synthetic oligonucleotide
uuuuccuggggaaagggug

SEQ ID NO: 3165313 - RNA, 19 nt, Artificial Sequence
  Description of Artificial Sequence: Synthetic oligonucleotide
aaucguagacuccauuucu

SEQ ID NO: 3165314 - RNA, 19 nt, Artificial Sequence
  Description of Artificial Sequence: Synthetic oligonucleotide
aaacaugcgaauuuccuuu

SEQ ID NO: 3165315 - RNA, 19 nt, Artificial Sequence
  Description of Artificial Sequence: Synthetic oligonucleotide
cugaagaaggaugaggugg

SEQ ID NO: 3165316 - RNA, 19 nt, Artificial Sequence
  Description of Artificial Sequence: Synthetic oligonucleotide
uauggaaguuuccagcuga

SEQ ID NO: 3165317 - RNA, 19 nt, Artificial Sequence
  Description of Artificial Sequence: Synthetic oligonucleotide
uagaacacagacagagagg

SEQ ID NO: 3165318 - RNA, 19 nt, Artificial Sequence
  Description of Artificial Sequence: Synthetic oligonucleotide
aacacagacagagagggca

SEQ ID NO: 3165319 - RNA, 19 nt, Artificial Sequence
  Description of Artificial Sequence: Synthetic oligonucleotide
agucacauuaaacaugcga

SEQ ID NO: 3165320 - RNA, 19 nt, Artificial Sequence
  Description of Artificial Sequence: Synthetic oligonucleotide
cacgaggacauucagaaac

SEQ ID NO: 3165321 - RNA, 19 nt, Artificial Sequence
  Description of Artificial Sequence: Synthetic oligonucleotide
auuaaacaugcgaauuucc

SEQ ID NO: 3165322 - RNA, 19 nt, Artificial Sequence
  Description of Artificial Sequence: Synthetic oligonucleotide
aggacauucagaaacacug

SEQ ID NO: 3165323 - RNA, 19 nt, Artificial Sequence
  Description of Artificial Sequence: Synthetic oligonucleotide
aaguuuccagcugaaacuc

SEQ ID NO: 3165324 - RNA, 19 nt, Artificial Sequence
  Description of Artificial Sequence: Synthetic oligonucleotide
gagaccugggccuagggag

SEQ ID NO: 3165325 - RNA, 19 nt, Artificial Sequence
  Description of Artificial Sequence: Synthetic oligonucleotide
uccuuuuauaaauaaguua

SEQ ID NO: 3165326 - RNA, 19 nt, Artificial Sequence
  Description of Artificial Sequence: Synthetic oligonucleotide
cugaaacucaaaauacagc

SEQ ID NO: 3165327 - RNA, 19 nt, Artificial Sequence
  Description of Artificial Sequence: Synthetic oligonucleotide
acuacccaaccucaacugc

SEQ ID NO: 3165328 - RNA, 19 nt, Artificial Sequence
  Description of Artificial Sequence: Synthetic oligonucleotide
guagacuccauuucucagg

SEQ ID NO: 3165329 - RNA, 19 nt, Artificial Sequence
  Description of Artificial Sequence: Synthetic oligonucleotide
aacaugcgaauuuccuuuc

SEQ ID NO: 3165330 - RNA, 19 nt, Artificial Sequence
  Description of Artificial Sequence: Synthetic oligonucleotide
cucgccuuucucaacaucc

SEQ ID NO: 3165331 - RNA, 19 nt, Artificial Sequence
  Description of Artificial Sequence: Synthetic oligonucleotide
auaaauaaguuagaacaca

SEQ ID NO: 3165332 - RNA, 19 nt, Artificial Sequence
  Description of Artificial Sequence: Synthetic oligonucleotide
gacacgaggacauucagaa

SEQ ID NO: 3165333 - RNA, 19 nt, Artificial Sequence
  Description of Artificial Sequence: Synthetic oligonucleotide
aggaacaagccacugggag

SEQ ID NO: 3165334 - RNA, 19 nt, Artificial Sequence
  Description of Artificial Sequence: Synthetic oligonucleotide
cucaacauccacacuuugg

SEQ ID NO: 3165335 - RNA, 19 nt, Artificial Sequence
  Description of Artificial Sequence: Synthetic oligonucleotide
acucucacccuuuuccucg

SEQ ID NO: 3165336 - RNA, 19 nt, Artificial Sequence
  Description of Artificial Sequence: Synthetic oligonucleotide
aacucaaaauacagccacc

SEQ ID NO: 3165337 - RNA, 19 nt, Artificial Sequence
  Description of Artificial Sequence: Synthetic oligonucleotide
uagacuccauuucucaggc

SEQ ID NO: 3165338 - RNA, 19 nt, Artificial Sequence
  Description of Artificial Sequence: Synthetic oligonucleotide
aacucucacccuuuuccuc

SEQ ID NO: 3165339 - RNA, 19 nt, Artificial Sequence
  Description of Artificial Sequence: Synthetic oligonucleotide
agaaggaugagguggguga

SEQ ID NO: 3165340 - RNA, 19 nt, Artificial Sequence
  Description of Artificial Sequence: Synthetic oligonucleotide
ugcacccacagacacgagg

SEQ ID NO: 3165341 - RNA, 19 nt, Artificial Sequence
  Description of Artificial Sequence: Synthetic oligonucleotide
aauacagccaccauccuuu

SEQ ID NO: 3165342 - RNA, 19 nt, Artificial Sequence
  Description of Artificial Sequence: Synthetic oligonucleotide
gacuccauuucucaggcca

SEQ ID NO: 3165343 - RNA, 19 nt, Artificial Sequence
  Description of Artificial Sequence: Synthetic oligonucleotide
aaauacagccaccauccuu

SEQ ID NO: 3165344 - RNA, 19 nt, Artificial Sequence
  Description of Artificial Sequence: Synthetic oligonucleotide
aaauaaguuagaacacaga

SEQ ID NO: 3165345 - RNA, 19 nt, Artificial Sequence
  Description of Artificial Sequence: Synthetic oligonucleotide
ugggagcugaagaaggaug

SEQ ID NO: 3165346 - RNA, 19 nt, Artificial Sequence
  Description of Artificial Sequence: Synthetic oligonucleotide
gaugaggugggugaaaaga

SEQ ID NO: 3165347 - RNA, 19 nt, Artificial Sequence
  Description of Artificial Sequence: Synthetic oligonucleotide
uuauggaaguuuccagcug

SEQ ID NO: 3165348 - RNA, 19 nt, Artificial Sequence
  Description of Artificial Sequence: Synthetic oligonucleotide
cagcugaaacucaaaauac

SEQ ID NO: 3165349 - RNA, 19 nt, Artificial Sequence
  Description of Artificial Sequence: Synthetic oligonucleotide
uuuccuggggaaagggugc

SEQ ID NO: 3165350 - RNA, 19 nt, Artificial Sequence
  Description of Artificial Sequence: Synthetic oligonucleotide
acauuaaacaugcgaauuu

SEQ ID NO: 3165351 - RNA, 19 nt, Artificial Sequence
  Description of Artificial Sequence: Synthetic oligonucleotide
gaaguuuccagcugaaacu

SEQ ID NO: 3165352 - RNA, 19 nt, Artificial Sequence
  Description of Artificial Sequence: Synthetic oligonucleotide
cauccuuuuauaaauaagu

SEQ ID NO: 3165353 - RNA, 19 nt, Artificial Sequence
  Description of Artificial Sequence: Synthetic oligonucleotide
uuugguccuucccuggccc

SEQ ID NO: 3165354 - RNA, 19 nt, Artificial Sequence
  Description of Artificial Sequence: Synthetic oligonucleotide
acuuugguccuucccuggc

SEQ ID NO: 3165355 - RNA, 19 nt, Artificial Sequence
  Description of Artificial Sequence: Synthetic oligonucleotide
gaaaagagacaaucguaga

SEQ ID NO: 3165356 - RNA, 19 nt, Artificial Sequence
  Description of Artificial Sequence: Synthetic oligonucleotide
auaaguuagaacacagaca

SEQ ID NO: 3165357 - RNA, 19 nt, Artificial Sequence
  Description of Artificial Sequence: Synthetic oligonucleotide
ggaaguuuccagcugaaac

SEQ ID NO: 3165358 - RNA, 19 nt, Artificial Sequence
  Description of Artificial Sequence: Synthetic oligonucleotide
uaaacaugcgaauuuccuu

SEQ ID NO: 3165359 - RNA, 19 nt, Artificial Sequence
  Description of Artificial Sequence: Synthetic oligonucleotide
agcacuacccaaccucaac

SEQ ID NO: 3165360 - RNA, 19 nt, Artificial Sequence
  Description of Artificial Sequence: Synthetic oligonucleotide
acaaucguagacuccauuu

SEQ ID NO: 3165361 - RNA, 19 nt, Artificial Sequence
  Description of Artificial Sequence: Synthetic oligonucleotide
ugggugaaaagagacaauc

SEQ ID NO: 3165362 - RNA, 19 nt, Artificial Sequence
  Description of Artificial Sequence: Synthetic oligonucleotide
acagccaccauccuuuuau

SEQ ID NO: 3165363 - RNA, 19 nt, Artificial Sequence
  Description of Artificial Sequence: Synthetic oligonucleotide
ucacauuaaacaugcgaau

SEQ ID NO: 3165364 - RNA, 19 nt, Artificial Sequence
  Description of Artificial Sequence: Synthetic oligonucleotide
gagcugaagaaggaugagg

SEQ ID NO: 3165365 - RNA, 19 nt, Artificial Sequence
  Description of Artificial Sequence: Synthetic oligonucleotide
ucaacugcugccccuuaug

SEQ ID NO: 3165366 - RNA, 19 nt, Artificial Sequence
  Description of Artificial Sequence: Synthetic oligonucleotide
ugaggugggugaaaagaga

SEQ ID NO: 3165367 - RNA, 19 nt, Artificial Sequence
  Description of Artificial Sequence: Synthetic oligonucleotide
gaacaagccacugggagac

SEQ ID NO: 3165368 - RNA, 19 nt, Artificial Sequence
  Description of Artificial Sequence: Synthetic oligonucleotide
agggugcacccacagacac

SEQ ID NO: 3165369 - RNA, 19 nt, Artificial Sequence
  Description of Artificial Sequence: Synthetic oligonucleotide
gagacaaucguagacucca

SEQ ID NO: 3165370 - RNA, 19 nt, Artificial Sequence
  Description of Artificial Sequence: Synthetic oligonucleotide
gagagggcaagucacauua

SEQ ID NO: 3165371 - RNA, 19 nt, Artificial Sequence
  Description of Artificial Sequence: Synthetic oligonucleotide
gagugggagcugaagaagg

SEQ ID NO: 3165372 - RNA, 19 nt, Artificial Sequence
  Description of Artificial Sequence: Synthetic oligonucleotide
uuccagcugaaacucaaaa

SEQ ID NO: 3165373 - RNA, 19 nt, Artificial Sequence
  Description of Artificial Sequence: Synthetic oligonucleotide
gucacauuaaacaugcgaa

SEQ ID NO: 3165374 - RNA, 19 nt, Artificial Sequence
  Description of Artificial Sequence: Synthetic oligonucleotide
cuuuuauaaauaaguuaga

SEQ ID NO: 3165375 - RNA, 19 nt, Artificial Sequence
  Description of Artificial Sequence: Synthetic oligonucleotide
aaaauacagccaccauccu

SEQ ID NO: 3165376 - RNA, 19 nt, Artificial Sequence
  Description of Artificial Sequence: Synthetic oligonucleotide
cauuaaacaugcgaauuuc

SEQ ID NO: 3165377 - RNA, 19 nt, Artificial Sequence
  Description of Artificial Sequence: Synthetic oligonucleotide
uuuuccucgccuuucucaa

SEQ ID NO: 3165378 - RNA, 19 nt, Artificial Sequence
  Description of Artificial Sequence: Synthetic oligonucleotide
acugcugccccuuauggaa

SEQ ID NO: 3165379 - RNA, 19 nt, Artificial Sequence
  Description of Artificial Sequence: Synthetic oligonucleotide
gcugaaacucaaaauacag

SEQ ID NO: 3165380 - RNA, 19 nt, Artificial Sequence
  Description of Artificial Sequence: Synthetic oligonucleotide
ucguagacuccauuucuca

SEQ ID NO: 3165381 - RNA, 19 nt, Artificial Sequence
  Description of Artificial Sequence: Synthetic oligonucleotide
agggcaagucacauuaaac

SEQ ID NO: 3165382 - RNA, 19 nt, Artificial Sequence
  Description of Artificial Sequence: Synthetic oligonucleotide
uccagcugaaacucaaaau

SEQ ID NO: 3165383 - RNA, 19 nt, Artificial Sequence
  Description of Artificial Sequence: Synthetic oligonucleotide
uuccucgccuuucucaaca

SEQ ID NO: 3165384 - RNA, 19 nt, Artificial Sequence
  Description of Artificial Sequence: Synthetic oligonucleotide
aaaauuaccaucuccauuc

SEQ ID NO: 3165385 - RNA, 19 nt, Artificial Sequence
  Description of Artificial Sequence: Synthetic oligonucleotide
aauguuagguuauaaauac

SEQ ID NO: 3165386 - RNA, 19 nt, Artificial Sequence
  Description of Artificial Sequence: Synthetic oligonucleotide
aauguuuuguuauugcccc

SEQ ID NO: 3165387 - RNA, 19 nt, Artificial Sequence
  Description of Artificial Sequence: Synthetic oligonucleotide
uaaacuagaauuuuaacag

SEQ ID NO: 3165388 - RNA, 19 nt, Artificial Sequence
  Description of Artificial Sequence: Synthetic oligonucleotide
ugaaauauacaaaagaagu

SEQ ID NO: 3165389 - RNA, 19 nt, Artificial Sequence
  Description of Artificial Sequence: Synthetic oligonucleotide
uauaaaacuacuuggaaag

SEQ ID NO: 3165390 - RNA, 19 nt, Artificial Sequence
  Description of Artificial Sequence: Synthetic oligonucleotide
uuauauuacaggaaaaugc

SEQ ID NO: 3165391 - RNA, 19 nt, Artificial Sequence
  Description of Artificial Sequence: Synthetic oligonucleotide
uguacaaauagcaauauac

SEQ ID NO: 3165392 - RNA, 19 nt, Artificial Sequence
  Description of Artificial Sequence: Synthetic oligonucleotide
ucuauuauaaaacuacuug

SEQ ID NO: 3165393 - RNA, 19 nt, Artificial Sequence
  Description of Artificial Sequence: Synthetic oligonucleotide
aauguuucuauuauaaaac

SEQ ID NO: 3165394 - RNA, 19 nt, Artificial Sequence
  Description of Artificial Sequence: Synthetic oligonucleotide
aauguaaccacuaaagauc

SEQ ID NO: 3165395 - RNA, 19 nt, Artificial Sequence
  Description of Artificial Sequence: Synthetic oligonucleotide
uaaauauacauauauguac

SEQ ID NO: 3165396 - RNA, 19 nt, Artificial Sequence
  Description of Artificial Sequence: Synthetic oligonucleotide
aaaauguuagguuauaaau

SEQ ID NO: 3165397 - RNA, 19 nt, Artificial Sequence
  Description of Artificial Sequence: Synthetic oligonucleotide
aauagcaauauacaguaca

SEQ ID NO: 3165398 - RNA, 19 nt, Artificial Sequence
  Description of Artificial Sequence: Synthetic oligonucleotide
cuauuauaaaacuacuugg

SEQ ID NO: 3165399 - RNA, 19 nt, Artificial Sequence
  Description of Artificial Sequence: Synthetic oligonucleotide
aaaaugguacauuuuaucu

SEQ ID NO: 3165400 - RNA, 19 nt, Artificial Sequence
  Description of Artificial Sequence: Synthetic oligonucleotide
aauuuuaacaggcaaaaua

SEQ ID NO: 3165401 - RNA, 19 nt, Artificial Sequence
  Description of Artificial Sequence: Synthetic oligonucleotide
aguuacuauaacuucacgg

SEQ ID NO: 3165402 - RNA, 19 nt, Artificial Sequence
  Description of Artificial Sequence: Synthetic oligonucleotide
aaauguuuuguuauugccc

SEQ ID NO: 3165403 - RNA, 19 nt, Artificial Sequence
  Description of Artificial Sequence: Synthetic oligonucleotide
aaaaugaaagcaauguuuc

SEQ ID NO: 3165404 - RNA, 19 nt, Artificial Sequence
  Description of Artificial Sequence: Synthetic oligonucleotide
auuuuaacaggcaaaauac

SEQ ID NO: 3165405 - RNA, 19 nt, Artificial Sequence
  Description of Artificial Sequence: Synthetic oligonucleotide
aaauacauucuuuacaaaa

SEQ ID NO: 3165406 - RNA, 19 nt, Artificial Sequence
  Description of Artificial Sequence: Synthetic oligonucleotide
uacaaaagaaguuaaggug

SEQ ID NO: 3165407 - RNA, 19 nt, Artificial Sequence
  Description of Artificial Sequence: Synthetic oligonucleotide
acauaaaauuaccaucucc

SEQ ID NO: 3165408 - RNA, 19 nt, Artificial Sequence
  Description of Artificial Sequence: Synthetic oligonucleotide
aacuagaauuuuaacaggc

SEQ ID NO: 3165409 - RNA, 19 nt, Artificial Sequence
  Description of Artificial Sequence: Synthetic oligonucleotide
ucuucuuuaaaaugaaagc

SEQ ID NO: 3165410 - RNA, 19 nt, Artificial Sequence
  Description of Artificial Sequence: Synthetic oligonucleotide
uacaaauagcaauauacag

SEQ ID NO: 3165411 - RNA, 19 nt, Artificial Sequence
  Description of Artificial Sequence: Synthetic oligonucleotide
aaacuagaauuuuaacagg

SEQ ID NO: 3165412 - RNA, 19 nt, Artificial Sequence
  Description of Artificial Sequence: Synthetic oligonucleotide
agcaauauacaguacacag

SEQ ID NO: 3165413 - RNA, 19 nt, Artificial Sequence
  Description of Artificial Sequence: Synthetic oligonucleotide
agaaauguuuuguuauugc

SEQ ID NO: 3165414 - RNA, 19 nt, Artificial Sequence
  Description of Artificial Sequence: Synthetic oligonucleotide
aaagaaguuaaggugauca

SEQ ID NO: 3165415 - RNA, 19 nt, Artificial Sequence
  Description of Artificial Sequence: Synthetic oligonucleotide
aacuucacgguauugaagu

SEQ ID NO: 3165416 - RNA, 19 nt, Artificial Sequence
  Description of Artificial Sequence: Synthetic oligonucleotide
uaaaaugaaagcaauguuu

SEQ ID NO: 3165417 - RNA, 19 nt, Artificial Sequence
  Description of Artificial Sequence: Synthetic oligonucleotide
uuuaacaggcaaaauacgu

SEQ ID NO: 3165418 - RNA, 19 nt, Artificial Sequence
  Description of Artificial Sequence: Synthetic oligonucleotide
aaaauaacuuuagaaaugu

SEQ ID NO: 3165419 - RNA, 19 nt, Artificial Sequence
  Description of Artificial Sequence: Synthetic oligonucleotide
uuuuaacaggcaaaauacg

SEQ ID NO: 3165420 - RNA, 19 nt, Artificial Sequence
  Description of Artificial Sequence: Synthetic oligonucleotide
guaaacuagaauuuuaaca

SEQ ID NO: 3165421 - RNA, 19 nt, Artificial Sequence
  Description of Artificial Sequence: Synthetic oligonucleotide
uacauauauguacauaugu

SEQ ID NO: 3165422 - RNA, 19 nt, Artificial Sequence
  Description of Artificial Sequence: Synthetic oligonucleotide
aaugguacauuuuaucuaa

SEQ ID NO: 3165423 - RNA, 19 nt, Artificial Sequence
  Description of Artificial Sequence: Synthetic oligonucleotide
gacauuucuguuuuaauac

SEQ ID NO: 3165424 - RNA, 19 nt, Artificial Sequence
  Description of Artificial Sequence: Synthetic oligonucleotide
ucauccuuuauauuacagg

SEQ ID NO: 3165425 - RNA, 19 nt, Artificial Sequence
  Description of Artificial Sequence: Synthetic oligonucleotide
ugaacauaaaauuaccauc

SEQ ID NO: 3165426 - RNA, 19 nt, Artificial Sequence
  Description of Artificial Sequence: Synthetic oligonucleotide
uuuagaaauguuuuguuau

SEQ ID NO: 3165427 - RNA, 19 nt, Artificial Sequence
  Description of Artificial Sequence: Synthetic oligonucleotide
aacuucuauaaauauacau

SEQ ID NO: 3165428 - RNA, 19 nt, Artificial Sequence
  Description of Artificial Sequence: Synthetic oligonucleotide
auacaaaagaaguuaaggu

SEQ ID NO: 3165429 - RNA, 19 nt, Artificial Sequence
  Description of Artificial Sequence: Synthetic oligonucleotide
uuauaaaacuacuuggaaa

SEQ ID NO: 3165430 - RNA, 19 nt, Artificial Sequence
  Description of Artificial Sequence: Synthetic oligonucleotide
uucugcaugaaauauacaa

SEQ ID NO: 3165431 - RNA, 19 nt, Artificial Sequence
  Description of Artificial Sequence: Synthetic oligonucleotide
aucuaagccaaccuuguac

SEQ ID NO: 3165432 - RNA, 19 nt, Artificial Sequence
  Description of Artificial Sequence: Synthetic oligonucleotide
uuuuaauggaaaauaacuu

SEQ ID NO: 3165433 - RNA, 19 nt, Artificial Sequence
  Description of Artificial Sequence: Synthetic oligonucleotide
auauacaguacacagacau

SEQ ID NO: 3165434 - RNA, 19 nt, Artificial Sequence
  Description of Artificial Sequence: Synthetic oligonucleotide
uguuagguuauaaauacau

SEQ ID NO: 3165435 - RNA, 19 nt, Artificial Sequence
  Description of Artificial Sequence: Synthetic oligonucleotide
ggcaaaauacgucauaugg

SEQ ID NO: 3165436 - RNA, 19 nt, Artificial Sequence
  Description of Artificial Sequence: Synthetic oligonucleotide
aggaaaaugcuuuuguuug

SEQ ID NO: 3165437 - RNA, 19 nt, Artificial Sequence
  Description of Artificial Sequence: Synthetic oligonucleotide
gaaauguuuuguuauugcc

SEQ ID NO: 3165438 - RNA, 19 nt, Artificial Sequence
  Description of Artificial Sequence: Synthetic oligonucleotide
uuuaauggaaaauaacuuu

SEQ ID NO: 3165439 - RNA, 19 nt, Artificial Sequence
  Description of Artificial Sequence: Synthetic oligonucleotide
guuuuaauaccccugaaca

SEQ ID NO: 3165440 - RNA, 19 nt, Artificial Sequence
  Description of Artificial Sequence: Synthetic oligonucleotide
aaaguuacuauaacuucac

SEQ ID NO: 3165441 - RNA, 19 nt, Artificial Sequence
  Description of Artificial Sequence: Synthetic oligonucleotide
uuggaagguauuuacaucu

SEQ ID NO: 3165442 - RNA, 19 nt, Artificial Sequence
  Description of Artificial Sequence: Synthetic oligonucleotide
uuaauggaaaauaacuuua

SEQ ID NO: 3165443 - RNA, 19 nt, Artificial Sequence
  Description of Artificial Sequence: Synthetic oligonucleotide
uaauggaaaauaacuuuag

SEQ ID NO: 3165444 - RNA, 19 nt, Artificial Sequence
  Description of Artificial Sequence: Synthetic oligonucleotide
uaaagauccaaauguaaac

SEQ ID NO: 3165445 - RNA, 19 nt, Artificial Sequence
  Description of Artificial Sequence: Synthetic oligonucleotide
uuuguuauugccccauuug

SEQ ID NO: 3165446 - RNA, 19 nt, Artificial Sequence
  Description of Artificial Sequence: Synthetic oligonucleotide
gucauauggcuuuuaaugg

SEQ ID NO: 3165447 - RNA, 19 nt, Artificial Sequence
  Description of Artificial Sequence: Synthetic oligonucleotide
aaagcaauguuucuauuau

SEQ ID NO: 3165448 - RNA, 19 nt, Artificial Sequence
  Description of Artificial Sequence: Synthetic oligonucleotide
uucaaaaugguacauuuua

SEQ ID NO: 3165449 - RNA, 19 nt, Artificial Sequence
  Description of Artificial Sequence: Synthetic oligonucleotide
uccuacagaauuaacagaa

SEQ ID NO: 3165450 - RNA, 19 nt, Artificial Sequence
  Description of Artificial Sequence: Synthetic oligonucleotide
uucuuuaaaaugaaagcaa

SEQ ID NO: 3165451 - RNA, 19 nt, Artificial Sequence
  Description of Artificial Sequence: Synthetic oligonucleotide
accaucuccauucaaaaug

SEQ ID NO: 3165452 - RNA, 19 nt, Artificial Sequence
  Description of Artificial Sequence: Synthetic oligonucleotide
cauaaaauuaccaucucca

SEQ ID NO: 3165453 - RNA, 19 nt, Artificial Sequence
  Description of Artificial Sequence: Synthetic oligonucleotide
ugagucauuccccaucagg

SEQ ID NO: 3165454 - RNA, 19 nt, Artificial Sequence
  Description of Artificial Sequence: Synthetic oligonucleotide
gaaaauaacuuuagaaaug

SEQ ID NO: 3165455 - RNA, 19 nt, Artificial Sequence
  Description of Artificial Sequence: Synthetic oligonucleotide
aauggaaaauaacuuuaga

SEQ ID NO: 3165456 - RNA, 19 nt, Artificial Sequence
  Description of Artificial Sequence: Synthetic oligonucleotide
aauaacuuuagaaauguuu

SEQ ID NO: 3165457 - RNA, 19 nt, Artificial Sequence
  Description of Artificial Sequence: Synthetic oligonucleotide
guuucuauuauaaaacuac

SEQ ID NO: 3165458 - RNA, 19 nt, Artificial Sequence
  Description of Artificial Sequence: Synthetic oligonucleotide
uguuuuaauaccccugaac

SEQ ID NO: 3165459 - RNA, 19 nt, Artificial Sequence
  Description of Artificial Sequence: Synthetic oligonucleotide
ucuguuuuaauaccccuga

SEQ ID NO: 3165460 - RNA, 19 nt, Artificial Sequence
  Description of Artificial Sequence: Synthetic oligonucleotide
uauuuacaucuucuuaucc

SEQ ID NO: 3165461 - RNA, 19 nt, Artificial Sequence
  Description of Artificial Sequence: Synthetic oligonucleotide
uauuacaggaaaaugcuuu

SEQ ID NO: 3165462 - RNA, 19 nt, Artificial Sequence
  Description of Artificial Sequence: Synthetic oligonucleotide
ugcaugaaauauacaaaag

SEQ ID NO: 3165463 - RNA, 19 nt, Artificial Sequence
  Description of Artificial Sequence: Synthetic oligonucleotide
uccuuuauauuacaggaaa

SEQ ID NO: 3165464 - RNA, 19 nt, Artificial Sequence
  Description of Artificial Sequence: Synthetic oligonucleotide
aauaccccugaacaucuuc

SEQ ID NO: 3165465 - RNA, 19 nt, Artificial Sequence
  Description of Artificial Sequence: Synthetic oligonucleotide
uggaaaguuacuauaacuu

SEQ ID NO: 3165466 - RNA, 19 nt, Artificial Sequence
  Description of Artificial Sequence: Synthetic oligonucleotide
uguuauugccccauuugag

SEQ ID NO: 3165467 - RNA, 19 nt, Artificial Sequence
  Description of Artificial Sequence: Synthetic oligonucleotide
uaacaggcaaaauacguca

SEQ ID NO: 3165468 - RNA, 19 nt, Artificial Sequence
  Description of Artificial Sequence: Synthetic oligonucleotide
uuucuauuauaaaacuacu

SEQ ID NO: 3165469 - RNA, 19 nt, Artificial Sequence
  Description of Artificial Sequence: Synthetic oligonucleotide
ucuuuaaaaugaaagcaau

SEQ ID NO: 3165470 - RNA, 19 nt, Artificial Sequence
  Description of Artificial Sequence: Synthetic oligonucleotide
aucuucuuuaaaaugaaag

SEQ ID NO: 3165471 - RNA, 19 nt, Artificial Sequence
  Description of Artificial Sequence: Synthetic oligonucleotide
uuggaaaguuacuauaacu

SEQ ID NO: 3165472 - RNA, 19 nt, Artificial Sequence
  Description of Artificial Sequence: Synthetic oligonucleotide
accuuguacauguguaugc

SEQ ID NO: 3165473 - RNA, 19 nt, Artificial Sequence
  Description of Artificial Sequence: Synthetic oligonucleotide
uaugcaacuucuauaaaua

SEQ ID NO: 3165474 - RNA, 19 nt, Artificial Sequence
  Description of Artificial Sequence: Synthetic oligonucleotide
auuuacaucuucuuauccu

SEQ ID NO: 3165475 - RNA, 19 nt, Artificial Sequence
  Description of Artificial Sequence: Synthetic oligonucleotide
cauuucuguuuuaauaccc

SEQ ID NO: 3165476 - RNA, 19 nt, Artificial Sequence
  Description of Artificial Sequence: Synthetic oligonucleotide
uuaaaaugaaagcaauguu

SEQ ID NO: 3165477 - RNA, 19 nt, Artificial Sequence
  Description of Artificial Sequence: Synthetic oligonucleotide
augaaauauacaaaagaag

SEQ ID NO: 3165478 - RNA, 19 nt, Artificial Sequence
  Description of Artificial Sequence: Synthetic oligonucleotide
ucuaagccaaccuuguaca

SEQ ID NO: 3165479 - RNA, 19 nt, Artificial Sequence
  Description of Artificial Sequence: Synthetic oligonucleotide
guacauuuuaucuaagcca

SEQ ID NO: 3165480 - RNA, 19 nt, Artificial Sequence
  Description of Artificial Sequence: Synthetic oligonucleotide
uuaacaggcaaaauacguc

SEQ ID NO: 3165481 - RNA, 19 nt, Artificial Sequence
  Description of Artificial Sequence: Synthetic oligonucleotide
uauaacuucacgguauuga

SEQ ID NO: 3165482 - RNA, 19 nt, Artificial Sequence
  Description of Artificial Sequence: Synthetic oligonucleotide
cuuuaaaaugaaagcaaug

SEQ ID NO: 3165483 - RNA, 19 nt, Artificial Sequence
  Description of Artificial Sequence: Synthetic oligonucleotide
aagccaaccuuguacaugu

SEQ ID NO: 3165484 - RNA, 19 nt, Artificial Sequence
  Description of Artificial Sequence: Synthetic oligonucleotide
acaaaguacagacagaggc

SEQ ID NO: 3165485 - RNA, 19 nt, Artificial Sequence
  Description of Artificial Sequence: Synthetic oligonucleotide
aggagaacgauuuugaagc

SEQ ID NO: 3165486 - RNA, 19 nt, Artificial Sequence
  Description of Artificial Sequence: Synthetic oligonucleotide
aacgacaaaguacagacag

SEQ ID NO: 3165487 - RNA, 19 nt, Artificial Sequence
  Description of Artificial Sequence: Synthetic oligonucleotide
ugaacagccagguugaugg

SEQ ID NO: 3165488 - RNA, 19 nt, Artificial Sequence
  Description of Artificial Sequence: Synthetic oligonucleotide
aaagaugaggugcaugugg

SEQ ID NO: 3165489 - RNA, 19 nt, Artificial Sequence
  Description of Artificial Sequence: Synthetic oligonucleotide
uaaaucugggcauacacag

SEQ ID NO: 3165490 - RNA, 19 nt, Artificial Sequence
  Description of Artificial Sequence: Synthetic oligonucleotide
gaugaaguggcucaccacg

SEQ ID NO: 3165491 - RNA, 19 nt, Artificial Sequence
  Description of Artificial Sequence: Synthetic oligonucleotide
uuuccuuucaaagaugagg

SEQ ID NO: 3165492 - RNA, 19 nt, Artificial Sequence
  Description of Artificial Sequence: Synthetic oligonucleotide
uggaaaagaccccugacag

SEQ ID NO: 3165493 - RNA, 19 nt, Artificial Sequence
  Description of Artificial Sequence: Synthetic oligonucleotide
gaucugaacagccagguug

SEQ ID NO: 3165494 - RNA, 19 nt, Artificial Sequence
  Description of Artificial Sequence: Synthetic oligonucleotide
guaacgacaaaguacagac

SEQ ID NO: 3165495 - RNA, 19 nt, Artificial Sequence
  Description of Artificial Sequence: Synthetic oligonucleotide
acgauuuugaagcuccagc

SEQ ID NO: 3165496 - RNA, 19 nt, Artificial Sequence
  Description of Artificial Sequence: Synthetic oligonucleotide
uggguaacgacaaaguaca

SEQ ID NO: 3165497 - RNA, 19 nt, Artificial Sequence
  Description of Artificial Sequence: Synthetic oligonucleotide
auuggugaagaucugaaca

SEQ ID NO: 3165498 - RNA, 19 nt, Artificial Sequence
  Description of Artificial Sequence: Synthetic oligonucleotide
ugaagaucugaacagccag

SEQ ID NO: 3165499 - RNA, 19 nt, Artificial Sequence
  Description of Artificial Sequence: Synthetic oligonucleotide
aacucauuggugaagaucu

SEQ ID NO: 3165500 - RNA, 19 nt, Artificial Sequence
  Description of Artificial Sequence: Synthetic oligonucleotide
gagauguuuccuuucaaag

SEQ ID NO: 3165501 - RNA, 19 nt, Artificial Sequence
  Description of Artificial Sequence: Synthetic oligonucleotide
uuccuuucaaagaugaggu

SEQ ID NO: 3165502 - RNA, 19 nt, Artificial Sequence
  Description of Artificial Sequence: Synthetic oligonucleotide
ucaaagaugaggugcaugu

SEQ ID NO: 3165503 - RNA, 19 nt, Artificial Sequence
  Description of Artificial Sequence: Synthetic oligonucleotide
agaacgauuuugaagcucc

SEQ ID NO: 3165504 - RNA, 19 nt, Artificial Sequence
  Description of Artificial Sequence: Synthetic oligonucleotide
agguuauccgugcaguugc

SEQ ID NO: 3165505 - RNA, 19 nt, Artificial Sequence
  Description of Artificial Sequence: Synthetic oligonucleotide
uguuuccuuucaaagauga

SEQ ID NO: 3165506 - RNA, 19 nt, Artificial Sequence
  Description of Artificial Sequence: Synthetic oligonucleotide
gacucauaggugaagaucc

SEQ ID NO: 3165507 - RNA, 19 nt, Artificial Sequence
  Description of Artificial Sequence: Synthetic oligonucleotide
gaggagaacgauuuugaag

SEQ ID NO: 3165508 - RNA, 19 nt, Artificial Sequence
  Description of Artificial Sequence: Synthetic oligonucleotide
uuggugaagaucugaacag

SEQ ID NO: 3165509 - RNA, 19 nt, Artificial Sequence
  Description of Artificial Sequence: Synthetic oligonucleotide
uuggcugucagcccaaacc

SEQ ID NO: 3165510 - RNA, 19 nt, Artificial Sequence
  Description of Artificial Sequence: Synthetic oligonucleotide
aaucugggcauacacagaa

SEQ ID NO: 3165511 - RNA, 19 nt, Artificial Sequence
  Description of Artificial Sequence: Synthetic oligonucleotide
acagaauacaggaggaagc

SEQ ID NO: 3165512 - RNA, 19 nt, Artificial Sequence
  Description of Artificial Sequence: Synthetic oligonucleotide
aaaguacagacagaggcug

SEQ ID NO: 3165513 - RNA, 19 nt, Artificial Sequence
  Description of Artificial Sequence: Synthetic oligonucleotide
aguucugcugcuucaugcc

SEQ ID NO: 3165514 - RNA, 19 nt, Artificial Sequence
  Description of Artificial Sequence: Synthetic oligonucleotide
uugauggacucauagguga

SEQ ID NO: 3165515 - RNA, 19 nt, Artificial Sequence
  Description of Artificial Sequence: Synthetic oligonucleotide
aaaccaguucugcugcuuc

SEQ ID NO: 3165516 - RNA, 19 nt, Artificial Sequence
  Description of Artificial Sequence: Synthetic oligonucleotide
auggguaacgacaaaguac

SEQ ID NO: 3165517 - RNA, 19 nt, Artificial Sequence
  Description of Artificial Sequence: Synthetic oligonucleotide
gauuuugaagcuccagcag

SEQ ID NO: 3165518 - RNA, 19 nt, Artificial Sequence
  Description of Artificial Sequence: Synthetic oligonucleotide
gaugguguagcucaugaga

SEQ ID NO: 3165519 - RNA, 19 nt, Artificial Sequence
  Description of Artificial Sequence: Synthetic oligonucleotide
uacaggaggaagcagcuga

SEQ ID NO: 3165520 - RNA, 19 nt, Artificial Sequence
  Description of Artificial Sequence: Synthetic oligonucleotide
gaauacaggaggaagcagc

SEQ ID NO: 3165521 - RNA, 19 nt, Artificial Sequence
  Description of Artificial Sequence: Synthetic oligonucleotide
ucugguagaugauuugggc

SEQ ID NO: 3165522 - RNA, 19 nt, Artificial Sequence
  Description of Artificial Sequence: Synthetic oligonucleotide
ggugaacugacucuggagg

SEQ ID NO: 3165523 - RNA, 19 nt, Artificial Sequence
  Description of Artificial Sequence: Synthetic oligonucleotide
auuuugaagcuccagcaga

SEQ ID NO: 3165524 - RNA, 19 nt, Artificial Sequence
  Description of Artificial Sequence: Synthetic oligonucleotide
uugggcauggguaacgaca

SEQ ID NO: 3165525 - RNA, 19 nt, Artificial Sequence
  Description of Artificial Sequence: Synthetic oligonucleotide
uugaagcuccagcagauga

SEQ ID NO: 3165526 - RNA, 19 nt, Artificial Sequence
  Description of Artificial Sequence: Synthetic oligonucleotide
gaaaagaccccugacagca

SEQ ID NO: 3165527 - RNA, 19 nt, Artificial Sequence
  Description of Artificial Sequence: Synthetic oligonucleotide
agcacugucgcccaucuug

SEQ ID NO: 3165528 - RNA, 19 nt, Artificial Sequence
  Description of Artificial Sequence: Synthetic oligonucleotide
cagcagaugaugaaguggc

SEQ ID NO: 3165529 - RNA, 19 nt, Artificial Sequence
  Description of Artificial Sequence: Synthetic oligonucleotide
uacacagaauacaggagga

SEQ ID NO: 3165530 - RNA, 19 nt, Artificial Sequence
  Description of Artificial Sequence: Synthetic oligonucleotide
agauguuuccuuucaaaga

SEQ ID NO: 3165531 - RNA, 19 nt, Artificial Sequence
  Description of Artificial Sequence: Synthetic oligonucleotide
aagauccagaugguguagc

SEQ ID NO: 3165532 - RNA, 19 nt, Artificial Sequence
  Description of Artificial Sequence: Synthetic oligonucleotide
aagaugaggugcauguggg

SEQ ID NO: 3165533 - RNA, 19 nt, Artificial Sequence
  Description of Artificial Sequence: Synthetic oligonucleotide
uguguagggaugcacggga

SEQ ID NO: 3165534 - RNA, 19 nt, Artificial Sequence
  Description of Artificial Sequence: Synthetic oligonucleotide
auguggguggccaugaugg

SEQ ID NO: 3165535 - RNA, 19 nt, Artificial Sequence
  Description of Artificial Sequence: Synthetic oligonucleotide
cauacacagaauacaggag

SEQ ID NO: 3165536 - RNA, 19 nt, Artificial Sequence
  Description of Artificial Sequence: Synthetic oligonucleotide
auggaaaagaccccugaca

SEQ ID NO: 3165537 - RNA, 19 nt, Artificial Sequence
  Description of Artificial Sequence: Synthetic oligonucleotide
ugauggaaaagaccccuga

SEQ ID NO: 3165538 - RNA, 19 nt, Artificial Sequence
  Description of Artificial Sequence: Synthetic oligonucleotide
ugacucuggagguuauccg

SEQ ID NO: 3165539 - RNA, 19 nt, Artificial Sequence
  Description of Artificial Sequence: Synthetic oligonucleotide
augguguagcucaugagac

SEQ ID NO: 3165540 - RNA, 19 nt, Artificial Sequence
  Description of Artificial Sequence: Synthetic oligonucleotide
ugguagaugauuugggcau

SEQ ID NO: 3165541 - RNA, 19 nt, Artificial Sequence
  Description of Artificial Sequence: Synthetic oligonucleotide
ucauuggugaagaucugaa

SEQ ID NO: 3165542 - RNA, 19 nt, Artificial Sequence
  Description of Artificial Sequence: Synthetic oligonucleotide
uuuugaagcuccagcagau

SEQ ID NO: 3165543 - RNA, 19 nt, Artificial Sequence
  Description of Artificial Sequence: Synthetic oligonucleotide
augcacgggacacccagcc

SEQ ID NO: 3165544 - RNA, 19 nt, Artificial Sequence
  Description of Artificial Sequence: Synthetic oligonucleotide
gaagaucugaacagccagg

SEQ ID NO: 3165545 - RNA, 19 nt, Artificial Sequence
  Description of Artificial Sequence: Synthetic oligonucleotide
gauguuuccuuucaaagau

SEQ ID NO: 3165546 - RNA, 19 nt, Artificial Sequence
  Description of Artificial Sequence: Synthetic oligonucleotide
gaugauuugggcaugggua

SEQ ID NO: 3165547 - RNA, 19 nt, Artificial Sequence
  Description of Artificial Sequence: Synthetic oligonucleotide
aacagccagguugauggac

SEQ ID NO: 3165548 - RNA, 19 nt, Artificial Sequence
  Description of Artificial Sequence: Synthetic oligonucleotide
gccaugauggaaaagaccc

SEQ ID NO: 3165549 - RNA, 19 nt, Artificial Sequence
  Description of Artificial Sequence: Synthetic oligonucleotide
aaagaccccugacagcacu

SEQ ID NO: 3165550 - RNA, 19 nt, Artificial Sequence
  Description of Artificial Sequence: Synthetic oligonucleotide
uggcugucagcccaaacca

SEQ ID NO: 3165551 - RNA, 19 nt, Artificial Sequence
  Description of Artificial Sequence: Synthetic oligonucleotide
aauacaggaggaagcagcu

SEQ ID NO: 3165552 - RNA, 19 nt, Artificial Sequence
  Description of Artificial Sequence: Synthetic oligonucleotide
uuauccgugcaguugcugu

SEQ ID NO: 3165553 - RNA, 19 nt, Artificial Sequence
  Description of Artificial Sequence: Synthetic oligonucleotide
cucugguagaugauuuggg

SEQ ID NO: 3165554 - RNA, 19 nt, Artificial Sequence
  Description of Artificial Sequence: Synthetic oligonucleotide
gauggaaaagaccccugac

SEQ ID NO: 3165555 - RNA, 19 nt, Artificial Sequence
  Description of Artificial Sequence: Synthetic oligonucleotide
aagaucugaacagccaggu

SEQ ID NO: 3165556 - RNA, 19 nt, Artificial Sequence
  Description of Artificial Sequence: Synthetic oligonucleotide
acucugguagaugauuugg

SEQ ID NO: 3165557 - RNA, 19 nt, Artificial Sequence
  Description of Artificial Sequence: Synthetic oligonucleotide
auaggugaagauccagaug

SEQ ID NO: 3165558 - RNA, 19 nt, Artificial Sequence
  Description of Artificial Sequence: Synthetic oligonucleotide
cagguugauggacucauag

SEQ ID NO: 3165559 - RNA, 19 nt, Artificial Sequence
  Description of Artificial Sequence: Synthetic oligonucleotide
acagacagaggcuguguag

SEQ ID NO: 3165560 - RNA, 19 nt, Artificial Sequence
  Description of Artificial Sequence: Synthetic oligonucleotide
gaugaggugcaugugggug

SEQ ID NO: 3165561 - RNA, 19 nt, Artificial Sequence
  Description of Artificial Sequence: Synthetic oligonucleotide
agaugauuugggcaugggu

SEQ ID NO: 3165562 - RNA, 19 nt, Artificial Sequence
  Description of Artificial Sequence: Synthetic oligonucleotide
cauggcucugaccagcgcc

SEQ ID NO: 3165563 - RNA, 19 nt, Artificial Sequence
  Description of Artificial Sequence: Synthetic oligonucleotide
caguucugcugcuucaugc

SEQ ID NO: 3165564 - RNA, 19 nt, Artificial Sequence
  Description of Artificial Sequence: Synthetic oligonucleotide
aacgauuuugaagcuccag

SEQ ID NO: 3165565 - RNA, 19 nt, Artificial Sequence
  Description of Artificial Sequence: Synthetic oligonucleotide
accagcgccacgcugaacu

SEQ ID NO: 3165566 - RNA, 19 nt, Artificial Sequence
  Description of Artificial Sequence: Synthetic oligonucleotide
augaugaaguggcucacca

SEQ ID NO: 3165567 - RNA, 19 nt, Artificial Sequence
  Description of Artificial Sequence: Synthetic oligonucleotide
gauuugggcauggguaacg

SEQ ID NO: 3165568 - RNA, 19 nt, Artificial Sequence
  Description of Artificial Sequence: Synthetic oligonucleotide
ugggcauacacagaauaca

SEQ ID NO: 3165569 - RNA, 19 nt, Artificial Sequence
  Description of Artificial Sequence: Synthetic oligonucleotide
cacagaauacaggaggaag

SEQ ID NO: 3165570 - RNA, 19 nt, Artificial Sequence
  Description of Artificial Sequence: Synthetic oligonucleotide
cuuucaaagaugaggugca

SEQ ID NO: 3165571 - RNA, 19 nt, Artificial Sequence
  Description of Artificial Sequence: Synthetic oligonucleotide
gcauacacagaauacagga

SEQ ID NO: 3165572 - RNA, 19 nt, Artificial Sequence
  Description of Artificial Sequence: Synthetic oligonucleotide
gaaguggcucaccacguug

SEQ ID NO: 3165573 - RNA, 19 nt, Artificial Sequence
  Description of Artificial Sequence: Synthetic oligonucleotide
aaguggcucaccacguugg

SEQ ID NO: 3165574 - RNA, 19 nt, Artificial Sequence
  Description of Artificial Sequence: Synthetic oligonucleotide
aagcagcugaccgccaugg

SEQ ID NO: 3165575 - RNA, 19 nt, Artificial Sequence
  Description of Artificial Sequence: Synthetic oligonucleotide
uggugaacugacucuggag

SEQ ID NO: 3165576 - RNA, 19 nt, Artificial Sequence
  Description of Artificial Sequence: Synthetic oligonucleotide
gacaaaguacagacagagg

SEQ ID NO: 3165577 - RNA, 19 nt, Artificial Sequence
  Description of Artificial Sequence: Synthetic oligonucleotide
uuacucugguagaugauuu

SEQ ID NO: 3165578 - RNA, 19 nt, Artificial Sequence
  Description of Artificial Sequence: Synthetic oligonucleotide
augauuugggcauggguaa

SEQ ID NO: 3165579 - RNA, 19 nt, Artificial Sequence
  Description of Artificial Sequence: Synthetic oligonucleotide
uguagggaugcacgggaca

SEQ ID NO: 3165580 - RNA, 19 nt, Artificial Sequence
  Description of Artificial Sequence: Synthetic oligonucleotide
agaggcuguguagggaugc

SEQ ID NO: 3165581 - RNA, 19 nt, Artificial Sequence
  Description of Artificial Sequence: Synthetic oligonucleotide
cagacagaggcuguguagg

SEQ ID NO: 3165582 - RNA, 19 nt, Artificial Sequence
  Description of Artificial Sequence: Synthetic oligonucleotide
gagggacaggaggagaacg

SEQ ID NO: 3165583 - RNA, 19 nt, Artificial Sequence
  Description of Artificial Sequence: Synthetic oligonucleotide
agggaugcacgggacaccc

SEQ ID NO: 3165584 - RNA, 19 nt, Artificial Sequence
  Description of Artificial Sequence: Synthetic oligonucleotide
gaagagaaccacuagaagc

SEQ ID NO: 3165585 - RNA, 19 nt, Artificial Sequence
  Description of Artificial Sequence: Synthetic oligonucleotide
uguacuguugcucauuagg

SEQ ID NO: 3165586 - RNA, 19 nt, Artificial Sequence
  Description of Artificial Sequence: Synthetic oligonucleotide
guuaccaucaccugguugg

SEQ ID NO: 3165587 - RNA, 19 nt, Artificial Sequence
  Description of Artificial Sequence: Synthetic oligonucleotide
aaccacuagaagcaagagc

SEQ ID NO: 3165588 - RNA, 19 nt, Artificial Sequence
  Description of Artificial Sequence: Synthetic oligonucleotide
aagacuggcauuugcuggc

SEQ ID NO: 3165589 - RNA, 19 nt, Artificial Sequence
  Description of Artificial Sequence: Synthetic oligonucleotide
auuggcaaauaccagguuc

SEQ ID NO: 3165590 - RNA, 19 nt, Artificial Sequence
  Description of Artificial Sequence: Synthetic oligonucleotide
acguuauuggaagagaacc

SEQ ID NO: 3165591 - RNA, 19 nt, Artificial Sequence
  Description of Artificial Sequence: Synthetic oligonucleotide
cuguuugcaagccagaugc

SEQ ID NO: 3165592 - RNA, 19 nt, Artificial Sequence
  Description of Artificial Sequence: Synthetic oligonucleotide
ugcauuggcaaauaccagg

SEQ ID NO: 3165593 - RNA, 19 nt, Artificial Sequence
  Description of Artificial Sequence: Synthetic oligonucleotide
gaagcaagagcuuguauag

SEQ ID NO: 3165594 - RNA, 19 nt, Artificial Sequence
  Description of Artificial Sequence: Synthetic oligonucleotide
agaguucccggauugagac

SEQ ID NO: 3165595 - RNA, 19 nt, Artificial Sequence
  Description of Artificial Sequence: Synthetic oligonucleotide
uuggcaaauaccagguucc

SEQ ID NO: 3165596 - RNA, 19 nt, Artificial Sequence
  Description of Artificial Sequence: Synthetic oligonucleotide
uccagcagcaaacugugag

SEQ ID NO: 3165597 - RNA, 19 nt, Artificial Sequence
  Description of Artificial Sequence: Synthetic oligonucleotide
aagagcuuguauaguagcc

SEQ ID NO: 3165598 - RNA, 19 nt, Artificial Sequence
  Description of Artificial Sequence: Synthetic oligonucleotide
uugagacugaguaaggcac

SEQ ID NO: 3165599 - RNA, 19 nt, Artificial Sequence
  Description of Artificial Sequence: Synthetic oligonucleotide
aagccucggaggcugaggc

SEQ ID NO: 3165600 - RNA, 19 nt, Artificial Sequence
  Description of Artificial Sequence: Synthetic oligonucleotide
aagaggggagggaagaggc

SEQ ID NO: 3165601 - RNA, 19 nt, Artificial Sequence
  Description of Artificial Sequence: Synthetic oligonucleotide
ugcuguuaccaucaccugg

SEQ ID NO: 3165602 - RNA, 19 nt, Artificial Sequence
  Description of Artificial Sequence: Synthetic oligonucleotide
uguauaguagccaguguac

SEQ ID NO: 3165603 - RNA, 19 nt, Artificial Sequence
  Description of Artificial Sequence: Synthetic oligonucleotide
accacuagaagcaagagcu

SEQ ID NO: 3165604 - RNA, 19 nt, Artificial Sequence
  Description of Artificial Sequence: Synthetic oligonucleotide
ucucacuggcacuagaagc

SEQ ID NO: 3165605 - RNA, 19 nt, Artificial Sequence
  Description of Artificial Sequence: Synthetic oligonucleotide
auaccagguucccaguugc

SEQ ID NO: 3165606 - RNA, 19 nt, Artificial Sequence
  Description of Artificial Sequence: Synthetic oligonucleotide
cauccagugacguuauugg

SEQ ID NO: 3165607 - RNA, 19 nt, Artificial Sequence
  Description of Artificial Sequence: Synthetic oligonucleotide
uuggaagagaaccacuaga

SEQ ID NO: 3165608 - RNA, 19 nt, Artificial Sequence
  Description of Artificial Sequence: Synthetic oligonucleotide
aauaccagguucccaguug

SEQ ID NO: 3165609 - RNA, 19 nt, Artificial Sequence
  Description of Artificial Sequence: Synthetic oligonucleotide
accaucaccugguuggccc

SEQ ID NO: 3165610 - RNA, 19 nt, Artificial Sequence
  Description of Artificial Sequence: Synthetic oligonucleotide
uuguauaguagccagugua

SEQ ID NO: 3165611 - RNA, 19 nt, Artificial Sequence
  Description of Artificial Sequence: Synthetic oligonucleotide
cugguuggccccaagaggg

SEQ ID NO: 3165612 - RNA, 19 nt, Artificial Sequence
  Description of Artificial Sequence: Synthetic oligonucleotide
uguugugcuggucucacug

SEQ ID NO: 3165613 - RNA, 19 nt, Artificial Sequence
  Description of Artificial Sequence: Synthetic oligonucleotide
cucacuggcacuagaagcc

SEQ ID NO: 3165614 - RNA, 19 nt, Artificial Sequence
  Description of Artificial Sequence: Synthetic oligonucleotide
uuugcuggcaacugugcag

SEQ ID NO: 3165615 - RNA, 19 nt, Artificial Sequence
  Description of Artificial Sequence: Synthetic oligonucleotide
uggaagagaaccacuagaa

SEQ ID NO: 3165616 - RNA, 19 nt, Artificial Sequence
  Description of Artificial Sequence: Synthetic oligonucleotide
ugugagggugccaucaggc

SEQ ID NO: 3165617 - RNA, 19 nt, Artificial Sequence
  Description of Artificial Sequence: Synthetic oligonucleotide
auugagacugaguaaggca

SEQ ID NO: 3165618 - RNA, 19 nt, Artificial Sequence
  Description of Artificial Sequence: Synthetic oligonucleotide
caagacuggcauuugcugg

SEQ ID NO: 3165619 - RNA, 19 nt, Artificial Sequence
  Description of Artificial Sequence: Synthetic oligonucleotide
uuugcaagccagaugcugu

SEQ ID NO: 3165620 - RNA, 19 nt, Artificial Sequence
  Description of Artificial Sequence: Synthetic oligonucleotide
uauaguagccaguguacug

SEQ ID NO: 3165621 - RNA, 19 nt, Artificial Sequence
  Description of Artificial Sequence: Synthetic oligonucleotide
auuagggcugggcugagag

SEQ ID NO: 3165622 - RNA, 19 nt, Artificial Sequence
  Description of Artificial Sequence: Synthetic oligonucleotide
ugcagcagcagccauggca

SEQ ID NO: 3165623 - RNA, 19 nt, Artificial Sequence
  Description of Artificial Sequence: Synthetic oligonucleotide
acuguugcucauuagggcu

SEQ ID NO: 3165624 - RNA, 19 nt, Artificial Sequence
  Description of Artificial Sequence: Synthetic oligonucleotide
agaagcaagagcuuguaua

SEQ ID NO: 3165625 - RNA, 19 nt, Artificial Sequence
  Description of Artificial Sequence: Synthetic oligonucleotide
uauuggaagagaaccacua

SEQ ID NO: 3165626 - RNA, 19 nt, Artificial Sequence
  Description of Artificial Sequence: Synthetic oligonucleotide
gacugaguaaggcaccucc

SEQ ID NO: 3165627 - RNA, 19 nt, Artificial Sequence
  Description of Artificial Sequence: Synthetic oligonucleotide
uccugcauuggcaaauacc

SEQ ID NO: 3165628 - RNA, 19 nt, Artificial Sequence
  Description of Artificial Sequence: Synthetic oligonucleotide
agaugcuguuaccaucacc

SEQ ID NO: 3165629 - RNA, 19 nt, Artificial Sequence
  Description of Artificial Sequence: Synthetic oligonucleotide
ugugcagcuccuuggagag

SEQ ID NO: 3165630 - RNA, 19 nt, Artificial Sequence
  Description of Artificial Sequence: Synthetic oligonucleotide
uuauuggaagagaaccacu

SEQ ID NO: 3165631 - RNA, 19 nt, Artificial Sequence
  Description of Artificial Sequence: Synthetic oligonucleotide
auuggaagagaaccacuag

SEQ ID NO: 3165632 - RNA, 19 nt, Artificial Sequence
  Description of Artificial Sequence: Synthetic oligonucleotide
caagagcuuguauaguagc

SEQ ID NO: 3165633 - RNA, 19 nt, Artificial Sequence
  Description of Artificial Sequence: Synthetic oligonucleotide
ugaguaaggcaccuccagc

SEQ ID NO: 3165634 - RNA, 19 nt, Artificial Sequence
  Description of Artificial Sequence: Synthetic oligonucleotide
ugacguuauuggaagagaa

SEQ ID NO: 3165635 - RNA, 19 nt, Artificial Sequence
  Description of Artificial Sequence: Synthetic oligonucleotide
gagcuuguauaguagccag

SEQ ID NO: 3165636 - RNA, 19 nt, Artificial Sequence
  Description of Artificial Sequence: Synthetic oligonucleotide
gcaaauaccagguucccag

SEQ ID NO: 3165637 - RNA, 19 nt, Artificial Sequence
  Description of Artificial Sequence: Synthetic oligonucleotide
guacuguugcucauuaggg

SEQ ID NO: 3165638 - RNA, 19 nt, Artificial Sequence
  Description of Artificial Sequence: Synthetic oligonucleotide
uacuguugcucauuagggc

SEQ ID NO: 3165639 - RNA, 19 nt, Artificial Sequence
  Description of Artificial Sequence: Synthetic oligonucleotide
uuggagagcagcagcagcu

SEQ ID NO: 3165640 - RNA, 19 nt, Artificial Sequence
  Description of Artificial Sequence: Synthetic oligonucleotide
ugcucauuagggcugggcu

SEQ ID NO: 3165641 - RNA, 19 nt, Artificial Sequence
  Description of Artificial Sequence: Synthetic oligonucleotide
uccagugacguuauuggaa

SEQ ID NO: 3165642 - RNA, 19 nt, Artificial Sequence
  Description of Artificial Sequence: Synthetic oligonucleotide
uaaggcaccuccagcagca

SEQ ID NO: 3165643 - RNA, 19 nt, Artificial Sequence
  Description of Artificial Sequence: Synthetic oligonucleotide
gauugagacugaguaaggc

SEQ ID NO: 3165644 - RNA, 19 nt, Artificial Sequence
  Description of Artificial Sequence: Synthetic oligonucleotide
gaugcuguuaccaucaccu

SEQ ID NO: 3165645 - RNA, 19 nt, Artificial Sequence
  Description of Artificial Sequence: Synthetic oligonucleotide
guagccaguguacuguugc

SEQ ID NO: 3165646 - RNA, 19 nt, Artificial Sequence
  Description of Artificial Sequence: Synthetic oligonucleotide
gaguaaggcaccuccagca

SEQ ID NO: 3165647 - RNA, 19 nt, Artificial Sequence
  Description of Artificial Sequence: Synthetic oligonucleotide
acuggcauuugcuggcaac

SEQ ID NO: 3165648 - RNA, 19 nt, Artificial Sequence
  Description of Artificial Sequence: Synthetic oligonucleotide
uguuaccaucaccugguug

SEQ ID NO: 3165649 - RNA, 19 nt, Artificial Sequence
  Description of Artificial Sequence: Synthetic oligonucleotide
ugagacugaguaaggcacc

SEQ ID NO: 3165650 - RNA, 19 nt, Artificial Sequence
  Description of Artificial Sequence: Synthetic oligonucleotide
agugacguuauuggaagag

SEQ ID NO: 3165651 - RNA, 19 nt, Artificial Sequence
  Description of Artificial Sequence: Synthetic oligonucleotide
cuggcaacugugcagcucc

SEQ ID NO: 3165652 - RNA, 19 nt, Artificial Sequence
  Description of Artificial Sequence: Synthetic oligonucleotide
guuauuggaagagaaccac

SEQ ID NO: 3165653 - RNA, 19 nt, Artificial Sequence
  Description of Artificial Sequence: Synthetic oligonucleotide
ugagggugccaucaggccu

SEQ ID NO: 3165654 - RNA, 19 nt, Artificial Sequence
  Description of Artificial Sequence: Synthetic oligonucleotide
ggcacuagaagccucggag

SEQ ID NO: 3165655 - RNA, 19 nt, Artificial Sequence
  Description of Artificial Sequence: Synthetic oligonucleotide
gagggaagaggcguggagg

SEQ ID NO: 3165656 - RNA, 19 nt, Artificial Sequence
  Description of Artificial Sequence: Synthetic oligonucleotide
gcagucacgauguugggag

SEQ ID NO: 3165657 - RNA, 19 nt, Artificial Sequence
  Description of Artificial Sequence: Synthetic oligonucleotide
cacuagaagccucggaggc

SEQ ID NO: 3165658 - RNA, 19 nt, Artificial Sequence
  Description of Artificial Sequence: Synthetic oligonucleotide
uucccaguugcauccagug

SEQ ID NO: 3165659 - RNA, 19 nt, Artificial Sequence
  Description of Artificial Sequence: Synthetic oligonucleotide
agccauggcagcaagacug

SEQ ID NO: 3165660 - RNA, 19 nt, Artificial Sequence
  Description of Artificial Sequence: Synthetic oligonucleotide
cagguucccaguugcaucc

SEQ ID NO: 3165661 - RNA, 19 nt, Artificial Sequence
  Description of Artificial Sequence: Synthetic oligonucleotide
aguaaggcaccuccagcag

SEQ ID NO: 3165662 - RNA, 19 nt, Artificial Sequence
  Description of Artificial Sequence: Synthetic oligonucleotide
aguucccggauugagacug

SEQ ID NO: 3165663 - RNA, 19 nt, Artificial Sequence
  Description of Artificial Sequence: Synthetic oligonucleotide
agcagcugcuguuugcaag

SEQ ID NO: 3165664 - RNA, 19 nt, Artificial Sequence
  Description of Artificial Sequence: Synthetic oligonucleotide
aacugugcagcuccuugga

SEQ ID NO: 3165665 - RNA, 19 nt, Artificial Sequence
  Description of Artificial Sequence: Synthetic oligonucleotide
auaguagccaguguacugu

SEQ ID NO: 3165666 - RNA, 19 nt, Artificial Sequence
  Description of Artificial Sequence: Synthetic oligonucleotide
agcaagagcuuguauagua

SEQ ID NO: 3165667 - RNA, 19 nt, Artificial Sequence
  Description of Artificial Sequence: Synthetic oligonucleotide
aucaggccuggguugaguc

SEQ ID NO: 3165668 - RNA, 19 nt, Artificial Sequence
  Description of Artificial Sequence: Synthetic oligonucleotide
uagggcugggcugagagca

SEQ ID NO: 3165669 - RNA, 19 nt, Artificial Sequence
  Description of Artificial Sequence: Synthetic oligonucleotide
uguugggagcuccuccugc

SEQ ID NO: 3165670 - RNA, 19 nt, Artificial Sequence
  Description of Artificial Sequence: Synthetic oligonucleotide
aaauaccagguucccaguu

SEQ ID NO: 3165671 - RNA, 19 nt, Artificial Sequence
  Description of Artificial Sequence: Synthetic oligonucleotide
cuuggagagcagcagcagc

SEQ ID NO: 3165672 - RNA, 19 nt, Artificial Sequence
  Description of Artificial Sequence: Synthetic oligonucleotide
caacugugcagcuccuugg

SEQ ID NO: 3165673 - RNA, 19 nt, Artificial Sequence
  Description of Artificial Sequence: Synthetic oligonucleotide
uugugcuggucucacuggc

SEQ ID NO: 3165674 - RNA, 19 nt, Artificial Sequence
  Description of Artificial Sequence: Synthetic oligonucleotide
aacugugagggugccauca

SEQ ID NO: 3165675 - RNA, 19 nt, Artificial Sequence
  Description of Artificial Sequence: Synthetic oligonucleotide
ugggcugagagcaccgccc

SEQ ID NO: 3165676 - RNA, 19 nt, Artificial Sequence
  Description of Artificial Sequence: Synthetic oligonucleotide
accugguuggccccaagag

SEQ ID NO: 3165677 - RNA, 19 nt, Artificial Sequence
  Description of Artificial Sequence: Synthetic oligonucleotide
auuugcuggcaacugugca

SEQ ID NO: 3165678 - RNA, 19 nt, Artificial Sequence
  Description of Artificial Sequence: Synthetic oligonucleotide
guugugcuggucucacugg

SEQ ID NO: 3165679 - RNA, 19 nt, Artificial Sequence
  Description of Artificial Sequence: Synthetic oligonucleotide
cuggguugaguccugcagc

SEQ ID NO: 3165680 - RNA, 19 nt, Artificial Sequence
  Description of Artificial Sequence: Synthetic oligonucleotide
cauuugcuggcaacugugc

SEQ ID NO: 3165681 - RNA, 19 nt, Artificial Sequence
  Description of Artificial Sequence: Synthetic oligonucleotide
auggcagcaagacuggcau

SEQ ID NO: 3165682 - RNA, 19 nt, Artificial Sequence
  Description of Artificial Sequence: Synthetic oligonucleotide
aagccagaugcuguuacca

SEQ ID NO: 3165683 - RNA, 19 nt, Artificial Sequence
  Description of Artificial Sequence: Synthetic oligonucleotide
aaacugugagggugccauc

SEQ ID NO: 3165684 - RNA, 19 nt, Artificial Sequence
  Description of Artificial Sequence: Synthetic oligonucleotide
gacuauaucacauuaaacg

SEQ ID NO: 3165685 - RNA, 19 nt, Artificial Sequence
  Description of Artificial Sequence: Synthetic oligonucleotide
auaauuaacaucaagcagc

SEQ ID NO: 3165686 - RNA, 19 nt, Artificial Sequence
  Description of Artificial Sequence: Synthetic oligonucleotide
aauacuuugguuccagccc

SEQ ID NO: 3165687 - RNA, 19 nt, Artificial Sequence
  Description of Artificial Sequence: Synthetic oligonucleotide
aauguagucaaucacaccu

SEQ ID NO: 3165688 - RNA, 19 nt, Artificial Sequence
  Description of Artificial Sequence: Synthetic oligonucleotide
aaugaguuaagaucugcac

SEQ ID NO: 3165689 - RNA, 19 nt, Artificial Sequence
  Description of Artificial Sequence: Synthetic oligonucleotide
gaaauaauuccaaagaaug

SEQ ID NO: 3165690 - RNA, 19 nt, Artificial Sequence
  Description of Artificial Sequence: Synthetic oligonucleotide
uuucuaauguaauaggaag

SEQ ID NO: 3165691 - RNA, 19 nt, Artificial Sequence
  Description of Artificial Sequence: Synthetic oligonucleotide
uaauguaauaggaagagaa

SEQ ID NO: 3165692 - RNA, 19 nt, Artificial Sequence
  Description of Artificial Sequence: Synthetic oligonucleotide
gauuacaacuaauaggcag

SEQ ID NO: 3165693 - RNA, 19 nt, Artificial Sequence
  Description of Artificial Sequence: Synthetic oligonucleotide
uucaaaucuagacagauau

SEQ ID NO: 3165694 - RNA, 19 nt, Artificial Sequence
  Description of Artificial Sequence: Synthetic oligonucleotide
aaauuagugauuuaccaau

SEQ ID NO: 3165695 - RNA, 19 nt, Artificial Sequence
  Description of Artificial Sequence: Synthetic oligonucleotide
uuuuagagaacaacacugg

SEQ ID NO: 3165696 - RNA, 19 nt, Artificial Sequence
  Description of Artificial Sequence: Synthetic oligonucleotide
acaacuaauaggcagacca

SEQ ID NO: 3165697 - RNA, 19 nt, Artificial Sequence
  Description of Artificial Sequence: Synthetic oligonucleotide
guucauaagacacucauug

SEQ ID NO: 3165698 - RNA, 19 nt, Artificial Sequence
  Description of Artificial Sequence: Synthetic oligonucleotide
aaacguacaaauuaagcaa

SEQ ID NO: 3165699 - RNA, 19 nt, Artificial Sequence
  Description of Artificial Sequence: Synthetic oligonucleotide
guauauaucugcuauuucc

SEQ ID NO: 3165700 - RNA, 19 nt, Artificial Sequence
  Description of Artificial Sequence: Synthetic oligonucleotide
uugauuuacaacuguacag

SEQ ID NO: 3165701 - RNA, 19 nt, Artificial Sequence
  Description of Artificial Sequence: Synthetic oligonucleotide
acaaaacauauacaaaguc

SEQ ID NO: 3165702 - RNA, 19 nt, Artificial Sequence
  Description of Artificial Sequence: Synthetic oligonucleotide
uuugauuuacaacuguaca

SEQ ID NO: 3165703 - RNA, 19 nt, Artificial Sequence
  Description of Artificial Sequence: Synthetic oligonucleotide
uuauagcaaacacauaaug

SEQ ID NO: 3165704 - RNA, 19 nt, Artificial Sequence
  Description of Artificial Sequence: Synthetic oligonucleotide
uuuccuauaaggcaugcca

SEQ ID NO: 3165705 - RNA, 19 nt, Artificial Sequence
  Description of Artificial Sequence: Synthetic oligonucleotide
aaaucagcuuguuaugaag

SEQ ID NO: 3165706 - RNA, 19 nt, Artificial Sequence
  Description of Artificial Sequence: Synthetic oligonucleotide
ucagcaaucuucuuuaaac

SEQ ID NO: 3165707 - RNA, 19 nt, Artificial Sequence
  Description of Artificial Sequence: Synthetic oligonucleotide
cauaugauggccauuuggc

SEQ ID NO: 3165708 - RNA, 19 nt, Artificial Sequence
  Description of Artificial Sequence: Synthetic oligonucleotide
auacuucacuccuacauac

SEQ ID NO: 3165709 - RNA, 19 nt, Artificial Sequence
  Description of Artificial Sequence: Synthetic oligonucleotide
aagugcuuuguuaaugugc

SEQ ID NO: 3165710 - RNA, 19 nt, Artificial Sequence
  Description of Artificial Sequence: Synthetic oligonucleotide
uuuaacuuauuuuggaaaa

SEQ ID NO: 3165711 - RNA, 19 nt, Artificial Sequence
  Description of Artificial Sequence: Synthetic oligonucleotide
cauaauuaacaucaagcag

SEQ ID NO: 3165712 - RNA, 19 nt, Artificial Sequence
  Description of Artificial Sequence: Synthetic oligonucleotide
uuagaguuaauauuucuaa

SEQ ID NO: 3165713 - RNA, 19 nt, Artificial Sequence
  Description of Artificial Sequence: Synthetic oligonucleotide
aaauuuaagugcuuuguua

SEQ ID NO: 3165714 - RNA, 19 nt, Artificial Sequence
  Description of Artificial Sequence: Synthetic oligonucleotide
aaaucuuguauuuggaguu

SEQ ID NO: 3165715 - RNA, 19 nt, Artificial Sequence
  Description of Artificial Sequence: Synthetic oligonucleotide
auagcaaacacauaaugaa

SEQ ID NO: 3165716 - RNA, 19 nt, Artificial Sequence
  Description of Artificial Sequence: Synthetic oligonucleotide
uauauaucugcuauuuccu

SEQ ID NO: 3165717 - RNA, 19 nt, Artificial Sequence
  Description of Artificial Sequence: Synthetic oligonucleotide
auugcuuaaauauuccaca

SEQ ID NO: 3165718 - RNA, 19 nt, Artificial Sequence
  Description of Artificial Sequence: Synthetic oligonucleotide
uauggcaguauauaucugc

SEQ ID NO: 3165719 - RNA, 19 nt, Artificial Sequence
  Description of Artificial Sequence: Synthetic oligonucleotide
gcuuauuugaaauaauucc

SEQ ID NO: 3165720 - RNA, 19 nt, Artificial Sequence
  Description of Artificial Sequence: Synthetic oligonucleotide
uagugauuuaccaauugug

SEQ ID NO: 3165721 - RNA, 19 nt, Artificial Sequence
  Description of Artificial Sequence: Synthetic oligonucleotide
cacguguaauauuauaugg

SEQ ID NO: 3165722 - RNA, 19 nt, Artificial Sequence
  Description of Artificial Sequence: Synthetic oligonucleotide
uaauacuuugguuccagcc

SEQ ID NO: 3165723 - RNA, 19 nt, Artificial Sequence
  Description of Artificial Sequence: Synthetic oligonucleotide
cucauuguaccucaguucc

SEQ ID NO: 3165724 - RNA, 19 nt, Artificial Sequence
  Description of Artificial Sequence: Synthetic oligonucleotide
uggcaaugaguuaagaucu

SEQ ID NO: 3165725 - RNA, 19 nt, Artificial Sequence
  Description of Artificial Sequence: Synthetic oligonucleotide
gugggaauaaaccaguagc

SEQ ID NO: 3165726 - RNA, 19 nt, Artificial Sequence
  Description of Artificial Sequence: Synthetic oligonucleotide
ugcacauagcaccagcggg

SEQ ID NO: 3165727 - RNA, 19 nt, Artificial Sequence
  Description of Artificial Sequence: Synthetic oligonucleotide
uuuugaaacuuugaccagg

SEQ ID NO: 3165728 - RNA, 19 nt, Artificial Sequence
  Description of Artificial Sequence: Synthetic oligonucleotide
uauuauauggcuuucccuu

SEQ ID NO: 3165729 - RNA, 19 nt, Artificial Sequence
  Description of Artificial Sequence: Synthetic oligonucleotide
uaauaggaagagaagaaau

SEQ ID NO: 3165730 - RNA, 19 nt, Artificial Sequence
  Description of Artificial Sequence: Synthetic oligonucleotide
guuauuuaugcucucugcc

SEQ ID NO: 3165731 - RNA, 19 nt, Artificial Sequence
  Description of Artificial Sequence: Synthetic oligonucleotide
ucagccaacaaacugucac

SEQ ID NO: 3165732 - RNA, 19 nt, Artificial Sequence
  Description of Artificial Sequence: Synthetic oligonucleotide
uaauuuucuccccacaaaa

SEQ ID NO: 3165733 - RNA, 19 nt, Artificial Sequence
  Description of Artificial Sequence: Synthetic oligonucleotide
acauuaaacguacaaauua

SEQ ID NO: 3165734 - RNA, 19 nt, Artificial Sequence
  Description of Artificial Sequence: Synthetic oligonucleotide
aaguucauaagacacucau

SEQ ID NO: 3165735 - RNA, 19 nt, Artificial Sequence
  Description of Artificial Sequence: Synthetic oligonucleotide
aauuccaaagaauguauuu

SEQ ID NO: 3165736 - RNA, 19 nt, Artificial Sequence
  Description of Artificial Sequence: Synthetic oligonucleotide
uuagugauuuaccaauugu

SEQ ID NO: 3165737 - RNA, 19 nt, Artificial Sequence
  Description of Artificial Sequence: Synthetic oligonucleotide
ucaauaugcacaaaacaua

SEQ ID NO: 3165738 - RNA, 19 nt, Artificial Sequence
  Description of Artificial Sequence: Synthetic oligonucleotide
acuuucaagauguauggca

SEQ ID NO: 3165739 - RNA, 19 nt, Artificial Sequence
  Description of Artificial Sequence: Synthetic oligonucleotide
uuauuuuggaaaacacgug

SEQ ID NO: 3165740 - RNA, 19 nt, Artificial Sequence
  Description of Artificial Sequence: Synthetic oligonucleotide
uaaugaaaggaaccugaag

SEQ ID NO: 3165741 - RNA, 19 nt, Artificial Sequence
  Description of Artificial Sequence: Synthetic oligonucleotide
ucaguuggaagccaugugu

SEQ ID NO: 3165742 - RNA, 19 nt, Artificial Sequence
  Description of Artificial Sequence: Synthetic oligonucleotide
ggcaacaaagauuaaaagc

SEQ ID NO: 3165743 - RNA, 19 nt, Artificial Sequence
  Description of Artificial Sequence: Synthetic oligonucleotide
auuuaacuuauuuuggaaa

SEQ ID NO: 3165744 - RNA, 19 nt, Artificial Sequence
  Description of Artificial Sequence: Synthetic oligonucleotide
agguguaauugguauaagg

SEQ ID NO: 3165745 - RNA, 19 nt, Artificial Sequence
  Description of Artificial Sequence: Synthetic oligonucleotide
uuugccacuauaagcagcu

SEQ ID NO: 3165746 - RNA, 19 nt, Artificial Sequence
  Description of Artificial Sequence: Synthetic oligonucleotide
agccaacuaauuuucuccc

SEQ ID NO: 3165747 - RNA, 19 nt, Artificial Sequence
  Description of Artificial Sequence: Synthetic oligonucleotide
cugaauaaguuucacauca

SEQ ID NO: 3165748 - RNA, 19 nt, Artificial Sequence
  Description of Artificial Sequence: Synthetic oligonucleotide
aaauccucucuaauguuac

SEQ ID NO: 3165749 - RNA, 19 nt, Artificial Sequence
  Description of Artificial Sequence: Synthetic oligonucleotide
augcacaaaacauauacaa

SEQ ID NO: 3165750 - RNA, 19 nt, Artificial Sequence
  Description of Artificial Sequence: Synthetic oligonucleotide
cauggucugaauaaguuuc

SEQ ID NO: 3165751 - RNA, 19 nt, Artificial Sequence
  Description of Artificial Sequence: Synthetic oligonucleotide
cauugcuuaaauauuccac

SEQ ID NO: 3165752 - RNA, 19 nt, Artificial Sequence
  Description of Artificial Sequence: Synthetic oligonucleotide
aaguuucacaucagaauac

SEQ ID NO: 3165753 - RNA, 19 nt, Artificial Sequence
  Description of Artificial Sequence: Synthetic oligonucleotide
aacagauccccgucuuggc

SEQ ID NO: 3165754 - RNA, 19 nt, Artificial Sequence
  Description of Artificial Sequence: Synthetic oligonucleotide
cuuauuuuggaaaacacgu

SEQ ID NO: 3165755 - RNA, 19 nt, Artificial Sequence
  Description of Artificial Sequence: Synthetic oligonucleotide
ugggaauaaaccaguagcu

SEQ ID NO: 3165756 - RNA, 19 nt, Artificial Sequence
  Description of Artificial Sequence: Synthetic oligonucleotide
uuaaggacggccauacuuc

SEQ ID NO: 3165757 - RNA, 19 nt, Artificial Sequence
  Description of Artificial Sequence: Synthetic oligonucleotide
cacaccuuugaaaucaaag

SEQ ID NO: 3165758 - RNA, 19 nt, Artificial Sequence
  Description of Artificial Sequence: Synthetic oligonucleotide
acguguaauauuauauggc

SEQ ID NO: 3165759 - RNA, 19 nt, Artificial Sequence
  Description of Artificial Sequence: Synthetic oligonucleotide
aguauauaucugcuauuuc

SEQ ID NO: 3165760 - RNA, 19 nt, Artificial Sequence
  Description of Artificial Sequence: Synthetic oligonucleotide
acucauuguaccucaguuc

SEQ ID NO: 3165761 - RNA, 19 nt, Artificial Sequence
  Description of Artificial Sequence: Synthetic oligonucleotide
ugagacaaacaucaugguc

SEQ ID NO: 3165762 - RNA, 19 nt, Artificial Sequence
  Description of Artificial Sequence: Synthetic oligonucleotide
augguugucagcuacuccu

SEQ ID NO: 3165763 - RNA, 19 nt, Artificial Sequence
  Description of Artificial Sequence: Synthetic oligonucleotide
ugauguuguucucaaccag

SEQ ID NO: 3165764 - RNA, 19 nt, Artificial Sequence
  Description of Artificial Sequence: Synthetic oligonucleotide
ugacuauaucacauuaaac

SEQ ID NO: 3165765 - RNA, 19 nt, Artificial Sequence
  Description of Artificial Sequence: Synthetic oligonucleotide
uguuacugugccauaauua

SEQ ID NO: 3165766 - RNA, 19 nt, Artificial Sequence
  Description of Artificial Sequence: Synthetic oligonucleotide
ugguauguauggaucaucu

SEQ ID NO: 3165767 - RNA, 19 nt, Artificial Sequence
  Description of Artificial Sequence: Synthetic oligonucleotide
acuauaagcagcuguuugu

SEQ ID NO: 3165768 - RNA, 19 nt, Artificial Sequence
  Description of Artificial Sequence: Synthetic oligonucleotide
cacaucagaauacucuggg

SEQ ID NO: 3165769 - RNA, 19 nt, Artificial Sequence
  Description of Artificial Sequence: Synthetic oligonucleotide
augacuauaucacauuaaa

SEQ ID NO: 3165770 - RNA, 19 nt, Artificial Sequence
  Description of Artificial Sequence: Synthetic oligonucleotide
auagcaacagauccccguc

SEQ ID NO: 3165771 - RNA, 19 nt, Artificial Sequence
  Description of Artificial Sequence: Synthetic oligonucleotide
uggcaacaaagauuaaaag

SEQ ID NO: 3165772 - RNA, 19 nt, Artificial Sequence
  Description of Artificial Sequence: Synthetic oligonucleotide
aauuaggaucugcgguugg

SEQ ID NO: 3165773 - RNA, 19 nt, Artificial Sequence
  Description of Artificial Sequence: Synthetic oligonucleotide
uuaaccucugagacaaaca

SEQ ID NO: 3165774 - RNA, 19 nt, Artificial Sequence
  Description of Artificial Sequence: Synthetic oligonucleotide
aauguuauuuaugcucucu

SEQ ID NO: 3165775 - RNA, 19 nt, Artificial Sequence
  Description of Artificial Sequence: Synthetic oligonucleotide
auaggcgcucuucaguugg

SEQ ID NO: 3165776 - RNA, 19 nt, Artificial Sequence
  Description of Artificial Sequence: Synthetic oligonucleotide
aaauaccaaauucuacuuu

SEQ ID NO: 3165777 - RNA, 19 nt, Artificial Sequence
  Description of Artificial Sequence: Synthetic oligonucleotide
ugggccaacgacaaccaag

SEQ ID NO: 3165778 - RNA, 19 nt, Artificial Sequence
  Description of Artificial Sequence: Synthetic oligonucleotide
cuuguuauggcuaaugacu

SEQ ID NO: 3165779 - RNA, 19 nt, Artificial Sequence
  Description of Artificial Sequence: Synthetic oligonucleotide
acaucaagcagccaacuaa

SEQ ID NO: 3165780 - RNA, 19 nt, Artificial Sequence
  Description of Artificial Sequence: Synthetic oligonucleotide
aaaauaucagacacuaauu

SEQ ID NO: 3165781 - RNA, 19 nt, Artificial Sequence
  Description of Artificial Sequence: Synthetic oligonucleotide
augauaucaauaugcacaa

SEQ ID NO: 3165782 - RNA, 19 nt, Artificial Sequence
  Description of Artificial Sequence: Synthetic oligonucleotide
uaaaucugucuucuccuca

SEQ ID NO: 3165783 - RNA, 19 nt, Artificial Sequence
  Description of Artificial Sequence: Synthetic oligonucleotide
ugcacaaaacauauacaaa

SEQ ID NO: 3165784 - RNA, 19 nt, Artificial Sequence
  Description of Artificial Sequence: Synthetic oligonucleotide
aauuacauaggacauauuc

SEQ ID NO: 3165785 - RNA, 19 nt, Artificial Sequence
  Description of Artificial Sequence: Synthetic oligonucleotide
uuucuuuugauuuagaacc

SEQ ID NO: 3165786 - RNA, 19 nt, Artificial Sequence
  Description of Artificial Sequence: Synthetic oligonucleotide
aguauuugaacuuucaggg

SEQ ID NO: 3165787 - RNA, 19 nt, Artificial Sequence
  Description of Artificial Sequence: Synthetic oligonucleotide
uuuagaaccacaaagaguc

SEQ ID NO: 3165788 - RNA, 19 nt, Artificial Sequence
  Description of Artificial Sequence: Synthetic oligonucleotide
aaguauuugaacuuucagg

SEQ ID NO: 3165789 - RNA, 19 nt, Artificial Sequence
  Description of Artificial Sequence: Synthetic oligonucleotide
uugauuuagaaccacaaag

SEQ ID NO: 3165790 - RNA, 19 nt, Artificial Sequence
  Description of Artificial Sequence: Synthetic oligonucleotide
uccauuaugauuuagauua

SEQ ID NO: 3165791 - RNA, 19 nt, Artificial Sequence
  Description of Artificial Sequence: Synthetic oligonucleotide
aaugguuucaaccucagcu

SEQ ID NO: 3165792 - RNA, 19 nt, Artificial Sequence
  Description of Artificial Sequence: Synthetic oligonucleotide
uaugauuuagauuagugug

SEQ ID NO: 3165793 - RNA, 19 nt, Artificial Sequence
  Description of Artificial Sequence: Synthetic oligonucleotide
aguaguuaauguuacagac

SEQ ID NO: 3165794 - RNA, 19 nt, Artificial Sequence
  Description of Artificial Sequence: Synthetic oligonucleotide
uuuccaauuacauaggaca

SEQ ID NO: 3165795 - RNA, 19 nt, Artificial Sequence
  Description of Artificial Sequence: Synthetic oligonucleotide
guucuuuccaauuacauag

SEQ ID NO: 3165796 - RNA, 19 nt, Artificial Sequence
  Description of Artificial Sequence: Synthetic oligonucleotide
aauuguucuuuccaauuac

SEQ ID NO: 3165797 - RNA, 19 nt, Artificial Sequence
  Description of Artificial Sequence: Synthetic oligonucleotide
aaauuucagaccuacauaa

SEQ ID NO: 3165798 - RNA, 19 nt, Artificial Sequence
  Description of Artificial Sequence: Synthetic oligonucleotide
uuacuuaggacuuuuaugu

SEQ ID NO: 3165799 - RNA, 19 nt, Artificial Sequence
  Description of Artificial Sequence: Synthetic oligonucleotide
aaugccauuuuccuuuuac

SEQ ID NO: 3165800 - RNA, 19 nt, Artificial Sequence
  Description of Artificial Sequence: Synthetic oligonucleotide
aauuuucucaucuagugaa

SEQ ID NO: 3165801 - RNA, 19 nt, Artificial Sequence
  Description of Artificial Sequence: Synthetic oligonucleotide
ucuacugcuaguaaggaca

SEQ ID NO: 3165802 - RNA, 19 nt, Artificial Sequence
  Description of Artificial Sequence: Synthetic oligonucleotide
guuaauguuacagacaaag

SEQ ID NO: 3165803 - RNA, 19 nt, Artificial Sequence
  Description of Artificial Sequence: Synthetic oligonucleotide
uacauaagacuuuugcugg

SEQ ID NO: 3165804 - RNA, 19 nt, Artificial Sequence
  Description of Artificial Sequence: Synthetic oligonucleotide
ucaaaugcuaucacaacag

SEQ ID NO: 3165805 - RNA, 19 nt, Artificial Sequence
  Description of Artificial Sequence: Synthetic oligonucleotide
aaaguauuugaacuuucag

SEQ ID NO: 3165806 - RNA, 19 nt, Artificial Sequence
  Description of Artificial Sequence: Synthetic oligonucleotide
uugaugaaauuucagaccu

SEQ ID NO: 3165807 - RNA, 19 nt, Artificial Sequence
  Description of Artificial Sequence: Synthetic oligonucleotide
accuacauaagacuuuugc

SEQ ID NO: 3165808 - RNA, 19 nt, Artificial Sequence
  Description of Artificial Sequence: Synthetic oligonucleotide
ugauuuagaaccacaaaga

SEQ ID NO: 3165809 - RNA, 19 nt, Artificial Sequence
  Description of Artificial Sequence: Synthetic oligonucleotide
uaauguuacagacaaagau

SEQ ID NO: 3165810 - RNA, 19 nt, Artificial Sequence
  Description of Artificial Sequence: Synthetic oligonucleotide
gauuuagaaccacaaagag

SEQ ID NO: 3165811 - RNA, 19 nt, Artificial Sequence
  Description of Artificial Sequence: Synthetic oligonucleotide
uuuacuuaggacuuuuaug

SEQ ID NO: 3165812 - RNA, 19 nt, Artificial Sequence
  Description of Artificial Sequence: Synthetic oligonucleotide
ugaacuuucagggaaaaug

SEQ ID NO: 3165813 - RNA, 19 nt, Artificial Sequence
  Description of Artificial Sequence: Synthetic oligonucleotide
uucaaaugcuaucacaaca

SEQ ID NO: 3165814 - RNA, 19 nt, Artificial Sequence
  Description of Artificial Sequence: Synthetic oligonucleotide
acuuuuaugucuuugcugu

SEQ ID NO: 3165815 - RNA, 19 nt, Artificial Sequence
  Description of Artificial Sequence: Synthetic oligonucleotide
ugaaauuucagaccuacau

SEQ ID NO: 3165816 - RNA, 19 nt, Artificial Sequence
  Description of Artificial Sequence: Synthetic oligonucleotide
uaguuaauguuacagacaa

SEQ ID NO: 3165817 - RNA, 19 nt, Artificial Sequence
  Description of Artificial Sequence: Synthetic oligonucleotide
aaauucaaaugcuaucaca

SEQ ID NO: 3165818 - RNA, 19 nt, Artificial Sequence
  Description of Artificial Sequence: Synthetic oligonucleotide
uuaugauuuagauuagugu

SEQ ID NO: 3165819 - RNA, 19 nt, Artificial Sequence
  Description of Artificial Sequence: Synthetic oligonucleotide
uuaaaguuucuuuugauuu

SEQ ID NO: 3165820 - RNA, 19 nt, Artificial Sequence
  Description of Artificial Sequence: Synthetic oligonucleotide
cuacauaagacuuuugcug

SEQ ID NO: 3165821 - RNA, 19 nt, Artificial Sequence
  Description of Artificial Sequence: Synthetic oligonucleotide
aaugcuaucacaacagucu

SEQ ID NO: 3165822 - RNA, 19 nt, Artificial Sequence
  Description of Artificial Sequence: Synthetic oligonucleotide
uuacauaggacauauucac

SEQ ID NO: 3165823 - RNA, 19 nt, Artificial Sequence
  Description of Artificial Sequence: Synthetic oligonucleotide
uuauuaaaguuucuuuuga

SEQ ID NO: 3165824 - RNA, 19 nt, Artificial Sequence
  Description of Artificial Sequence: Synthetic oligonucleotide
uaucacaacagucuuauua

SEQ ID NO: 3165825 - RNA, 19 nt, Artificial Sequence
  Description of Artificial Sequence: Synthetic oligonucleotide
uccagugccauuuucagug

SEQ ID NO: 3165826 - RNA, 19 nt, Artificial Sequence
  Description of Artificial Sequence: Synthetic oligonucleotide
cuuauuaaaguuucuuuug

SEQ ID NO: 3165827 - RNA, 19 nt, Artificial Sequence
  Description of Artificial Sequence: Synthetic oligonucleotide
cuugaugaaauuucagacc

SEQ ID NO: 3165828 - RNA, 19 nt, Artificial Sequence
  Description of Artificial Sequence: Synthetic oligonucleotide
auauucaccauccauuaug

SEQ ID NO: 3165829 - RNA, 19 nt, Artificial Sequence
  Description of Artificial Sequence: Synthetic oligonucleotide
uauuugaacuuucagggaa

SEQ ID NO: 3165830 - RNA, 19 nt, Artificial Sequence
  Description of Artificial Sequence: Synthetic oligonucleotide
uuucagugcucuuucauag

SEQ ID NO: 3165831 - RNA, 19 nt, Artificial Sequence
  Description of Artificial Sequence: Synthetic oligonucleotide
uagugaaaguauuugaacu

SEQ ID NO: 3165832 - RNA, 19 nt, Artificial Sequence
  Description of Artificial Sequence: Synthetic oligonucleotide
guaauuuucucaucuagug

SEQ ID NO: 3165833 - RNA, 19 nt, Artificial Sequence
  Description of Artificial Sequence: Synthetic oligonucleotide
aggacuuuuaugucuuugc

SEQ ID NO: 3165834 - RNA, 19 nt, Artificial Sequence
  Description of Artificial Sequence: Synthetic oligonucleotide
uccuuuuacugcuugauga

SEQ ID NO: 3165835 - RNA, 19 nt, Artificial Sequence
  Description of Artificial Sequence: Synthetic oligonucleotide
ucaccauccauuaugauuu

SEQ ID NO: 3165836 - RNA, 19 nt, Artificial Sequence
  Description of Artificial Sequence: Synthetic oligonucleotide
gauugguuggccuuguggc

SEQ ID NO: 3165837 - RNA, 19 nt, Artificial Sequence
  Description of Artificial Sequence: Synthetic oligonucleotide
acagacaaagauugguugg

SEQ ID NO: 3165838 - RNA, 19 nt, Artificial Sequence
  Description of Artificial Sequence: Synthetic oligonucleotide
uuucagaccuacauaagac

SEQ ID NO: 3165839 - RNA, 19 nt, Artificial Sequence
  Description of Artificial Sequence: Synthetic oligonucleotide
ucuagugaaaguauuugaa

SEQ ID NO: 3165840 - RNA, 19 nt, Artificial Sequence
  Description of Artificial Sequence: Synthetic oligonucleotide
aauucaaaugcuaucacaa

SEQ ID NO: 3165841 - RNA, 19 nt, Artificial Sequence
  Description of Artificial Sequence: Synthetic oligonucleotide
ucuuauuaaaguuucuuuu

SEQ ID NO: 3165842 - RNA, 19 nt, Artificial Sequence
  Description of Artificial Sequence: Synthetic oligonucleotide
uuuugauuuagaaccacaa

SEQ ID NO: 3165843 - RNA, 19 nt, Artificial Sequence
  Description of Artificial Sequence: Synthetic oligonucleotide
aaguaguuaauguuacaga

SEQ ID NO: 3165844 - RNA, 19 nt, Artificial Sequence
  Description of Artificial Sequence: Synthetic oligonucleotide
aaaguuucuuuugauuuag

SEQ ID NO: 3165845 - RNA, 19 nt, Artificial Sequence
  Description of Artificial Sequence: Synthetic oligonucleotide
acaacagucuuauuaaagu

SEQ ID NO: 3165846 - RNA, 19 nt, Artificial Sequence
  Description of Artificial Sequence: Synthetic oligonucleotide
acauaggacauauucacca

SEQ ID NO: 3165847 - RNA, 19 nt, Artificial Sequence
  Description of Artificial Sequence: Synthetic oligonucleotide
augauuuagauuagugugc

SEQ ID NO: 3165848 - RNA, 19 nt, Artificial Sequence
  Description of Artificial Sequence: Synthetic oligonucleotide
uaggacauauucaccaucc

SEQ ID NO: 3165849 - RNA, 19 nt, Artificial Sequence
  Description of Artificial Sequence: Synthetic oligonucleotide
aaaugcuaucacaacaguc

SEQ ID NO: 3165850 - RNA, 19 nt, Artificial Sequence
  Description of Artificial Sequence: Synthetic oligonucleotide
uaauuuucucaucuaguga

SEQ ID NO: 3165851 - RNA, 19 nt, Artificial Sequence
  Description of Artificial Sequence: Synthetic oligonucleotide
guuucuuuugauuuagaac

SEQ ID NO: 3165852 - RNA, 19 nt, Artificial Sequence
  Description of Artificial Sequence: Synthetic oligonucleotide
agauuagugugccaaguag

SEQ ID NO: 3165853 - RNA, 19 nt, Artificial Sequence
  Description of Artificial Sequence: Synthetic oligonucleotide
auucaaaugcuaucacaac

SEQ ID NO: 3165854 - RNA, 19 nt, Artificial Sequence
  Description of Artificial Sequence: Synthetic oligonucleotide
ugcuaguaaggacacaaug

SEQ ID NO: 3165855 - RNA, 19 nt, Artificial Sequence
  Description of Artificial Sequence: Synthetic oligonucleotide
uggcuacaaauucaaaugc

SEQ ID NO: 3165856 - RNA, 19 nt, Artificial Sequence
  Description of Artificial Sequence: Synthetic oligonucleotide
uacagacaaagauugguug

SEQ ID NO: 3165857 - RNA, 19 nt, Artificial Sequence
  Description of Artificial Sequence: Synthetic oligonucleotide
acaaauucaaaugcuauca

SEQ ID NO: 3165858 - RNA, 19 nt, Artificial Sequence
  Description of Artificial Sequence: Synthetic oligonucleotide
uauucaccauccauuauga

SEQ ID NO: 3165859 - RNA, 19 nt, Artificial Sequence
  Description of Artificial Sequence: Synthetic oligonucleotide
uuaauguuacagacaaaga

SEQ ID NO: 3165860 - RNA, 19 nt, Artificial Sequence
  Description of Artificial Sequence: Synthetic oligonucleotide
guggcuacaaauucaaaug

SEQ ID NO: 3165861 - RNA, 19 nt, Artificial Sequence
  Description of Artificial Sequence: Synthetic oligonucleotide
ugcuugaugaaauuucaga

SEQ ID NO: 3165862 - RNA, 19 nt, Artificial Sequence
  Description of Artificial Sequence: Synthetic oligonucleotide
uguggcuacaaauucaaau

SEQ ID NO: 3165863 - RNA, 19 nt, Artificial Sequence
  Description of Artificial Sequence: Synthetic oligonucleotide
auuucagaccuacauaaga

SEQ ID NO: 3165864 - RNA, 19 nt, Artificial Sequence
  Description of Artificial Sequence: Synthetic oligonucleotide
caaguaguuaauguuacag

SEQ ID NO: 3165865 - RNA, 19 nt, Artificial Sequence
  Description of Artificial Sequence: Synthetic oligonucleotide
gaacuuucagggaaaaugc

SEQ ID NO: 3165866 - RNA, 19 nt, Artificial Sequence
  Description of Artificial Sequence: Synthetic oligonucleotide
aauguuacagacaaagauu

SEQ ID NO: 3165867 - RNA, 19 nt, Artificial Sequence
  Description of Artificial Sequence: Synthetic oligonucleotide
cuagugaaaguauuugaac

SEQ ID NO: 3165868 - RNA, 19 nt, Artificial Sequence
  Description of Artificial Sequence: Synthetic oligonucleotide
uuuagauuagugugccaag

SEQ ID NO: 3165869 - RNA, 19 nt, Artificial Sequence
  Description of Artificial Sequence: Synthetic oligonucleotide
ucagugcucuuucauaggc

SEQ ID NO: 3165870 - RNA, 19 nt, Artificial Sequence
  Description of Artificial Sequence: Synthetic oligonucleotide
aacuuucagggaaaaugcc

SEQ ID NO: 3165871 - RNA, 19 nt, Artificial Sequence
  Description of Artificial Sequence: Synthetic oligonucleotide
ugccauuuuccuuuuacug

SEQ ID NO: 3165872 - RNA, 19 nt, Artificial Sequence
  Description of Artificial Sequence: Synthetic oligonucleotide
ugugccaaguaguuaaugu

SEQ ID NO: 3165873 - RNA, 19 nt, Artificial Sequence
  Description of Artificial Sequence: Synthetic oligonucleotide
agauugguuggccuugugg

SEQ ID NO: 3165874 - RNA, 19 nt, Artificial Sequence
  Description of Artificial Sequence: Synthetic oligonucleotide
gacuuuuaugucuuugcug

SEQ ID NO: 3165875 - RNA, 19 nt, Artificial Sequence
  Description of Artificial Sequence: Synthetic oligonucleotide
uuugauuuagaaccacaaa

SEQ ID NO: 3165876 - RNA, 19 nt, Artificial Sequence
  Description of Artificial Sequence: Synthetic oligonucleotide
uaugucuuugcuguccacg

SEQ ID NO: 3165877 - RNA, 19 nt, Artificial Sequence
  Description of Artificial Sequence: Synthetic oligonucleotide
agggaaaaugccauuuucc

SEQ ID NO: 3165878 - RNA, 19 nt, Artificial Sequence
  Description of Artificial Sequence: Synthetic oligonucleotide
uuuuacugcuugaugaaau

SEQ ID NO: 3165879 - RNA, 19 nt, Artificial Sequence
  Description of Artificial Sequence: Synthetic oligonucleotide
uguuacagacaaagauugg

SEQ ID NO: 3165880 - RNA, 19 nt, Artificial Sequence
  Description of Artificial Sequence: Synthetic oligonucleotide
uucuuuccaauuacauagg

SEQ ID NO: 3165881 - RNA, 19 nt, Artificial Sequence
  Description of Artificial Sequence: Synthetic oligonucleotide
acauaagacuuuugcuggc

SEQ ID NO: 3165882 - RNA, 19 nt, Artificial Sequence
  Description of Artificial Sequence: Synthetic oligonucleotide
cuuuugcuggccauaauug

SEQ ID NO: 3165883 - RNA, 19 nt, Artificial Sequence
  Description of Artificial Sequence: Synthetic oligonucleotide
ugaccucugacucuacugc

SEQ ID NO: 3165884 - RNA, 19 nt, Artificial Sequence
  Description of Artificial Sequence: Synthetic oligonucleotide
aauuuccucauucagauuc

SEQ ID NO: 3165885 - RNA, 19 nt, Artificial Sequence
  Description of Artificial Sequence: Synthetic oligonucleotide
aacacuucuuauuaguagc

SEQ ID NO: 3165886 - RNA, 19 nt, Artificial Sequence
  Description of Artificial Sequence: Synthetic oligonucleotide
ucaaguugaaaucuggucc

SEQ ID NO: 3165887 - RNA, 19 nt, Artificial Sequence
  Description of Artificial Sequence: Synthetic oligonucleotide
ugaauuuuccaaaauaacu

SEQ ID NO: 3165888 - RNA, 19 nt, Artificial Sequence
  Description of Artificial Sequence: Synthetic oligonucleotide
uaaauuuugaugucaggcg

SEQ ID NO: 3165889 - RNA, 19 nt, Artificial Sequence
  Description of Artificial Sequence: Synthetic oligonucleotide
aacuuucuuucuuauaaac

SEQ ID NO: 3165890 - RNA, 19 nt, Artificial Sequence
  Description of Artificial Sequence: Synthetic oligonucleotide
uuucuuauaaacucuacug

SEQ ID NO: 3165891 - RNA, 19 nt, Artificial Sequence
  Description of Artificial Sequence: Synthetic oligonucleotide
uucuuauaaacucuacugg

SEQ ID NO: 3165892 - RNA, 19 nt, Artificial Sequence
  Description of Artificial Sequence: Synthetic oligonucleotide
cauuauuccaacuauggcc

SEQ ID NO: 3165893 - RNA, 19 nt, Artificial Sequence
  Description of Artificial Sequence: Synthetic oligonucleotide
uuaacuuucuuucuuauaa

SEQ ID NO: 3165894 - RNA, 19 nt, Artificial Sequence
  Description of Artificial Sequence: Synthetic oligonucleotide
aaaauuuccucauucagau

SEQ ID NO: 3165895 - RNA, 19 nt, Artificial Sequence
  Description of Artificial Sequence: Synthetic oligonucleotide
uuugaauuuuccaaaauaa

SEQ ID NO: 3165896 - RNA, 19 nt, Artificial Sequence
  Description of Artificial Sequence: Synthetic oligonucleotide
cuuauuaguagcauuauuc

SEQ ID NO: 3165897 - RNA, 19 nt, Artificial Sequence
  Description of Artificial Sequence: Synthetic oligonucleotide
ugagucauaauuuagcccu

SEQ ID NO: 3165898 - RNA, 19 nt, Artificial Sequence
  Description of Artificial Sequence: Synthetic oligonucleotide
uaaaauauccacccuaugu

SEQ ID NO: 3165899 - RNA, 19 nt, Artificial Sequence
  Description of Artificial Sequence: Synthetic oligonucleotide
gucauaauaacuucuuugg

SEQ ID NO: 3165900 - RNA, 19 nt, Artificial Sequence
  Description of Artificial Sequence: Synthetic oligonucleotide
aaauauccacccuauguuc

SEQ ID NO: 3165901 - RNA, 19 nt, Artificial Sequence
  Description of Artificial Sequence: Synthetic oligonucleotide
uuuugagucauaauuuagc

SEQ ID NO: 3165902 - RNA, 19 nt, Artificial Sequence
  Description of Artificial Sequence: Synthetic oligonucleotide
auaauaacuucuuugguca

SEQ ID NO: 3165903 - RNA, 19 nt, Artificial Sequence
  Description of Artificial Sequence: Synthetic oligonucleotide
uuauuaguagcauuauucc

SEQ ID NO: 3165904 - RNA, 19 nt, Artificial Sequence
  Description of Artificial Sequence: Synthetic oligonucleotide
ucaaaauuuccucauucag

SEQ ID NO: 3165905 - RNA, 19 nt, Artificial Sequence
  Description of Artificial Sequence: Synthetic oligonucleotide
cacauuaaaauauccaccc

SEQ ID NO: 3165906 - RNA, 19 nt, Artificial Sequence
  Description of Artificial Sequence: Synthetic oligonucleotide
ucagcuuuaaguaagcguc

SEQ ID NO: 3165907 - RNA, 19 nt, Artificial Sequence
  Description of Artificial Sequence: Synthetic oligonucleotide
uucacauuaaaauauccac

SEQ ID NO: 3165908 - RNA, 19 nt, Artificial Sequence
  Description of Artificial Sequence: Synthetic oligonucleotide
ugucauaauaacuucuuug

SEQ ID NO: 3165909 - RNA, 19 nt, Artificial Sequence
  Description of Artificial Sequence: Synthetic oligonucleotide
ucacauuaaaauauccacc

SEQ ID NO: 3165910 - RNA, 19 nt, Artificial Sequence
  Description of Artificial Sequence: Synthetic oligonucleotide
uucagauucacauuaaaau

SEQ ID NO: 3165911 - RNA, 19 nt, Artificial Sequence
  Description of Artificial Sequence: Synthetic oligonucleotide
uuugagucauaauuuagcc

SEQ ID NO: 3165912 - RNA, 19 nt, Artificial Sequence
  Description of Artificial Sequence: Synthetic oligonucleotide
aaauuuugaugucaggcga

SEQ ID NO: 3165913 - RNA, 19 nt, Artificial Sequence
  Description of Artificial Sequence: Synthetic oligonucleotide
guuguuuuaaaaucugucc

SEQ ID NO: 3165914 - RNA, 19 nt, Artificial Sequence
  Description of Artificial Sequence: Synthetic oligonucleotide
uaauuuagcccuuugacaa

SEQ ID NO: 3165915 - RNA, 19 nt, Artificial Sequence
  Description of Artificial Sequence: Synthetic oligonucleotide
uuguuuuaaaaucuguccu

SEQ ID NO: 3165916 - RNA, 19 nt, Artificial Sequence
  Description of Artificial Sequence: Synthetic oligonucleotide
uuuaaguaagcgucugugg

SEQ ID NO: 3165917 - RNA, 19 nt, Artificial Sequence
  Description of Artificial Sequence: Synthetic oligonucleotide
aaaauauccacccuauguu

SEQ ID NO: 3165918 - RNA, 19 nt, Artificial Sequence
  Description of Artificial Sequence: Synthetic oligonucleotide
agguuguaaauuuugaugu

SEQ ID NO: 3165919 - RNA, 19 nt, Artificial Sequence
  Description of Artificial Sequence: Synthetic oligonucleotide
uuaaguaagcgucugugga

SEQ ID NO: 3165920 - RNA, 19 nt, Artificial Sequence
  Description of Artificial Sequence: Synthetic oligonucleotide
ucuccuuucuuuaaggcug

SEQ ID NO: 3165921 - RNA, 19 nt, Artificial Sequence
  Description of Artificial Sequence: Synthetic oligonucleotide
ucuuauaaacucuacugga

SEQ ID NO: 3165922 - RNA, 19 nt, Artificial Sequence
  Description of Artificial Sequence: Synthetic oligonucleotide
gagguuguaaauuuugaug

SEQ ID NO: 3165923 - RNA, 19 nt, Artificial Sequence
  Description of Artificial Sequence: Synthetic oligonucleotide
uccaaaauaacuuucuuuu

SEQ ID NO: 3165924 - RNA, 19 nt, Artificial Sequence
  Description of Artificial Sequence: Synthetic oligonucleotide
ugaaaucugguccaguugu

SEQ ID NO: 3165925 - RNA, 19 nt, Artificial Sequence
  Description of Artificial Sequence: Synthetic oligonucleotide
ugucaguucagcuuuaagu

SEQ ID NO: 3165926 - RNA, 19 nt, Artificial Sequence
  Description of Artificial Sequence: Synthetic oligonucleotide
aacuucuuuggucaaguug

SEQ ID NO: 3165927 - RNA, 19 nt, Artificial Sequence
  Description of Artificial Sequence: Synthetic oligonucleotide
guaaauuuugaugucaggc

SEQ ID NO: 3165928 - RNA, 19 nt, Artificial Sequence
  Description of Artificial Sequence: Synthetic oligonucleotide
gauucuuccuuccauauuc

SEQ ID NO: 3165929 - RNA, 19 nt, Artificial Sequence
  Description of Artificial Sequence: Synthetic oligonucleotide
cuauguucaauuucuagac

SEQ ID NO: 3165930 - RNA, 19 nt, Artificial Sequence
  Description of Artificial Sequence: Synthetic oligonucleotide
cauaauaacuucuuugguc

SEQ ID NO: 3165931 - RNA, 19 nt, Artificial Sequence
  Description of Artificial Sequence: Synthetic oligonucleotide
uuuucucaaaauuuccuca

SEQ ID NO: 3165932 - RNA, 19 nt, Artificial Sequence
  Description of Artificial Sequence: Synthetic oligonucleotide
cauaauuuagcccuuugac

SEQ ID NO: 3165933 - RNA, 19 nt, Artificial Sequence
  Description of Artificial Sequence: Synthetic oligonucleotide
aaucuuugaauuuuccaaa

SEQ ID NO: 3165934 - RNA, 19 nt, Artificial Sequence
  Description of Artificial Sequence: Synthetic oligonucleotide
uuuuccaaaauaacuuucu

SEQ ID NO: 3165935 - RNA, 19 nt, Artificial Sequence
  Description of Artificial Sequence: Synthetic oligonucleotide
cuuucuuuaaggcugucag

SEQ ID NO: 3165936 - RNA, 19 nt, Artificial Sequence
  Description of Artificial Sequence: Synthetic oligonucleotide
ucuuuggucaaguugaaau

SEQ ID NO: 3165937 - RNA, 19 nt, Artificial Sequence
  Description of Artificial Sequence: Synthetic oligonucleotide
uuguaaauuuugaugucag

SEQ ID NO: 3165938 - RNA, 19 nt, Artificial Sequence
  Description of Artificial Sequence: Synthetic oligonucleotide
auaauuuagcccuuugaca

SEQ ID NO: 3165939 - RNA, 19 nt, Artificial Sequence
  Description of Artificial Sequence: Synthetic oligonucleotide
uuugacaagaaccguuuug

SEQ ID NO: 3165940 - RNA, 19 nt, Artificial Sequence
  Description of Artificial Sequence: Synthetic oligonucleotide
uugaauuuuccaaaauaac

SEQ ID NO: 3165941 - RNA, 19 nt, Artificial Sequence
  Description of Artificial Sequence: Synthetic oligonucleotide
gaaucuuugaauuuuccaa

SEQ ID NO: 3165942 - RNA, 19 nt, Artificial Sequence
  Description of Artificial Sequence: Synthetic oligonucleotide
ucagauucacauuaaaaua

SEQ ID NO: 3165943 - RNA, 19 nt, Artificial Sequence
  Description of Artificial Sequence: Synthetic oligonucleotide
acucuacuggaauaucugc

SEQ ID NO: 3165944 - RNA, 19 nt, Artificial Sequence
  Description of Artificial Sequence: Synthetic oligonucleotide
gaacacuucuuauuaguag

SEQ ID NO: 3165945 - RNA, 19 nt, Artificial Sequence
  Description of Artificial Sequence: Synthetic oligonucleotide
ucuacuggaauaucugcag

SEQ ID NO: 3165946 - RNA, 19 nt, Artificial Sequence
  Description of Artificial Sequence: Synthetic oligonucleotide
uuuuccaucuuucucucca

SEQ ID NO: 3165947 - RNA, 19 nt, Artificial Sequence
  Description of Artificial Sequence: Synthetic oligonucleotide
acuauggccauuccaguac

SEQ ID NO: 3165948 - RNA, 19 nt, Artificial Sequence
  Description of Artificial Sequence: Synthetic oligonucleotide
acaagaaccguuuugccca

SEQ ID NO: 3165949 - RNA, 19 nt, Artificial Sequence
  Description of Artificial Sequence: Synthetic oligonucleotide
uccagugggauuuugaguc

SEQ ID NO: 3165950 - RNA, 19 nt, Artificial Sequence
  Description of Artificial Sequence: Synthetic oligonucleotide
uguaaauuuugaugucagg

SEQ ID NO: 3165951 - RNA, 19 nt, Artificial Sequence
  Description of Artificial Sequence: Synthetic oligonucleotide
uccaguuguuuuaaaaucu

SEQ ID NO: 3165952 - RNA, 19 nt, Artificial Sequence
  Description of Artificial Sequence: Synthetic oligonucleotide
uuugaugucaggcgaacac

SEQ ID NO: 3165953 - RNA, 19 nt, Artificial Sequence
  Description of Artificial Sequence: Synthetic oligonucleotide
auuucuagaccacacucag

SEQ ID NO: 3165954 - RNA, 19 nt, Artificial Sequence
  Description of Artificial Sequence: Synthetic oligonucleotide
auguucaauuucuagacca

SEQ ID NO: 3165955 - RNA, 19 nt, Artificial Sequence
  Description of Artificial Sequence: Synthetic oligonucleotide
uauuaguagcauuauucca

SEQ ID NO: 3165956 - RNA, 19 nt, Artificial Sequence
  Description of Artificial Sequence: Synthetic oligonucleotide
ucauaauuuagcccuuuga

SEQ ID NO: 3165957 - RNA, 19 nt, Artificial Sequence
  Description of Artificial Sequence: Synthetic oligonucleotide
uuucuuucuuauaaacucu

SEQ ID NO: 3165958 - RNA, 19 nt, Artificial Sequence
  Description of Artificial Sequence: Synthetic oligonucleotide
ucucaaaauuuccucauuc

SEQ ID NO: 3165959 - RNA, 19 nt, Artificial Sequence
  Description of Artificial Sequence: Synthetic oligonucleotide
accacacucaguuauccgg

SEQ ID NO: 3165960 - RNA, 19 nt, Artificial Sequence
  Description of Artificial Sequence: Synthetic oligonucleotide
uuauaaacucuacuggaau

SEQ ID NO: 3165961 - RNA, 19 nt, Artificial Sequence
  Description of Artificial Sequence: Synthetic oligonucleotide
gacaagaaccguuuugccc

SEQ ID NO: 3165962 - RNA, 19 nt, Artificial Sequence
  Description of Artificial Sequence: Synthetic oligonucleotide
uucuagaccacacucaguu

SEQ ID NO: 3165963 - RNA, 19 nt, Artificial Sequence
  Description of Artificial Sequence: Synthetic oligonucleotide
uccucauucagauucacau

SEQ ID NO: 3165964 - RNA, 19 nt, Artificial Sequence
  Description of Artificial Sequence: Synthetic oligonucleotide
uucaauuucuagaccacac

SEQ ID NO: 3165965 - RNA, 19 nt, Artificial Sequence
  Description of Artificial Sequence: Synthetic oligonucleotide
uuuccagugggauuuugag

SEQ ID NO: 3165966 - RNA, 19 nt, Artificial Sequence
  Description of Artificial Sequence: Synthetic oligonucleotide
aguuguuuuaaaaucuguc

SEQ ID NO: 3165967 - RNA, 19 nt, Artificial Sequence
  Description of Artificial Sequence: Synthetic oligonucleotide
uauguucaauuucuagacc

SEQ ID NO: 3165968 - RNA, 19 nt, Artificial Sequence
  Description of Artificial Sequence: Synthetic oligonucleotide
uugagucauaauuuagccc

SEQ ID NO: 3165969 - RNA, 19 nt, Artificial Sequence
  Description of Artificial Sequence: Synthetic oligonucleotide
aauuuagcccuuugacaag

SEQ ID NO: 3165970 - RNA, 19 nt, Artificial Sequence
  Description of Artificial Sequence: Synthetic oligonucleotide
uacuggaauaucugcagag

SEQ ID NO: 3165971 - RNA, 19 nt, Artificial Sequence
  Description of Artificial Sequence: Synthetic oligonucleotide
uggucaaguugaaaucugg

SEQ ID NO: 3165972 - RNA, 19 nt, Artificial Sequence
  Description of Artificial Sequence: Synthetic oligonucleotide
agcauuauuccaacuaugg

SEQ ID NO: 3165973 - RNA, 19 nt, Artificial Sequence
  Description of Artificial Sequence: Synthetic oligonucleotide
gguguaaucggccacguag

SEQ ID NO: 3165974 - RNA, 19 nt, Artificial Sequence
  Description of Artificial Sequence: Synthetic oligonucleotide
ucauaauaacuucuuuggu

SEQ ID NO: 3165975 - RNA, 19 nt, Artificial Sequence
  Description of Artificial Sequence: Synthetic oligonucleotide
uucagcuuuaaguaagcgu

SEQ ID NO: 3165976 - RNA, 19 nt, Artificial Sequence
  Description of Artificial Sequence: Synthetic oligonucleotide
gauucacauuaaaauaucc

SEQ ID NO: 3165977 - RNA, 19 nt, Artificial Sequence
  Description of Artificial Sequence: Synthetic oligonucleotide
aaccguuuugcccaagccu

SEQ ID NO: 3165978 - RNA, 19 nt, Artificial Sequence
  Description of Artificial Sequence: Synthetic oligonucleotide
auuauuccaacuauggcca

SEQ ID NO: 3165979 - RNA, 19 nt, Artificial Sequence
  Description of Artificial Sequence: Synthetic oligonucleotide
uuaaaauauccacccuaug

SEQ ID NO: 3165980 - RNA, 19 nt, Artificial Sequence
  Description of Artificial Sequence: Synthetic oligonucleotide
acuucuuuggucaaguuga

SEQ ID NO: 3165981 - RNA, 19 nt, Artificial Sequence
  Description of Artificial Sequence: Synthetic oligonucleotide
uuuggucaaguugaaaucu

SEQ ID NO: 3165982 - RNA, 19 nt, Artificial Sequence
  Description of Artificial Sequence: Synthetic oligonucleotide
cuuuucucaaaauuuccuc

SEQ ID NO: 3165983 - RNA, 19 nt, Artificial Sequence
  Description of Artificial Sequence: Synthetic oligonucleotide
aguuauccgguguaaucgg

SEQ ID NO: 3165984 - RNA, 19 nt, Artificial Sequence
  Description of Artificial Sequence: Synthetic oligonucleotide
ucuuucauaacccaugagg

SEQ ID NO: 3165985 - RNA, 19 nt, Artificial Sequence
  Description of Artificial Sequence: Synthetic oligonucleotide
aauuuugaccauuuucugc

SEQ ID NO: 3165986 - RNA, 19 nt, Artificial Sequence
  Description of Artificial Sequence: Synthetic oligonucleotide
auuuuaaaagaccaccacc

SEQ ID NO: 3165987 - RNA, 19 nt, Artificial Sequence
  Description of Artificial Sequence: Synthetic oligonucleotide
aaccugaaauucuugaucg

SEQ ID NO: 3165988 - RNA, 19 nt, Artificial Sequence
  Description of Artificial Sequence: Synthetic oligonucleotide
aauguccagaucuuuauag

SEQ ID NO: 3165989 - RNA, 19 nt, Artificial Sequence
  Description of Artificial Sequence: Synthetic oligonucleotide
uuuuaaaagaccaccaccu

SEQ ID NO: 3165990 - RNA, 19 nt, Artificial Sequence
  Description of Artificial Sequence: Synthetic oligonucleotide
uaaaacugcauccuuaaca

SEQ ID NO: 3165991 - RNA, 19 nt, Artificial Sequence
  Description of Artificial Sequence: Synthetic oligonucleotide
aguacuuugguucacaacu

SEQ ID NO: 3165992 - RNA, 19 nt, Artificial Sequence
  Description of Artificial Sequence: Synthetic oligonucleotide
aaguagacagccuaaaacu

SEQ ID NO: 3165993 - RNA, 19 nt, Artificial Sequence
  Description of Artificial Sequence: Synthetic oligonucleotide
uuauuugaaagagagauga

SEQ ID NO: 3165994 - RNA, 19 nt, Artificial Sequence
  Description of Artificial Sequence: Synthetic oligonucleotide
uaacccaugaggcagacag

SEQ ID NO: 3165995 - RNA, 19 nt, Artificial Sequence
  Description of Artificial Sequence: Synthetic oligonucleotide
uuugaaagagagaugagac

SEQ ID NO: 3165996 - RNA, 19 nt, Artificial Sequence
  Description of Artificial Sequence: Synthetic oligonucleotide
guuauugcaaauuuugacc

SEQ ID NO: 3165997 - RNA, 19 nt, Artificial Sequence
  Description of Artificial Sequence: Synthetic oligonucleotide
aagaucuuaacuuuuacua

SEQ ID NO: 3165998 - RNA, 19 nt, Artificial Sequence
  Description of Artificial Sequence: Synthetic oligonucleotide
auaagguagucauacuugc

SEQ ID NO: 3165999 - RNA, 19 nt, Artificial Sequence
  Description of Artificial Sequence: Synthetic oligonucleotide
uagacugauuccauuaugg

SEQ ID NO: 3166000 - RNA, 19 nt, Artificial Sequence
  Description of Artificial Sequence: Synthetic oligonucleotide
aucuuuauagacugauucc

SEQ ID NO: 3166001 - RNA, 19 nt, Artificial Sequence
  Description of Artificial Sequence: Synthetic oligonucleotide
cuagaaauuugaaaguugc

SEQ ID NO: 3166002 - RNA, 19 nt, Artificial Sequence
  Description of Artificial Sequence: Synthetic oligonucleotide
acagccuaaaacugcaucc

SEQ ID NO: 3166003 - RNA, 19 nt, Artificial Sequence
  Description of Artificial Sequence: Synthetic oligonucleotide
aaugaaucuacacuaaauu

SEQ ID NO: 3166004 - RNA, 19 nt, Artificial Sequence
  Description of Artificial Sequence: Synthetic oligonucleotide
uacacuaaauucaaauugc

SEQ ID NO: 3166005 - RNA, 19 nt, Artificial Sequence
  Description of Artificial Sequence: Synthetic oligonucleotide
uuguauuucaaauguauca

SEQ ID NO: 3166006 - RNA, 19 nt, Artificial Sequence
  Description of Artificial Sequence: Synthetic oligonucleotide
cuuucauaacccaugaggc

SEQ ID NO: 3166007 - RNA, 19 nt, Artificial Sequence
  Description of Artificial Sequence: Synthetic oligonucleotide
uaaguuaggcaacuaacag

SEQ ID NO: 3166008 - RNA, 19 nt, Artificial Sequence
  Description of Artificial Sequence: Synthetic oligonucleotide
aucuagaacacauguaacg

SEQ ID NO: 3166009 - RNA, 19 nt, Artificial Sequence
  Description of Artificial Sequence: Synthetic oligonucleotide
aaaauaagaucuuaacuuu

SEQ ID NO: 3166010 - RNA, 19 nt, Artificial Sequence
  Description of Artificial Sequence: Synthetic oligonucleotide
uuauugcaaauuuugacca

SEQ ID NO: 3166011 - RNA, 19 nt, Artificial Sequence
  Description of Artificial Sequence: Synthetic oligonucleotide
aagaaucugaaaugaaucu

SEQ ID NO: 3166012 - RNA, 19 nt, Artificial Sequence
  Description of Artificial Sequence: Synthetic oligonucleotide
aagaccaccaccucugauc

SEQ ID NO: 3166013 - RNA, 19 nt, Artificial Sequence
  Description of Artificial Sequence: Synthetic oligonucleotide
auaacuuggauacccuccc

SEQ ID NO: 3166014 - RNA, 19 nt, Artificial Sequence
  Description of Artificial Sequence: Synthetic oligonucleotide
agagagaugagacuccaac

SEQ ID NO: 3166015 - RNA, 19 nt, Artificial Sequence
  Description of Artificial Sequence: Synthetic oligonucleotide
gaucuuuauagacugauuc

SEQ ID NO: 3166016 - RNA, 19 nt, Artificial Sequence
  Description of Artificial Sequence: Synthetic oligonucleotide
ucacgaaccaacaaauugc

SEQ ID NO: 3166017 - RNA, 19 nt, Artificial Sequence
  Description of Artificial Sequence: Synthetic oligonucleotide
auguguauuucuuacauca

SEQ ID NO: 3166018 - RNA, 19 nt, Artificial Sequence
  Description of Artificial Sequence: Synthetic oligonucleotide
cauacuuucagccacaaca

SEQ ID NO: 3166019 - RNA, 19 nt, Artificial Sequence
  Description of Artificial Sequence: Synthetic oligonucleotide
uuucaaagccaaaagggug

SEQ ID NO: 3166020 - RNA, 19 nt, Artificial Sequence
  Description of Artificial Sequence: Synthetic oligonucleotide
uuaacuuuuacuagaaauu

SEQ ID NO: 3166021 - RNA, 19 nt, Artificial Sequence
  Description of Artificial Sequence: Synthetic oligonucleotide
ugaauugacaaauuuuagu

SEQ ID NO: 3166022 - RNA, 19 nt, Artificial Sequence
  Description of Artificial Sequence: Synthetic oligonucleotide
aaguaaacaagugguggcc

SEQ ID NO: 3166023 - RNA, 19 nt, Artificial Sequence
  Description of Artificial Sequence: Synthetic oligonucleotide
ucaggaaaaucaaugaaaa

SEQ ID NO: 3166024 - RNA, 19 nt, Artificial Sequence
  Description of Artificial Sequence: Synthetic oligonucleotide
aaauuuugaccauuuucug

SEQ ID NO: 3166025 - RNA, 19 nt, Artificial Sequence
  Description of Artificial Sequence: Synthetic oligonucleotide
ucaaauguaucauugcuuc

SEQ ID NO: 3166026 - RNA, 19 nt, Artificial Sequence
  Description of Artificial Sequence: Synthetic oligonucleotide
uuaggcaacuaacagaaaa

SEQ ID NO: 3166027 - RNA, 19 nt, Artificial Sequence
  Description of Artificial Sequence: Synthetic oligonucleotide
guagaagcaaguuacguug

SEQ ID NO: 3166028 - RNA, 19 nt, Artificial Sequence
  Description of Artificial Sequence: Synthetic oligonucleotide
uccaaaagaaucugaaaug

SEQ ID NO: 3166029 - RNA, 19 nt, Artificial Sequence
  Description of Artificial Sequence: Synthetic oligonucleotide
aagaacuagguauggagca

SEQ ID NO: 3166030 - RNA, 19 nt, Artificial Sequence
  Description of Artificial Sequence: Synthetic oligonucleotide
ucaccuaugaaaugguugc

SEQ ID NO: 3166031 - RNA, 19 nt, Artificial Sequence
  Description of Artificial Sequence: Synthetic oligonucleotide
cauaauaacuuggauaccc

SEQ ID NO: 3166032 - RNA, 19 nt, Artificial Sequence
  Description of Artificial Sequence: Synthetic oligonucleotide
uaaaagaccaccaccucug

SEQ ID NO: 3166033 - RNA, 19 nt, Artificial Sequence
  Description of Artificial Sequence: Synthetic oligonucleotide
auaagaucuuaacuuuuac

SEQ ID NO: 3166034 - RNA, 19 nt, Artificial Sequence
  Description of Artificial Sequence: Synthetic oligonucleotide
uuaaaagaccaccaccucu

SEQ ID NO: 3166035 - RNA, 19 nt, Artificial Sequence
  Description of Artificial Sequence: Synthetic oligonucleotide
aaaucuaacauggaaucca

SEQ ID NO: 3166036 - RNA, 19 nt, Artificial Sequence
  Description of Artificial Sequence: Synthetic oligonucleotide
auccaaaagaaucugaaau

SEQ ID NO: 3166037 - RNA, 19 nt, Artificial Sequence
  Description of Artificial Sequence: Synthetic oligonucleotide
ucuuacaucaugccauucc

SEQ ID NO: 3166038 - RNA, 19 nt, Artificial Sequence
  Description of Artificial Sequence: Synthetic oligonucleotide
aauccccauacauacuuuc

SEQ ID NO: 3166039 - RNA, 19 nt, Artificial Sequence
  Description of Artificial Sequence: Synthetic oligonucleotide
acuuaagcaaugcuucugg

SEQ ID NO: 3166040 - RNA, 19 nt, Artificial Sequence
  Description of Artificial Sequence: Synthetic oligonucleotide
gaaguaaacaagugguggc

SEQ ID NO: 3166041 - RNA, 19 nt, Artificial Sequence
  Description of Artificial Sequence: Synthetic oligonucleotide
auuuucugcacauaugccu

SEQ ID NO: 3166042 - RNA, 19 nt, Artificial Sequence
  Description of Artificial Sequence: Synthetic oligonucleotide
auccuuaacaaccugaaau

SEQ ID NO: 3166043 - RNA, 19 nt, Artificial Sequence
  Description of Artificial Sequence: Synthetic oligonucleotide
uucaccuaugaaaugguug

SEQ ID NO: 3166044 - RNA, 19 nt, Artificial Sequence
  Description of Artificial Sequence: Synthetic oligonucleotide
uccagaucuuuauagacug

SEQ ID NO: 3166045 - RNA, 19 nt, Artificial Sequence
  Description of Artificial Sequence: Synthetic oligonucleotide
aacaaccugaaauucuuga

SEQ ID NO: 3166046 - RNA, 19 nt, Artificial Sequence
  Description of Artificial Sequence: Synthetic oligonucleotide
aaguuaggcaacuaacaga

SEQ ID NO: 3166047 - RNA, 19 nt, Artificial Sequence
  Description of Artificial Sequence: Synthetic oligonucleotide
aaaauccccauacauacuu

SEQ ID NO: 3166048 - RNA, 19 nt, Artificial Sequence
  Description of Artificial Sequence: Synthetic oligonucleotide
cauugcuuccugaaaaucc

SEQ ID NO: 3166049 - RNA, 19 nt, Artificial Sequence
  Description of Artificial Sequence: Synthetic oligonucleotide
cuagguauggagcagguug

SEQ ID NO: 3166050 - RNA, 19 nt, Artificial Sequence
  Description of Artificial Sequence: Synthetic oligonucleotide
auauauucuguucuccaag

SEQ ID NO: 3166051 - RNA, 19 nt, Artificial Sequence
  Description of Artificial Sequence: Synthetic oligonucleotide
aguaaguuaggcaacuaac

SEQ ID NO: 3166052 - RNA, 19 nt, Artificial Sequence
  Description of Artificial Sequence: Synthetic oligonucleotide
gagagaugagacuccaacg

SEQ ID NO: 3166053 - RNA, 19 nt, Artificial Sequence
  Description of Artificial Sequence: Synthetic oligonucleotide
uccaugcaaggucauaagg

SEQ ID NO: 3166054 - RNA, 19 nt, Artificial Sequence
  Description of Artificial Sequence: Synthetic oligonucleotide
aagcaaguuacguugucug

SEQ ID NO: 3166055 - RNA, 19 nt, Artificial Sequence
  Description of Artificial Sequence: Synthetic oligonucleotide
uuugguuagcuuagcauug

SEQ ID NO: 3166056 - RNA, 19 nt, Artificial Sequence
  Description of Artificial Sequence: Synthetic oligonucleotide
uaucauugcuuccugaaaa

SEQ ID NO: 3166057 - RNA, 19 nt, Artificial Sequence
  Description of Artificial Sequence: Synthetic oligonucleotide
cuuacaucaugccauuccg

SEQ ID NO: 3166058 - RNA, 19 nt, Artificial Sequence
  Description of Artificial Sequence: Synthetic oligonucleotide
agacugauuccauuauggc

SEQ ID NO: 3166059 - RNA, 19 nt, Artificial Sequence
  Description of Artificial Sequence: Synthetic oligonucleotide
uucagaugcacuuaagcaa

SEQ ID NO: 3166060 - RNA, 19 nt, Artificial Sequence
  Description of Artificial Sequence: Synthetic oligonucleotide
uaagaucuuaacuuuuacu

SEQ ID NO: 3166061 - RNA, 19 nt, Artificial Sequence
  Description of Artificial Sequence: Synthetic oligonucleotide
auaagcuuguauuucaaau

SEQ ID NO: 3166062 - RNA, 19 nt, Artificial Sequence
  Description of Artificial Sequence: Synthetic oligonucleotide
aacuuggauacccucccuc

SEQ ID NO: 3166063 - RNA, 19 nt, Artificial Sequence
  Description of Artificial Sequence: Synthetic oligonucleotide
uugaaaguugcuuuucaga

SEQ ID NO: 3166064 - RNA, 19 nt, Artificial Sequence
  Description of Artificial Sequence: Synthetic oligonucleotide
caaguagacagccuaaaac

SEQ ID NO: 3166065 - RNA, 19 nt, Artificial Sequence
  Description of Artificial Sequence: Synthetic oligonucleotide
aaaagggugaucauguuaa

SEQ ID NO: 3166066 - RNA, 19 nt, Artificial Sequence
  Description of Artificial Sequence: Synthetic oligonucleotide
cauaagguagucauacuug

SEQ ID NO: 3166067 - RNA, 19 nt, Artificial Sequence
  Description of Artificial Sequence: Synthetic oligonucleotide
uuacuagaaauuugaaagu

SEQ ID NO: 3166068 - RNA, 19 nt, Artificial Sequence
  Description of Artificial Sequence: Synthetic oligonucleotide
aaauugcuguauuuuaaaa

SEQ ID NO: 3166069 - RNA, 19 nt, Artificial Sequence
  Description of Artificial Sequence: Synthetic oligonucleotide
aacaaauugcuguauuuua

SEQ ID NO: 3166070 - RNA, 19 nt, Artificial Sequence
  Description of Artificial Sequence: Synthetic oligonucleotide
auugcuuccugaaaauccc

SEQ ID NO: 3166071 - RNA, 19 nt, Artificial Sequence
  Description of Artificial Sequence: Synthetic oligonucleotide
caagaacuagguauggagc

SEQ ID NO: 3166072 - RNA, 19 nt, Artificial Sequence
  Description of Artificial Sequence: Synthetic oligonucleotide
aauuuucuuuugcuguucu

SEQ ID NO: 3166073 - RNA, 19 nt, Artificial Sequence
  Description of Artificial Sequence: Synthetic oligonucleotide
ucauaagguagucauacuu

SEQ ID NO: 3166074 - RNA, 19 nt, Artificial Sequence
  Description of Artificial Sequence: Synthetic oligonucleotide
aaauuugaaaguugcuuuu

SEQ ID NO: 3166075 - RNA, 19 nt, Artificial Sequence
  Description of Artificial Sequence: Synthetic oligonucleotide
gucacgaaccaacaaauug

SEQ ID NO: 3166076 - RNA, 19 nt, Artificial Sequence
  Description of Artificial Sequence: Synthetic oligonucleotide
auucuugaucgcuugguag

SEQ ID NO: 3166077 - RNA, 19 nt, Artificial Sequence
  Description of Artificial Sequence: Synthetic oligonucleotide
uacuggguaauauauucug

SEQ ID NO: 3166078 - RNA, 19 nt, Artificial Sequence
  Description of Artificial Sequence: Synthetic oligonucleotide
ugaugcuacauaauaacuu

SEQ ID NO: 3166079 - RNA, 19 nt, Artificial Sequence
  Description of Artificial Sequence: Synthetic oligonucleotide
ugccauuccguacuggaag

SEQ ID NO: 3166080 - RNA, 19 nt, Artificial Sequence
  Description of Artificial Sequence: Synthetic oligonucleotide
gaaauucuugaucgcuugg

SEQ ID NO: 3166081 - RNA, 19 nt, Artificial Sequence
  Description of Artificial Sequence: Synthetic oligonucleotide
uugacaagcggguuugaag

SEQ ID NO: 3166082 - RNA, 19 nt, Artificial Sequence
  Description of Artificial Sequence: Synthetic oligonucleotide
aauccaaaagaaucugaaa

SEQ ID NO: 3166083 - RNA, 19 nt, Artificial Sequence
  Description of Artificial Sequence: Synthetic oligonucleotide
uugguucacaacuccaugc

SEQ ID NO: 3166084 - RNA, 19 nt, Artificial Sequence
  Description of Artificial Sequence: Synthetic oligonucleotide
aaguacaugcagaagaucc

SEQ ID NO: 3166085 - RNA, 19 nt, Artificial Sequence
  Description of Artificial Sequence: Synthetic oligonucleotide
ucagcaacacuucugaggg

SEQ ID NO: 3166086 - RNA, 19 nt, Artificial Sequence
  Description of Artificial Sequence: Synthetic oligonucleotide
gacuugauaaaguacaugc

SEQ ID NO: 3166087 - RNA, 19 nt, Artificial Sequence
  Description of Artificial Sequence: Synthetic oligonucleotide
auaaaguacaugcagaaga

SEQ ID NO: 3166088 - RNA, 19 nt, Artificial Sequence
  Description of Artificial Sequence: Synthetic oligonucleotide
aaccaucagauguuuaagc

SEQ ID NO: 3166089 - RNA, 19 nt, Artificial Sequence
  Description of Artificial Sequence: Synthetic oligonucleotide
ucuaugucaauguacagca

SEQ ID NO: 3166090 - RNA, 19 nt, Artificial Sequence
  Description of Artificial Sequence: Synthetic oligonucleotide
accaucagauguuuaagcc

SEQ ID NO: 3166091 - RNA, 19 nt, Artificial Sequence
  Description of Artificial Sequence: Synthetic oligonucleotide
agacgugccaaccaggccc

SEQ ID NO: 3166092 - RNA, 19 nt, Artificial Sequence
  Description of Artificial Sequence: Synthetic oligonucleotide
cuugauaaaguacaugcag

SEQ ID NO: 3166093 - RNA, 19 nt, Artificial Sequence
  Description of Artificial Sequence: Synthetic oligonucleotide
agauguuuaagccaagucu

SEQ ID NO: 3166094 - RNA, 19 nt, Artificial Sequence
  Description of Artificial Sequence: Synthetic oligonucleotide
uaugucaauguacagcagc

SEQ ID NO: 3166095 - RNA, 19 nt, Artificial Sequence
  Description of Artificial Sequence: Synthetic oligonucleotide
aucuaugucaauguacagc

SEQ ID NO: 3166096 - RNA, 19 nt, Artificial Sequence
  Description of Artificial Sequence: Synthetic oligonucleotide
uugauaaaguacaugcaga

SEQ ID NO: 3166097 - RNA, 19 nt, Artificial Sequence
  Description of Artificial Sequence: Synthetic oligonucleotide
uguaacacccagaaaugag

SEQ ID NO: 3166098 - RNA, 19 nt, Artificial Sequence
  Description of Artificial Sequence: Synthetic oligonucleotide
acagcugcaguucagacgu

SEQ ID NO: 3166099 - RNA, 19 nt, Artificial Sequence
  Description of Artificial Sequence: Synthetic oligonucleotide
ucaguucucaaccaucaga

SEQ ID NO: 3166100 - RNA, 19 nt, Artificial Sequence
  Description of Artificial Sequence: Synthetic oligonucleotide
acacaagcaguguaacacc

SEQ ID NO: 3166101 - RNA, 19 nt, Artificial Sequence
  Description of Artificial Sequence: Synthetic oligonucleotide
agaaaugagcucucaguuc

SEQ ID NO: 3166102 - RNA, 19 nt, Artificial Sequence
  Description of Artificial Sequence: Synthetic oligonucleotide
cucagcaacacuucugagg

SEQ ID NO: 3166103 - RNA, 19 nt, Artificial Sequence
  Description of Artificial Sequence: Synthetic oligonucleotide
agcaacacuucugagggcc

SEQ ID NO: 3166104 - RNA, 19 nt, Artificial Sequence
  Description of Artificial Sequence: Synthetic oligonucleotide
ugauaaaguacaugcagaa

SEQ ID NO: 3166105 - RNA, 19 nt, Artificial Sequence
  Description of Artificial Sequence: Synthetic oligonucleotide
gauguuuaagccaagucuc

SEQ ID NO: 3166106 - RNA, 19 nt, Artificial Sequence
  Description of Artificial Sequence: Synthetic oligonucleotide
acagcagcgacacaagcag

SEQ ID NO: 3166107 - RNA, 19 nt, Artificial Sequence
  Description of Artificial Sequence: Synthetic oligonucleotide
aagccaagucucccuaccc

SEQ ID NO: 3166108 - RNA, 19 nt, Artificial Sequence
  Description of Artificial Sequence: Synthetic oligonucleotide
aaagucacagcugcaguuc

SEQ ID NO: 3166109 - RNA, 19 nt, Artificial Sequence
  Description of Artificial Sequence: Synthetic oligonucleotide
gacacaagcaguguaacac

SEQ ID NO: 3166110 - RNA, 19 nt, Artificial Sequence
  Description of Artificial Sequence: Synthetic oligonucleotide
uaaaguacaugcagaagau

SEQ ID NO: 3166111 - RNA, 19 nt, Artificial Sequence
  Description of Artificial Sequence: Synthetic oligonucleotide
ucaaccaucagauguuuaa

SEQ ID NO: 3166112 - RNA, 19 nt, Artificial Sequence
  Description of Artificial Sequence: Synthetic oligonucleotide
ucucaguucucaaccauca

SEQ ID NO: 3166113 - RNA, 19 nt, Artificial Sequence
  Description of Artificial Sequence: Synthetic oligonucleotide
uacaugcagaagauccugg

SEQ ID NO: 3166114 - RNA, 19 nt, Artificial Sequence
  Description of Artificial Sequence: Synthetic oligonucleotide
ucaauguacagcagcgaca

SEQ ID NO: 3166115 - RNA, 19 nt, Artificial Sequence
  Description of Artificial Sequence: Synthetic oligonucleotide
ugagucucugcucagcaac

SEQ ID NO: 3166116 - RNA, 19 nt, Artificial Sequence
  Description of Artificial Sequence: Synthetic oligonucleotide
aaaagucacagcugcaguu

SEQ ID NO: 3166117 - RNA, 19 nt, Artificial Sequence
  Description of Artificial Sequence: Synthetic oligonucleotide
aaaguacaugcagaagauc

SEQ ID NO: 3166118 - RNA, 19 nt, Artificial Sequence
  Description of Artificial Sequence: Synthetic oligonucleotide
uaacacccagaaaugagcu

SEQ ID NO: 3166119 - RNA, 19 nt, Artificial Sequence
  Description of Artificial Sequence: Synthetic oligonucleotide
gauaaaguacaugcagaag

SEQ ID NO: 3166120 - RNA, 19 nt, Artificial Sequence
  Description of Artificial Sequence: Synthetic oligonucleotide
ugcucagcaacacuucuga

SEQ ID NO: 3166121 - RNA, 19 nt, Artificial Sequence
  Description of Artificial Sequence: Synthetic oligonucleotide
aacacccagaaaugagcuc

SEQ ID NO: 3166122 - RNA, 19 nt, Artificial Sequence
  Description of Artificial Sequence: Synthetic oligonucleotide
uacagcagcgacacaagca

SEQ ID NO: 3166123 - RNA, 19 nt, Artificial Sequence
  Description of Artificial Sequence: Synthetic oligonucleotide
gaaaugagcucucaguucu

SEQ ID NO: 3166124 - RNA, 19 nt, Artificial Sequence
  Description of Artificial Sequence: Synthetic oligonucleotide
acaugcagaagauccuggg

SEQ ID NO: 3166125 - RNA, 19 nt, Artificial Sequence
  Description of Artificial Sequence: Synthetic oligonucleotide
augcagaagauccugggga

SEQ ID NO: 3166126 - RNA, 19 nt, Artificial Sequence
  Description of Artificial Sequence: Synthetic oligonucleotide
ucagacgugccaaccaggc

SEQ ID NO: 3166127 - RNA, 19 nt, Artificial Sequence
  Description of Artificial Sequence: Synthetic oligonucleotide
acacuagcugacuugauaa

SEQ ID NO: 3166128 - RNA, 19 nt, Artificial Sequence
  Description of Artificial Sequence: Synthetic oligonucleotide
agccaagucucccuacccc

SEQ ID NO: 3166129 - RNA, 19 nt, Artificial Sequence
  Description of Artificial Sequence: Synthetic oligonucleotide
gagcucucaguucucaacc

SEQ ID NO: 3166130 - RNA, 19 nt, Artificial Sequence
  Description of Artificial Sequence: Synthetic oligonucleotide
uguacagcagcgacacaag

SEQ ID NO: 3166131 - RNA, 19 nt, Artificial Sequence
  Description of Artificial Sequence: Synthetic oligonucleotide
uucagacgugccaaccagg

SEQ ID NO: 3166132 - RNA, 19 nt, Artificial Sequence
  Description of Artificial Sequence: Synthetic oligonucleotide
uaagccaagucucccuacc

SEQ ID NO: 3166133 - RNA, 19 nt, Artificial Sequence
  Description of Artificial Sequence: Synthetic oligonucleotide
agcaguguaacacccagaa

SEQ ID NO: 3166134 - RNA, 19 nt, Artificial Sequence
  Description of Artificial Sequence: Synthetic oligonucleotide
aagggguggggcuagccug

SEQ ID NO: 3166135 - RNA, 19 nt, Artificial Sequence
  Description of Artificial Sequence: Synthetic oligonucleotide
acuagcugacuugauaaag

SEQ ID NO: 3166136 - RNA, 19 nt, Artificial Sequence
  Description of Artificial Sequence: Synthetic oligonucleotide
augucaauguacagcagcg

SEQ ID NO: 3166137 - RNA, 19 nt, Artificial Sequence
  Description of Artificial Sequence: Synthetic oligonucleotide
gaucuaugucaauguacag

SEQ ID NO: 3166138 - RNA, 19 nt, Artificial Sequence
  Description of Artificial Sequence: Synthetic oligonucleotide
guaacacccagaaaugagc

SEQ ID NO: 3166139 - RNA, 19 nt, Artificial Sequence
  Description of Artificial Sequence: Synthetic oligonucleotide
cacaagcaguguaacaccc

SEQ ID NO: 3166140 - RNA, 19 nt, Artificial Sequence
  Description of Artificial Sequence: Synthetic oligonucleotide
caugcagaagauccugggg

SEQ ID NO: 3166141 - RNA, 19 nt, Artificial Sequence
  Description of Artificial Sequence: Synthetic oligonucleotide
gucaauguacagcagcgac

SEQ ID NO: 3166142 - RNA, 19 nt, Artificial Sequence
  Description of Artificial Sequence: Synthetic oligonucleotide
caauguacagcagcgacac

SEQ ID NO: 3166143 - RNA, 19 nt, Artificial Sequence
  Description of Artificial Sequence: Synthetic oligonucleotide
ucuggcuucuucuggaguc

SEQ ID NO: 3166144 - RNA, 19 nt, Artificial Sequence
  Description of Artificial Sequence: Synthetic oligonucleotide
auguuuaagccaagucucc

SEQ ID NO: 3166145 - RNA, 19 nt, Artificial Sequence
  Description of Artificial Sequence: Synthetic oligonucleotide
uuuaagccaagucucccua

SEQ ID NO: 3166146 - RNA, 19 nt, Artificial Sequence
  Description of Artificial Sequence: Synthetic oligonucleotide
aaagggguggggcuagccu

SEQ ID NO: 3166147 - RNA, 19 nt, Artificial Sequence
  Description of Artificial Sequence: Synthetic oligonucleotide
cacagcugcaguucagacg

SEQ ID NO: 3166148 - RNA, 19 nt, Artificial Sequence
  Description of Artificial Sequence: Synthetic oligonucleotide
uagccugagucucugcuca

SEQ ID NO: 3166149 - RNA, 19 nt, Artificial Sequence
  Description of Artificial Sequence: Synthetic oligonucleotide
caagcaguguaacacccag

SEQ ID NO: 3166150 - RNA, 19 nt, Artificial Sequence
  Description of Artificial Sequence: Synthetic oligonucleotide
guucucaaccaucagaugu

SEQ ID NO: 3166151 - RNA, 19 nt, Artificial Sequence
  Description of Artificial Sequence: Synthetic oligonucleotide
uguuuaagccaagucuccc

SEQ ID NO: 3166152 - RNA, 19 nt, Artificial Sequence
  Description of Artificial Sequence: Synthetic oligonucleotide
ucucugcucagcaacacuu

SEQ ID NO: 3166153 - RNA, 19 nt, Artificial Sequence
  Description of Artificial Sequence: Synthetic oligonucleotide
ugagcucucaguucucaac

SEQ ID NO: 3166154 - RNA, 19 nt, Artificial Sequence
  Description of Artificial Sequence: Synthetic oligonucleotide
auccuggggaucuauguca

SEQ ID NO: 3166155 - RNA, 19 nt, Artificial Sequence
  Description of Artificial Sequence: Synthetic oligonucleotide
ucugcucagcaacacuucu

SEQ ID NO: 3166156 - RNA, 19 nt, Artificial Sequence
  Description of Artificial Sequence: Synthetic oligonucleotide
ugacuugauaaaguacaug

SEQ ID NO: 3166157 - RNA, 19 nt, Artificial Sequence
  Description of Artificial Sequence: Synthetic oligonucleotide
acacccagaaaugagcucu

SEQ ID NO: 3166158 - RNA, 19 nt, Artificial Sequence
  Description of Artificial Sequence: Synthetic oligonucleotide
uggggaucuaugucaaugu

SEQ ID NO: 3166159 - RNA, 19 nt, Artificial Sequence
  Description of Artificial Sequence: Synthetic oligonucleotide
aagucacagcugcaguuca

SEQ ID NO: 3166160 - RNA, 19 nt, Artificial Sequence
  Description of Artificial Sequence: Synthetic oligonucleotide
agauccuggggaucuaugu

SEQ ID NO: 3166161 - RNA, 19 nt, Artificial Sequence
  Description of Artificial Sequence: Synthetic oligonucleotide
guucagacgugccaaccag

SEQ ID NO: 3166162 - RNA, 19 nt, Artificial Sequence
  Description of Artificial Sequence: Synthetic oligonucleotide
caguguaacacccagaaau

SEQ ID NO: 3166163 - RNA, 19 nt, Artificial Sequence
  Description of Artificial Sequence: Synthetic oligonucleotide
agcugacuugauaaaguac

SEQ ID NO: 3166164 - RNA, 19 nt, Artificial Sequence
  Description of Artificial Sequence: Synthetic oligonucleotide
aguucagacgugccaacca

SEQ ID NO: 3166165 - RNA, 19 nt, Artificial Sequence
  Description of Artificial Sequence: Synthetic oligonucleotide
caucagauguuuaagccaa

SEQ ID NO: 3166166 - RNA, 19 nt, Artificial Sequence
  Description of Artificial Sequence: Synthetic oligonucleotide
uucucaaccaucagauguu

SEQ ID NO: 3166167 - RNA, 19 nt, Artificial Sequence
  Description of Artificial Sequence: Synthetic oligonucleotide
aguguaacacccagaaaug

SEQ ID NO: 3166168 - RNA, 19 nt, Artificial Sequence
  Description of Artificial Sequence: Synthetic oligonucleotide
aaugagcucucaguucuca

SEQ ID NO: 3166169 - RNA, 19 nt, Artificial Sequence
  Description of Artificial Sequence: Synthetic oligonucleotide
gugccaaccaggcccaggg

SEQ ID NO: 3166170 - RNA, 19 nt, Artificial Sequence
  Description of Artificial Sequence: Synthetic oligonucleotide
auguacagcagcgacacaa

SEQ ID NO: 3166171 - RNA, 19 nt, Artificial Sequence
  Description of Artificial Sequence: Synthetic oligonucleotide
ucagauguuuaagccaagu

SEQ ID NO: 3166172 - RNA, 19 nt, Artificial Sequence
  Description of Artificial Sequence: Synthetic oligonucleotide
cagauguuuaagccaaguc

SEQ ID NO: 3166173 - RNA, 19 nt, Artificial Sequence
  Description of Artificial Sequence: Synthetic oligonucleotide
agcugcaguucagacgugc

SEQ ID NO: 3166174 - RNA, 19 nt, Artificial Sequence
  Description of Artificial Sequence: Synthetic oligonucleotide
uagcugacuugauaaagua

SEQ ID NO: 3166175 - RNA, 19 nt, Artificial Sequence
  Description of Artificial Sequence: Synthetic oligonucleotide
gauccuggggaucuauguc

SEQ ID NO: 3166176 - RNA, 19 nt, Artificial Sequence
  Description of Artificial Sequence: Synthetic oligonucleotide
gcugacuugauaaaguaca

SEQ ID NO: 3166177 - RNA, 19 nt, Artificial Sequence
  Description of Artificial Sequence: Synthetic oligonucleotide
ggaucuaugucaauguaca

SEQ ID NO: 3166178 - RNA, 19 nt, Artificial Sequence
  Description of Artificial Sequence: Synthetic oligonucleotide
uuaagccaagucucccuac

SEQ ID NO: 3166179 - RNA, 19 nt, Artificial Sequence
  Description of Artificial Sequence: Synthetic oligonucleotide
acuugauaaaguacaugca

SEQ ID NO: 3166180 - RNA, 19 nt, Artificial Sequence
  Description of Artificial Sequence: Synthetic oligonucleotide
cuggggaucuaugucaaug

SEQ ID NO: 3166181 - RNA, 19 nt, Artificial Sequence
  Description of Artificial Sequence: Synthetic oligonucleotide
aguucucaaccaucagaug

SEQ ID NO: 3166182 - RNA, 19 nt, Artificial Sequence
  Description of Artificial Sequence: Synthetic oligonucleotide
ucccuaccccugcugaaag

SEQ ID NO: 3166183 - RNA, 19 nt, Artificial Sequence
  Description of Artificial Sequence: Synthetic oligonucleotide
ugcaguucagacgugccaa

SEQ ID NO: 3166184 - RNA, 19 nt, Artificial Sequence
  Description of Artificial Sequence: Synthetic oligonucleotide
aauaacaugacauaaagcc

SEQ ID NO: 3166185 - RNA, 19 nt, Artificial Sequence
  Description of Artificial Sequence: Synthetic oligonucleotide
aaauguuuagcuuucaucc

SEQ ID NO: 3166186 - RNA, 19 nt, Artificial Sequence
  Description of Artificial Sequence: Synthetic oligonucleotide
aauuauaaaauguuuagcu

SEQ ID NO: 3166187 - RNA, 19 nt, Artificial Sequence
  Description of Artificial Sequence: Synthetic oligonucleotide
aaugaaaacaucuccaauc

SEQ ID NO: 3166188 - RNA, 19 nt, Artificial Sequence
  Description of Artificial Sequence: Synthetic oligonucleotide
gaaauuaucauuuaagaca

SEQ ID NO: 3166189 - RNA, 19 nt, Artificial Sequence
  Description of Artificial Sequence: Synthetic oligonucleotide
aacaucuccaaucugguac

SEQ ID NO: 3166190 - RNA, 19 nt, Artificial Sequence
  Description of Artificial Sequence: Synthetic oligonucleotide
aaaaguaacauugacaucu

SEQ ID NO: 3166191 - RNA, 19 nt, Artificial Sequence
  Description of Artificial Sequence: Synthetic oligonucleotide
aaguuuauuaaacaggugu

SEQ ID NO: 3166192 - RNA, 19 nt, Artificial Sequence
  Description of Artificial Sequence: Synthetic oligonucleotide
aaaauguuuagcuuucauc

SEQ ID NO: 3166193 - RNA, 19 nt, Artificial Sequence
  Description of Artificial Sequence: Synthetic oligonucleotide
uuuaagacaauauucaagu

SEQ ID NO: 3166194 - RNA, 19 nt, Artificial Sequence
  Description of Artificial Sequence: Synthetic oligonucleotide
uucaaguuuauuaaacagg

SEQ ID NO: 3166195 - RNA, 19 nt, Artificial Sequence
  Description of Artificial Sequence: Synthetic oligonucleotide
ucaaaaguaacauugacau

SEQ ID NO: 3166196 - RNA, 19 nt, Artificial Sequence
  Description of Artificial Sequence: Synthetic oligonucleotide
cauuaugcaaaauacauac

SEQ ID NO: 3166197 - RNA, 19 nt, Artificial Sequence
  Description of Artificial Sequence: Synthetic oligonucleotide
aaauaagcaagacauguga

SEQ ID NO: 3166198 - RNA, 19 nt, Artificial Sequence
  Description of Artificial Sequence: Synthetic oligonucleotide
uauaacugcacuuucaggu

SEQ ID NO: 3166199 - RNA, 19 nt, Artificial Sequence
  Description of Artificial Sequence: Synthetic oligonucleotide
uaaucauuaugcaaaauac

SEQ ID NO: 3166200 - RNA, 19 nt, Artificial Sequence
  Description of Artificial Sequence: Synthetic oligonucleotide
uuaacugauuuuaauaaca

SEQ ID NO: 3166201 - RNA, 19 nt, Artificial Sequence
  Description of Artificial Sequence: Synthetic oligonucleotide
auugacaucuucugcagcc

SEQ ID NO: 3166202 - RNA, 19 nt, Artificial Sequence
  Description of Artificial Sequence: Synthetic oligonucleotide
aauauaaaauaaauaagca

SEQ ID NO: 3166203 - RNA, 19 nt, Artificial Sequence
  Description of Artificial Sequence: Synthetic oligonucleotide
aaaagaaaguuuuccuuuc

SEQ ID NO: 3166204 - RNA, 19 nt, Artificial Sequence
  Description of Artificial Sequence: Synthetic oligonucleotide
guaauuauaaaauguuuag

SEQ ID NO: 3166205 - RNA, 19 nt, Artificial Sequence
  Description of Artificial Sequence: Synthetic oligonucleotide
ucaaguuuauuaaacaggu

SEQ ID NO: 3166206 - RNA, 19 nt, Artificial Sequence
  Description of Artificial Sequence: Synthetic oligonucleotide
aagacaugugaaaauaggc

SEQ ID NO: 3166207 - RNA, 19 nt, Artificial Sequence
  Description of Artificial Sequence: Synthetic oligonucleotide
gaaaacaucuccaaucugg

SEQ ID NO: 3166208 - RNA, 19 nt, Artificial Sequence
  Description of Artificial Sequence: Synthetic oligonucleotide
uaacaugacauaaagcccc

SEQ ID NO: 3166209 - RNA, 19 nt, Artificial Sequence
  Description of Artificial Sequence: Synthetic oligonucleotide
aacauugacaucuucugca

SEQ ID NO: 3166210 - RNA, 19 nt, Artificial Sequence
  Description of Artificial Sequence: Synthetic oligonucleotide
uuaugcaaaauacauacau

SEQ ID NO: 3166211 - RNA, 19 nt, Artificial Sequence
  Description of Artificial Sequence: Synthetic oligonucleotide
aauguuuagcuuucauccg

SEQ ID NO: 3166212 - RNA, 19 nt, Artificial Sequence
  Description of Artificial Sequence: Synthetic oligonucleotide
acaagcgucuucuaaauuc

SEQ ID NO: 3166213 - RNA, 19 nt, Artificial Sequence
  Description of Artificial Sequence: Synthetic oligonucleotide
auauaaaauaaauaagcaa

SEQ ID NO: 3166214 - RNA, 19 nt, Artificial Sequence
  Description of Artificial Sequence: Synthetic oligonucleotide
acugauuuuaauaacauga

SEQ ID NO: 3166215 - RNA, 19 nt, Artificial Sequence
  Description of Artificial Sequence: Synthetic oligonucleotide
gauauaaucauuaugcaaa

SEQ ID NO: 3166216 - RNA, 19 nt, Artificial Sequence
  Description of Artificial Sequence: Synthetic oligonucleotide
ugacauaaagccccuaaag

SEQ ID NO: 3166217 - RNA, 19 nt, Artificial Sequence
  Description of Artificial Sequence: Synthetic oligonucleotide
uucaggucggcuaauaccc

SEQ ID NO: 3166218 - RNA, 19 nt, Artificial Sequence
  Description of Artificial Sequence: Synthetic oligonucleotide
caugaugucgucacaagcg

SEQ ID NO: 3166219 - RNA, 19 nt, Artificial Sequence
  Description of Artificial Sequence: Synthetic oligonucleotide
guugcugccaaauuuugcg

SEQ ID NO: 3166220 - RNA, 19 nt, Artificial Sequence
  Description of Artificial Sequence: Synthetic oligonucleotide
aauacugucuucuuuuaaa

SEQ ID NO: 3166221 - RNA, 19 nt, Artificial Sequence
  Description of Artificial Sequence: Synthetic oligonucleotide
aauauucaaguuuauuaaa

SEQ ID NO: 3166222 - RNA, 19 nt, Artificial Sequence
  Description of Artificial Sequence: Synthetic oligonucleotide
uauucaaguuuauuaaaca

SEQ ID NO: 3166223 - RNA, 19 nt, Artificial Sequence
  Description of Artificial Sequence: Synthetic oligonucleotide
aaauuaucauuuaagacaa

SEQ ID NO: 3166224 - RNA, 19 nt, Artificial Sequence
  Description of Artificial Sequence: Synthetic oligonucleotide
auaaauaagcaagacaugu

SEQ ID NO: 3166225 - RNA, 19 nt, Artificial Sequence
  Description of Artificial Sequence: Synthetic oligonucleotide
auguuuagcuuucauccgc

SEQ ID NO: 3166226 - RNA, 19 nt, Artificial Sequence
  Description of Artificial Sequence: Synthetic oligonucleotide
uaauaacaugacauaaagc

SEQ ID NO: 3166227 - RNA, 19 nt, Artificial Sequence
  Description of Artificial Sequence: Synthetic oligonucleotide
uaugcaaaauacauacaug

SEQ ID NO: 3166228 - RNA, 19 nt, Artificial Sequence
  Description of Artificial Sequence: Synthetic oligonucleotide
uaagacaauauucaaguuu

SEQ ID NO: 3166229 - RNA, 19 nt, Artificial Sequence
  Description of Artificial Sequence: Synthetic oligonucleotide
auauucaaguuuauuaaac

SEQ ID NO: 3166230 - RNA, 19 nt, Artificial Sequence
  Description of Artificial Sequence: Synthetic oligonucleotide
gucuucuaaauucuggagg

SEQ ID NO: 3166231 - RNA, 19 nt, Artificial Sequence
  Description of Artificial Sequence: Synthetic oligonucleotide
ugaaaauaggcaaguuucc

SEQ ID NO: 3166232 - RNA, 19 nt, Artificial Sequence
  Description of Artificial Sequence: Synthetic oligonucleotide
uaaauaagcaagacaugug

SEQ ID NO: 3166233 - RNA, 19 nt, Artificial Sequence
  Description of Artificial Sequence: Synthetic oligonucleotide
ucuaucuccuccuuuagcu

SEQ ID NO: 3166234 - RNA, 19 nt, Artificial Sequence
  Description of Artificial Sequence: Synthetic oligonucleotide
aguugauauaaucauuaug

SEQ ID NO: 3166235 - RNA, 19 nt, Artificial Sequence
  Description of Artificial Sequence: Synthetic oligonucleotide
uuugcuucuucuaacauuu

SEQ ID NO: 3166236 - RNA, 19 nt, Artificial Sequence
  Description of Artificial Sequence: Synthetic oligonucleotide
ucuucuaaauucuggaggu

SEQ ID NO: 3166237 - RNA, 19 nt, Artificial Sequence
  Description of Artificial Sequence: Synthetic oligonucleotide
caagacaugugaaaauagg

SEQ ID NO: 3166238 - RNA, 19 nt, Artificial Sequence
  Description of Artificial Sequence: Synthetic oligonucleotide
uuuaacugauuuuaauaac

SEQ ID NO: 3166239 - RNA, 19 nt, Artificial Sequence
  Description of Artificial Sequence: Synthetic oligonucleotide
uauaaaauguuuagcuuuc

SEQ ID NO: 3166240 - RNA, 19 nt, Artificial Sequence
  Description of Artificial Sequence: Synthetic oligonucleotide
cuggguuucuucuugagag

SEQ ID NO: 3166241 - RNA, 19 nt, Artificial Sequence
  Description of Artificial Sequence: Synthetic oligonucleotide
aacugauuuuaauaacaug

SEQ ID NO: 3166242 - RNA, 19 nt, Artificial Sequence
  Description of Artificial Sequence: Synthetic oligonucleotide
ugguacgggaucaugaagc

SEQ ID NO: 3166243 - RNA, 19 nt, Artificial Sequence
  Description of Artificial Sequence: Synthetic oligonucleotide
ugauauaaucauuaugcaa

SEQ ID NO: 3166244 - RNA, 19 nt, Artificial Sequence
  Description of Artificial Sequence: Synthetic oligonucleotide
cauaaagccccuaaaguug

SEQ ID NO: 3166245 - RNA, 19 nt, Artificial Sequence
  Description of Artificial Sequence: Synthetic oligonucleotide
ucuugcaaaguuuucuuug

SEQ ID NO: 3166246 - RNA, 19 nt, Artificial Sequence
  Description of Artificial Sequence: Synthetic oligonucleotide
aaaguaauuauaaaauguu

SEQ ID NO: 3166247 - RNA, 19 nt, Artificial Sequence
  Description of Artificial Sequence: Synthetic oligonucleotide
guuuaacugauuuuaauaa

SEQ ID NO: 3166248 - RNA, 19 nt, Artificial Sequence
  Description of Artificial Sequence: Synthetic oligonucleotide
guaacauugacaucuucug

SEQ ID NO: 3166249 - RNA, 19 nt, Artificial Sequence
  Description of Artificial Sequence: Synthetic oligonucleotide
auuuaagacaauauucaag

SEQ ID NO: 3166250 - RNA, 19 nt, Artificial Sequence
  Description of Artificial Sequence: Synthetic oligonucleotide
ugauucgacucguauuucg

SEQ ID NO: 3166251 - RNA, 19 nt, Artificial Sequence
  Description of Artificial Sequence: Synthetic oligonucleotide
aaaguugauauaaucauua

SEQ ID NO: 3166252 - RNA, 19 nt, Artificial Sequence
  Description of Artificial Sequence: Synthetic oligonucleotide
augaaaacaucuccaaucu

SEQ ID NO: 3166253 - RNA, 19 nt, Artificial Sequence
  Description of Artificial Sequence: Synthetic oligonucleotide
uugauauaaucauuaugca

SEQ ID NO: 3166254 - RNA, 19 nt, Artificial Sequence
  Description of Artificial Sequence: Synthetic oligonucleotide
auuauaaaauguuuagcuu

SEQ ID NO: 3166255 - RNA, 19 nt, Artificial Sequence
  Description of Artificial Sequence: Synthetic oligonucleotide
ucguuucauuugaagaagg

SEQ ID NO: 3166256 - RNA, 19 nt, Artificial Sequence
  Description of Artificial Sequence: Synthetic oligonucleotide
uugacuguuuaacugauuu

SEQ ID NO: 3166257 - RNA, 19 nt, Artificial Sequence
  Description of Artificial Sequence: Synthetic oligonucleotide
uugagaguggcuaaugaaa

SEQ ID NO: 3166258 - RNA, 19 nt, Artificial Sequence
  Description of Artificial Sequence: Synthetic oligonucleotide
uacgggaucaugaagcagu

SEQ ID NO: 3166259 - RNA, 19 nt, Artificial Sequence
  Description of Artificial Sequence: Synthetic oligonucleotide
gcuaauacccgcuggaugg

SEQ ID NO: 3166260 - RNA, 19 nt, Artificial Sequence
  Description of Artificial Sequence: Synthetic oligonucleotide
auaacugcacuuucagguc

SEQ ID NO: 3166261 - RNA, 19 nt, Artificial Sequence
  Description of Artificial Sequence: Synthetic oligonucleotide
cugauuuuaauaacaugac

SEQ ID NO: 3166262 - RNA, 19 nt, Artificial Sequence
  Description of Artificial Sequence: Synthetic oligonucleotide
aaguuuucuuugcuucuuc

SEQ ID NO: 3166263 - RNA, 19 nt, Artificial Sequence
  Description of Artificial Sequence: Synthetic oligonucleotide
ucguauuucgagcaaauuu

SEQ ID NO: 3166264 - RNA, 19 nt, Artificial Sequence
  Description of Artificial Sequence: Synthetic oligonucleotide
uaacauugacaucuucugc

SEQ ID NO: 3166265 - RNA, 19 nt, Artificial Sequence
  Description of Artificial Sequence: Synthetic oligonucleotide
aauaaauaagcaagacaug

SEQ ID NO: 3166266 - RNA, 19 nt, Artificial Sequence
  Description of Artificial Sequence: Synthetic oligonucleotide
aagacaauauucaaguuua

SEQ ID NO: 3166267 - RNA, 19 nt, Artificial Sequence
  Description of Artificial Sequence: Synthetic oligonucleotide
ugcuucuucuaacauuucc

SEQ ID NO: 3166268 - RNA, 19 nt, Artificial Sequence
  Description of Artificial Sequence: Synthetic oligonucleotide
ucgagguuuauguugcugc

SEQ ID NO: 3166269 - RNA, 19 nt, Artificial Sequence
  Description of Artificial Sequence: Synthetic oligonucleotide
aaucauuaugcaaaauaca

SEQ ID NO: 3166270 - RNA, 19 nt, Artificial Sequence
  Description of Artificial Sequence: Synthetic oligonucleotide
aagaaaguuuuccuuucgu

SEQ ID NO: 3166271 - RNA, 19 nt, Artificial Sequence
  Description of Artificial Sequence: Synthetic oligonucleotide
uuucgagcaaauuuguuua

SEQ ID NO: 3166272 - RNA, 19 nt, Artificial Sequence
  Description of Artificial Sequence: Synthetic oligonucleotide
acauaaagccccuaaaguu

SEQ ID NO: 3166273 - RNA, 19 nt, Artificial Sequence
  Description of Artificial Sequence: Synthetic oligonucleotide
gugaaaauaggcaaguuuc

SEQ ID NO: 3166274 - RNA, 19 nt, Artificial Sequence
  Description of Artificial Sequence: Synthetic oligonucleotide
auuucgagcaaauuuguuu

SEQ ID NO: 3166275 - RNA, 19 nt, Artificial Sequence
  Description of Artificial Sequence: Synthetic oligonucleotide
aauuuugcguauaacugca

SEQ ID NO: 3166276 - RNA, 19 nt, Artificial Sequence
  Description of Artificial Sequence: Synthetic oligonucleotide
auacccgcuggauggaugc

SEQ ID NO: 3166277 - RNA, 19 nt, Artificial Sequence
  Description of Artificial Sequence: Synthetic oligonucleotide
uuuugcguauaacugcacu

SEQ ID NO: 3166278 - RNA, 19 nt, Artificial Sequence
  Description of Artificial Sequence: Synthetic oligonucleotide
agugauucgacucguauuu

SEQ ID NO: 3166279 - RNA, 19 nt, Artificial Sequence
  Description of Artificial Sequence: Synthetic oligonucleotide
aguaauuauaaaauguuua

SEQ ID NO: 3166280 - RNA, 19 nt, Artificial Sequence
  Description of Artificial Sequence: Synthetic oligonucleotide
ugagaguggcuaaugaaaa

SEQ ID NO: 3166281 - RNA, 19 nt, Artificial Sequence
  Description of Artificial Sequence: Synthetic oligonucleotide
cuuucguuucauuugaaga

SEQ ID NO: 3166282 - RNA, 19 nt, Artificial Sequence
  Description of Artificial Sequence: Synthetic oligonucleotide
aagggaaauuaucauuuaa

SEQ ID NO: 3166283 - RNA, 19 nt, Artificial Sequence
  Description of Artificial Sequence: Synthetic oligonucleotide
ucauuaugcaaaauacaua

SEQ ID NO: 3166284 - RNA, 19 nt, Artificial Sequence
  Description of Artificial Sequence: Synthetic oligonucleotide
aauacagucaucuuaauac

SEQ ID NO: 3166285 - RNA, 19 nt, Artificial Sequence
  Description of Artificial Sequence: Synthetic oligonucleotide
aaaagaagaagaaagaaac

SEQ ID NO: 3166286 - RNA, 19 nt, Artificial Sequence
  Description of Artificial Sequence: Synthetic oligonucleotide
aaucauugcaaauacaguc

SEQ ID NO: 3166287 - RNA, 19 nt, Artificial Sequence
  Description of Artificial Sequence: Synthetic oligonucleotide
aaaagaaaagaaaagaaag

SEQ ID NO: 3166288 - RNA, 19 nt, Artificial Sequence
  Description of Artificial Sequence: Synthetic oligonucleotide
aaagaaaagaagaagaaag

SEQ ID NO: 3166289 - RNA, 19 nt, Artificial Sequence
  Description of Artificial Sequence: Synthetic oligonucleotide
aaacauuguaaacagaaug

SEQ ID NO: 3166290 - RNA, 19 nt, Artificial Sequence
  Description of Artificial Sequence: Synthetic oligonucleotide
gaaagaaacauuguaauag

SEQ ID NO: 3166291 - RNA, 19 nt, Artificial Sequence
  Description of Artificial Sequence: Synthetic oligonucleotide
aacauuguaauagagcagg

SEQ ID NO: 3166292 - RNA, 19 nt, Artificial Sequence
  Description of Artificial Sequence: Synthetic oligonucleotide
gaaacauuguaauagagca

SEQ ID NO: 3166293 - RNA, 19 nt, Artificial Sequence
  Description of Artificial Sequence: Synthetic oligonucleotide
aacauuguaaacagaaugg

SEQ ID NO: 3166294 - RNA, 19 nt, Artificial Sequence
  Description of Artificial Sequence: Synthetic oligonucleotide
aaaagaaaagaaaagaaaa

SEQ ID NO: 3166295 - RNA, 19 nt, Artificial Sequence
  Description of Artificial Sequence: Synthetic oligonucleotide
aaaagaaagaaaagaaaag

SEQ ID NO: 3166296 - RNA, 19 nt, Artificial Sequence
  Description of Artificial Sequence: Synthetic oligonucleotide
aaagaaaagaaaagaaaag

SEQ ID NO: 3166297 - RNA, 19 nt, Artificial Sequence
  Description of Artificial Sequence: Synthetic oligonucleotide
cucagaacuguaaacaugg

SEQ ID NO: 3166298 - RNA, 19 nt, Artificial Sequence
  Description of Artificial Sequence: Synthetic oligonucleotide
ucuuaauaccccaagaaaa

SEQ ID NO: 3166299 - RNA, 19 nt, Artificial Sequence
  Description of Artificial Sequence: Synthetic oligonucleotide
gaagaagaaagaaacauug

SEQ ID NO: 3166300 - RNA, 19 nt, Artificial Sequence
  Description of Artificial Sequence: Synthetic oligonucleotide
gaaagaaaagaaaagaaga

SEQ ID NO: 3166301 - RNA, 19 nt, Artificial Sequence
  Description of Artificial Sequence: Synthetic oligonucleotide
aaguucaguuucuuugugc

SEQ ID NO: 3166302 - RNA, 19 nt, Artificial Sequence
  Description of Artificial Sequence: Synthetic oligonucleotide
aagaaagaaacauuguaau

SEQ ID NO: 3166303 - RNA, 19 nt, Artificial Sequence
  Description of Artificial Sequence: Synthetic oligonucleotide
gaaaagaaaagaaagaaaa

SEQ ID NO: 3166304 - RNA, 19 nt, Artificial Sequence
  Description of Artificial Sequence: Synthetic oligonucleotide
uugaccaccacgaugagga

SEQ ID NO: 3166305 - RNA, 19 nt, Artificial Sequence
  Description of Artificial Sequence: Synthetic oligonucleotide
auaaucauugcaaauacag

SEQ ID NO: 3166306 - RNA, 19 nt, Artificial Sequence
  Description of Artificial Sequence: Synthetic oligonucleotide
uucaggaacaccgucagcg

SEQ ID NO: 3166307 - RNA, 19 nt, Artificial Sequence
  Description of Artificial Sequence: Synthetic oligonucleotide
aaaagaaaagaaagaaaag

SEQ ID NO: 3166308 - RNA, 19 nt, Artificial Sequence
  Description of Artificial Sequence: Synthetic oligonucleotide
agagcuggcagcuacaaag

SEQ ID NO: 3166309 - RNA, 19 nt, Artificial Sequence
  Description of Artificial Sequence: Synthetic oligonucleotide
auacagucaucuuaauacc

SEQ ID NO: 3166310 - RNA, 19 nt, Artificial Sequence
  Description of Artificial Sequence: Synthetic oligonucleotide
aaagaaacauuguaauaga

SEQ ID NO: 3166311 - RNA, 19 nt, Artificial Sequence
  Description of Artificial Sequence: Synthetic oligonucleotide
aaugccaagucagagcugg

SEQ ID NO: 3166312 - RNA, 19 nt, Artificial Sequence
  Description of Artificial Sequence: Synthetic oligonucleotide
uggacuuccgccauggcgg

SEQ ID NO: 3166313 - RNA, 19 nt, Artificial Sequence
  Description of Artificial Sequence: Synthetic oligonucleotide
agaaacauuguaauagagc

SEQ ID NO: 3166314 - RNA, 19 nt, Artificial Sequence
  Description of Artificial Sequence: Synthetic oligonucleotide
gaaaagaaagaaaagaaaa

SEQ ID NO: 3166315 - RNA, 19 nt, Artificial Sequence
  Description of Artificial Sequence: Synthetic oligonucleotide
gaaagaaaagaaaagaaaa

SEQ ID NO: 3166316 - RNA, 19 nt, Artificial Sequence
  Description of Artificial Sequence: Synthetic oligonucleotide
ucagcaaacauuguaaaca

SEQ ID NO: 3166317 - RNA, 19 nt, Artificial Sequence
  Description of Artificial Sequence: Synthetic oligonucleotide
guaaacagaauggagaacc

SEQ ID NO: 3166318 - RNA, 19 nt, Artificial Sequence
  Description of Artificial Sequence: Synthetic oligonucleotide
aagaagaagaaagaaacau

SEQ ID NO: 3166319 - RNA, 19 nt, Artificial Sequence
  Description of Artificial Sequence: Synthetic oligonucleotide
auccuuccagaucaaaugc

SEQ ID NO: 3166320 - RNA, 19 nt, Artificial Sequence
  Description of Artificial Sequence: Synthetic oligonucleotide
aacagaauggagaaccuuc

SEQ ID NO: 3166321 - RNA, 19 nt, Artificial Sequence
  Description of Artificial Sequence: Synthetic oligonucleotide
augaggaaggagcucacgc

SEQ ID NO: 3166322 - RNA, 19 nt, Artificial Sequence
  Description of Artificial Sequence: Synthetic oligonucleotide
gaauggagaaccuucucag

SEQ ID NO: 3166323 - RNA, 19 nt, Artificial Sequence
  Description of Artificial Sequence: Synthetic oligonucleotide
auugcaaauacagucaucu

SEQ ID NO: 3166324 - RNA, 19 nt, Artificial Sequence
  Description of Artificial Sequence: Synthetic oligonucleotide
gacaucauugaucaaauaa

SEQ ID NO: 3166325 - RNA, 19 nt, Artificial Sequence
  Description of Artificial Sequence: Synthetic oligonucleotide
uauccuuccagaucaaaug

SEQ ID NO: 3166326 - RNA, 19 nt, Artificial Sequence
  Description of Artificial Sequence: Synthetic oligonucleotide
aaaagaaaagaagaagaaa

SEQ ID NO: 3166327 - RNA, 19 nt, Artificial Sequence
  Description of Artificial Sequence: Synthetic oligonucleotide
accacgaugaggaaggagc

SEQ ID NO: 3166328 - RNA, 19 nt, Artificial Sequence
  Description of Artificial Sequence: Synthetic oligonucleotide
agaacuguaaacaugggca

SEQ ID NO: 3166329 - RNA, 19 nt, Artificial Sequence
  Description of Artificial Sequence: Synthetic oligonucleotide
ugcaaauacagucaucuua

SEQ ID NO: 3166330 - RNA, 19 nt, Artificial Sequence
  Description of Artificial Sequence: Synthetic oligonucleotide
uguguggaggauuucgcgg

SEQ ID NO: 3166331 - RNA, 19 nt, Artificial Sequence
  Description of Artificial Sequence: Synthetic oligonucleotide
auuguaaacagaauggaga

SEQ ID NO: 3166332 - RNA, 19 nt, Artificial Sequence
  Description of Artificial Sequence: Synthetic oligonucleotide
ucaaaugccaagucagagc

SEQ ID NO: 3166333 - RNA, 19 nt, Artificial Sequence
  Description of Artificial Sequence: Synthetic oligonucleotide
uuuaaccggagcaugcuga

SEQ ID NO: 3166334 - RNA, 19 nt, Artificial Sequence
  Description of Artificial Sequence: Synthetic oligonucleotide
uucuccuuuaaccggagca

SEQ ID NO: 3166335 - RNA, 19 nt, Artificial Sequence
  Description of Artificial Sequence: Synthetic oligonucleotide
gaaaagaaaagaaaagaaa

SEQ ID NO: 3166336 - RNA, 19 nt, Artificial Sequence
  Description of Artificial Sequence: Synthetic oligonucleotide
cauuguaaacagaauggag

SEQ ID NO: 3166337 - RNA, 19 nt, Artificial Sequence
  Description of Artificial Sequence: Synthetic oligonucleotide
acgucuguggacuuccgcc

SEQ ID NO: 3166338 - RNA, 19 nt, Artificial Sequence
  Description of Artificial Sequence: Synthetic oligonucleotide
aguuucuuugugcugaaca

SEQ ID NO: 3166339 - RNA, 19 nt, Artificial Sequence
  Description of Artificial Sequence: Synthetic oligonucleotide
agaagaaagaaacauugua

SEQ ID NO: 3166340 - RNA, 19 nt, Artificial Sequence
  Description of Artificial Sequence: Synthetic oligonucleotide
uuguaaacagaauggagaa

SEQ ID NO: 3166341 - RNA, 19 nt, Artificial Sequence
  Description of Artificial Sequence: Synthetic oligonucleotide
aaauacagucaucuuaaua

SEQ ID NO: 3166342 - RNA, 19 nt, Artificial Sequence
  Description of Artificial Sequence: Synthetic oligonucleotide
ucuucuugaguagagcucc

SEQ ID NO: 3166343 - RNA, 19 nt, Artificial Sequence
  Description of Artificial Sequence: Synthetic oligonucleotide
uacagucaucuuaauaccc

SEQ ID NO: 3166344 - RNA, 19 nt, Artificial Sequence
  Description of Artificial Sequence: Synthetic oligonucleotide
guaaacaugggcaaguuca

SEQ ID NO: 3166345 - RNA, 19 nt, Artificial Sequence
  Description of Artificial Sequence: Synthetic oligonucleotide
aagaaaagaagaagaaaga

SEQ ID NO: 3166346 - RNA, 19 nt, Artificial Sequence
  Description of Artificial Sequence: Synthetic oligonucleotide
aacaccgucagcguuucgg

SEQ ID NO: 3166347 - RNA, 19 nt, Artificial Sequence
  Description of Artificial Sequence: Synthetic oligonucleotide
uaaucauugcaaauacagu

SEQ ID NO: 3166348 - RNA, 19 nt, Artificial Sequence
  Description of Artificial Sequence: Synthetic oligonucleotide
guuucuuugugcugaacag

SEQ ID NO: 3166349 - RNA, 19 nt, Artificial Sequence
  Description of Artificial Sequence: Synthetic oligonucleotide
ucaucuuaauaccccaaga

SEQ ID NO: 3166350 - RNA, 19 nt, Artificial Sequence
  Description of Artificial Sequence: Synthetic oligonucleotide
gaggaaggagcucacgccg

SEQ ID NO: 3166351 - RNA, 19 nt, Artificial Sequence
  Description of Artificial Sequence: Synthetic oligonucleotide
aagaaacauuguaauagag

SEQ ID NO: 3166352 - RNA, 19 nt, Artificial Sequence
  Description of Artificial Sequence: Synthetic oligonucleotide
agaauggagaaccuucuca

SEQ ID NO: 3166353 - RNA, 19 nt, Artificial Sequence
  Description of Artificial Sequence: Synthetic oligonucleotide
agaucaaaugccaagucag

SEQ ID NO: 3166354 - RNA, 19 nt, Artificial Sequence
  Description of Artificial Sequence: Synthetic oligonucleotide
aguucaguuucuuugugcu

SEQ ID NO: 3166355 - RNA, 19 nt, Artificial Sequence
  Description of Artificial Sequence: Synthetic oligonucleotide
ucucagaacuguaaacaug

SEQ ID NO: 3166356 - RNA, 19 nt, Artificial Sequence
  Description of Artificial Sequence: Synthetic oligonucleotide
gaagaaagaaacauuguaa

SEQ ID NO: 3166357 - RNA, 19 nt, Artificial Sequence
  Description of Artificial Sequence: Synthetic oligonucleotide
aacagucccuuguugacca

SEQ ID NO: 3166358 - RNA, 19 nt, Artificial Sequence
  Description of Artificial Sequence: Synthetic oligonucleotide
cuuugugcugaacaguccc

SEQ ID NO: 3166359 - RNA, 19 nt, Artificial Sequence
  Description of Artificial Sequence: Synthetic oligonucleotide
agcagcuucaggaacaccg

SEQ ID NO: 3166360 - RNA, 19 nt, Artificial Sequence
  Description of Artificial Sequence: Synthetic oligonucleotide
uaaacaugggcaaguucag

SEQ ID NO: 3166361 - RNA, 19 nt, Artificial Sequence
  Description of Artificial Sequence: Synthetic oligonucleotide
aagucuucuugaguagagc

SEQ ID NO: 3166362 - RNA, 19 nt, Artificial Sequence
  Description of Artificial Sequence: Synthetic oligonucleotide
uugaguagagcuccuucag

SEQ ID NO: 3166363 - RNA, 19 nt, Artificial Sequence
  Description of Artificial Sequence: Synthetic oligonucleotide
uucuuugugcugaacaguc

SEQ ID NO: 3166364 - RNA, 19 nt, Artificial Sequence
  Description of Artificial Sequence: Synthetic oligonucleotide
ucccuuguugaccaccacg

SEQ ID NO: 3166365 - RNA, 19 nt, Artificial Sequence
  Description of Artificial Sequence: Synthetic oligonucleotide
acagucaucuuaauacccc

SEQ ID NO: 3166366 - RNA, 19 nt, Artificial Sequence
  Description of Artificial Sequence: Synthetic oligonucleotide
aaccggagcaugcugacgu

SEQ ID NO: 3166367 - RNA, 19 nt, Artificial Sequence
  Description of Artificial Sequence: Synthetic oligonucleotide
aacaugggcaaguucaguu

SEQ ID NO: 3166368 - RNA, 19 nt, Artificial Sequence
  Description of Artificial Sequence: Synthetic oligonucleotide
agucuucuugaguagagcu

SEQ ID NO: 3166369 - RNA, 19 nt, Artificial Sequence
  Description of Artificial Sequence: Synthetic oligonucleotide
aaagaagaagaaagaaaca

SEQ ID NO: 3166370 - RNA, 19 nt, Artificial Sequence
  Description of Artificial Sequence: Synthetic oligonucleotide
uucaguuucuuugugcuga

SEQ ID NO: 3166371 - RNA, 19 nt, Artificial Sequence
  Description of Artificial Sequence: Synthetic oligonucleotide
agaaaagaagaagaaagaa

SEQ ID NO: 3166372 - RNA, 19 nt, Artificial Sequence
  Description of Artificial Sequence: Synthetic oligonucleotide
aucuuaauaccccaagaaa

SEQ ID NO: 3166373 - RNA, 19 nt, Artificial Sequence
  Description of Artificial Sequence: Synthetic oligonucleotide
uuccagaucaaaugccaag

SEQ ID NO: 3166374 - RNA, 19 nt, Artificial Sequence
  Description of Artificial Sequence: Synthetic oligonucleotide
cagaacuguaaacaugggc

SEQ ID NO: 3166375 - RNA, 19 nt, Artificial Sequence
  Description of Artificial Sequence: Synthetic oligonucleotide
aaacauuguaauagagcag

SEQ ID NO: 3166376 - RNA, 19 nt, Artificial Sequence
  Description of Artificial Sequence: Synthetic oligonucleotide
cagcaaacauuguaaacag

SEQ ID NO: 3166377 - RNA, 19 nt, Artificial Sequence
  Description of Artificial Sequence: Synthetic oligonucleotide
gagcucacgccguagaagc

SEQ ID NO: 3166378 - RNA, 19 nt, Artificial Sequence
  Description of Artificial Sequence: Synthetic oligonucleotide
gggacuucuccuuuaaccg

SEQ ID NO: 3166379 - RNA, 19 nt, Artificial Sequence
  Description of Artificial Sequence: Synthetic oligonucleotide
uucagcaaacauuguaaac

SEQ ID NO: 3166380 - RNA, 19 nt, Artificial Sequence
  Description of Artificial Sequence: Synthetic oligonucleotide
ugaggaaggagcucacgcc

SEQ ID NO: 3166381 - RNA, 19 nt, Artificial Sequence
  Description of Artificial Sequence: Synthetic oligonucleotide
aaaagucuucuugaguaga

SEQ ID NO: 3166382 - RNA, 19 nt, Artificial Sequence
  Description of Artificial Sequence: Synthetic oligonucleotide
uguguguggaggauuucgc

SEQ ID NO: 3166383 - RNA, 19 nt, Artificial Sequence
  Description of Artificial Sequence: Synthetic oligonucleotide
aauggagaaccuucucaga

SEQ ID NO: 3166384 - RNA, 19 nt, Artificial Sequence
  Description of Artificial Sequence: Synthetic oligonucleotide
aagaguauuugucaucuuc

SEQ ID NO: 3166385 - RNA, 19 nt, Artificial Sequence
  Description of Artificial Sequence: Synthetic oligonucleotide
aaugucaacagauccuggg

SEQ ID NO: 3166386 - RNA, 19 nt, Artificial Sequence
  Description of Artificial Sequence: Synthetic oligonucleotide
auacauaugauauuucuca

SEQ ID NO: 3166387 - RNA, 19 nt, Artificial Sequence
  Description of Artificial Sequence: Synthetic oligonucleotide
agacaaugugcuuugauuc

SEQ ID NO: 3166388 - RNA, 19 nt, Artificial Sequence
  Description of Artificial Sequence: Synthetic oligonucleotide
uuucacauacauaugauau

SEQ ID NO: 3166389 - RNA, 19 nt, Artificial Sequence
  Description of Artificial Sequence: Synthetic oligonucleotide
ugguaauucuccaacauca

SEQ ID NO: 3166390 - RNA, 19 nt, Artificial Sequence
  Description of Artificial Sequence: Synthetic oligonucleotide
uucucuuggauauucacag

SEQ ID NO: 3166391 - RNA, 19 nt, Artificial Sequence
  Description of Artificial Sequence: Synthetic oligonucleotide
uguaccaggccuuugaagc

SEQ ID NO: 3166392 - RNA, 19 nt, Artificial Sequence
  Description of Artificial Sequence: Synthetic oligonucleotide
auugugguaauucuccaac

SEQ ID NO: 3166393 - RNA, 19 nt, Artificial Sequence
  Description of Artificial Sequence: Synthetic oligonucleotide
uaauucuccaacaucacgu

SEQ ID NO: 3166394 - RNA, 19 nt, Artificial Sequence
  Description of Artificial Sequence: Synthetic oligonucleotide
ugauccaagacuuucauau

SEQ ID NO: 3166395 - RNA, 19 nt, Artificial Sequence
  Description of Artificial Sequence: Synthetic oligonucleotide
uuucauaagacuucucuug

SEQ ID NO: 3166396 - RNA, 19 nt, Artificial Sequence
  Description of Artificial Sequence: Synthetic oligonucleotide
ugugauaagaguauuuguc

SEQ ID NO: 3166397 - RNA, 19 nt, Artificial Sequence
  Description of Artificial Sequence: Synthetic oligonucleotide
uucauaagacuucucuugg

SEQ ID NO: 3166398 - RNA, 19 nt, Artificial Sequence
  Description of Artificial Sequence: Synthetic oligonucleotide
aacaucacgucaauguacc

SEQ ID NO: 3166399 - RNA, 19 nt, Artificial Sequence
  Description of Artificial Sequence: Synthetic oligonucleotide
ugauucuugauccaagacu

SEQ ID NO: 3166400 - RNA, 19 nt, Artificial Sequence
  Description of Artificial Sequence: Synthetic oligonucleotide
uaugauauuucucaacaaa

SEQ ID NO: 3166401 - RNA, 19 nt, Artificial Sequence
  Description of Artificial Sequence: Synthetic oligonucleotide
ugugcuuugauucuugauc

SEQ ID NO: 3166402 - RNA, 19 nt, Artificial Sequence
  Description of Artificial Sequence: Synthetic oligonucleotide
uagauugugguaauucucc

SEQ ID NO: 3166403 - RNA, 19 nt, Artificial Sequence
  Description of Artificial Sequence: Synthetic oligonucleotide
gauauucacagggugauag

SEQ ID NO: 3166404 - RNA, 19 nt, Artificial Sequence
  Description of Artificial Sequence: Synthetic oligonucleotide
aggccuuugaagcagacuc

SEQ ID NO: 3166405 - RNA, 19 nt, Artificial Sequence
  Description of Artificial Sequence: Synthetic oligonucleotide
aauucuccaacaucacguc

SEQ ID NO: 3166406 - RNA, 19 nt, Artificial Sequence
  Description of Artificial Sequence: Synthetic oligonucleotide
aacuagauugugguaauuc

SEQ ID NO: 3166407 - RNA, 19 nt, Artificial Sequence
  Description of Artificial Sequence: Synthetic oligonucleotide
aaugcagucuuuucauaag

SEQ ID NO: 3166408 - RNA, 19 nt, Artificial Sequence
  Description of Artificial Sequence: Synthetic oligonucleotide
acauaugauauuucucaac

SEQ ID NO: 3166409 - RNA, 19 nt, Artificial Sequence
  Description of Artificial Sequence: Synthetic oligonucleotide
uccaacaucacgucaaugu

SEQ ID NO: 3166410 - RNA, 19 nt, Artificial Sequence
  Description of Artificial Sequence: Synthetic oligonucleotide
uuugugauaagaguauuug

SEQ ID NO: 3166411 - RNA, 19 nt, Artificial Sequence
  Description of Artificial Sequence: Synthetic oligonucleotide
aucacgucaauguaccagg

SEQ ID NO: 3166412 - RNA, 19 nt, Artificial Sequence
  Description of Artificial Sequence: Synthetic oligonucleotide
cucuuggauauucacaggg

SEQ ID NO: 3166413 - RNA, 19 nt, Artificial Sequence
  Description of Artificial Sequence: Synthetic oligonucleotide
acauacauaugauauuucu

SEQ ID NO: 3166414 - RNA, 19 nt, Artificial Sequence
  Description of Artificial Sequence: Synthetic oligonucleotide
uccacagccacacuccccg

SEQ ID NO: 3166415 - RNA, 19 nt, Artificial Sequence
  Description of Artificial Sequence: Synthetic oligonucleotide
agggugauagacaaugugc

SEQ ID NO: 3166416 - RNA, 19 nt, Artificial Sequence
  Description of Artificial Sequence: Synthetic oligonucleotide
uuugaagcagacuccagac

SEQ ID NO: 3166417 - RNA, 19 nt, Artificial Sequence
  Description of Artificial Sequence: Synthetic oligonucleotide
acuccagacauucccauuc

SEQ ID NO: 3166418 - RNA, 19 nt, Artificial Sequence
  Description of Artificial Sequence: Synthetic oligonucleotide
ugaagcagacuccagacau

SEQ ID NO: 3166419 - RNA, 19 nt, Artificial Sequence
  Description of Artificial Sequence: Synthetic oligonucleotide
uaagacuucucuuggauau

SEQ ID NO: 3166420 - RNA, 19 nt, Artificial Sequence
  Description of Artificial Sequence: Synthetic oligonucleotide
guaauucuccaacaucacg

SEQ ID NO: 3166421 - RNA, 19 nt, Artificial Sequence
  Description of Artificial Sequence: Synthetic oligonucleotide
cauaugauauuucucaaca

SEQ ID NO: 3166422 - RNA, 19 nt, Artificial Sequence
  Description of Artificial Sequence: Synthetic oligonucleotide
guauuugucaucuucacua

SEQ ID NO: 3166423 - RNA, 19 nt, Artificial Sequence
  Description of Artificial Sequence: Synthetic oligonucleotide
acuucucuuggauauucac

SEQ ID NO: 3166424 - RNA, 19 nt, Artificial Sequence
  Description of Artificial Sequence: Synthetic oligonucleotide
uuugauucuugauccaaga

SEQ ID NO: 3166425 - RNA, 19 nt, Artificial Sequence
  Description of Artificial Sequence: Synthetic oligonucleotide
uuggauauucacaggguga

SEQ ID NO: 3166426 - RNA, 19 nt, Artificial Sequence
  Description of Artificial Sequence: Synthetic oligonucleotide
auaagaguauuugucaucu

SEQ ID NO: 3166427 - RNA, 19 nt, Artificial Sequence
  Description of Artificial Sequence: Synthetic oligonucleotide
gugcuuugauucuugaucc

SEQ ID NO: 3166428 - RNA, 19 nt, Artificial Sequence
  Description of Artificial Sequence: Synthetic oligonucleotide
acuagauugugguaauucu

SEQ ID NO: 3166429 - RNA, 19 nt, Artificial Sequence
  Description of Artificial Sequence: Synthetic oligonucleotide
uucacagggugauagacaa

SEQ ID NO: 3166430 - RNA, 19 nt, Artificial Sequence
  Description of Artificial Sequence: Synthetic oligonucleotide
aaaacuagauugugguaau

SEQ ID NO: 3166431 - RNA, 19 nt, Artificial Sequence
  Description of Artificial Sequence: Synthetic oligonucleotide
augucaacagauccugggg

SEQ ID NO: 3166432 - RNA, 19 nt, Artificial Sequence
  Description of Artificial Sequence: Synthetic oligonucleotide
cauacauaugauauuucuc

SEQ ID NO: 3166433 - RNA, 19 nt, Artificial Sequence
  Description of Artificial Sequence: Synthetic oligonucleotide
aaguccacagccacacucc

SEQ ID NO: 3166434 - RNA, 19 nt, Artificial Sequence
  Description of Artificial Sequence: Synthetic oligonucleotide
aagcagacuccagacauuc

SEQ ID NO: 3166435 - RNA, 19 nt, Artificial Sequence
  Description of Artificial Sequence: Synthetic oligonucleotide
gauaagaguauuugucauc

SEQ ID NO: 3166436 - RNA, 19 nt, Artificial Sequence
  Description of Artificial Sequence: Synthetic oligonucleotide
ugauagacaaugugcuuug

SEQ ID NO: 3166437 - RNA, 19 nt, Artificial Sequence
  Description of Artificial Sequence: Synthetic oligonucleotide
ucuugauccaagacuuuca

SEQ ID NO: 3166438 - RNA, 19 nt, Artificial Sequence
  Description of Artificial Sequence: Synthetic oligonucleotide
uuuucacauacauaugaua

SEQ ID NO: 3166439 - RNA, 19 nt, Artificial Sequence
  Description of Artificial Sequence: Synthetic oligonucleotide
acgucaauguaccaggccu

SEQ ID NO: 3166440 - RNA, 19 nt, Artificial Sequence
  Description of Artificial Sequence: Synthetic oligonucleotide
ugauaagaguauuugucau

SEQ ID NO: 3166441 - RNA, 19 nt, Artificial Sequence
  Description of Artificial Sequence: Synthetic oligonucleotide
cuuggauauucacagggug

SEQ ID NO: 3166442 - RNA, 19 nt, Artificial Sequence
  Description of Artificial Sequence: Synthetic oligonucleotide
uuuucauaagacuucucuu

SEQ ID NO: 3166443 - RNA, 19 nt, Artificial Sequence
  Description of Artificial Sequence: Synthetic oligonucleotide
gugauaagaguauuuguca

SEQ ID NO: 3166444 - RNA, 19 nt, Artificial Sequence
  Description of Artificial Sequence: Synthetic oligonucleotide
uugauucuugauccaagac

SEQ ID NO: 3166445 - RNA, 19 nt, Artificial Sequence
  Description of Artificial Sequence: Synthetic oligonucleotide
uugugauaagaguauuugu

SEQ ID NO: 3166446 - RNA, 19 nt, Artificial Sequence
  Description of Artificial Sequence: Synthetic oligonucleotide
cuuugauucuugauccaag

SEQ ID NO: 3166447 - RNA, 19 nt, Artificial Sequence
  Description of Artificial Sequence: Synthetic oligonucleotide
ucacauacauaugauauuu

SEQ ID NO: 3166448 - RNA, 19 nt, Artificial Sequence
  Description of Artificial Sequence: Synthetic oligonucleotide
ugugguaauucuccaacau

SEQ ID NO: 3166449 - RNA, 19 nt, Artificial Sequence
  Description of Artificial Sequence: Synthetic oligonucleotide
cuagauugugguaauucuc

SEQ ID NO: 3166450 - RNA, 19 nt, Artificial Sequence
  Description of Artificial Sequence: Synthetic oligonucleotide
uucuccaacaucacgucaa

SEQ ID NO: 3166451 - RNA, 19 nt, Artificial Sequence
  Description of Artificial Sequence: Synthetic oligonucleotide
aguauuugucaucuucacu

SEQ ID NO: 3166452 - RNA, 19 nt, Artificial Sequence
  Description of Artificial Sequence: Synthetic oligonucleotide
ugcagucuuuucauaagac

SEQ ID NO: 3166453 - RNA, 19 nt, Artificial Sequence
  Description of Artificial Sequence: Synthetic oligonucleotide
gaaguccacagccacacuc

SEQ ID NO: 3166454 - RNA, 19 nt, Artificial Sequence
  Description of Artificial Sequence: Synthetic oligonucleotide
aaugugcuuugauucuuga

SEQ ID NO: 3166455 - RNA, 19 nt, Artificial Sequence
  Description of Artificial Sequence: Synthetic oligonucleotide
uagacaaugugcuuugauu

SEQ ID NO: 3166456 - RNA, 19 nt, Artificial Sequence
  Description of Artificial Sequence: Synthetic oligonucleotide
ucuuggauauucacagggu

SEQ ID NO: 3166457 - RNA, 19 nt, Artificial Sequence
  Description of Artificial Sequence: Synthetic oligonucleotide
agucuuuucauaagacuuc

SEQ ID NO: 3166458 - RNA, 19 nt, Artificial Sequence
  Description of Artificial Sequence: Synthetic oligonucleotide
uauucacagggugauagac

SEQ ID NO: 3166459 - RNA, 19 nt, Artificial Sequence
  Description of Artificial Sequence: Synthetic oligonucleotide
gaaugcagucuuuucauaa

SEQ ID NO: 3166460 - RNA, 19 nt, Artificial Sequence
  Description of Artificial Sequence: Synthetic oligonucleotide
caacaucacgucaauguac

SEQ ID NO: 3166461 - RNA, 19 nt, Artificial Sequence
  Description of Artificial Sequence: Synthetic oligonucleotide
uacauaugauauuucucaa

SEQ ID NO: 3166462 - RNA, 19 nt, Artificial Sequence
  Description of Artificial Sequence: Synthetic oligonucleotide
ucucuuggauauucacagg

SEQ ID NO: 3166463 - RNA, 19 nt, Artificial Sequence
  Description of Artificial Sequence: Synthetic oligonucleotide
uccuuugugauaagaguau

SEQ ID NO: 3166464 - RNA, 19 nt, Artificial Sequence
  Description of Artificial Sequence: Synthetic oligonucleotide
gaguauuugucaucuucac

SEQ ID NO: 3166465 - RNA, 19 nt, Artificial Sequence
  Description of Artificial Sequence: Synthetic oligonucleotide
cacagggugauagacaaug

SEQ ID NO: 3166466 - RNA, 19 nt, Artificial Sequence
  Description of Artificial Sequence: Synthetic oligonucleotide
aauguaccaggccuuugaa

SEQ ID NO: 3166467 - RNA, 19 nt, Artificial Sequence
  Description of Artificial Sequence: Synthetic oligonucleotide
aguccacagccacacuccc

SEQ ID NO: 3166468 - RNA, 19 nt, Artificial Sequence
  Description of Artificial Sequence: Synthetic oligonucleotide
ucauaagacuucucuugga

SEQ ID NO: 3166469 - RNA, 19 nt, Artificial Sequence
  Description of Artificial Sequence: Synthetic oligonucleotide
uugaagcagacuccagaca

SEQ ID NO: 3166470 - RNA, 19 nt, Artificial Sequence
  Description of Artificial Sequence: Synthetic oligonucleotide
auaugauauuucucaacaa

SEQ ID NO: 3166471 - RNA, 19 nt, Artificial Sequence
  Description of Artificial Sequence: Synthetic oligonucleotide
augauauuucucaacaaaa

SEQ ID NO: 3166472 - RNA, 19 nt, Artificial Sequence
  Description of Artificial Sequence: Synthetic oligonucleotide
uccccgaaugucaacagau

SEQ ID NO: 3166473 - RNA, 19 nt, Artificial Sequence
  Description of Artificial Sequence: Synthetic oligonucleotide
agaguauuugucaucuuca

SEQ ID NO: 3166474 - RNA, 19 nt, Artificial Sequence
  Description of Artificial Sequence: Synthetic oligonucleotide
uugugguaauucuccaaca

SEQ ID NO: 3166475 - RNA, 19 nt, Artificial Sequence
  Description of Artificial Sequence: Synthetic oligonucleotide
auccaagacuuucauauuu

SEQ ID NO: 3166476 - RNA, 19 nt, Artificial Sequence
  Description of Artificial Sequence: Synthetic oligonucleotide
uucacauacauaugauauu

SEQ ID NO: 3166477 - RNA, 19 nt, Artificial Sequence
  Description of Artificial Sequence: Synthetic oligonucleotide
cuuuucauaagacuucucu

SEQ ID NO: 3166478 - RNA, 19 nt, Artificial Sequence
  Description of Artificial Sequence: Synthetic oligonucleotide
agacuucucuuggauauuc

SEQ ID NO: 3166479 - RNA, 19 nt, Artificial Sequence
  Description of Artificial Sequence: Synthetic oligonucleotide
auguaccaggccuuugaag

SEQ ID NO: 3166480 - RNA, 19 nt, Artificial Sequence
  Description of Artificial Sequence: Synthetic oligonucleotide
augcagucuuuucauaaga

SEQ ID NO: 3166481 - RNA, 19 nt, Artificial Sequence
  Description of Artificial Sequence: Synthetic oligonucleotide
gagaaguccacagccacac

SEQ ID NO: 3166482 - RNA, 19 nt, Artificial Sequence
  Description of Artificial Sequence: Synthetic oligonucleotide
caucacgucaauguaccag

SEQ ID NO: 3166483 - RNA, 19 nt, Artificial Sequence
  Description of Artificial Sequence: Synthetic oligonucleotide
cuuugaagcagacuccaga

SEQ ID NO: 3166484 - RNA, 19 nt, Artificial Sequence
  Description of Artificial Sequence: Synthetic oligonucleotide
uauacaaguacacagaagg

SEQ ID NO: 3166485 - RNA, 19 nt, Artificial Sequence
  Description of Artificial Sequence: Synthetic oligonucleotide
uuuuaauucuguuaaagcg

SEQ ID NO: 3166486 - RNA, 19 nt, Artificial Sequence
  Description of Artificial Sequence: Synthetic oligonucleotide
aauagcaucaaguuccugg

SEQ ID NO: 3166487 - RNA, 19 nt, Artificial Sequence
  Description of Artificial Sequence: Synthetic oligonucleotide
ucaauaaaugucaaagugg

SEQ ID NO: 3166488 - RNA, 19 nt, Artificial Sequence
  Description of Artificial Sequence: Synthetic oligonucleotide
uuuuaaaucacuuagguuu

SEQ ID NO: 3166489 - RNA, 19 nt, Artificial Sequence
  Description of Artificial Sequence: Synthetic oligonucleotide
uuuauugucacguaggaca

SEQ ID NO: 3166490 - RNA, 19 nt, Artificial Sequence
  Description of Artificial Sequence: Synthetic oligonucleotide
ucauacaugucuuuaaacg

SEQ ID NO: 3166491 - RNA, 19 nt, Artificial Sequence
  Description of Artificial Sequence: Synthetic oligonucleotide
aaauaugcagucuucuugg

SEQ ID NO: 3166492 - RNA, 19 nt, Artificial Sequence
  Description of Artificial Sequence: Synthetic oligonucleotide
aacgcuucuugcuuaaucc

SEQ ID NO: 3166493 - RNA, 19 nt, Artificial Sequence
  Description of Artificial Sequence: Synthetic oligonucleotide
uuuaauucuguuaaagcgc

SEQ ID NO: 3166494 - RNA, 19 nt, Artificial Sequence
  Description of Artificial Sequence: Synthetic oligonucleotide
uuugaugucagaucaaucc

SEQ ID NO: 3166495 - RNA, 19 nt, Artificial Sequence
  Description of Artificial Sequence: Synthetic oligonucleotide
uuaauucuguuaaagcgcg

SEQ ID NO: 3166496 - RNA, 19 nt, Artificial Sequence
  Description of Artificial Sequence: Synthetic oligonucleotide
aggaauagcaucaaguucc

SEQ ID NO: 3166497 - RNA, 19 nt, Artificial Sequence
  Description of Artificial Sequence: Synthetic oligonucleotide
uaaguuugaugucagauca

SEQ ID NO: 3166498 - RNA, 19 nt, Artificial Sequence
  Description of Artificial Sequence: Synthetic oligonucleotide
uauacagugguacuuauac

SEQ ID NO: 3166499 - RNA, 19 nt, Artificial Sequence
  Description of Artificial Sequence: Synthetic oligonucleotide
auaucaauaaaugucaaag

SEQ ID NO: 3166500 - RNA, 19 nt, Artificial Sequence
  Description of Artificial Sequence: Synthetic oligonucleotide
uacuuauacaaguacacag

SEQ ID NO: 3166501 - RNA, 19 nt, Artificial Sequence
  Description of Artificial Sequence: Synthetic oligonucleotide
aucaauaaaugucaaagug

SEQ ID NO: 3166502 - RNA, 19 nt, Artificial Sequence
  Description of Artificial Sequence: Synthetic oligonucleotide
ucugauauuaaguuugaug

SEQ ID NO: 3166503 - RNA, 19 nt, Artificial Sequence
  Description of Artificial Sequence: Synthetic oligonucleotide
uuauccgugauauagagau

SEQ ID NO: 3166504 - RNA, 19 nt, Artificial Sequence
  Description of Artificial Sequence: Synthetic oligonucleotide
aauuuuauugucacguagg

SEQ ID NO: 3166505 - RNA, 19 nt, Artificial Sequence
  Description of Artificial Sequence: Synthetic oligonucleotide
auaaaugucaaagugguug

SEQ ID NO: 3166506 - RNA, 19 nt, Artificial Sequence
  Description of Artificial Sequence: Synthetic oligonucleotide
uaauuuuauugucacguag

SEQ ID NO: 3166507 - RNA, 19 nt, Artificial Sequence
  Description of Artificial Sequence: Synthetic oligonucleotide
ucuauuguugcugauauca

SEQ ID NO: 3166508 - RNA, 19 nt, Artificial Sequence
  Description of Artificial Sequence: Synthetic oligonucleotide
aauagaaauaugcagucuu

SEQ ID NO: 3166509 - RNA, 19 nt, Artificial Sequence
  Description of Artificial Sequence: Synthetic oligonucleotide
uaaaugucaaagugguugg

SEQ ID NO: 3166510 - RNA, 19 nt, Artificial Sequence
  Description of Artificial Sequence: Synthetic oligonucleotide
gaaauaugcagucuucuug

SEQ ID NO: 3166511 - RNA, 19 nt, Artificial Sequence
  Description of Artificial Sequence: Synthetic oligonucleotide
ucuguuaaagcgcgaauag

SEQ ID NO: 3166512 - RNA, 19 nt, Artificial Sequence
  Description of Artificial Sequence: Synthetic oligonucleotide
uguuaaagcgcgaauagaa

SEQ ID NO: 3166513 - RNA, 19 nt, Artificial Sequence
  Description of Artificial Sequence: Synthetic oligonucleotide
ugcaucuucaucaaucucu

SEQ ID NO: 3166514 - RNA, 19 nt, Artificial Sequence
  Description of Artificial Sequence: Synthetic oligonucleotide
cauacaugucuuuaaacgc

SEQ ID NO: 3166515 - RNA, 19 nt, Artificial Sequence
  Description of Artificial Sequence: Synthetic oligonucleotide
uuuaaaucacuuagguuug

SEQ ID NO: 3166516 - RNA, 19 nt, Artificial Sequence
  Description of Artificial Sequence: Synthetic oligonucleotide
aaugcaucuucaucaaucu

SEQ ID NO: 3166517 - RNA, 19 nt, Artificial Sequence
  Description of Artificial Sequence: Synthetic oligonucleotide
ucggaaugcaucuucauca

SEQ ID NO: 3166518 - RNA, 19 nt, Artificial Sequence
  Description of Artificial Sequence: Synthetic oligonucleotide
ucaaucucugauauuaagu

SEQ ID NO: 3166519 - RNA, 19 nt, Artificial Sequence
  Description of Artificial Sequence: Synthetic oligonucleotide
agcgcgaauagaaauaugc

SEQ ID NO: 3166520 - RNA, 19 nt, Artificial Sequence
  Description of Artificial Sequence: Synthetic oligonucleotide
aucauacaugucuuuaaac

SEQ ID NO: 3166521 - RNA, 19 nt, Artificial Sequence
  Description of Artificial Sequence: Synthetic oligonucleotide
aaacgcuucuugcuuaauc

SEQ ID NO: 3166522 - RNA, 19 nt, Artificial Sequence
  Description of Artificial Sequence: Synthetic oligonucleotide
aagcucuuggagaugaggc

SEQ ID NO: 3166523 - RNA, 19 nt, Artificial Sequence
  Description of Artificial Sequence: Synthetic oligonucleotide
gucaucacaguauacagug

SEQ ID NO: 3166524 - RNA, 19 nt, Artificial Sequence
  Description of Artificial Sequence: Synthetic oligonucleotide
uguuauccgugauauagag

SEQ ID NO: 3166525 - RNA, 19 nt, Artificial Sequence
  Description of Artificial Sequence: Synthetic oligonucleotide
aaucacuuagguuugcaaa

SEQ ID NO: 3166526 - RNA, 19 nt, Artificial Sequence
  Description of Artificial Sequence: Synthetic oligonucleotide
agaggaaugugguccaagc

SEQ ID NO: 3166527 - RNA, 19 nt, Artificial Sequence
  Description of Artificial Sequence: Synthetic oligonucleotide
auagagauggugaagauca

SEQ ID NO: 3166528 - RNA, 19 nt, Artificial Sequence
  Description of Artificial Sequence: Synthetic oligonucleotide
uacagugguacuuauacaa

SEQ ID NO: 3166529 - RNA, 19 nt, Artificial Sequence
  Description of Artificial Sequence: Synthetic oligonucleotide
aagcugcuuaauuuuauug

SEQ ID NO: 3166530 - RNA, 19 nt, Artificial Sequence
  Description of Artificial Sequence: Synthetic oligonucleotide
gauauuaaguuugauguca

SEQ ID NO: 3166531 - RNA, 19 nt, Artificial Sequence
  Description of Artificial Sequence: Synthetic oligonucleotide
uaugcagucuucuugggga

SEQ ID NO: 3166532 - RNA, 19 nt, Artificial Sequence
  Description of Artificial Sequence: Synthetic oligonucleotide
ugucuuuaaacgcuucuug

SEQ ID NO: 3166533 - RNA, 19 nt, Artificial Sequence
  Description of Artificial Sequence: Synthetic oligonucleotide
aucacuuagguuugcaaag

SEQ ID NO: 3166534 - RNA, 19 nt, Artificial Sequence
  Description of Artificial Sequence: Synthetic oligonucleotide
uuauacaaguacacagaag

SEQ ID NO: 3166535 - RNA, 19 nt, Artificial Sequence
  Description of Artificial Sequence: Synthetic oligonucleotide
uugcugauaucaauaaaug

SEQ ID NO: 3166536 - RNA, 19 nt, Artificial Sequence
  Description of Artificial Sequence: Synthetic oligonucleotide
auugucacguaggacaagc

SEQ ID NO: 3166537 - RNA, 19 nt, Artificial Sequence
  Description of Artificial Sequence: Synthetic oligonucleotide
cugauauuaaguuugaugu

SEQ ID NO: 3166538 - RNA, 19 nt, Artificial Sequence
  Description of Artificial Sequence: Synthetic oligonucleotide
ucuugcuuaaucccuuucc

SEQ ID NO: 3166539 - RNA, 19 nt, Artificial Sequence
  Description of Artificial Sequence: Synthetic oligonucleotide
uaucaauaaaugucaaagu

SEQ ID NO: 3166540 - RNA, 19 nt, Artificial Sequence
  Description of Artificial Sequence: Synthetic oligonucleotide
gauauagagauggugaaga

SEQ ID NO: 3166541 - RNA, 19 nt, Artificial Sequence
  Description of Artificial Sequence: Synthetic oligonucleotide
uggaggaauagcaucaagu

SEQ ID NO: 3166542 - RNA, 19 nt, Artificial Sequence
  Description of Artificial Sequence: Synthetic oligonucleotide
ugguuggcaauucuggaag

SEQ ID NO: 3166543 - RNA, 19 nt, Artificial Sequence
  Description of Artificial Sequence: Synthetic oligonucleotide
aauaugcagucuucuuggg

SEQ ID NO: 3166544 - RNA, 19 nt, Artificial Sequence
  Description of Artificial Sequence: Synthetic oligonucleotide
uuaaguuugaugucagauc

SEQ ID NO: 3166545 - RNA, 19 nt, Artificial Sequence
  Description of Artificial Sequence: Synthetic oligonucleotide
uuaaagcgcgaauagaaau

SEQ ID NO: 3166546 - RNA, 19 nt, Artificial Sequence
  Description of Artificial Sequence: Synthetic oligonucleotide
auccgugauauagagaugg

SEQ ID NO: 3166547 - RNA, 19 nt, Artificial Sequence
  Description of Artificial Sequence: Synthetic oligonucleotide
ucaucaaucucugauauua

SEQ ID NO: 3166548 - RNA, 19 nt, Artificial Sequence
  Description of Artificial Sequence: Synthetic oligonucleotide
ugguacuuauacaaguaca

SEQ ID NO: 3166549 - RNA, 19 nt, Artificial Sequence
  Description of Artificial Sequence: Synthetic oligonucleotide
uacacagaaggcagguugg

SEQ ID NO: 3166550 - RNA, 19 nt, Artificial Sequence
  Description of Artificial Sequence: Synthetic oligonucleotide
cugauaucaauaaauguca

SEQ ID NO: 3166551 - RNA, 19 nt, Artificial Sequence
  Description of Artificial Sequence: Synthetic oligonucleotide
ucuuuaaacgcuucuugcu

SEQ ID NO: 3166552 - RNA, 19 nt, Artificial Sequence
  Description of Artificial Sequence: Synthetic oligonucleotide
uggugaagaucauacaugu

SEQ ID NO: 3166553 - RNA, 19 nt, Artificial Sequence
  Description of Artificial Sequence: Synthetic oligonucleotide
aggaaugugguccaagcug

SEQ ID NO: 3166554 - RNA, 19 nt, Artificial Sequence
  Description of Artificial Sequence: Synthetic oligonucleotide
uacaaguacacagaaggca

SEQ ID NO: 3166555 - RNA, 19 nt, Artificial Sequence
  Description of Artificial Sequence: Synthetic oligonucleotide
ugcuuaauuuuauugucac

SEQ ID NO: 3166556 - RNA, 19 nt, Artificial Sequence
  Description of Artificial Sequence: Synthetic oligonucleotide
aucaaucucugauauuaag

SEQ ID NO: 3166557 - RNA, 19 nt, Artificial Sequence
  Description of Artificial Sequence: Synthetic oligonucleotide
uggucaucacaguauacag

SEQ ID NO: 3166558 - RNA, 19 nt, Artificial Sequence
  Description of Artificial Sequence: Synthetic oligonucleotide
uugaugucagaucaauccu

SEQ ID NO: 3166559 - RNA, 19 nt, Artificial Sequence
  Description of Artificial Sequence: Synthetic oligonucleotide
guugggaagucuucguugg

SEQ ID NO: 3166560 - RNA, 19 nt, Artificial Sequence
  Description of Artificial Sequence: Synthetic oligonucleotide
auuuuauugucacguagga

SEQ ID NO: 3166561 - RNA, 19 nt, Artificial Sequence
  Description of Artificial Sequence: Synthetic oligonucleotide
ucuucuuggggaguggagg

SEQ ID NO: 3166562 - RNA, 19 nt, Artificial Sequence
  Description of Artificial Sequence: Synthetic oligonucleotide
ugcugauaucaauaaaugu

SEQ ID NO: 3166563 - RNA, 19 nt, Artificial Sequence
  Description of Artificial Sequence: Synthetic oligonucleotide
uucuggaaguggcagagga

SEQ ID NO: 3166564 - RNA, 19 nt, Artificial Sequence
  Description of Artificial Sequence: Synthetic oligonucleotide
aaaugucaaagugguuggc

SEQ ID NO: 3166565 - RNA, 19 nt, Artificial Sequence
  Description of Artificial Sequence: Synthetic oligonucleotide
aagugguuggcaauucugg

SEQ ID NO: 3166566 - RNA, 19 nt, Artificial Sequence
  Description of Artificial Sequence: Synthetic oligonucleotide
agcugcuuaauuuuauugu

SEQ ID NO: 3166567 - RNA, 19 nt, Artificial Sequence
  Description of Artificial Sequence: Synthetic oligonucleotide
gagauggugaagaucauac

SEQ ID NO: 3166568 - RNA, 19 nt, Artificial Sequence
  Description of Artificial Sequence: Synthetic oligonucleotide
aauucuggaagcugcuuaa

SEQ ID NO: 3166569 - RNA, 19 nt, Artificial Sequence
  Description of Artificial Sequence: Synthetic oligonucleotide
guacacagaaggcagguug

SEQ ID NO: 3166570 - RNA, 19 nt, Artificial Sequence
  Description of Artificial Sequence: Synthetic oligonucleotide
aaucucugauauuaaguuu

SEQ ID NO: 3166571 - RNA, 19 nt, Artificial Sequence
  Description of Artificial Sequence: Synthetic oligonucleotide
aucucugauauuaaguuug

SEQ ID NO: 3166572 - RNA, 19 nt, Artificial Sequence
  Description of Artificial Sequence: Synthetic oligonucleotide
auaugcagucuucuugggg

SEQ ID NO: 3166573 - RNA, 19 nt, Artificial Sequence
  Description of Artificial Sequence: Synthetic oligonucleotide
uuggagaugaggcagcuuu

SEQ ID NO: 3166574 - RNA, 19 nt, Artificial Sequence
  Description of Artificial Sequence: Synthetic oligonucleotide
aucuucaucaaucucugau

SEQ ID NO: 3166575 - RNA, 19 nt, Artificial Sequence
  Description of Artificial Sequence: Synthetic oligonucleotide
agcaucaaguuccugguca

SEQ ID NO: 3166576 - RNA, 19 nt, Artificial Sequence
  Description of Artificial Sequence: Synthetic oligonucleotide
aaaucacuuagguuugcaa

SEQ ID NO: 3166577 - RNA, 19 nt, Artificial Sequence
  Description of Artificial Sequence: Synthetic oligonucleotide
auuaaguuugaugucagau

SEQ ID NO: 3166578 - RNA, 19 nt, Artificial Sequence
  Description of Artificial Sequence: Synthetic oligonucleotide
uaggacaagcucuuggaga

SEQ ID NO: 3166579 - RNA, 19 nt, Artificial Sequence
  Description of Artificial Sequence: Synthetic oligonucleotide
gucuuuaaacgcuucuugc

SEQ ID NO: 3166580 - RNA, 19 nt, Artificial Sequence
  Description of Artificial Sequence: Synthetic oligonucleotide
ugcuuaaucccuuuccuuc

SEQ ID NO: 3166581 - RNA, 19 nt, Artificial Sequence
  Description of Artificial Sequence: Synthetic oligonucleotide
agucuauuguugcugauau

SEQ ID NO: 3166582 - RNA, 19 nt, Artificial Sequence
  Description of Artificial Sequence: Synthetic oligonucleotide
auacaaguacacagaaggc

SEQ ID NO: 3166583 - RNA, 19 nt, Artificial Sequence
  Description of Artificial Sequence: Synthetic oligonucleotide
gaaugcaucuucaucaauc

SEQ ID NO: 3166584 - RNA, 19 nt, Artificial Sequence
  Description of Artificial Sequence: Synthetic oligonucleotide
agggcuacaggccugaacc

SEQ ID NO: 3166585 - RNA, 19 nt, Artificial Sequence
  Description of Artificial Sequence: Synthetic oligonucleotide
ucugccagcaccuugagug

SEQ ID NO: 3166586 - RNA, 19 nt, Artificial Sequence
  Description of Artificial Sequence: Synthetic oligonucleotide
agaaagauccgucaucuuc

SEQ ID NO: 3166587 - RNA, 19 nt, Artificial Sequence
  Description of Artificial Sequence: Synthetic oligonucleotide
agauccgucaucuucacag

SEQ ID NO: 3166588 - RNA, 19 nt, Artificial Sequence
  Description of Artificial Sequence: Synthetic oligonucleotide
aucuucacagccuguaggc

SEQ ID NO: 3166589 - RNA, 19 nt, Artificial Sequence
  Description of Artificial Sequence: Synthetic oligonucleotide
ugaaccacgcccaucacca

SEQ ID NO: 3166590 - RNA, 19 nt, Artificial Sequence
  Description of Artificial Sequence: Synthetic oligonucleotide
aaggccggccucuagguac

SEQ ID NO: 3166591 - RNA, 19 nt, Artificial Sequence
  Description of Artificial Sequence: Synthetic oligonucleotide
accuccaguucccacaugc

SEQ ID NO: 3166592 - RNA, 19 nt, Artificial Sequence
  Description of Artificial Sequence: Synthetic oligonucleotide
aagggucccagcucuaagg

SEQ ID NO: 3166593 - RNA, 19 nt, Artificial Sequence
  Description of Artificial Sequence: Synthetic oligonucleotide
aaagauccgucaucuucac

SEQ ID NO: 3166594 - RNA, 19 nt, Artificial Sequence
  Description of Artificial Sequence: Synthetic oligonucleotide
aagucuuccaccuccaguu

SEQ ID NO: 3166595 - RNA, 19 nt, Artificial Sequence
  Description of Artificial Sequence: Synthetic oligonucleotide
acaggccugaaccacgccc

SEQ ID NO: 3166596 - RNA, 19 nt, Artificial Sequence
  Description of Artificial Sequence: Synthetic oligonucleotide
agggcucagggcuacaggc

SEQ ID NO: 3166597 - RNA, 19 nt, Artificial Sequence
  Description of Artificial Sequence: Synthetic oligonucleotide
uucuuaaagggucccagcu

SEQ ID NO: 3166598 - RNA, 19 nt, Artificial Sequence
  Description of Artificial Sequence: Synthetic oligonucleotide
ucuagguacgcgcuccagg

SEQ ID NO: 3166599 - RNA, 19 nt, Artificial Sequence
  Description of Artificial Sequence: Synthetic oligonucleotide
agcacggugcccugcaucc

SEQ ID NO: 3166600 - RNA, 19 nt, Artificial Sequence
  Description of Artificial Sequence: Synthetic oligonucleotide
ucagaaagauccgucaucu

SEQ ID NO: 3166601 - RNA, 19 nt, Artificial Sequence
  Description of Artificial Sequence: Synthetic oligonucleotide
aaagcuguucuuaaagggu

SEQ ID NO: 3166602 - RNA, 19 nt, Artificial Sequence
  Description of Artificial Sequence: Synthetic oligonucleotide
agguacgcgcuccaggccc

SEQ ID NO: 3166603 - RNA, 19 nt, Artificial Sequence
  Description of Artificial Sequence: Synthetic oligonucleotide
aggucagcgacuccgccgc

SEQ ID NO: 3166604 - RNA, 19 nt, Artificial Sequence
  Description of Artificial Sequence: Synthetic oligonucleotide
uucacagccuguaggcagg

SEQ ID NO: 3166605 - RNA, 19 nt, Artificial Sequence
  Description of Artificial Sequence: Synthetic oligonucleotide
uguucuuaaagggucccag

SEQ ID NO: 3166606 - RNA, 19 nt, Artificial Sequence
  Description of Artificial Sequence: Synthetic oligonucleotide
auccgucaucuucacagcc

SEQ ID NO: 3166607 - RNA, 19 nt, Artificial Sequence
  Description of Artificial Sequence: Synthetic oligonucleotide
uuuccugggagcaggcaag

SEQ ID NO: 3166608 - RNA, 19 nt, Artificial Sequence
  Description of Artificial Sequence: Synthetic oligonucleotide
caucuucacagccuguagg

SEQ ID NO: 3166609 - RNA, 19 nt, Artificial Sequence
  Description of Artificial Sequence: Synthetic oligonucleotide
cuagguacgcgcuccaggc

SEQ ID NO: 3166610 - RNA, 19 nt, Artificial Sequence
  Description of Artificial Sequence: Synthetic oligonucleotide
uugucagaaagauccguca

SEQ ID NO: 3166611 - RNA, 19 nt, Artificial Sequence
  Description of Artificial Sequence: Synthetic oligonucleotide
cugggagcaggcaaggccg

SEQ ID NO: 3166612 - RNA, 19 nt, Artificial Sequence
  Description of Artificial Sequence: Synthetic oligonucleotide
caucacauacuuuccuggg

SEQ ID NO: 3166613 - RNA, 19 nt, Artificial Sequence
  Description of Artificial Sequence: Synthetic oligonucleotide
uaagucuuccaccuccagu

SEQ ID NO: 3166614 - RNA, 19 nt, Artificial Sequence
  Description of Artificial Sequence: Synthetic oligonucleotide
gaaagauccgucaucuuca

SEQ ID NO: 3166615 - RNA, 19 nt, Artificial Sequence
  Description of Artificial Sequence: Synthetic oligonucleotide
auugucagaaagauccguc

SEQ ID NO: 3166616 - RNA, 19 nt, Artificial Sequence
  Description of Artificial Sequence: Synthetic oligonucleotide
guguaagucuuccaccucc

SEQ ID NO: 3166617 - RNA, 19 nt, Artificial Sequence
  Description of Artificial Sequence: Synthetic oligonucleotide
ucaucuucacagccuguag

SEQ ID NO: 3166618 - RNA, 19 nt, Artificial Sequence
  Description of Artificial Sequence: Synthetic oligonucleotide
aaagggucccagcucuaag

SEQ ID NO: 3166619 - RNA, 19 nt, Artificial Sequence
  Description of Artificial Sequence: Synthetic oligonucleotide
gugcccugcauccacacgg

SEQ ID NO: 3166620 - RNA, 19 nt, Artificial Sequence
  Description of Artificial Sequence: Synthetic oligonucleotide
cuucacagccuguaggcag

SEQ ID NO: 3166621 - RNA, 19 nt, Artificial Sequence
  Description of Artificial Sequence: Synthetic oligonucleotide
aaccacgcccaucaccauc

SEQ ID NO: 3166622 - RNA, 19 nt, Artificial Sequence
  Description of Artificial Sequence: Synthetic oligonucleotide
uucccacaugcuuucgugg

SEQ ID NO: 3166623 - RNA, 19 nt, Artificial Sequence
  Description of Artificial Sequence: Synthetic oligonucleotide
ucguggacgggauugucag

SEQ ID NO: 3166624 - RNA, 19 nt, Artificial Sequence
  Description of Artificial Sequence: Synthetic oligonucleotide
ucuuaaagggucccagcuc

SEQ ID NO: 3166625 - RNA, 19 nt, Artificial Sequence
  Description of Artificial Sequence: Synthetic oligonucleotide
acggagaaggccccgcucg

SEQ ID NO: 3166626 - RNA, 19 nt, Artificial Sequence
  Description of Artificial Sequence: Synthetic oligonucleotide
agccguacggccccggggc

SEQ ID NO: 3166627 - RNA, 19 nt, Artificial Sequence
  Description of Artificial Sequence: Synthetic oligonucleotide
ucaccaucacauacuuucc

SEQ ID NO: 3166628 - RNA, 19 nt, Artificial Sequence
  Description of Artificial Sequence: Synthetic oligonucleotide
ugagugguggcgaccgcgg

SEQ ID NO: 3166629 - RNA, 19 nt, Artificial Sequence
  Description of Artificial Sequence: Synthetic oligonucleotide
gaggucagcgacuccgccg

SEQ ID NO: 3166630 - RNA, 19 nt, Artificial Sequence
  Description of Artificial Sequence: Synthetic oligonucleotide
uguaagucuuccaccucca

SEQ ID NO: 3166631 - RNA, 19 nt, Artificial Sequence
  Description of Artificial Sequence: Synthetic oligonucleotide
ucuuccaccuccaguuccc

SEQ ID NO: 3166632 - RNA, 19 nt, Artificial Sequence
  Description of Artificial Sequence: Synthetic oligonucleotide
ugucagaaagauccgucau

SEQ ID NO: 3166633 - RNA, 19 nt, Artificial Sequence
  Description of Artificial Sequence: Synthetic oligonucleotide
auacuuuccugggagcagg

SEQ ID NO: 3166634 - RNA, 19 nt, Artificial Sequence
  Description of Artificial Sequence: Synthetic oligonucleotide
uccaguucccacaugcuuu

SEQ ID NO: 3166635 - RNA, 19 nt, Artificial Sequence
  Description of Artificial Sequence: Synthetic oligonucleotide
acggccgccagcuccagcg

SEQ ID NO: 3166636 - RNA, 19 nt, Artificial Sequence
  Description of Artificial Sequence: Synthetic oligonucleotide
uucguggacgggauuguca

SEQ ID NO: 3166637 - RNA, 19 nt, Artificial Sequence
  Description of Artificial Sequence: Synthetic oligonucleotide
ugcucugccagcaccuuga

SEQ ID NO: 3166638 - RNA, 19 nt, Artificial Sequence
  Description of Artificial Sequence: Synthetic oligonucleotide
acagccuguaggcagggcu

SEQ ID NO: 3166639 - RNA, 19 nt, Artificial Sequence
  Description of Artificial Sequence: Synthetic oligonucleotide
agcuccagcggcucucggc

SEQ ID NO: 3166640 - RNA, 19 nt, Artificial Sequence
  Description of Artificial Sequence: Synthetic oligonucleotide
uugagugguggcgaccgcg

SEQ ID NO: 3166641 - RNA, 19 nt, Artificial Sequence
  Description of Artificial Sequence: Synthetic oligonucleotide
uccaccuccaguucccaca

SEQ ID NO: 3166642 - RNA, 19 nt, Artificial Sequence
  Description of Artificial Sequence: Synthetic oligonucleotide
aucacauacuuuccuggga

SEQ ID NO: 3166643 - RNA, 19 nt, Artificial Sequence
  Description of Artificial Sequence: Synthetic oligonucleotide
guucuuaaagggucccagc

SEQ ID NO: 3166644 - RNA, 19 nt, Artificial Sequence
  Description of Artificial Sequence: Synthetic oligonucleotide
uccgccgccagcacggugc

SEQ ID NO: 3166645 - RNA, 19 nt, Artificial Sequence
  Description of Artificial Sequence: Synthetic oligonucleotide
cuguaggcagggcucaggg

SEQ ID NO: 3166646 - RNA, 19 nt, Artificial Sequence
  Description of Artificial Sequence: Synthetic oligonucleotide
agcuguucuuaaagggucc

SEQ ID NO: 3166647 - RNA, 19 nt, Artificial Sequence
  Description of Artificial Sequence: Synthetic oligonucleotide
agcaccuugagugguggcg

SEQ ID NO: 3166648 - RNA, 19 nt, Artificial Sequence
  Description of Artificial Sequence: Synthetic oligonucleotide
gaaggccccgcucgggucg

SEQ ID NO: 3166649 - RNA, 19 nt, Artificial Sequence
  Description of Artificial Sequence: Synthetic oligonucleotide
uccgucaucuucacagccu

SEQ ID NO: 3166650 - RNA, 19 nt, Artificial Sequence
  Description of Artificial Sequence: Synthetic oligonucleotide
guucccacaugcuuucgug

SEQ ID NO: 3166651 - RNA, 19 nt, Artificial Sequence
  Description of Artificial Sequence: Synthetic oligonucleotide
ucuaagggaugcuccugug

SEQ ID NO: 3166652 - RNA, 19 nt, Artificial Sequence
  Description of Artificial Sequence: Synthetic oligonucleotide
cugaaccacgcccaucacc

SEQ ID NO: 3166653 - RNA, 19 nt, Artificial Sequence
  Description of Artificial Sequence: Synthetic oligonucleotide
ucccacaugcuuucgugga

SEQ ID NO: 3166654 - RNA, 19 nt, Artificial Sequence
  Description of Artificial Sequence: Synthetic oligonucleotide
uccgccgccgccaugccgc

SEQ ID NO: 3166655 - RNA, 19 nt, Artificial Sequence
  Description of Artificial Sequence: Synthetic oligonucleotide
cacauacuuuccugggagc

SEQ ID NO: 3166656 - RNA, 19 nt, Artificial Sequence
  Description of Artificial Sequence: Synthetic oligonucleotide
cagcucuaagggaugcucc

SEQ ID NO: 3166657 - RNA, 19 nt, Artificial Sequence
  Description of Artificial Sequence: Synthetic oligonucleotide
acauacuuuccugggagca

SEQ ID NO: 3166658 - RNA, 19 nt, Artificial Sequence
  Description of Artificial Sequence: Synthetic oligonucleotide
cacaugcuuucguggacgg

SEQ ID NO: 3166659 - RNA, 19 nt, Artificial Sequence
  Description of Artificial Sequence: Synthetic oligonucleotide
cuuaaagggucccagcucu

SEQ ID NO: 3166660 - RNA, 19 nt, Artificial Sequence
  Description of Artificial Sequence: Synthetic oligonucleotide
aagggaugcuccuguguaa

SEQ ID NO: 3166661 - RNA, 19 nt, Artificial Sequence
  Description of Artificial Sequence: Synthetic oligonucleotide
uguguaagucuuccaccuc

SEQ ID NO: 3166662 - RNA, 19 nt, Artificial Sequence
  Description of Artificial Sequence: Synthetic oligonucleotide
agucuuccaccuccaguuc

SEQ ID NO: 3166663 - RNA, 19 nt, Artificial Sequence
  Description of Artificial Sequence: Synthetic oligonucleotide
ggacgggauugucagaaag

SEQ ID NO: 3166664 - RNA, 19 nt, Artificial Sequence
  Description of Artificial Sequence: Synthetic oligonucleotide
uguaggcagggcucagggc

SEQ ID NO: 3166665 - RNA, 19 nt, Artificial Sequence
  Description of Artificial Sequence: Synthetic oligonucleotide
gucuuccaccuccaguucc

SEQ ID NO: 3166666 - RNA, 19 nt, Artificial Sequence
  Description of Artificial Sequence: Synthetic oligonucleotide
aagauccgucaucuucaca

SEQ ID NO: 3166667 - RNA, 19 nt, Artificial Sequence
  Description of Artificial Sequence: Synthetic oligonucleotide
ccuguguaagucuuccacc

SEQ ID NO: 3166668 - RNA, 19 nt, Artificial Sequence
  Description of Artificial Sequence: Synthetic oligonucleotide
guaggcagggcucagggcu

SEQ ID NO: 3166669 - RNA, 19 nt, Artificial Sequence
  Description of Artificial Sequence: Synthetic oligonucleotide
accgccgcccgcgacagcc

SEQ ID NO: 3166670 - RNA, 19 nt, Artificial Sequence
  Description of Artificial Sequence: Synthetic oligonucleotide
acgcccaucaccaucacau

SEQ ID NO: 3166671 - RNA, 19 nt, Artificial Sequence
  Description of Artificial Sequence: Synthetic oligonucleotide
aguucccacaugcuuucgu

SEQ ID NO: 3166672 - RNA, 19 nt, Artificial Sequence
  Description of Artificial Sequence: Synthetic oligonucleotide
uacuuuccugggagcaggc

SEQ ID NO: 3166673 - RNA, 19 nt, Artificial Sequence
  Description of Artificial Sequence: Synthetic oligonucleotide
cauacuuuccugggagcag

SEQ ID NO: 3166674 - RNA, 19 nt, Artificial Sequence
  Description of Artificial Sequence: Synthetic oligonucleotide
gaccgcggcagccguacgg

SEQ ID NO: 3166675 - RNA, 19 nt, Artificial Sequence
  Description of Artificial Sequence: Synthetic oligonucleotide
ucuucacagccuguaggca

SEQ ID NO: 3166676 - RNA, 19 nt, Artificial Sequence
  Description of Artificial Sequence: Synthetic oligonucleotide
agaaggccccgcucggguc

SEQ ID NO: 3166677 - RNA, 19 nt, Artificial Sequence
  Description of Artificial Sequence: Synthetic oligonucleotide
agggaugcuccuguguaag

SEQ ID NO: 3166678 - RNA, 19 nt, Artificial Sequence
  Description of Artificial Sequence: Synthetic oligonucleotide
ugggagcaggcaaggccgg

SEQ ID NO: 3166679 - RNA, 19 nt, Artificial Sequence
  Description of Artificial Sequence: Synthetic oligonucleotide
acgggauugucagaaagau

SEQ ID NO: 3166680 - RNA, 19 nt, Artificial Sequence
  Description of Artificial Sequence: Synthetic oligonucleotide
guaagucuuccaccuccag

SEQ ID NO: 3166681 - RNA, 19 nt, Artificial Sequence
  Description of Artificial Sequence: Synthetic oligonucleotide
uagguacgcgcuccaggcc

SEQ ID NO: 3166682 - RNA, 19 nt, Artificial Sequence
  Description of Artificial Sequence: Synthetic oligonucleotide
cugccagcaccuugagugg

SEQ ID NO: 3166683 - RNA, 19 nt, Artificial Sequence
  Description of Artificial Sequence: Synthetic oligonucleotide
gacgggauugucagaaaga

SEQ ID NO: 3166684 - RNA, 19 nt, Artificial Sequence
  Description of Artificial Sequence: Synthetic oligonucleotide
ugaauauucaaauacaagg

SEQ ID NO: 3166685 - RNA, 19 nt, Artificial Sequence
  Description of Artificial Sequence: Synthetic oligonucleotide
aauauucaaauacaaggcc

SEQ ID NO: 3166686 - RNA, 19 nt, Artificial Sequence
  Description of Artificial Sequence: Synthetic oligonucleotide
cuuauaguuaacaagagcc

SEQ ID NO: 3166687 - RNA, 19 nt, Artificial Sequence
  Description of Artificial Sequence: Synthetic oligonucleotide
aaguccaucucuuaaagcg

SEQ ID NO: 3166688 - RNA, 19 nt, Artificial Sequence
  Description of Artificial Sequence: Synthetic oligonucleotide
aacaaggugacagagagag

SEQ ID NO: 3166689 - RNA, 19 nt, Artificial Sequence
  Description of Artificial Sequence: Synthetic oligonucleotide
cuaaugaauauucaaauac

SEQ ID NO: 3166690 - RNA, 19 nt, Artificial Sequence
  Description of Artificial Sequence: Synthetic oligonucleotide
ucaacaaggugacagagag

SEQ ID NO: 3166691 - RNA, 19 nt, Artificial Sequence
  Description of Artificial Sequence: Synthetic oligonucleotide
caagcaaucuucauuaagg

SEQ ID NO: 3166692 - RNA, 19 nt, Artificial Sequence
  Description of Artificial Sequence: Synthetic oligonucleotide
agagagaggauucacacag

SEQ ID NO: 3166693 - RNA, 19 nt, Artificial Sequence
  Description of Artificial Sequence: Synthetic oligonucleotide
aaugaguuuacagcuauuc

SEQ ID NO: 3166694 - RNA, 19 nt, Artificial Sequence
  Description of Artificial Sequence: Synthetic oligonucleotide
uucaaaugaguuuacagcu

SEQ ID NO: 3166695 - RNA, 19 nt, Artificial Sequence
  Description of Artificial Sequence: Synthetic oligonucleotide
aaggcuuggaguuccaagg

SEQ ID NO: 3166696 - RNA, 19 nt, Artificial Sequence
  Description of Artificial Sequence: Synthetic oligonucleotide
cuucaaaugaguuuacagc

SEQ ID NO: 3166697 - RNA, 19 nt, Artificial Sequence
  Description of Artificial Sequence: Synthetic oligonucleotide
uauuccuccacaagcaagg

SEQ ID NO: 3166698 - RNA, 19 nt, Artificial Sequence
  Description of Artificial Sequence: Synthetic oligonucleotide
ucuucaaaugaguuuacag

SEQ ID NO: 3166699 - RNA, 19 nt, Artificial Sequence
  Description of Artificial Sequence: Synthetic oligonucleotide
uaaugaauauucaaauaca

SEQ ID NO: 3166700 - RNA, 19 nt, Artificial Sequence
  Description of Artificial Sequence: Synthetic oligonucleotide
gaauauucaaauacaaggc

SEQ ID NO: 3166701 - RNA, 19 nt, Artificial Sequence
  Description of Artificial Sequence: Synthetic oligonucleotide
uauucaaauacaaggccag

SEQ ID NO: 3166702 - RNA, 19 nt, Artificial Sequence
  Description of Artificial Sequence: Synthetic oligonucleotide
uucauuaaggucuucaaau

SEQ ID NO: 3166703 - RNA, 19 nt, Artificial Sequence
  Description of Artificial Sequence: Synthetic oligonucleotide
acagagagaggauucacac

SEQ ID NO: 3166704 - RNA, 19 nt, Artificial Sequence
  Description of Artificial Sequence: Synthetic oligonucleotide
uccuugaucuguauuagag

SEQ ID NO: 3166705 - RNA, 19 nt, Artificial Sequence
  Description of Artificial Sequence: Synthetic oligonucleotide
ugaguuuacagcuauuccu

SEQ ID NO: 3166706 - RNA, 19 nt, Artificial Sequence
  Description of Artificial Sequence: Synthetic oligonucleotide
auuagaguaugcuuguuug

SEQ ID NO: 3166707 - RNA, 19 nt, Artificial Sequence
  Description of Artificial Sequence: Synthetic oligonucleotide
uugaucaacaaggugacag

SEQ ID NO: 3166708 - RNA, 19 nt, Artificial Sequence
  Description of Artificial Sequence: Synthetic oligonucleotide
agaggauucacacaguccu

SEQ ID NO: 3166709 - RNA, 19 nt, Artificial Sequence
  Description of Artificial Sequence: Synthetic oligonucleotide
augaguuuacagcuauucc

SEQ ID NO: 3166710 - RNA, 19 nt, Artificial Sequence
  Description of Artificial Sequence: Synthetic oligonucleotide
cuguauuagaguaugcuug

SEQ ID NO: 3166711 - RNA, 19 nt, Artificial Sequence
  Description of Artificial Sequence: Synthetic oligonucleotide
uuauaguuaacaagagccu

SEQ ID NO: 3166712 - RNA, 19 nt, Artificial Sequence
  Description of Artificial Sequence: Synthetic oligonucleotide
uacaaggccagcauguccc

SEQ ID NO: 3166713 - RNA, 19 nt, Artificial Sequence
  Description of Artificial Sequence: Synthetic oligonucleotide
aaaggcuuggaguuccaag

SEQ ID NO: 3166714 - RNA, 19 nt, Artificial Sequence
  Description of Artificial Sequence: Synthetic oligonucleotide
acuucaacugcuccagccc

SEQ ID NO: 3166715 - RNA, 19 nt, Artificial Sequence
  Description of Artificial Sequence: Synthetic oligonucleotide
agauuucuucucuuugccc

SEQ ID NO: 3166716 - RNA, 19 nt, Artificial Sequence
  Description of Artificial Sequence: Synthetic oligonucleotide
uuguuugguccuuugauca

SEQ ID NO: 3166717 - RNA, 19 nt, Artificial Sequence
  Description of Artificial Sequence: Synthetic oligonucleotide
uuagaguaugcuuguuugg

SEQ ID NO: 3166718 - RNA, 19 nt, Artificial Sequence
  Description of Artificial Sequence: Synthetic oligonucleotide
ucauuaaggucuucaaaug

SEQ ID NO: 3166719 - RNA, 19 nt, Artificial Sequence
  Description of Artificial Sequence: Synthetic oligonucleotide
gguccuuugaucaacaagg

SEQ ID NO: 3166720 - RNA, 19 nt, Artificial Sequence
  Description of Artificial Sequence: Synthetic oligonucleotide
uucucuuugcccuucgaag

SEQ ID NO: 3166721 - RNA, 19 nt, Artificial Sequence
  Description of Artificial Sequence: Synthetic oligonucleotide
aaugaauauucaaauacaa

SEQ ID NO: 3166722 - RNA, 19 nt, Artificial Sequence
  Description of Artificial Sequence: Synthetic oligonucleotide
cacacagccaucuucaaug

SEQ ID NO: 3166723 - RNA, 19 nt, Artificial Sequence
  Description of Artificial Sequence: Synthetic oligonucleotide
aguuuacagcuauuccucc

SEQ ID NO: 3166724 - RNA, 19 nt, Artificial Sequence
  Description of Artificial Sequence: Synthetic oligonucleotide
ugcuauugcgacuucaacu

SEQ ID NO: 3166725 - RNA, 19 nt, Artificial Sequence
  Description of Artificial Sequence: Synthetic oligonucleotide
aaggguaagccuuucgaga

SEQ ID NO: 3166726 - RNA, 19 nt, Artificial Sequence
  Description of Artificial Sequence: Synthetic oligonucleotide
agagaggauucacacaguc

SEQ ID NO: 3166727 - RNA, 19 nt, Artificial Sequence
  Description of Artificial Sequence: Synthetic oligonucleotide
gaguaugcuuguuuggucc

SEQ ID NO: 3166728 - RNA, 19 nt, Artificial Sequence
  Description of Artificial Sequence: Synthetic oligonucleotide
aagcaaucuucauuaaggu

SEQ ID NO: 3166729 - RNA, 19 nt, Artificial Sequence
  Description of Artificial Sequence: Synthetic oligonucleotide
ucuuaaagcguccuugauc

SEQ ID NO: 3166730 - RNA, 19 nt, Artificial Sequence
  Description of Artificial Sequence: Synthetic oligonucleotide
aaggcgagcucuucccugc

SEQ ID NO: 3166731 - RNA, 19 nt, Artificial Sequence
  Description of Artificial Sequence: Synthetic oligonucleotide
aagagccucugcuauugcg

SEQ ID NO: 3166732 - RNA, 19 nt, Artificial Sequence
  Description of Artificial Sequence: Synthetic oligonucleotide
auacaaggccagcaugucc

SEQ ID NO: 3166733 - RNA, 19 nt, Artificial Sequence
  Description of Artificial Sequence: Synthetic oligonucleotide
aaauacaaggccagcaugu

SEQ ID NO: 3166734 - RNA, 19 nt, Artificial Sequence
  Description of Artificial Sequence: Synthetic oligonucleotide
agcaaucuucauuaagguc

SEQ ID NO: 3166735 - RNA, 19 nt, Artificial Sequence
  Description of Artificial Sequence: Synthetic oligonucleotide
ugcuuauaguuaacaagag

SEQ ID NO: 3166736 - RNA, 19 nt, Artificial Sequence
  Description of Artificial Sequence: Synthetic oligonucleotide
uguauuagaguaugcuugu

SEQ ID NO: 3166737 - RNA, 19 nt, Artificial Sequence
  Description of Artificial Sequence: Synthetic oligonucleotide
uuaaggucuucaaaugagu

SEQ ID NO: 3166738 - RNA, 19 nt, Artificial Sequence
  Description of Artificial Sequence: Synthetic oligonucleotide
uccucaauaaaagugaauu

SEQ ID NO: 3166739 - RNA, 19 nt, Artificial Sequence
  Description of Artificial Sequence: Synthetic oligonucleotide
ggugcuuauaguuaacaag

SEQ ID NO: 3166740 - RNA, 19 nt, Artificial Sequence
  Description of Artificial Sequence: Synthetic oligonucleotide
accuaaugaauauucaaau

SEQ ID NO: 3166741 - RNA, 19 nt, Artificial Sequence
  Description of Artificial Sequence: Synthetic oligonucleotide
uuuacagcuauuccuccac

SEQ ID NO: 3166742 - RNA, 19 nt, Artificial Sequence
  Description of Artificial Sequence: Synthetic oligonucleotide
agccuuucgagauuucuuc

SEQ ID NO: 3166743 - RNA, 19 nt, Artificial Sequence
  Description of Artificial Sequence: Synthetic oligonucleotide
gagauuucuucucuuugcc

SEQ ID NO: 3166744 - RNA, 19 nt, Artificial Sequence
  Description of Artificial Sequence: Synthetic oligonucleotide
aucagcaaaggcuuggagu

SEQ ID NO: 3166745 - RNA, 19 nt, Artificial Sequence
  Description of Artificial Sequence: Synthetic oligonucleotide
ucaaauacaaggccagcau

SEQ ID NO: 3166746 - RNA, 19 nt, Artificial Sequence
  Description of Artificial Sequence: Synthetic oligonucleotide
auuaaggucuucaaaugag

SEQ ID NO: 3166747 - RNA, 19 nt, Artificial Sequence
  Description of Artificial Sequence: Synthetic oligonucleotide
cuuugaucaacaaggugac

SEQ ID NO: 3166748 - RNA, 19 nt, Artificial Sequence
  Description of Artificial Sequence: Synthetic oligonucleotide
ugguccuuugaucaacaag

SEQ ID NO: 3166749 - RNA, 19 nt, Artificial Sequence
  Description of Artificial Sequence: Synthetic oligonucleotide
ugaucuguauuagaguaug

SEQ ID NO: 3166750 - RNA, 19 nt, Artificial Sequence
  Description of Artificial Sequence: Synthetic oligonucleotide
uuuuccucaccuaaugaau

SEQ ID NO: 3166751 - RNA, 19 nt, Artificial Sequence
  Description of Artificial Sequence: Synthetic oligonucleotide
ucagcaaaggcuuggaguu

SEQ ID NO: 3166752 - RNA, 19 nt, Artificial Sequence
  Description of Artificial Sequence: Synthetic oligonucleotide
uccuccacaagcaagggua

SEQ ID NO: 3166753 - RNA, 19 nt, Artificial Sequence
  Description of Artificial Sequence: Synthetic oligonucleotide
uuugaccgcacgaagucca

SEQ ID NO: 3166754 - RNA, 19 nt, Artificial Sequence
  Description of Artificial Sequence: Synthetic oligonucleotide
uucaaauacaaggccagca

SEQ ID NO: 3166755 - RNA, 19 nt, Artificial Sequence
  Description of Artificial Sequence: Synthetic oligonucleotide
ucuguauuagaguaugcuu

SEQ ID NO: 3166756 - RNA, 19 nt, Artificial Sequence
  Description of Artificial Sequence: Synthetic oligonucleotide
aauacaaggccagcauguc

SEQ ID NO: 3166757 - RNA, 19 nt, Artificial Sequence
  Description of Artificial Sequence: Synthetic oligonucleotide
cuuaaagcguccuugaucu

SEQ ID NO: 3166758 - RNA, 19 nt, Artificial Sequence
  Description of Artificial Sequence: Synthetic oligonucleotide
ucucuuugcccuucgaaga

SEQ ID NO: 3166759 - RNA, 19 nt, Artificial Sequence
  Description of Artificial Sequence: Synthetic oligonucleotide
auauucaaauacaaggcca

SEQ ID NO: 3166760 - RNA, 19 nt, Artificial Sequence
  Description of Artificial Sequence: Synthetic oligonucleotide
uauuagaguaugcuuguuu

SEQ ID NO: 3166761 - RNA, 19 nt, Artificial Sequence
  Description of Artificial Sequence: Synthetic oligonucleotide
agaguaugcuuguuugguc

SEQ ID NO: 3166762 - RNA, 19 nt, Artificial Sequence
  Description of Artificial Sequence: Synthetic oligonucleotide
ucaccuaaugaauauucaa

SEQ ID NO: 3166763 - RNA, 19 nt, Artificial Sequence
  Description of Artificial Sequence: Synthetic oligonucleotide
ucgagauuucuucucuuug

SEQ ID NO: 3166764 - RNA, 19 nt, Artificial Sequence
  Description of Artificial Sequence: Synthetic oligonucleotide
gacuucaacugcuccagcc

SEQ ID NO: 3166765 - RNA, 19 nt, Artificial Sequence
  Description of Artificial Sequence: Synthetic oligonucleotide
uauaguuaacaagagccuc

SEQ ID NO: 3166766 - RNA, 19 nt, Artificial Sequence
  Description of Artificial Sequence: Synthetic oligonucleotide
augaauauucaaauacaag

SEQ ID NO: 3166767 - RNA, 19 nt, Artificial Sequence
  Description of Artificial Sequence: Synthetic oligonucleotide
uuaacaagagccucugcua

SEQ ID NO: 3166768 - RNA, 19 nt, Artificial Sequence
  Description of Artificial Sequence: Synthetic oligonucleotide
acaguccucaauaaaagug

SEQ ID NO: 3166769 - RNA, 19 nt, Artificial Sequence
  Description of Artificial Sequence: Synthetic oligonucleotide
ucccaagcaaucuucauua

SEQ ID NO: 3166770 - RNA, 19 nt, Artificial Sequence
  Description of Artificial Sequence: Synthetic oligonucleotide
gaucaacaaggugacagag

SEQ ID NO: 3166771 - RNA, 19 nt, Artificial Sequence
  Description of Artificial Sequence: Synthetic oligonucleotide
gcuauugcgacuucaacug

SEQ ID NO: 3166772 - RNA, 19 nt, Artificial Sequence
  Description of Artificial Sequence: Synthetic oligonucleotide
cuugaucuguauuagagua

SEQ ID NO: 3166773 - RNA, 19 nt, Artificial Sequence
  Description of Artificial Sequence: Synthetic oligonucleotide
uauugcgacuucaacugcu

SEQ ID NO: 3166774 - RNA, 19 nt, Artificial Sequence
  Description of Artificial Sequence: Synthetic oligonucleotide
aaggucuucaaaugaguuu

SEQ ID NO: 3166775 - RNA, 19 nt, Artificial Sequence
  Description of Artificial Sequence: Synthetic oligonucleotide
agcaaaggcuuggaguucc

SEQ ID NO: 3166776 - RNA, 19 nt, Artificial Sequence
  Description of Artificial Sequence: Synthetic oligonucleotide
aguuaacaagagccucugc

SEQ ID NO: 3166777 - RNA, 19 nt, Artificial Sequence
  Description of Artificial Sequence: Synthetic oligonucleotide
gugcuuauaguuaacaaga

SEQ ID NO: 3166778 - RNA, 19 nt, Artificial Sequence
  Description of Artificial Sequence: Synthetic oligonucleotide
cagcuauuccuccacaagc

SEQ ID NO: 3166779 - RNA, 19 nt, Artificial Sequence
  Description of Artificial Sequence: Synthetic oligonucleotide
cuuguuugguccuuugauc

SEQ ID NO: 3166780 - RNA, 19 nt, Artificial Sequence
  Description of Artificial Sequence: Synthetic oligonucleotide
gaaguccaucucuuaaagc

SEQ ID NO: 3166781 - RNA, 19 nt, Artificial Sequence
  Description of Artificial Sequence: Synthetic oligonucleotide
aggcuuggaguuccaaggc

SEQ ID NO: 3166782 - RNA, 19 nt, Artificial Sequence
  Description of Artificial Sequence: Synthetic oligonucleotide
auucacacaguccucaaua

SEQ ID NO: 3166783 - RNA, 19 nt, Artificial Sequence
  Description of Artificial Sequence: Synthetic oligonucleotide
uccuuugaucaacaaggug

SEQ ID NO: 3166784 - RNA, 19 nt, Artificial Sequence
  Description of Artificial Sequence: Synthetic oligonucleotide
aaaaguuuaacuuuuaugg

SEQ ID NO: 3166785 - RNA, 19 nt, Artificial Sequence
  Description of Artificial Sequence: Synthetic oligonucleotide
uaauaaauaauuuuaaaag

SEQ ID NO: 3166786 - RNA, 19 nt, Artificial Sequence
  Description of Artificial Sequence: Synthetic oligonucleotide
aaaaguuaacuucuguucc

SEQ ID NO: 3166787 - RNA, 19 nt, Artificial Sequence
  Description of Artificial Sequence: Synthetic oligonucleotide
aauaaauaauuuuaaaagu

SEQ ID NO: 3166788 - RNA, 19 nt, Artificial Sequence
  Description of Artificial Sequence: Synthetic oligonucleotide
uaaaauuacaguuauuuag

SEQ ID NO: 3166789 - RNA, 19 nt, Artificial Sequence
  Description of Artificial Sequence: Synthetic oligonucleotide
uacauuacuaauuuuauaa

SEQ ID NO: 3166790 - RNA, 19 nt, Artificial Sequence
  Description of Artificial Sequence: Synthetic oligonucleotide
cuaauuuuauaacagguag

SEQ ID NO: 3166791 - RNA, 19 nt, Artificial Sequence
  Description of Artificial Sequence: Synthetic oligonucleotide
auuacaguuauuuaguagu

SEQ ID NO: 3166792 - RNA, 19 nt, Artificial Sequence
  Description of Artificial Sequence: Synthetic oligonucleotide
aauuacaguuauuuaguag

SEQ ID NO: 3166793 - RNA, 19 nt, Artificial Sequence
  Description of Artificial Sequence: Synthetic oligonucleotide
uuuuauaacagguaguaaa

SEQ ID NO: 3166794 - RNA, 19 nt, Artificial Sequence
  Description of Artificial Sequence: Synthetic oligonucleotide
uuauuuaguagucuaacaa

SEQ ID NO: 3166795 - RNA, 19 nt, Artificial Sequence
  Description of Artificial Sequence: Synthetic oligonucleotide
uuaacuucuguuccuaugc

SEQ ID NO: 3166796 - RNA, 19 nt, Artificial Sequence
  Description of Artificial Sequence: Synthetic oligonucleotide
uuacuaauuuuauaacagg

SEQ ID NO: 3166797 - RNA, 19 nt, Artificial Sequence
  Description of Artificial Sequence: Synthetic oligonucleotide
ucuaacaaaaguuuaacuu

SEQ ID NO: 3166798 - RNA, 19 nt, Artificial Sequence
  Description of Artificial Sequence: Synthetic oligonucleotide
uuaacuuuuaugguugggg

SEQ ID NO: 3166799 - RNA, 19 nt, Artificial Sequence
  Description of Artificial Sequence: Synthetic oligonucleotide
uaaauaauuuuaaaaguua

SEQ ID NO: 3166800 - RNA, 19 nt, Artificial Sequence
  Description of Artificial Sequence: Synthetic oligonucleotide
uuaguagucuaacaaaagu

SEQ ID NO: 3166801 - RNA, 19 nt, Artificial Sequence
  Description of Artificial Sequence: Synthetic oligonucleotide
acauuacuaauuuuauaac

SEQ ID NO: 3166802 - RNA, 19 nt, Artificial Sequence
  Description of Artificial Sequence: Synthetic oligonucleotide
aaaguuuaacuuuuauggu

SEQ ID NO: 3166803 - RNA, 19 nt, Artificial Sequence
  Description of Artificial Sequence: Synthetic oligonucleotide
cuaauaaauaauuuuaaaa

SEQ ID NO: 3166804 - RNA, 19 nt, Artificial Sequence
  Description of Artificial Sequence: Synthetic oligonucleotide
uacuaauuuuauaacaggu

SEQ ID NO: 3166805 - RNA, 19 nt, Artificial Sequence
  Description of Artificial Sequence: Synthetic oligonucleotide
uuuaguagucuaacaaaag

SEQ ID NO: 3166806 - RNA, 19 nt, Artificial Sequence
  Description of Artificial Sequence: Synthetic oligonucleotide
ucagauaucuacauuacua

SEQ ID NO: 3166807 - RNA, 19 nt, Artificial Sequence
  Description of Artificial Sequence: Synthetic oligonucleotide
uuuauaacagguaguaaaa

SEQ ID NO: 3166808 - RNA, 19 nt, Artificial Sequence
  Description of Artificial Sequence: Synthetic oligonucleotide
aaaauuacaguuauuuagu

SEQ ID NO: 3166809 - RNA, 19 nt, Artificial Sequence
  Description of Artificial Sequence: Synthetic oligonucleotide
auuacuaauuuuauaacag

SEQ ID NO: 3166810 - RNA, 19 nt, Artificial Sequence
  Description of Artificial Sequence: Synthetic oligonucleotide
uaugcuaauaaauaauuuu

SEQ ID NO: 3166811 - RNA, 19 nt, Artificial Sequence
  Description of Artificial Sequence: Synthetic oligonucleotide
auaauuuuaaaaguuaaaa

SEQ ID NO: 3166812 - RNA, 19 nt, Artificial Sequence
  Description of Artificial Sequence: Synthetic oligonucleotide
caaaaguuuaacuuuuaug

SEQ ID NO: 3166813 - RNA, 19 nt, Artificial Sequence
  Description of Artificial Sequence: Synthetic oligonucleotide
aauuuuauaacagguagua

SEQ ID NO: 3166814 - RNA, 19 nt, Artificial Sequence
  Description of Artificial Sequence: Synthetic oligonucleotide
aguaaaauuacaguuauuu

SEQ ID NO: 3166815 - RNA, 19 nt, Artificial Sequence
  Description of Artificial Sequence: Synthetic oligonucleotide
aacuucuguuccuaugcac

SEQ ID NO: 3166816 - RNA, 19 nt, Artificial Sequence
  Description of Artificial Sequence: Synthetic oligonucleotide
auaucagauaucuacauua

SEQ ID NO: 3166817 - RNA, 19 nt, Artificial Sequence
  Description of Artificial Sequence: Synthetic oligonucleotide
aaguuuaacuuuuaugguu

SEQ ID NO: 3166818 - RNA, 19 nt, Artificial Sequence
  Description of Artificial Sequence: Synthetic oligonucleotide
uauuuaguagucuaacaaa

SEQ ID NO: 3166819 - RNA, 19 nt, Artificial Sequence
  Description of Artificial Sequence: Synthetic oligonucleotide
acaauaugcuaauaaauaa

SEQ ID NO: 3166820 - RNA, 19 nt, Artificial Sequence
  Description of Artificial Sequence: Synthetic oligonucleotide
uaauuuuauaacagguagu

SEQ ID NO: 3166821 - RNA, 19 nt, Artificial Sequence
  Description of Artificial Sequence: Synthetic oligonucleotide
aguuauuuaguagucuaac

SEQ ID NO: 3166822 - RNA, 19 nt, Artificial Sequence
  Description of Artificial Sequence: Synthetic oligonucleotide
aaauaauuuuaaaaguuaa

SEQ ID NO: 3166823 - RNA, 19 nt, Artificial Sequence
  Description of Artificial Sequence: Synthetic oligonucleotide
aaaguuaacuucuguuccu

SEQ ID NO: 3166824 - RNA, 19 nt, Artificial Sequence
  Description of Artificial Sequence: Synthetic oligonucleotide
ugcuaauaaauaauuuuaa

SEQ ID NO: 3166825 - RNA, 19 nt, Artificial Sequence
  Description of Artificial Sequence: Synthetic oligonucleotide
aauaugcuaauaaauaauu

SEQ ID NO: 3166826 - RNA, 19 nt, Artificial Sequence
  Description of Artificial Sequence: Synthetic oligonucleotide
ucuacauuacuaauuuuau

SEQ ID NO: 3166827 - RNA, 19 nt, Artificial Sequence
  Description of Artificial Sequence: Synthetic oligonucleotide
auaucuacauuacuaauuu

SEQ ID NO: 3166828 - RNA, 19 nt, Artificial Sequence
  Description of Artificial Sequence: Synthetic oligonucleotide
uaacagguaguaaaauuac

SEQ ID NO: 3166829 - RNA, 19 nt, Artificial Sequence
  Description of Artificial Sequence: Synthetic oligonucleotide
cauuacuaauuuuauaaca

SEQ ID NO: 3166830 - RNA, 19 nt, Artificial Sequence
  Description of Artificial Sequence: Synthetic oligonucleotide
agucuaacaaaaguuuaac

SEQ ID NO: 3166831 - RNA, 19 nt, Artificial Sequence
  Description of Artificial Sequence: Synthetic oligonucleotide
uauaacagguaguaaaauu

SEQ ID NO: 3166832 - RNA, 19 nt, Artificial Sequence
  Description of Artificial Sequence: Synthetic oligonucleotide
auaaauaauuuuaaaaguu

SEQ ID NO: 3166833 - RNA, 19 nt, Artificial Sequence
  Description of Artificial Sequence: Synthetic oligonucleotide
aauaauuuuaaaaguuaaa

SEQ ID NO: 3166834 - RNA, 19 nt, Artificial Sequence
  Description of Artificial Sequence: Synthetic oligonucleotide
acagguaguaaaauuacag

SEQ ID NO: 3166835 - RNA, 19 nt, Artificial Sequence
  Description of Artificial Sequence: Synthetic oligonucleotide
agguaguaaaauuacaguu

SEQ ID NO: 3166836 - RNA, 19 nt, Artificial Sequence
  Description of Artificial Sequence: Synthetic oligonucleotide
uaguagucuaacaaaaguu

SEQ ID NO: 3166837 - RNA, 19 nt, Artificial Sequence
  Description of Artificial Sequence: Synthetic oligonucleotide
aaauuacaguuauuuagua

SEQ ID NO: 3166838 - RNA, 19 nt, Artificial Sequence
  Description of Artificial Sequence: Synthetic oligonucleotide
uaacaaaaguuuaacuuuu

SEQ ID NO: 3166839 - RNA, 19 nt, Artificial Sequence
  Description of Artificial Sequence: Synthetic oligonucleotide
uaucagauaucuacauuac

SEQ ID NO: 3166840 - RNA, 19 nt, Artificial Sequence
  Description of Artificial Sequence: Synthetic oligonucleotide
aguuuaacuuuuaugguug

SEQ ID NO: 3166841 - RNA, 19 nt, Artificial Sequence
  Description of Artificial Sequence: Synthetic oligonucleotide
uagucuaacaaaaguuuaa

SEQ ID NO: 3166842 - RNA, 19 nt, Artificial Sequence
  Description of Artificial Sequence: Synthetic oligonucleotide
uuuaacuuuuaugguuggg

SEQ ID NO: 3166843 - RNA, 19 nt, Artificial Sequence
  Description of Artificial Sequence: Synthetic oligonucleotide
guuauuuaguagucuaaca

SEQ ID NO: 3166844 - RNA, 19 nt, Artificial Sequence
  Description of Artificial Sequence: Synthetic oligonucleotide
uuacaguuauuuaguaguc

SEQ ID NO: 3166845 - RNA, 19 nt, Artificial Sequence
  Description of Artificial Sequence: Synthetic oligonucleotide
auaacagguaguaaaauua

SEQ ID NO: 3166846 - RNA, 19 nt, Artificial Sequence
  Description of Artificial Sequence: Synthetic oligonucleotide
accacaauaugcuaauaaa

SEQ ID NO: 3166847 - RNA, 19 nt, Artificial Sequence
  Description of Artificial Sequence: Synthetic oligonucleotide
guuuaacuuuuaugguugg

SEQ ID NO: 3166848 - RNA, 19 nt, Artificial Sequence
  Description of Artificial Sequence: Synthetic oligonucleotide
acaguuauuuaguagucua

SEQ ID NO: 3166849 - RNA, 19 nt, Artificial Sequence
  Description of Artificial Sequence: Synthetic oligonucleotide
guuaacuucuguuccuaug

SEQ ID NO: 3166850 - RNA, 19 nt, Artificial Sequence
  Description of Artificial Sequence: Synthetic oligonucleotide
cacaauaugcuaauaaaua

SEQ ID NO: 3166851 - RNA, 19 nt, Artificial Sequence
  Description of Artificial Sequence: Synthetic oligonucleotide
auuuaguagucuaacaaaa

SEQ ID NO: 3166852 - RNA, 19 nt, Artificial Sequence
  Description of Artificial Sequence: Synthetic oligonucleotide
acaaaaguuuaacuuuuau

SEQ ID NO: 3166853 - RNA, 19 nt, Artificial Sequence
  Description of Artificial Sequence: Synthetic oligonucleotide
agauaucuacauuacuaau

SEQ ID NO: 3166854 - RNA, 19 nt, Artificial Sequence
  Description of Artificial Sequence: Synthetic oligonucleotide
aucuacauuacuaauuuua

SEQ ID NO: 3166855 - RNA, 19 nt, Artificial Sequence
  Description of Artificial Sequence: Synthetic oligonucleotide
aucagauaucuacauuacu

SEQ ID NO: 3166856 - RNA, 19 nt, Artificial Sequence
  Description of Artificial Sequence: Synthetic oligonucleotide
aguagucuaacaaaaguuu

SEQ ID NO: 3166857 - RNA, 19 nt, Artificial Sequence
  Description of Artificial Sequence: Synthetic oligonucleotide
uaacuucuguuccuaugca

SEQ ID NO: 3166858 - RNA, 19 nt, Artificial Sequence
  Description of Artificial Sequence: Synthetic oligonucleotide
guaaaauuacaguuauuua

SEQ ID NO: 3166859 - RNA, 19 nt, Artificial Sequence
  Description of Artificial Sequence: Synthetic oligonucleotide
aacagguaguaaaauuaca

SEQ ID NO: 3166860 - RNA, 19 nt, Artificial Sequence
  Description of Artificial Sequence: Synthetic oligonucleotide
augcuaauaaauaauuuua

SEQ ID NO: 3166861 - RNA, 19 nt, Artificial Sequence
  Description of Artificial Sequence: Synthetic oligonucleotide
cuaacaaaaguuuaacuuu

SEQ ID NO: 3166862 - RNA, 19 nt, Artificial Sequence
  Description of Artificial Sequence: Synthetic oligonucleotide
uuauaacagguaguaaaau

SEQ ID NO: 3166863 - RNA, 19 nt, Artificial Sequence
  Description of Artificial Sequence: Synthetic oligonucleotide
acuaauuuuauaacaggua

SEQ ID NO: 3166864 - RNA, 19 nt, Artificial Sequence
  Description of Artificial Sequence: Synthetic oligonucleotide
uacaguuauuuaguagucu

SEQ ID NO: 3166865 - RNA, 19 nt, Artificial Sequence
  Description of Artificial Sequence: Synthetic oligonucleotide
cagauaucuacauuacuaa

SEQ ID NO: 3166866 - RNA, 19 nt, Artificial Sequence
  Description of Artificial Sequence: Synthetic oligonucleotide
guaguaaaauuacaguuau

SEQ ID NO: 3166867 - RNA, 19 nt, Artificial Sequence
  Description of Artificial Sequence: Synthetic oligonucleotide
gcuaauaaauaauuuuaaa

SEQ ID NO: 3166868 - RNA, 19 nt, Artificial Sequence
  Description of Artificial Sequence: Synthetic oligonucleotide
acuucuguuccuaugcaca

SEQ ID NO: 3166869 - RNA, 19 nt, Artificial Sequence
  Description of Artificial Sequence: Synthetic oligonucleotide
gauaucuacauuacuaauu

SEQ ID NO: 3166870 - RNA, 19 nt, Artificial Sequence
  Description of Artificial Sequence: Synthetic oligonucleotide
auaugcuaauaaauaauuu

SEQ ID NO: 3166871 - RNA, 19 nt, Artificial Sequence
  Description of Artificial Sequence: Synthetic oligonucleotide
caauaugcuaauaaauaau

SEQ ID NO: 3166872 - RNA, 19 nt, Artificial Sequence
  Description of Artificial Sequence: Synthetic oligonucleotide
auuuuauaacagguaguaa

SEQ ID NO: 3166873 - RNA, 19 nt, Artificial Sequence
  Description of Artificial Sequence: Synthetic oligonucleotide
gucuaacaaaaguuuaacu

SEQ ID NO: 3166874 - RNA, 19 nt, Artificial Sequence
  Description of Artificial Sequence: Synthetic oligonucleotide
uaucuacauuacuaauuuu

SEQ ID NO: 3166875 - RNA, 19 nt, Artificial Sequence
  Description of Artificial Sequence: Synthetic oligonucleotide
gguaguaaaauuacaguua

SEQ ID NO: 3166876 - RNA, 19 nt, Artificial Sequence
  Description of Artificial Sequence: Synthetic oligonucleotide
aaguuaacuucuguuccua

SEQ ID NO: 3166877 - RNA, 19 nt, Artificial Sequence
  Description of Artificial Sequence: Synthetic oligonucleotide
uaguaaaauuacaguuauu

SEQ ID NO: 3166878 - RNA, 19 nt, Artificial Sequence
  Description of Artificial Sequence: Synthetic oligonucleotide
aacaaaaguuuaacuuuua

SEQ ID NO: 3166879 - RNA, 19 nt, Artificial Sequence
  Description of Artificial Sequence: Synthetic oligonucleotide
aguuaacuucuguuccuau

SEQ ID NO: 3166880 - RNA, 19 nt, Artificial Sequence
  Description of Artificial Sequence: Synthetic oligonucleotide
cuacauuacuaauuuuaua

SEQ ID NO: 3166881 - RNA, 19 nt, Artificial Sequence
  Description of Artificial Sequence: Synthetic oligonucleotide
caccacaauaugcuaauaa

SEQ ID NO: 3166882 - RNA, 19 nt, Artificial Sequence
  Description of Artificial Sequence: Synthetic oligonucleotide
guagucuaacaaaaguuua

SEQ ID NO: 3166883 - RNA, 19 nt, Artificial Sequence
  Description of Artificial Sequence: Synthetic oligonucleotide
cagguaguaaaauuacagu

SEQ ID NO: 3166884 - RNA, 19 nt, Artificial Sequence
  Description of Artificial Sequence: Synthetic oligonucleotide
aaacucguauuucugaaac

SEQ ID NO: 3166885 - RNA, 19 nt, Artificial Sequence
  Description of Artificial Sequence: Synthetic oligonucleotide
uuugguagacuccuuaugg

SEQ ID NO: 3166886 - RNA, 19 nt, Artificial Sequence
  Description of Artificial Sequence: Synthetic oligonucleotide
uggucuaccaccauggagg

SEQ ID NO: 3166887 - RNA, 19 nt, Artificial Sequence
  Description of Artificial Sequence: Synthetic oligonucleotide
ucuucuauggagaagcugc

SEQ ID NO: 3166888 - RNA, 19 nt, Artificial Sequence
  Description of Artificial Sequence: Synthetic oligonucleotide
uuugugugcaaguucaagg

SEQ ID NO: 3166889 - RNA, 19 nt, Artificial Sequence
  Description of Artificial Sequence: Synthetic oligonucleotide
cuuaggagaagugagaagg

SEQ ID NO: 3166890 - RNA, 19 nt, Artificial Sequence
  Description of Artificial Sequence: Synthetic oligonucleotide
ucgggaaucagacaacugg

SEQ ID NO: 3166891 - RNA, 19 nt, Artificial Sequence
  Description of Artificial Sequence: Synthetic oligonucleotide
agugacacacaauucuucc

SEQ ID NO: 3166892 - RNA, 19 nt, Artificial Sequence
  Description of Artificial Sequence: Synthetic oligonucleotide
acauaauucccauagucag

SEQ ID NO: 3166893 - RNA, 19 nt, Artificial Sequence
  Description of Artificial Sequence: Synthetic oligonucleotide
aaacuguggacagauggcc

SEQ ID NO: 3166894 - RNA, 19 nt, Artificial Sequence
  Description of Artificial Sequence: Synthetic oligonucleotide
ugagugaccugcaauagcc

SEQ ID NO: 3166895 - RNA, 19 nt, Artificial Sequence
  Description of Artificial Sequence: Synthetic oligonucleotide
aggaucaucacagugcagc

SEQ ID NO: 3166896 - RNA, 19 nt, Artificial Sequence
  Description of Artificial Sequence: Synthetic oligonucleotide
agcucucaaagucuggugc

SEQ ID NO: 3166897 - RNA, 19 nt, Artificial Sequence
  Description of Artificial Sequence: Synthetic oligonucleotide
uuggcagaagcucucaaag

SEQ ID NO: 3166898 - RNA, 19 nt, Artificial Sequence
  Description of Artificial Sequence: Synthetic oligonucleotide
aacuguuuguuugagacgu

SEQ ID NO: 3166899 - RNA, 19 nt, Artificial Sequence
  Description of Artificial Sequence: Synthetic oligonucleotide
acuagagugacacacaauu

SEQ ID NO: 3166900 - RNA, 19 nt, Artificial Sequence
  Description of Artificial Sequence: Synthetic oligonucleotide
aaugggucucauuguggcc

SEQ ID NO: 3166901 - RNA, 19 nt, Artificial Sequence
  Description of Artificial Sequence: Synthetic oligonucleotide
aguacucuuccagugaggc

SEQ ID NO: 3166902 - RNA, 19 nt, Artificial Sequence
  Description of Artificial Sequence: Synthetic oligonucleotide
uacugagugggcaugagac

SEQ ID NO: 3166903 - RNA, 19 nt, Artificial Sequence
  Description of Artificial Sequence: Synthetic oligonucleotide
cauuguggccaccagaggg

SEQ ID NO: 3166904 - RNA, 19 nt, Artificial Sequence
  Description of Artificial Sequence: Synthetic oligonucleotide
aacaccuuguuuaacagca

SEQ ID NO: 3166905 - RNA, 19 nt, Artificial Sequence
  Description of Artificial Sequence: Synthetic oligonucleotide
gugacuaguacugaguggg

SEQ ID NO: 3166906 - RNA, 19 nt, Artificial Sequence
  Description of Artificial Sequence: Synthetic oligonucleotide
ucuaugccgauuauggacu

SEQ ID NO: 3166907 - RNA, 19 nt, Artificial Sequence
  Description of Artificial Sequence: Synthetic oligonucleotide
cagucuauggugaagauca

SEQ ID NO: 3166908 - RNA, 19 nt, Artificial Sequence
  Description of Artificial Sequence: Synthetic oligonucleotide
acagugacagagcagcccg

SEQ ID NO: 3166909 - RNA, 19 nt, Artificial Sequence
  Description of Artificial Sequence: Synthetic oligonucleotide
guuuguuugagacgucugg

SEQ ID NO: 3166910 - RNA, 19 nt, Artificial Sequence
  Description of Artificial Sequence: Synthetic oligonucleotide
aguggagccuugcagcugc

SEQ ID NO: 3166911 - RNA, 19 nt, Artificial Sequence
  Description of Artificial Sequence: Synthetic oligonucleotide
gacacuaugcuguagugca

SEQ ID NO: 3166912 - RNA, 19 nt, Artificial Sequence
  Description of Artificial Sequence: Synthetic oligonucleotide
aaaaugccugagcaucuuc

SEQ ID NO: 3166913 - RNA, 19 nt, Artificial Sequence
  Description of Artificial Sequence: Synthetic oligonucleotide
aacacugggacguccucgg

SEQ ID NO: 3166914 - RNA, 19 nt, Artificial Sequence
  Description of Artificial Sequence: Synthetic oligonucleotide
uguguggggaauccagugg

SEQ ID NO: 3166915 - RNA, 19 nt, Artificial Sequence
  Description of Artificial Sequence: Synthetic oligonucleotide
ugagaagggcaccauacca

SEQ ID NO: 3166916 - RNA, 19 nt, Artificial Sequence
  Description of Artificial Sequence: Synthetic oligonucleotide
cucaugauugaaaugugug

SEQ ID NO: 3166917 - RNA, 19 nt, Artificial Sequence
  Description of Artificial Sequence: Synthetic oligonucleotide
aauggcguggacuucugga

SEQ ID NO: 3166918 - RNA, 19 nt, Artificial Sequence
  Description of Artificial Sequence: Synthetic oligonucleotide
gagacagugacagagcagc

SEQ ID NO: 3166919 - RNA, 19 nt, Artificial Sequence
  Description of Artificial Sequence: Synthetic oligonucleotide
ugacacacaauucuucccu

SEQ ID NO: 3166920 - RNA, 19 nt, Artificial Sequence
  Description of Artificial Sequence: Synthetic oligonucleotide
ucuauggagaagcugcagu

SEQ ID NO: 3166921 - RNA, 19 nt, Artificial Sequence
  Description of Artificial Sequence: Synthetic oligonucleotide
gaaugggucucauuguggc

SEQ ID NO: 3166922 - RNA, 19 nt, Artificial Sequence
  Description of Artificial Sequence: Synthetic oligonucleotide
aaagucuggugcuagggau

SEQ ID NO: 3166923 - RNA, 19 nt, Artificial Sequence
  Description of Artificial Sequence: Synthetic oligonucleotide
ucuggaaccaucucgggaa

SEQ ID NO: 3166924 - RNA, 19 nt, Artificial Sequence
  Description of Artificial Sequence: Synthetic oligonucleotide
cauaauucccauagucagg

SEQ ID NO: 3166925 - RNA, 19 nt, Artificial Sequence
  Description of Artificial Sequence: Synthetic oligonucleotide
ucugaguacucuuccagug

SEQ ID NO: 3166926 - RNA, 19 nt, Artificial Sequence
  Description of Artificial Sequence: Synthetic oligonucleotide
uacucuuccagugaggcca

SEQ ID NO: 3166927 - RNA, 19 nt, Artificial Sequence
  Description of Artificial Sequence: Synthetic oligonucleotide
gaacuguuuguuugagacg

SEQ ID NO: 3166928 - RNA, 19 nt, Artificial Sequence
  Description of Artificial Sequence: Synthetic oligonucleotide
ggaacuguuuguuugagac

SEQ ID NO: 3166929 - RNA, 19 nt, Artificial Sequence
  Description of Artificial Sequence: Synthetic oligonucleotide
agaacaccuuguuuaacag

SEQ ID NO: 3166930 - RNA, 19 nt, Artificial Sequence
  Description of Artificial Sequence: Synthetic oligonucleotide
ugugcgcugccuuugguag

SEQ ID NO: 3166931 - RNA, 19 nt, Artificial Sequence
  Description of Artificial Sequence: Synthetic oligonucleotide
ugaaggccagaacacuggg

SEQ ID NO: 3166932 - RNA, 19 nt, Artificial Sequence
  Description of Artificial Sequence: Synthetic oligonucleotide
uauuucugaaacuguggac

SEQ ID NO: 3166933 - RNA, 19 nt, Artificial Sequence
  Description of Artificial Sequence: Synthetic oligonucleotide
uuuaccuagcaggugcccg

SEQ ID NO: 3166934 - RNA, 19 nt, Artificial Sequence
  Description of Artificial Sequence: Synthetic oligonucleotide
gucuaugccgauuauggac

SEQ ID NO: 3166935 - RNA, 19 nt, Artificial Sequence
  Description of Artificial Sequence: Synthetic oligonucleotide
aauggcggcacauggcacu

SEQ ID NO: 3166936 - RNA, 19 nt, Artificial Sequence
  Description of Artificial Sequence: Synthetic oligonucleotide
accauggaggucuccuucc

SEQ ID NO: 3166937 - RNA, 19 nt, Artificial Sequence
  Description of Artificial Sequence: Synthetic oligonucleotide
guauuucugaaacugugga

SEQ ID NO: 3166938 - RNA, 19 nt, Artificial Sequence
  Description of Artificial Sequence: Synthetic oligonucleotide
aaaguucugggucuccaau

SEQ ID NO: 3166939 - RNA, 19 nt, Artificial Sequence
  Description of Artificial Sequence: Synthetic oligonucleotide
ucuggguaggaccaccaca

SEQ ID NO: 3166940 - RNA, 19 nt, Artificial Sequence
  Description of Artificial Sequence: Synthetic oligonucleotide
acacuagcugguuggaguc

SEQ ID NO: 3166941 - RNA, 19 nt, Artificial Sequence
  Description of Artificial Sequence: Synthetic oligonucleotide
uguuuguuugagacgucug

SEQ ID NO: 3166942 - RNA, 19 nt, Artificial Sequence
  Description of Artificial Sequence: Synthetic oligonucleotide
gccuugguaaguuagcagg

SEQ ID NO: 3166943 - RNA, 19 nt, Artificial Sequence
  Description of Artificial Sequence: Synthetic oligonucleotide
cacauaauucccauaguca

SEQ ID NO: 3166944 - RNA, 19 nt, Artificial Sequence
  Description of Artificial Sequence: Synthetic oligonucleotide
ucagguuuggaaagugccu

SEQ ID NO: 3166945 - RNA, 19 nt, Artificial Sequence
  Description of Artificial Sequence: Synthetic oligonucleotide
acucaugggagcaucagag

SEQ ID NO: 3166946 - RNA, 19 nt, Artificial Sequence
  Description of Artificial Sequence: Synthetic oligonucleotide
gaacaccuuguuuaacagc

SEQ ID NO: 3166947 - RNA, 19 nt, Artificial Sequence
  Description of Artificial Sequence: Synthetic oligonucleotide
gugggcaugagacagugac

SEQ ID NO: 3166948 - RNA, 19 nt, Artificial Sequence
  Description of Artificial Sequence: Synthetic oligonucleotide
aaauggcguggacuucugg

SEQ ID NO: 3166949 - RNA, 19 nt, Artificial Sequence
  Description of Artificial Sequence: Synthetic oligonucleotide
aacucaugggagcaucaga

SEQ ID NO: 3166950 - RNA, 19 nt, Artificial Sequence
  Description of Artificial Sequence: Synthetic oligonucleotide
uguguuucugaugugcgcu

SEQ ID NO: 3166951 - RNA, 19 nt, Artificial Sequence
  Description of Artificial Sequence: Synthetic oligonucleotide
gaaacuguggacagauggc

SEQ ID NO: 3166952 - RNA, 19 nt, Artificial Sequence
  Description of Artificial Sequence: Synthetic oligonucleotide
ugauucccaaaaguucugg

SEQ ID NO: 3166953 - RNA, 19 nt, Artificial Sequence
  Description of Artificial Sequence: Synthetic oligonucleotide
uagccuuuccagcuugucc

SEQ ID NO: 3166954 - RNA, 19 nt, Artificial Sequence
  Description of Artificial Sequence: Synthetic oligonucleotide
auuguggccaccagagggc

SEQ ID NO: 3166955 - RNA, 19 nt, Artificial Sequence
  Description of Artificial Sequence: Synthetic oligonucleotide
ugccuugauucccaaaagu

SEQ ID NO: 3166956 - RNA, 19 nt, Artificial Sequence
  Description of Artificial Sequence: Synthetic oligonucleotide
cacagugcagccuggagug

SEQ ID NO: 3166957 - RNA, 19 nt, Artificial Sequence
  Description of Artificial Sequence: Synthetic oligonucleotide
cuuguuuaacagcaucuuc

SEQ ID NO: 3166958 - RNA, 19 nt, Artificial Sequence
  Description of Artificial Sequence: Synthetic oligonucleotide
uggagaaagccaguggagc

SEQ ID NO: 3166959 - RNA, 19 nt, Artificial Sequence
  Description of Artificial Sequence: Synthetic oligonucleotide
acuggcuggagacacggug

SEQ ID NO: 3166960 - RNA, 19 nt, Artificial Sequence
  Description of Artificial Sequence: Synthetic oligonucleotide
uucuaaucuuuugaacagc

SEQ ID NO: 3166961 - RNA, 19 nt, Artificial Sequence
  Description of Artificial Sequence: Synthetic oligonucleotide
aaaaguucugggucuccaa

SEQ ID NO: 3166962 - RNA, 19 nt, Artificial Sequence
  Description of Artificial Sequence: Synthetic oligonucleotide
cuuaugucggggaccgugc

SEQ ID NO: 3166963 - RNA, 19 nt, Artificial Sequence
  Description of Artificial Sequence: Synthetic oligonucleotide
aaucagacaacuggcugga

SEQ ID NO: 3166964 - RNA, 19 nt, Artificial Sequence
  Description of Artificial Sequence: Synthetic oligonucleotide
gggucuaugccgauuaugg

SEQ ID NO: 3166965 - RNA, 19 nt, Artificial Sequence
  Description of Artificial Sequence: Synthetic oligonucleotide
gagugcuggagaaagccag

SEQ ID NO: 3166966 - RNA, 19 nt, Artificial Sequence
  Description of Artificial Sequence: Synthetic oligonucleotide
ugagcaucuucuacugacu

SEQ ID NO: 3166967 - RNA, 19 nt, Artificial Sequence
  Description of Artificial Sequence: Synthetic oligonucleotide
ccuucucuggcucacagcg

SEQ ID NO: 3166968 - RNA, 19 nt, Artificial Sequence
  Description of Artificial Sequence: Synthetic oligonucleotide
ucaacucaugggagcauca

SEQ ID NO: 3166969 - RNA, 19 nt, Artificial Sequence
  Description of Artificial Sequence: Synthetic oligonucleotide
gucagguuuggaaagugcc

SEQ ID NO: 3166970 - RNA, 19 nt, Artificial Sequence
  Description of Artificial Sequence: Synthetic oligonucleotide
auggacucuaguuuucuaa

SEQ ID NO: 3166971 - RNA, 19 nt, Artificial Sequence
  Description of Artificial Sequence: Synthetic oligonucleotide
ugccuugguaaguuagcag

SEQ ID NO: 3166972 - RNA, 19 nt, Artificial Sequence
  Description of Artificial Sequence: Synthetic oligonucleotide
uuugagacgucuggacuag

SEQ ID NO: 3166973 - RNA, 19 nt, Artificial Sequence
  Description of Artificial Sequence: Synthetic oligonucleotide
aacaagcuuugugugcaag

SEQ ID NO: 3166974 - RNA, 19 nt, Artificial Sequence
  Description of Artificial Sequence: Synthetic oligonucleotide
ugaugugcgcugccuuugg

SEQ ID NO: 3166975 - RNA, 19 nt, Artificial Sequence
  Description of Artificial Sequence: Synthetic oligonucleotide
ggugaagaucaccaugucc

SEQ ID NO: 3166976 - RNA, 19 nt, Artificial Sequence
  Description of Artificial Sequence: Synthetic oligonucleotide
agggucuuuggaaauggcg

SEQ ID NO: 3166977 - RNA, 19 nt, Artificial Sequence
  Description of Artificial Sequence: Synthetic oligonucleotide
aagggucuuuggaaauggc

SEQ ID NO: 3166978 - RNA, 19 nt, Artificial Sequence
  Description of Artificial Sequence: Synthetic oligonucleotide
uucccuuuguuuccucagc

SEQ ID NO: 3166979 - RNA, 19 nt, Artificial Sequence
  Description of Artificial Sequence: Synthetic oligonucleotide
cuugguaaguuagcagggg

SEQ ID NO: 3166980 - RNA, 19 nt, Artificial Sequence
  Description of Artificial Sequence: Synthetic oligonucleotide
aagucuggugcuagggauc

SEQ ID NO: 3166981 - RNA, 19 nt, Artificial Sequence
  Description of Artificial Sequence: Synthetic oligonucleotide
ucagucaugcuggaugugu

SEQ ID NO: 3166982 - RNA, 19 nt, Artificial Sequence
  Description of Artificial Sequence: Synthetic oligonucleotide
agaccggucagcugugaag

SEQ ID NO: 3166983 - RNA, 19 nt, Artificial Sequence
  Description of Artificial Sequence: Synthetic oligonucleotide
auguguggggaauccagug

SEQ ID NO: 3166984 - RNA, 19 nt, Artificial Sequence
  Description of Artificial Sequence: Synthetic oligonucleotide
cuugauaugaucaaugugc

SEQ ID NO: 3166985 - RNA, 19 nt, Artificial Sequence
  Description of Artificial Sequence: Synthetic oligonucleotide
aacagaauauucuucaucu

SEQ ID NO: 3166986 - RNA, 19 nt, Artificial Sequence
  Description of Artificial Sequence: Synthetic oligonucleotide
aaagauuucuucauccucc

SEQ ID NO: 3166987 - RNA, 19 nt, Artificial Sequence
  Description of Artificial Sequence: Synthetic oligonucleotide
aucaaagauuucuucaucc

SEQ ID NO: 3166988 - RNA, 19 nt, Artificial Sequence
  Description of Artificial Sequence: Synthetic oligonucleotide
ucugaugagagaucuaucg

SEQ ID NO: 3166989 - RNA, 19 nt, Artificial Sequence
  Description of Artificial Sequence: Synthetic oligonucleotide
ucugucuuuaaccacagcc

SEQ ID NO: 3166990 - RNA, 19 nt, Artificial Sequence
  Description of Artificial Sequence: Synthetic oligonucleotide
aauauucuucaucugauga

SEQ ID NO: 3166991 - RNA, 19 nt, Artificial Sequence
  Description of Artificial Sequence: Synthetic oligonucleotide
uuaaccacagccaaggaug

SEQ ID NO: 3166992 - RNA, 19 nt, Artificial Sequence
  Description of Artificial Sequence: Synthetic oligonucleotide
gauaugaucaaugugcucc

SEQ ID NO: 3166993 - RNA, 19 nt, Artificial Sequence
  Description of Artificial Sequence: Synthetic oligonucleotide
ucuaauuccacucacuuuc

SEQ ID NO: 3166994 - RNA, 19 nt, Artificial Sequence
  Description of Artificial Sequence: Synthetic oligonucleotide
acuauucuaguucuaauuc

SEQ ID NO: 3166995 - RNA, 19 nt, Artificial Sequence
  Description of Artificial Sequence: Synthetic oligonucleotide
uuucuugucaaaauucugc

SEQ ID NO: 3166996 - RNA, 19 nt, Artificial Sequence
  Description of Artificial Sequence: Synthetic oligonucleotide
uuuucuuuggaaaaugccu

SEQ ID NO: 3166997 - RNA, 19 nt, Artificial Sequence
  Description of Artificial Sequence: Synthetic oligonucleotide
ugaugagagaucuaucggg

SEQ ID NO: 3166998 - RNA, 19 nt, Artificial Sequence
  Description of Artificial Sequence: Synthetic oligonucleotide
gauuucuucauccuccucc

SEQ ID NO: 3166999 - RNA, 19 nt, Artificial Sequence
  Description of Artificial Sequence: Synthetic oligonucleotide
ucuuuaaccacagccaagg

SEQ ID NO: 3167000 - RNA, 19 nt, Artificial Sequence
  Description of Artificial Sequence: Synthetic oligonucleotide
ucugcuuucuucaacagaa

SEQ ID NO: 3167001 - RNA, 19 nt, Artificial Sequence
  Description of Artificial Sequence: Synthetic oligonucleotide
uucaacagaauauucuuca

SEQ ID NO: 3167002 - RNA, 19 nt, Artificial Sequence
  Description of Artificial Sequence: Synthetic oligonucleotide
uauucuaguucuaauucca

SEQ ID NO: 3167003 - RNA, 19 nt, Artificial Sequence
  Description of Artificial Sequence: Synthetic oligonucleotide
ucaggcgugacuauucuag

SEQ ID NO: 3167004 - RNA, 19 nt, Artificial Sequence
  Description of Artificial Sequence: Synthetic oligonucleotide
aauuccacucacuuucuug

SEQ ID NO: 3167005 - RNA, 19 nt, Artificial Sequence
  Description of Artificial Sequence: Synthetic oligonucleotide
uucuucauccuccuccugg

SEQ ID NO: 3167006 - RNA, 19 nt, Artificial Sequence
  Description of Artificial Sequence: Synthetic oligonucleotide
uccuaaaccuggcagaucu

SEQ ID NO: 3167007 - RNA, 19 nt, Artificial Sequence
  Description of Artificial Sequence: Synthetic oligonucleotide
uuuggaaaaugccuucuug

SEQ ID NO: 3167008 - RNA, 19 nt, Artificial Sequence
  Description of Artificial Sequence: Synthetic oligonucleotide
uucuucaacagaauauucu

SEQ ID NO: 3167009 - RNA, 19 nt, Artificial Sequence
  Description of Artificial Sequence: Synthetic oligonucleotide
ucuaguucuaauuccacuc

SEQ ID NO: 3167010 - RNA, 19 nt, Artificial Sequence
  Description of Artificial Sequence: Synthetic oligonucleotide
uguuuucuuuggaaaaugc

SEQ ID NO: 3167011 - RNA, 19 nt, Artificial Sequence
  Description of Artificial Sequence: Synthetic oligonucleotide
ucuugauaugaucaaugug

SEQ ID NO: 3167012 - RNA, 19 nt, Artificial Sequence
  Description of Artificial Sequence: Synthetic oligonucleotide
cuauucuaguucuaauucc

SEQ ID NO: 3167013 - RNA, 19 nt, Artificial Sequence
  Description of Artificial Sequence: Synthetic oligonucleotide
ucuugucaaaauucugccg

SEQ ID NO: 3167014 - RNA, 19 nt, Artificial Sequence
  Description of Artificial Sequence: Synthetic oligonucleotide
auauucuucaucugaugag

SEQ ID NO: 3167015 - RNA, 19 nt, Artificial Sequence
  Description of Artificial Sequence: Synthetic oligonucleotide
uucuugucaaaauucugcc

SEQ ID NO: 3167016 - RNA, 19 nt, Artificial Sequence
  Description of Artificial Sequence: Synthetic oligonucleotide
uuggaaaaugccuucuuga

SEQ ID NO: 3167017 - RNA, 19 nt, Artificial Sequence
  Description of Artificial Sequence: Synthetic oligonucleotide
aagggcacuggauauucuc

SEQ ID NO: 3167018 - RNA, 19 nt, Artificial Sequence
  Description of Artificial Sequence: Synthetic oligonucleotide
gaugagagaucuaucgggg

SEQ ID NO: 3167019 - RNA, 19 nt, Artificial Sequence
  Description of Artificial Sequence: Synthetic oligonucleotide
gaaaaugccuucuugauau

SEQ ID NO: 3167020 - RNA, 19 nt, Artificial Sequence
  Description of Artificial Sequence: Synthetic oligonucleotide
uugauaugaucaaugugcu

SEQ ID NO: 3167021 - RNA, 19 nt, Artificial Sequence
  Description of Artificial Sequence: Synthetic oligonucleotide
acagccaaggaugaagggc

SEQ ID NO: 3167022 - RNA, 19 nt, Artificial Sequence
  Description of Artificial Sequence: Synthetic oligonucleotide
aaaauucugccgugucuuc

SEQ ID NO: 3167023 - RNA, 19 nt, Artificial Sequence
  Description of Artificial Sequence: Synthetic oligonucleotide
cuucuugauaugaucaaug

SEQ ID NO: 3167024 - RNA, 19 nt, Artificial Sequence
  Description of Artificial Sequence: Synthetic oligonucleotide
ugccuucuugauaugauca

SEQ ID NO: 3167025 - RNA, 19 nt, Artificial Sequence
  Description of Artificial Sequence: Synthetic oligonucleotide
uuuaaccacagccaaggau

SEQ ID NO: 3167026 - RNA, 19 nt, Artificial Sequence
  Description of Artificial Sequence: Synthetic oligonucleotide
uucugcauguuuucuuugg

SEQ ID NO: 3167027 - RNA, 19 nt, Artificial Sequence
  Description of Artificial Sequence: Synthetic oligonucleotide
caggcuucugucuuuaacc

SEQ ID NO: 3167028 - RNA, 19 nt, Artificial Sequence
  Description of Artificial Sequence: Synthetic oligonucleotide
ucaaaauucugccgugucu

SEQ ID NO: 3167029 - RNA, 19 nt, Artificial Sequence
  Description of Artificial Sequence: Synthetic oligonucleotide
ugaucaaugugcuccuugc

SEQ ID NO: 3167030 - RNA, 19 nt, Artificial Sequence
  Description of Artificial Sequence: Synthetic oligonucleotide
uucuugauaugaucaaugu

SEQ ID NO: 3167031 - RNA, 19 nt, Artificial Sequence
  Description of Artificial Sequence: Synthetic oligonucleotide
gacuuccuaaaccuggcag

SEQ ID NO: 3167032 - RNA, 19 nt, Artificial Sequence
  Description of Artificial Sequence: Synthetic oligonucleotide
uuucuuuggaaaaugccuu

SEQ ID NO: 3167033 - RNA, 19 nt, Artificial Sequence
  Description of Artificial Sequence: Synthetic oligonucleotide
uauucuucaucugaugaga

SEQ ID NO: 3167034 - RNA, 19 nt, Artificial Sequence
  Description of Artificial Sequence: Synthetic oligonucleotide
ucuucaucugaugagagau

SEQ ID NO: 3167035 - RNA, 19 nt, Artificial Sequence
  Description of Artificial Sequence: Synthetic oligonucleotide
ucaaugugcuccuugccug

SEQ ID NO: 3167036 - RNA, 19 nt, Artificial Sequence
  Description of Artificial Sequence: Synthetic oligonucleotide
ucuucaacagaauauucuu

SEQ ID NO: 3167037 - RNA, 19 nt, Artificial Sequence
  Description of Artificial Sequence: Synthetic oligonucleotide
gaauauucuucaucugaug

SEQ ID NO: 3167038 - RNA, 19 nt, Artificial Sequence
  Description of Artificial Sequence: Synthetic oligonucleotide
ugagccucucuccugacug

SEQ ID NO: 3167039 - RNA, 19 nt, Artificial Sequence
  Description of Artificial Sequence: Synthetic oligonucleotide
ugagccucuccccugacug

SEQ ID NO: 3167040 - RNA, 19 nt, Artificial Sequence
  Description of Artificial Sequence: Synthetic oligonucleotide
ucaaagauuucuucauccu

SEQ ID NO: 3167041 - RNA, 19 nt, Artificial Sequence
  Description of Artificial Sequence: Synthetic oligonucleotide
agaucugcuuucuucaaca

SEQ ID NO: 3167042 - RNA, 19 nt, Artificial Sequence
  Description of Artificial Sequence: Synthetic oligonucleotide
uugccugacuuccuaaacc

SEQ ID NO: 3167043 - RNA, 19 nt, Artificial Sequence
  Description of Artificial Sequence: Synthetic oligonucleotide
auuccacucacuuucuugu

SEQ ID NO: 3167044 - RNA, 19 nt, Artificial Sequence
  Description of Artificial Sequence: Synthetic oligonucleotide
aauucugccgugucuucug

SEQ ID NO: 3167045 - RNA, 19 nt, Artificial Sequence
  Description of Artificial Sequence: Synthetic oligonucleotide
acugccugagccucucucc

SEQ ID NO: 3167046 - RNA, 19 nt, Artificial Sequence
  Description of Artificial Sequence: Synthetic oligonucleotide
ugucuuuaaccacagccaa

SEQ ID NO: 3167047 - RNA, 19 nt, Artificial Sequence
  Description of Artificial Sequence: Synthetic oligonucleotide
uccccugacugucugagcc

SEQ ID NO: 3167048 - RNA, 19 nt, Artificial Sequence
  Description of Artificial Sequence: Synthetic oligonucleotide
uucaucugaugagagaucu

SEQ ID NO: 3167049 - RNA, 19 nt, Artificial Sequence
  Description of Artificial Sequence: Synthetic oligonucleotide
ugcauguuuucuuuggaaa

SEQ ID NO: 3167050 - RNA, 19 nt, Artificial Sequence
  Description of Artificial Sequence: Synthetic oligonucleotide
cugaugagagaucuaucgg

SEQ ID NO: 3167051 - RNA, 19 nt, Artificial Sequence
  Description of Artificial Sequence: Synthetic oligonucleotide
acugucugagccucucccc

SEQ ID NO: 3167052 - RNA, 19 nt, Artificial Sequence
  Description of Artificial Sequence: Synthetic oligonucleotide
uuucuucaacagaauauuc

SEQ ID NO: 3167053 - RNA, 19 nt, Artificial Sequence
  Description of Artificial Sequence: Synthetic oligonucleotide
aucaaugugcuccuugccu

SEQ ID NO: 3167054 - RNA, 19 nt, Artificial Sequence
  Description of Artificial Sequence: Synthetic oligonucleotide
aaggaugaagggcacugga

SEQ ID NO: 3167055 - RNA, 19 nt, Artificial Sequence
  Description of Artificial Sequence: Synthetic oligonucleotide
aagauuucuucauccuccu

SEQ ID NO: 3167056 - RNA, 19 nt, Artificial Sequence
  Description of Artificial Sequence: Synthetic oligonucleotide
cacuuucuugucaaaauuc

SEQ ID NO: 3167057 - RNA, 19 nt, Artificial Sequence
  Description of Artificial Sequence: Synthetic oligonucleotide
uucuaguucuaauuccacu

SEQ ID NO: 3167058 - RNA, 19 nt, Artificial Sequence
  Description of Artificial Sequence: Synthetic oligonucleotide
uccccugacugccugagcc

SEQ ID NO: 3167059 - RNA, 19 nt, Artificial Sequence
  Description of Artificial Sequence: Synthetic oligonucleotide
ucucucuccucucaggcgu

SEQ ID NO: 3167060 - RNA, 19 nt, Artificial Sequence
  Description of Artificial Sequence: Synthetic oligonucleotide
guuuucuuuggaaaaugcc

SEQ ID NO: 3167061 - RNA, 19 nt, Artificial Sequence
  Description of Artificial Sequence: Synthetic oligonucleotide
cuuucuugucaaaauucug

SEQ ID NO: 3167062 - RNA, 19 nt, Artificial Sequence
  Description of Artificial Sequence: Synthetic oligonucleotide
acuuccuaaaccuggcaga

SEQ ID NO: 3167063 - RNA, 19 nt, Artificial Sequence
  Description of Artificial Sequence: Synthetic oligonucleotide
ucacuuucuugucaaaauu

SEQ ID NO: 3167064 - RNA, 19 nt, Artificial Sequence
  Description of Artificial Sequence: Synthetic oligonucleotide
gaucaaagauuucuucauc

SEQ ID NO: 3167065 - RNA, 19 nt, Artificial Sequence
  Description of Artificial Sequence: Synthetic oligonucleotide
cuucaacagaauauucuuc

SEQ ID NO: 3167066 - RNA, 19 nt, Artificial Sequence
  Description of Artificial Sequence: Synthetic oligonucleotide
cagaauauucuucaucuga

SEQ ID NO: 3167067 - RNA, 19 nt, Artificial Sequence
  Description of Artificial Sequence: Synthetic oligonucleotide
augccuucuugauaugauc

SEQ ID NO: 3167068 - RNA, 19 nt, Artificial Sequence
  Description of Artificial Sequence: Synthetic oligonucleotide
ucugcauguuuucuuugga

SEQ ID NO: 3167069 - RNA, 19 nt, Artificial Sequence
  Description of Artificial Sequence: Synthetic oligonucleotide
aaaugccuucuugauauga

SEQ ID NO: 3167070 - RNA, 19 nt, Artificial Sequence
  Description of Artificial Sequence: Synthetic oligonucleotide
caaagauuucuucauccuc

SEQ ID NO: 3167071 - RNA, 19 nt, Artificial Sequence
  Description of Artificial Sequence: Synthetic oligonucleotide
uccacucacuuucuuguca

SEQ ID NO: 3167072 - RNA, 19 nt, Artificial Sequence
  Description of Artificial Sequence: Synthetic oligonucleotide
ugccugacuuccuaaaccu

SEQ ID NO: 3167073 - RNA, 19 nt, Artificial Sequence
  Description of Artificial Sequence: Synthetic oligonucleotide
auuucuucauccuccuccu

SEQ ID NO: 3167074 - RNA, 19 nt, Artificial Sequence
  Description of Artificial Sequence: Synthetic oligonucleotide
ugcuuucuucaacagaaua

SEQ ID NO: 3167075 - RNA, 19 nt, Artificial Sequence
  Description of Artificial Sequence: Synthetic oligonucleotide
augaucaaugugcuccuug

SEQ ID NO: 3167076 - RNA, 19 nt, Artificial Sequence
  Description of Artificial Sequence: Synthetic oligonucleotide
uaguucuaauuccacucac

SEQ ID NO: 3167077 - RNA, 19 nt, Artificial Sequence
  Description of Artificial Sequence: Synthetic oligonucleotide
uggaaaaugccuucuugau

SEQ ID NO: 3167078 - RNA, 19 nt, Artificial Sequence
  Description of Artificial Sequence: Synthetic oligonucleotide
caacagaauauucuucauc

SEQ ID NO: 3167079 - RNA, 19 nt, Artificial Sequence
  Description of Artificial Sequence: Synthetic oligonucleotide
acagaauauucuucaucug

SEQ ID NO: 3167080 - RNA, 19 nt, Artificial Sequence
  Description of Artificial Sequence: Synthetic oligonucleotide
gaucaaugugcuccuugcc

SEQ ID NO: 3167081 - RNA, 19 nt, Artificial Sequence
  Description of Artificial Sequence: Synthetic oligonucleotide
cuaaaccuggcagaucugc

SEQ ID NO: 3167082 - RNA, 19 nt, Artificial Sequence
  Description of Artificial Sequence: Synthetic oligonucleotide
gacugucugagccucuccc

SEQ ID NO: 3167083 - RNA, 19 nt, Artificial Sequence
  Description of Artificial Sequence: Synthetic oligonucleotide
gaucugcuuucuucaacag

SEQ ID NO: 3167084 - RNA, 19 nt, Artificial Sequence
  Description of Artificial Sequence: Synthetic oligonucleotide
aauguuuucauacagccuc

SEQ ID NO: 3167085 - RNA, 19 nt, Artificial Sequence
  Description of Artificial Sequence: Synthetic oligonucleotide
aauaaccuuuucuucaugg

SEQ ID NO: 3167086 - RNA, 19 nt, Artificial Sequence
  Description of Artificial Sequence: Synthetic oligonucleotide
uuaauguuuucauacagcc

SEQ ID NO: 3167087 - RNA, 19 nt, Artificial Sequence
  Description of Artificial Sequence: Synthetic oligonucleotide
uuuaauaaccuuuucuuca

SEQ ID NO: 3167088 - RNA, 19 nt, Artificial Sequence
  Description of Artificial Sequence: Synthetic oligonucleotide
uaaguuaauguuuucauac

SEQ ID NO: 3167089 - RNA, 19 nt, Artificial Sequence
  Description of Artificial Sequence: Synthetic oligonucleotide
uguucaaucaaccagucaa

SEQ ID NO: 3167090 - RNA, 19 nt, Artificial Sequence
  Description of Artificial Sequence: Synthetic oligonucleotide
uucugcaugaguuuuauug

SEQ ID NO: 3167091 - RNA, 19 nt, Artificial Sequence
  Description of Artificial Sequence: Synthetic oligonucleotide
aacaaagcaguuuggguag

SEQ ID NO: 3167092 - RNA, 19 nt, Artificial Sequence
  Description of Artificial Sequence: Synthetic oligonucleotide
guagaagaguuuuacaucc

SEQ ID NO: 3167093 - RNA, 19 nt, Artificial Sequence
  Description of Artificial Sequence: Synthetic oligonucleotide
ucuucauggagccucagcc

SEQ ID NO: 3167094 - RNA, 19 nt, Artificial Sequence
  Description of Artificial Sequence: Synthetic oligonucleotide
aauuccuugugcucgucac

SEQ ID NO: 3167095 - RNA, 19 nt, Artificial Sequence
  Description of Artificial Sequence: Synthetic oligonucleotide
uucuuuggcaacaaagcag

SEQ ID NO: 3167096 - RNA, 19 nt, Artificial Sequence
  Description of Artificial Sequence: Synthetic oligonucleotide
uuggcaacaaagcaguuug

SEQ ID NO: 3167097 - RNA, 19 nt, Artificial Sequence
  Description of Artificial Sequence: Synthetic oligonucleotide
aaccuuuucuucauggagc

SEQ ID NO: 3167098 - RNA, 19 nt, Artificial Sequence
  Description of Artificial Sequence: Synthetic oligonucleotide
aguuaauguuuucauacag

SEQ ID NO: 3167099 - RNA, 19 nt, Artificial Sequence
  Description of Artificial Sequence: Synthetic oligonucleotide
agucaaucaguucuuuggc

SEQ ID NO: 3167100 - RNA, 19 nt, Artificial Sequence
  Description of Artificial Sequence: Synthetic oligonucleotide
uuuuauugccgucucucgg

SEQ ID NO: 3167101 - RNA, 19 nt, Artificial Sequence
  Description of Artificial Sequence: Synthetic oligonucleotide
uuucauacagccucugucc

SEQ ID NO: 3167102 - RNA, 19 nt, Artificial Sequence
  Description of Artificial Sequence: Synthetic oligonucleotide
ucuuuaauaaccuuuucuu

SEQ ID NO: 3167103 - RNA, 19 nt, Artificial Sequence
  Description of Artificial Sequence: Synthetic oligonucleotide
aagaguuuuacauccuuga

SEQ ID NO: 3167104 - RNA, 19 nt, Artificial Sequence
  Description of Artificial Sequence: Synthetic oligonucleotide
aguucuuuggcaacaaagc

SEQ ID NO: 3167105 - RNA, 19 nt, Artificial Sequence
  Description of Artificial Sequence: Synthetic oligonucleotide
ucuaucuuuaauaaccuuu

SEQ ID NO: 3167106 - RNA, 19 nt, Artificial Sequence
  Description of Artificial Sequence: Synthetic oligonucleotide
aguuuuacauccuugaauu

SEQ ID NO: 3167107 - RNA, 19 nt, Artificial Sequence
  Description of Artificial Sequence: Synthetic oligonucleotide
uuuuacauccuugaauucc

SEQ ID NO: 3167108 - RNA, 19 nt, Artificial Sequence
  Description of Artificial Sequence: Synthetic oligonucleotide
cuuguguucaaucaaccag

SEQ ID NO: 3167109 - RNA, 19 nt, Artificial Sequence
  Description of Artificial Sequence: Synthetic oligonucleotide
uaaccuuuucuucauggag

SEQ ID NO: 3167110 - RNA, 19 nt, Artificial Sequence
  Description of Artificial Sequence: Synthetic oligonucleotide
uggguaggucuucagaugg

SEQ ID NO: 3167111 - RNA, 19 nt, Artificial Sequence
  Description of Artificial Sequence: Synthetic oligonucleotide
uuuuaaguuaauguuuuca

SEQ ID NO: 3167112 - RNA, 19 nt, Artificial Sequence
  Description of Artificial Sequence: Synthetic oligonucleotide
uuuaaguuaauguuuucau

SEQ ID NO: 3167113 - RNA, 19 nt, Artificial Sequence
  Description of Artificial Sequence: Synthetic oligonucleotide
caaucaaccagucaaucag

SEQ ID NO: 3167114 - RNA, 19 nt, Artificial Sequence
  Description of Artificial Sequence: Synthetic oligonucleotide
ucuuuggcaacaaagcagu

SEQ ID NO: 3167115 - RNA, 19 nt, Artificial Sequence
  Description of Artificial Sequence: Synthetic oligonucleotide
aaggccuucacuucguugu

SEQ ID NO: 3167116 - RNA, 19 nt, Artificial Sequence
  Description of Artificial Sequence: Synthetic oligonucleotide
accuuuucuucauggagcc

SEQ ID NO: 3167117 - RNA, 19 nt, Artificial Sequence
  Description of Artificial Sequence: Synthetic oligonucleotide
aucuuuaauaaccuuuucu

SEQ ID NO: 3167118 - RNA, 19 nt, Artificial Sequence
  Description of Artificial Sequence: Synthetic oligonucleotide
cagucaaucaguucuuugg

SEQ ID NO: 3167119 - RNA, 19 nt, Artificial Sequence
  Description of Artificial Sequence: Synthetic oligonucleotide
uuuucauacagccucuguc

SEQ ID NO: 3167120 - RNA, 19 nt, Artificial Sequence
  Description of Artificial Sequence: Synthetic oligonucleotide
ucugcaugaguuuuauugc

SEQ ID NO: 3167121 - RNA, 19 nt, Artificial Sequence
  Description of Artificial Sequence: Synthetic oligonucleotide
ugaaugaugccccggucgg

SEQ ID NO: 3167122 - RNA, 19 nt, Artificial Sequence
  Description of Artificial Sequence: Synthetic oligonucleotide
augaaugaugccccggucg

SEQ ID NO: 3167123 - RNA, 19 nt, Artificial Sequence
  Description of Artificial Sequence: Synthetic oligonucleotide
cuugaauuccuugugcucg

SEQ ID NO: 3167124 - RNA, 19 nt, Artificial Sequence
  Description of Artificial Sequence: Synthetic oligonucleotide
uuucugaagcgguagaaga

SEQ ID NO: 3167125 - RNA, 19 nt, Artificial Sequence
  Description of Artificial Sequence: Synthetic oligonucleotide
ugcaugaguuuuauugccg

SEQ ID NO: 3167126 - RNA, 19 nt, Artificial Sequence
  Description of Artificial Sequence: Synthetic oligonucleotide
uuuacauccuugaauuccu

SEQ ID NO: 3167127 - RNA, 19 nt, Artificial Sequence
  Description of Artificial Sequence: Synthetic oligonucleotide
uuguguucaaucaaccagu

SEQ ID NO: 3167128 - RNA, 19 nt, Artificial Sequence
  Description of Artificial Sequence: Synthetic oligonucleotide
aaguuaauguuuucauaca

SEQ ID NO: 3167129 - RNA, 19 nt, Artificial Sequence
  Description of Artificial Sequence: Synthetic oligonucleotide
auccuugaauuccuugugc

SEQ ID NO: 3167130 - RNA, 19 nt, Artificial Sequence
  Description of Artificial Sequence: Synthetic oligonucleotide
cuuuaauaaccuuuucuuc

SEQ ID NO: 3167131 - RNA, 19 nt, Artificial Sequence
  Description of Artificial Sequence: Synthetic oligonucleotide
ucaaucaaccagucaauca

SEQ ID NO: 3167132 - RNA, 19 nt, Artificial Sequence
  Description of Artificial Sequence: Synthetic oligonucleotide
aagcaguuuggguaggucu

SEQ ID NO: 3167133 - RNA, 19 nt, Artificial Sequence
  Description of Artificial Sequence: Synthetic oligonucleotide
uucugaagcgguagaagag

SEQ ID NO: 3167134 - RNA, 19 nt, Artificial Sequence
  Description of Artificial Sequence: Synthetic oligonucleotide
aguuuuauugccgucucuc

SEQ ID NO: 3167135 - RNA, 19 nt, Artificial Sequence
  Description of Artificial Sequence: Synthetic oligonucleotide
cacacgugaugaaugaugc

SEQ ID NO: 3167136 - RNA, 19 nt, Artificial Sequence
  Description of Artificial Sequence: Synthetic oligonucleotide
caguucuuuggcaacaaag

SEQ ID NO: 3167137 - RNA, 19 nt, Artificial Sequence
  Description of Artificial Sequence: Synthetic oligonucleotide
uuuggguaggucuucagau

SEQ ID NO: 3167138 - RNA, 19 nt, Artificial Sequence
  Description of Artificial Sequence: Synthetic oligonucleotide
ucaaucaguucuuuggcaa

SEQ ID NO: 3167139 - RNA, 19 nt, Artificial Sequence
  Description of Artificial Sequence: Synthetic oligonucleotide
uuaaguuaauguuuucaua

SEQ ID NO: 3167140 - RNA, 19 nt, Artificial Sequence
  Description of Artificial Sequence: Synthetic oligonucleotide
guuuuauugccgucucucg

SEQ ID NO: 3167141 - RNA, 19 nt, Artificial Sequence
  Description of Artificial Sequence: Synthetic oligonucleotide
caugaaggccuucacuucg

SEQ ID NO: 3167142 - RNA, 19 nt, Artificial Sequence
  Description of Artificial Sequence: Synthetic oligonucleotide
uuuauugccgucucucggu

SEQ ID NO: 3167143 - RNA, 19 nt, Artificial Sequence
  Description of Artificial Sequence: Synthetic oligonucleotide
uuguccagugggaaggugc

SEQ ID NO: 3167144 - RNA, 19 nt, Artificial Sequence
  Description of Artificial Sequence: Synthetic oligonucleotide
uuaauaaccuuuucuucau

SEQ ID NO: 3167145 - RNA, 19 nt, Artificial Sequence
  Description of Artificial Sequence: Synthetic oligonucleotide
cacgugaugaaugaugccc

SEQ ID NO: 3167146 - RNA, 19 nt, Artificial Sequence
  Description of Artificial Sequence: Synthetic oligonucleotide
guuaauguuuucauacagc

SEQ ID NO: 3167147 - RNA, 19 nt, Artificial Sequence
  Description of Artificial Sequence: Synthetic oligonucleotide
uaggucuucagauggugcc

SEQ ID NO: 3167148 - RNA, 19 nt, Artificial Sequence
  Description of Artificial Sequence: Synthetic oligonucleotide
uaauguuuucauacagccu

SEQ ID NO: 3167149 - RNA, 19 nt, Artificial Sequence
  Description of Artificial Sequence: Synthetic oligonucleotide
acauccuugaauuccuugu

SEQ ID NO: 3167150 - RNA, 19 nt, Artificial Sequence
  Description of Artificial Sequence: Synthetic oligonucleotide
ccgucuaucuuuaauaacc

SEQ ID NO: 3167151 - RNA, 19 nt, Artificial Sequence
  Description of Artificial Sequence: Synthetic oligonucleotide
uucacuucguuguccagug

SEQ ID NO: 3167152 - RNA, 19 nt, Artificial Sequence
  Description of Artificial Sequence: Synthetic oligonucleotide
ugaugaaugaugccccggu

SEQ ID NO: 3167153 - RNA, 19 nt, Artificial Sequence
  Description of Artificial Sequence: Synthetic oligonucleotide
uccuuguguucaaucaacc

SEQ ID NO: 3167154 - RNA, 19 nt, Artificial Sequence
  Description of Artificial Sequence: Synthetic oligonucleotide
agcgguagaagaguuuuac

SEQ ID NO: 3167155 - RNA, 19 nt, Artificial Sequence
  Description of Artificial Sequence: Synthetic oligonucleotide
ucguuguccagugggaagg

SEQ ID NO: 3167156 - RNA, 19 nt, Artificial Sequence
  Description of Artificial Sequence: Synthetic oligonucleotide
cacuucguuguccaguggg

SEQ ID NO: 3167157 - RNA, 19 nt, Artificial Sequence
  Description of Artificial Sequence: Synthetic oligonucleotide
uuccuuguguucaaucaac

SEQ ID NO: 3167158 - RNA, 19 nt, Artificial Sequence
  Description of Artificial Sequence: Synthetic oligonucleotide
cugcaugaguuuuauugcc

SEQ ID NO: 3167159 - RNA, 19 nt, Artificial Sequence
  Description of Artificial Sequence: Synthetic oligonucleotide
gaagaguuuuacauccuug

SEQ ID NO: 3167160 - RNA, 19 nt, Artificial Sequence
  Description of Artificial Sequence: Synthetic oligonucleotide
ucauccuuucugaagcggu

SEQ ID NO: 3167161 - RNA, 19 nt, Artificial Sequence
  Description of Artificial Sequence: Synthetic oligonucleotide
aaagcaguuuggguagguc

SEQ ID NO: 3167162 - RNA, 19 nt, Artificial Sequence
  Description of Artificial Sequence: Synthetic oligonucleotide
uccuugaauuccuugugcu

SEQ ID NO: 3167163 - RNA, 19 nt, Artificial Sequence
  Description of Artificial Sequence: Synthetic oligonucleotide
uugugcucgucacacacgu

SEQ ID NO: 3167164 - RNA, 19 nt, Artificial Sequence
  Description of Artificial Sequence: Synthetic oligonucleotide
cauacagccucuguccucg

SEQ ID NO: 3167165 - RNA, 19 nt, Artificial Sequence
  Description of Artificial Sequence: Synthetic oligonucleotide
auaaccuuuucuucaugga

SEQ ID NO: 3167166 - RNA, 19 nt, Artificial Sequence
  Description of Artificial Sequence: Synthetic oligonucleotide
uaauaaccuuuucuucaug

SEQ ID NO: 3167167 - RNA, 19 nt, Artificial Sequence
  Description of Artificial Sequence: Synthetic oligonucleotide
ucggcuaauuucugcauga

SEQ ID NO: 3167168 - RNA, 19 nt, Artificial Sequence
  Description of Artificial Sequence: Synthetic oligonucleotide
cuuuucuucauggagccuc

SEQ ID NO: 3167169 - RNA, 19 nt, Artificial Sequence
  Description of Artificial Sequence: Synthetic oligonucleotide
guucuuuggcaacaaagca

SEQ ID NO: 3167170 - RNA, 19 nt, Artificial Sequence
  Description of Artificial Sequence: Synthetic oligonucleotide
uguccucgcaugaaggccu

SEQ ID NO: 3167171 - RNA, 19 nt, Artificial Sequence
  Description of Artificial Sequence: Synthetic oligonucleotide
ucuguccucgcaugaaggc

SEQ ID NO: 3167172 - RNA, 19 nt, Artificial Sequence
  Description of Artificial Sequence: Synthetic oligonucleotide
acacgugaugaaugaugcc

SEQ ID NO: 3167173 - RNA, 19 nt, Artificial Sequence
  Description of Artificial Sequence: Synthetic oligonucleotide
uucauacagccucuguccu

SEQ ID NO: 3167174 - RNA, 19 nt, Artificial Sequence
  Description of Artificial Sequence: Synthetic oligonucleotide
acgugaugaaugaugcccc

SEQ ID NO: 3167175 - RNA, 19 nt, Artificial Sequence
  Description of Artificial Sequence: Synthetic oligonucleotide
aaucaguucuuuggcaaca

SEQ ID NO: 3167176 - RNA, 19 nt, Artificial Sequence
  Description of Artificial Sequence: Synthetic oligonucleotide
uacauccuugaauuccuug

SEQ ID NO: 3167177 - RNA, 19 nt, Artificial Sequence
  Description of Artificial Sequence: Synthetic oligonucleotide
uucguuguccagugggaag

SEQ ID NO: 3167178 - RNA, 19 nt, Artificial Sequence
  Description of Artificial Sequence: Synthetic oligonucleotide
uguccagugggaaggugcc

SEQ ID NO: 3167179 - RNA, 19 nt, Artificial Sequence
  Description of Artificial Sequence: Synthetic oligonucleotide
ucacacacgugaugaauga

SEQ ID NO: 3167180 - RNA, 19 nt, Artificial Sequence
  Description of Artificial Sequence: Synthetic oligonucleotide
uaucuuuaauaaccuuuuc

SEQ ID NO: 3167181 - RNA, 19 nt, Artificial Sequence
  Description of Artificial Sequence: Synthetic oligonucleotide
caacaaagcaguuugggua

SEQ ID NO: 3167182 - RNA, 19 nt, Artificial Sequence
  Description of Artificial Sequence: Synthetic oligonucleotide
uuuucuucauggagccuca

SEQ ID NO: 3167183 - RNA, 19 nt, Artificial Sequence
  Description of Artificial Sequence: Synthetic oligonucleotide
uucuucauggagccucagc

SEQ ID NO: 3167184 - RNA, 19 nt, Artificial Sequence
  Description of Artificial Sequence: Synthetic oligonucleotide
aaauauauaaaauccacag

SEQ ID NO: 3167185 - RNA, 19 nt, Artificial Sequence
  Description of Artificial Sequence: Synthetic oligonucleotide
aaauccacagauuaugucg

SEQ ID NO: 3167186 - RNA, 19 nt, Artificial Sequence
  Description of Artificial Sequence: Synthetic oligonucleotide
uggucaaagagucaaaugg

SEQ ID NO: 3167187 - RNA, 19 nt, Artificial Sequence
  Description of Artificial Sequence: Synthetic oligonucleotide
ucugacacuagauagacag

SEQ ID NO: 3167188 - RNA, 19 nt, Artificial Sequence
  Description of Artificial Sequence: Synthetic oligonucleotide
auauauaaaauccacagau

SEQ ID NO: 3167189 - RNA, 19 nt, Artificial Sequence
  Description of Artificial Sequence: Synthetic oligonucleotide
uugaaaucaagguauuugg

SEQ ID NO: 3167190 - RNA, 19 nt, Artificial Sequence
  Description of Artificial Sequence: Synthetic oligonucleotide
uguucauucacagaaacag

SEQ ID NO: 3167191 - RNA, 19 nt, Artificial Sequence
  Description of Artificial Sequence: Synthetic oligonucleotide
aaucaagguauuuggguac

SEQ ID NO: 3167192 - RNA, 19 nt, Artificial Sequence
  Description of Artificial Sequence: Synthetic oligonucleotide
aauauauaaaauccacaga

SEQ ID NO: 3167193 - RNA, 19 nt, Artificial Sequence
  Description of Artificial Sequence: Synthetic oligonucleotide
aaaugggaaguguugauug

SEQ ID NO: 3167194 - RNA, 19 nt, Artificial Sequence
  Description of Artificial Sequence: Synthetic oligonucleotide
aaaaucggcuuguucauuc

SEQ ID NO: 3167195 - RNA, 19 nt, Artificial Sequence
  Description of Artificial Sequence: Synthetic oligonucleotide
uccaagcaaguuaaaaucg

SEQ ID NO: 3167196 - RNA, 19 nt, Artificial Sequence
  Description of Artificial Sequence: Synthetic oligonucleotide
uguggauccacucacacac

SEQ ID NO: 3167197 - RNA, 19 nt, Artificial Sequence
  Description of Artificial Sequence: Synthetic oligonucleotide
guuaaaaucggcuuguuca

SEQ ID NO: 3167198 - RNA, 19 nt, Artificial Sequence
  Description of Artificial Sequence: Synthetic oligonucleotide
aaaauccacagauuauguc

SEQ ID NO: 3167199 - RNA, 19 nt, Artificial Sequence
  Description of Artificial Sequence: Synthetic oligonucleotide
acacuagauagacaguucc

SEQ ID NO: 3167200 - RNA, 19 nt, Artificial Sequence
  Description of Artificial Sequence: Synthetic oligonucleotide
agaaauauauaaaauccac

SEQ ID NO: 3167201 - RNA, 19 nt, Artificial Sequence
  Description of Artificial Sequence: Synthetic oligonucleotide
ucuguugcagaacauaucu

SEQ ID NO: 3167202 - RNA, 19 nt, Artificial Sequence
  Description of Artificial Sequence: Synthetic oligonucleotide
aagguauuuggguacuugg

SEQ ID NO: 3167203 - RNA, 19 nt, Artificial Sequence
  Description of Artificial Sequence: Synthetic oligonucleotide
aacauaucuucuugaaauc

SEQ ID NO: 3167204 - RNA, 19 nt, Artificial Sequence
  Description of Artificial Sequence: Synthetic oligonucleotide
acugccaaguuucuguugc

SEQ ID NO: 3167205 - RNA, 19 nt, Artificial Sequence
  Description of Artificial Sequence: Synthetic oligonucleotide
uaucuucuugaaaucaagg

SEQ ID NO: 3167206 - RNA, 19 nt, Artificial Sequence
  Description of Artificial Sequence: Synthetic oligonucleotide
ugaaaucaagguauuuggg

SEQ ID NO: 3167207 - RNA, 19 nt, Artificial Sequence
  Description of Artificial Sequence: Synthetic oligonucleotide
cuugucugacacuagauag

SEQ ID NO: 3167208 - RNA, 19 nt, Artificial Sequence
  Description of Artificial Sequence: Synthetic oligonucleotide
agauagacaguuccaaaac

SEQ ID NO: 3167209 - RNA, 19 nt, Artificial Sequence
  Description of Artificial Sequence: Synthetic oligonucleotide
auauaaaauccacagauua

SEQ ID NO: 3167210 - RNA, 19 nt, Artificial Sequence
  Description of Artificial Sequence: Synthetic oligonucleotide
aguuccaaaacuuccacug

SEQ ID NO: 3167211 - RNA, 19 nt, Artificial Sequence
  Description of Artificial Sequence: Synthetic oligonucleotide
aaaacuuccacugccaagu

SEQ ID NO: 3167212 - RNA, 19 nt, Artificial Sequence
  Description of Artificial Sequence: Synthetic oligonucleotide
aauccacagauuaugucgc

SEQ ID NO: 3167213 - RNA, 19 nt, Artificial Sequence
  Description of Artificial Sequence: Synthetic oligonucleotide
ccagaaauauauaaaaucc

SEQ ID NO: 3167214 - RNA, 19 nt, Artificial Sequence
  Description of Artificial Sequence: Synthetic oligonucleotide
aaaucaagguauuugggua

SEQ ID NO: 3167215 - RNA, 19 nt, Artificial Sequence
  Description of Artificial Sequence: Synthetic oligonucleotide
uucauucacagaaacaguc

SEQ ID NO: 3167216 - RNA, 19 nt, Artificial Sequence
  Description of Artificial Sequence: Synthetic oligonucleotide
auaaaauccacagauuaug

SEQ ID NO: 3167217 - RNA, 19 nt, Artificial Sequence
  Description of Artificial Sequence: Synthetic oligonucleotide
caaagagucaaaugggaag

SEQ ID NO: 3167218 - RNA, 19 nt, Artificial Sequence
  Description of Artificial Sequence: Synthetic oligonucleotide
ucuucuugaaaucaaggua

SEQ ID NO: 3167219 - RNA, 19 nt, Artificial Sequence
  Description of Artificial Sequence: Synthetic oligonucleotide
uucagcaucgcuccaagca

SEQ ID NO: 3167220 - RNA, 19 nt, Artificial Sequence
  Description of Artificial Sequence: Synthetic oligonucleotide
uccacucacacacuuagca

SEQ ID NO: 3167221 - RNA, 19 nt, Artificial Sequence
  Description of Artificial Sequence: Synthetic oligonucleotide
aaagagucaaaugggaagu

SEQ ID NO: 3167222 - RNA, 19 nt, Artificial Sequence
  Description of Artificial Sequence: Synthetic oligonucleotide
acacuuagcagucucucgg

SEQ ID NO: 3167223 - RNA, 19 nt, Artificial Sequence
  Description of Artificial Sequence: Synthetic oligonucleotide
aaguuucuguugcagaaca

SEQ ID NO: 3167224 - RNA, 19 nt, Artificial Sequence
  Description of Artificial Sequence: Synthetic oligonucleotide
cauucacagaaacaguccg

SEQ ID NO: 3167225 - RNA, 19 nt, Artificial Sequence
  Description of Artificial Sequence: Synthetic oligonucleotide
uguugcagaacauaucuuc

SEQ ID NO: 3167226 - RNA, 19 nt, Artificial Sequence
  Description of Artificial Sequence: Synthetic oligonucleotide
gauccacucacacacuuag

SEQ ID NO: 3167227 - RNA, 19 nt, Artificial Sequence
  Description of Artificial Sequence: Synthetic oligonucleotide
uauaaaauccacagauuau

SEQ ID NO: 3167228 - RNA, 19 nt, Artificial Sequence
  Description of Artificial Sequence: Synthetic oligonucleotide
uaaaauccacagauuaugu

SEQ ID NO: 3167229 - RNA, 19 nt, Artificial Sequence
  Description of Artificial Sequence: Synthetic oligonucleotide
ucauucacagaaacagucc

SEQ ID NO: 3167230 - RNA, 19 nt, Artificial Sequence
  Description of Artificial Sequence: Synthetic oligonucleotide
uuuggguacuuggaaaugg

SEQ ID NO: 3167231 - RNA, 19 nt, Artificial Sequence
  Description of Artificial Sequence: Synthetic oligonucleotide
auugaugccagaaauauau

SEQ ID NO: 3167232 - RNA, 19 nt, Artificial Sequence
  Description of Artificial Sequence: Synthetic oligonucleotide
aguuaaaaucggcuuguuc

SEQ ID NO: 3167233 - RNA, 19 nt, Artificial Sequence
  Description of Artificial Sequence: Synthetic oligonucleotide
aauggcuguggauccacuc

SEQ ID NO: 3167234 - RNA, 19 nt, Artificial Sequence
  Description of Artificial Sequence: Synthetic oligonucleotide
agucucucggaauuucagc

SEQ ID NO: 3167235 - RNA, 19 nt, Artificial Sequence
  Description of Artificial Sequence: Synthetic oligonucleotide
uuccaaaacuuccacugcc

SEQ ID NO: 3167236 - RNA, 19 nt, Artificial Sequence
  Description of Artificial Sequence: Synthetic oligonucleotide
ugcagaacauaucuucuug

SEQ ID NO: 3167237 - RNA, 19 nt, Artificial Sequence
  Description of Artificial Sequence: Synthetic oligonucleotide
cuugaaaucaagguauuug

SEQ ID NO: 3167238 - RNA, 19 nt, Artificial Sequence
  Description of Artificial Sequence: Synthetic oligonucleotide
aaucggcuuguucauucac

SEQ ID NO: 3167239 - RNA, 19 nt, Artificial Sequence
  Description of Artificial Sequence: Synthetic oligonucleotide
acagauuaugucgcaaagc

SEQ ID NO: 3167240 - RNA, 19 nt, Artificial Sequence
  Description of Artificial Sequence: Synthetic oligonucleotide
uaguucuucucccuguuug

SEQ ID NO: 3167241 - RNA, 19 nt, Artificial Sequence
  Description of Artificial Sequence: Synthetic oligonucleotide
gaacauaucuucuugaaau

SEQ ID NO: 3167242 - RNA, 19 nt, Artificial Sequence
  Description of Artificial Sequence: Synthetic oligonucleotide
aucuucuugaaaucaaggu

SEQ ID NO: 3167243 - RNA, 19 nt, Artificial Sequence
  Description of Artificial Sequence: Synthetic oligonucleotide
gaaauauauaaaauccaca

SEQ ID NO: 3167244 - RNA, 19 nt, Artificial Sequence
  Description of Artificial Sequence: Synthetic oligonucleotide
uagauagacaguuccaaaa

SEQ ID NO: 3167245 - RNA, 19 nt, Artificial Sequence
  Description of Artificial Sequence: Synthetic oligonucleotide
ugaugccagaaauauauaa

SEQ ID NO: 3167246 - RNA, 19 nt, Artificial Sequence
  Description of Artificial Sequence: Synthetic oligonucleotide
acaguuccaaaacuuccac

SEQ ID NO: 3167247 - RNA, 19 nt, Artificial Sequence
  Description of Artificial Sequence: Synthetic oligonucleotide
cuccaagcaaguuaaaauc

SEQ ID NO: 3167248 - RNA, 19 nt, Artificial Sequence
  Description of Artificial Sequence: Synthetic oligonucleotide
uuucuugucugacacuaga

SEQ ID NO: 3167249 - RNA, 19 nt, Artificial Sequence
  Description of Artificial Sequence: Synthetic oligonucleotide
ucucggaauuucagcaucg

SEQ ID NO: 3167250 - RNA, 19 nt, Artificial Sequence
  Description of Artificial Sequence: Synthetic oligonucleotide
ucaaagagucaaaugggaa

SEQ ID NO: 3167251 - RNA, 19 nt, Artificial Sequence
  Description of Artificial Sequence: Synthetic oligonucleotide
uauauaaaauccacagauu

SEQ ID NO: 3167252 - RNA, 19 nt, Artificial Sequence
  Description of Artificial Sequence: Synthetic oligonucleotide
uuucuguugcagaacauau

SEQ ID NO: 3167253 - RNA, 19 nt, Artificial Sequence
  Description of Artificial Sequence: Synthetic oligonucleotide
aacaguccggccucccagc

SEQ ID NO: 3167254 - RNA, 19 nt, Artificial Sequence
  Description of Artificial Sequence: Synthetic oligonucleotide
cuuguucauucacagaaac

SEQ ID NO: 3167255 - RNA, 19 nt, Artificial Sequence
  Description of Artificial Sequence: Synthetic oligonucleotide
agacaguuccaaaacuucc

SEQ ID NO: 3167256 - RNA, 19 nt, Artificial Sequence
  Description of Artificial Sequence: Synthetic oligonucleotide
aaacaguccggccucccag

SEQ ID NO: 3167257 - RNA, 19 nt, Artificial Sequence
  Description of Artificial Sequence: Synthetic oligonucleotide
acuuccacugccaaguuuc

SEQ ID NO: 3167258 - RNA, 19 nt, Artificial Sequence
  Description of Artificial Sequence: Synthetic oligonucleotide
augccagaaauauauaaaa

SEQ ID NO: 3167259 - RNA, 19 nt, Artificial Sequence
  Description of Artificial Sequence: Synthetic oligonucleotide
ugauugaugccagaaauau

SEQ ID NO: 3167260 - RNA, 19 nt, Artificial Sequence
  Description of Artificial Sequence: Synthetic oligonucleotide
acagaaacaguccggccuc

SEQ ID NO: 3167261 - RNA, 19 nt, Artificial Sequence
  Description of Artificial Sequence: Synthetic oligonucleotide
gaaguguugauugaugcca

SEQ ID NO: 3167262 - RNA, 19 nt, Artificial Sequence
  Description of Artificial Sequence: Synthetic oligonucleotide
caagcaaguuaaaaucggc

SEQ ID NO: 3167263 - RNA, 19 nt, Artificial Sequence
  Description of Artificial Sequence: Synthetic oligonucleotide
uauuuggguacuuggaaau

SEQ ID NO: 3167264 - RNA, 19 nt, Artificial Sequence
  Description of Artificial Sequence: Synthetic oligonucleotide
uuggaaauggcuguggauc

SEQ ID NO: 3167265 - RNA, 19 nt, Artificial Sequence
  Description of Artificial Sequence: Synthetic oligonucleotide
ucggcuuguucauucacag

SEQ ID NO: 3167266 - RNA, 19 nt, Artificial Sequence
  Description of Artificial Sequence: Synthetic oligonucleotide
aaugggaaguguugauuga

SEQ ID NO: 3167267 - RNA, 19 nt, Artificial Sequence
  Description of Artificial Sequence: Synthetic oligonucleotide
ggaauuucagcaucgcucc

SEQ ID NO: 3167268 - RNA, 19 nt, Artificial Sequence
  Description of Artificial Sequence: Synthetic oligonucleotide
gaaaucaagguauuugggu

SEQ ID NO: 3167269 - RNA, 19 nt, Artificial Sequence
  Description of Artificial Sequence: Synthetic oligonucleotide
cagaaauauauaaaaucca

SEQ ID NO: 3167270 - RNA, 19 nt, Artificial Sequence
  Description of Artificial Sequence: Synthetic oligonucleotide
cagauuaugucgcaaagca

SEQ ID NO: 3167271 - RNA, 19 nt, Artificial Sequence
  Description of Artificial Sequence: Synthetic oligonucleotide
uuguucauucacagaaaca

SEQ ID NO: 3167272 - RNA, 19 nt, Artificial Sequence
  Description of Artificial Sequence: Synthetic oligonucleotide
uggaaauggcuguggaucc

SEQ ID NO: 3167273 - RNA, 19 nt, Artificial Sequence
  Description of Artificial Sequence: Synthetic oligonucleotide
uuaaaaucggcuuguucau

SEQ ID NO: 3167274 - RNA, 19 nt, Artificial Sequence
  Description of Artificial Sequence: Synthetic oligonucleotide
uucacagaaacaguccggc

SEQ ID NO: 3167275 - RNA, 19 nt, Artificial Sequence
  Description of Artificial Sequence: Synthetic oligonucleotide
aguucuucucccuguuugg

SEQ ID NO: 3167276 - RNA, 19 nt, Artificial Sequence
  Description of Artificial Sequence: Synthetic oligonucleotide
uccacugccaaguuucugu

SEQ ID NO: 3167277 - RNA, 19 nt, Artificial Sequence
  Description of Artificial Sequence: Synthetic oligonucleotide
uagacaguuccaaaacuuc

SEQ ID NO: 3167278 - RNA, 19 nt, Artificial Sequence
  Description of Artificial Sequence: Synthetic oligonucleotide
uuagcagucucucggaauu

SEQ ID NO: 3167279 - RNA, 19 nt, Artificial Sequence
  Description of Artificial Sequence: Synthetic oligonucleotide
uugucugacacuagauaga

SEQ ID NO: 3167280 - RNA, 19 nt, Artificial Sequence
  Description of Artificial Sequence: Synthetic oligonucleotide
uguugauugaugccagaaa

SEQ ID NO: 3167281 - RNA, 19 nt, Artificial Sequence
  Description of Artificial Sequence: Synthetic oligonucleotide
gccagaaauauauaaaauc

SEQ ID NO: 3167282 - RNA, 19 nt, Artificial Sequence
  Description of Artificial Sequence: Synthetic oligonucleotide
ucuugucugacacuagaua

SEQ ID NO: 3167283 - RNA, 19 nt, Artificial Sequence
  Description of Artificial Sequence: Synthetic oligonucleotide
ugccagaaauauauaaaau

SEQ ID NO: 3167284 - RNA, 19 nt, Artificial Sequence
  Description of Artificial Sequence: Synthetic oligonucleotide
aaccuuauaaccuauaguc

SEQ ID NO: 3167285 - RNA, 19 nt, Artificial Sequence
  Description of Artificial Sequence: Synthetic oligonucleotide
aaaucaaaguguuacagcg

SEQ ID NO: 3167286 - RNA, 19 nt, Artificial Sequence
  Description of Artificial Sequence: Synthetic oligonucleotide
aacauagaaaagcuaaaac

SEQ ID NO: 3167287 - RNA, 19 nt, Artificial Sequence
  Description of Artificial Sequence: Synthetic oligonucleotide
ugauaaaccagucaaaucu

SEQ ID NO: 3167288 - RNA, 19 nt, Artificial Sequence
  Description of Artificial Sequence: Synthetic oligonucleotide
ucugaaacaacaauaauac

SEQ ID NO: 3167289 - RNA, 19 nt, Artificial Sequence
  Description of Artificial Sequence: Synthetic oligonucleotide
aaaccagucaaaucuaaac

SEQ ID NO: 3167290 - RNA, 19 nt, Artificial Sequence
  Description of Artificial Sequence: Synthetic oligonucleotide
uuuaaagucugaaacaaca

SEQ ID NO: 3167291 - RNA, 19 nt, Artificial Sequence
  Description of Artificial Sequence: Synthetic oligonucleotide
uccacguucaauuugagcc

SEQ ID NO: 3167292 - RNA, 19 nt, Artificial Sequence
  Description of Artificial Sequence: Synthetic oligonucleotide
uuuuguguaacauacagau

SEQ ID NO: 3167293 - RNA, 19 nt, Artificial Sequence
  Description of Artificial Sequence: Synthetic oligonucleotide
agcuauagaaucuaaguuc

SEQ ID NO: 3167294 - RNA, 19 nt, Artificial Sequence
  Description of Artificial Sequence: Synthetic oligonucleotide
uuagcuuuaauaaacuggu

SEQ ID NO: 3167295 - RNA, 19 nt, Artificial Sequence
  Description of Artificial Sequence: Synthetic oligonucleotide
uucgucacgaauaaaagca

SEQ ID NO: 3167296 - RNA, 19 nt, Artificial Sequence
  Description of Artificial Sequence: Synthetic oligonucleotide
auaauacagcuauagaauc

SEQ ID NO: 3167297 - RNA, 19 nt, Artificial Sequence
  Description of Artificial Sequence: Synthetic oligonucleotide
ugcaccaucgaauagauaa

SEQ ID NO: 3167298 - RNA, 19 nt, Artificial Sequence
  Description of Artificial Sequence: Synthetic oligonucleotide
uaaacugguuaaaaucucg

SEQ ID NO: 3167299 - RNA, 19 nt, Artificial Sequence
  Description of Artificial Sequence: Synthetic oligonucleotide
agaaguaagcgauuagugg

SEQ ID NO: 3167300 - RNA, 19 nt, Artificial Sequence
  Description of Artificial Sequence: Synthetic oligonucleotide
uuuaaaacugcauggaguc

SEQ ID NO: 3167301 - RNA, 19 nt, Artificial Sequence
  Description of Artificial Sequence: Synthetic oligonucleotide
auuagcuuuaauaaacugg

SEQ ID NO: 3167302 - RNA, 19 nt, Artificial Sequence
  Description of Artificial Sequence: Synthetic oligonucleotide
auauuuaagagucgcaucu

SEQ ID NO: 3167303 - RNA, 19 nt, Artificial Sequence
  Description of Artificial Sequence: Synthetic oligonucleotide
aguuuaaaacaucaauguc

SEQ ID NO: 3167304 - RNA, 19 nt, Artificial Sequence
  Description of Artificial Sequence: Synthetic oligonucleotide
gauaaggaugauuacaaca

SEQ ID NO: 3167305 - RNA, 19 nt, Artificial Sequence
  Description of Artificial Sequence: Synthetic oligonucleotide
ucaaaucuaaacuggggag

SEQ ID NO: 3167306 - RNA, 19 nt, Artificial Sequence
  Description of Artificial Sequence: Synthetic oligonucleotide
uucucauuagcuuuaauaa

SEQ ID NO: 3167307 - RNA, 19 nt, Artificial Sequence
  Description of Artificial Sequence: Synthetic oligonucleotide
agcugaauacuccaugacc

SEQ ID NO: 3167308 - RNA, 19 nt, Artificial Sequence
  Description of Artificial Sequence: Synthetic oligonucleotide
cucauuagcuuuaauaaac

SEQ ID NO: 3167309 - RNA, 19 nt, Artificial Sequence
  Description of Artificial Sequence: Synthetic oligonucleotide
uacgcaacugaugaaaugg

SEQ ID NO: 3167310 - RNA, 19 nt, Artificial Sequence
  Description of Artificial Sequence: Synthetic oligonucleotide
aaccagucaaaucuaaacu

SEQ ID NO: 3167311 - RNA, 19 nt, Artificial Sequence
  Description of Artificial Sequence: Synthetic oligonucleotide
ucugucaaagcccauuuug

SEQ ID NO: 3167312 - RNA, 19 nt, Artificial Sequence
  Description of Artificial Sequence: Synthetic oligonucleotide
aauuaaagacauccggaca

SEQ ID NO: 3167313 - RNA, 19 nt, Artificial Sequence
  Description of Artificial Sequence: Synthetic oligonucleotide
caucgaauagauaaggaug

SEQ ID NO: 3167314 - RNA, 19 nt, Artificial Sequence
  Description of Artificial Sequence: Synthetic oligonucleotide
aguucuagacuugauaaac

SEQ ID NO: 3167315 - RNA, 19 nt, Artificial Sequence
  Description of Artificial Sequence: Synthetic oligonucleotide
gaaguaagcgauuagugga

SEQ ID NO: 3167316 - RNA, 19 nt, Artificial Sequence
  Description of Artificial Sequence: Synthetic oligonucleotide
uacaaugcauaaaauagaa

SEQ ID NO: 3167317 - RNA, 19 nt, Artificial Sequence
  Description of Artificial Sequence: Synthetic oligonucleotide
aagcaucaaacaaacaagg

SEQ ID NO: 3167318 - RNA, 19 nt, Artificial Sequence
  Description of Artificial Sequence: Synthetic oligonucleotide
ucuuaauucuucauacaca

SEQ ID NO: 3167319 - RNA, 19 nt, Artificial Sequence
  Description of Artificial Sequence: Synthetic oligonucleotide
gcuuucuuaauacugaucc

SEQ ID NO: 3167320 - RNA, 19 nt, Artificial Sequence
  Description of Artificial Sequence: Synthetic oligonucleotide
uagauaaggaugauuacaa

SEQ ID NO: 3167321 - RNA, 19 nt, Artificial Sequence
  Description of Artificial Sequence: Synthetic oligonucleotide
ugugaaaccuuguguaagg

SEQ ID NO: 3167322 - RNA, 19 nt, Artificial Sequence
  Description of Artificial Sequence: Synthetic oligonucleotide
aauacugauccuucgcuga

SEQ ID NO: 3167323 - RNA, 19 nt, Artificial Sequence
  Description of Artificial Sequence: Synthetic oligonucleotide
uagaaaagcuaaaaccuca

SEQ ID NO: 3167324 - RNA, 19 nt, Artificial Sequence
  Description of Artificial Sequence: Synthetic oligonucleotide
uuucucauuagcuuuaaua

SEQ ID NO: 3167325 - RNA, 19 nt, Artificial Sequence
  Description of Artificial Sequence: Synthetic oligonucleotide
uaaaaccucagcacaagca

SEQ ID NO: 3167326 - RNA, 19 nt, Artificial Sequence
  Description of Artificial Sequence: Synthetic oligonucleotide
uuguaaaauguauaaaaua

SEQ ID NO: 3167327 - RNA, 19 nt, Artificial Sequence
  Description of Artificial Sequence: Synthetic oligonucleotide
acagcuauagaaucuaagu

SEQ ID NO: 3167328 - RNA, 19 nt, Artificial Sequence
  Description of Artificial Sequence: Synthetic oligonucleotide
gaguaagagguucagcucc

SEQ ID NO: 3167329 - RNA, 19 nt, Artificial Sequence
  Description of Artificial Sequence: Synthetic oligonucleotide
uguuguauaaggugggcca

SEQ ID NO: 3167330 - RNA, 19 nt, Artificial Sequence
  Description of Artificial Sequence: Synthetic oligonucleotide
ucuuaauacugauccuucg

SEQ ID NO: 3167331 - RNA, 19 nt, Artificial Sequence
  Description of Artificial Sequence: Synthetic oligonucleotide
uuuacucaagcccaaguaa

SEQ ID NO: 3167332 - RNA, 19 nt, Artificial Sequence
  Description of Artificial Sequence: Synthetic oligonucleotide
uaauuaccaucucauaaga

SEQ ID NO: 3167333 - RNA, 19 nt, Artificial Sequence
  Description of Artificial Sequence: Synthetic oligonucleotide
ucuagacuugauaaaccag

SEQ ID NO: 3167334 - RNA, 19 nt, Artificial Sequence
  Description of Artificial Sequence: Synthetic oligonucleotide
accagucaaaucuaaacug

SEQ ID NO: 3167335 - RNA, 19 nt, Artificial Sequence
  Description of Artificial Sequence: Synthetic oligonucleotide
uauaaauuuaaagucugaa

SEQ ID NO: 3167336 - RNA, 19 nt, Artificial Sequence
  Description of Artificial Sequence: Synthetic oligonucleotide
ugucccaguaagaaguaag

SEQ ID NO: 3167337 - RNA, 19 nt, Artificial Sequence
  Description of Artificial Sequence: Synthetic oligonucleotide
ucucgcuuaguccaguuug

SEQ ID NO: 3167338 - RNA, 19 nt, Artificial Sequence
  Description of Artificial Sequence: Synthetic oligonucleotide
caaacaaggacugagagga

SEQ ID NO: 3167339 - RNA, 19 nt, Artificial Sequence
  Description of Artificial Sequence: Synthetic oligonucleotide
uucuagacuugauaaacca

SEQ ID NO: 3167340 - RNA, 19 nt, Artificial Sequence
  Description of Artificial Sequence: Synthetic oligonucleotide
ucaauuuccauauuuucuu

SEQ ID NO: 3167341 - RNA, 19 nt, Artificial Sequence
  Description of Artificial Sequence: Synthetic oligonucleotide
auuccuuggaaccuuauaa

SEQ ID NO: 3167342 - RNA, 19 nt, Artificial Sequence
  Description of Artificial Sequence: Synthetic oligonucleotide
acugguuccauacugaaua

SEQ ID NO: 3167343 - RNA, 19 nt, Artificial Sequence
  Description of Artificial Sequence: Synthetic oligonucleotide
uacagcuauagaaucuaag

SEQ ID NO: 3167344 - RNA, 19 nt, Artificial Sequence
  Description of Artificial Sequence: Synthetic oligonucleotide
uccuuggaaccuuauaacc

SEQ ID NO: 3167345 - RNA, 19 nt, Artificial Sequence
  Description of Artificial Sequence: Synthetic oligonucleotide
gaauuaauguguucaucug

SEQ ID NO: 3167346 - RNA, 19 nt, Artificial Sequence
  Description of Artificial Sequence: Synthetic oligonucleotide
ucauuagcuuuaauaaacu

SEQ ID NO: 3167347 - RNA, 19 nt, Artificial Sequence
  Description of Artificial Sequence: Synthetic oligonucleotide
aaaacacagcugaauacuc

SEQ ID NO: 3167348 - RNA, 19 nt, Artificial Sequence
  Description of Artificial Sequence: Synthetic oligonucleotide
gacuugauaaaccagucaa

SEQ ID NO: 3167349 - RNA, 19 nt, Artificial Sequence
  Description of Artificial Sequence: Synthetic oligonucleotide
uucauacacauuuucucug

SEQ ID NO: 3167350 - RNA, 19 nt, Artificial Sequence
  Description of Artificial Sequence: Synthetic oligonucleotide
agauagaaagcauuguaaa

SEQ ID NO: 3167351 - RNA, 19 nt, Artificial Sequence
  Description of Artificial Sequence: Synthetic oligonucleotide
uuuuacucaagcccaagua

SEQ ID NO: 3167352 - RNA, 19 nt, Artificial Sequence
  Description of Artificial Sequence: Synthetic oligonucleotide
augcacaaaauacaguaca

SEQ ID NO: 3167353 - RNA, 19 nt, Artificial Sequence
  Description of Artificial Sequence: Synthetic oligonucleotide
agauaaggaugauuacaac

SEQ ID NO: 3167354 - RNA, 19 nt, Artificial Sequence
  Description of Artificial Sequence: Synthetic oligonucleotide
auugcagcguucccaaaac

SEQ ID NO: 3167355 - RNA, 19 nt, Artificial Sequence
  Description of Artificial Sequence: Synthetic oligonucleotide
agcauuggaguuuuaguug

SEQ ID NO: 3167356 - RNA, 19 nt, Artificial Sequence
  Description of Artificial Sequence: Synthetic oligonucleotide
acauccggacaauuaaagg

SEQ ID NO: 3167357 - RNA, 19 nt, Artificial Sequence
  Description of Artificial Sequence: Synthetic oligonucleotide
agcuuuaauaaacugguua

SEQ ID NO: 3167358 - RNA, 19 nt, Artificial Sequence
  Description of Artificial Sequence: Synthetic oligonucleotide
ugaaaccuuguguaaggag

SEQ ID NO: 3167359 - RNA, 19 nt, Artificial Sequence
  Description of Artificial Sequence: Synthetic oligonucleotide
uaaccuauagucuuccgau

SEQ ID NO: 3167360 - RNA, 19 nt, Artificial Sequence
  Description of Artificial Sequence: Synthetic oligonucleotide
aaguaagcgauuaguggac

SEQ ID NO: 3167361 - RNA, 19 nt, Artificial Sequence
  Description of Artificial Sequence: Synthetic oligonucleotide
uguaauucauugcagcguu

SEQ ID NO: 3167362 - RNA, 19 nt, Artificial Sequence
  Description of Artificial Sequence: Synthetic oligonucleotide
cugaauacgcaacugauga

SEQ ID NO: 3167363 - RNA, 19 nt, Artificial Sequence
  Description of Artificial Sequence: Synthetic oligonucleotide
uacacauuuucucugucaa

SEQ ID NO: 3167364 - RNA, 19 nt, Artificial Sequence
  Description of Artificial Sequence: Synthetic oligonucleotide
uccuguaauucauugcagc

SEQ ID NO: 3167365 - RNA, 19 nt, Artificial Sequence
  Description of Artificial Sequence: Synthetic oligonucleotide
cagaauauuuaagagucgc

SEQ ID NO: 3167366 - RNA, 19 nt, Artificial Sequence
  Description of Artificial Sequence: Synthetic oligonucleotide
gaauaaaagcagcucuuac

SEQ ID NO: 3167367 - RNA, 19 nt, Artificial Sequence
  Description of Artificial Sequence: Synthetic oligonucleotide
auaaccuauagucuuccga

SEQ ID NO: 3167368 - RNA, 19 nt, Artificial Sequence
  Description of Artificial Sequence: Synthetic oligonucleotide
uauagucuuccgauaauaa

SEQ ID NO: 3167369 - RNA, 19 nt, Artificial Sequence
  Description of Artificial Sequence: Synthetic oligonucleotide
ugcacaaaauacaguacac

SEQ ID NO: 3167370 - RNA, 19 nt, Artificial Sequence
  Description of Artificial Sequence: Synthetic oligonucleotide
uaaagcccagaguucaugc

SEQ ID NO: 3167371 - RNA, 19 nt, Artificial Sequence
  Description of Artificial Sequence: Synthetic oligonucleotide
guucccaaaacacagcuga

SEQ ID NO: 3167372 - RNA, 19 nt, Artificial Sequence
  Description of Artificial Sequence: Synthetic oligonucleotide
aaguaaagcccagaguuca

SEQ ID NO: 3167373 - RNA, 19 nt, Artificial Sequence
  Description of Artificial Sequence: Synthetic oligonucleotide
aagagcauuggaguuuuag

SEQ ID NO: 3167374 - RNA, 19 nt, Artificial Sequence
  Description of Artificial Sequence: Synthetic oligonucleotide
gucaaaucuaaacugggga

SEQ ID NO: 3167375 - RNA, 19 nt, Artificial Sequence
  Description of Artificial Sequence: Synthetic oligonucleotide
gaguuuauccuucucuuca

SEQ ID NO: 3167376 - RNA, 19 nt, Artificial Sequence
  Description of Artificial Sequence: Synthetic oligonucleotide
uucuccucaaaucauuuua

SEQ ID NO: 3167377 - RNA, 19 nt, Artificial Sequence
  Description of Artificial Sequence: Synthetic oligonucleotide
uucaucuguuguauaaggu

SEQ ID NO: 3167378 - RNA, 19 nt, Artificial Sequence
  Description of Artificial Sequence: Synthetic oligonucleotide
ucucauuagcuuuaauaaa

SEQ ID NO: 3167379 - RNA, 19 nt, Artificial Sequence
  Description of Artificial Sequence: Synthetic oligonucleotide
cauuagcuuuaauaaacug

SEQ ID NO: 3167380 - RNA, 19 nt, Artificial Sequence
  Description of Artificial Sequence: Synthetic oligonucleotide
caucaaacaaacaaggacu

SEQ ID NO: 3167381 - RNA, 19 nt, Artificial Sequence
  Description of Artificial Sequence: Synthetic oligonucleotide
guucaugcagguuauucug

SEQ ID NO: 3167382 - RNA, 19 nt, Artificial Sequence
  Description of Artificial Sequence: Synthetic oligonucleotide
cauuucgucacgaauaaaa

SEQ ID NO: 3167383 - RNA, 19 nt, Artificial Sequence
  Description of Artificial Sequence: Synthetic oligonucleotide
uccgauaauaaagaauuaa

SEQ ID NO: 3167384 - RNA, 19 nt, Artificial Sequence
  Description of Artificial Sequence: Synthetic oligonucleotide
ugcaaaaucaugcuuaggg

SEQ ID NO: 3167385 - RNA, 19 nt, Artificial Sequence
  Description of Artificial Sequence: Synthetic oligonucleotide
uuucuuugaacucaggagg

SEQ ID NO: 3167386 - RNA, 19 nt, Artificial Sequence
  Description of Artificial Sequence: Synthetic oligonucleotide
aaagacuugggagaaaugg

SEQ ID NO: 3167387 - RNA, 19 nt, Artificial Sequence
  Description of Artificial Sequence: Synthetic oligonucleotide
uucaucuccagauagacug

SEQ ID NO: 3167388 - RNA, 19 nt, Artificial Sequence
  Description of Artificial Sequence: Synthetic oligonucleotide
auccauuuuaucuagccac

SEQ ID NO: 3167389 - RNA, 19 nt, Artificial Sequence
  Description of Artificial Sequence: Synthetic oligonucleotide
aauuucaguguuguguugc

SEQ ID NO: 3167390 - RNA, 19 nt, Artificial Sequence
  Description of Artificial Sequence: Synthetic oligonucleotide
ucagacagacucaugaucc

SEQ ID NO: 3167391 - RNA, 19 nt, Artificial Sequence
  Description of Artificial Sequence: Synthetic oligonucleotide
ucuucagacagacucauga

SEQ ID NO: 3167392 - RNA, 19 nt, Artificial Sequence
  Description of Artificial Sequence: Synthetic oligonucleotide
acuuagagucuauaguuac

SEQ ID NO: 3167393 - RNA, 19 nt, Artificial Sequence
  Description of Artificial Sequence: Synthetic oligonucleotide
uccucaauuucuuugaacu

SEQ ID NO: 3167394 - RNA, 19 nt, Artificial Sequence
  Description of Artificial Sequence: Synthetic oligonucleotide
uauaccaccaguucuucag

SEQ ID NO: 3167395 - RNA, 19 nt, Artificial Sequence
  Description of Artificial Sequence: Synthetic oligonucleotide
ucacaggucaacuugagaa

SEQ ID NO: 3167396 - RNA, 19 nt, Artificial Sequence
  Description of Artificial Sequence: Synthetic oligonucleotide
aaaccugcaugccuguuuc

SEQ ID NO: 3167397 - RNA, 19 nt, Artificial Sequence
  Description of Artificial Sequence: Synthetic oligonucleotide
cuuagucaugagaugaucc

SEQ ID NO: 3167398 - RNA, 19 nt, Artificial Sequence
  Description of Artificial Sequence: Synthetic oligonucleotide
uauaguuacaguuccugga

SEQ ID NO: 3167399 - RNA, 19 nt, Artificial Sequence
  Description of Artificial Sequence: Synthetic oligonucleotide
uuccuggagguuuaggugg

SEQ ID NO: 3167400 - RNA, 19 nt, Artificial Sequence
  Description of Artificial Sequence: Synthetic oligonucleotide
aagacuugggagaaauggc

SEQ ID NO: 3167401 - RNA, 19 nt, Artificial Sequence
  Description of Artificial Sequence: Synthetic oligonucleotide
gaugauccauuuuaucuag

SEQ ID NO: 3167402 - RNA, 19 nt, Artificial Sequence
  Description of Artificial Sequence: Synthetic oligonucleotide
aaaaucaugcuuagggaag

SEQ ID NO: 3167403 - RNA, 19 nt, Artificial Sequence
  Description of Artificial Sequence: Synthetic oligonucleotide
agcugguucagguaggagg

SEQ ID NO: 3167404 - RNA, 19 nt, Artificial Sequence
  Description of Artificial Sequence: Synthetic oligonucleotide
uuaucuagccacuuugcug

SEQ ID NO: 3167405 - RNA, 19 nt, Artificial Sequence
  Description of Artificial Sequence: Synthetic oligonucleotide
aauggcaggaugcuuguga

SEQ ID NO: 3167406 - RNA, 19 nt, Artificial Sequence
  Description of Artificial Sequence: Synthetic oligonucleotide
auaguuacaguuccuggag

SEQ ID NO: 3167407 - RNA, 19 nt, Artificial Sequence
  Description of Artificial Sequence: Synthetic oligonucleotide
guuuccuaggucuucaccc

SEQ ID NO: 3167408 - RNA, 19 nt, Artificial Sequence
  Description of Artificial Sequence: Synthetic oligonucleotide
uuuuaucuagccacuuugc

SEQ ID NO: 3167409 - RNA, 19 nt, Artificial Sequence
  Description of Artificial Sequence: Synthetic oligonucleotide
ugauccauuuuaucuagcc

SEQ ID NO: 3167410 - RNA, 19 nt, Artificial Sequence
  Description of Artificial Sequence: Synthetic oligonucleotide
aaaucaugcuuagggaagg

SEQ ID NO: 3167411 - RNA, 19 nt, Artificial Sequence
  Description of Artificial Sequence: Synthetic oligonucleotide
ucgaauuucaguguugugu

SEQ ID NO: 3167412 - RNA, 19 nt, Artificial Sequence
  Description of Artificial Sequence: Synthetic oligonucleotide
agaguugccccuuuaaaca

SEQ ID NO: 3167413 - RNA, 19 nt, Artificial Sequence
  Description of Artificial Sequence: Synthetic oligonucleotide
cuauaguuacaguuccugg

SEQ ID NO: 3167414 - RNA, 19 nt, Artificial Sequence
  Description of Artificial Sequence: Synthetic oligonucleotide
ucacacuuagagucuauag

SEQ ID NO: 3167415 - RNA, 19 nt, Artificial Sequence
  Description of Artificial Sequence: Synthetic oligonucleotide
uuuaucuagccacuuugcu

SEQ ID NO: 3167416 - RNA, 19 nt, Artificial Sequence
  Description of Artificial Sequence: Synthetic oligonucleotide
uucuuugaacucaggaggc

SEQ ID NO: 3167417 - RNA, 19 nt, Artificial Sequence
  Description of Artificial Sequence: Synthetic oligonucleotide
cucaccuagaccugaagcc

SEQ ID NO: 3167418 - RNA, 19 nt, Artificial Sequence
  Description of Artificial Sequence: Synthetic oligonucleotide
ugggagagaaaccugcaug

SEQ ID NO: 3167419 - RNA, 19 nt, Artificial Sequence
  Description of Artificial Sequence: Synthetic oligonucleotide
caguucuucagacagacuc

SEQ ID NO: 3167420 - RNA, 19 nt, Artificial Sequence
  Description of Artificial Sequence: Synthetic oligonucleotide
agugguuccucacacuuag

SEQ ID NO: 3167421 - RNA, 19 nt, Artificial Sequence
  Description of Artificial Sequence: Synthetic oligonucleotide
agagucuauaguuacaguu

SEQ ID NO: 3167422 - RNA, 19 nt, Artificial Sequence
  Description of Artificial Sequence: Synthetic oligonucleotide
auguucucccaauacauug

SEQ ID NO: 3167423 - RNA, 19 nt, Artificial Sequence
  Description of Artificial Sequence: Synthetic oligonucleotide
aagccgguugugcaaaauc

SEQ ID NO: 3167424 - RNA, 19 nt, Artificial Sequence
  Description of Artificial Sequence: Synthetic oligonucleotide
ugugcaaaaucaugcuuag

SEQ ID NO: 3167425 - RNA, 19 nt, Artificial Sequence
  Description of Artificial Sequence: Synthetic oligonucleotide
agcaagugguuccucacac

SEQ ID NO: 3167426 - RNA, 19 nt, Artificial Sequence
  Description of Artificial Sequence: Synthetic oligonucleotide
agacucaugauccucuuca

SEQ ID NO: 3167427 - RNA, 19 nt, Artificial Sequence
  Description of Artificial Sequence: Synthetic oligonucleotide
guaggggucacucacugag

SEQ ID NO: 3167428 - RNA, 19 nt, Artificial Sequence
  Description of Artificial Sequence: Synthetic oligonucleotide
uuugcugacugccauucga

SEQ ID NO: 3167429 - RNA, 19 nt, Artificial Sequence
  Description of Artificial Sequence: Synthetic oligonucleotide
acacuuagagucuauaguu

SEQ ID NO: 3167430 - RNA, 19 nt, Artificial Sequence
  Description of Artificial Sequence: Synthetic oligonucleotide
uugucuguguaccauucug

SEQ ID NO: 3167431 - RNA, 19 nt, Artificial Sequence
  Description of Artificial Sequence: Synthetic oligonucleotide
uucaccaggucagucaggg

SEQ ID NO: 3167432 - RNA, 19 nt, Artificial Sequence
  Description of Artificial Sequence: Synthetic oligonucleotide
aauacauuguugggcugcg

SEQ ID NO: 3167433 - RNA, 19 nt, Artificial Sequence
  Description of Artificial Sequence: Synthetic oligonucleotide
ucucugaccaucagcaagu

SEQ ID NO: 3167434 - RNA, 19 nt, Artificial Sequence
  Description of Artificial Sequence: Synthetic oligonucleotide
uguccaguaaugccucagg

SEQ ID NO: 3167435 - RNA, 19 nt, Artificial Sequence
  Description of Artificial Sequence: Synthetic oligonucleotide
acugagggcucuuauacca

SEQ ID NO: 3167436 - RNA, 19 nt, Artificial Sequence
  Description of Artificial Sequence: Synthetic oligonucleotide
uggacuaugggcuucggau

SEQ ID NO: 3167437 - RNA, 19 nt, Artificial Sequence
  Description of Artificial Sequence: Synthetic oligonucleotide
acugucuuucauuucugag

SEQ ID NO: 3167438 - RNA, 19 nt, Artificial Sequence
  Description of Artificial Sequence: Synthetic oligonucleotide
uucagacagacucaugauc

SEQ ID NO: 3167439 - RNA, 19 nt, Artificial Sequence
  Description of Artificial Sequence: Synthetic oligonucleotide
agacgucugaaccacuguc

SEQ ID NO: 3167440 - RNA, 19 nt, Artificial Sequence
  Description of Artificial Sequence: Synthetic oligonucleotide
caugagaaaggacaucaug

SEQ ID NO: 3167441 - RNA, 19 nt, Artificial Sequence
  Description of Artificial Sequence: Synthetic oligonucleotide
ugggcuucggaucuuucag

SEQ ID NO: 3167442 - RNA, 19 nt, Artificial Sequence
  Description of Artificial Sequence: Synthetic oligonucleotide
uguuggaauggggaaagcc

SEQ ID NO: 3167443 - RNA, 19 nt, Artificial Sequence
  Description of Artificial Sequence: Synthetic oligonucleotide
ucuguuggaauggggaaag

SEQ ID NO: 3167444 - RNA, 19 nt, Artificial Sequence
  Description of Artificial Sequence: Synthetic oligonucleotide
ugugacuggcugcagguga

SEQ ID NO: 3167445 - RNA, 19 nt, Artificial Sequence
  Description of Artificial Sequence: Synthetic oligonucleotide
agcaggagggcucacaggu

SEQ ID NO: 3167446 - RNA, 19 nt, Artificial Sequence
  Description of Artificial Sequence: Synthetic oligonucleotide
cagaguugccccuuuaaac

SEQ ID NO: 3167447 - RNA, 19 nt, Artificial Sequence
  Description of Artificial Sequence: Synthetic oligonucleotide
uacuuccccaacauguucu

SEQ ID NO: 3167448 - RNA, 19 nt, Artificial Sequence
  Description of Artificial Sequence: Synthetic oligonucleotide
ucagacgucugaaccacug

SEQ ID NO: 3167449 - RNA, 19 nt, Artificial Sequence
  Description of Artificial Sequence: Synthetic oligonucleotide
auggcaggaugcuugugac

SEQ ID NO: 3167450 - RNA, 19 nt, Artificial Sequence
  Description of Artificial Sequence: Synthetic oligonucleotide
uguucucccaauacauugu

SEQ ID NO: 3167451 - RNA, 19 nt, Artificial Sequence
  Description of Artificial Sequence: Synthetic oligonucleotide
caugagaugauccauuuua

SEQ ID NO: 3167452 - RNA, 19 nt, Artificial Sequence
  Description of Artificial Sequence: Synthetic oligonucleotide
gaguugccccuuuaaacag

SEQ ID NO: 3167453 - RNA, 19 nt, Artificial Sequence
  Description of Artificial Sequence: Synthetic oligonucleotide
gaauggggaaagccugugg

SEQ ID NO: 3167454 - RNA, 19 nt, Artificial Sequence
  Description of Artificial Sequence: Synthetic oligonucleotide
aaguucuguguccaguaau

SEQ ID NO: 3167455 - RNA, 19 nt, Artificial Sequence
  Description of Artificial Sequence: Synthetic oligonucleotide
uuagggaagggcugggaga

SEQ ID NO: 3167456 - RNA, 19 nt, Artificial Sequence
  Description of Artificial Sequence: Synthetic oligonucleotide
uaccauucuguuggaaugg

SEQ ID NO: 3167457 - RNA, 19 nt, Artificial Sequence
  Description of Artificial Sequence: Synthetic oligonucleotide
ucgggcuggacuaugggcu

SEQ ID NO: 3167458 - RNA, 19 nt, Artificial Sequence
  Description of Artificial Sequence: Synthetic oligonucleotide
ucccaauacauuguugggc

SEQ ID NO: 3167459 - RNA, 19 nt, Artificial Sequence
  Description of Artificial Sequence: Synthetic oligonucleotide
guuuaggugggauugaagu

SEQ ID NO: 3167460 - RNA, 19 nt, Artificial Sequence
  Description of Artificial Sequence: Synthetic oligonucleotide
ucaguguuguguugccggg

SEQ ID NO: 3167461 - RNA, 19 nt, Artificial Sequence
  Description of Artificial Sequence: Synthetic oligonucleotide
cauucuguuggaaugggga

SEQ ID NO: 3167462 - RNA, 19 nt, Artificial Sequence
  Description of Artificial Sequence: Synthetic oligonucleotide
gauccauuuuaucuagcca

SEQ ID NO: 3167463 - RNA, 19 nt, Artificial Sequence
  Description of Artificial Sequence: Synthetic oligonucleotide
acucaggaggcugagguuc

SEQ ID NO: 3167464 - RNA, 19 nt, Artificial Sequence
  Description of Artificial Sequence: Synthetic oligonucleotide
gucaacuugagaaugaaua

SEQ ID NO: 3167465 - RNA, 19 nt, Artificial Sequence
  Description of Artificial Sequence: Synthetic oligonucleotide
cuuagggaagggcugggag

SEQ ID NO: 3167466 - RNA, 19 nt, Artificial Sequence
  Description of Artificial Sequence: Synthetic oligonucleotide
aaucaugcuuagggaaggg

SEQ ID NO: 3167467 - RNA, 19 nt, Artificial Sequence
  Description of Artificial Sequence: Synthetic oligonucleotide
ugagaugauccauuuuauc

SEQ ID NO: 3167468 - RNA, 19 nt, Artificial Sequence
  Description of Artificial Sequence: Synthetic oligonucleotide
ucaugcucaccucaucuuc

SEQ ID NO: 3167469 - RNA, 19 nt, Artificial Sequence
  Description of Artificial Sequence: Synthetic oligonucleotide
gucaugagaaaggacauca

SEQ ID NO: 3167470 - RNA, 19 nt, Artificial Sequence
  Description of Artificial Sequence: Synthetic oligonucleotide
aucaugcuuagggaagggc

SEQ ID NO: 3167471 - RNA, 19 nt, Artificial Sequence
  Description of Artificial Sequence: Synthetic oligonucleotide
aaccugcaugccuguuucc

SEQ ID NO: 3167472 - RNA, 19 nt, Artificial Sequence
  Description of Artificial Sequence: Synthetic oligonucleotide
uuuaggugggauugaaguu

SEQ ID NO: 3167473 - RNA, 19 nt, Artificial Sequence
  Description of Artificial Sequence: Synthetic oligonucleotide
gguaucucugcuucugagg

SEQ ID NO: 3167474 - RNA, 19 nt, Artificial Sequence
  Description of Artificial Sequence: Synthetic oligonucleotide
aggacaucaugucaccuga

SEQ ID NO: 3167475 - RNA, 19 nt, Artificial Sequence
  Description of Artificial Sequence: Synthetic oligonucleotide
caauacauuguugggcugc

SEQ ID NO: 3167476 - RNA, 19 nt, Artificial Sequence
  Description of Artificial Sequence: Synthetic oligonucleotide
agagaaaccugcaugccug

SEQ ID NO: 3167477 - RNA, 19 nt, Artificial Sequence
  Description of Artificial Sequence: Synthetic oligonucleotide
uagaccugaagccgguugu

SEQ ID NO: 3167478 - RNA, 19 nt, Artificial Sequence
  Description of Artificial Sequence: Synthetic oligonucleotide
gaauuucaguguuguguug

SEQ ID NO: 3167479 - RNA, 19 nt, Artificial Sequence
  Description of Artificial Sequence: Synthetic oligonucleotide
cucccaauacauuguuggg

SEQ ID NO: 3167480 - RNA, 19 nt, Artificial Sequence
  Description of Artificial Sequence: Synthetic oligonucleotide
ucagguaggagggaacugu

SEQ ID NO: 3167481 - RNA, 19 nt, Artificial Sequence
  Description of Artificial Sequence: Synthetic oligonucleotide
ucaucuccagauagacugc

SEQ ID NO: 3167482 - RNA, 19 nt, Artificial Sequence
  Description of Artificial Sequence: Synthetic oligonucleotide
ugagguucuccuccugggc

SEQ ID NO: 3167483 - RNA, 19 nt, Artificial Sequence
  Description of Artificial Sequence: Synthetic oligonucleotide
caugauccucuucaccagg

SEQ ID NO: 3167484 - RNA, 19 nt, Artificial Sequence
  Description of Artificial Sequence: Synthetic oligonucleotide
uauauauucaguuuagugg

SEQ ID NO: 3167485 - RNA, 19 nt, Artificial Sequence
  Description of Artificial Sequence: Synthetic oligonucleotide
aacaugaauaauuaaacuc

SEQ ID NO: 3167486 - RNA, 19 nt, Artificial Sequence
  Description of Artificial Sequence: Synthetic oligonucleotide
aacugaauaaaccacuagc

SEQ ID NO: 3167487 - RNA, 19 nt, Artificial Sequence
  Description of Artificial Sequence: Synthetic oligonucleotide
auaaauuuaaaucuaccac

SEQ ID NO: 3167488 - RNA, 19 nt, Artificial Sequence
  Description of Artificial Sequence: Synthetic oligonucleotide
uaugauauggaacaggcag

SEQ ID NO: 3167489 - RNA, 19 nt, Artificial Sequence
  Description of Artificial Sequence: Synthetic oligonucleotide
aaaaucaggguuuuccagc

SEQ ID NO: 3167490 - RNA, 19 nt, Artificial Sequence
  Description of Artificial Sequence: Synthetic oligonucleotide
agaauagaaagcuuuaaac

SEQ ID NO: 3167491 - RNA, 19 nt, Artificial Sequence
  Description of Artificial Sequence: Synthetic oligonucleotide
aaaugugaccuuuacauag

SEQ ID NO: 3167492 - RNA, 19 nt, Artificial Sequence
  Description of Artificial Sequence: Synthetic oligonucleotide
auauauucaguuuaguggg

SEQ ID NO: 3167493 - RNA, 19 nt, Artificial Sequence
  Description of Artificial Sequence: Synthetic oligonucleotide
ugaauaauuaaacucaagu

SEQ ID NO: 3167494 - RNA, 19 nt, Artificial Sequence
  Description of Artificial Sequence: Synthetic oligonucleotide
ugaaaaugcacauaaaacu

SEQ ID NO: 3167495 - RNA, 19 nt, Artificial Sequence
  Description of Artificial Sequence: Synthetic oligonucleotide
cuaauuauauuugagauag

SEQ ID NO: 3167496 - RNA, 19 nt, Artificial Sequence
  Description of Artificial Sequence: Synthetic oligonucleotide
aaagccuggaaucugacag

SEQ ID NO: 3167497 - RNA, 19 nt, Artificial Sequence
  Description of Artificial Sequence: Synthetic oligonucleotide
uaaauuuaaaucuaccaca

SEQ ID NO: 3167498 - RNA, 19 nt, Artificial Sequence
  Description of Artificial Sequence: Synthetic oligonucleotide
agcguaauaauacagagug

SEQ ID NO: 3167499 - RNA, 19 nt, Artificial Sequence
  Description of Artificial Sequence: Synthetic oligonucleotide
auuagaggagaauagaaag

SEQ ID NO: 3167500 - RNA, 19 nt, Artificial Sequence
  Description of Artificial Sequence: Synthetic oligonucleotide
aaaauguaaaaugugaccu

SEQ ID NO: 3167501 - RNA, 19 nt, Artificial Sequence
  Description of Artificial Sequence: Synthetic oligonucleotide
uaauaaauuccucuaaugu

SEQ ID NO: 3167502 - RNA, 19 nt, Artificial Sequence
  Description of Artificial Sequence: Synthetic oligonucleotide
aauauaucaaagcaccaca

SEQ ID NO: 3167503 - RNA, 19 nt, Artificial Sequence
  Description of Artificial Sequence: Synthetic oligonucleotide
aaguguaucaugcuaaacu

SEQ ID NO: 3167504 - RNA, 19 nt, Artificial Sequence
  Description of Artificial Sequence: Synthetic oligonucleotide
uguaucaugcuaaacuuag

SEQ ID NO: 3167505 - RNA, 19 nt, Artificial Sequence
  Description of Artificial Sequence: Synthetic oligonucleotide
aauuauauuugagauagcu

SEQ ID NO: 3167506 - RNA, 19 nt, Artificial Sequence
  Description of Artificial Sequence: Synthetic oligonucleotide
ugaauuaauauucauucuc

SEQ ID NO: 3167507 - RNA, 19 nt, Artificial Sequence
  Description of Artificial Sequence: Synthetic oligonucleotide
ugauuacauaaaaucaggg

SEQ ID NO: 3167508 - RNA, 19 nt, Artificial Sequence
  Description of Artificial Sequence: Synthetic oligonucleotide
uucuagauuauagauauag

SEQ ID NO: 3167509 - RNA, 19 nt, Artificial Sequence
  Description of Artificial Sequence: Synthetic oligonucleotide
cacccuaagaauuauauag

SEQ ID NO: 3167510 - RNA, 19 nt, Artificial Sequence
  Description of Artificial Sequence: Synthetic oligonucleotide
aauaauacagaguguuuug

SEQ ID NO: 3167511 - RNA, 19 nt, Artificial Sequence
  Description of Artificial Sequence: Synthetic oligonucleotide
gaauaauuaaacucaaguc

SEQ ID NO: 3167512 - RNA, 19 nt, Artificial Sequence
  Description of Artificial Sequence: Synthetic oligonucleotide
uuacauagcguaauaauac

SEQ ID NO: 3167513 - RNA, 19 nt, Artificial Sequence
  Description of Artificial Sequence: Synthetic oligonucleotide
uugauugcaaaguugaaga

SEQ ID NO: 3167514 - RNA, 19 nt, Artificial Sequence
  Description of Artificial Sequence: Synthetic oligonucleotide
aucaugcuaaacuuagugc

SEQ ID NO: 3167515 - RNA, 19 nt, Artificial Sequence
  Description of Artificial Sequence: Synthetic oligonucleotide
aauaaauuccucuaaugua

SEQ ID NO: 3167516 - RNA, 19 nt, Artificial Sequence
  Description of Artificial Sequence: Synthetic oligonucleotide
uaucaaagcaccacauugg

SEQ ID NO: 3167517 - RNA, 19 nt, Artificial Sequence
  Description of Artificial Sequence: Synthetic oligonucleotide
uguauggugaacaauguaa

SEQ ID NO: 3167518 - RNA, 19 nt, Artificial Sequence
  Description of Artificial Sequence: Synthetic oligonucleotide
uaucaugcuaaacuuagug

SEQ ID NO: 3167519 - RNA, 19 nt, Artificial Sequence
  Description of Artificial Sequence: Synthetic oligonucleotide
uuaaaucuaccacauaagu

SEQ ID NO: 3167520 - RNA, 19 nt, Artificial Sequence
  Description of Artificial Sequence: Synthetic oligonucleotide
aauuccucuaauguaagag

SEQ ID NO: 3167521 - RNA, 19 nt, Artificial Sequence
  Description of Artificial Sequence: Synthetic oligonucleotide
ucaaguuugaguaaacguc

SEQ ID NO: 3167522 - RNA, 19 nt, Artificial Sequence
  Description of Artificial Sequence: Synthetic oligonucleotide
agaucuguggauucugugc

SEQ ID NO: 3167523 - RNA, 19 nt, Artificial Sequence
  Description of Artificial Sequence: Synthetic oligonucleotide
aauuauauagaaaagugua

SEQ ID NO: 3167524 - RNA, 19 nt, Artificial Sequence
  Description of Artificial Sequence: Synthetic oligonucleotide
aaauggauuaaaaguuugc

SEQ ID NO: 3167525 - RNA, 19 nt, Artificial Sequence
  Description of Artificial Sequence: Synthetic oligonucleotide
uggguaaugaaauaacuga

SEQ ID NO: 3167526 - RNA, 19 nt, Artificial Sequence
  Description of Artificial Sequence: Synthetic oligonucleotide
uuugcaaaguauauauuca

SEQ ID NO: 3167527 - RNA, 19 nt, Artificial Sequence
  Description of Artificial Sequence: Synthetic oligonucleotide
uaugagaggauucuuuagc

SEQ ID NO: 3167528 - RNA, 19 nt, Artificial Sequence
  Description of Artificial Sequence: Synthetic oligonucleotide
auuaauauucauucucaag

SEQ ID NO: 3167529 - RNA, 19 nt, Artificial Sequence
  Description of Artificial Sequence: Synthetic oligonucleotide
agucaaaauggauuaaaag

SEQ ID NO: 3167530 - RNA, 19 nt, Artificial Sequence
  Description of Artificial Sequence: Synthetic oligonucleotide
aagagauguacucaugcug

SEQ ID NO: 3167531 - RNA, 19 nt, Artificial Sequence
  Description of Artificial Sequence: Synthetic oligonucleotide
uccaauuacuucuagauua

SEQ ID NO: 3167532 - RNA, 19 nt, Artificial Sequence
  Description of Artificial Sequence: Synthetic oligonucleotide
augagaggauucuuuagcc

SEQ ID NO: 3167533 - RNA, 19 nt, Artificial Sequence
  Description of Artificial Sequence: Synthetic oligonucleotide
augaaaaugcacauaaaac

SEQ ID NO: 3167534 - RNA, 19 nt, Artificial Sequence
  Description of Artificial Sequence: Synthetic oligonucleotide
acuucuagauuauagauau

SEQ ID NO: 3167535 - RNA, 19 nt, Artificial Sequence
  Description of Artificial Sequence: Synthetic oligonucleotide
gaauaaaccacuagcaccc

SEQ ID NO: 3167536 - RNA, 19 nt, Artificial Sequence
  Description of Artificial Sequence: Synthetic oligonucleotide
auagcguaauaauacagag

SEQ ID NO: 3167537 - RNA, 19 nt, Artificial Sequence
  Description of Artificial Sequence: Synthetic oligonucleotide
accacucacaauuuguuac

SEQ ID NO: 3167538 - RNA, 19 nt, Artificial Sequence
  Description of Artificial Sequence: Synthetic oligonucleotide
uacuaauuauauuugagau

SEQ ID NO: 3167539 - RNA, 19 nt, Artificial Sequence
  Description of Artificial Sequence: Synthetic oligonucleotide
aauuaaagaauccucucuu

SEQ ID NO: 3167540 - RNA, 19 nt, Artificial Sequence
  Description of Artificial Sequence: Synthetic oligonucleotide
uaaacgucagguaacucag

SEQ ID NO: 3167541 - RNA, 19 nt, Artificial Sequence
  Description of Artificial Sequence: Synthetic oligonucleotide
cauaagucaucauugcucc

SEQ ID NO: 3167542 - RNA, 19 nt, Artificial Sequence
  Description of Artificial Sequence: Synthetic oligonucleotide
cugagaaugagaucugugg

SEQ ID NO: 3167543 - RNA, 19 nt, Artificial Sequence
  Description of Artificial Sequence: Synthetic oligonucleotide
uuugagauagcuccaauua

SEQ ID NO: 3167544 - RNA, 19 nt, Artificial Sequence
  Description of Artificial Sequence: Synthetic oligonucleotide
aacuccacuaagaaaugcc

SEQ ID NO: 3167545 - RNA, 19 nt, Artificial Sequence
  Description of Artificial Sequence: Synthetic oligonucleotide
uugauuuaaaucaccuuca

SEQ ID NO: 3167546 - RNA, 19 nt, Artificial Sequence
  Description of Artificial Sequence: Synthetic oligonucleotide
aauaacugaauaaaccacu

SEQ ID NO: 3167547 - RNA, 19 nt, Artificial Sequence
  Description of Artificial Sequence: Synthetic oligonucleotide
uaaugaaauaacugaauaa

SEQ ID NO: 3167548 - RNA, 19 nt, Artificial Sequence
  Description of Artificial Sequence: Synthetic oligonucleotide
aaaagaauaugauuacaua

SEQ ID NO: 3167549 - RNA, 19 nt, Artificial Sequence
  Description of Artificial Sequence: Synthetic oligonucleotide
aauggauuaaaaguuugca

SEQ ID NO: 3167550 - RNA, 19 nt, Artificial Sequence
  Description of Artificial Sequence: Synthetic oligonucleotide
uggugaacaauguaagaag

SEQ ID NO: 3167551 - RNA, 19 nt, Artificial Sequence
  Description of Artificial Sequence: Synthetic oligonucleotide
ucagguucagguaauaaau

SEQ ID NO: 3167552 - RNA, 19 nt, Artificial Sequence
  Description of Artificial Sequence: Synthetic oligonucleotide
uaauguaagagauguacuc

SEQ ID NO: 3167553 - RNA, 19 nt, Artificial Sequence
  Description of Artificial Sequence: Synthetic oligonucleotide
uugcaaaguauauauucag

SEQ ID NO: 3167554 - RNA, 19 nt, Artificial Sequence
  Description of Artificial Sequence: Synthetic oligonucleotide
accgauucuacauuuagcu

SEQ ID NO: 3167555 - RNA, 19 nt, Artificial Sequence
  Description of Artificial Sequence: Synthetic oligonucleotide
uuguuacuaauuauauuug

SEQ ID NO: 3167556 - RNA, 19 nt, Artificial Sequence
  Description of Artificial Sequence: Synthetic oligonucleotide
uugaagaauuaaagaaucc

SEQ ID NO: 3167557 - RNA, 19 nt, Artificial Sequence
  Description of Artificial Sequence: Synthetic oligonucleotide
uaaaaucaggguuuuccag

SEQ ID NO: 3167558 - RNA, 19 nt, Artificial Sequence
  Description of Artificial Sequence: Synthetic oligonucleotide
aaucauuagaggagaauag

SEQ ID NO: 3167559 - RNA, 19 nt, Artificial Sequence
  Description of Artificial Sequence: Synthetic oligonucleotide
aaacuccacuaagaaaugc

SEQ ID NO: 3167560 - RNA, 19 nt, Artificial Sequence
  Description of Artificial Sequence: Synthetic oligonucleotide
uguaaaaugugaccuuuac

SEQ ID NO: 3167561 - RNA, 19 nt, Artificial Sequence
  Description of Artificial Sequence: Synthetic oligonucleotide
acaugaauaauuaaacuca

SEQ ID NO: 3167562 - RNA, 19 nt, Artificial Sequence
  Description of Artificial Sequence: Synthetic oligonucleotide
gucaaaauggauuaaaagu

SEQ ID NO: 3167563 - RNA, 19 nt, Artificial Sequence
  Description of Artificial Sequence: Synthetic oligonucleotide
uuaaacucaagucaccguu

SEQ ID NO: 3167564 - RNA, 19 nt, Artificial Sequence
  Description of Artificial Sequence: Synthetic oligonucleotide
uaaccuuuucguaugccag

SEQ ID NO: 3167565 - RNA, 19 nt, Artificial Sequence
  Description of Artificial Sequence: Synthetic oligonucleotide
aaugugaccuuuacauagc

SEQ ID NO: 3167566 - RNA, 19 nt, Artificial Sequence
  Description of Artificial Sequence: Synthetic oligonucleotide
uguacucaugcugagaaug

SEQ ID NO: 3167567 - RNA, 19 nt, Artificial Sequence
  Description of Artificial Sequence: Synthetic oligonucleotide
uucacagacucuuauggca

SEQ ID NO: 3167568 - RNA, 19 nt, Artificial Sequence
  Description of Artificial Sequence: Synthetic oligonucleotide
ucauuagaggagaauagaa

SEQ ID NO: 3167569 - RNA, 19 nt, Artificial Sequence
  Description of Artificial Sequence: Synthetic oligonucleotide
uaugccaguuuucaguuga

SEQ ID NO: 3167570 - RNA, 19 nt, Artificial Sequence
  Description of Artificial Sequence: Synthetic oligonucleotide
aauuggcccuuguucaagg

SEQ ID NO: 3167571 - RNA, 19 nt, Artificial Sequence
  Description of Artificial Sequence: Synthetic oligonucleotide
ucaguugauugcaaaguug

SEQ ID NO: 3167572 - RNA, 19 nt, Artificial Sequence
  Description of Artificial Sequence: Synthetic oligonucleotide
cugugcuugauuuaaauca

SEQ ID NO: 3167573 - RNA, 19 nt, Artificial Sequence
  Description of Artificial Sequence: Synthetic oligonucleotide
uaauuaaacucaagucacc

SEQ ID NO: 3167574 - RNA, 19 nt, Artificial Sequence
  Description of Artificial Sequence: Synthetic oligonucleotide
uucugacauaaccuuuucg

SEQ ID NO: 3167575 - RNA, 19 nt, Artificial Sequence
  Description of Artificial Sequence: Synthetic oligonucleotide
ucugagacuccaaaucacc

SEQ ID NO: 3167576 - RNA, 19 nt, Artificial Sequence
  Description of Artificial Sequence: Synthetic oligonucleotide
aauauucauucucaaguuu

SEQ ID NO: 3167577 - RNA, 19 nt, Artificial Sequence
  Description of Artificial Sequence: Synthetic oligonucleotide
uguuaaguccccauaaauu

SEQ ID NO: 3167578 - RNA, 19 nt, Artificial Sequence
  Description of Artificial Sequence: Synthetic oligonucleotide
accacuagcacccuaagaa

SEQ ID NO: 3167579 - RNA, 19 nt, Artificial Sequence
  Description of Artificial Sequence: Synthetic oligonucleotide
uggaaucugacagaaaugu

SEQ ID NO: 3167580 - RNA, 19 nt, Artificial Sequence
  Description of Artificial Sequence: Synthetic oligonucleotide
agccuaaaagccuggaauc

SEQ ID NO: 3167581 - RNA, 19 nt, Artificial Sequence
  Description of Artificial Sequence: Synthetic oligonucleotide
uuaaaagaauaugauuaca

SEQ ID NO: 3167582 - RNA, 19 nt, Artificial Sequence
  Description of Artificial Sequence: Synthetic oligonucleotide
auuauauuugagauagcuc

SEQ ID NO: 3167583 - RNA, 19 nt, Artificial Sequence
  Description of Artificial Sequence: Synthetic oligonucleotide
augauuacauaaaaucagg

SEQ ID NO: 3167584 - RNA, 19 nt, Artificial Sequence
  Description of Artificial Sequence: Synthetic oligonucleotide
acguaaauaaauuugaagu

SEQ ID NO: 3167585 - RNA, 19 nt, Artificial Sequence
  Description of Artificial Sequence: Synthetic oligonucleotide
ugaagaauauuccugcagg

SEQ ID NO: 3167586 - RNA, 19 nt, Artificial Sequence
  Description of Artificial Sequence: Synthetic oligonucleotide
uuuaauguccuucaagucu

SEQ ID NO: 3167587 - RNA, 19 nt, Artificial Sequence
  Description of Artificial Sequence: Synthetic oligonucleotide
guuuaauucaacaagauga

SEQ ID NO: 3167588 - RNA, 19 nt, Artificial Sequence
  Description of Artificial Sequence: Synthetic oligonucleotide
ugagauaacauccacguaa

SEQ ID NO: 3167589 - RNA, 19 nt, Artificial Sequence
  Description of Artificial Sequence: Synthetic oligonucleotide
aaaacugucccuguuacuc

SEQ ID NO: 3167590 - RNA, 19 nt, Artificial Sequence
  Description of Artificial Sequence: Synthetic oligonucleotide
auaacauccacguaaauaa

SEQ ID NO: 3167591 - RNA, 19 nt, Artificial Sequence
  Description of Artificial Sequence: Synthetic oligonucleotide
aacaagaugacuuucuuua

SEQ ID NO: 3167592 - RNA, 19 nt, Artificial Sequence
  Description of Artificial Sequence: Synthetic oligonucleotide
uaaauuugaaguuuccuac

SEQ ID NO: 3167593 - RNA, 19 nt, Artificial Sequence
  Description of Artificial Sequence: Synthetic oligonucleotide
ucuuuaauguccuucaagu

SEQ ID NO: 3167594 - RNA, 19 nt, Artificial Sequence
  Description of Artificial Sequence: Synthetic oligonucleotide
auaaccauugagcagaagu

SEQ ID NO: 3167595 - RNA, 19 nt, Artificial Sequence
  Description of Artificial Sequence: Synthetic oligonucleotide
augacuuucuuuaaugucc

SEQ ID NO: 3167596 - RNA, 19 nt, Artificial Sequence
  Description of Artificial Sequence: Synthetic oligonucleotide
uguuuaauucaacaagaug

SEQ ID NO: 3167597 - RNA, 19 nt, Artificial Sequence
  Description of Artificial Sequence: Synthetic oligonucleotide
uuuaauucaacaagaugac

SEQ ID NO: 3167598 - RNA, 19 nt, Artificial Sequence
  Description of Artificial Sequence: Synthetic oligonucleotide
ugugccuuuauucucuuag

SEQ ID NO: 3167599 - RNA, 19 nt, Artificial Sequence
  Description of Artificial Sequence: Synthetic oligonucleotide
caauguuuaauucaacaag

SEQ ID NO: 3167600 - RNA, 19 nt, Artificial Sequence
  Description of Artificial Sequence: Synthetic oligonucleotide
aauguuuaauucaacaaga

SEQ ID NO: 3167601 - RNA, 19 nt, Artificial Sequence
  Description of Artificial Sequence: Synthetic oligonucleotide
aaguguugaagaauauucc

SEQ ID NO: 3167602 - RNA, 19 nt, Artificial Sequence
  Description of Artificial Sequence: Synthetic oligonucleotide
ucugagauaacauccacgu

SEQ ID NO: 3167603 - RNA, 19 nt, Artificial Sequence
  Description of Artificial Sequence: Synthetic oligonucleotide
uugauuuugagggagucgg

SEQ ID NO: 3167604 - RNA, 19 nt, Artificial Sequence
  Description of Artificial Sequence: Synthetic oligonucleotide
uaauucaacaagaugacuu

SEQ ID NO: 3167605 - RNA, 19 nt, Artificial Sequence
  Description of Artificial Sequence: Synthetic oligonucleotide
uaaauaaauuugaaguuuc

SEQ ID NO: 3167606 - RNA, 19 nt, Artificial Sequence
  Description of Artificial Sequence: Synthetic oligonucleotide
uuuguuguuaagcaugccu

SEQ ID NO: 3167607 - RNA, 19 nt, Artificial Sequence
  Description of Artificial Sequence: Synthetic oligonucleotide
uuacagauaaugucuauga

SEQ ID NO: 3167608 - RNA, 19 nt, Artificial Sequence
  Description of Artificial Sequence: Synthetic oligonucleotide
uuugaaguuuccuacuuug

SEQ ID NO: 3167609 - RNA, 19 nt, Artificial Sequence
  Description of Artificial Sequence: Synthetic oligonucleotide
uacuuuguuguuaagcaug

SEQ ID NO: 3167610 - RNA, 19 nt, Artificial Sequence
  Description of Artificial Sequence: Synthetic oligonucleotide
ccuuucuugauuuugaggg

SEQ ID NO: 3167611 - RNA, 19 nt, Artificial Sequence
  Description of Artificial Sequence: Synthetic oligonucleotide
ugugaaaucagugugcacu

SEQ ID NO: 3167612 - RNA, 19 nt, Artificial Sequence
  Description of Artificial Sequence: Synthetic oligonucleotide
uuguuguuaagcaugccug

SEQ ID NO: 3167613 - RNA, 19 nt, Artificial Sequence
  Description of Artificial Sequence: Synthetic oligonucleotide
aauaaauuugaaguuuccu

SEQ ID NO: 3167614 - RNA, 19 nt, Artificial Sequence
  Description of Artificial Sequence: Synthetic oligonucleotide
uucugagauaacauccacg

SEQ ID NO: 3167615 - RNA, 19 nt, Artificial Sequence
  Description of Artificial Sequence: Synthetic oligonucleotide
uucuuuaauguccuucaag

SEQ ID NO: 3167616 - RNA, 19 nt, Artificial Sequence
  Description of Artificial Sequence: Synthetic oligonucleotide
uugaagaauauuccugcag

SEQ ID NO: 3167617 - RNA, 19 nt, Artificial Sequence
  Description of Artificial Sequence: Synthetic oligonucleotide
uccacguaaauaaauuuga

SEQ ID NO: 3167618 - RNA, 19 nt, Artificial Sequence
  Description of Artificial Sequence: Synthetic oligonucleotide
cucuucugagauaacaucc

SEQ ID NO: 3167619 - RNA, 19 nt, Artificial Sequence
  Description of Artificial Sequence: Synthetic oligonucleotide
uaaccauugagcagaagug

SEQ ID NO: 3167620 - RNA, 19 nt, Artificial Sequence
  Description of Artificial Sequence: Synthetic oligonucleotide
ugucauagggacuuggugu

SEQ ID NO: 3167621 - RNA, 19 nt, Artificial Sequence
  Description of Artificial Sequence: Synthetic oligonucleotide
aaguuuccuacuuuguugu

SEQ ID NO: 3167622 - RNA, 19 nt, Artificial Sequence
  Description of Artificial Sequence: Synthetic oligonucleotide
aaauuugaaguuuccuacu

SEQ ID NO: 3167623 - RNA, 19 nt, Artificial Sequence
  Description of Artificial Sequence: Synthetic oligonucleotide
agaauauuccugcagguga

SEQ ID NO: 3167624 - RNA, 19 nt, Artificial Sequence
  Description of Artificial Sequence: Synthetic oligonucleotide
gaaguguugaagaauauuc

SEQ ID NO: 3167625 - RNA, 19 nt, Artificial Sequence
  Description of Artificial Sequence: Synthetic oligonucleotide
uacucguuccaucugaaca

SEQ ID NO: 3167626 - RNA, 19 nt, Artificial Sequence
  Description of Artificial Sequence: Synthetic oligonucleotide
uuggugugaaaucagugug

SEQ ID NO: 3167627 - RNA, 19 nt, Artificial Sequence
  Description of Artificial Sequence: Synthetic oligonucleotide
uguccuucaagucuuccag

SEQ ID NO: 3167628 - RNA, 19 nt, Artificial Sequence
  Description of Artificial Sequence: Synthetic oligonucleotide
auaaauuugaaguuuccua

SEQ ID NO: 3167629 - RNA, 19 nt, Artificial Sequence
  Description of Artificial Sequence: Synthetic oligonucleotide
ugagcagaaguguugaaga

SEQ ID NO: 3167630 - RNA, 19 nt, Artificial Sequence
  Description of Artificial Sequence: Synthetic oligonucleotide
cacguaaauaaauuugaag

SEQ ID NO: 3167631 - RNA, 19 nt, Artificial Sequence
  Description of Artificial Sequence: Synthetic oligonucleotide
aauggcccugaguagggac

SEQ ID NO: 3167632 - RNA, 19 nt, Artificial Sequence
  Description of Artificial Sequence: Synthetic oligonucleotide
auuggcaauguuuaauuca

SEQ ID NO: 3167633 - RNA, 19 nt, Artificial Sequence
  Description of Artificial Sequence: Synthetic oligonucleotide
uuuacugcuucgcugugcc

SEQ ID NO: 3167634 - RNA, 19 nt, Artificial Sequence
  Description of Artificial Sequence: Synthetic oligonucleotide
aaacugucccuguuacucg

SEQ ID NO: 3167635 - RNA, 19 nt, Artificial Sequence
  Description of Artificial Sequence: Synthetic oligonucleotide
ucuuuuacugcuucgcugu

SEQ ID NO: 3167636 - RNA, 19 nt, Artificial Sequence
  Description of Artificial Sequence: Synthetic oligonucleotide
aauucaacaagaugacuuu

SEQ ID NO: 3167637 - RNA, 19 nt, Artificial Sequence
  Description of Artificial Sequence: Synthetic oligonucleotide
ucagugugcacucuggcac

SEQ ID NO: 3167638 - RNA, 19 nt, Artificial Sequence
  Description of Artificial Sequence: Synthetic oligonucleotide
uuuacagauaaugucuaug

SEQ ID NO: 3167639 - RNA, 19 nt, Artificial Sequence
  Description of Artificial Sequence: Synthetic oligonucleotide
ucaucauccagucgaaaac

SEQ ID NO: 3167640 - RNA, 19 nt, Artificial Sequence
  Description of Artificial Sequence: Synthetic oligonucleotide
aguguugaagaauauuccu

SEQ ID NO: 3167641 - RNA, 19 nt, Artificial Sequence
  Description of Artificial Sequence: Synthetic oligonucleotide
uccuucaagucuuccaggg

SEQ ID NO: 3167642 - RNA, 19 nt, Artificial Sequence
  Description of Artificial Sequence: Synthetic oligonucleotide
ugaguagggacugucauca

SEQ ID NO: 3167643 - RNA, 19 nt, Artificial Sequence
  Description of Artificial Sequence: Synthetic oligonucleotide
uccuuucuugauuuugagg

SEQ ID NO: 3167644 - RNA, 19 nt, Artificial Sequence
  Description of Artificial Sequence: Synthetic oligonucleotide
uucaacaagaugacuuucu

SEQ ID NO: 3167645 - RNA, 19 nt, Artificial Sequence
  Description of Artificial Sequence: Synthetic oligonucleotide
aauuugaaguuuccuacuu

SEQ ID NO: 3167646 - RNA, 19 nt, Artificial Sequence
  Description of Artificial Sequence: Synthetic oligonucleotide
uuguuaagcaugccugucc

SEQ ID NO: 3167647 - RNA, 19 nt, Artificial Sequence
  Description of Artificial Sequence: Synthetic oligonucleotide
acucguuccaucugaacag

SEQ ID NO: 3167648 - RNA, 19 nt, Artificial Sequence
  Description of Artificial Sequence: Synthetic oligonucleotide
uuggcaauguuuaauucaa

SEQ ID NO: 3167649 - RNA, 19 nt, Artificial Sequence
  Description of Artificial Sequence: Synthetic oligonucleotide
uguuacucguuccaucuga

SEQ ID NO: 3167650 - RNA, 19 nt, Artificial Sequence
  Description of Artificial Sequence: Synthetic oligonucleotide
uguuaagcaugccugucca

SEQ ID NO: 3167651 - RNA, 19 nt, Artificial Sequence
  Description of Artificial Sequence: Synthetic oligonucleotide
ucuucugagauaacaucca

SEQ ID NO: 3167652 - RNA, 19 nt, Artificial Sequence
  Description of Artificial Sequence: Synthetic oligonucleotide
gaugacuuucuuuaauguc

SEQ ID NO: 3167653 - RNA, 19 nt, Artificial Sequence
  Description of Artificial Sequence: Synthetic oligonucleotide
uuucuugauuuugagggag

SEQ ID NO: 3167654 - RNA, 19 nt, Artificial Sequence
  Description of Artificial Sequence: Synthetic oligonucleotide
uuaauguccuucaagucuu

SEQ ID NO: 3167655 - RNA, 19 nt, Artificial Sequence
  Description of Artificial Sequence: Synthetic oligonucleotide
acuuucuuuaauguccuuc

SEQ ID NO: 3167656 - RNA, 19 nt, Artificial Sequence
  Description of Artificial Sequence: Synthetic oligonucleotide
ucucauaaccauugagcag

SEQ ID NO: 3167657 - RNA, 19 nt, Artificial Sequence
  Description of Artificial Sequence: Synthetic oligonucleotide
ccuuuauucucuuaggagc

SEQ ID NO: 3167658 - RNA, 19 nt, Artificial Sequence
  Description of Artificial Sequence: Synthetic oligonucleotide
ugaaucugcuccaggaacu

SEQ ID NO: 3167659 - RNA, 19 nt, Artificial Sequence
  Description of Artificial Sequence: Synthetic oligonucleotide
auaaugucuaugaugucuc

SEQ ID NO: 3167660 - RNA, 19 nt, Artificial Sequence
  Description of Artificial Sequence: Synthetic oligonucleotide
acuuuguuguuaagcaugc

SEQ ID NO: 3167661 - RNA, 19 nt, Artificial Sequence
  Description of Artificial Sequence: Synthetic oligonucleotide
aauguccuucaagucuucc

SEQ ID NO: 3167662 - RNA, 19 nt, Artificial Sequence
  Description of Artificial Sequence: Synthetic oligonucleotide
uccugcagagucuuggugc

SEQ ID NO: 3167663 - RNA, 19 nt, Artificial Sequence
  Description of Artificial Sequence: Synthetic oligonucleotide
ucucuuaggagcugcuucc

SEQ ID NO: 3167664 - RNA, 19 nt, Artificial Sequence
  Description of Artificial Sequence: Synthetic oligonucleotide
aagaauauuccugcaggug

SEQ ID NO: 3167665 - RNA, 19 nt, Artificial Sequence
  Description of Artificial Sequence: Synthetic oligonucleotide
cagauaaugucuaugaugu

SEQ ID NO: 3167666 - RNA, 19 nt, Artificial Sequence
  Description of Artificial Sequence: Synthetic oligonucleotide
aaaucagugugcacucugg

SEQ ID NO: 3167667 - RNA, 19 nt, Artificial Sequence
  Description of Artificial Sequence: Synthetic oligonucleotide
cuuccagggucucauaacc

SEQ ID NO: 3167668 - RNA, 19 nt, Artificial Sequence
  Description of Artificial Sequence: Synthetic oligonucleotide
agaugacuuucuuuaaugu

SEQ ID NO: 3167669 - RNA, 19 nt, Artificial Sequence
  Description of Artificial Sequence: Synthetic oligonucleotide
aguagggacugucaucauc

SEQ ID NO: 3167670 - RNA, 19 nt, Artificial Sequence
  Description of Artificial Sequence: Synthetic oligonucleotide
gaaaucagugugcacucug

SEQ ID NO: 3167671 - RNA, 19 nt, Artificial Sequence
  Description of Artificial Sequence: Synthetic oligonucleotide
ugccuuuauucucuuagga

SEQ ID NO: 3167672 - RNA, 19 nt, Artificial Sequence
  Description of Artificial Sequence: Synthetic oligonucleotide
uugagcagaaguguugaag

SEQ ID NO: 3167673 - RNA, 19 nt, Artificial Sequence
  Description of Artificial Sequence: Synthetic oligonucleotide
ucuccuuucuugauuuuga

SEQ ID NO: 3167674 - RNA, 19 nt, Artificial Sequence
  Description of Artificial Sequence: Synthetic oligonucleotide
gucucauaaccauugagca

SEQ ID NO: 3167675 - RNA, 19 nt, Artificial Sequence
  Description of Artificial Sequence: Synthetic oligonucleotide
uccagucgaaaacuguccc

SEQ ID NO: 3167676 - RNA, 19 nt, Artificial Sequence
  Description of Artificial Sequence: Synthetic oligonucleotide
uauuccugcaggugaaucu

SEQ ID NO: 3167677 - RNA, 19 nt, Artificial Sequence
  Description of Artificial Sequence: Synthetic oligonucleotide
uucgcugugccuuuauucu

SEQ ID NO: 3167678 - RNA, 19 nt, Artificial Sequence
  Description of Artificial Sequence: Synthetic oligonucleotide
uccuacuuuguuguuaagc

SEQ ID NO: 3167679 - RNA, 19 nt, Artificial Sequence
  Description of Artificial Sequence: Synthetic oligonucleotide
uuuccuacuuuguuguuaa

SEQ ID NO: 3167680 - RNA, 19 nt, Artificial Sequence
  Description of Artificial Sequence: Synthetic oligonucleotide
uggugugaaaucagugugc

SEQ ID NO: 3167681 - RNA, 19 nt, Artificial Sequence
  Description of Artificial Sequence: Synthetic oligonucleotide
ugacuuucuuuaauguccu

SEQ ID NO: 3167682 - RNA, 19 nt, Artificial Sequence
  Description of Artificial Sequence: Synthetic oligonucleotide
guagggacugucaucaucc

SEQ ID NO: 3167683 - RNA, 19 nt, Artificial Sequence
  Description of Artificial Sequence: Synthetic oligonucleotide
uucucuuaggagcugcuuc

SEQ ID NO: 3167684 - RNA, 19 nt, Artificial Sequence
  Description of Artificial Sequence: Synthetic oligonucleotide
uuuagaagcaaccagaucu

SEQ ID NO: 3167685 - RNA, 19 nt, Artificial Sequence
  Description of Artificial Sequence: Synthetic oligonucleotide
uuugauagcccuuggagcg

SEQ ID NO: 3167686 - RNA, 19 nt, Artificial Sequence
  Description of Artificial Sequence: Synthetic oligonucleotide
ugauuccugauuuugauag

SEQ ID NO: 3167687 - RNA, 19 nt, Artificial Sequence
  Description of Artificial Sequence: Synthetic oligonucleotide
agaggcagagcucugagcc

SEQ ID NO: 3167688 - RNA, 19 nt, Artificial Sequence
  Description of Artificial Sequence: Synthetic oligonucleotide
uccaucuucaucuucauca

SEQ ID NO: 3167689 - RNA, 19 nt, Artificial Sequence
  Description of Artificial Sequence: Synthetic oligonucleotide
auuuugauagcccuuggag

SEQ ID NO: 3167690 - RNA, 19 nt, Artificial Sequence
  Description of Artificial Sequence: Synthetic oligonucleotide
ugguuauaugugcugaacg

SEQ ID NO: 3167691 - RNA, 19 nt, Artificial Sequence
  Description of Artificial Sequence: Synthetic oligonucleotide
uuuugauagcccuuggagc

SEQ ID NO: 3167692 - RNA, 19 nt, Artificial Sequence
  Description of Artificial Sequence: Synthetic oligonucleotide
uucaucuucaucaggcacc

SEQ ID NO: 3167693 - RNA, 19 nt, Artificial Sequence
  Description of Artificial Sequence: Synthetic oligonucleotide
aucuucaucuucaucaggc

SEQ ID NO: 3167694 - RNA, 19 nt, Artificial Sequence
  Description of Artificial Sequence: Synthetic oligonucleotide
ucuucagugguuauaugug

SEQ ID NO: 3167695 - RNA, 19 nt, Artificial Sequence
  Description of Artificial Sequence: Synthetic oligonucleotide
agugauuguucaugguugc

SEQ ID NO: 3167696 - RNA, 19 nt, Artificial Sequence
  Description of Artificial Sequence: Synthetic oligonucleotide
auuccugauuuugauagcc

SEQ ID NO: 3167697 - RNA, 19 nt, Artificial Sequence
  Description of Artificial Sequence: Synthetic oligonucleotide
uucaugguugcuuugccag

SEQ ID NO: 3167698 - RNA, 19 nt, Artificial Sequence
  Description of Artificial Sequence: Synthetic oligonucleotide
uucuucagugguuauaugu

SEQ ID NO: 3167699 - RNA, 19 nt, Artificial Sequence
  Description of Artificial Sequence: Synthetic oligonucleotide
ucacuggagauccugggag

SEQ ID NO: 3167700 - RNA, 19 nt, Artificial Sequence
  Description of Artificial Sequence: Synthetic oligonucleotide
ugugccaugggcucacugg

SEQ ID NO: 3167701 - RNA, 19 nt, Artificial Sequence
  Description of Artificial Sequence: Synthetic oligonucleotide
aucuucaucaggcacccag

SEQ ID NO: 3167702 - RNA, 19 nt, Artificial Sequence
  Description of Artificial Sequence: Synthetic oligonucleotide
uuuucuucugguucuucag

SEQ ID NO: 3167703 - RNA, 19 nt, Artificial Sequence
  Description of Artificial Sequence: Synthetic oligonucleotide
aguggaucagacuaccucu

SEQ ID NO: 3167704 - RNA, 19 nt, Artificial Sequence
  Description of Artificial Sequence: Synthetic oligonucleotide
ugagccucuuuucuucugg

SEQ ID NO: 3167705 - RNA, 19 nt, Artificial Sequence
  Description of Artificial Sequence: Synthetic oligonucleotide
ucaucaggcacccaguuuu

SEQ ID NO: 3167706 - RNA, 19 nt, Artificial Sequence
  Description of Artificial Sequence: Synthetic oligonucleotide
ugggagugauuguucaugg

SEQ ID NO: 3167707 - RNA, 19 nt, Artificial Sequence
  Description of Artificial Sequence: Synthetic oligonucleotide
ucuucugguucuucagugg

SEQ ID NO: 3167708 - RNA, 19 nt, Artificial Sequence
  Description of Artificial Sequence: Synthetic oligonucleotide
ugcugaacgcuucuugucc

SEQ ID NO: 3167709 - RNA, 19 nt, Artificial Sequence
  Description of Artificial Sequence: Synthetic oligonucleotide
aacgcuucuuguccaggcg

SEQ ID NO: 3167710 - RNA, 19 nt, Artificial Sequence
  Description of Artificial Sequence: Synthetic oligonucleotide
uugccaguggaucagacua

SEQ ID NO: 3167711 - RNA, 19 nt, Artificial Sequence
  Description of Artificial Sequence: Synthetic oligonucleotide
uggcacuagaggcagagcu

SEQ ID NO: 3167712 - RNA, 19 nt, Artificial Sequence
  Description of Artificial Sequence: Synthetic oligonucleotide
cagacuaccucuucuagug

SEQ ID NO: 3167713 - RNA, 19 nt, Artificial Sequence
  Description of Artificial Sequence: Synthetic oligonucleotide
cuucagugguuauaugugc

SEQ ID NO: 3167714 - RNA, 19 nt, Artificial Sequence
  Description of Artificial Sequence: Synthetic oligonucleotide
ugauuuugauagcccuugg

SEQ ID NO: 3167715 - RNA, 19 nt, Artificial Sequence
  Description of Artificial Sequence: Synthetic oligonucleotide
uucuucugguucuucagug

SEQ ID NO: 3167716 - RNA, 19 nt, Artificial Sequence
  Description of Artificial Sequence: Synthetic oligonucleotide
ucucuguuugguugguagg

SEQ ID NO: 3167717 - RNA, 19 nt, Artificial Sequence
  Description of Artificial Sequence: Synthetic oligonucleotide
gguuauaugugcugaacgc

SEQ ID NO: 3167718 - RNA, 19 nt, Artificial Sequence
  Description of Artificial Sequence: Synthetic oligonucleotide
uucccauugugccaugggc

SEQ ID NO: 3167719 - RNA, 19 nt, Artificial Sequence
  Description of Artificial Sequence: Synthetic oligonucleotide
gacuaccucuucuagugcc

SEQ ID NO: 3167720 - RNA, 19 nt, Artificial Sequence
  Description of Artificial Sequence: Synthetic oligonucleotide
cuuggagcggacuuggcac

SEQ ID NO: 3167721 - RNA, 19 nt, Artificial Sequence
  Description of Artificial Sequence: Synthetic oligonucleotide
uuagaagcaaccagaucuc

SEQ ID NO: 3167722 - RNA, 19 nt, Artificial Sequence
  Description of Artificial Sequence: Synthetic oligonucleotide
uucagugguuauaugugcu

SEQ ID NO: 3167723 - RNA, 19 nt, Artificial Sequence
  Description of Artificial Sequence: Synthetic oligonucleotide
gagugauuguucaugguug

SEQ ID NO: 3167724 - RNA, 19 nt, Artificial Sequence
  Description of Artificial Sequence: Synthetic oligonucleotide
uuauaugugcugaacgcuu

SEQ ID NO: 3167725 - RNA, 19 nt, Artificial Sequence
  Description of Artificial Sequence: Synthetic oligonucleotide
augggcucacuggagaucc

SEQ ID NO: 3167726 - RNA, 19 nt, Artificial Sequence
  Description of Artificial Sequence: Synthetic oligonucleotide
ugugguuccucacuuccca

SEQ ID NO: 3167727 - RNA, 19 nt, Artificial Sequence
  Description of Artificial Sequence: Synthetic oligonucleotide
ugugauuccugauuuugau

SEQ ID NO: 3167728 - RNA, 19 nt, Artificial Sequence
  Description of Artificial Sequence: Synthetic oligonucleotide
aguuuucucccucuuguga

SEQ ID NO: 3167729 - RNA, 19 nt, Artificial Sequence
  Description of Artificial Sequence: Synthetic oligonucleotide
uguucaugguugcuuugcc

SEQ ID NO: 3167730 - RNA, 19 nt, Artificial Sequence
  Description of Artificial Sequence: Synthetic oligonucleotide
uuucuucugguucuucagu

SEQ ID NO: 3167731 - RNA, 19 nt, Artificial Sequence
  Description of Artificial Sequence: Synthetic oligonucleotide
aagcaaccagaucuccauc

SEQ ID NO: 3167732 - RNA, 19 nt, Artificial Sequence
  Description of Artificial Sequence: Synthetic oligonucleotide
uugugauuccugauuuuga

SEQ ID NO: 3167733 - RNA, 19 nt, Artificial Sequence
  Description of Artificial Sequence: Synthetic oligonucleotide
uguuugguugguaggugug

SEQ ID NO: 3167734 - RNA, 19 nt, Artificial Sequence
  Description of Artificial Sequence: Synthetic oligonucleotide
cucucuguuugguugguag

SEQ ID NO: 3167735 - RNA, 19 nt, Artificial Sequence
  Description of Artificial Sequence: Synthetic oligonucleotide
uuuuagaagcaaccagauc

SEQ ID NO: 3167736 - RNA, 19 nt, Artificial Sequence
  Description of Artificial Sequence: Synthetic oligonucleotide
uccugauuuugauagcccu

SEQ ID NO: 3167737 - RNA, 19 nt, Artificial Sequence
  Description of Artificial Sequence: Synthetic oligonucleotide
ugugcugaacgcuucuugu

SEQ ID NO: 3167738 - RNA, 19 nt, Artificial Sequence
  Description of Artificial Sequence: Synthetic oligonucleotide
ucagugguuauaugugcug

SEQ ID NO: 3167739 - RNA, 19 nt, Artificial Sequence
  Description of Artificial Sequence: Synthetic oligonucleotide
agacuaccucuucuagugc

SEQ ID NO: 3167740 - RNA, 19 nt, Artificial Sequence
  Description of Artificial Sequence: Synthetic oligonucleotide
aucagacuaccucuucuag

SEQ ID NO: 3167741 - RNA, 19 nt, Artificial Sequence
  Description of Artificial Sequence: Synthetic oligonucleotide
uuccugauuuugauagccc

SEQ ID NO: 3167742 - RNA, 19 nt, Artificial Sequence
  Description of Artificial Sequence: Synthetic oligonucleotide
ucccauugugccaugggcu

SEQ ID NO: 3167743 - RNA, 19 nt, Artificial Sequence
  Description of Artificial Sequence: Synthetic oligonucleotide
uauaugugcugaacgcuuc

SEQ ID NO: 3167744 - RNA, 19 nt, Artificial Sequence
  Description of Artificial Sequence: Synthetic oligonucleotide
agcaaccagaucuccaucu

SEQ ID NO: 3167745 - RNA, 19 nt, Artificial Sequence
  Description of Artificial Sequence: Synthetic oligonucleotide
cuugugauuccugauuuug

SEQ ID NO: 3167746 - RNA, 19 nt, Artificial Sequence
  Description of Artificial Sequence: Synthetic oligonucleotide
ucagacuaccucuucuagu

SEQ ID NO: 3167747 - RNA, 19 nt, Artificial Sequence
  Description of Artificial Sequence: Synthetic oligonucleotide
gauuuugauagcccuugga

SEQ ID NO: 3167748 - RNA, 19 nt, Artificial Sequence
  Description of Artificial Sequence: Synthetic oligonucleotide
ucuucaucuucaucaggca

SEQ ID NO: 3167749 - RNA, 19 nt, Artificial Sequence
  Description of Artificial Sequence: Synthetic oligonucleotide
aaccagaucuccaucuuca

SEQ ID NO: 3167750 - RNA, 19 nt, Artificial Sequence
  Description of Artificial Sequence: Synthetic oligonucleotide
cuucaucuucaucaggcac

SEQ ID NO: 3167751 - RNA, 19 nt, Artificial Sequence
  Description of Artificial Sequence: Synthetic oligonucleotide
gagauccugggagugauug

SEQ ID NO: 3167752 - RNA, 19 nt, Artificial Sequence
  Description of Artificial Sequence: Synthetic oligonucleotide
uuccucacuucccauugug

SEQ ID NO: 3167753 - RNA, 19 nt, Artificial Sequence
  Description of Artificial Sequence: Synthetic oligonucleotide
gauuccugauuuugauagc

SEQ ID NO: 3167754 - RNA, 19 nt, Artificial Sequence
  Description of Artificial Sequence: Synthetic oligonucleotide
gaacgcuucuuguccaggc

SEQ ID NO: 3167755 - RNA, 19 nt, Artificial Sequence
  Description of Artificial Sequence: Synthetic oligonucleotide
ucaucuucaucaggcaccc

SEQ ID NO: 3167756 - RNA, 19 nt, Artificial Sequence
  Description of Artificial Sequence: Synthetic oligonucleotide
cuuguccaggcguuucugg

SEQ ID NO: 3167757 - RNA, 19 nt, Artificial Sequence
  Description of Artificial Sequence: Synthetic oligonucleotide
ucuucaucaggcacccagu

SEQ ID NO: 3167758 - RNA, 19 nt, Artificial Sequence
  Description of Artificial Sequence: Synthetic oligonucleotide
uuguucaugguugcuuugc

SEQ ID NO: 3167759 - RNA, 19 nt, Artificial Sequence
  Description of Artificial Sequence: Synthetic oligonucleotide
cagaucuccaucuucaucu

SEQ ID NO: 3167760 - RNA, 19 nt, Artificial Sequence
  Description of Artificial Sequence: Synthetic oligonucleotide
cugauuuugauagcccuug

SEQ ID NO: 3167761 - RNA, 19 nt, Artificial Sequence
  Description of Artificial Sequence: Synthetic oligonucleotide
uccucacuucccauugugc

SEQ ID NO: 3167762 - RNA, 19 nt, Artificial Sequence
  Description of Artificial Sequence: Synthetic oligonucleotide
uuugccaguggaucagacu

SEQ ID NO: 3167763 - RNA, 19 nt, Artificial Sequence
  Description of Artificial Sequence: Synthetic oligonucleotide
caggcacccaguuuucucc

SEQ ID NO: 3167764 - RNA, 19 nt, Artificial Sequence
  Description of Artificial Sequence: Synthetic oligonucleotide
uuguccaggcguuucuggc

SEQ ID NO: 3167765 - RNA, 19 nt, Artificial Sequence
  Description of Artificial Sequence: Synthetic oligonucleotide
uugcuuugccaguggauca

SEQ ID NO: 3167766 - RNA, 19 nt, Artificial Sequence
  Description of Artificial Sequence: Synthetic oligonucleotide
agcagugcugguccggcuc

SEQ ID NO: 3167767 - RNA, 19 nt, Artificial Sequence
  Description of Artificial Sequence: Synthetic oligonucleotide
ugguccggcucucuguuug

SEQ ID NO: 3167768 - RNA, 19 nt, Artificial Sequence
  Description of Artificial Sequence: Synthetic oligonucleotide
augugcugaacgcuucuug

SEQ ID NO: 3167769 - RNA, 19 nt, Artificial Sequence
  Description of Artificial Sequence: Synthetic oligonucleotide
aggcacccaguuuucuccc

SEQ ID NO: 3167770 - RNA, 19 nt, Artificial Sequence
  Description of Artificial Sequence: Synthetic oligonucleotide
guugcuuugccaguggauc

SEQ ID NO: 3167771 - RNA, 19 nt, Artificial Sequence
  Description of Artificial Sequence: Synthetic oligonucleotide
auuguucaugguugcuuug

SEQ ID NO: 3167772 - RNA, 19 nt, Artificial Sequence
  Description of Artificial Sequence: Synthetic oligonucleotide
agcucugagccucuuuucu

SEQ ID NO: 3167773 - RNA, 19 nt, Artificial Sequence
  Description of Artificial Sequence: Synthetic oligonucleotide
cuuuucuucugguucuuca

SEQ ID NO: 3167774 - RNA, 19 nt, Artificial Sequence
  Description of Artificial Sequence: Synthetic oligonucleotide
caucuucaucuucaucagg

SEQ ID NO: 3167775 - RNA, 19 nt, Artificial Sequence
  Description of Artificial Sequence: Synthetic oligonucleotide
guuugguugguaggugugg

SEQ ID NO: 3167776 - RNA, 19 nt, Artificial Sequence
  Description of Artificial Sequence: Synthetic oligonucleotide
uccugggagugauuguuca

SEQ ID NO: 3167777 - RNA, 19 nt, Artificial Sequence
  Description of Artificial Sequence: Synthetic oligonucleotide
cuuggcacuagaggcagag

SEQ ID NO: 3167778 - RNA, 19 nt, Artificial Sequence
  Description of Artificial Sequence: Synthetic oligonucleotide
agagcucugagccucuuuu

SEQ ID NO: 3167779 - RNA, 19 nt, Artificial Sequence
  Description of Artificial Sequence: Synthetic oligonucleotide
cuagaggcagagcucugag

SEQ ID NO: 3167780 - RNA, 19 nt, Artificial Sequence
  Description of Artificial Sequence: Synthetic oligonucleotide
gacuuggcacuagaggcag

SEQ ID NO: 3167781 - RNA, 19 nt, Artificial Sequence
  Description of Artificial Sequence: Synthetic oligonucleotide
caguggaucagacuaccuc

SEQ ID NO: 3167782 - RNA, 19 nt, Artificial Sequence
  Description of Artificial Sequence: Synthetic oligonucleotide
ucuguuugguugguaggug

SEQ ID NO: 3167783 - RNA, 19 nt, Artificial Sequence
  Description of Artificial Sequence: Synthetic oligonucleotide
ugaacgcuucuuguccagg

SEQ ID NO: 3167784 - RNA, 19 nt, Artificial Sequence
  Description of Artificial Sequence: Synthetic oligonucleotide
uuuauucucaguaaaauca

SEQ ID NO: 3167785 - RNA, 19 nt, Artificial Sequence
  Description of Artificial Sequence: Synthetic oligonucleotide
acaagcauaagucagaauc

SEQ ID NO: 3167786 - RNA, 19 nt, Artificial Sequence
  Description of Artificial Sequence: Synthetic oligonucleotide
acuauuggaacauauauuc

SEQ ID NO: 3167787 - RNA, 19 nt, Artificial Sequence
  Description of Artificial Sequence: Synthetic oligonucleotide
uuaaauagaaacaaaauuu

SEQ ID NO: 3167788 - RNA, 19 nt, Artificial Sequence
  Description of Artificial Sequence: Synthetic oligonucleotide
uagaacagaaauuugaaag

SEQ ID NO: 3167789 - RNA, 19 nt, Artificial Sequence
  Description of Artificial Sequence: Synthetic oligonucleotide
agaaauauugguaaaauac

SEQ ID NO: 3167790 - RNA, 19 nt, Artificial Sequence
  Description of Artificial Sequence: Synthetic oligonucleotide
uuagaauauaguuuaaaag

SEQ ID NO: 3167791 - RNA, 19 nt, Artificial Sequence
  Description of Artificial Sequence: Synthetic oligonucleotide
aaauguucauauuaaugac

SEQ ID NO: 3167792 - RNA, 19 nt, Artificial Sequence
  Description of Artificial Sequence: Synthetic oligonucleotide
ucuuauuuuaccaaguaga

SEQ ID NO: 3167793 - RNA, 19 nt, Artificial Sequence
  Description of Artificial Sequence: Synthetic oligonucleotide
uauauaauuacuauuggaa

SEQ ID NO: 3167794 - RNA, 19 nt, Artificial Sequence
  Description of Artificial Sequence: Synthetic oligonucleotide
auauaauuacuauuggaac

SEQ ID NO: 3167795 - RNA, 19 nt, Artificial Sequence
  Description of Artificial Sequence: Synthetic oligonucleotide
uagauuuucauaaugagau

SEQ ID NO: 3167796 - RNA, 19 nt, Artificial Sequence
  Description of Artificial Sequence: Synthetic oligonucleotide
uauaugaacaaaacaagca

SEQ ID NO: 3167797 - RNA, 19 nt, Artificial Sequence
  Description of Artificial Sequence: Synthetic oligonucleotide
aguaucauaucauaaaugu

SEQ ID NO: 3167798 - RNA, 19 nt, Artificial Sequence
  Description of Artificial Sequence: Synthetic oligonucleotide
aaugaugcuauauauguau

SEQ ID NO: 3167799 - RNA, 19 nt, Artificial Sequence
  Description of Artificial Sequence: Synthetic oligonucleotide
aaauacaaagacaguaggc

SEQ ID NO: 3167800 - RNA, 19 nt, Artificial Sequence
  Description of Artificial Sequence: Synthetic oligonucleotide
aauuccaaaauacuaucug

SEQ ID NO: 3167801 - RNA, 19 nt, Artificial Sequence
  Description of Artificial Sequence: Synthetic oligonucleotide
aacacaaauguuuauuuga

SEQ ID NO: 3167802 - RNA, 19 nt, Artificial Sequence
  Description of Artificial Sequence: Synthetic oligonucleotide
gaauuuaguaagcugguag

SEQ ID NO: 3167803 - RNA, 19 nt, Artificial Sequence
  Description of Artificial Sequence: Synthetic oligonucleotide
aaugauauucuaugaagcu

SEQ ID NO: 3167804 - RNA, 19 nt, Artificial Sequence
  Description of Artificial Sequence: Synthetic oligonucleotide
ucaacauugaaagugagga

SEQ ID NO: 3167805 - RNA, 19 nt, Artificial Sequence
  Description of Artificial Sequence: Synthetic oligonucleotide
aauacaaagacaguaggca

SEQ ID NO: 3167806 - RNA, 19 nt, Artificial Sequence
  Description of Artificial Sequence: Synthetic oligonucleotide
guuagucccauuuugaacc

SEQ ID NO: 3167807 - RNA, 19 nt, Artificial Sequence
  Description of Artificial Sequence: Synthetic oligonucleotide
uuaucaucugcacaaaaug

SEQ ID NO: 3167808 - RNA, 19 nt, Artificial Sequence
  Description of Artificial Sequence: Synthetic oligonucleotide
aauaccgugccuucaagag

SEQ ID NO: 3167809 - RNA, 19 nt, Artificial Sequence
  Description of Artificial Sequence: Synthetic oligonucleotide
uuugcaauucaacuuuagg

SEQ ID NO: 3167810 - RNA, 19 nt, Artificial Sequence
  Description of Artificial Sequence: Synthetic oligonucleotide
uucaauaaaauucacccau

SEQ ID NO: 3167811 - RNA, 19 nt, Artificial Sequence
  Description of Artificial Sequence: Synthetic oligonucleotide
uucgcugucaaauacauaa

SEQ ID NO: 3167812 - RNA, 19 nt, Artificial Sequence
  Description of Artificial Sequence: Synthetic oligonucleotide
auauuuagaaaacuugucu

SEQ ID NO: 3167813 - RNA, 19 nt, Artificial Sequence
  Description of Artificial Sequence: Synthetic oligonucleotide
uugcaauucaacuuuagga

SEQ ID NO: 3167814 - RNA, 19 nt, Artificial Sequence
  Description of Artificial Sequence: Synthetic oligonucleotide
uauuggagaaaauggaacc

SEQ ID NO: 3167815 - RNA, 19 nt, Artificial Sequence
  Description of Artificial Sequence: Synthetic oligonucleotide
ucuauagaaagcauaauuu

SEQ ID NO: 3167816 - RNA, 19 nt, Artificial Sequence
  Description of Artificial Sequence: Synthetic oligonucleotide
auaaacauuacacuaaguu

SEQ ID NO: 3167817 - RNA, 19 nt, Artificial Sequence
  Description of Artificial Sequence: Synthetic oligonucleotide
gaaucacucauucuugacg

SEQ ID NO: 3167818 - RNA, 19 nt, Artificial Sequence
  Description of Artificial Sequence: Synthetic oligonucleotide
uuugggacaaggauaauga

SEQ ID NO: 3167819 - RNA, 19 nt, Artificial Sequence
  Description of Artificial Sequence: Synthetic oligonucleotide
ucaguaaaaucaaacauau

SEQ ID NO: 3167820 - RNA, 19 nt, Artificial Sequence
  Description of Artificial Sequence: Synthetic oligonucleotide
uucgguacugccaagaacu

SEQ ID NO: 3167821 - RNA, 19 nt, Artificial Sequence
  Description of Artificial Sequence: Synthetic oligonucleotide
ugaguuuacauagaaauac

SEQ ID NO: 3167822 - RNA, 19 nt, Artificial Sequence
  Description of Artificial Sequence: Synthetic oligonucleotide
aaauucacccauaacacag

SEQ ID NO: 3167823 - RNA, 19 nt, Artificial Sequence
  Description of Artificial Sequence: Synthetic oligonucleotide
uugauaaugcuucaggcgu

SEQ ID NO: 3167824 - RNA, 19 nt, Artificial Sequence
  Description of Artificial Sequence: Synthetic oligonucleotide
uugaguuauucucaacugg

SEQ ID NO: 3167825 - RNA, 19 nt, Artificial Sequence
  Description of Artificial Sequence: Synthetic oligonucleotide
uagcagguauaacagaacg

SEQ ID NO: 3167826 - RNA, 19 nt, Artificial Sequence
  Description of Artificial Sequence: Synthetic oligonucleotide
uauagaaagcauaauuuuc

SEQ ID NO: 3167827 - RNA, 19 nt, Artificial Sequence
  Description of Artificial Sequence: Synthetic oligonucleotide
uucuuauuuuaccaaguag

SEQ ID NO: 3167828 - RNA, 19 nt, Artificial Sequence
  Description of Artificial Sequence: Synthetic oligonucleotide
uaaugaacuaaugucuugg

SEQ ID NO: 3167829 - RNA, 19 nt, Artificial Sequence
  Description of Artificial Sequence: Synthetic oligonucleotide
caaaacaagcauaagucag

SEQ ID NO: 3167830 - RNA, 19 nt, Artificial Sequence
  Description of Artificial Sequence: Synthetic oligonucleotide
auauuaaugaccaauuaug

SEQ ID NO: 3167831 - RNA, 19 nt, Artificial Sequence
  Description of Artificial Sequence: Synthetic oligonucleotide
gugaauauccucuugucag

SEQ ID NO: 3167832 - RNA, 19 nt, Artificial Sequence
  Description of Artificial Sequence: Synthetic oligonucleotide
caauuauguacuaugauca

SEQ ID NO: 3167833 - RNA, 19 nt, Artificial Sequence
  Description of Artificial Sequence: Synthetic oligonucleotide
uauaguuuaaaagagcaau

SEQ ID NO: 3167834 - RNA, 19 nt, Artificial Sequence
  Description of Artificial Sequence: Synthetic oligonucleotide
uccaauaaacauuacacua

SEQ ID NO: 3167835 - RNA, 19 nt, Artificial Sequence
  Description of Artificial Sequence: Synthetic oligonucleotide
aaauggaaccauaucaaag

SEQ ID NO: 3167836 - RNA, 19 nt, Artificial Sequence
  Description of Artificial Sequence: Synthetic oligonucleotide
ucuuggagaaugaacauaa

SEQ ID NO: 3167837 - RNA, 19 nt, Artificial Sequence
  Description of Artificial Sequence: Synthetic oligonucleotide
uauauuacuacaugacaac

SEQ ID NO: 3167838 - RNA, 19 nt, Artificial Sequence
  Description of Artificial Sequence: Synthetic oligonucleotide
acauagaaauacaauuucc

SEQ ID NO: 3167839 - RNA, 19 nt, Artificial Sequence
  Description of Artificial Sequence: Synthetic oligonucleotide
aaaauucacccauaacaca

SEQ ID NO: 3167840 - RNA, 19 nt, Artificial Sequence
  Description of Artificial Sequence: Synthetic oligonucleotide
ucuuaaaguaccagagcag

SEQ ID NO: 3167841 - RNA, 19 nt, Artificial Sequence
  Description of Artificial Sequence: Synthetic oligonucleotide
acuugaguuauucucaacu

SEQ ID NO: 3167842 - RNA, 19 nt, Artificial Sequence
  Description of Artificial Sequence: Synthetic oligonucleotide
uugguaaaauacaaagaca

SEQ ID NO: 3167843 - RNA, 19 nt, Artificial Sequence
  Description of Artificial Sequence: Synthetic oligonucleotide
uugcuaaauauauacccag

SEQ ID NO: 3167844 - RNA, 19 nt, Artificial Sequence
  Description of Artificial Sequence: Synthetic oligonucleotide
aguagaauuuaguaagcug

SEQ ID NO: 3167845 - RNA, 19 nt, Artificial Sequence
  Description of Artificial Sequence: Synthetic oligonucleotide
agaacagaaauuugaaaga

SEQ ID NO: 3167846 - RNA, 19 nt, Artificial Sequence
  Description of Artificial Sequence: Synthetic oligonucleotide
uaucaaagaugucaguaga

SEQ ID NO: 3167847 - RNA, 19 nt, Artificial Sequence
  Description of Artificial Sequence: Synthetic oligonucleotide
auaugaacaaaacaagcau

SEQ ID NO: 3167848 - RNA, 19 nt, Artificial Sequence
  Description of Artificial Sequence: Synthetic oligonucleotide
ugaccaauuauguacuaug

SEQ ID NO: 3167849 - RNA, 19 nt, Artificial Sequence
  Description of Artificial Sequence: Synthetic oligonucleotide
auauuggagaaaauggaac

SEQ ID NO: 3167850 - RNA, 19 nt, Artificial Sequence
  Description of Artificial Sequence: Synthetic oligonucleotide
ugaguuauucucaacuggu

SEQ ID NO: 3167851 - RNA, 19 nt, Artificial Sequence
  Description of Artificial Sequence: Synthetic oligonucleotide
guuucuaaaucuuggauuc

SEQ ID NO: 3167852 - RNA, 19 nt, Artificial Sequence
  Description of Artificial Sequence: Synthetic oligonucleotide
aguaaagacuuccugguga

SEQ ID NO: 3167853 - RNA, 19 nt, Artificial Sequence
  Description of Artificial Sequence: Synthetic oligonucleotide
uauuuagaaaacuugucuu

SEQ ID NO: 3167854 - RNA, 19 nt, Artificial Sequence
  Description of Artificial Sequence: Synthetic oligonucleotide
ugaaucuauagaaagcaua

SEQ ID NO: 3167855 - RNA, 19 nt, Artificial Sequence
  Description of Artificial Sequence: Synthetic oligonucleotide
uuccaaaauacuaucugac

SEQ ID NO: 3167856 - RNA, 19 nt, Artificial Sequence
  Description of Artificial Sequence: Synthetic oligonucleotide
gaacauaaaaguccaauaa

SEQ ID NO: 3167857 - RNA, 19 nt, Artificial Sequence
  Description of Artificial Sequence: Synthetic oligonucleotide
uaugaacaaaacaagcaua

SEQ ID NO: 3167858 - RNA, 19 nt, Artificial Sequence
  Description of Artificial Sequence: Synthetic oligonucleotide
gaacuuugcuauuguaggg

SEQ ID NO: 3167859 - RNA, 19 nt, Artificial Sequence
  Description of Artificial Sequence: Synthetic oligonucleotide
agacaaggcagauauuuag

SEQ ID NO: 3167860 - RNA, 19 nt, Artificial Sequence
  Description of Artificial Sequence: Synthetic oligonucleotide
gaaauauugguaaaauaca

SEQ ID NO: 3167861 - RNA, 19 nt, Artificial Sequence
  Description of Artificial Sequence: Synthetic oligonucleotide
uaaugagaugaacauuuca

SEQ ID NO: 3167862 - RNA, 19 nt, Artificial Sequence
  Description of Artificial Sequence: Synthetic oligonucleotide
uucagacacaaaaugacau

SEQ ID NO: 3167863 - RNA, 19 nt, Artificial Sequence
  Description of Artificial Sequence: Synthetic oligonucleotide
uauucuuauuuuaccaagu

SEQ ID NO: 3167864 - RNA, 19 nt, Artificial Sequence
  Description of Artificial Sequence: Synthetic oligonucleotide
acuaaguucugcuuaaaau

SEQ ID NO: 3167865 - RNA, 19 nt, Artificial Sequence
  Description of Artificial Sequence: Synthetic oligonucleotide
uaaauuucaauugaugauu

SEQ ID NO: 3167866 - RNA, 19 nt, Artificial Sequence
  Description of Artificial Sequence: Synthetic oligonucleotide
uaugaaagugaauauccuc

SEQ ID NO: 3167867 - RNA, 19 nt, Artificial Sequence
  Description of Artificial Sequence: Synthetic oligonucleotide
uugcauaugaaagugaaua

SEQ ID NO: 3167868 - RNA, 19 nt, Artificial Sequence
  Description of Artificial Sequence: Synthetic oligonucleotide
uuccuggugaaacacauuc

SEQ ID NO: 3167869 - RNA, 19 nt, Artificial Sequence
  Description of Artificial Sequence: Synthetic oligonucleotide
augcuauauauguauauga

SEQ ID NO: 3167870 - RNA, 19 nt, Artificial Sequence
  Description of Artificial Sequence: Synthetic oligonucleotide
caguagaucugcuagguac

SEQ ID NO: 3167871 - RNA, 19 nt, Artificial Sequence
  Description of Artificial Sequence: Synthetic oligonucleotide
uauuggaacauauauucuu

SEQ ID NO: 3167872 - RNA, 19 nt, Artificial Sequence
  Description of Artificial Sequence: Synthetic oligonucleotide
uauugguaucaaaauagaa

SEQ ID NO: 3167873 - RNA, 19 nt, Artificial Sequence
  Description of Artificial Sequence: Synthetic oligonucleotide
uguuaauguuauuucuuca

SEQ ID NO: 3167874 - RNA, 19 nt, Artificial Sequence
  Description of Artificial Sequence: Synthetic oligonucleotide
acugaucaccauuaaaacu

SEQ ID NO: 3167875 - RNA, 19 nt, Artificial Sequence
  Description of Artificial Sequence: Synthetic oligonucleotide
aauagaacagaaauuugaa

SEQ ID NO: 3167876 - RNA, 19 nt, Artificial Sequence
  Description of Artificial Sequence: Synthetic oligonucleotide
gaugcuauauauguauaug

SEQ ID NO: 3167877 - RNA, 19 nt, Artificial Sequence
  Description of Artificial Sequence: Synthetic oligonucleotide
cuaauuaagguuuaacuua

SEQ ID NO: 3167878 - RNA, 19 nt, Artificial Sequence
  Description of Artificial Sequence: Synthetic oligonucleotide
cuuuugaggcaaauuaaac

SEQ ID NO: 3167879 - RNA, 19 nt, Artificial Sequence
  Description of Artificial Sequence: Synthetic oligonucleotide
ugccauuucgaguaggugu

SEQ ID NO: 3167880 - RNA, 19 nt, Artificial Sequence
  Description of Artificial Sequence: Synthetic oligonucleotide
ugcuauauauguauaugaa

SEQ ID NO: 3167881 - RNA, 19 nt, Artificial Sequence
  Description of Artificial Sequence: Synthetic oligonucleotide
auuucuugaugugucuugc

SEQ ID NO: 3167882 - RNA, 19 nt, Artificial Sequence
  Description of Artificial Sequence: Synthetic oligonucleotide
uuauucucaguaaaaucaa

SEQ ID NO: 3167883 - RNA, 19 nt, Artificial Sequence
  Description of Artificial Sequence: Synthetic oligonucleotide
agauaaaucaacauugaaa

SEQ ID NO: 3167884 - RNA, 19 nt, Artificial Sequence
  Description of Artificial Sequence: Synthetic oligonucleotide
uuuaucuuuauguacaaag

SEQ ID NO: 3167885 - RNA, 19 nt, Artificial Sequence
  Description of Artificial Sequence: Synthetic oligonucleotide
guauuuucggaucagaccg

SEQ ID NO: 3167886 - RNA, 19 nt, Artificial Sequence
  Description of Artificial Sequence: Synthetic oligonucleotide
uugaauaauccauucaagg

SEQ ID NO: 3167887 - RNA, 19 nt, Artificial Sequence
  Description of Artificial Sequence: Synthetic oligonucleotide
cuuaaugaagccuaugucc

SEQ ID NO: 3167888 - RNA, 19 nt, Artificial Sequence
  Description of Artificial Sequence: Synthetic oligonucleotide
uguacaaagacuagcauga

SEQ ID NO: 3167889 - RNA, 19 nt, Artificial Sequence
  Description of Artificial Sequence: Synthetic oligonucleotide
uguuacacuggguagacag

SEQ ID NO: 3167890 - RNA, 19 nt, Artificial Sequence
  Description of Artificial Sequence: Synthetic oligonucleotide
aacuuaaugaagccuaugu

SEQ ID NO: 3167891 - RNA, 19 nt, Artificial Sequence
  Description of Artificial Sequence: Synthetic oligonucleotide
uuauguacaaagacuagca

SEQ ID NO: 3167892 - RNA, 19 nt, Artificial Sequence
  Description of Artificial Sequence: Synthetic oligonucleotide
ucuuuauguacaaagacua

SEQ ID NO: 3167893 - RNA, 19 nt, Artificial Sequence
  Description of Artificial Sequence: Synthetic oligonucleotide
ucuugaauaauccauucaa

SEQ ID NO: 3167894 - RNA, 19 nt, Artificial Sequence
  Description of Artificial Sequence: Synthetic oligonucleotide
ugaauaauccauucaaggu

SEQ ID NO: 3167895 - RNA, 19 nt, Artificial Sequence
  Description of Artificial Sequence: Synthetic oligonucleotide
uaucuuuauguacaaagac

SEQ ID NO: 3167896 - RNA, 19 nt, Artificial Sequence
  Description of Artificial Sequence: Synthetic oligonucleotide
uuaaugaagccuauguccu

SEQ ID NO: 3167897 - RNA, 19 nt, Artificial Sequence
  Description of Artificial Sequence: Synthetic oligonucleotide
uuaucuuuauguacaaaga

SEQ ID NO: 3167898 - RNA, 19 nt, Artificial Sequence
  Description of Artificial Sequence: Synthetic oligonucleotide
uaguccaacuuaaugaagc

SEQ ID NO: 3167899 - RNA, 19 nt, Artificial Sequence
  Description of Artificial Sequence: Synthetic oligonucleotide
aauaauccauucaagguug

SEQ ID NO: 3167900 - RNA, 19 nt, Artificial Sequence
  Description of Artificial Sequence: Synthetic oligonucleotide
agcaugaucuguuacacug

SEQ ID NO: 3167901 - RNA, 19 nt, Artificial Sequence
  Description of Artificial Sequence: Synthetic oligonucleotide
uuuauguacaaagacuagc

SEQ ID NO: 3167902 - RNA, 19 nt, Artificial Sequence
  Description of Artificial Sequence: Synthetic oligonucleotide
acuuaaugaagccuauguc

SEQ ID NO: 3167903 - RNA, 19 nt, Artificial Sequence
  Description of Artificial Sequence: Synthetic oligonucleotide
uucaagguugcuuagucca

SEQ ID NO: 3167904 - RNA, 19 nt, Artificial Sequence
  Description of Artificial Sequence: Synthetic oligonucleotide
acaaagacuagcaugaucu

SEQ ID NO: 3167905 - RNA, 19 nt, Artificial Sequence
  Description of Artificial Sequence: Synthetic oligonucleotide
uguucagcccguauuuucg

SEQ ID NO: 3167906 - RNA, 19 nt, Artificial Sequence
  Description of Artificial Sequence: Synthetic oligonucleotide
auguacaaagacuagcaug

SEQ ID NO: 3167907 - RNA, 19 nt, Artificial Sequence
  Description of Artificial Sequence: Synthetic oligonucleotide
aagagcgagagcccuggcc

SEQ ID NO: 3167908 - RNA, 19 nt, Artificial Sequence
  Description of Artificial Sequence: Synthetic oligonucleotide
aguccaacuuaaugaagcc

SEQ ID NO: 3167909 - RNA, 19 nt, Artificial Sequence
  Description of Artificial Sequence: Synthetic oligonucleotide
auucaagguugcuuagucc

SEQ ID NO: 3167910 - RNA, 19 nt, Artificial Sequence
  Description of Artificial Sequence: Synthetic oligonucleotide
ugaucuguuacacugggua

SEQ ID NO: 3167911 - RNA, 19 nt, Artificial Sequence
  Description of Artificial Sequence: Synthetic oligonucleotide
cuugaauaauccauucaag

SEQ ID NO: 3167912 - RNA, 19 nt, Artificial Sequence
  Description of Artificial Sequence: Synthetic oligonucleotide
aaugaagccuauguccuuc

SEQ ID NO: 3167913 - RNA, 19 nt, Artificial Sequence
  Description of Artificial Sequence: Synthetic oligonucleotide
agagcgagagcccuggccg

SEQ ID NO: 3167914 - RNA, 19 nt, Artificial Sequence
  Description of Artificial Sequence: Synthetic oligonucleotide
ugcuuaguccaacuuaaug

SEQ ID NO: 3167915 - RNA, 19 nt, Artificial Sequence
  Description of Artificial Sequence: Synthetic oligonucleotide
agucuugaauaauccauuc

SEQ ID NO: 3167916 - RNA, 19 nt, Artificial Sequence
  Description of Artificial Sequence: Synthetic oligonucleotide
uuucggaucagaccguggc

SEQ ID NO: 3167917 - RNA, 19 nt, Artificial Sequence
  Description of Artificial Sequence: Synthetic oligonucleotide
cugacggaagcacugacgg

SEQ ID NO: 3167918 - RNA, 19 nt, Artificial Sequence
  Description of Artificial Sequence: Synthetic oligonucleotide
uccaacuuaaugaagccua

SEQ ID NO: 3167919 - RNA, 19 nt, Artificial Sequence
  Description of Artificial Sequence: Synthetic oligonucleotide
uagacagucuugaauaauc

SEQ ID NO: 3167920 - RNA, 19 nt, Artificial Sequence
  Description of Artificial Sequence: Synthetic oligonucleotide
aagccuauguccuucgcgu

SEQ ID NO: 3167921 - RNA, 19 nt, Artificial Sequence
  Description of Artificial Sequence: Synthetic oligonucleotide
gaagccuauguccuucgcg

SEQ ID NO: 3167922 - RNA, 19 nt, Artificial Sequence
  Description of Artificial Sequence: Synthetic oligonucleotide
auguccuucgcguacugac

SEQ ID NO: 3167923 - RNA, 19 nt, Artificial Sequence
  Description of Artificial Sequence: Synthetic oligonucleotide
uuaguccaacuuaaugaag

SEQ ID NO: 3167924 - RNA, 19 nt, Artificial Sequence
  Description of Artificial Sequence: Synthetic oligonucleotide
acuccaguagagcugcugg

SEQ ID NO: 3167925 - RNA, 19 nt, Artificial Sequence
  Description of Artificial Sequence: Synthetic oligonucleotide
acuagcaugaucuguuaca

SEQ ID NO: 3167926 - RNA, 19 nt, Artificial Sequence
  Description of Artificial Sequence: Synthetic oligonucleotide
gaucuguuacacuggguag

SEQ ID NO: 3167927 - RNA, 19 nt, Artificial Sequence
  Description of Artificial Sequence: Synthetic oligonucleotide
cuuuauguacaaagacuag

SEQ ID NO: 3167928 - RNA, 19 nt, Artificial Sequence
  Description of Artificial Sequence: Synthetic oligonucleotide
agacagucuugaauaaucc

SEQ ID NO: 3167929 - RNA, 19 nt, Artificial Sequence
  Description of Artificial Sequence: Synthetic oligonucleotide
caugaucuguuacacuggg

SEQ ID NO: 3167930 - RNA, 19 nt, Artificial Sequence
  Description of Artificial Sequence: Synthetic oligonucleotide
aaagacuagcaugaucugu

SEQ ID NO: 3167931 - RNA, 19 nt, Artificial Sequence
  Description of Artificial Sequence: Synthetic oligonucleotide
uguccuucgcguacugacg

SEQ ID NO: 3167932 - RNA, 19 nt, Artificial Sequence
  Description of Artificial Sequence: Synthetic oligonucleotide
aucuuuauguacaaagacu

SEQ ID NO: 3167933 - RNA, 19 nt, Artificial Sequence
  Description of Artificial Sequence: Synthetic oligonucleotide
uauguacaaagacuagcau

SEQ ID NO: 3167934 - RNA, 19 nt, Artificial Sequence
  Description of Artificial Sequence: Synthetic oligonucleotide
uucggaucagaccguggcg

SEQ ID NO: 3167935 - RNA, 19 nt, Artificial Sequence
  Description of Artificial Sequence: Synthetic oligonucleotide
auguucagcccguauuuuc

SEQ ID NO: 3167936 - RNA, 19 nt, Artificial Sequence
  Description of Artificial Sequence: Synthetic oligonucleotide
gcuuaguccaacuuaauga

SEQ ID NO: 3167937 - RNA, 19 nt, Artificial Sequence
  Description of Artificial Sequence: Synthetic oligonucleotide
uacaaagacuagcaugauc

SEQ ID NO: 3167938 - RNA, 19 nt, Artificial Sequence
  Description of Artificial Sequence: Synthetic oligonucleotide
gaauaauccauucaagguu

SEQ ID NO: 3167939 - RNA, 19 nt, Artificial Sequence
  Description of Artificial Sequence: Synthetic oligonucleotide
uggcgguuggagcagacgc

SEQ ID NO: 3167940 - RNA, 19 nt, Artificial Sequence
  Description of Artificial Sequence: Synthetic oligonucleotide
ucggaucagaccguggcgg

SEQ ID NO: 3167941 - RNA, 19 nt, Artificial Sequence
  Description of Artificial Sequence: Synthetic oligonucleotide
uuuucggaucagaccgugg

SEQ ID NO: 3167942 - RNA, 19 nt, Artificial Sequence
  Description of Artificial Sequence: Synthetic oligonucleotide
cuuaguccaacuuaaugaa

SEQ ID NO: 3167943 - RNA, 19 nt, Artificial Sequence
  Description of Artificial Sequence: Synthetic oligonucleotide
uggguagacagucuugaau

SEQ ID NO: 3167944 - RNA, 19 nt, Artificial Sequence
  Description of Artificial Sequence: Synthetic oligonucleotide
cauucaagguugcuuaguc

SEQ ID NO: 3167945 - RNA, 19 nt, Artificial Sequence
  Description of Artificial Sequence: Synthetic oligonucleotide
aagguugcuuaguccaacu

SEQ ID NO: 3167946 - RNA, 19 nt, Artificial Sequence
  Description of Artificial Sequence: Synthetic oligonucleotide
uucgcguacugacggaagc

SEQ ID NO: 3167947 - RNA, 19 nt, Artificial Sequence
  Description of Artificial Sequence: Synthetic oligonucleotide
ugacggcacauguucagcc

SEQ ID NO: 3167948 - RNA, 19 nt, Artificial Sequence
  Description of Artificial Sequence: Synthetic oligonucleotide
aauccauucaagguugcuu

SEQ ID NO: 3167949 - RNA, 19 nt, Artificial Sequence
  Description of Artificial Sequence: Synthetic oligonucleotide
gacagucuugaauaaucca

SEQ ID NO: 3167950 - RNA, 19 nt, Artificial Sequence
  Description of Artificial Sequence: Synthetic oligonucleotide
aagcacugacggcacaugu

SEQ ID NO: 3167951 - RNA, 19 nt, Artificial Sequence
  Description of Artificial Sequence: Synthetic oligonucleotide
aguagagcugcuggugacc

SEQ ID NO: 3167952 - RNA, 19 nt, Artificial Sequence
  Description of Artificial Sequence: Synthetic oligonucleotide
agaccguggcgguuggagc

SEQ ID NO: 3167953 - RNA, 19 nt, Artificial Sequence
  Description of Artificial Sequence: Synthetic oligonucleotide
cuagcaugaucuguuacac

SEQ ID NO: 3167954 - RNA, 19 nt, Artificial Sequence
  Description of Artificial Sequence: Synthetic oligonucleotide
agcagacgcggcaagagcg

SEQ ID NO: 3167955 - RNA, 19 nt, Artificial Sequence
  Description of Artificial Sequence: Synthetic oligonucleotide
auccauucaagguugcuua

SEQ ID NO: 3167956 - RNA, 19 nt, Artificial Sequence
  Description of Artificial Sequence: Synthetic oligonucleotide
aagacuagcaugaucuguu

SEQ ID NO: 3167957 - RNA, 19 nt, Artificial Sequence
  Description of Artificial Sequence: Synthetic oligonucleotide
acugacggcacauguucag

SEQ ID NO: 3167958 - RNA, 19 nt, Artificial Sequence
  Description of Artificial Sequence: Synthetic oligonucleotide
guccuucgcguacugacgg

SEQ ID NO: 3167959 - RNA, 19 nt, Artificial Sequence
  Description of Artificial Sequence: Synthetic oligonucleotide
uccauucaagguugcuuag

SEQ ID NO: 3167960 - RNA, 19 nt, Artificial Sequence
  Description of Artificial Sequence: Synthetic oligonucleotide
acggcacauguucagcccg

SEQ ID NO: 3167961 - RNA, 19 nt, Artificial Sequence
  Description of Artificial Sequence: Synthetic oligonucleotide
acagucuugaauaauccau

SEQ ID NO: 3167962 - RNA, 19 nt, Artificial Sequence
  Description of Artificial Sequence: Synthetic oligonucleotide
gacggaagcacugacggca

SEQ ID NO: 3167963 - RNA, 19 nt, Artificial Sequence
  Description of Artificial Sequence: Synthetic oligonucleotide
uuacacuggguagacaguc

SEQ ID NO: 3167964 - RNA, 19 nt, Artificial Sequence
  Description of Artificial Sequence: Synthetic oligonucleotide
uuuugaaggucuccauuuu

SEQ ID NO: 3167965 - RNA, 19 nt, Artificial Sequence
  Description of Artificial Sequence: Synthetic oligonucleotide
augaagccuauguccuucg

SEQ ID NO: 3167966 - RNA, 19 nt, Artificial Sequence
  Description of Artificial Sequence: Synthetic oligonucleotide
uauuuucggaucagaccgu

SEQ ID NO: 3167967 - RNA, 19 nt, Artificial Sequence
  Description of Artificial Sequence: Synthetic oligonucleotide
auaauccauucaagguugc

SEQ ID NO: 3167968 - RNA, 19 nt, Artificial Sequence
  Description of Artificial Sequence: Synthetic oligonucleotide
acauguucagcccguauuu

SEQ ID NO: 3167969 - RNA, 19 nt, Artificial Sequence
  Description of Artificial Sequence: Synthetic oligonucleotide
gacuagcaugaucuguuac

SEQ ID NO: 3167970 - RNA, 19 nt, Artificial Sequence
  Description of Artificial Sequence: Synthetic oligonucleotide
guucagcccguauuuucgg

SEQ ID NO: 3167971 - RNA, 19 nt, Artificial Sequence
  Description of Artificial Sequence: Synthetic oligonucleotide
aacuugcgcgggugacucc

SEQ ID NO: 3167972 - RNA, 19 nt, Artificial Sequence
  Description of Artificial Sequence: Synthetic oligonucleotide
gacgcggcaagagcgagag

SEQ ID NO: 3167973 - RNA, 19 nt, Artificial Sequence
  Description of Artificial Sequence: Synthetic oligonucleotide
gucuugaauaauccauuca

SEQ ID NO: 3167974 - RNA, 19 nt, Artificial Sequence
  Description of Artificial Sequence: Synthetic oligonucleotide
acugacggaagcacugacg

SEQ ID NO: 3167975 - RNA, 19 nt, Artificial Sequence
  Description of Artificial Sequence: Synthetic oligonucleotide
ucuguuacacuggguagac

SEQ ID NO: 3167976 - RNA, 19 nt, Artificial Sequence
  Description of Artificial Sequence: Synthetic oligonucleotide
gacggcacauguucagccc

SEQ ID NO: 3167977 - RNA, 19 nt, Artificial Sequence
  Description of Artificial Sequence: Synthetic oligonucleotide
uuuuaucuuuauguacaaa

SEQ ID NO: 3167978 - RNA, 19 nt, Artificial Sequence
  Description of Artificial Sequence: Synthetic oligonucleotide
uccaguagagcugcuggug

SEQ ID NO: 3167979 - RNA, 19 nt, Artificial Sequence
  Description of Artificial Sequence: Synthetic oligonucleotide
ucaagguugcuuaguccaa

SEQ ID NO: 3167980 - RNA, 19 nt, Artificial Sequence
  Description of Artificial Sequence: Synthetic oligonucleotide
caaagacuagcaugaucug

SEQ ID NO: 3167981 - RNA, 19 nt, Artificial Sequence
  Description of Artificial Sequence: Synthetic oligonucleotide
guugcuuaguccaacuuaa

SEQ ID NO: 3167982 - RNA, 19 nt, Artificial Sequence
  Description of Artificial Sequence: Synthetic oligonucleotide
uacacuggguagacagucu

SEQ ID NO: 3167983 - RNA, 19 nt, Artificial Sequence
  Description of Artificial Sequence: Synthetic oligonucleotide
acuggguagacagucuuga

SEQ ID NO: 3167984 - RNA, 19 nt, Artificial Sequence
  Description of Artificial Sequence: Synthetic oligonucleotide
aagauuaacaacuucaguc

SEQ ID NO: 3167985 - RNA, 19 nt, Artificial Sequence
  Description of Artificial Sequence: Synthetic oligonucleotide
gaagauuaaaaucagauac

SEQ ID NO: 3167986 - RNA, 19 nt, Artificial Sequence
  Description of Artificial Sequence: Synthetic oligonucleotide
uguaaauuccaaaagauca

SEQ ID NO: 3167987 - RNA, 19 nt, Artificial Sequence
  Description of Artificial Sequence: Synthetic oligonucleotide
aacugaaagaguccaaugc

SEQ ID NO: 3167988 - RNA, 19 nt, Artificial Sequence
  Description of Artificial Sequence: Synthetic oligonucleotide
uaaaauuuugaucagcuga

SEQ ID NO: 3167989 - RNA, 19 nt, Artificial Sequence
  Description of Artificial Sequence: Synthetic oligonucleotide
auuaaaaucagauacuccu

SEQ ID NO: 3167990 - RNA, 19 nt, Artificial Sequence
  Description of Artificial Sequence: Synthetic oligonucleotide
uuaaaagccucugagaugg

SEQ ID NO: 3167991 - RNA, 19 nt, Artificial Sequence
  Description of Artificial Sequence: Synthetic oligonucleotide
ucuauguacuuuaaaagcc

SEQ ID NO: 3167992 - RNA, 19 nt, Artificial Sequence
  Description of Artificial Sequence: Synthetic oligonucleotide
ucugagaugguaauagagg

SEQ ID NO: 3167993 - RNA, 19 nt, Artificial Sequence
  Description of Artificial Sequence: Synthetic oligonucleotide
aacaacuucagucaacugu

SEQ ID NO: 3167994 - RNA, 19 nt, Artificial Sequence
  Description of Artificial Sequence: Synthetic oligonucleotide
uucuauguacuuuaaaagc

SEQ ID NO: 3167995 - RNA, 19 nt, Artificial Sequence
  Description of Artificial Sequence: Synthetic oligonucleotide
aaaacaaucaacuccugaa

SEQ ID NO: 3167996 - RNA, 19 nt, Artificial Sequence
  Description of Artificial Sequence: Synthetic oligonucleotide
uccacuaugaaccuccaag

SEQ ID NO: 3167997 - RNA, 19 nt, Artificial Sequence
  Description of Artificial Sequence: Synthetic oligonucleotide
cuucguaaaauuuugauca

SEQ ID NO: 3167998 - RNA, 19 nt, Artificial Sequence
  Description of Artificial Sequence: Synthetic oligonucleotide
gaaauggacaugaauauag

SEQ ID NO: 3167999 - RNA, 19 nt, Artificial Sequence
  Description of Artificial Sequence: Synthetic oligonucleotide
uacuuuaaaagccucugag

SEQ ID NO: 3168000 - RNA, 19 nt, Artificial Sequence
  Description of Artificial Sequence: Synthetic oligonucleotide
acaauauucuuucaaaagu

SEQ ID NO: 3168001 - RNA, 19 nt, Artificial Sequence
  Description of Artificial Sequence: Synthetic oligonucleotide
uccaagaccacaucgagcc

SEQ ID NO: 3168002 - RNA, 19 nt, Artificial Sequence
  Description of Artificial Sequence: Synthetic oligonucleotide
aacucgaagauuaaaauca

SEQ ID NO: 3168003 - RNA, 19 nt, Artificial Sequence
  Description of Artificial Sequence: Synthetic oligonucleotide
aacuacaaaacuuguucuc

SEQ ID NO: 3168004 - RNA, 19 nt, Artificial Sequence
  Description of Artificial Sequence: Synthetic oligonucleotide
uuugcaaugcaacucgaag

SEQ ID NO: 3168005 - RNA, 19 nt, Artificial Sequence
  Description of Artificial Sequence: Synthetic oligonucleotide
aauuggaucuaccacuucu

SEQ ID NO: 3168006 - RNA, 19 nt, Artificial Sequence
  Description of Artificial Sequence: Synthetic oligonucleotide
acuucguaaaauuuugauc

SEQ ID NO: 3168007 - RNA, 19 nt, Artificial Sequence
  Description of Artificial Sequence: Synthetic oligonucleotide
uauaguuuucuguaaauuc

SEQ ID NO: 3168008 - RNA, 19 nt, Artificial Sequence
  Description of Artificial Sequence: Synthetic oligonucleotide
agauacuccuucuauguac

SEQ ID NO: 3168009 - RNA, 19 nt, Artificial Sequence
  Description of Artificial Sequence: Synthetic oligonucleotide
ucaucuucaaugcuaagcu

SEQ ID NO: 3168010 - RNA, 19 nt, Artificial Sequence
  Description of Artificial Sequence: Synthetic oligonucleotide
aacuucagucaacuguagc

SEQ ID NO: 3168011 - RNA, 19 nt, Artificial Sequence
  Description of Artificial Sequence: Synthetic oligonucleotide
aaagguaucaaaacguucu

SEQ ID NO: 3168012 - RNA, 19 nt, Artificial Sequence
  Description of Artificial Sequence: Synthetic oligonucleotide
aaaguguuugcaaugcaac

SEQ ID NO: 3168013 - RNA, 19 nt, Artificial Sequence
  Description of Artificial Sequence: Synthetic oligonucleotide
acugcauacagguauuuuc

SEQ ID NO: 3168014 - RNA, 19 nt, Artificial Sequence
  Description of Artificial Sequence: Synthetic oligonucleotide
aggaaaucgaauuggaucu

SEQ ID NO: 3168015 - RNA, 19 nt, Artificial Sequence
  Description of Artificial Sequence: Synthetic oligonucleotide
aagaaauggacaugaauau

SEQ ID NO: 3168016 - RNA, 19 nt, Artificial Sequence
  Description of Artificial Sequence: Synthetic oligonucleotide
augguaauagaggaaaucg

SEQ ID NO: 3168017 - RNA, 19 nt, Artificial Sequence
  Description of Artificial Sequence: Synthetic oligonucleotide
ucuguaaauuccaaaagau

SEQ ID NO: 3168018 - RNA, 19 nt, Artificial Sequence
  Description of Artificial Sequence: Synthetic oligonucleotide
aaauuccaaaagaucaugg

SEQ ID NO: 3168019 - RNA, 19 nt, Artificial Sequence
  Description of Artificial Sequence: Synthetic oligonucleotide
aaucgaauuggaucuacca

SEQ ID NO: 3168020 - RNA, 19 nt, Artificial Sequence
  Description of Artificial Sequence: Synthetic oligonucleotide
caauauucuuucaaaagug

SEQ ID NO: 3168021 - RNA, 19 nt, Artificial Sequence
  Description of Artificial Sequence: Synthetic oligonucleotide
uguccuuucagaaauucac

SEQ ID NO: 3168022 - RNA, 19 nt, Artificial Sequence
  Description of Artificial Sequence: Synthetic oligonucleotide
uaucaaaacguucuacaca

SEQ ID NO: 3168023 - RNA, 19 nt, Artificial Sequence
  Description of Artificial Sequence: Synthetic oligonucleotide
aaagauuaacaacuucagu

SEQ ID NO: 3168024 - RNA, 19 nt, Artificial Sequence
  Description of Artificial Sequence: Synthetic oligonucleotide
uuuguaagugccaggaacu

SEQ ID NO: 3168025 - RNA, 19 nt, Artificial Sequence
  Description of Artificial Sequence: Synthetic oligonucleotide
aucgaauuggaucuaccac

SEQ ID NO: 3168026 - RNA, 19 nt, Artificial Sequence
  Description of Artificial Sequence: Synthetic oligonucleotide
aaugcuaagcuccucacuu

SEQ ID NO: 3168027 - RNA, 19 nt, Artificial Sequence
  Description of Artificial Sequence: Synthetic oligonucleotide
aauauaguuuucuguaaau

SEQ ID NO: 3168028 - RNA, 19 nt, Artificial Sequence
  Description of Artificial Sequence: Synthetic oligonucleotide
gaggaaaucgaauuggauc

SEQ ID NO: 3168029 - RNA, 19 nt, Artificial Sequence
  Description of Artificial Sequence: Synthetic oligonucleotide
accacaucgagccugauga

SEQ ID NO: 3168030 - RNA, 19 nt, Artificial Sequence
  Description of Artificial Sequence: Synthetic oligonucleotide
uagcaugucugcuagaaca

SEQ ID NO: 3168031 - RNA, 19 nt, Artificial Sequence
  Description of Artificial Sequence: Synthetic oligonucleotide
acagcaaagauuaacaacu

SEQ ID NO: 3168032 - RNA, 19 nt, Artificial Sequence
  Description of Artificial Sequence: Synthetic oligonucleotide
uugguacucaucuucaaug

SEQ ID NO: 3168033 - RNA, 19 nt, Artificial Sequence
  Description of Artificial Sequence: Synthetic oligonucleotide
uccaguacuggcuaaaggu

SEQ ID NO: 3168034 - RNA, 19 nt, Artificial Sequence
  Description of Artificial Sequence: Synthetic oligonucleotide
aaagaguccaaugcaguuc

SEQ ID NO: 3168035 - RNA, 19 nt, Artificial Sequence
  Description of Artificial Sequence: Synthetic oligonucleotide
uccuuucagaaauucacag

SEQ ID NO: 3168036 - RNA, 19 nt, Artificial Sequence
  Description of Artificial Sequence: Synthetic oligonucleotide
ugaugaagcgaagauacag

SEQ ID NO: 3168037 - RNA, 19 nt, Artificial Sequence
  Description of Artificial Sequence: Synthetic oligonucleotide
aaugcaguucuguggauca

SEQ ID NO: 3168038 - RNA, 19 nt, Artificial Sequence
  Description of Artificial Sequence: Synthetic oligonucleotide
uucaaaaguguuugcaaug

SEQ ID NO: 3168039 - RNA, 19 nt, Artificial Sequence
  Description of Artificial Sequence: Synthetic oligonucleotide
aaaaucagauacuccuucu

SEQ ID NO: 3168040 - RNA, 19 nt, Artificial Sequence
  Description of Artificial Sequence: Synthetic oligonucleotide
agcgaagauacaguggucc

SEQ ID NO: 3168041 - RNA, 19 nt, Artificial Sequence
  Description of Artificial Sequence: Synthetic oligonucleotide
ucgaauuggaucuaccacu

SEQ ID NO: 3168042 - RNA, 19 nt, Artificial Sequence
  Description of Artificial Sequence: Synthetic oligonucleotide
gaucaauuuguccuuucag

SEQ ID NO: 3168043 - RNA, 19 nt, Artificial Sequence
  Description of Artificial Sequence: Synthetic oligonucleotide
ucaauuuguccuuucagaa

SEQ ID NO: 3168044 - RNA, 19 nt, Artificial Sequence
  Description of Artificial Sequence: Synthetic oligonucleotide
uaauagaggaaaucgaauu

SEQ ID NO: 3168045 - RNA, 19 nt, Artificial Sequence
  Description of Artificial Sequence: Synthetic oligonucleotide
aaaagaucauggcaggcaa

SEQ ID NO: 3168046 - RNA, 19 nt, Artificial Sequence
  Description of Artificial Sequence: Synthetic oligonucleotide
uucuccacuaugaaccucc

SEQ ID NO: 3168047 - RNA, 19 nt, Artificial Sequence
  Description of Artificial Sequence: Synthetic oligonucleotide
uccaaugcaguucugugga

SEQ ID NO: 3168048 - RNA, 19 nt, Artificial Sequence
  Description of Artificial Sequence: Synthetic oligonucleotide
uuuaaaagccucugagaug

SEQ ID NO: 3168049 - RNA, 19 nt, Artificial Sequence
  Description of Artificial Sequence: Synthetic oligonucleotide
caagaaauggacaugaaua

SEQ ID NO: 3168050 - RNA, 19 nt, Artificial Sequence
  Description of Artificial Sequence: Synthetic oligonucleotide
caaaacuuguucucuuugg

SEQ ID NO: 3168051 - RNA, 19 nt, Artificial Sequence
  Description of Artificial Sequence: Synthetic oligonucleotide
uuaacaacuucagucaacu

SEQ ID NO: 3168052 - RNA, 19 nt, Artificial Sequence
  Description of Artificial Sequence: Synthetic oligonucleotide
agcguguauauccaccuac

SEQ ID NO: 3168053 - RNA, 19 nt, Artificial Sequence
  Description of Artificial Sequence: Synthetic oligonucleotide
aauauucuuucaaaagugu

SEQ ID NO: 3168054 - RNA, 19 nt, Artificial Sequence
  Description of Artificial Sequence: Synthetic oligonucleotide
ucaacuguagcaugucugc

SEQ ID NO: 3168055 - RNA, 19 nt, Artificial Sequence
  Description of Artificial Sequence: Synthetic oligonucleotide
aucaauuuguccuuucaga

SEQ ID NO: 3168056 - RNA, 19 nt, Artificial Sequence
  Description of Artificial Sequence: Synthetic oligonucleotide
cugaucuuuuguaagugcc

SEQ ID NO: 3168057 - RNA, 19 nt, Artificial Sequence
  Description of Artificial Sequence: Synthetic oligonucleotide
ucagcugaucuuuuguaag

SEQ ID NO: 3168058 - RNA, 19 nt, Artificial Sequence
  Description of Artificial Sequence: Synthetic oligonucleotide
ucaaaaguguuugcaaugc

SEQ ID NO: 3168059 - RNA, 19 nt, Artificial Sequence
  Description of Artificial Sequence: Synthetic oligonucleotide
aaaucgaauuggaucuacc

SEQ ID NO: 3168060 - RNA, 19 nt, Artificial Sequence
  Description of Artificial Sequence: Synthetic oligonucleotide
uugcaaugcaacucgaaga

SEQ ID NO: 3168061 - RNA, 19 nt, Artificial Sequence
  Description of Artificial Sequence: Synthetic oligonucleotide
guguuugcaaugcaacucg

SEQ ID NO: 3168062 - RNA, 19 nt, Artificial Sequence
  Description of Artificial Sequence: Synthetic oligonucleotide
acugaaagaguccaaugca

SEQ ID NO: 3168063 - RNA, 19 nt, Artificial Sequence
  Description of Artificial Sequence: Synthetic oligonucleotide
ucuuuuguaagugccagga

SEQ ID NO: 3168064 - RNA, 19 nt, Artificial Sequence
  Description of Artificial Sequence: Synthetic oligonucleotide
aaguguuugcaaugcaacu

SEQ ID NO: 3168065 - RNA, 19 nt, Artificial Sequence
  Description of Artificial Sequence: Synthetic oligonucleotide
ggcuaaagguaucaaaacg

SEQ ID NO: 3168066 - RNA, 19 nt, Artificial Sequence
  Description of Artificial Sequence: Synthetic oligonucleotide
aagauuaaaaucagauacu

SEQ ID NO: 3168067 - RNA, 19 nt, Artificial Sequence
  Description of Artificial Sequence: Synthetic oligonucleotide
aaaauuuugaucagcugau

SEQ ID NO: 3168068 - RNA, 19 nt, Artificial Sequence
  Description of Artificial Sequence: Synthetic oligonucleotide
agcaaagauuaacaacuuc

SEQ ID NO: 3168069 - RNA, 19 nt, Artificial Sequence
  Description of Artificial Sequence: Synthetic oligonucleotide
uaaauuccaaaagaucaug

SEQ ID NO: 3168070 - RNA, 19 nt, Artificial Sequence
  Description of Artificial Sequence: Synthetic oligonucleotide
acagugguccaguacuggc

SEQ ID NO: 3168071 - RNA, 19 nt, Artificial Sequence
  Description of Artificial Sequence: Synthetic oligonucleotide
augaagcgaagauacagug

SEQ ID NO: 3168072 - RNA, 19 nt, Artificial Sequence
  Description of Artificial Sequence: Synthetic oligonucleotide
ugguaauagaggaaaucga

SEQ ID NO: 3168073 - RNA, 19 nt, Artificial Sequence
  Description of Artificial Sequence: Synthetic oligonucleotide
gauuaaaaucagauacucc

SEQ ID NO: 3168074 - RNA, 19 nt, Artificial Sequence
  Description of Artificial Sequence: Synthetic oligonucleotide
acuuuaaaagccucugaga

SEQ ID NO: 3168075 - RNA, 19 nt, Artificial Sequence
  Description of Artificial Sequence: Synthetic oligonucleotide
acuguagcaugucugcuag

SEQ ID NO: 3168076 - RNA, 19 nt, Artificial Sequence
  Description of Artificial Sequence: Synthetic oligonucleotide
cugcauugcagcuaagaag

SEQ ID NO: 3168077 - RNA, 19 nt, Artificial Sequence
  Description of Artificial Sequence: Synthetic oligonucleotide
agauacagugguccaguac

SEQ ID NO: 3168078 - RNA, 19 nt, Artificial Sequence
  Description of Artificial Sequence: Synthetic oligonucleotide
gauacagugguccaguacu

SEQ ID NO: 3168079 - RNA, 19 nt, Artificial Sequence
  Description of Artificial Sequence: Synthetic oligonucleotide
auggcaggcaauuugcuca

SEQ ID NO: 3168080 - RNA, 19 nt, Artificial Sequence
  Description of Artificial Sequence: Synthetic oligonucleotide
acaugaauauaguuuucug

SEQ ID NO: 3168081 - RNA, 19 nt, Artificial Sequence
  Description of Artificial Sequence: Synthetic oligonucleotide
uucuacacagcugagggcu

SEQ ID NO: 3168082 - RNA, 19 nt, Artificial Sequence
  Description of Artificial Sequence: Synthetic oligonucleotide
ugaucuuuuguaagugcca

SEQ ID NO: 3168083 - RNA, 19 nt, Artificial Sequence
  Description of Artificial Sequence: Synthetic oligonucleotide
acaaaacuuguucucuuug

SEQ ID NO: 3168084 - RNA, 19 nt, Artificial Sequence
  Description of Artificial Sequence: Synthetic oligonucleotide
auuucuucaacauugcuuc

SEQ ID NO: 3168085 - RNA, 19 nt, Artificial Sequence
  Description of Artificial Sequence: Synthetic oligonucleotide
uaagaacugauaaagaaug

SEQ ID NO: 3168086 - RNA, 19 nt, Artificial Sequence
  Description of Artificial Sequence: Synthetic oligonucleotide
aauuuagcgaagaucagcc

SEQ ID NO: 3168087 - RNA, 19 nt, Artificial Sequence
  Description of Artificial Sequence: Synthetic oligonucleotide
agaaguaugaacuacuuca

SEQ ID NO: 3168088 - RNA, 19 nt, Artificial Sequence
  Description of Artificial Sequence: Synthetic oligonucleotide
aacuacuucauucauuaag

SEQ ID NO: 3168089 - RNA, 19 nt, Artificial Sequence
  Description of Artificial Sequence: Synthetic oligonucleotide
aguaugaacuacuucauuc

SEQ ID NO: 3168090 - RNA, 19 nt, Artificial Sequence
  Description of Artificial Sequence: Synthetic oligonucleotide
ucauuaagaacugauaaag

SEQ ID NO: 3168091 - RNA, 19 nt, Artificial Sequence
  Description of Artificial Sequence: Synthetic oligonucleotide
ucaacauugcuuccuaugg

SEQ ID NO: 3168092 - RNA, 19 nt, Artificial Sequence
  Description of Artificial Sequence: Synthetic oligonucleotide
acaaugauuacuuugugcu

SEQ ID NO: 3168093 - RNA, 19 nt, Artificial Sequence
  Description of Artificial Sequence: Synthetic oligonucleotide
uuuacacacacacacacac

SEQ ID NO: 3168094 - RNA, 19 nt, Artificial Sequence
  Description of Artificial Sequence: Synthetic oligonucleotide
aacugauaaagaauggugg

SEQ ID NO: 3168095 - RNA, 19 nt, Artificial Sequence
  Description of Artificial Sequence: Synthetic oligonucleotide
aacuauuucuucaacauug

SEQ ID NO: 3168096 - RNA, 19 nt, Artificial Sequence
  Description of Artificial Sequence: Synthetic oligonucleotide
acuucauucauuaagaacu

SEQ ID NO: 3168097 - RNA, 19 nt, Artificial Sequence
  Description of Artificial Sequence: Synthetic oligonucleotide
aagaaugguggucuucccc

SEQ ID NO: 3168098 - RNA, 19 nt, Artificial Sequence
  Description of Artificial Sequence: Synthetic oligonucleotide
uuuagcgaagaucagcccc

SEQ ID NO: 3168099 - RNA, 19 nt, Artificial Sequence
  Description of Artificial Sequence: Synthetic oligonucleotide
auuaagaacugauaaagaa

SEQ ID NO: 3168100 - RNA, 19 nt, Artificial Sequence
  Description of Artificial Sequence: Synthetic oligonucleotide
aaaggcuccacaauuuagc

SEQ ID NO: 3168101 - RNA, 19 nt, Artificial Sequence
  Description of Artificial Sequence: Synthetic oligonucleotide
cacaauuuagcgaagauca

SEQ ID NO: 3168102 - RNA, 19 nt, Artificial Sequence
  Description of Artificial Sequence: Synthetic oligonucleotide
auucauuaagaacugauaa

SEQ ID NO: 3168103 - RNA, 19 nt, Artificial Sequence
  Description of Artificial Sequence: Synthetic oligonucleotide
uuaagaacugauaaagaau

SEQ ID NO: 3168104 - RNA, 19 nt, Artificial Sequence
  Description of Artificial Sequence: Synthetic oligonucleotide
uguuuacacacacacacac

SEQ ID NO: 3168105 - RNA, 19 nt, Artificial Sequence
  Description of Artificial Sequence: Synthetic oligonucleotide
ugcucuugguuacagaaag

SEQ ID NO: 3168106 - RNA, 19 nt, Artificial Sequence
  Description of Artificial Sequence: Synthetic oligonucleotide
cuugguuacagaaaggcuc

SEQ ID NO: 3168107 - RNA, 19 nt, Artificial Sequence
  Description of Artificial Sequence: Synthetic oligonucleotide
aaugauuacuuugugcucu

SEQ ID NO: 3168108 - RNA, 19 nt, Artificial Sequence
  Description of Artificial Sequence: Synthetic oligonucleotide
aaggcuccacaauuuagcg

SEQ ID NO: 3168109 - RNA, 19 nt, Artificial Sequence
  Description of Artificial Sequence: Synthetic oligonucleotide
ugaacuacuucauucauua

SEQ ID NO: 3168110 - RNA, 19 nt, Artificial Sequence
  Description of Artificial Sequence: Synthetic oligonucleotide
gauuacuuugugcucuugg

SEQ ID NO: 3168111 - RNA, 19 nt, Artificial Sequence
  Description of Artificial Sequence: Synthetic oligonucleotide
aaagaaugguggucuuccc

SEQ ID NO: 3168112 - RNA, 19 nt, Artificial Sequence
  Description of Artificial Sequence: Synthetic oligonucleotide
gaagcuucgguccuucgcg

SEQ ID NO: 3168113 - RNA, 19 nt, Artificial Sequence
  Description of Artificial Sequence: Synthetic oligonucleotide
uaugguuggagaaguauga

SEQ ID NO: 3168114 - RNA, 19 nt, Artificial Sequence
  Description of Artificial Sequence: Synthetic oligonucleotide
uacacacacacacacacac

SEQ ID NO: 3168115 - RNA, 19 nt, Artificial Sequence
  Description of Artificial Sequence: Synthetic oligonucleotide
uauuucuucaacauugcuu

SEQ ID NO: 3168116 - RNA, 19 nt, Artificial Sequence
  Description of Artificial Sequence: Synthetic oligonucleotide
ugauaaagaaugguggucu

SEQ ID NO: 3168117 - RNA, 19 nt, Artificial Sequence
  Description of Artificial Sequence: Synthetic oligonucleotide
uugguuacagaaaggcucc

SEQ ID NO: 3168118 - RNA, 19 nt, Artificial Sequence
  Description of Artificial Sequence: Synthetic oligonucleotide
uaaagaaugguggucuucc

SEQ ID NO: 3168119 - RNA, 19 nt, Artificial Sequence
  Description of Artificial Sequence: Synthetic oligonucleotide
gaacugauaaagaauggug

SEQ ID NO: 3168120 - RNA, 19 nt, Artificial Sequence
  Description of Artificial Sequence: Synthetic oligonucleotide
ucauucauuaagaacugau

SEQ ID NO: 3168121 - RNA, 19 nt, Artificial Sequence
  Description of Artificial Sequence: Synthetic oligonucleotide
aaugguggucuuccccugc

SEQ ID NO: 3168122 - RNA, 19 nt, Artificial Sequence
  Description of Artificial Sequence: Synthetic oligonucleotide
acaacuauuucuucaacau

SEQ ID NO: 3168123 - RNA, 19 nt, Artificial Sequence
  Description of Artificial Sequence: Synthetic oligonucleotide
uucauuaagaacugauaaa

SEQ ID NO: 3168124 - RNA, 19 nt, Artificial Sequence
  Description of Artificial Sequence: Synthetic oligonucleotide
aucagccccaucaugagcc

SEQ ID NO: 3168125 - RNA, 19 nt, Artificial Sequence
  Description of Artificial Sequence: Synthetic oligonucleotide
cacaaugauuacuuugugc

SEQ ID NO: 3168126 - RNA, 19 nt, Artificial Sequence
  Description of Artificial Sequence: Synthetic oligonucleotide
uucaacauugcuuccuaug

SEQ ID NO: 3168127 - RNA, 19 nt, Artificial Sequence
  Description of Artificial Sequence: Synthetic oligonucleotide
uacuucauucauuaagaac

SEQ ID NO: 3168128 - RNA, 19 nt, Artificial Sequence
  Description of Artificial Sequence: Synthetic oligonucleotide
auuuagcgaagaucagccc

SEQ ID NO: 3168129 - RNA, 19 nt, Artificial Sequence
  Description of Artificial Sequence: Synthetic oligonucleotide
acugauaaagaaugguggu

SEQ ID NO: 3168130 - RNA, 19 nt, Artificial Sequence
  Description of Artificial Sequence: Synthetic oligonucleotide
uuauccagccccacaauga

SEQ ID NO: 3168131 - RNA, 19 nt, Artificial Sequence
  Description of Artificial Sequence: Synthetic oligonucleotide
aagaacugauaaagaaugg

SEQ ID NO: 3168132 - RNA, 19 nt, Artificial Sequence
  Description of Artificial Sequence: Synthetic oligonucleotide
ugugcucuugguuacagaa

SEQ ID NO: 3168133 - RNA, 19 nt, Artificial Sequence
  Description of Artificial Sequence: Synthetic oligonucleotide
aacauugcuuccuaugguu

SEQ ID NO: 3168134 - RNA, 19 nt, Artificial Sequence
  Description of Artificial Sequence: Synthetic oligonucleotide
auuauccagccccacaaug

SEQ ID NO: 3168135 - RNA, 19 nt, Artificial Sequence
  Description of Artificial Sequence: Synthetic oligonucleotide
cacacacacacacacgacg

SEQ ID NO: 3168136 - RNA, 19 nt, Artificial Sequence
  Description of Artificial Sequence: Synthetic oligonucleotide
cuaugguuggagaaguaug

SEQ ID NO: 3168137 - RNA, 19 nt, Artificial Sequence
  Description of Artificial Sequence: Synthetic oligonucleotide
auuacuuugugcucuuggu

SEQ ID NO: 3168138 - RNA, 19 nt, Artificial Sequence
  Description of Artificial Sequence: Synthetic oligonucleotide
acuuugugcucuugguuac

SEQ ID NO: 3168139 - RNA, 19 nt, Artificial Sequence
  Description of Artificial Sequence: Synthetic oligonucleotide
uggagaaguaugaacuacu

SEQ ID NO: 3168140 - RNA, 19 nt, Artificial Sequence
  Description of Artificial Sequence: Synthetic oligonucleotide
uuagcgaagaucagcccca

SEQ ID NO: 3168141 - RNA, 19 nt, Artificial Sequence
  Description of Artificial Sequence: Synthetic oligonucleotide
acuauuucuucaacauugc

SEQ ID NO: 3168142 - RNA, 19 nt, Artificial Sequence
  Description of Artificial Sequence: Synthetic oligonucleotide
aagaucagccccaucauga

SEQ ID NO: 3168143 - RNA, 19 nt, Artificial Sequence
  Description of Artificial Sequence: Synthetic oligonucleotide
uucuucacaacuauuucuu

SEQ ID NO: 3168144 - RNA, 19 nt, Artificial Sequence
  Description of Artificial Sequence: Synthetic oligonucleotide
uucacaacuauuucuucaa

SEQ ID NO: 3168145 - RNA, 19 nt, Artificial Sequence
  Description of Artificial Sequence: Synthetic oligonucleotide
uguucuucacaacuauuuc

SEQ ID NO: 3168146 - RNA, 19 nt, Artificial Sequence
  Description of Artificial Sequence: Synthetic oligonucleotide
cucuugguuacagaaaggc

SEQ ID NO: 3168147 - RNA, 19 nt, Artificial Sequence
  Description of Artificial Sequence: Synthetic oligonucleotide
ucuugguuacagaaaggcu

SEQ ID NO: 3168148 - RNA, 19 nt, Artificial Sequence
  Description of Artificial Sequence: Synthetic oligonucleotide
acuacuucauucauuaaga

SEQ ID NO: 3168149 - RNA, 19 nt, Artificial Sequence
  Description of Artificial Sequence: Synthetic oligonucleotide
cacacacacacacacacac

SEQ ID NO: 3168150 - RNA, 19 nt, Artificial Sequence
  Description of Artificial Sequence: Synthetic oligonucleotide
caauuuagcgaagaucagc

SEQ ID NO: 3168151 - RNA, 19 nt, Artificial Sequence
  Description of Artificial Sequence: Synthetic oligonucleotide
uacuuugugcucuugguua

SEQ ID NO: 3168152 - RNA, 19 nt, Artificial Sequence
  Description of Artificial Sequence: Synthetic oligonucleotide
agaaugguggucuuccccu

SEQ ID NO: 3168153 - RNA, 19 nt, Artificial Sequence
  Description of Artificial Sequence: Synthetic oligonucleotide
guaugaacuacuucauuca

SEQ ID NO: 3168154 - RNA, 19 nt, Artificial Sequence
  Description of Artificial Sequence: Synthetic oligonucleotide
cauugcuuccuaugguugg

SEQ ID NO: 3168155 - RNA, 19 nt, Artificial Sequence
  Description of Artificial Sequence: Synthetic oligonucleotide
uuacagaaaggcuccacaa

SEQ ID NO: 3168156 - RNA, 19 nt, Artificial Sequence
  Description of Artificial Sequence: Synthetic oligonucleotide
agaacugauaaagaauggu

SEQ ID NO: 3168157 - RNA, 19 nt, Artificial Sequence
  Description of Artificial Sequence: Synthetic oligonucleotide
uaugaacuacuucauucau

SEQ ID NO: 3168158 - RNA, 19 nt, Artificial Sequence
  Description of Artificial Sequence: Synthetic oligonucleotide
uccagccccacaaugauua

SEQ ID NO: 3168159 - RNA, 19 nt, Artificial Sequence
  Description of Artificial Sequence: Synthetic oligonucleotide
cuucauucauuaagaacug

SEQ ID NO: 3168160 - RNA, 19 nt, Artificial Sequence
  Description of Artificial Sequence: Synthetic oligonucleotide
acagaaaggcuccacaauu

SEQ ID NO: 3168161 - RNA, 19 nt, Artificial Sequence
  Description of Artificial Sequence: Synthetic oligonucleotide
uuccccugcauuauccagc

SEQ ID NO: 3168162 - RNA, 19 nt, Artificial Sequence
  Description of Artificial Sequence: Synthetic oligonucleotide
ugagccccggucaggaggg

SEQ ID NO: 3168163 - RNA, 19 nt, Artificial Sequence
  Description of Artificial Sequence: Synthetic oligonucleotide
ugguuggagaaguaugaac

SEQ ID NO: 3168164 - RNA, 19 nt, Artificial Sequence
  Description of Artificial Sequence: Synthetic oligonucleotide
gaagaucagccccaucaug

SEQ ID NO: 3168165 - RNA, 19 nt, Artificial Sequence
  Description of Artificial Sequence: Synthetic oligonucleotide
gaaaggcuccacaauuuag

SEQ ID NO: 3168166 - RNA, 19 nt, Artificial Sequence
  Description of Artificial Sequence: Synthetic oligonucleotide
augagccccggucaggagg

SEQ ID NO: 3168167 - RNA, 19 nt, Artificial Sequence
  Description of Artificial Sequence: Synthetic oligonucleotide
auaaagaaugguggucuuc

SEQ ID NO: 3168168 - RNA, 19 nt, Artificial Sequence
  Description of Artificial Sequence: Synthetic oligonucleotide
aagcuucgguccuucgcgg

SEQ ID NO: 3168169 - RNA, 19 nt, Artificial Sequence
  Description of Artificial Sequence: Synthetic oligonucleotide
cauuaagaacugauaaaga

SEQ ID NO: 3168170 - RNA, 19 nt, Artificial Sequence
  Description of Artificial Sequence: Synthetic oligonucleotide
gagaaguaugaacuacuuc

SEQ ID NO: 3168171 - RNA, 19 nt, Artificial Sequence
  Description of Artificial Sequence: Synthetic oligonucleotide
guuacagaaaggcuccaca

SEQ ID NO: 3168172 - RNA, 19 nt, Artificial Sequence
  Description of Artificial Sequence: Synthetic oligonucleotide
ugcauuauccagccccaca

SEQ ID NO: 3168173 - RNA, 19 nt, Artificial Sequence
  Description of Artificial Sequence: Synthetic oligonucleotide
cuucacaacuauuucuuca

SEQ ID NO: 3168174 - RNA, 19 nt, Artificial Sequence
  Description of Artificial Sequence: Synthetic oligonucleotide
uuacuuugugcucuugguu

SEQ ID NO: 3168175 - RNA, 19 nt, Artificial Sequence
  Description of Artificial Sequence: Synthetic oligonucleotide
uuacacacacacacacaca

SEQ ID NO: 3168176 - RNA, 19 nt, Artificial Sequence
  Description of Artificial Sequence: Synthetic oligonucleotide
aaguaugaacuacuucauu

SEQ ID NO: 3168177 - RNA, 19 nt, Artificial Sequence
  Description of Artificial Sequence: Synthetic oligonucleotide
uacagaaaggcuccacaau

SEQ ID NO: 3168178 - RNA, 19 nt, Artificial Sequence
  Description of Artificial Sequence: Synthetic oligonucleotide
cacaacuauuucuucaaca

SEQ ID NO: 3168179 - RNA, 19 nt, Artificial Sequence
  Description of Artificial Sequence: Synthetic oligonucleotide
uuggagaaguaugaacuac

SEQ ID NO: 3168180 - RNA, 19 nt, Artificial Sequence
  Description of Artificial Sequence: Synthetic oligonucleotide
acacacacacacacgacgg

SEQ ID NO: 3168181 - RNA, 19 nt, Artificial Sequence
  Description of Artificial Sequence: Synthetic oligonucleotide
acacacacgacggggacgg

SEQ ID NO: 3168182 - RNA, 19 nt, Artificial Sequence
  Description of Artificial Sequence: Synthetic oligonucleotide
agcgcugggcggcaagugc

SEQ ID NO: 3168183 - RNA, 19 nt, Artificial Sequence
  Description of Artificial Sequence: Synthetic oligonucleotide
uuugugcucuugguuacag

SEQ ID NO: 3168184 - RNA, 19 nt, Artificial Sequence
  Description of Artificial Sequence: Synthetic oligonucleotide
acuuaauuuaaguugaugg

SEQ ID NO: 3168185 - RNA, 19 nt, Artificial Sequence
  Description of Artificial Sequence: Synthetic oligonucleotide
aaaacgaacucuuagagga

SEQ ID NO: 3168186 - RNA, 19 nt, Artificial Sequence
  Description of Artificial Sequence: Synthetic oligonucleotide
uuagauagcacaauaagug

SEQ ID NO: 3168187 - RNA, 19 nt, Artificial Sequence
  Description of Artificial Sequence: Synthetic oligonucleotide
aauuuaaguugauggaacc

SEQ ID NO: 3168188 - RNA, 19 nt, Artificial Sequence
  Description of Artificial Sequence: Synthetic oligonucleotide
aauuagauagcacaauaag

SEQ ID NO: 3168189 - RNA, 19 nt, Artificial Sequence
  Description of Artificial Sequence: Synthetic oligonucleotide
uuuacgaucaucauuucgc

SEQ ID NO: 3168190 - RNA, 19 nt, Artificial Sequence
  Description of Artificial Sequence: Synthetic oligonucleotide
uauacuaacccuuacagaa

SEQ ID NO: 3168191 - RNA, 19 nt, Artificial Sequence
  Description of Artificial Sequence: Synthetic oligonucleotide
uucuuuaugaagaaguucu

SEQ ID NO: 3168192 - RNA, 19 nt, Artificial Sequence
  Description of Artificial Sequence: Synthetic oligonucleotide
aaaguaauauacuaacccu

SEQ ID NO: 3168193 - RNA, 19 nt, Artificial Sequence
  Description of Artificial Sequence: Synthetic oligonucleotide
uuuaugaagaaguucuucc

SEQ ID NO: 3168194 - RNA, 19 nt, Artificial Sequence
  Description of Artificial Sequence: Synthetic oligonucleotide
agcacaauaaguguaagac

SEQ ID NO: 3168195 - RNA, 19 nt, Artificial Sequence
  Description of Artificial Sequence: Synthetic oligonucleotide
aauagcgugagcaugauga

SEQ ID NO: 3168196 - RNA, 19 nt, Artificial Sequence
  Description of Artificial Sequence: Synthetic oligonucleotide
auuaucaugguguuguaag

SEQ ID NO: 3168197 - RNA, 19 nt, Artificial Sequence
  Description of Artificial Sequence: Synthetic oligonucleotide
ugaacagugcgucaguggg

SEQ ID NO: 3168198 - RNA, 19 nt, Artificial Sequence
  Description of Artificial Sequence: Synthetic oligonucleotide
uauuaucuaggcaaguuug

SEQ ID NO: 3168199 - RNA, 19 nt, Artificial Sequence
  Description of Artificial Sequence: Synthetic oligonucleotide
ugaugaaccauccaggcac

SEQ ID NO: 3168200 - RNA, 19 nt, Artificial Sequence
  Description of Artificial Sequence: Synthetic oligonucleotide
uuuaaguugauggaacccg

SEQ ID NO: 3168201 - RNA, 19 nt, Artificial Sequence
  Description of Artificial Sequence: Synthetic oligonucleotide
ucuuagaggaaacacuaag

SEQ ID NO: 3168202 - RNA, 19 nt, Artificial Sequence
  Description of Artificial Sequence: Synthetic oligonucleotide
gugucaaugacuuccaggg

SEQ ID NO: 3168203 - RNA, 19 nt, Artificial Sequence
  Description of Artificial Sequence: Synthetic oligonucleotide
gaugugaucacccacucug

SEQ ID NO: 3168204 - RNA, 19 nt, Artificial Sequence
  Description of Artificial Sequence: Synthetic oligonucleotide
uuaaacaaauuagauagca

SEQ ID NO: 3168205 - RNA, 19 nt, Artificial Sequence
  Description of Artificial Sequence: Synthetic oligonucleotide
uccgaagaaagccugcugg

SEQ ID NO: 3168206 - RNA, 19 nt, Artificial Sequence
  Description of Artificial Sequence: Synthetic oligonucleotide
ugaucacccacucugaucu

SEQ ID NO: 3168207 - RNA, 19 nt, Artificial Sequence
  Description of Artificial Sequence: Synthetic oligonucleotide
uggacuuaauuuaaguuga

SEQ ID NO: 3168208 - RNA, 19 nt, Artificial Sequence
  Description of Artificial Sequence: Synthetic oligonucleotide
uaauuuaaguugauggaac

SEQ ID NO: 3168209 - RNA, 19 nt, Artificial Sequence
  Description of Artificial Sequence: Synthetic oligonucleotide
acagguaauugccugaauc

SEQ ID NO: 3168210 - RNA, 19 nt, Artificial Sequence
  Description of Artificial Sequence: Synthetic oligonucleotide
ucuacuccauagaugaucc

SEQ ID NO: 3168211 - RNA, 19 nt, Artificial Sequence
  Description of Artificial Sequence: Synthetic oligonucleotide
uuugcagugggaaaauagc

SEQ ID NO: 3168212 - RNA, 19 nt, Artificial Sequence
  Description of Artificial Sequence: Synthetic oligonucleotide
cuaaaguaauauacuaacc

SEQ ID NO: 3168213 - RNA, 19 nt, Artificial Sequence
  Description of Artificial Sequence: Synthetic oligonucleotide
gaagaguuugcaugaaucc

SEQ ID NO: 3168214 - RNA, 19 nt, Artificial Sequence
  Description of Artificial Sequence: Synthetic oligonucleotide
ugugucaaugacuuccagg

SEQ ID NO: 3168215 - RNA, 19 nt, Artificial Sequence
  Description of Artificial Sequence: Synthetic oligonucleotide
gaaacacuaaguuggauga

SEQ ID NO: 3168216 - RNA, 19 nt, Artificial Sequence
  Description of Artificial Sequence: Synthetic oligonucleotide
uguaaacauccacauaaug

SEQ ID NO: 3168217 - RNA, 19 nt, Artificial Sequence
  Description of Artificial Sequence: Synthetic oligonucleotide
acgaucaucauuucgccuc

SEQ ID NO: 3168218 - RNA, 19 nt, Artificial Sequence
  Description of Artificial Sequence: Synthetic oligonucleotide
gaugaugugaacaucugug

SEQ ID NO: 3168219 - RNA, 19 nt, Artificial Sequence
  Description of Artificial Sequence: Synthetic oligonucleotide
uuuaaacaaauuagauagc

SEQ ID NO: 3168220 - RNA, 19 nt, Artificial Sequence
  Description of Artificial Sequence: Synthetic oligonucleotide
auuuaaguugauggaaccc

SEQ ID NO: 3168221 - RNA, 19 nt, Artificial Sequence
  Description of Artificial Sequence: Synthetic oligonucleotide
gaacugaaaacaaagugug

SEQ ID NO: 3168222 - RNA, 19 nt, Artificial Sequence
  Description of Artificial Sequence: Synthetic oligonucleotide
aaauguucugugucaauga

SEQ ID NO: 3168223 - RNA, 19 nt, Artificial Sequence
  Description of Artificial Sequence: Synthetic oligonucleotide
ucuggaauugccaguauac

SEQ ID NO: 3168224 - RNA, 19 nt, Artificial Sequence
  Description of Artificial Sequence: Synthetic oligonucleotide
uuaauuuaaguugauggaa

SEQ ID NO: 3168225 - RNA, 19 nt, Artificial Sequence
  Description of Artificial Sequence: Synthetic oligonucleotide
uguucugugucaaugacuu

SEQ ID NO: 3168226 - RNA, 19 nt, Artificial Sequence
  Description of Artificial Sequence: Synthetic oligonucleotide
ucgucuucgagccaucucc

SEQ ID NO: 3168227 - RNA, 19 nt, Artificial Sequence
  Description of Artificial Sequence: Synthetic oligonucleotide
ugugaucucugucaggugu

SEQ ID NO: 3168228 - RNA, 19 nt, Artificial Sequence
  Description of Artificial Sequence: Synthetic oligonucleotide
cugguagacaaaacuaucc

SEQ ID NO: 3168229 - RNA, 19 nt, Artificial Sequence
  Description of Artificial Sequence: Synthetic oligonucleotide
cagaacugaaaacaaagug

SEQ ID NO: 3168230 - RNA, 19 nt, Artificial Sequence
  Description of Artificial Sequence: Synthetic oligonucleotide
uucagaagaguuugcauga

SEQ ID NO: 3168231 - RNA, 19 nt, Artificial Sequence
  Description of Artificial Sequence: Synthetic oligonucleotide
agaacugaaaacaaagugu

SEQ ID NO: 3168232 - RNA, 19 nt, Artificial Sequence
  Description of Artificial Sequence: Synthetic oligonucleotide
uuaugaagaaguucuucca

SEQ ID NO: 3168233 - RNA, 19 nt, Artificial Sequence
  Description of Artificial Sequence: Synthetic oligonucleotide
gaugauccucuccucaagg

SEQ ID NO: 3168234 - RNA, 19 nt, Artificial Sequence
  Description of Artificial Sequence: Synthetic oligonucleotide
ugaacaucugugcucaccu

SEQ ID NO: 3168235 - RNA, 19 nt, Artificial Sequence
  Description of Artificial Sequence: Synthetic oligonucleotide
cagguaauugccugaaucc

SEQ ID NO: 3168236 - RNA, 19 nt, Artificial Sequence
  Description of Artificial Sequence: Synthetic oligonucleotide
aaaauccuacucuagcuua

SEQ ID NO: 3168237 - RNA, 19 nt, Artificial Sequence
  Description of Artificial Sequence: Synthetic oligonucleotide
cuuugcagugggaaaauag

SEQ ID NO: 3168238 - RNA, 19 nt, Artificial Sequence
  Description of Artificial Sequence: Synthetic oligonucleotide
cuuaauuuaaguugaugga

SEQ ID NO: 3168239 - RNA, 19 nt, Artificial Sequence
  Description of Artificial Sequence: Synthetic oligonucleotide
uggaauugccaguauacca

SEQ ID NO: 3168240 - RNA, 19 nt, Artificial Sequence
  Description of Artificial Sequence: Synthetic oligonucleotide
agaagaguuugcaugaauc

SEQ ID NO: 3168241 - RNA, 19 nt, Artificial Sequence
  Description of Artificial Sequence: Synthetic oligonucleotide
cugcauuccaagaaugugc

SEQ ID NO: 3168242 - RNA, 19 nt, Artificial Sequence
  Description of Artificial Sequence: Synthetic oligonucleotide
aacaucugugcucaccugu

SEQ ID NO: 3168243 - RNA, 19 nt, Artificial Sequence
  Description of Artificial Sequence: Synthetic oligonucleotide
uugcagacugcgaagcagg

SEQ ID NO: 3168244 - RNA, 19 nt, Artificial Sequence
  Description of Artificial Sequence: Synthetic oligonucleotide
uaugaagaaguucuuccaa

SEQ ID NO: 3168245 - RNA, 19 nt, Artificial Sequence
  Description of Artificial Sequence: Synthetic oligonucleotide
ucagguguuugguauuccg

SEQ ID NO: 3168246 - RNA, 19 nt, Artificial Sequence
  Description of Artificial Sequence: Synthetic oligonucleotide
uucuuuugcagacugcgaa

SEQ ID NO: 3168247 - RNA, 19 nt, Artificial Sequence
  Description of Artificial Sequence: Synthetic oligonucleotide
auuagauagcacaauaagu

SEQ ID NO: 3168248 - RNA, 19 nt, Artificial Sequence
  Description of Artificial Sequence: Synthetic oligonucleotide
uacuaacccuuacagaacu

SEQ ID NO: 3168249 - RNA, 19 nt, Artificial Sequence
  Description of Artificial Sequence: Synthetic oligonucleotide
aacacuaaguuggaugaug

SEQ ID NO: 3168250 - RNA, 19 nt, Artificial Sequence
  Description of Artificial Sequence: Synthetic oligonucleotide
uagauagcacaauaagugu

SEQ ID NO: 3168251 - RNA, 19 nt, Artificial Sequence
  Description of Artificial Sequence: Synthetic oligonucleotide
uaaguugauggaacccggg

SEQ ID NO: 3168252 - RNA, 19 nt, Artificial Sequence
  Description of Artificial Sequence: Synthetic oligonucleotide
ugguagacaaaacuauccu

SEQ ID NO: 3168253 - RNA, 19 nt, Artificial Sequence
  Description of Artificial Sequence: Synthetic oligonucleotide
ggaaacacuaaguuggaug

SEQ ID NO: 3168254 - RNA, 19 nt, Artificial Sequence
  Description of Artificial Sequence: Synthetic oligonucleotide
ucaccugugaucucuguca

SEQ ID NO: 3168255 - RNA, 19 nt, Artificial Sequence
  Description of Artificial Sequence: Synthetic oligonucleotide
aaauuagauagcacaauaa

SEQ ID NO: 3168256 - RNA, 19 nt, Artificial Sequence
  Description of Artificial Sequence: Synthetic oligonucleotide
acuaaguuggaugauguga

SEQ ID NO: 3168257 - RNA, 19 nt, Artificial Sequence
  Description of Artificial Sequence: Synthetic oligonucleotide
uaucuaggcaaguuuguac

SEQ ID NO: 3168258 - RNA, 19 nt, Artificial Sequence
  Description of Artificial Sequence: Synthetic oligonucleotide
aacaaauuagauagcacaa

SEQ ID NO: 3168259 - RNA, 19 nt, Artificial Sequence
  Description of Artificial Sequence: Synthetic oligonucleotide
aacagugcgucaguggguc

SEQ ID NO: 3168260 - RNA, 19 nt, Artificial Sequence
  Description of Artificial Sequence: Synthetic oligonucleotide
gaauccuucuuuugcagac

SEQ ID NO: 3168261 - RNA, 19 nt, Artificial Sequence
  Description of Artificial Sequence: Synthetic oligonucleotide
cagacugcgaagcaggagc

SEQ ID NO: 3168262 - RNA, 19 nt, Artificial Sequence
  Description of Artificial Sequence: Synthetic oligonucleotide
ucuuuugcagacugcgaag

SEQ ID NO: 3168263 - RNA, 19 nt, Artificial Sequence
  Description of Artificial Sequence: Synthetic oligonucleotide
acuauccuugaauccaauc

SEQ ID NO: 3168264 - RNA, 19 nt, Artificial Sequence
  Description of Artificial Sequence: Synthetic oligonucleotide
aucucugucagguguuugg

SEQ ID NO: 3168265 - RNA, 19 nt, Artificial Sequence
  Description of Artificial Sequence: Synthetic oligonucleotide
uuacgaucaucauuucgcc

SEQ ID NO: 3168266 - RNA, 19 nt, Artificial Sequence
  Description of Artificial Sequence: Synthetic oligonucleotide
cccauggugauuaucaugg

SEQ ID NO: 3168267 - RNA, 19 nt, Artificial Sequence
  Description of Artificial Sequence: Synthetic oligonucleotide
uucgucucuuugcaguggg

SEQ ID NO: 3168268 - RNA, 19 nt, Artificial Sequence
  Description of Artificial Sequence: Synthetic oligonucleotide
acugaaaacaaagugugaa

SEQ ID NO: 3168269 - RNA, 19 nt, Artificial Sequence
  Description of Artificial Sequence: Synthetic oligonucleotide
gaauugccaguauaccaag

SEQ ID NO: 3168270 - RNA, 19 nt, Artificial Sequence
  Description of Artificial Sequence: Synthetic oligonucleotide
augucuugacgucuuguuc

SEQ ID NO: 3168271 - RNA, 19 nt, Artificial Sequence
  Description of Artificial Sequence: Synthetic oligonucleotide
aaugacuuccagggucacc

SEQ ID NO: 3168272 - RNA, 19 nt, Artificial Sequence
  Description of Artificial Sequence: Synthetic oligonucleotide
ucugucagguguuugguau

SEQ ID NO: 3168273 - RNA, 19 nt, Artificial Sequence
  Description of Artificial Sequence: Synthetic oligonucleotide
gaaaauagcgugagcauga

SEQ ID NO: 3168274 - RNA, 19 nt, Artificial Sequence
  Description of Artificial Sequence: Synthetic oligonucleotide
acaagcuuugccauaaaug

SEQ ID NO: 3168275 - RNA, 19 nt, Artificial Sequence
  Description of Artificial Sequence: Synthetic oligonucleotide
gcaaguuuguacuuguuug

SEQ ID NO: 3168276 - RNA, 19 nt, Artificial Sequence
  Description of Artificial Sequence: Synthetic oligonucleotide
ugugcugcuguuuucuacu

SEQ ID NO: 3168277 - RNA, 19 nt, Artificial Sequence
  Description of Artificial Sequence: Synthetic oligonucleotide
acccuuacagaacugaaaa

SEQ ID NO: 3168278 - RNA, 19 nt, Artificial Sequence
  Description of Artificial Sequence: Synthetic oligonucleotide
aucauuucgccucuggaau

SEQ ID NO: 3168279 - RNA, 19 nt, Artificial Sequence
  Description of Artificial Sequence: Synthetic oligonucleotide
acagcgauguagaggaagc

SEQ ID NO: 3168280 - RNA, 19 nt, Artificial Sequence
  Description of Artificial Sequence: Synthetic oligonucleotide
cccaccauuguaaacaucc

SEQ ID NO: 3168281 - RNA, 19 nt, Artificial Sequence
  Description of Artificial Sequence: Synthetic oligonucleotide
ugaugaugugaucacccac

SEQ ID NO: 3168282 - RNA, 19 nt, Artificial Sequence
  Description of Artificial Sequence: Synthetic oligonucleotide
uccacauaaugccaugaaa

SEQ ID NO: 3168283 - RNA, 19 nt, Artificial Sequence
  Description of Artificial Sequence: Synthetic oligonucleotide
gcuguuuucuacuccauag

SEQ ID NO: 3168284 - RNA, 19 nt, Artificial Sequence
  Description of Artificial Sequence: Synthetic oligonucleotide
aaaaccguguaucugaagc

SEQ ID NO: 3168285 - RNA, 19 nt, Artificial Sequence
  Description of Artificial Sequence: Synthetic oligonucleotide
aaugcaagauuucugcugc

SEQ ID NO: 3168286 - RNA, 19 nt, Artificial Sequence
  Description of Artificial Sequence: Synthetic oligonucleotide
aagcauguggcucauuucc

SEQ ID NO: 3168287 - RNA, 19 nt, Artificial Sequence
  Description of Artificial Sequence: Synthetic oligonucleotide
ucauacuuaagcauguggc

SEQ ID NO: 3168288 - RNA, 19 nt, Artificial Sequence
  Description of Artificial Sequence: Synthetic oligonucleotide
ucuuucaguugccugaugg

SEQ ID NO: 3168289 - RNA, 19 nt, Artificial Sequence
  Description of Artificial Sequence: Synthetic oligonucleotide
cuucuuuugagugaaaacc

SEQ ID NO: 3168290 - RNA, 19 nt, Artificial Sequence
  Description of Artificial Sequence: Synthetic oligonucleotide
aauuuuggcagcaacaggu

SEQ ID NO: 3168291 - RNA, 19 nt, Artificial Sequence
  Description of Artificial Sequence: Synthetic oligonucleotide
gaugaugucuucuuuugag

SEQ ID NO: 3168292 - RNA, 19 nt, Artificial Sequence
  Description of Artificial Sequence: Synthetic oligonucleotide
agcacuuccuuucucauuc

SEQ ID NO: 3168293 - RNA, 19 nt, Artificial Sequence
  Description of Artificial Sequence: Synthetic oligonucleotide
uccaaugcaagauuucugc

SEQ ID NO: 3168294 - RNA, 19 nt, Artificial Sequence
  Description of Artificial Sequence: Synthetic oligonucleotide
aagaugaugucuucuuuug

SEQ ID NO: 3168295 - RNA, 19 nt, Artificial Sequence
  Description of Artificial Sequence: Synthetic oligonucleotide
ucucauucuguccaguuca

SEQ ID NO: 3168296 - RNA, 19 nt, Artificial Sequence
  Description of Artificial Sequence: Synthetic oligonucleotide
ugguuaaucggccuacuag

SEQ ID NO: 3168297 - RNA, 19 nt, Artificial Sequence
  Description of Artificial Sequence: Synthetic oligonucleotide
uuuugagugaaaaccgugu

SEQ ID NO: 3168298 - RNA, 19 nt, Artificial Sequence
  Description of Artificial Sequence: Synthetic oligonucleotide
ucgaagguggaacaggagc

SEQ ID NO: 3168299 - RNA, 19 nt, Artificial Sequence
  Description of Artificial Sequence: Synthetic oligonucleotide
uaucugaagcugaagacgu

SEQ ID NO: 3168300 - RNA, 19 nt, Artificial Sequence
  Description of Artificial Sequence: Synthetic oligonucleotide
acucauccaauuuuggcag

SEQ ID NO: 3168301 - RNA, 19 nt, Artificial Sequence
  Description of Artificial Sequence: Synthetic oligonucleotide
ugaugucuucuuuugagug

SEQ ID NO: 3168302 - RNA, 19 nt, Artificial Sequence
  Description of Artificial Sequence: Synthetic oligonucleotide
  modified_base (10)..(10): a, c, u, g, unknown or other
uguuccagcnguuccagcu

SEQ ID NO: 3168303 - RNA, 19 nt, Artificial Sequence
  Description of Artificial Sequence: Synthetic oligonucleotide
aaagaugaugucuucuuuu

SEQ ID NO: 3168304 - RNA, 19 nt, Artificial Sequence
  Description of Artificial Sequence: Synthetic oligonucleotide
uguaucugaagcugaagac

SEQ ID NO: 3168305 - RNA, 19 nt, Artificial Sequence
  Description of Artificial Sequence: Synthetic oligonucleotide
aacaggucaaccagggugg

SEQ ID NO: 3168306 - RNA, 19 nt, Artificial Sequence
  Description of Artificial Sequence: Synthetic oligonucleotide
ucugaagcugaagacgucg

SEQ ID NO: 3168307 - RNA, 19 nt, Artificial Sequence
  Description of Artificial Sequence: Synthetic oligonucleotide
uccaauuuuggcagcaaca

SEQ ID NO: 3168308 - RNA, 19 nt, Artificial Sequence
  Description of Artificial Sequence: Synthetic oligonucleotide
cauucuguccaguucauug

SEQ ID NO: 3168309 - RNA, 19 nt, Artificial Sequence
  Description of Artificial Sequence: Synthetic oligonucleotide
auucuguccaguucauugg

SEQ ID NO: 3168310 - RNA, 19 nt, Artificial Sequence
  Description of Artificial Sequence: Synthetic oligonucleotide
gucauacuuaagcaugugg

SEQ ID NO: 3168311 - RNA, 19 nt, Artificial Sequence
  Description of Artificial Sequence: Synthetic oligonucleotide
guaucugaagcugaagacg

SEQ ID NO: 3168312 - RNA, 19 nt, Artificial Sequence
  Description of Artificial Sequence: Synthetic oligonucleotide
ucugaugaggguccaaaga

SEQ ID NO: 3168313 - RNA, 19 nt, Artificial Sequence
  Description of Artificial Sequence: Synthetic oligonucleotide
gaacuguuccuucugauga

SEQ ID NO: 3168314 - RNA, 19 nt, Artificial Sequence
  Description of Artificial Sequence: Synthetic oligonucleotide
uacaagcuggaacuguucc

SEQ ID NO: 3168315 - RNA, 19 nt, Artificial Sequence
  Description of Artificial Sequence: Synthetic oligonucleotide
uccuuucucauucugucca

SEQ ID NO: 3168316 - RNA, 19 nt, Artificial Sequence
  Description of Artificial Sequence: Synthetic oligonucleotide
  modified_base (18)..(18): a, c, u, g, unknown or other
ucaaccacuguuccagcng

SEQ ID NO: 3168317 - RNA, 19 nt, Artificial Sequence
  Description of Artificial Sequence: Synthetic oligonucleotide
agauuucugcugcugcacc

SEQ ID NO: 3168318 - RNA, 19 nt, Artificial Sequence
  Description of Artificial Sequence: Synthetic oligonucleotide
ugccugauggaucucacca

SEQ ID NO: 3168319 - RNA, 19 nt, Artificial Sequence
  Description of Artificial Sequence: Synthetic oligonucleotide
uuaagcauguggcucauuu

SEQ ID NO: 3168320 - RNA, 19 nt, Artificial Sequence
  Description of Artificial Sequence: Synthetic oligonucleotide
aagauuucugcugcugcac

SEQ ID NO: 3168321 - RNA, 19 nt, Artificial Sequence
  Description of Artificial Sequence: Synthetic oligonucleotide
caacaggucaaccagggug

SEQ ID NO: 3168322 - RNA, 19 nt, Artificial Sequence
  Description of Artificial Sequence: Synthetic oligonucleotide
aaaccguguaucugaagcu

SEQ ID NO: 3168323 - RNA, 19 nt, Artificial Sequence
  Description of Artificial Sequence: Synthetic oligonucleotide
ugucuguacaagcuggaac

SEQ ID NO: 3168324 - RNA, 19 nt, Artificial Sequence
  Description of Artificial Sequence: Synthetic oligonucleotide
ucuucuuuugagugaaaac

SEQ ID NO: 3168325 - RNA, 19 nt, Artificial Sequence
  Description of Artificial Sequence: Synthetic oligonucleotide
auacuuaagcauguggcuc

SEQ ID NO: 3168326 - RNA, 19 nt, Artificial Sequence
  Description of Artificial Sequence: Synthetic oligonucleotide
aaccagggugguuaaucgg

SEQ ID NO: 3168327 - RNA, 19 nt, Artificial Sequence
  Description of Artificial Sequence: Synthetic oligonucleotide
auggaucucaccaacaucu

SEQ ID NO: 3168328 - RNA, 19 nt, Artificial Sequence
  Description of Artificial Sequence: Synthetic oligonucleotide
ucuuuugagugaaaaccgu

SEQ ID NO: 3168329 - RNA, 19 nt, Artificial Sequence
  Description of Artificial Sequence: Synthetic oligonucleotide
uuugcugaacauguccccg

SEQ ID NO: 3168330 - RNA, 19 nt, Artificial Sequence
  Description of Artificial Sequence: Synthetic oligonucleotide
auuuccuucagcugucuca

SEQ ID NO: 3168331 - RNA, 19 nt, Artificial Sequence
  Description of Artificial Sequence: Synthetic oligonucleotide
ucaguugccugauggaucu

SEQ ID NO: 3168332 - RNA, 19 nt, Artificial Sequence
  Description of Artificial Sequence: Synthetic oligonucleotide
auccaauuuuggcagcaac

SEQ ID NO: 3168333 - RNA, 19 nt, Artificial Sequence
  Description of Artificial Sequence: Synthetic oligonucleotide
ugaugaggguccaaagaug

SEQ ID NO: 3168334 - RNA, 19 nt, Artificial Sequence
  Description of Artificial Sequence: Synthetic oligonucleotide
uacuuaagcauguggcuca

SEQ ID NO: 3168335 - RNA, 19 nt, Artificial Sequence
  Description of Artificial Sequence: Synthetic oligonucleotide
  modified_base (4)..(4): a, c, u, g, unknown or other
agcnguuccagcugcagcu

SEQ ID NO: 3168336 - RNA, 19 nt, Artificial Sequence
  Description of Artificial Sequence: Synthetic oligonucleotide
ugagugaaaaccguguauc

SEQ ID NO: 3168337 - RNA, 19 nt, Artificial Sequence
  Description of Artificial Sequence: Synthetic oligonucleotide
cuuuugagugaaaaccgug

SEQ ID NO: 3168338 - RNA, 19 nt, Artificial Sequence
  Description of Artificial Sequence: Synthetic oligonucleotide
caaugcaagauuucugcug

SEQ ID NO: 3168339 - RNA, 19 nt, Artificial Sequence
  Description of Artificial Sequence: Synthetic oligonucleotide
aacuguuccuucugaugag

SEQ ID NO: 3168340 - RNA, 19 nt, Artificial Sequence
  Description of Artificial Sequence: Synthetic oligonucleotide
uuaaucggccuacuagugu

SEQ ID NO: 3168341 - RNA, 19 nt, Artificial Sequence
  Description of Artificial Sequence: Synthetic oligonucleotide
uccacucauccaauuuugg

SEQ ID NO: 3168342 - RNA, 19 nt, Artificial Sequence
  Description of Artificial Sequence: Synthetic oligonucleotide
uuuuggcagcaacagguca

SEQ ID NO: 3168343 - RNA, 19 nt, Artificial Sequence
  Description of Artificial Sequence: Synthetic oligonucleotide
ggaacaggagcuuugcucc

SEQ ID NO: 3168344 - RNA, 19 nt, Artificial Sequence
  Description of Artificial Sequence: Synthetic oligonucleotide
ugucgaagguggaacagga

SEQ ID NO: 3168345 - RNA, 19 nt, Artificial Sequence
  Description of Artificial Sequence: Synthetic oligonucleotide
aguucauuggcuguugucu

SEQ ID NO: 3168346 - RNA, 19 nt, Artificial Sequence
  Description of Artificial Sequence: Synthetic oligonucleotide
uggaacaggagcuuugcuc

SEQ ID NO: 3168347 - RNA, 19 nt, Artificial Sequence
  Description of Artificial Sequence: Synthetic oligonucleotide
gaagcugaagacgucgugc

SEQ ID NO: 3168348 - RNA, 19 nt, Artificial Sequence
  Description of Artificial Sequence: Synthetic oligonucleotide
uuugcuccagccgucaacc

SEQ ID NO: 3168349 - RNA, 19 nt, Artificial Sequence
  Description of Artificial Sequence: Synthetic oligonucleotide
uaguguucuggacguaucc

SEQ ID NO: 3168350 - RNA, 19 nt, Artificial Sequence
  Description of Artificial Sequence: Synthetic oligonucleotide
uccuucagcugucucagca

SEQ ID NO: 3168351 - RNA, 19 nt, Artificial Sequence
  Description of Artificial Sequence: Synthetic oligonucleotide
aagcugaagacgucgugca

SEQ ID NO: 3168352 - RNA, 19 nt, Artificial Sequence
  Description of Artificial Sequence: Synthetic oligonucleotide
uguucuggacguauccagc

SEQ ID NO: 3168353 - RNA, 19 nt, Artificial Sequence
  Description of Artificial Sequence: Synthetic oligonucleotide
gaacauguccccgucauac

SEQ ID NO: 3168354 - RNA, 19 nt, Artificial Sequence
  Description of Artificial Sequence: Synthetic oligonucleotide
gugaaaaccguguaucuga

SEQ ID NO: 3168355 - RNA, 19 nt, Artificial Sequence
  Description of Artificial Sequence: Synthetic oligonucleotide
uuugagugaaaaccgugua

SEQ ID NO: 3168356 - RNA, 19 nt, Artificial Sequence
  Description of Artificial Sequence: Synthetic oligonucleotide
ccuacuaguguucuggacg

SEQ ID NO: 3168357 - RNA, 19 nt, Artificial Sequence
  Description of Artificial Sequence: Synthetic oligonucleotide
uuuggcagcaacaggucaa

SEQ ID NO: 3168358 - RNA, 19 nt, Artificial Sequence
  Description of Artificial Sequence: Synthetic oligonucleotide
ugaggguccaaagaugaug

SEQ ID NO: 3168359 - RNA, 19 nt, Artificial Sequence
  Description of Artificial Sequence: Synthetic oligonucleotide
uucuguccaguucauuggc

SEQ ID NO: 3168360 - RNA, 19 nt, Artificial Sequence
  Description of Artificial Sequence: Synthetic oligonucleotide
uugagugaaaaccguguau

SEQ ID NO: 3168361 - RNA, 19 nt, Artificial Sequence
  Description of Artificial Sequence: Synthetic oligonucleotide
uggcucauuuccuucagcu

SEQ ID NO: 3168362 - RNA, 19 nt, Artificial Sequence
  Description of Artificial Sequence: Synthetic oligonucleotide
guccccgucauacuuaagc

SEQ ID NO: 3168363 - RNA, 19 nt, Artificial Sequence
  Description of Artificial Sequence: Synthetic oligonucleotide
caauuuuggcagcaacagg

SEQ ID NO: 3168364 - RNA, 19 nt, Artificial Sequence
  Description of Artificial Sequence: Synthetic oligonucleotide
caaccagggugguuaaucg

SEQ ID NO: 3168365 - RNA, 19 nt, Artificial Sequence
  Description of Artificial Sequence: Synthetic oligonucleotide
cuuccuuucucauucuguc

SEQ ID NO: 3168366 - RNA, 19 nt, Artificial Sequence
  Description of Artificial Sequence: Synthetic oligonucleotide
gaugaggguccaaagauga

SEQ ID NO: 3168367 - RNA, 19 nt, Artificial Sequence
  Description of Artificial Sequence: Synthetic oligonucleotide
ugauggaucucaccaacau

SEQ ID NO: 3168368 - RNA, 19 nt, Artificial Sequence
  Description of Artificial Sequence: Synthetic oligonucleotide
guguaucugaagcugaaga

SEQ ID NO: 3168369 - RNA, 19 nt, Artificial Sequence
  Description of Artificial Sequence: Synthetic oligonucleotide
ucuggacguauccagcacu

SEQ ID NO: 3168370 - RNA, 19 nt, Artificial Sequence
  Description of Artificial Sequence: Synthetic oligonucleotide
accagggugguuaaucggc

SEQ ID NO: 3168371 - RNA, 19 nt, Artificial Sequence
  Description of Artificial Sequence: Synthetic oligonucleotide
gaugucuucuuuugaguga

SEQ ID NO: 3168372 - RNA, 19 nt, Artificial Sequence
  Description of Artificial Sequence: Synthetic oligonucleotide
cacucauccaauuuuggca

SEQ ID NO: 3168373 - RNA, 19 nt, Artificial Sequence
  Description of Artificial Sequence: Synthetic oligonucleotide
uucugaugaggguccaaag

SEQ ID NO: 3168374 - RNA, 19 nt, Artificial Sequence
  Description of Artificial Sequence: Synthetic oligonucleotide
uuccuucugaugagggucc

SEQ ID NO: 3168375 - RNA, 19 nt, Artificial Sequence
  Description of Artificial Sequence: Synthetic oligonucleotide
aggucuuucaguugccuga

SEQ ID NO: 3168376 - RNA, 19 nt, Artificial Sequence
  Description of Artificial Sequence: Synthetic oligonucleotide
cuuugcugaacaugucccc

SEQ ID NO: 3168377 - RNA, 19 nt, Artificial Sequence
  Description of Artificial Sequence: Synthetic oligonucleotide
uccagcacuuccuuucuca

SEQ ID NO: 3168378 - RNA, 19 nt, Artificial Sequence
  Description of Artificial Sequence: Synthetic oligonucleotide
uucaguugccugauggauc

SEQ ID NO: 3168379 - RNA, 19 nt, Artificial Sequence
  Description of Artificial Sequence: Synthetic oligonucleotide
augaugucuucuuuugagu

SEQ ID NO: 3168380 - RNA, 19 nt, Artificial Sequence
  Description of Artificial Sequence: Synthetic oligonucleotide
uguacaagcuggaacuguu

SEQ ID NO: 3168381 - RNA, 19 nt, Artificial Sequence
  Description of Artificial Sequence: Synthetic oligonucleotide
aggagcuuugcuccagccg

SEQ ID NO: 3168382 - RNA, 19 nt, Artificial Sequence
  Description of Artificial Sequence: Synthetic oligonucleotide
aaccguguaucugaagcug

SEQ ID NO: 3168383 - RNA, 19 nt, Artificial Sequence
  Description of Artificial Sequence: Synthetic oligonucleotide
ugaagcugaagacgucgug

SEQ ID NO: 3168384 - RNA, 19 nt, Artificial Sequence
  Description of Artificial Sequence: Synthetic oligonucleotide
cuaauuaauaaccaaauag

SEQ ID NO: 3168385 - RNA, 19 nt, Artificial Sequence
  Description of Artificial Sequence: Synthetic oligonucleotide
aacucuuagaauucguugc

SEQ ID NO: 3168386 - RNA, 19 nt, Artificial Sequence
  Description of Artificial Sequence: Synthetic oligonucleotide
ugcuauaugaauaaagucc

SEQ ID NO: 3168387 - RNA, 19 nt, Artificial Sequence
  Description of Artificial Sequence: Synthetic oligonucleotide
gaaugaucaacccauaggg

SEQ ID NO: 3168388 - RNA, 19 nt, Artificial Sequence
  Description of Artificial Sequence: Synthetic oligonucleotide
aauaguauuuuguacaggu

SEQ ID NO: 3168389 - RNA, 19 nt, Artificial Sequence
  Description of Artificial Sequence: Synthetic oligonucleotide
aguaguguuaccuagaacu

SEQ ID NO: 3168390 - RNA, 19 nt, Artificial Sequence
  Description of Artificial Sequence: Synthetic oligonucleotide
auuuuguacagguuuaccc

SEQ ID NO: 3168391 - RNA, 19 nt, Artificial Sequence
  Description of Artificial Sequence: Synthetic oligonucleotide
uaauuaauaaccaaauagu

SEQ ID NO: 3168392 - RNA, 19 nt, Artificial Sequence
  Description of Artificial Sequence: Synthetic oligonucleotide
aguaugucuucauauagcc

SEQ ID NO: 3168393 - RNA, 19 nt, Artificial Sequence
  Description of Artificial Sequence: Synthetic oligonucleotide
auaaaauuuguuucuauag

SEQ ID NO: 3168394 - RNA, 19 nt, Artificial Sequence
  Description of Artificial Sequence: Synthetic oligonucleotide
aaauguuagcucuucagag

SEQ ID NO: 3168395 - RNA, 19 nt, Artificial Sequence
  Description of Artificial Sequence: Synthetic oligonucleotide
ugagaaauggcuuuacagg

SEQ ID NO: 3168396 - RNA, 19 nt, Artificial Sequence
  Description of Artificial Sequence: Synthetic oligonucleotide
uauguaauagccaucuaag

SEQ ID NO: 3168397 - RNA, 19 nt, Artificial Sequence
  Description of Artificial Sequence: Synthetic oligonucleotide
aaaauucaagucuuguaag

SEQ ID NO: 3168398 - RNA, 19 nt, Artificial Sequence
  Description of Artificial Sequence: Synthetic oligonucleotide
uauaaaucuaauuaauaac

SEQ ID NO: 3168399 - RNA, 19 nt, Artificial Sequence
  Description of Artificial Sequence: Synthetic oligonucleotide
uaaaucaacugcaauaaca

SEQ ID NO: 3168400 - RNA, 19 nt, Artificial Sequence
  Description of Artificial Sequence: Synthetic oligonucleotide
aauguuagcucuucagagg

SEQ ID NO: 3168401 - RNA, 19 nt, Artificial Sequence
  Description of Artificial Sequence: Synthetic oligonucleotide
auuuuaaaagagucacucc

SEQ ID NO: 3168402 - RNA, 19 nt, Artificial Sequence
  Description of Artificial Sequence: Synthetic oligonucleotide
cugaaauuaauaaaauuug

SEQ ID NO: 3168403 - RNA, 19 nt, Artificial Sequence
  Description of Artificial Sequence: Synthetic oligonucleotide
uaucaaguauauaucgccg

SEQ ID NO: 3168404 - RNA, 19 nt, Artificial Sequence
  Description of Artificial Sequence: Synthetic oligonucleotide
ugugcuauaugaauaaagu

SEQ ID NO: 3168405 - RNA, 19 nt, Artificial Sequence
  Description of Artificial Sequence: Synthetic oligonucleotide
ugaaauuaauaaaauuugu

SEQ ID NO: 3168406 - RNA, 19 nt, Artificial Sequence
  Description of Artificial Sequence: Synthetic oligonucleotide
uguauagcguagaagauac

SEQ ID NO: 3168407 - RNA, 19 nt, Artificial Sequence
  Description of Artificial Sequence: Synthetic oligonucleotide
uuaccuagaacucuuagaa

SEQ ID NO: 3168408 - RNA, 19 nt, Artificial Sequence
  Description of Artificial Sequence: Synthetic oligonucleotide
uguccuucguuacagaugc

SEQ ID NO: 3168409 - RNA, 19 nt, Artificial Sequence
  Description of Artificial Sequence: Synthetic oligonucleotide
uaugcauagaguuucacaa

SEQ ID NO: 3168410 - RNA, 19 nt, Artificial Sequence
  Description of Artificial Sequence: Synthetic oligonucleotide
agaaugaucaacccauagg

SEQ ID NO: 3168411 - RNA, 19 nt, Artificial Sequence
  Description of Artificial Sequence: Synthetic oligonucleotide
auguauauccaccacuaac

SEQ ID NO: 3168412 - RNA, 19 nt, Artificial Sequence
  Description of Artificial Sequence: Synthetic oligonucleotide
cuaucaaguauauaucgcc

SEQ ID NO: 3168413 - RNA, 19 nt, Artificial Sequence
  Description of Artificial Sequence: Synthetic oligonucleotide
aaaagagucacuccaaauu

SEQ ID NO: 3168414 - RNA, 19 nt, Artificial Sequence
  Description of Artificial Sequence: Synthetic oligonucleotide
aucaaguauauaucgccgc

SEQ ID NO: 3168415 - RNA, 19 nt, Artificial Sequence
  Description of Artificial Sequence: Synthetic oligonucleotide
uggcuuauuagucuaaaga

SEQ ID NO: 3168416 - RNA, 19 nt, Artificial Sequence
  Description of Artificial Sequence: Synthetic oligonucleotide
aaauucaagucuuguaagu

SEQ ID NO: 3168417 - RNA, 19 nt, Artificial Sequence
  Description of Artificial Sequence: Synthetic oligonucleotide
ucuaucaaguauauaucgc

SEQ ID NO: 3168418 - RNA, 19 nt, Artificial Sequence
  Description of Artificial Sequence: Synthetic oligonucleotide
uaauaauuuaucugagaug

SEQ ID NO: 3168419 - RNA, 19 nt, Artificial Sequence
  Description of Artificial Sequence: Synthetic oligonucleotide
auaauuggaagguaaagaa

SEQ ID NO: 3168420 - RNA, 19 nt, Artificial Sequence
  Description of Artificial Sequence: Synthetic oligonucleotide
auguaauagccaucuaagc

SEQ ID NO: 3168421 - RNA, 19 nt, Artificial Sequence
  Description of Artificial Sequence: Synthetic oligonucleotide
accgccagagguuauauac

SEQ ID NO: 3168422 - RNA, 19 nt, Artificial Sequence
  Description of Artificial Sequence: Synthetic oligonucleotide
ucuggcaaaacacauccca

SEQ ID NO: 3168423 - RNA, 19 nt, Artificial Sequence
  Description of Artificial Sequence: Synthetic oligonucleotide
auaaaguccaucuguagga

SEQ ID NO: 3168424 - RNA, 19 nt, Artificial Sequence
  Description of Artificial Sequence: Synthetic oligonucleotide
acugaaauuaauaaaauuu

SEQ ID NO: 3168425 - RNA, 19 nt, Artificial Sequence
  Description of Artificial Sequence: Synthetic oligonucleotide
aaacuaauaccugagagua

SEQ ID NO: 3168426 - RNA, 19 nt, Artificial Sequence
  Description of Artificial Sequence: Synthetic oligonucleotide
aaagagucacuccaaauua

SEQ ID NO: 3168427 - RNA, 19 nt, Artificial Sequence
  Description of Artificial Sequence: Synthetic oligonucleotide
uuuaccaaugauuaauaau

SEQ ID NO: 3168428 - RNA, 19 nt, Artificial Sequence
  Description of Artificial Sequence: Synthetic oligonucleotide
aaauuucaaacugaaauua

SEQ ID NO: 3168429 - RNA, 19 nt, Artificial Sequence
  Description of Artificial Sequence: Synthetic oligonucleotide
uuuauaauuggaagguaaa

SEQ ID NO: 3168430 - RNA, 19 nt, Artificial Sequence
  Description of Artificial Sequence: Synthetic oligonucleotide
uuucaaacugaaauuaaua

SEQ ID NO: 3168431 - RNA, 19 nt, Artificial Sequence
  Description of Artificial Sequence: Synthetic oligonucleotide
uggaacgucagcuuagcag

SEQ ID NO: 3168432 - RNA, 19 nt, Artificial Sequence
  Description of Artificial Sequence: Synthetic oligonucleotide
uuuauaagggacaccaaua

SEQ ID NO: 3168433 - RNA, 19 nt, Artificial Sequence
  Description of Artificial Sequence: Synthetic oligonucleotide
cugagaaauggcuuuacag

SEQ ID NO: 3168434 - RNA, 19 nt, Artificial Sequence
  Description of Artificial Sequence: Synthetic oligonucleotide
uauuacacuaccaguuuca

SEQ ID NO: 3168435 - RNA, 19 nt, Artificial Sequence
  Description of Artificial Sequence: Synthetic oligonucleotide
auaagggacaccaauauca

SEQ ID NO: 3168436 - RNA, 19 nt, Artificial Sequence
  Description of Artificial Sequence: Synthetic oligonucleotide
gauaguccuauuaagacuc

SEQ ID NO: 3168437 - RNA, 19 nt, Artificial Sequence
  Description of Artificial Sequence: Synthetic oligonucleotide
ucauauagccggaggaucc

SEQ ID NO: 3168438 - RNA, 19 nt, Artificial Sequence
  Description of Artificial Sequence: Synthetic oligonucleotide
cuaaagacuacauauaugu

SEQ ID NO: 3168439 - RNA, 19 nt, Artificial Sequence
  Description of Artificial Sequence: Synthetic oligonucleotide
uauagcguagaagauacca

SEQ ID NO: 3168440 - RNA, 19 nt, Artificial Sequence
  Description of Artificial Sequence: Synthetic oligonucleotide
uuauuuucauaguaauugu

SEQ ID NO: 3168441 - RNA, 19 nt, Artificial Sequence
  Description of Artificial Sequence: Synthetic oligonucleotide
ugaauuucuuguauuuaca

SEQ ID NO: 3168442 - RNA, 19 nt, Artificial Sequence
  Description of Artificial Sequence: Synthetic oligonucleotide
uauuaagacucuagaaacu

SEQ ID NO: 3168443 - RNA, 19 nt, Artificial Sequence
  Description of Artificial Sequence: Synthetic oligonucleotide
gagaguaaaauuaaaugca

SEQ ID NO: 3168444 - RNA, 19 nt, Artificial Sequence
  Description of Artificial Sequence: Synthetic oligonucleotide
uuauaagggacaccaauau

SEQ ID NO: 3168445 - RNA, 19 nt, Artificial Sequence
  Description of Artificial Sequence: Synthetic oligonucleotide
aagucuuuaguccacuaaa

SEQ ID NO: 3168446 - RNA, 19 nt, Artificial Sequence
  Description of Artificial Sequence: Synthetic oligonucleotide
ugcauagaguuucacaagu

SEQ ID NO: 3168447 - RNA, 19 nt, Artificial Sequence
  Description of Artificial Sequence: Synthetic oligonucleotide
uuuaguccacuaaagugca

SEQ ID NO: 3168448 - RNA, 19 nt, Artificial Sequence
  Description of Artificial Sequence: Synthetic oligonucleotide
aacauaaggaagaaccucu

SEQ ID NO: 3168449 - RNA, 19 nt, Artificial Sequence
  Description of Artificial Sequence: Synthetic oligonucleotide
cauuuuaaaagagucacuc

SEQ ID NO: 3168450 - RNA, 19 nt, Artificial Sequence
  Description of Artificial Sequence: Synthetic oligonucleotide
uagaaugaucaacccauag

SEQ ID NO: 3168451 - RNA, 19 nt, Artificial Sequence
  Description of Artificial Sequence: Synthetic oligonucleotide
agccaucuaagccuuuucc

SEQ ID NO: 3168452 - RNA, 19 nt, Artificial Sequence
  Description of Artificial Sequence: Synthetic oligonucleotide
aagccuuuuccucugagaa

SEQ ID NO: 3168453 - RNA, 19 nt, Artificial Sequence
  Description of Artificial Sequence: Synthetic oligonucleotide
uuucauaguaauuguaaua

SEQ ID NO: 3168454 - RNA, 19 nt, Artificial Sequence
  Description of Artificial Sequence: Synthetic oligonucleotide
gaggcuagaaugaucaacc

SEQ ID NO: 3168455 - RNA, 19 nt, Artificial Sequence
  Description of Artificial Sequence: Synthetic oligonucleotide
aauaugcauagaguuucac

SEQ ID NO: 3168456 - RNA, 19 nt, Artificial Sequence
  Description of Artificial Sequence: Synthetic oligonucleotide
uucuucuucgcucccgagg

SEQ ID NO: 3168457 - RNA, 19 nt, Artificial Sequence
  Description of Artificial Sequence: Synthetic oligonucleotide
gacacgacaagccagacua

SEQ ID NO: 3168458 - RNA, 19 nt, Artificial Sequence
  Description of Artificial Sequence: Synthetic oligonucleotide
uucugcaucugaauggcug

SEQ ID NO: 3168459 - RNA, 19 nt, Artificial Sequence
  Description of Artificial Sequence: Synthetic oligonucleotide
guuucacugagccaguccc

SEQ ID NO: 3168460 - RNA, 19 nt, Artificial Sequence
  Description of Artificial Sequence: Synthetic oligonucleotide
cuaccaguuucacugagcc

SEQ ID NO: 3168461 - RNA, 19 nt, Artificial Sequence
  Description of Artificial Sequence: Synthetic oligonucleotide
cuucguuacagaugcaaag

SEQ ID NO: 3168462 - RNA, 19 nt, Artificial Sequence
  Description of Artificial Sequence: Synthetic oligonucleotide
agguuuacccauaauacuc

SEQ ID NO: 3168463 - RNA, 19 nt, Artificial Sequence
  Description of Artificial Sequence: Synthetic oligonucleotide
ucaaagagauuaccgccag

SEQ ID NO: 3168464 - RNA, 19 nt, Artificial Sequence
  Description of Artificial Sequence: Synthetic oligonucleotide
guauauaucgccgcgggag

SEQ ID NO: 3168465 - RNA, 19 nt, Artificial Sequence
  Description of Artificial Sequence: Synthetic oligonucleotide
aagucuuguaaguaguguu

SEQ ID NO: 3168466 - RNA, 19 nt, Artificial Sequence
  Description of Artificial Sequence: Synthetic oligonucleotide
gugaauuucuuguauuuac

SEQ ID NO: 3168467 - RNA, 19 nt, Artificial Sequence
  Description of Artificial Sequence: Synthetic oligonucleotide
cauaauucugcuuacaagu

SEQ ID NO: 3168468 - RNA, 19 nt, Artificial Sequence
  Description of Artificial Sequence: Synthetic oligonucleotide
agaguaaaauuaaaugcag

SEQ ID NO: 3168469 - RNA, 19 nt, Artificial Sequence
  Description of Artificial Sequence: Synthetic oligonucleotide
uauuagucuaaagacuaca

SEQ ID NO: 3168470 - RNA, 19 nt, Artificial Sequence
  Description of Artificial Sequence: Synthetic oligonucleotide
uuucugaugugauaucuuc

SEQ ID NO: 3168471 - RNA, 19 nt, Artificial Sequence
  Description of Artificial Sequence: Synthetic oligonucleotide
uauuuucauaguaauugua

SEQ ID NO: 3168472 - RNA, 19 nt, Artificial Sequence
  Description of Artificial Sequence: Synthetic oligonucleotide
uuuguuaauacugucuaua

SEQ ID NO: 3168473 - RNA, 19 nt, Artificial Sequence
  Description of Artificial Sequence: Synthetic oligonucleotide
ugaauggcugcaauacagc

SEQ ID NO: 3168474 - RNA, 19 nt, Artificial Sequence
  Description of Artificial Sequence: Synthetic oligonucleotide
uguuaauacugucuauaaa

SEQ ID NO: 3168475 - RNA, 19 nt, Artificial Sequence
  Description of Artificial Sequence: Synthetic oligonucleotide
auaugcauagaguuucaca

SEQ ID NO: 3168476 - RNA, 19 nt, Artificial Sequence
  Description of Artificial Sequence: Synthetic oligonucleotide
ucuauagauagaagaugga

SEQ ID NO: 3168477 - RNA, 19 nt, Artificial Sequence
  Description of Artificial Sequence: Synthetic oligonucleotide
acugucuauaaauuacaca

SEQ ID NO: 3168478 - RNA, 19 nt, Artificial Sequence
  Description of Artificial Sequence: Synthetic oligonucleotide
uauauaucgccgcgggagc

SEQ ID NO: 3168479 - RNA, 19 nt, Artificial Sequence
  Description of Artificial Sequence: Synthetic oligonucleotide
cuucgauauuuuauuacac

SEQ ID NO: 3168480 - RNA, 19 nt, Artificial Sequence
  Description of Artificial Sequence: Synthetic oligonucleotide
ucccauacucuuauggcug

SEQ ID NO: 3168481 - RNA, 19 nt, Artificial Sequence
  Description of Artificial Sequence: Synthetic oligonucleotide
uaccaaucuaucaaguaua

SEQ ID NO: 3168482 - RNA, 19 nt, Artificial Sequence
  Description of Artificial Sequence: Synthetic oligonucleotide
auguuagcucuucagagga

SEQ ID NO: 3168483 - RNA, 19 nt, Artificial Sequence
  Description of Artificial Sequence: Synthetic oligonucleotide
uuguuaauacugucuauaa

SEQ ID NO: 3168484 - RNA, 19 nt, Artificial Sequence
  Description of Artificial Sequence: Synthetic oligonucleotide
aaugauaucaguuauaccg

SEQ ID NO: 3168485 - RNA, 19 nt, Artificial Sequence
  Description of Artificial Sequence: Synthetic oligonucleotide
uucacuguggcaaacuugg

SEQ ID NO: 3168486 - RNA, 19 nt, Artificial Sequence
  Description of Artificial Sequence: Synthetic oligonucleotide
aacaaguucagccuuccuc

SEQ ID NO: 3168487 - RNA, 19 nt, Artificial Sequence
  Description of Artificial Sequence: Synthetic oligonucleotide
auaaugauaucaguuauac

SEQ ID NO: 3168488 - RNA, 19 nt, Artificial Sequence
  Description of Artificial Sequence: Synthetic oligonucleotide
uggaaauucacuuaagccu

SEQ ID NO: 3168489 - RNA, 19 nt, Artificial Sequence
  Description of Artificial Sequence: Synthetic oligonucleotide
acuguggcaaacuuggugg

SEQ ID NO: 3168490 - RNA, 19 nt, Artificial Sequence
  Description of Artificial Sequence: Synthetic oligonucleotide
uaagccucgcauuuuacgg

SEQ ID NO: 3168491 - RNA, 19 nt, Artificial Sequence
  Description of Artificial Sequence: Synthetic oligonucleotide
ucuggaaauucacuuaagc

SEQ ID NO: 3168492 - RNA, 19 nt, Artificial Sequence
  Description of Artificial Sequence: Synthetic oligonucleotide
cuggaaauucacuuaagcc

SEQ ID NO: 3168493 - RNA, 19 nt, Artificial Sequence
  Description of Artificial Sequence: Synthetic oligonucleotide
auuucaguaacucaugaaa

SEQ ID NO: 3168494 - RNA, 19 nt, Artificial Sequence
  Description of Artificial Sequence: Synthetic oligonucleotide
uuuacggaacaucagcucu

SEQ ID NO: 3168495 - RNA, 19 nt, Artificial Sequence
  Description of Artificial Sequence: Synthetic oligonucleotide
ucagccuuccucuaugggg

SEQ ID NO: 3168496 - RNA, 19 nt, Artificial Sequence
  Description of Artificial Sequence: Synthetic oligonucleotide
cauuuuacggaacaucagc

SEQ ID NO: 3168497 - RNA, 19 nt, Artificial Sequence
  Description of Artificial Sequence: Synthetic oligonucleotide
uuaagccucgcauuuuacg

SEQ ID NO: 3168498 - RNA, 19 nt, Artificial Sequence
  Description of Artificial Sequence: Synthetic oligonucleotide
uuucaguaacucaugaaaa

SEQ ID NO: 3168499 - RNA, 19 nt, Artificial Sequence
  Description of Artificial Sequence: Synthetic oligonucleotide
ggaacaucagcucuggagg

SEQ ID NO: 3168500 - RNA, 19 nt, Artificial Sequence
  Description of Artificial Sequence: Synthetic oligonucleotide
ucaguuauaccgccauagg

SEQ ID NO: 3168501 - RNA, 19 nt, Artificial Sequence
  Description of Artificial Sequence: Synthetic oligonucleotide
augauaucaguuauaccgc

SEQ ID NO: 3168502 - RNA, 19 nt, Artificial Sequence
  Description of Artificial Sequence: Synthetic oligonucleotide
acaaguucagccuuccucu

SEQ ID NO: 3168503 - RNA, 19 nt, Artificial Sequence
  Description of Artificial Sequence: Synthetic oligonucleotide
aagcccaucaugcucucag

SEQ ID NO: 3168504 - RNA, 19 nt, Artificial Sequence
  Description of Artificial Sequence: Synthetic oligonucleotide
uggggcaucccaauaauga

SEQ ID NO: 3168505 - RNA, 19 nt, Artificial Sequence
  Description of Artificial Sequence: Synthetic oligonucleotide
uggagguaacugcaggagg

SEQ ID NO: 3168506 - RNA, 19 nt, Artificial Sequence
  Description of Artificial Sequence: Synthetic oligonucleotide
ugauaucaguuauaccgcc

SEQ ID NO: 3168507 - RNA, 19 nt, Artificial Sequence
  Description of Artificial Sequence: Synthetic oligonucleotide
ucucuggaaauucacuuaa

SEQ ID NO: 3168508 - RNA, 19 nt, Artificial Sequence
  Description of Artificial Sequence: Synthetic oligonucleotide
aucaguuauaccgccauag

SEQ ID NO: 3168509 - RNA, 19 nt, Artificial Sequence
  Description of Artificial Sequence: Synthetic oligonucleotide
aaauucacuuaagccucgc

SEQ ID NO: 3168510 - RNA, 19 nt, Artificial Sequence
  Description of Artificial Sequence: Synthetic oligonucleotide
aguuauaccgccauaggcu

SEQ ID NO: 3168511 - RNA, 19 nt, Artificial Sequence
  Description of Artificial Sequence: Synthetic oligonucleotide
uccauaucucuucacugug

SEQ ID NO: 3168512 - RNA, 19 nt, Artificial Sequence
  Description of Artificial Sequence: Synthetic oligonucleotide
caguuauaccgccauaggc

SEQ ID NO: 3168513 - RNA, 19 nt, Artificial Sequence
  Description of Artificial Sequence: Synthetic oligonucleotide
cauaucucuucacuguggc

SEQ ID NO: 3168514 - RNA, 19 nt, Artificial Sequence
  Description of Artificial Sequence: Synthetic oligonucleotide
uaucucuucacuguggcaa

SEQ ID NO: 3168515 - RNA, 19 nt, Artificial Sequence
  Description of Artificial Sequence: Synthetic oligonucleotide
guuauaccgccauaggcug

SEQ ID NO: 3168516 - RNA, 19 nt, Artificial Sequence
  Description of Artificial Sequence: Synthetic oligonucleotide
uaaugauaucaguuauacc

SEQ ID NO: 3168517 - RNA, 19 nt, Artificial Sequence
  Description of Artificial Sequence: Synthetic oligonucleotide
uccucuauggggcauccca

SEQ ID NO: 3168518 - RNA, 19 nt, Artificial Sequence
  Description of Artificial Sequence: Synthetic oligonucleotide
ccugucaacaaguucagcc

SEQ ID NO: 3168519 - RNA, 19 nt, Artificial Sequence
  Description of Artificial Sequence: Synthetic oligonucleotide
uaggcugacgauuucagua

SEQ ID NO: 3168520 - RNA, 19 nt, Artificial Sequence
  Description of Artificial Sequence: Synthetic oligonucleotide
auucacuuaagccucgcau

SEQ ID NO: 3168521 - RNA, 19 nt, Artificial Sequence
  Description of Artificial Sequence: Synthetic oligonucleotide
auucucuggaaauucacuu

SEQ ID NO: 3168522 - RNA, 19 nt, Artificial Sequence
  Description of Artificial Sequence: Synthetic oligonucleotide
uuuuacggaacaucagcuc

SEQ ID NO: 3168523 - RNA, 19 nt, Artificial Sequence
  Description of Artificial Sequence: Synthetic oligonucleotide
aauucacuuaagccucgca

SEQ ID NO: 3168524 - RNA, 19 nt, Artificial Sequence
  Description of Artificial Sequence: Synthetic oligonucleotide
uuacggaacaucagcucug

SEQ ID NO: 3168525 - RNA, 19 nt, Artificial Sequence
  Description of Artificial Sequence: Synthetic oligonucleotide
ucuggagguaacugcagga

SEQ ID NO: 3168526 - RNA, 19 nt, Artificial Sequence
  Description of Artificial Sequence: Synthetic oligonucleotide
caucccaauaaugauauca

SEQ ID NO: 3168527 - RNA, 19 nt, Artificial Sequence
  Description of Artificial Sequence: Synthetic oligonucleotide
aauaaugauaucaguuaua

SEQ ID NO: 3168528 - RNA, 19 nt, Artificial Sequence
  Description of Artificial Sequence: Synthetic oligonucleotide
auuuuacggaacaucagcu

SEQ ID NO: 3168529 - RNA, 19 nt, Artificial Sequence
  Description of Artificial Sequence: Synthetic oligonucleotide
auaucaguuauaccgccau

SEQ ID NO: 3168530 - RNA, 19 nt, Artificial Sequence
  Description of Artificial Sequence: Synthetic oligonucleotide
ugacgauuucaguaacuca

SEQ ID NO: 3168531 - RNA, 19 nt, Artificial Sequence
  Description of Artificial Sequence: Synthetic oligonucleotide
cauaggcugacgauuucag

SEQ ID NO: 3168532 - RNA, 19 nt, Artificial Sequence
  Description of Artificial Sequence: Synthetic oligonucleotide
uucagccuuccucuauggg

SEQ ID NO: 3168533 - RNA, 19 nt, Artificial Sequence
  Description of Artificial Sequence: Synthetic oligonucleotide
uucaccuccauaucucuuc

SEQ ID NO: 3168534 - RNA, 19 nt, Artificial Sequence
  Description of Artificial Sequence: Synthetic oligonucleotide
uucacuuaagccucgcauu

SEQ ID NO: 3168535 - RNA, 19 nt, Artificial Sequence
  Description of Artificial Sequence: Synthetic oligonucleotide
gaaauucacuuaagccucg

SEQ ID NO: 3168536 - RNA, 19 nt, Artificial Sequence
  Description of Artificial Sequence: Synthetic oligonucleotide
cagccuuccucuauggggc

SEQ ID NO: 3168537 - RNA, 19 nt, Artificial Sequence
  Description of Artificial Sequence: Synthetic oligonucleotide
aaaagcccaucaugcucuc

SEQ ID NO: 3168538 - RNA, 19 nt, Artificial Sequence
  Description of Artificial Sequence: Synthetic oligonucleotide
aucccaauaaugauaucag

SEQ ID NO: 3168539 - RNA, 19 nt, Artificial Sequence
  Description of Artificial Sequence: Synthetic oligonucleotide
aagccucgcauuuuacgga

SEQ ID NO: 3168540 - RNA, 19 nt, Artificial Sequence
  Description of Artificial Sequence: Synthetic oligonucleotide
aguucagccuuccucuaug

SEQ ID NO: 3168541 - RNA, 19 nt, Artificial Sequence
  Description of Artificial Sequence: Synthetic oligonucleotide
acauucucuggaaauucac

SEQ ID NO: 3168542 - RNA, 19 nt, Artificial Sequence
  Description of Artificial Sequence: Synthetic oligonucleotide
gauuucaguaacucaugaa

SEQ ID NO: 3168543 - RNA, 19 nt, Artificial Sequence
  Description of Artificial Sequence: Synthetic oligonucleotide
ucacuuaagccucgcauuu

SEQ ID NO: 3168544 - RNA, 19 nt, Artificial Sequence
  Description of Artificial Sequence: Synthetic oligonucleotide
aggccugucaacaaguuca

SEQ ID NO: 3168545 - RNA, 19 nt, Artificial Sequence
  Description of Artificial Sequence: Synthetic oligonucleotide
aacugcaggaggccuguca

SEQ ID NO: 3168546 - RNA, 19 nt, Artificial Sequence
  Description of Artificial Sequence: Synthetic oligonucleotide
cuucacuguggcaaacuug

SEQ ID NO: 3168547 - RNA, 19 nt, Artificial Sequence
  Description of Artificial Sequence: Synthetic oligonucleotide
accuccauaucucuucacu

SEQ ID NO: 3168548 - RNA, 19 nt, Artificial Sequence
  Description of Artificial Sequence: Synthetic oligonucleotide
ucccaauaaugauaucagu

SEQ ID NO: 3168549 - RNA, 19 nt, Artificial Sequence
  Description of Artificial Sequence: Synthetic oligonucleotide
uucucuggaaauucacuua

SEQ ID NO: 3168550 - RNA, 19 nt, Artificial Sequence
  Description of Artificial Sequence: Synthetic oligonucleotide
ugucaacaaguucagccuu

SEQ ID NO: 3168551 - RNA, 19 nt, Artificial Sequence
  Description of Artificial Sequence: Synthetic oligonucleotide
agccccuucaccuccauau

SEQ ID NO: 3168552 - RNA, 19 nt, Artificial Sequence
  Description of Artificial Sequence: Synthetic oligonucleotide
cucuggagguaacugcagg

SEQ ID NO: 3168553 - RNA, 19 nt, Artificial Sequence
  Description of Artificial Sequence: Synthetic oligonucleotide
ucaacaaguucagccuucc

SEQ ID NO: 3168554 - RNA, 19 nt, Artificial Sequence
  Description of Artificial Sequence: Synthetic oligonucleotide
uauggggcaucccaauaau

SEQ ID NO: 3168555 - RNA, 19 nt, Artificial Sequence
  Description of Artificial Sequence: Synthetic oligonucleotide
ucagcucuggagguaacug

SEQ ID NO: 3168556 - RNA, 19 nt, Artificial Sequence
  Description of Artificial Sequence: Synthetic oligonucleotide
cacuguggcaaacuuggug

SEQ ID NO: 3168557 - RNA, 19 nt, Artificial Sequence
  Description of Artificial Sequence: Synthetic oligonucleotide
ggaaauucacuuaagccuc

SEQ ID NO: 3168558 - RNA, 19 nt, Artificial Sequence
  Description of Artificial Sequence: Synthetic oligonucleotide
uacggaacaucagcucugg

SEQ ID NO: 3168559 - RNA, 19 nt, Artificial Sequence
  Description of Artificial Sequence: Synthetic oligonucleotide
ucaccuccauaucucuuca

SEQ ID NO: 3168560 - RNA, 19 nt, Artificial Sequence
  Description of Artificial Sequence: Synthetic oligonucleotide
guucagccuuccucuaugg

SEQ ID NO: 3168561 - RNA, 19 nt, Artificial Sequence
  Description of Artificial Sequence: Synthetic oligonucleotide
ucuucacuguggcaaacuu

SEQ ID NO: 3168562 - RNA, 19 nt, Artificial Sequence
  Description of Artificial Sequence: Synthetic oligonucleotide
ucucagccccuucaccucc

SEQ ID NO: 3168563 - RNA, 19 nt, Artificial Sequence
  Description of Artificial Sequence: Synthetic oligonucleotide
agcccaucaugcucucagc

SEQ ID NO: 3168564 - RNA, 19 nt, Artificial Sequence
  Description of Artificial Sequence: Synthetic oligonucleotide
cugacgauuucaguaacuc

SEQ ID NO: 3168565 - RNA, 19 nt, Artificial Sequence
  Description of Artificial Sequence: Synthetic oligonucleotide
ugcaggaggccugucaaca

SEQ ID NO: 3168566 - RNA, 19 nt, Artificial Sequence
  Description of Artificial Sequence: Synthetic oligonucleotide
gacgauuucaguaacucau

SEQ ID NO: 3168567 - RNA, 19 nt, Artificial Sequence
  Description of Artificial Sequence: Synthetic oligonucleotide
cuuaagccucgcauuuuac

SEQ ID NO: 3168568 - RNA, 19 nt, Artificial Sequence
  Description of Artificial Sequence: Synthetic oligonucleotide
ucuauggggcaucccaaua

SEQ ID NO: 3168569 - RNA, 19 nt, Artificial Sequence
  Description of Artificial Sequence: Synthetic oligonucleotide
acuuaagccucgcauuuua

SEQ ID NO: 3168570 - RNA, 19 nt, Artificial Sequence
  Description of Artificial Sequence: Synthetic oligonucleotide
cagcucuggagguaacugc

SEQ ID NO: 3168571 - RNA, 19 nt, Artificial Sequence
  Description of Artificial Sequence: Synthetic oligonucleotide
aaguucagccuuccucuau

SEQ ID NO: 3168572 - RNA, 19 nt, Artificial Sequence
  Description of Artificial Sequence: Synthetic oligonucleotide
cucuggaaauucacuuaag

SEQ ID NO: 3168573 - RNA, 19 nt, Artificial Sequence
  Description of Artificial Sequence: Synthetic oligonucleotide
uuauaccgccauaggcuga

SEQ ID NO: 3168574 - RNA, 19 nt, Artificial Sequence
  Description of Artificial Sequence: Synthetic oligonucleotide
gauaucaguuauaccgcca

SEQ ID NO: 3168575 - RNA, 19 nt, Artificial Sequence
  Description of Artificial Sequence: Synthetic oligonucleotide
aaaaguggucaaacuccug

SEQ ID NO: 3168576 - RNA, 19 nt, Artificial Sequence
  Description of Artificial Sequence: Synthetic oligonucleotide
auaggcugacgauuucagu

SEQ ID NO: 3168577 - RNA, 19 nt, Artificial Sequence
  Description of Artificial Sequence: Synthetic oligonucleotide
ugcucucagccccuucacc

SEQ ID NO: 3168578 - RNA, 19 nt, Artificial Sequence
  Description of Artificial Sequence: Synthetic oligonucleotide
acugcaggaggccugucaa

SEQ ID NO: 3168579 - RNA, 19 nt, Artificial Sequence
  Description of Artificial Sequence: Synthetic oligonucleotide
auaucucuucacuguggca

SEQ ID NO: 3168580 - RNA, 19 nt, Artificial Sequence
  Description of Artificial Sequence: Synthetic oligonucleotide
augcucucagccccuucac

SEQ ID NO: 3168581 - RNA, 19 nt, Artificial Sequence
  Description of Artificial Sequence: Synthetic oligonucleotide
uauaccgccauaggcugac

SEQ ID NO: 3168582 - RNA, 19 nt, Artificial Sequence
  Description of Artificial Sequence: Synthetic oligonucleotide
aggcugacgauuucaguaa

SEQ ID NO: 3168583 - RNA, 19 nt, Artificial Sequence
  Description of Artificial Sequence: Synthetic oligonucleotide
ucgcauuuuacggaacauc

SEQ ID NO: 3168584 - RNA, 19 nt, Artificial Sequence
  Description of Artificial Sequence: Synthetic oligonucleotide
acauauuucacauugauag

SEQ ID NO: 3168585 - RNA, 19 nt, Artificial Sequence
  Description of Artificial Sequence: Synthetic oligonucleotide
ucuucuguaaguuaaagag

SEQ ID NO: 3168586 - RNA, 19 nt, Artificial Sequence
  Description of Artificial Sequence: Synthetic oligonucleotide
uagaauuuagacaaaauug

SEQ ID NO: 3168587 - RNA, 19 nt, Artificial Sequence
  Description of Artificial Sequence: Synthetic oligonucleotide
aauaccaacacaugaauug

SEQ ID NO: 3168588 - RNA, 19 nt, Artificial Sequence
  Description of Artificial Sequence: Synthetic oligonucleotide
aaaggaaucaacuacugga

SEQ ID NO: 3168589 - RNA, 19 nt, Artificial Sequence
  Description of Artificial Sequence: Synthetic oligonucleotide
uaaagcuucaguaagcugc

SEQ ID NO: 3168590 - RNA, 19 nt, Artificial Sequence
  Description of Artificial Sequence: Synthetic oligonucleotide
aaaaucuccaacaggaccc

SEQ ID NO: 3168591 - RNA, 19 nt, Artificial Sequence
  Description of Artificial Sequence: Synthetic oligonucleotide
uaaguuaaagagccgaugg

SEQ ID NO: 3168592 - RNA, 19 nt, Artificial Sequence
  Description of Artificial Sequence: Synthetic oligonucleotide
acauugauagaauuuagac

SEQ ID NO: 3168593 - RNA, 19 nt, Artificial Sequence
  Description of Artificial Sequence: Synthetic oligonucleotide
uagaaaaucuccaacagga

SEQ ID NO: 3168594 - RNA, 19 nt, Artificial Sequence
  Description of Artificial Sequence: Synthetic oligonucleotide
uuuauaauagaauccaguc

SEQ ID NO: 3168595 - RNA, 19 nt, Artificial Sequence
  Description of Artificial Sequence: Synthetic oligonucleotide
uacuuuauacacuagaaaa

SEQ ID NO: 3168596 - RNA, 19 nt, Artificial Sequence
  Description of Artificial Sequence: Synthetic oligonucleotide
ugcaucuuccccaaaacgg

SEQ ID NO: 3168597 - RNA, 19 nt, Artificial Sequence
  Description of Artificial Sequence: Synthetic oligonucleotide
aaaaggaaucaacuacugg

SEQ ID NO: 3168598 - RNA, 19 nt, Artificial Sequence
  Description of Artificial Sequence: Synthetic oligonucleotide
ugcauuuagaaguuguuag

SEQ ID NO: 3168599 - RNA, 19 nt, Artificial Sequence
  Description of Artificial Sequence: Synthetic oligonucleotide
aguaucaucccuuuugauc

SEQ ID NO: 3168600 - RNA, 19 nt, Artificial Sequence
  Description of Artificial Sequence: Synthetic oligonucleotide
auagaauccagucuucagg

SEQ ID NO: 3168601 - RNA, 19 nt, Artificial Sequence
  Description of Artificial Sequence: Synthetic oligonucleotide
agaaacuacuaacucauuc

SEQ ID NO: 3168602 - RNA, 19 nt, Artificial Sequence
  Description of Artificial Sequence: Synthetic oligonucleotide
uauacacuagaaaaucucc

SEQ ID NO: 3168603 - RNA, 19 nt, Artificial Sequence
  Description of Artificial Sequence: Synthetic oligonucleotide
ucaacuacuggagacaccg

SEQ ID NO: 3168604 - RNA, 19 nt, Artificial Sequence
  Description of Artificial Sequence: Synthetic oligonucleotide
aauucugaguaucuucauc

SEQ ID NO: 3168605 - RNA, 19 nt, Artificial Sequence
  Description of Artificial Sequence: Synthetic oligonucleotide
guaucaucccuuuugaucc

SEQ ID NO: 3168606 - RNA, 19 nt, Artificial Sequence
  Description of Artificial Sequence: Synthetic oligonucleotide
aaaguuuugacaauucuga

SEQ ID NO: 3168607 - RNA, 19 nt, Artificial Sequence
  Description of Artificial Sequence: Synthetic oligonucleotide
gaaaaucuccaacaggacc

SEQ ID NO: 3168608 - RNA, 19 nt, Artificial Sequence
  Description of Artificial Sequence: Synthetic oligonucleotide
uuacgaacagaucacaccu

SEQ ID NO: 3168609 - RNA, 19 nt, Artificial Sequence
  Description of Artificial Sequence: Synthetic oligonucleotide
uuuuaaagcuucaguaagc

SEQ ID NO: 3168610 - RNA, 19 nt, Artificial Sequence
  Description of Artificial Sequence: Synthetic oligonucleotide
aaaaguuuugacaauucug

SEQ ID NO: 3168611 - RNA, 19 nt, Artificial Sequence
  Description of Artificial Sequence: Synthetic oligonucleotide
ugcauuaaaacaugaggcc

SEQ ID NO: 3168612 - RNA, 19 nt, Artificial Sequence
  Description of Artificial Sequence: Synthetic oligonucleotide
aaaacaugaggccaacagu

SEQ ID NO: 3168613 - RNA, 19 nt, Artificial Sequence
  Description of Artificial Sequence: Synthetic oligonucleotide
uaaugugacaaauaccaac

SEQ ID NO: 3168614 - RNA, 19 nt, Artificial Sequence
  Description of Artificial Sequence: Synthetic oligonucleotide
uguacaagaacaauaucau

SEQ ID NO: 3168615 - RNA, 19 nt, Artificial Sequence
  Description of Artificial Sequence: Synthetic oligonucleotide
cuucauuugaccugacugg

SEQ ID NO: 3168616 - RNA, 19 nt, Artificial Sequence
  Description of Artificial Sequence: Synthetic oligonucleotide
aaugugacaaauaccaaca

SEQ ID NO: 3168617 - RNA, 19 nt, Artificial Sequence
  Description of Artificial Sequence: Synthetic oligonucleotide
auucugaguaucuucaucu

SEQ ID NO: 3168618 - RNA, 19 nt, Artificial Sequence
  Description of Artificial Sequence: Synthetic oligonucleotide
gaaacuacuaacucauuca

SEQ ID NO: 3168619 - RNA, 19 nt, Artificial Sequence
  Description of Artificial Sequence: Synthetic oligonucleotide
ucaguaagcugcuucaggc

SEQ ID NO: 3168620 - RNA, 19 nt, Artificial Sequence
  Description of Artificial Sequence: Synthetic oligonucleotide
uuguuagauacacuuauaa

SEQ ID NO: 3168621 - RNA, 19 nt, Artificial Sequence
  Description of Artificial Sequence: Synthetic oligonucleotide
aguaagcugcuucaggcac

SEQ ID NO: 3168622 - RNA, 19 nt, Artificial Sequence
  Description of Artificial Sequence: Synthetic oligonucleotide
cugguuuauaauagaaucc

SEQ ID NO: 3168623 - RNA, 19 nt, Artificial Sequence
  Description of Artificial Sequence: Synthetic oligonucleotide
cuuuugauccauucaacag

SEQ ID NO: 3168624 - RNA, 19 nt, Artificial Sequence
  Description of Artificial Sequence: Synthetic oligonucleotide
agaauuuagaaacuacuaa

SEQ ID NO: 3168625 - RNA, 19 nt, Artificial Sequence
  Description of Artificial Sequence: Synthetic oligonucleotide
uccucauuaccuaaaauau

SEQ ID NO: 3168626 - RNA, 19 nt, Artificial Sequence
  Description of Artificial Sequence: Synthetic oligonucleotide
auacauucuacuuuauaca

SEQ ID NO: 3168627 - RNA, 19 nt, Artificial Sequence
  Description of Artificial Sequence: Synthetic oligonucleotide
uaaaaggaaucaacuacug

SEQ ID NO: 3168628 - RNA, 19 nt, Artificial Sequence
  Description of Artificial Sequence: Synthetic oligonucleotide
aaguuuugacaauucugag

SEQ ID NO: 3168629 - RNA, 19 nt, Artificial Sequence
  Description of Artificial Sequence: Synthetic oligonucleotide
cucauuaccuaaaauauga

SEQ ID NO: 3168630 - RNA, 19 nt, Artificial Sequence
  Description of Artificial Sequence: Synthetic oligonucleotide
cuuauugggaaacccagag

SEQ ID NO: 3168631 - RNA, 19 nt, Artificial Sequence
  Description of Artificial Sequence: Synthetic oligonucleotide
cuuacgaacagaucacacc

SEQ ID NO: 3168632 - RNA, 19 nt, Artificial Sequence
  Description of Artificial Sequence: Synthetic oligonucleotide
acacuuauaaagucuacca

SEQ ID NO: 3168633 - RNA, 19 nt, Artificial Sequence
  Description of Artificial Sequence: Synthetic oligonucleotide
uuccucauuaccuaaaaua

SEQ ID NO: 3168634 - RNA, 19 nt, Artificial Sequence
  Description of Artificial Sequence: Synthetic oligonucleotide
cuagaaaaucuccaacagg

SEQ ID NO: 3168635 - RNA, 19 nt, Artificial Sequence
  Description of Artificial Sequence: Synthetic oligonucleotide
cagguuagcauccuuauug

SEQ ID NO: 3168636 - RNA, 19 nt, Artificial Sequence
  Description of Artificial Sequence: Synthetic oligonucleotide
uucaguaagcugcuucagg

SEQ ID NO: 3168637 - RNA, 19 nt, Artificial Sequence
  Description of Artificial Sequence: Synthetic oligonucleotide
agaaaauggucagaggagg

SEQ ID NO: 3168638 - RNA, 19 nt, Artificial Sequence
  Description of Artificial Sequence: Synthetic oligonucleotide
gaacagaucacaccucucc

SEQ ID NO: 3168639 - RNA, 19 nt, Artificial Sequence
  Description of Artificial Sequence: Synthetic oligonucleotide
aacucauucaaaguuauua

SEQ ID NO: 3168640 - RNA, 19 nt, Artificial Sequence
  Description of Artificial Sequence: Synthetic oligonucleotide
uccuuauugggaaacccag

SEQ ID NO: 3168641 - RNA, 19 nt, Artificial Sequence
  Description of Artificial Sequence: Synthetic oligonucleotide
accauugcaucuuagggug

SEQ ID NO: 3168642 - RNA, 19 nt, Artificial Sequence
  Description of Artificial Sequence: Synthetic oligonucleotide
gucaauucuaacugucugg

SEQ ID NO: 3168643 - RNA, 19 nt, Artificial Sequence
  Description of Artificial Sequence: Synthetic oligonucleotide
auaccaacacaugaauugc

SEQ ID NO: 3168644 - RNA, 19 nt, Artificial Sequence
  Description of Artificial Sequence: Synthetic oligonucleotide
gaacccuuuugguauaucc

SEQ ID NO: 3168645 - RNA, 19 nt, Artificial Sequence
  Description of Artificial Sequence: Synthetic oligonucleotide
ucucaaggaauacacacau

SEQ ID NO: 3168646 - RNA, 19 nt, Artificial Sequence
  Description of Artificial Sequence: Synthetic oligonucleotide
aacaggaccccauuccuug

SEQ ID NO: 3168647 - RNA, 19 nt, Artificial Sequence
  Description of Artificial Sequence: Synthetic oligonucleotide
gaaacccagagccuucugg

SEQ ID NO: 3168648 - RNA, 19 nt, Artificial Sequence
  Description of Artificial Sequence: Synthetic oligonucleotide
caucuuaggguguaagcgg

SEQ ID NO: 3168649 - RNA, 19 nt, Artificial Sequence
  Description of Artificial Sequence: Synthetic oligonucleotide
ugaagaggaucauagugga

SEQ ID NO: 3168650 - RNA, 19 nt, Artificial Sequence
  Description of Artificial Sequence: Synthetic oligonucleotide
ucuaccacacauauuucac

SEQ ID NO: 3168651 - RNA, 19 nt, Artificial Sequence
  Description of Artificial Sequence: Synthetic oligonucleotide
agugacuuguacaagaaca

SEQ ID NO: 3168652 - RNA, 19 nt, Artificial Sequence
  Description of Artificial Sequence: Synthetic oligonucleotide
gacaaaauugauaucuuca

SEQ ID NO: 3168653 - RNA, 19 nt, Artificial Sequence
  Description of Artificial Sequence: Synthetic oligonucleotide
uguuagauacacuuauaaa

SEQ ID NO: 3168654 - RNA, 19 nt, Artificial Sequence
  Description of Artificial Sequence: Synthetic oligonucleotide
uuuaaagcuucaguaagcu

SEQ ID NO: 3168655 - RNA, 19 nt, Artificial Sequence
  Description of Artificial Sequence: Synthetic oligonucleotide
ucuguaaguuaaagagccg

SEQ ID NO: 3168656 - RNA, 19 nt, Artificial Sequence
  Description of Artificial Sequence: Synthetic oligonucleotide
uuugauccauucaacagua

SEQ ID NO: 3168657 - RNA, 19 nt, Artificial Sequence
  Description of Artificial Sequence: Synthetic oligonucleotide
uaggcuccaacucuuacga

SEQ ID NO: 3168658 - RNA, 19 nt, Artificial Sequence
  Description of Artificial Sequence: Synthetic oligonucleotide
uagaauccagucuucaggu

SEQ ID NO: 3168659 - RNA, 19 nt, Artificial Sequence
  Description of Artificial Sequence: Synthetic oligonucleotide
uacacuuauaaagucuacc

SEQ ID NO: 3168660 - RNA, 19 nt, Artificial Sequence
  Description of Artificial Sequence: Synthetic oligonucleotide
uucuucuguaaguuaaaga

SEQ ID NO: 3168661 - RNA, 19 nt, Artificial Sequence
  Description of Artificial Sequence: Synthetic oligonucleotide
gaggagaaaauggucagag

SEQ ID NO: 3168662 - RNA, 19 nt, Artificial Sequence
  Description of Artificial Sequence: Synthetic oligonucleotide
gauaccgucguagaugagc

SEQ ID NO: 3168663 - RNA, 19 nt, Artificial Sequence
  Description of Artificial Sequence: Synthetic oligonucleotide
uucucaaggaauacacaca

SEQ ID NO: 3168664 - RNA, 19 nt, Artificial Sequence
  Description of Artificial Sequence: Synthetic oligonucleotide
aaacccagagccuucugga

SEQ ID NO: 3168665 - RNA, 19 nt, Artificial Sequence
  Description of Artificial Sequence: Synthetic oligonucleotide
aacugucuggguaucuacc

SEQ ID NO: 3168666 - RNA, 19 nt, Artificial Sequence
  Description of Artificial Sequence: Synthetic oligonucleotide
guguaagcgguuuacauca

SEQ ID NO: 3168667 - RNA, 19 nt, Artificial Sequence
  Description of Artificial Sequence: Synthetic oligonucleotide
gacaauucugaguaucuuc

SEQ ID NO: 3168668 - RNA, 19 nt, Artificial Sequence
  Description of Artificial Sequence: Synthetic oligonucleotide
uccaguuuaaccccuucac

SEQ ID NO: 3168669 - RNA, 19 nt, Artificial Sequence
  Description of Artificial Sequence: Synthetic oligonucleotide
agucuuuuaaagcuucagu

SEQ ID NO: 3168670 - RNA, 19 nt, Artificial Sequence
  Description of Artificial Sequence: Synthetic oligonucleotide
uuauugggaaacccagagc

SEQ ID NO: 3168671 - RNA, 19 nt, Artificial Sequence
  Description of Artificial Sequence: Synthetic oligonucleotide
agguuagcauccuuauugg

SEQ ID NO: 3168672 - RNA, 19 nt, Artificial Sequence
  Description of Artificial Sequence: Synthetic oligonucleotide
aagucuaccaaaauugcaa

SEQ ID NO: 3168673 - RNA, 19 nt, Artificial Sequence
  Description of Artificial Sequence: Synthetic oligonucleotide
ucuuccgcuaacuccagug

SEQ ID NO: 3168674 - RNA, 19 nt, Artificial Sequence
  Description of Artificial Sequence: Synthetic oligonucleotide
aucaagagaaguuccgcug

SEQ ID NO: 3168675 - RNA, 19 nt, Artificial Sequence
  Description of Artificial Sequence: Synthetic oligonucleotide
cacaccucuccaaaguugg

SEQ ID NO: 3168676 - RNA, 19 nt, Artificial Sequence
  Description of Artificial Sequence: Synthetic oligonucleotide
ucccuuuugauccauucaa

SEQ ID NO: 3168677 - RNA, 19 nt, Artificial Sequence
  Description of Artificial Sequence: Synthetic oligonucleotide
guaucuaccacacauauuu

SEQ ID NO: 3168678 - RNA, 19 nt, Artificial Sequence
  Description of Artificial Sequence: Synthetic oligonucleotide
aacagaucacaccucucca

SEQ ID NO: 3168679 - RNA, 19 nt, Artificial Sequence
  Description of Artificial Sequence: Synthetic oligonucleotide
gucguagaugagcagaacc

SEQ ID NO: 3168680 - RNA, 19 nt, Artificial Sequence
  Description of Artificial Sequence: Synthetic oligonucleotide
uggauaccgucguagauga

SEQ ID NO: 3168681 - RNA, 19 nt, Artificial Sequence
  Description of Artificial Sequence: Synthetic oligonucleotide
ucuuacgaacagaucacac

SEQ ID NO: 3168682 - RNA, 19 nt, Artificial Sequence
  Description of Artificial Sequence: Synthetic oligonucleotide
gaaguuguuagauacacuu

SEQ ID NO: 3168683 - RNA, 19 nt, Artificial Sequence
  Description of Artificial Sequence: Synthetic oligonucleotide
uacacuagaaaaucuccaa

SEQ ID NO: 3168684 - RNA, 19 nt, Artificial Sequence
  Description of Artificial Sequence: Synthetic oligonucleotide
aauauuauagaguaugucu

SEQ ID NO: 3168685 - RNA, 19 nt, Artificial Sequence
  Description of Artificial Sequence: Synthetic oligonucleotide
aacauaaugaagucugagc

SEQ ID NO: 3168686 - RNA, 19 nt, Artificial Sequence
  Description of Artificial Sequence: Synthetic oligonucleotide
aacuagaugaaacuauugg

SEQ ID NO: 3168687 - RNA, 19 nt, Artificial Sequence
  Description of Artificial Sequence: Synthetic oligonucleotide
ugaauaggcaccaaguggg

SEQ ID NO: 3168688 - RNA, 19 nt, Artificial Sequence
  Description of Artificial Sequence: Synthetic oligonucleotide
ucuuauaagaaucacugcu

SEQ ID NO: 3168689 - RNA, 19 nt, Artificial Sequence
  Description of Artificial Sequence: Synthetic oligonucleotide
uaaacaaugaagauaauuu

SEQ ID NO: 3168690 - RNA, 19 nt, Artificial Sequence
  Description of Artificial Sequence: Synthetic oligonucleotide
aucuuuucaugauacaggc

SEQ ID NO: 3168691 - RNA, 19 nt, Artificial Sequence
  Description of Artificial Sequence: Synthetic oligonucleotide
aacaaaaucccucaucgug

SEQ ID NO: 3168692 - RNA, 19 nt, Artificial Sequence
  Description of Artificial Sequence: Synthetic oligonucleotide
aaagcaacaacugugcauc

SEQ ID NO: 3168693 - RNA, 19 nt, Artificial Sequence
  Description of Artificial Sequence: Synthetic oligonucleotide
uuaucgaugcauuugaaca

SEQ ID NO: 3168694 - RNA, 19 nt, Artificial Sequence
  Description of Artificial Sequence: Synthetic oligonucleotide
uuuuauacucagcuggagg

SEQ ID NO: 3168695 - RNA, 19 nt, Artificial Sequence
  Description of Artificial Sequence: Synthetic oligonucleotide
cagauuagcaaauuguucc

SEQ ID NO: 3168696 - RNA, 19 nt, Artificial Sequence
  Description of Artificial Sequence: Synthetic oligonucleotide
uauggaagagaccuuuucg

SEQ ID NO: 3168697 - RNA, 19 nt, Artificial Sequence
  Description of Artificial Sequence: Synthetic oligonucleotide
uuuauacucagcuggaggc

SEQ ID NO: 3168698 - RNA, 19 nt, Artificial Sequence
  Description of Artificial Sequence: Synthetic oligonucleotide
uauagaguaugucuggacc

SEQ ID NO: 3168699 - RNA, 19 nt, Artificial Sequence
  Description of Artificial Sequence: Synthetic oligonucleotide
acaacugugcaucuucucc

SEQ ID NO: 3168700 - RNA, 19 nt, Artificial Sequence
  Description of Artificial Sequence: Synthetic oligonucleotide
acauaaugaagucugagcu

SEQ ID NO: 3168701 - RNA, 19 nt, Artificial Sequence
  Description of Artificial Sequence: Synthetic oligonucleotide
uaaccuuugaacaacugca

SEQ ID NO: 3168702 - RNA, 19 nt, Artificial Sequence
  Description of Artificial Sequence: Synthetic oligonucleotide
aaauauuauagaguauguc

SEQ ID NO: 3168703 - RNA, 19 nt, Artificial Sequence
  Description of Artificial Sequence: Synthetic oligonucleotide
gaucccaccaacaaaaucc

SEQ ID NO: 3168704 - RNA, 19 nt, Artificial Sequence
  Description of Artificial Sequence: Synthetic oligonucleotide
aacucgaacucgcugcugc

SEQ ID NO: 3168705 - RNA, 19 nt, Artificial Sequence
  Description of Artificial Sequence: Synthetic oligonucleotide
aaucuuuucaugauacagg

SEQ ID NO: 3168706 - RNA, 19 nt, Artificial Sequence
  Description of Artificial Sequence: Synthetic oligonucleotide
gguaauaaaacucucagca

SEQ ID NO: 3168707 - RNA, 19 nt, Artificial Sequence
  Description of Artificial Sequence: Synthetic oligonucleotide
uucaaaaugaggcuuguaa

SEQ ID NO: 3168708 - RNA, 19 nt, Artificial Sequence
  Description of Artificial Sequence: Synthetic oligonucleotide
uuuacuaacucaacagaug

SEQ ID NO: 3168709 - RNA, 19 nt, Artificial Sequence
  Description of Artificial Sequence: Synthetic oligonucleotide
ugugauuugguucaucagu

SEQ ID NO: 3168710 - RNA, 19 nt, Artificial Sequence
  Description of Artificial Sequence: Synthetic oligonucleotide
auagaguaugucuggaccg

SEQ ID NO: 3168711 - RNA, 19 nt, Artificial Sequence
  Description of Artificial Sequence: Synthetic oligonucleotide
uguaccagcacuaaugaua

SEQ ID NO: 3168712 - RNA, 19 nt, Artificial Sequence
  Description of Artificial Sequence: Synthetic oligonucleotide
aagauaauuucaaacauaa

SEQ ID NO: 3168713 - RNA, 19 nt, Artificial Sequence
  Description of Artificial Sequence: Synthetic oligonucleotide
aaacauuugcuguggguag

SEQ ID NO: 3168714 - RNA, 19 nt, Artificial Sequence
  Description of Artificial Sequence: Synthetic oligonucleotide
cucaaauuacuaaacaguc

SEQ ID NO: 3168715 - RNA, 19 nt, Artificial Sequence
  Description of Artificial Sequence: Synthetic oligonucleotide
acuagaugaaacuauugga

SEQ ID NO: 3168716 - RNA, 19 nt, Artificial Sequence
  Description of Artificial Sequence: Synthetic oligonucleotide
aacaaugaagauaauuuca

SEQ ID NO: 3168717 - RNA, 19 nt, Artificial Sequence
  Description of Artificial Sequence: Synthetic oligonucleotide
cuugcaaauucccagcagg

SEQ ID NO: 3168718 - RNA, 19 nt, Artificial Sequence
  Description of Artificial Sequence: Synthetic oligonucleotide
uaugcagauuagcaaauug

SEQ ID NO: 3168719 - RNA, 19 nt, Artificial Sequence
  Description of Artificial Sequence: Synthetic oligonucleotide
uuugcaguucacaucaaac

SEQ ID NO: 3168720 - RNA, 19 nt, Artificial Sequence
  Description of Artificial Sequence: Synthetic oligonucleotide
uucacuagcuacucgagca

SEQ ID NO: 3168721 - RNA, 19 nt, Artificial Sequence
  Description of Artificial Sequence: Synthetic oligonucleotide
cuuauaagaaucacugcug

SEQ ID NO: 3168722 - RNA, 19 nt, Artificial Sequence
  Description of Artificial Sequence: Synthetic oligonucleotide
ugaaucuuuccuguguugg

SEQ ID NO: 3168723 - RNA, 19 nt, Artificial Sequence
  Description of Artificial Sequence: Synthetic oligonucleotide
aacuauuggagggguaacc

SEQ ID NO: 3168724 - RNA, 19 nt, Artificial Sequence
  Description of Artificial Sequence: Synthetic oligonucleotide
cugaauaggcaccaagugg

SEQ ID NO: 3168725 - RNA, 19 nt, Artificial Sequence
  Description of Artificial Sequence: Synthetic oligonucleotide
gucucugguagacagaucc

SEQ ID NO: 3168726 - RNA, 19 nt, Artificial Sequence
  Description of Artificial Sequence: Synthetic oligonucleotide
aaauucucguaguacauuu

SEQ ID NO: 3168727 - RNA, 19 nt, Artificial Sequence
  Description of Artificial Sequence: Synthetic oligonucleotide
uucuuaucgaugcauuuga

SEQ ID NO: 3168728 - RNA, 19 nt, Artificial Sequence
  Description of Artificial Sequence: Synthetic oligonucleotide
cuuaacaauaugcagauua

SEQ ID NO: 3168729 - RNA, 19 nt, Artificial Sequence
  Description of Artificial Sequence: Synthetic oligonucleotide
gaugcauuugaacacagaa

SEQ ID NO: 3168730 - RNA, 19 nt, Artificial Sequence
  Description of Artificial Sequence: Synthetic oligonucleotide
gaugaaacuauuggagggg

SEQ ID NO: 3168731 - RNA, 19 nt, Artificial Sequence
  Description of Artificial Sequence: Synthetic oligonucleotide
guaaccuuugaacaacugc

SEQ ID NO: 3168732 - RNA, 19 nt, Artificial Sequence
  Description of Artificial Sequence: Synthetic oligonucleotide
aaaacauuugcugugggua

SEQ ID NO: 3168733 - RNA, 19 nt, Artificial Sequence
  Description of Artificial Sequence: Synthetic oligonucleotide
ucaguuacuucucucacau

SEQ ID NO: 3168734 - RNA, 19 nt, Artificial Sequence
  Description of Artificial Sequence: Synthetic oligonucleotide
auauuauagaguaugucug

SEQ ID NO: 3168735 - RNA, 19 nt, Artificial Sequence
  Description of Artificial Sequence: Synthetic oligonucleotide
uuuagugucucuuuaucau

SEQ ID NO: 3168736 - RNA, 19 nt, Artificial Sequence
  Description of Artificial Sequence: Synthetic oligonucleotide
auuuagugucucuuuauca

SEQ ID NO: 3168737 - RNA, 19 nt, Artificial Sequence
  Description of Artificial Sequence: Synthetic oligonucleotide
auucucguaguacauuuag

SEQ ID NO: 3168738 - RNA, 19 nt, Artificial Sequence
  Description of Artificial Sequence: Synthetic oligonucleotide
ugauuugaaaccggaagag

SEQ ID NO: 3168739 - RNA, 19 nt, Artificial Sequence
  Description of Artificial Sequence: Synthetic oligonucleotide
caaaccagccguuucauug

SEQ ID NO: 3168740 - RNA, 19 nt, Artificial Sequence
  Description of Artificial Sequence: Synthetic oligonucleotide
ucuguaccagcacuaauga

SEQ ID NO: 3168741 - RNA, 19 nt, Artificial Sequence
  Description of Artificial Sequence: Synthetic oligonucleotide
ugaggaacgcuuaacaaua

SEQ ID NO: 3168742 - RNA, 19 nt, Artificial Sequence
  Description of Artificial Sequence: Synthetic oligonucleotide
cagguaauaaaacucucag

SEQ ID NO: 3168743 - RNA, 19 nt, Artificial Sequence
  Description of Artificial Sequence: Synthetic oligonucleotide
ucaaaaugaggcuuguaau

SEQ ID NO: 3168744 - RNA, 19 nt, Artificial Sequence
  Description of Artificial Sequence: Synthetic oligonucleotide
gaugucaucacugugcguc

SEQ ID NO: 3168745 - RNA, 19 nt, Artificial Sequence
  Description of Artificial Sequence: Synthetic oligonucleotide
acaugagucaguccugagg

SEQ ID NO: 3168746 - RNA, 19 nt, Artificial Sequence
  Description of Artificial Sequence: Synthetic oligonucleotide
gaauucccaaaucugacuc

SEQ ID NO: 3168747 - RNA, 19 nt, Artificial Sequence
  Description of Artificial Sequence: Synthetic oligonucleotide
uguuccucaauccucucca

SEQ ID NO: 3168748 - RNA, 19 nt, Artificial Sequence
  Description of Artificial Sequence: Synthetic oligonucleotide
ugauuaagaucccaccaac

SEQ ID NO: 3168749 - RNA, 19 nt, Artificial Sequence
  Description of Artificial Sequence: Synthetic oligonucleotide
uuuuccauugagcaagcaa

SEQ ID NO: 3168750 - RNA, 19 nt, Artificial Sequence
  Description of Artificial Sequence: Synthetic oligonucleotide
ugucaugcaguaaaucugu

SEQ ID NO: 3168751 - RNA, 19 nt, Artificial Sequence
  Description of Artificial Sequence: Synthetic oligonucleotide
acuugcagaauagacauug

SEQ ID NO: 3168752 - RNA, 19 nt, Artificial Sequence
  Description of Artificial Sequence: Synthetic oligonucleotide
aaacguacuugagugaugu

SEQ ID NO: 3168753 - RNA, 19 nt, Artificial Sequence
  Description of Artificial Sequence: Synthetic oligonucleotide
uaauuucccugucaaguca

SEQ ID NO: 3168754 - RNA, 19 nt, Artificial Sequence
  Description of Artificial Sequence: Synthetic oligonucleotide
ccaacaaaaucccucaucg

SEQ ID NO: 3168755 - RNA, 19 nt, Artificial Sequence
  Description of Artificial Sequence: Synthetic oligonucleotide
uuaagaucccaccaacaaa

SEQ ID NO: 3168756 - RNA, 19 nt, Artificial Sequence
  Description of Artificial Sequence: Synthetic oligonucleotide
uugcaguucacaucaaacu

SEQ ID NO: 3168757 - RNA, 19 nt, Artificial Sequence
  Description of Artificial Sequence: Synthetic oligonucleotide
uccuccaauaacaaacagu

SEQ ID NO: 3168758 - RNA, 19 nt, Artificial Sequence
  Description of Artificial Sequence: Synthetic oligonucleotide
aacaacuccccacacugga

SEQ ID NO: 3168759 - RNA, 19 nt, Artificial Sequence
  Description of Artificial Sequence: Synthetic oligonucleotide
cuuaucgaugcauuugaac

SEQ ID NO: 3168760 - RNA, 19 nt, Artificial Sequence
  Description of Artificial Sequence: Synthetic oligonucleotide
uccuucucuuauaagaauc

SEQ ID NO: 3168761 - RNA, 19 nt, Artificial Sequence
  Description of Artificial Sequence: Synthetic oligonucleotide
ugugcgucucugaauaggc

SEQ ID NO: 3168762 - RNA, 19 nt, Artificial Sequence
  Description of Artificial Sequence: Synthetic oligonucleotide
ugguucaucaguauccaaa

SEQ ID NO: 3168763 - RNA, 19 nt, Artificial Sequence
  Description of Artificial Sequence: Synthetic oligonucleotide
agccacuaaauucucguag

SEQ ID NO: 3168764 - RNA, 19 nt, Artificial Sequence
  Description of Artificial Sequence: Synthetic oligonucleotide
ugugaacucgaacucgcug

SEQ ID NO: 3168765 - RNA, 19 nt, Artificial Sequence
  Description of Artificial Sequence: Synthetic oligonucleotide
guucaaacaugugauuugg

SEQ ID NO: 3168766 - RNA, 19 nt, Artificial Sequence
  Description of Artificial Sequence: Synthetic oligonucleotide
augauaugaucuuugcagu

SEQ ID NO: 3168767 - RNA, 19 nt, Artificial Sequence
  Description of Artificial Sequence: Synthetic oligonucleotide
uacuucucucacauccugg

SEQ ID NO: 3168768 - RNA, 19 nt, Artificial Sequence
  Description of Artificial Sequence: Synthetic oligonucleotide
ucagcuggaggcuuuaaaa

SEQ ID NO: 3168769 - RNA, 19 nt, Artificial Sequence
  Description of Artificial Sequence: Synthetic oligonucleotide
cuaaacagucugauauugc

SEQ ID NO: 3168770 - RNA, 19 nt, Artificial Sequence
  Description of Artificial Sequence: Synthetic oligonucleotide
aaacuauuggagggguaac

SEQ ID NO: 3168771 - RNA, 19 nt, Artificial Sequence
  Description of Artificial Sequence: Synthetic oligonucleotide
gaugugucuaucccaagca

SEQ ID NO: 3168772 - RNA, 19 nt, Artificial Sequence
  Description of Artificial Sequence: Synthetic oligonucleotide
ucucucacauccuggaugu

SEQ ID NO: 3168773 - RNA, 19 nt, Artificial Sequence
  Description of Artificial Sequence: Synthetic oligonucleotide
cacacacacacacacacac

SEQ ID NO: 3168774 - RNA, 19 nt, Artificial Sequence
  Description of Artificial Sequence: Synthetic oligonucleotide
ucuaucccaagcagguaag

SEQ ID NO: 3168775 - RNA, 19 nt, Artificial Sequence
  Description of Artificial Sequence: Synthetic oligonucleotide
uaguaaaagugauuugaaa

SEQ ID NO: 3168776 - RNA, 19 nt, Artificial Sequence
  Description of Artificial Sequence: Synthetic oligonucleotide
agaggaugcuauuuucaag

SEQ ID NO: 3168777 - RNA, 19 nt, Artificial Sequence
  Description of Artificial Sequence: Synthetic oligonucleotide
aaacuagaugaaacuauug

SEQ ID NO: 3168778 - RNA, 19 nt, Artificial Sequence
  Description of Artificial Sequence: Synthetic oligonucleotide
cuguacuugcagaauagac

SEQ ID NO: 3168779 - RNA, 19 nt, Artificial Sequence
  Description of Artificial Sequence: Synthetic oligonucleotide
aaaccagccguuucauugu

SEQ ID NO: 3168780 - RNA, 19 nt, Artificial Sequence
  Description of Artificial Sequence: Synthetic oligonucleotide
auaugaucuuugcaguuca

SEQ ID NO: 3168781 - RNA, 19 nt, Artificial Sequence
  Description of Artificial Sequence: Synthetic oligonucleotide
aucauauauucuuaucgau

SEQ ID NO: 3168782 - RNA, 19 nt, Artificial Sequence
  Description of Artificial Sequence: Synthetic oligonucleotide
uaacucaacagaugguuuc

SEQ ID NO: 3168783 - RNA, 19 nt, Artificial Sequence
  Description of Artificial Sequence: Synthetic oligonucleotide
gagggguaaccuuugaaca

SEQ ID NO: 3168784 - RNA, 19 nt, Artificial Sequence
  Description of Artificial Sequence: Synthetic oligonucleotide
uguagcuucacaaagagug

SEQ ID NO: 3168785 - RNA, 19 nt, Artificial Sequence
  Description of Artificial Sequence: Synthetic oligonucleotide
uacuaauaagaucagaagg

SEQ ID NO: 3168786 - RNA, 19 nt, Artificial Sequence
  Description of Artificial Sequence: Synthetic oligonucleotide
aaguaguucacuccgauac

SEQ ID NO: 3168787 - RNA, 19 nt, Artificial Sequence
  Description of Artificial Sequence: Synthetic oligonucleotide
uaaaacugaguguauaucg

SEQ ID NO: 3168788 - RNA, 19 nt, Artificial Sequence
  Description of Artificial Sequence: Synthetic oligonucleotide
aauagaaaaguguucagcu

SEQ ID NO: 3168789 - RNA, 19 nt, Artificial Sequence
  Description of Artificial Sequence: Synthetic oligonucleotide
acugacauaaaauugccac

SEQ ID NO: 3168790 - RNA, 19 nt, Artificial Sequence
  Description of Artificial Sequence: Synthetic oligonucleotide
uuuaugaugaagauaaguc

SEQ ID NO: 3168791 - RNA, 19 nt, Artificial Sequence
  Description of Artificial Sequence: Synthetic oligonucleotide
uacccuacuaauaagauca

SEQ ID NO: 3168792 - RNA, 19 nt, Artificial Sequence
  Description of Artificial Sequence: Synthetic oligonucleotide
auauggauuacucugaagu

SEQ ID NO: 3168793 - RNA, 19 nt, Artificial Sequence
  Description of Artificial Sequence: Synthetic oligonucleotide
aauaagaucagaaggaggu

SEQ ID NO: 3168794 - RNA, 19 nt, Artificial Sequence
  Description of Artificial Sequence: Synthetic oligonucleotide
aaugcaggaacuugcagag

SEQ ID NO: 3168795 - RNA, 19 nt, Artificial Sequence
  Description of Artificial Sequence: Synthetic oligonucleotide
aacauaacuucccaaaggu

SEQ ID NO: 3168796 - RNA, 19 nt, Artificial Sequence
  Description of Artificial Sequence: Synthetic oligonucleotide
uuacauauggauuacucug

SEQ ID NO: 3168797 - RNA, 19 nt, Artificial Sequence
  Description of Artificial Sequence: Synthetic oligonucleotide
auaguaggaguccauagcg

SEQ ID NO: 3168798 - RNA, 19 nt, Artificial Sequence
  Description of Artificial Sequence: Synthetic oligonucleotide
aaaauugccaccugugugu

SEQ ID NO: 3168799 - RNA, 19 nt, Artificial Sequence
  Description of Artificial Sequence: Synthetic oligonucleotide
uaauagucaaaaccagugg

SEQ ID NO: 3168800 - RNA, 19 nt, Artificial Sequence
  Description of Artificial Sequence: Synthetic oligonucleotide
uuaugaugaagauaaguca

SEQ ID NO: 3168801 - RNA, 19 nt, Artificial Sequence
  Description of Artificial Sequence: Synthetic oligonucleotide
aauguagucauaguaggag

SEQ ID NO: 3168802 - RNA, 19 nt, Artificial Sequence
  Description of Artificial Sequence: Synthetic oligonucleotide
gauaaaauaauagucaaaa

SEQ ID NO: 3168803 - RNA, 19 nt, Artificial Sequence
  Description of Artificial Sequence: Synthetic oligonucleotide
aaaugcaggaacuugcaga

SEQ ID NO: 3168804 - RNA, 19 nt, Artificial Sequence
  Description of Artificial Sequence: Synthetic oligonucleotide
ugaagauaagucaaguacu

SEQ ID NO: 3168805 - RNA, 19 nt, Artificial Sequence
  Description of Artificial Sequence: Synthetic oligonucleotide
uuagacacacugcagaucu

SEQ ID NO: 3168806 - RNA, 19 nt, Artificial Sequence
  Description of Artificial Sequence: Synthetic oligonucleotide
ugucuuguaaucaauuucu

SEQ ID NO: 3168807 - RNA, 19 nt, Artificial Sequence
  Description of Artificial Sequence: Synthetic oligonucleotide
ucauucagcauaaaccugc

SEQ ID NO: 3168808 - RNA, 19 nt, Artificial Sequence
  Description of Artificial Sequence: Synthetic oligonucleotide
aauucuguuuggccaaugg

SEQ ID NO: 3168809 - RNA, 19 nt, Artificial Sequence
  Description of Artificial Sequence: Synthetic oligonucleotide
uccucuuuuaugaugaaga

SEQ ID NO: 3168810 - RNA, 19 nt, Artificial Sequence
  Description of Artificial Sequence: Synthetic oligonucleotide
uaugaugaagauaagucaa

SEQ ID NO: 3168811 - RNA, 19 nt, Artificial Sequence
  Description of Artificial Sequence: Synthetic oligonucleotide
uuauuaaacuaacucugcc

SEQ ID NO: 3168812 - RNA, 19 nt, Artificial Sequence
  Description of Artificial Sequence: Synthetic oligonucleotide
ugacaauucagcaaagaac

SEQ ID NO: 3168813 - RNA, 19 nt, Artificial Sequence
  Description of Artificial Sequence: Synthetic oligonucleotide
aucaggaagccucauuucc

SEQ ID NO: 3168814 - RNA, 19 nt, Artificial Sequence
  Description of Artificial Sequence: Synthetic oligonucleotide
gauagugacaucccaaaug

SEQ ID NO: 3168815 - RNA, 19 nt, Artificial Sequence
  Description of Artificial Sequence: Synthetic oligonucleotide
agagugauaaaauaauagu

SEQ ID NO: 3168816 - RNA, 19 nt, Artificial Sequence
  Description of Artificial Sequence: Synthetic oligonucleotide
uuugauagcaaucugucuu

SEQ ID NO: 3168817 - RNA, 19 nt, Artificial Sequence
  Description of Artificial Sequence: Synthetic oligonucleotide
uaaaauugccaccugugug

SEQ ID NO: 3168818 - RNA, 19 nt, Artificial Sequence
  Description of Artificial Sequence: Synthetic oligonucleotide
uauuaaacuaacucugcca

SEQ ID NO: 3168819 - RNA, 19 nt, Artificial Sequence
  Description of Artificial Sequence: Synthetic oligonucleotide
uuugauaaaagaaguaguu

SEQ ID NO: 3168820 - RNA, 19 nt, Artificial Sequence
  Description of Artificial Sequence: Synthetic oligonucleotide
uacauuaugccuaguguag

SEQ ID NO: 3168821 - RNA, 19 nt, Artificial Sequence
  Description of Artificial Sequence: Synthetic oligonucleotide
uugaucgguauauacauca

SEQ ID NO: 3168822 - RNA, 19 nt, Artificial Sequence
  Description of Artificial Sequence: Synthetic oligonucleotide
ugaacauaacuucccaaag

SEQ ID NO: 3168823 - RNA, 19 nt, Artificial Sequence
  Description of Artificial Sequence: Synthetic oligonucleotide
uucacaaagagugauaaaa

SEQ ID NO: 3168824 - RNA, 19 nt, Artificial Sequence
  Description of Artificial Sequence: Synthetic oligonucleotide
aaauaauagucaaaaccag

SEQ ID NO: 3168825 - RNA, 19 nt, Artificial Sequence
  Description of Artificial Sequence: Synthetic oligonucleotide
aguuuaacauaaaagcaac

SEQ ID NO: 3168826 - RNA, 19 nt, Artificial Sequence
  Description of Artificial Sequence: Synthetic oligonucleotide
auucuguuuggccaauggc

SEQ ID NO: 3168827 - RNA, 19 nt, Artificial Sequence
  Description of Artificial Sequence: Synthetic oligonucleotide
uaaaccuuuggccaugaga

SEQ ID NO: 3168828 - RNA, 19 nt, Artificial Sequence
  Description of Artificial Sequence: Synthetic oligonucleotide
aggaauaucaggaagccuc

SEQ ID NO: 3168829 - RNA, 19 nt, Artificial Sequence
  Description of Artificial Sequence: Synthetic oligonucleotide
acacucuucagcuacaacu

SEQ ID NO: 3168830 - RNA, 19 nt, Artificial Sequence
  Description of Artificial Sequence: Synthetic oligonucleotide
gacgaagaggaauaucagg

SEQ ID NO: 3168831 - RNA, 19 nt, Artificial Sequence
  Description of Artificial Sequence: Synthetic oligonucleotide
aaagcaacacacucuucag

SEQ ID NO: 3168832 - RNA, 19 nt, Artificial Sequence
  Description of Artificial Sequence: Synthetic oligonucleotide
uguaaaccaaaucucuugu

SEQ ID NO: 3168833 - RNA, 19 nt, Artificial Sequence
  Description of Artificial Sequence: Synthetic oligonucleotide
aaaaugcaggaacuugcag

SEQ ID NO: 3168834 - RNA, 19 nt, Artificial Sequence
  Description of Artificial Sequence: Synthetic oligonucleotide
uuuuaugaugaagauaagu

SEQ ID NO: 3168835 - RNA, 19 nt, Artificial Sequence
  Description of Artificial Sequence: Synthetic oligonucleotide
cuacuaauaagaucagaag

SEQ ID NO: 3168836 - RNA, 19 nt, Artificial Sequence
  Description of Artificial Sequence: Synthetic oligonucleotide
acaagcugcaaauagcugu

SEQ ID NO: 3168837 - RNA, 19 nt, Artificial Sequence
  Description of Artificial Sequence: Synthetic oligonucleotide
aucagaaggaggucucucc

SEQ ID NO: 3168838 - RNA, 19 nt, Artificial Sequence
  Description of Artificial Sequence: Synthetic oligonucleotide
uguaaucaauuucucugag

SEQ ID NO: 3168839 - RNA, 19 nt, Artificial Sequence
  Description of Artificial Sequence: Synthetic oligonucleotide
gaucgguauauacaucagg

SEQ ID NO: 3168840 - RNA, 19 nt, Artificial Sequence
  Description of Artificial Sequence: Synthetic oligonucleotide
agcuaaaagcuguccaagc

SEQ ID NO: 3168841 - RNA, 19 nt, Artificial Sequence
  Description of Artificial Sequence: Synthetic oligonucleotide
aaaccaaaucucuuguuaa

SEQ ID NO: 3168842 - RNA, 19 nt, Artificial Sequence
  Description of Artificial Sequence: Synthetic oligonucleotide
aauuccgaggauaacacca

SEQ ID NO: 3168843 - RNA, 19 nt, Artificial Sequence
  Description of Artificial Sequence: Synthetic oligonucleotide
aauaauagucaaaaccagu

SEQ ID NO: 3168844 - RNA, 19 nt, Artificial Sequence
  Description of Artificial Sequence: Synthetic oligonucleotide
aucgguauauacaucaggg

SEQ ID NO: 3168845 - RNA, 19 nt, Artificial Sequence
  Description of Artificial Sequence: Synthetic oligonucleotide
auagcuguuuagcaugggg

SEQ ID NO: 3168846 - RNA, 19 nt, Artificial Sequence
  Description of Artificial Sequence: Synthetic oligonucleotide
gagugauaaaauaauaguc

SEQ ID NO: 3168847 - RNA, 19 nt, Artificial Sequence
  Description of Artificial Sequence: Synthetic oligonucleotide
uuagcauggggaaaguccu

SEQ ID NO: 3168848 - RNA, 19 nt, Artificial Sequence
  Description of Artificial Sequence: Synthetic oligonucleotide
acuaauaagaucagaagga

SEQ ID NO: 3168849 - RNA, 19 nt, Artificial Sequence
  Description of Artificial Sequence: Synthetic oligonucleotide
cauaaaauugccaccugug

SEQ ID NO: 3168850 - RNA, 19 nt, Artificial Sequence
  Description of Artificial Sequence: Synthetic oligonucleotide
auugcuacggcuucaaaau

SEQ ID NO: 3168851 - RNA, 19 nt, Artificial Sequence
  Description of Artificial Sequence: Synthetic oligonucleotide
uuggccaugagaauguaaa

SEQ ID NO: 3168852 - RNA, 19 nt, Artificial Sequence
  Description of Artificial Sequence: Synthetic oligonucleotide
uuguaaucaauuucucuga

SEQ ID NO: 3168853 - RNA, 19 nt, Artificial Sequence
  Description of Artificial Sequence: Synthetic oligonucleotide
ugcuacggcuucaaaaucc

SEQ ID NO: 3168854 - RNA, 19 nt, Artificial Sequence
  Description of Artificial Sequence: Synthetic oligonucleotide
caaaaguaacaucucauuc

SEQ ID NO: 3168855 - RNA, 19 nt, Artificial Sequence
  Description of Artificial Sequence: Synthetic oligonucleotide
ucggugagaacucuguuac

SEQ ID NO: 3168856 - RNA, 19 nt, Artificial Sequence
  Description of Artificial Sequence: Synthetic oligonucleotide
auaaaagcaacacacucuu

SEQ ID NO: 3168857 - RNA, 19 nt, Artificial Sequence
  Description of Artificial Sequence: Synthetic oligonucleotide
uacauauggauuacucuga

SEQ ID NO: 3168858 - RNA, 19 nt, Artificial Sequence
  Description of Artificial Sequence: Synthetic oligonucleotide
uucacuccgauacauuaug

SEQ ID NO: 3168859 - RNA, 19 nt, Artificial Sequence
  Description of Artificial Sequence: Synthetic oligonucleotide
guaaucaauuucucugagg

SEQ ID NO: 3168860 - RNA, 19 nt, Artificial Sequence
  Description of Artificial Sequence: Synthetic oligonucleotide
acuugaucgguauauacau

SEQ ID NO: 3168861 - RNA, 19 nt, Artificial Sequence
  Description of Artificial Sequence: Synthetic oligonucleotide
agugacaucccaaauguag

SEQ ID NO: 3168862 - RNA, 19 nt, Artificial Sequence
  Description of Artificial Sequence: Synthetic oligonucleotide
ugguuagacacacugcaga

SEQ ID NO: 3168863 - RNA, 19 nt, Artificial Sequence
  Description of Artificial Sequence: Synthetic oligonucleotide
uaagucaaguacuccaaga

SEQ ID NO: 3168864 - RNA, 19 nt, Artificial Sequence
  Description of Artificial Sequence: Synthetic oligonucleotide
acugaguguauaucgaacu

SEQ ID NO: 3168865 - RNA, 19 nt, Artificial Sequence
  Description of Artificial Sequence: Synthetic oligonucleotide
uucgguacccuacuaauaa

SEQ ID NO: 3168866 - RNA, 19 nt, Artificial Sequence
  Description of Artificial Sequence: Synthetic oligonucleotide
auaaaauugccaccugugu

SEQ ID NO: 3168867 - RNA, 19 nt, Artificial Sequence
  Description of Artificial Sequence: Synthetic oligonucleotide
cugugugugacaauucagc

SEQ ID NO: 3168868 - RNA, 19 nt, Artificial Sequence
  Description of Artificial Sequence: Synthetic oligonucleotide
acggcuucaaaauccacag

SEQ ID NO: 3168869 - RNA, 19 nt, Artificial Sequence
  Description of Artificial Sequence: Synthetic oligonucleotide
uggccaaauagaaaagugu

SEQ ID NO: 3168870 - RNA, 19 nt, Artificial Sequence
  Description of Artificial Sequence: Synthetic oligonucleotide
ugugugugacaauucagca

SEQ ID NO: 3168871 - RNA, 19 nt, Artificial Sequence
  Description of Artificial Sequence: Synthetic oligonucleotide
cuaauaagaucagaaggag

SEQ ID NO: 3168872 - RNA, 19 nt, Artificial Sequence
  Description of Artificial Sequence: Synthetic oligonucleotide
ucugccaucauuuccucgu

SEQ ID NO: 3168873 - RNA, 19 nt, Artificial Sequence
  Description of Artificial Sequence: Synthetic oligonucleotide
uucguuuuaucacuugauc

SEQ ID NO: 3168874 - RNA, 19 nt, Artificial Sequence
  Description of Artificial Sequence: Synthetic oligonucleotide
guuaccaacuccaaacaag

SEQ ID NO: 3168875 - RNA, 19 nt, Artificial Sequence
  Description of Artificial Sequence: Synthetic oligonucleotide
aaaguguucagcugugaua

SEQ ID NO: 3168876 - RNA, 19 nt, Artificial Sequence
  Description of Artificial Sequence: Synthetic oligonucleotide
auaucaggaagccucauuu

SEQ ID NO: 3168877 - RNA, 19 nt, Artificial Sequence
  Description of Artificial Sequence: Synthetic oligonucleotide
aacuagucuucuuuucacu

SEQ ID NO: 3168878 - RNA, 19 nt, Artificial Sequence
  Description of Artificial Sequence: Synthetic oligonucleotide
uaagaucagaaggaggucu

SEQ ID NO: 3168879 - RNA, 19 nt, Artificial Sequence
  Description of Artificial Sequence: Synthetic oligonucleotide
uuuguuccugcaaugacuu

SEQ ID NO: 3168880 - RNA, 19 nt, Artificial Sequence
  Description of Artificial Sequence: Synthetic oligonucleotide
ugacgaagaggaauaucag

SEQ ID NO: 3168881 - RNA, 19 nt, Artificial Sequence
  Description of Artificial Sequence: Synthetic oligonucleotide
aaacugaguguauaucgaa

SEQ ID NO: 3168882 - RNA, 19 nt, Artificial Sequence
  Description of Artificial Sequence: Synthetic oligonucleotide
uugauaaaagaaguaguuc

SEQ ID NO: 3168883 - RNA, 19 nt, Artificial Sequence
  Description of Artificial Sequence: Synthetic oligonucleotide
auaagucaaguacuccaag

SEQ ID NO: 3168884 - RNA, 19 nt, Artificial Sequence
  Description of Artificial Sequence: Synthetic oligonucleotide
gaaauauucaauuaaaagc

SEQ ID NO: 3168885 - RNA, 19 nt, Artificial Sequence
  Description of Artificial Sequence: Synthetic oligonucleotide
aaaaucaguguccuguucc

SEQ ID NO: 3168886 - RNA, 19 nt, Artificial Sequence
  Description of Artificial Sequence: Synthetic oligonucleotide
  modified_base (4)..(4): a, c, u, g, unknown or other
aaanaauuacauucuagag

SEQ ID NO: 3168887 - RNA, 19 nt, Artificial Sequence
  Description of Artificial Sequence: Synthetic oligonucleotide
  modified_base (3)..(3): a, c, u, g, unknown or other
aanaauuacauucuagaga

SEQ ID NO: 3168888 - RNA, 19 nt, Artificial Sequence
  Description of Artificial Sequence: Synthetic oligonucleotide
auaaagcuuaauuugcugc

SEQ ID NO: 3168889 - RNA, 19 nt, Artificial Sequence
  Description of Artificial Sequence: Synthetic oligonucleotide
ucaauuaaaagcuuuuaag

SEQ ID NO: 3168890 - RNA, 19 nt, Artificial Sequence
  Description of Artificial Sequence: Synthetic oligonucleotide
uguuaguuuaguuagagac

SEQ ID NO: 3168891 - RNA, 19 nt, Artificial Sequence
  Description of Artificial Sequence: Synthetic oligonucleotide
  modified_base (5)..(5): a, c, u, g, unknown or other
uaaanaauuacauucuaga

SEQ ID NO: 3168892 - RNA, 19 nt, Artificial Sequence
  Description of Artificial Sequence: Synthetic oligonucleotide
acaauuaccagugagacag

SEQ ID NO: 3168893 - RNA, 19 nt, Artificial Sequence
  Description of Artificial Sequence: Synthetic oligonucleotide
aauaccaacaccaucucac

SEQ ID NO: 3168894 - RNA, 19 nt, Artificial Sequence
  Description of Artificial Sequence: Synthetic oligonucleotide
uguuccuguauuaagaaug

SEQ ID NO: 3168895 - RNA, 19 nt, Artificial Sequence
  Description of Artificial Sequence: Synthetic oligonucleotide
auuauaaagcuuaauuugc

SEQ ID NO: 3168896 - RNA, 19 nt, Artificial Sequence
  Description of Artificial Sequence: Synthetic oligonucleotide
uuaucguuaaaccuuaggu

SEQ ID NO: 3168897 - RNA, 19 nt, Artificial Sequence
  Description of Artificial Sequence: Synthetic oligonucleotide
aguuacucuaacuacuuac

SEQ ID NO: 3168898 - RNA, 19 nt, Artificial Sequence
  Description of Artificial Sequence: Synthetic oligonucleotide
ucaaaguucuguuugagga

SEQ ID NO: 3168899 - RNA, 19 nt, Artificial Sequence
  Description of Artificial Sequence: Synthetic oligonucleotide
  modified_base (16)..(16): a, c, u, g, unknown or other
ugauuagacaauaaanaau

SEQ ID NO: 3168900 - RNA, 19 nt, Artificial Sequence
  Description of Artificial Sequence: Synthetic oligonucleotide
uuugcugcaagcaucagga

SEQ ID NO: 3168901 - RNA, 19 nt, Artificial Sequence
  Description of Artificial Sequence: Synthetic oligonucleotide
  modified_base (7)..(7): a, c, u, g, unknown or other
aauaaanaauuacauucua

SEQ ID NO: 3168902 - RNA, 19 nt, Artificial Sequence
  Description of Artificial Sequence: Synthetic oligonucleotide
uaugaugaaagcuuuuaug

SEQ ID NO: 3168903 - RNA, 19 nt, Artificial Sequence
  Description of Artificial Sequence: Synthetic oligonucleotide
agcauagaggaguacaugg

SEQ ID NO: 3168904 - RNA, 19 nt, Artificial Sequence
  Description of Artificial Sequence: Synthetic oligonucleotide
auauaauucaucucauuug

SEQ ID NO: 3168905 - RNA, 19 nt, Artificial Sequence
  Description of Artificial Sequence: Synthetic oligonucleotide
augaugaaagcuuuuauga

SEQ ID NO: 3168906 - RNA, 19 nt, Artificial Sequence
  Description of Artificial Sequence: Synthetic oligonucleotide
uguauacuugauuagacaa

SEQ ID NO: 3168907 - RNA, 19 nt, Artificial Sequence
  Description of Artificial Sequence: Synthetic oligonucleotide
agagacuauagacaauuac

SEQ ID NO: 3168908 - RNA, 19 nt, Artificial Sequence
  Description of Artificial Sequence: Synthetic oligonucleotide
uaucguuaaaccuuaggug

SEQ ID NO: 3168909 - RNA, 19 nt, Artificial Sequence
  Description of Artificial Sequence: Synthetic oligonucleotide
uagaaugaagaacaaagaa

SEQ ID NO: 3168910 - RNA, 19 nt, Artificial Sequence
  Description of Artificial Sequence: Synthetic oligonucleotide
ucauuauaaagcuuaauuu

SEQ ID NO: 3168911 - RNA, 19 nt, Artificial Sequence
  Description of Artificial Sequence: Synthetic oligonucleotide
uccgugaugcuucugaugc

SEQ ID NO: 3168912 - RNA, 19 nt, Artificial Sequence
  Description of Artificial Sequence: Synthetic oligonucleotide
aucguuaaaccuuagguga

SEQ ID NO: 3168913 - RNA, 19 nt, Artificial Sequence
  Description of Artificial Sequence: Synthetic oligonucleotide
  modified_base (17)..(17): a, c, u, g, unknown or other
uugauuagacaauaaanaa

SEQ ID NO: 3168914 - RNA, 19 nt, Artificial Sequence
  Description of Artificial Sequence: Synthetic oligonucleotide
gagacuauagacaauuacc

SEQ ID NO: 3168915 - RNA, 19 nt, Artificial Sequence
  Description of Artificial Sequence: Synthetic oligonucleotide
uaguuaacaggccucaggc

SEQ ID NO: 3168916 - RNA, 19 nt, Artificial Sequence
  Description of Artificial Sequence: Synthetic oligonucleotide
uuuguauacuugauuagac

SEQ ID NO: 3168917 - RNA, 19 nt, Artificial Sequence
  Description of Artificial Sequence: Synthetic oligonucleotide
auugcaauccuuucccugg

SEQ ID NO: 3168918 - RNA, 19 nt, Artificial Sequence
  Description of Artificial Sequence: Synthetic oligonucleotide
ugaaggaaggguaagucac

SEQ ID NO: 3168919 - RNA, 19 nt, Artificial Sequence
  Description of Artificial Sequence: Synthetic oligonucleotide
auagacaauuaccagugag

SEQ ID NO: 3168920 - RNA, 19 nt, Artificial Sequence
  Description of Artificial Sequence: Synthetic oligonucleotide
aauuaccagugagacaggc

SEQ ID NO: 3168921 - RNA, 19 nt, Artificial Sequence
  Description of Artificial Sequence: Synthetic oligonucleotide
acuuaccugagguagaucu

SEQ ID NO: 3168922 - RNA, 19 nt, Artificial Sequence
  Description of Artificial Sequence: Synthetic oligonucleotide
uauaaagcuuaauuugcug

SEQ ID NO: 3168923 - RNA, 19 nt, Artificial Sequence
  Description of Artificial Sequence: Synthetic oligonucleotide
uagccaacgaaugugaaag

SEQ ID NO: 3168924 - RNA, 19 nt, Artificial Sequence
  Description of Artificial Sequence: Synthetic oligonucleotide
cuuuacauccucaaaguuc

SEQ ID NO: 3168925 - RNA, 19 nt, Artificial Sequence
  Description of Artificial Sequence: Synthetic oligonucleotide
agacaauuaccagugagac

SEQ ID NO: 3168926 - RNA, 19 nt, Artificial Sequence
  Description of Artificial Sequence: Synthetic oligonucleotide
ugauuucuugucaagacau

SEQ ID NO: 3168927 - RNA, 19 nt, Artificial Sequence
  Description of Artificial Sequence: Synthetic oligonucleotide
ugcaugagagcugagauca

SEQ ID NO: 3168928 - RNA, 19 nt, Artificial Sequence
  Description of Artificial Sequence: Synthetic oligonucleotide
aaaauuagaagugaccaua

SEQ ID NO: 3168929 - RNA, 19 nt, Artificial Sequence
  Description of Artificial Sequence: Synthetic oligonucleotide
uaagucaccaaccuacuaa

SEQ ID NO: 3168930 - RNA, 19 nt, Artificial Sequence
  Description of Artificial Sequence: Synthetic oligonucleotide
auaguuaacaggccucagg

SEQ ID NO: 3168931 - RNA, 19 nt, Artificial Sequence
  Description of Artificial Sequence: Synthetic oligonucleotide
ucuaacuacuuaccugagg

SEQ ID NO: 3168932 - RNA, 19 nt, Artificial Sequence
  Description of Artificial Sequence: Synthetic oligonucleotide
uagacaauuaccagugaga

SEQ ID NO: 3168933 - RNA, 19 nt, Artificial Sequence
  Description of Artificial Sequence: Synthetic oligonucleotide
ucauuccaaaccaagaaua

SEQ ID NO: 3168934 - RNA, 19 nt, Artificial Sequence
  Description of Artificial Sequence: Synthetic oligonucleotide
aauuagaagugaccauaag

SEQ ID NO: 3168935 - RNA, 19 nt, Artificial Sequence
  Description of Artificial Sequence: Synthetic oligonucleotide
aacacuuagaauucuucau

SEQ ID NO: 3168936 - RNA, 19 nt, Artificial Sequence
  Description of Artificial Sequence: Synthetic oligonucleotide
  modified_base (6)..(6): a, c, u, g, unknown or other
auaaanaauuacauucuag

SEQ ID NO: 3168937 - RNA, 19 nt, Artificial Sequence
  Description of Artificial Sequence: Synthetic oligonucleotide
uagaacugaaauaaaugaa

SEQ ID NO: 3168938 - RNA, 19 nt, Artificial Sequence
  Description of Artificial Sequence: Synthetic oligonucleotide
uaacacuuagaauucuuca

SEQ ID NO: 3168939 - RNA, 19 nt, Artificial Sequence
  Description of Artificial Sequence: Synthetic oligonucleotide
ucaggauaauagaaugaag

SEQ ID NO: 3168940 - RNA, 19 nt, Artificial Sequence
  Description of Artificial Sequence: Synthetic oligonucleotide
caggauaauagaaugaaga

SEQ ID NO: 3168941 - RNA, 19 nt, Artificial Sequence
  Description of Artificial Sequence: Synthetic oligonucleotide
uauaaugcaguuccucugu

SEQ ID NO: 3168942 - RNA, 19 nt, Artificial Sequence
  Description of Artificial Sequence: Synthetic oligonucleotide
uuagaauucuucauuccaa

SEQ ID NO: 3168943 - RNA, 19 nt, Artificial Sequence
  Description of Artificial Sequence: Synthetic oligonucleotide
uacugucugauguugaaga

SEQ ID NO: 3168944 - RNA, 19 nt, Artificial Sequence
  Description of Artificial Sequence: Synthetic oligonucleotide
ugagcuacaguuaaacuuu

SEQ ID NO: 3168945 - RNA, 19 nt, Artificial Sequence
  Description of Artificial Sequence: Synthetic oligonucleotide
auuugcugcaagcaucagg

SEQ ID NO: 3168946 - RNA, 19 nt, Artificial Sequence
  Description of Artificial Sequence: Synthetic oligonucleotide
aauaaggucugagcuacag

SEQ ID NO: 3168947 - RNA, 19 nt, Artificial Sequence
  Description of Artificial Sequence: Synthetic oligonucleotide
agucaggacccucaaaauc

SEQ ID NO: 3168948 - RNA, 19 nt, Artificial Sequence
  Description of Artificial Sequence: Synthetic oligonucleotide
ugcuucugaugcaugagag

SEQ ID NO: 3168949 - RNA, 19 nt, Artificial Sequence
  Description of Artificial Sequence: Synthetic oligonucleotide
aaauacuacaggaacuuga

SEQ ID NO: 3168950 - RNA, 19 nt, Artificial Sequence
  Description of Artificial Sequence: Synthetic oligonucleotide
gacuauagacaauuaccag

SEQ ID NO: 3168951 - RNA, 19 nt, Artificial Sequence
  Description of Artificial Sequence: Synthetic oligonucleotide
aguuaacaggccucaggcc

SEQ ID NO: 3168952 - RNA, 19 nt, Artificial Sequence
  Description of Artificial Sequence: Synthetic oligonucleotide
ucccaaauacuacaggaac

SEQ ID NO: 3168953 - RNA, 19 nt, Artificial Sequence
  Description of Artificial Sequence: Synthetic oligonucleotide
aagacauccgugaugcuuc

SEQ ID NO: 3168954 - RNA, 19 nt, Artificial Sequence
  Description of Artificial Sequence: Synthetic oligonucleotide
uacgcuauguaauaccaac

SEQ ID NO: 3168955 - RNA, 19 nt, Artificial Sequence
  Description of Artificial Sequence: Synthetic oligonucleotide
auaccaacaccaucucacc

SEQ ID NO: 3168956 - RNA, 19 nt, Artificial Sequence
  Description of Artificial Sequence: Synthetic oligonucleotide
auuacauucuagagagucc

SEQ ID NO: 3168957 - RNA, 19 nt, Artificial Sequence
  Description of Artificial Sequence: Synthetic oligonucleotide
ucagguuacgcuauguaau

SEQ ID NO: 3168958 - RNA, 19 nt, Artificial Sequence
  Description of Artificial Sequence: Synthetic oligonucleotide
uguauucuucaccaaugug

SEQ ID NO: 3168959 - RNA, 19 nt, Artificial Sequence
  Description of Artificial Sequence: Synthetic oligonucleotide
cuuaucguuaaaccuuagg

SEQ ID NO: 3168960 - RNA, 19 nt, Artificial Sequence
  Description of Artificial Sequence: Synthetic oligonucleotide
uaaguuagccaacgaaugu

SEQ ID NO: 3168961 - RNA, 19 nt, Artificial Sequence
  Description of Artificial Sequence: Synthetic oligonucleotide
aaccacuuauucuaacacu

SEQ ID NO: 3168962 - RNA, 19 nt, Artificial Sequence
  Description of Artificial Sequence: Synthetic oligonucleotide
aagaaugcuucauuguuuu

SEQ ID NO: 3168963 - RNA, 19 nt, Artificial Sequence
  Description of Artificial Sequence: Synthetic oligonucleotide
uuguauacuugauuagaca

SEQ ID NO: 3168964 - RNA, 19 nt, Artificial Sequence
  Description of Artificial Sequence: Synthetic oligonucleotide
uuaugacauacacuguacu

SEQ ID NO: 3168965 - RNA, 19 nt, Artificial Sequence
  Description of Artificial Sequence: Synthetic oligonucleotide
uuuuguguugauugcaauc

SEQ ID NO: 3168966 - RNA, 19 nt, Artificial Sequence
  Description of Artificial Sequence: Synthetic oligonucleotide
gauguauucuucaccaaug

SEQ ID NO: 3168967 - RNA, 19 nt, Artificial Sequence
  Description of Artificial Sequence: Synthetic oligonucleotide
ucucaccauaguuaacagg

SEQ ID NO: 3168968 - RNA, 19 nt, Artificial Sequence
  Description of Artificial Sequence: Synthetic oligonucleotide
uuacucuaacuacuuaccu

SEQ ID NO: 3168969 - RNA, 19 nt, Artificial Sequence
  Description of Artificial Sequence: Synthetic oligonucleotide
aggugaaugugccaaccac

SEQ ID NO: 3168970 - RNA, 19 nt, Artificial Sequence
  Description of Artificial Sequence: Synthetic oligonucleotide
uuaccugagguagaucugg

SEQ ID NO: 3168971 - RNA, 19 nt, Artificial Sequence
  Description of Artificial Sequence: Synthetic oligonucleotide
cuaggaagaaaucacucuc

SEQ ID NO: 3168972 - RNA, 19 nt, Artificial Sequence
  Description of Artificial Sequence: Synthetic oligonucleotide
uuagagacuauagacaauu

SEQ ID NO: 3168973 - RNA, 19 nt, Artificial Sequence
  Description of Artificial Sequence: Synthetic oligonucleotide
ugugccaaccacuuauucu

SEQ ID NO: 3168974 - RNA, 19 nt, Artificial Sequence
  Description of Artificial Sequence: Synthetic oligonucleotide
aaaucaguguccuguuccu

SEQ ID NO: 3168975 - RNA, 19 nt, Artificial Sequence
  Description of Artificial Sequence: Synthetic oligonucleotide
uuuaaacuuugucucuuuc

SEQ ID NO: 3168976 - RNA, 19 nt, Artificial Sequence
  Description of Artificial Sequence: Synthetic oligonucleotide
ucacacauagaccacugau

SEQ ID NO: 3168977 - RNA, 19 nt, Artificial Sequence
  Description of Artificial Sequence: Synthetic oligonucleotide
uuaaaccuuaggugaaugu

SEQ ID NO: 3168978 - RNA, 19 nt, Artificial Sequence
  Description of Artificial Sequence: Synthetic oligonucleotide
acuaauguuuuaaacuuug

SEQ ID NO: 3168979 - RNA, 19 nt, Artificial Sequence
  Description of Artificial Sequence: Synthetic oligonucleotide
uguugguuuucuuccaugu

SEQ ID NO: 3168980 - RNA, 19 nt, Artificial Sequence
  Description of Artificial Sequence: Synthetic oligonucleotide
cacuguacuuauaaugcag

SEQ ID NO: 3168981 - RNA, 19 nt, Artificial Sequence
  Description of Artificial Sequence: Synthetic oligonucleotide
uuagguuuacgugauuucu

SEQ ID NO: 3168982 - RNA, 19 nt, Artificial Sequence
  Description of Artificial Sequence: Synthetic oligonucleotide
ugaggaaugguccacuguu

SEQ ID NO: 3168983 - RNA, 19 nt, Artificial Sequence
  Description of Artificial Sequence: Synthetic oligonucleotide
acccuacuguaguagaaac

SEQ ID NO: 3168984 - RNA, 19 nt, Artificial Sequence
  Description of Artificial Sequence: Synthetic oligonucleotide
uugaacauguauaagaucc

SEQ ID NO: 3168985 - RNA, 19 nt, Artificial Sequence
  Description of Artificial Sequence: Synthetic oligonucleotide
aaguaagauaaacauacac

SEQ ID NO: 3168986 - RNA, 19 nt, Artificial Sequence
  Description of Artificial Sequence: Synthetic oligonucleotide
aaacauaagacauaaaaua

SEQ ID NO: 3168987 - RNA, 19 nt, Artificial Sequence
  Description of Artificial Sequence: Synthetic oligonucleotide
uugacuaaaacacuaaaca

SEQ ID NO: 3168988 - RNA, 19 nt, Artificial Sequence
  Description of Artificial Sequence: Synthetic oligonucleotide
aaaguuuugagauacugcu

SEQ ID NO: 3168989 - RNA, 19 nt, Artificial Sequence
  Description of Artificial Sequence: Synthetic oligonucleotide
uuugaauauguuuugagug

SEQ ID NO: 3168990 - RNA, 19 nt, Artificial Sequence
  Description of Artificial Sequence: Synthetic oligonucleotide
aaaucauuugcagaagugc

SEQ ID NO: 3168991 - RNA, 19 nt, Artificial Sequence
  Description of Artificial Sequence: Synthetic oligonucleotide
agugacaagugcuauaccc

SEQ ID NO: 3168992 - RNA, 19 nt, Artificial Sequence
  Description of Artificial Sequence: Synthetic oligonucleotide
aacauaagacauaaaauac

SEQ ID NO: 3168993 - RNA, 19 nt, Artificial Sequence
  Description of Artificial Sequence: Synthetic oligonucleotide
aucuuuagaauccaaaauc

SEQ ID NO: 3168994 - RNA, 19 nt, Artificial Sequence
  Description of Artificial Sequence: Synthetic oligonucleotide
aaacauacacauuugaaaa

SEQ ID NO: 3168995 - RNA, 19 nt, Artificial Sequence
  Description of Artificial Sequence: Synthetic oligonucleotide
ugauugaaauaauauagag

SEQ ID NO: 3168996 - RNA, 19 nt, Artificial Sequence
  Description of Artificial Sequence: Synthetic oligonucleotide
guuauuauuaucuuuagaa

SEQ ID NO: 3168997 - RNA, 19 nt, Artificial Sequence
  Description of Artificial Sequence: Synthetic oligonucleotide
cuugaaaagagauagcaug

SEQ ID NO: 3168998 - RNA, 19 nt, Artificial Sequence
  Description of Artificial Sequence: Synthetic oligonucleotide
uauucagugaaauaguuaa

SEQ ID NO: 3168999 - RNA, 19 nt, Artificial Sequence
  Description of Artificial Sequence: Synthetic oligonucleotide
ucuuuagaauccaaaauca

SEQ ID NO: 3169000 - RNA, 19 nt, Artificial Sequence
  Description of Artificial Sequence: Synthetic oligonucleotide
ucagcuacuaauaauacau

SEQ ID NO: 3169001 - RNA, 19 nt, Artificial Sequence
  Description of Artificial Sequence: Synthetic oligonucleotide
gauuacagcaccuugugug

SEQ ID NO: 3169002 - RNA, 19 nt, Artificial Sequence
  Description of Artificial Sequence: Synthetic oligonucleotide
gaugcuuugacaucaaaac

SEQ ID NO: 3169003 - RNA, 19 nt, Artificial Sequence
  Description of Artificial Sequence: Synthetic oligonucleotide
uaaaacaugggucaccaga

SEQ ID NO: 3169004 - RNA, 19 nt, Artificial Sequence
  Description of Artificial Sequence: Synthetic oligonucleotide
aaguuuguuguauggagag

SEQ ID NO: 3169005 - RNA, 19 nt, Artificial Sequence
  Description of Artificial Sequence: Synthetic oligonucleotide
ugauacuuuggacugcugg

SEQ ID NO: 3169006 - RNA, 19 nt, Artificial Sequence
  Description of Artificial Sequence: Synthetic oligonucleotide
uuaguauucaagauacucu

SEQ ID NO: 3169007 - RNA, 19 nt, Artificial Sequence
  Description of Artificial Sequence: Synthetic oligonucleotide
auacauaugaaggucauuc

SEQ ID NO: 3169008 - RNA, 19 nt, Artificial Sequence
  Description of Artificial Sequence: Synthetic oligonucleotide
ugagcuauaguccccagcc

SEQ ID NO: 3169009 - RNA, 19 nt, Artificial Sequence
  Description of Artificial Sequence: Synthetic oligonucleotide
uaaaguuuugagauacugc

SEQ ID NO: 3169010 - RNA, 19 nt, Artificial Sequence
  Description of Artificial Sequence: Synthetic oligonucleotide
ugagcuauuccucagcuac

SEQ ID NO: 3169011 - RNA, 19 nt, Artificial Sequence
  Description of Artificial Sequence: Synthetic oligonucleotide
gauuugaauauguuuugag

SEQ ID NO: 3169012 - RNA, 19 nt, Artificial Sequence
  Description of Artificial Sequence: Synthetic oligonucleotide
auuacaaauauuuuacaaa

SEQ ID NO: 3169013 - RNA, 19 nt, Artificial Sequence
  Description of Artificial Sequence: Synthetic oligonucleotide
ugauguucuagaauguccc

SEQ ID NO: 3169014 - RNA, 19 nt, Artificial Sequence
  Description of Artificial Sequence: Synthetic oligonucleotide
cucaggauuaccauggagc

SEQ ID NO: 3169015 - RNA, 19 nt, Artificial Sequence
  Description of Artificial Sequence: Synthetic oligonucleotide
aaaacaugggucaccagac

SEQ ID NO: 3169016 - RNA, 19 nt, Artificial Sequence
  Description of Artificial Sequence: Synthetic oligonucleotide
aaauaccaagaccuaaucu

SEQ ID NO: 3169017 - RNA, 19 nt, Artificial Sequence
  Description of Artificial Sequence: Synthetic oligonucleotide
ucuuguguaaagacagagg

SEQ ID NO: 3169018 - RNA, 19 nt, Artificial Sequence
  Description of Artificial Sequence: Synthetic oligonucleotide
uugucaaaaucaaucaacu

SEQ ID NO: 3169019 - RNA, 19 nt, Artificial Sequence
  Description of Artificial Sequence: Synthetic oligonucleotide
uauugaacauguauaagau

SEQ ID NO: 3169020 - RNA, 19 nt, Artificial Sequence
  Description of Artificial Sequence: Synthetic oligonucleotide
uaacguuugaucacaaccu

SEQ ID NO: 3169021 - RNA, 19 nt, Artificial Sequence
  Description of Artificial Sequence: Synthetic oligonucleotide
uugaaaagagauagcaugu

SEQ ID NO: 3169022 - RNA, 19 nt, Artificial Sequence
  Description of Artificial Sequence: Synthetic oligonucleotide
uugauguucuagaaugucc

SEQ ID NO: 3169023 - RNA, 19 nt, Artificial Sequence
  Description of Artificial Sequence: Synthetic oligonucleotide
auuugaauauguuuugagu

SEQ ID NO: 3169024 - RNA, 19 nt, Artificial Sequence
  Description of Artificial Sequence: Synthetic oligonucleotide
uauaaguaagauaaacaua

SEQ ID NO: 3169025 - RNA, 19 nt, Artificial Sequence
  Description of Artificial Sequence: Synthetic oligonucleotide
cuugacuaaaacacuaaac

SEQ ID NO: 3169026 - RNA, 19 nt, Artificial Sequence
  Description of Artificial Sequence: Synthetic oligonucleotide
uaaguggugaacuucugug

SEQ ID NO: 3169027 - RNA, 19 nt, Artificial Sequence
  Description of Artificial Sequence: Synthetic oligonucleotide
uauuuaacauggaaaucug

SEQ ID NO: 3169028 - RNA, 19 nt, Artificial Sequence
  Description of Artificial Sequence: Synthetic oligonucleotide
uccuuuuaguaacaaagga

SEQ ID NO: 3169029 - RNA, 19 nt, Artificial Sequence
  Description of Artificial Sequence: Synthetic oligonucleotide
gauacuuuggacugcuggc

SEQ ID NO: 3169030 - RNA, 19 nt, Artificial Sequence
  Description of Artificial Sequence: Synthetic oligonucleotide
uguacugaauccugaaccc

SEQ ID NO: 3169031 - RNA, 19 nt, Artificial Sequence
  Description of Artificial Sequence: Synthetic oligonucleotide
auugaacauguauaagauc

SEQ ID NO: 3169032 - RNA, 19 nt, Artificial Sequence
  Description of Artificial Sequence: Synthetic oligonucleotide
ugugaucuagguaaacaug

SEQ ID NO: 3169033 - RNA, 19 nt, Artificial Sequence
  Description of Artificial Sequence: Synthetic oligonucleotide
aucugcuauuccaagaugc

SEQ ID NO: 3169034 - RNA, 19 nt, Artificial Sequence
  Description of Artificial Sequence: Synthetic oligonucleotide
uuuauguacugaauccuga

SEQ ID NO: 3169035 - RNA, 19 nt, Artificial Sequence
  Description of Artificial Sequence: Synthetic oligonucleotide
aacucauagcuccuccuuc

SEQ ID NO: 3169036 - RNA, 19 nt, Artificial Sequence
  Description of Artificial Sequence: Synthetic oligonucleotide
aguaagauaaacauacaca

SEQ ID NO: 3169037 - RNA, 19 nt, Artificial Sequence
  Description of Artificial Sequence: Synthetic oligonucleotide
aacucugccagguuuagau

SEQ ID NO: 3169038 - RNA, 19 nt, Artificial Sequence
  Description of Artificial Sequence: Synthetic oligonucleotide
agauagcauguccucaccc

SEQ ID NO: 3169039 - RNA, 19 nt, Artificial Sequence
  Description of Artificial Sequence: Synthetic oligonucleotide
ugcagaagugccaauaaaa

SEQ ID NO: 3169040 - RNA, 19 nt, Artificial Sequence
  Description of Artificial Sequence: Synthetic oligonucleotide
ugcuauuccaagaugcacu

SEQ ID NO: 3169041 - RNA, 19 nt, Artificial Sequence
  Description of Artificial Sequence: Synthetic oligonucleotide
ugaacuucacuuguaaaca

SEQ ID NO: 3169042 - RNA, 19 nt, Artificial Sequence
  Description of Artificial Sequence: Synthetic oligonucleotide
ucucauuuugggcucagga

SEQ ID NO: 3169043 - RNA, 19 nt, Artificial Sequence
  Description of Artificial Sequence: Synthetic oligonucleotide
aagaugcacuuugagaguc

SEQ ID NO: 3169044 - RNA, 19 nt, Artificial Sequence
  Description of Artificial Sequence: Synthetic oligonucleotide
uagccuagaaauuauacuu

SEQ ID NO: 3169045 - RNA, 19 nt, Artificial Sequence
  Description of Artificial Sequence: Synthetic oligonucleotide
auagccuagaaauuauacu

SEQ ID NO: 3169046 - RNA, 19 nt, Artificial Sequence
  Description of Artificial Sequence: Synthetic oligonucleotide
aaaaucauuugcagaagug

SEQ ID NO: 3169047 - RNA, 19 nt, Artificial Sequence
  Description of Artificial Sequence: Synthetic oligonucleotide
aacauacacauuugaaaau

SEQ ID NO: 3169048 - RNA, 19 nt, Artificial Sequence
  Description of Artificial Sequence: Synthetic oligonucleotide
aacguuugaucacaaccug

SEQ ID NO: 3169049 - RNA, 19 nt, Artificial Sequence
  Description of Artificial Sequence: Synthetic oligonucleotide
aauauuggugaaauaauua

SEQ ID NO: 3169050 - RNA, 19 nt, Artificial Sequence
  Description of Artificial Sequence: Synthetic oligonucleotide
ugguacuuccuccaggccc

SEQ ID NO: 3169051 - RNA, 19 nt, Artificial Sequence
  Description of Artificial Sequence: Synthetic oligonucleotide
cuuaguauucaagauacuc

SEQ ID NO: 3169052 - RNA, 19 nt, Artificial Sequence
  Description of Artificial Sequence: Synthetic oligonucleotide
uaaaccuccaaaugauuga

SEQ ID NO: 3169053 - RNA, 19 nt, Artificial Sequence
  Description of Artificial Sequence: Synthetic oligonucleotide
ugaccuagaacaucuaauc

SEQ ID NO: 3169054 - RNA, 19 nt, Artificial Sequence
  Description of Artificial Sequence: Synthetic oligonucleotide
cacauuugaaaauacagaa

SEQ ID NO: 3169055 - RNA, 19 nt, Artificial Sequence
  Description of Artificial Sequence: Synthetic oligonucleotide
uuuucuguccuccuccaga

SEQ ID NO: 3169056 - RNA, 19 nt, Artificial Sequence
  Description of Artificial Sequence: Synthetic oligonucleotide
aaugaccuagaacaucuaa

SEQ ID NO: 3169057 - RNA, 19 nt, Artificial Sequence
  Description of Artificial Sequence: Synthetic oligonucleotide
guaaacaugcuaccaacug

SEQ ID NO: 3169058 - RNA, 19 nt, Artificial Sequence
  Description of Artificial Sequence: Synthetic oligonucleotide
cuuuuaguaacaaaggagu

SEQ ID NO: 3169059 - RNA, 19 nt, Artificial Sequence
  Description of Artificial Sequence: Synthetic oligonucleotide
aacuuuauuuuguuauaaa

SEQ ID NO: 3169060 - RNA, 19 nt, Artificial Sequence
  Description of Artificial Sequence: Synthetic oligonucleotide
acagaacacauuguaaauc

SEQ ID NO: 3169061 - RNA, 19 nt, Artificial Sequence
  Description of Artificial Sequence: Synthetic oligonucleotide
guuaaaacauaagacauaa

SEQ ID NO: 3169062 - RNA, 19 nt, Artificial Sequence
  Description of Artificial Sequence: Synthetic oligonucleotide
uggauuugaauauguuuug

SEQ ID NO: 3169063 - RNA, 19 nt, Artificial Sequence
  Description of Artificial Sequence: Synthetic oligonucleotide
aguggagacuaguugaaga

SEQ ID NO: 3169064 - RNA, 19 nt, Artificial Sequence
  Description of Artificial Sequence: Synthetic oligonucleotide
guccauagcucacacacag

SEQ ID NO: 3169065 - RNA, 19 nt, Artificial Sequence
  Description of Artificial Sequence: Synthetic oligonucleotide
ucccuguugauguacuucc

SEQ ID NO: 3169066 - RNA, 19 nt, Artificial Sequence
  Description of Artificial Sequence: Synthetic oligonucleotide
ccuuuuaguaacaaaggag

SEQ ID NO: 3169067 - RNA, 19 nt, Artificial Sequence
  Description of Artificial Sequence: Synthetic oligonucleotide
uuuuaguaacaaaggaguu

SEQ ID NO: 3169068 - RNA, 19 nt, Artificial Sequence
  Description of Artificial Sequence: Synthetic oligonucleotide
acaugcuaccaacugagcu

SEQ ID NO: 3169069 - RNA, 19 nt, Artificial Sequence
  Description of Artificial Sequence: Synthetic oligonucleotide
ugugugaucuagguaaaca

SEQ ID NO: 3169070 - RNA, 19 nt, Artificial Sequence
  Description of Artificial Sequence: Synthetic oligonucleotide
gaaacuggaugaccgggag

SEQ ID NO: 3169071 - RNA, 19 nt, Artificial Sequence
  Description of Artificial Sequence: Synthetic oligonucleotide
gaccuaaucuuguguaaag

SEQ ID NO: 3169072 - RNA, 19 nt, Artificial Sequence
  Description of Artificial Sequence: Synthetic oligonucleotide
agaugcucaugucaauguc

SEQ ID NO: 3169073 - RNA, 19 nt, Artificial Sequence
  Description of Artificial Sequence: Synthetic oligonucleotide
ugacaagugcuauacccug

SEQ ID NO: 3169074 - RNA, 19 nt, Artificial Sequence
  Description of Artificial Sequence: Synthetic oligonucleotide
aacccgcuuuagcugagac

SEQ ID NO: 3169075 - RNA, 19 nt, Artificial Sequence
  Description of Artificial Sequence: Synthetic oligonucleotide
uccaaguauuagaacagaa

SEQ ID NO: 3169076 - RNA, 19 nt, Artificial Sequence
  Description of Artificial Sequence: Synthetic oligonucleotide
ggagcuaagaaugaccuag

SEQ ID NO: 3169077 - RNA, 19 nt, Artificial Sequence
  Description of Artificial Sequence: Synthetic oligonucleotide
agaccacccauauuaccac

SEQ ID NO: 3169078 - RNA, 19 nt, Artificial Sequence
  Description of Artificial Sequence: Synthetic oligonucleotide
uguauaagauccacuuuua

SEQ ID NO: 3169079 - RNA, 19 nt, Artificial Sequence
  Description of Artificial Sequence: Synthetic oligonucleotide
uccucacccaucuagguaa

SEQ ID NO: 3169080 - RNA, 19 nt, Artificial Sequence
  Description of Artificial Sequence: Synthetic oligonucleotide
uuguaaacagguuggucgu

SEQ ID NO: 3169081 - RNA, 19 nt, Artificial Sequence
  Description of Artificial Sequence: Synthetic oligonucleotide
uuugaaauaccaagaccua

SEQ ID NO: 3169082 - RNA, 19 nt, Artificial Sequence
  Description of Artificial Sequence: Synthetic oligonucleotide
aauuguccugucuuguauu

SEQ ID NO: 3169083 - RNA, 19 nt, Artificial Sequence
  Description of Artificial Sequence: Synthetic oligonucleotide
ugucuuuccuuacauugaa

SEQ ID NO: 3169084 - RNA, 19 nt, Artificial Sequence
  Description of Artificial Sequence: Synthetic oligonucleotide
aauauggacauguacaugc

SEQ ID NO: 3169085 - RNA, 19 nt, Artificial Sequence
  Description of Artificial Sequence: Synthetic oligonucleotide
aguaacauaacugagaaac

SEQ ID NO: 3169086 - RNA, 19 nt, Artificial Sequence
  Description of Artificial Sequence: Synthetic oligonucleotide
aaaguagacacgcagcucc

SEQ ID NO: 3169087 - RNA, 19 nt, Artificial Sequence
  Description of Artificial Sequence: Synthetic oligonucleotide
auaacugagaaacuguggc

SEQ ID NO: 3169088 - RNA, 19 nt, Artificial Sequence
  Description of Artificial Sequence: Synthetic oligonucleotide
auuuguuugaguuacuuuc

SEQ ID NO: 3169089 - RNA, 19 nt, Artificial Sequence
  Description of Artificial Sequence: Synthetic oligonucleotide
ugaaacauaaccccagugg

SEQ ID NO: 3169090 - RNA, 19 nt, Artificial Sequence
  Description of Artificial Sequence: Synthetic oligonucleotide
uuuucauccaggcuaaggg

SEQ ID NO: 3169091 - RNA, 19 nt, Artificial Sequence
  Description of Artificial Sequence: Synthetic oligonucleotide
uuuccugggaagaauaugg

SEQ ID NO: 3169092 - RNA, 19 nt, Artificial Sequence
  Description of Artificial Sequence: Synthetic oligonucleotide
uaaaaugcuuugcaaaagg

SEQ ID NO: 3169093 - RNA, 19 nt, Artificial Sequence
  Description of Artificial Sequence: Synthetic oligonucleotide
uauucuaaguaacauaacu

SEQ ID NO: 3169094 - RNA, 19 nt, Artificial Sequence
  Description of Artificial Sequence: Synthetic oligonucleotide
ucuuuugucauguuucugg

SEQ ID NO: 3169095 - RNA, 19 nt, Artificial Sequence
  Description of Artificial Sequence: Synthetic oligonucleotide
guuugaguuacuuucaugc

SEQ ID NO: 3169096 - RNA, 19 nt, Artificial Sequence
  Description of Artificial Sequence: Synthetic oligonucleotide
ucgugauugaaacauaacc

SEQ ID NO: 3169097 - RNA, 19 nt, Artificial Sequence
  Description of Artificial Sequence: Synthetic oligonucleotide
cacaagugcaauaaaaugc

SEQ ID NO: 3169098 - RNA, 19 nt, Artificial Sequence
  Description of Artificial Sequence: Synthetic oligonucleotide
auaaagucugcucagcuuc

SEQ ID NO: 3169099 - RNA, 19 nt, Artificial Sequence
  Description of Artificial Sequence: Synthetic oligonucleotide
uuugucauguuucuggagc

SEQ ID NO: 3169100 - RNA, 19 nt, Artificial Sequence
  Description of Artificial Sequence: Synthetic oligonucleotide
aagagcgaggcccauuucc

SEQ ID NO: 3169101 - RNA, 19 nt, Artificial Sequence
  Description of Artificial Sequence: Synthetic oligonucleotide
gaugcugucauuucugcgg

SEQ ID NO: 3169102 - RNA, 19 nt, Artificial Sequence
  Description of Artificial Sequence: Synthetic oligonucleotide
ugcagaguccagaagagcg

SEQ ID NO: 3169103 - RNA, 19 nt, Artificial Sequence
  Description of Artificial Sequence: Synthetic oligonucleotide
uuacuuucaugccugaaag

SEQ ID NO: 3169104 - RNA, 19 nt, Artificial Sequence
  Description of Artificial Sequence: Synthetic oligonucleotide
ugugaaguuagccugucag

SEQ ID NO: 3169105 - RNA, 19 nt, Artificial Sequence
  Description of Artificial Sequence: Synthetic oligonucleotide
ugggauguaauaaagucug

SEQ ID NO: 3169106 - RNA, 19 nt, Artificial Sequence
  Description of Artificial Sequence: Synthetic oligonucleotide
uaaguaacauaacugagaa

SEQ ID NO: 3169107 - RNA, 19 nt, Artificial Sequence
  Description of Artificial Sequence: Synthetic oligonucleotide
uuugaaaagguccuauucu

SEQ ID NO: 3169108 - RNA, 19 nt, Artificial Sequence
  Description of Artificial Sequence: Synthetic oligonucleotide
aaaaugcuuugcaaaaggc

SEQ ID NO: 3169109 - RNA, 19 nt, Artificial Sequence
  Description of Artificial Sequence: Synthetic oligonucleotide
ucuaaguaacauaacugag

SEQ ID NO: 3169110 - RNA, 19 nt, Artificial Sequence
  Description of Artificial Sequence: Synthetic oligonucleotide
aagaauauggacauguaca

SEQ ID NO: 3169111 - RNA, 19 nt, Artificial Sequence
  Description of Artificial Sequence: Synthetic oligonucleotide
gaaacauaaccccaguggc

SEQ ID NO: 3169112 - RNA, 19 nt, Artificial Sequence
  Description of Artificial Sequence: Synthetic oligonucleotide
ugcaaaaggcugcagaacc

SEQ ID NO: 3169113 - RNA, 19 nt, Artificial Sequence
  Description of Artificial Sequence: Synthetic oligonucleotide
uguaauaaagucugcucag

SEQ ID NO: 3169114 - RNA, 19 nt, Artificial Sequence
  Description of Artificial Sequence: Synthetic oligonucleotide
ugcaauaaaaugcuuugca

SEQ ID NO: 3169115 - RNA, 19 nt, Artificial Sequence
  Description of Artificial Sequence: Synthetic oligonucleotide
aaugcuuugcaaaaggcug

SEQ ID NO: 3169116 - RNA, 19 nt, Artificial Sequence
  Description of Artificial Sequence: Synthetic oligonucleotide
uguuugugaaguuagccug

SEQ ID NO: 3169117 - RNA, 19 nt, Artificial Sequence
  Description of Artificial Sequence: Synthetic oligonucleotide
uggagcucaucauagaugc

SEQ ID NO: 3169118 - RNA, 19 nt, Artificial Sequence
  Description of Artificial Sequence: Synthetic oligonucleotide
acauguacaugcuucacag

SEQ ID NO: 3169119 - RNA, 19 nt, Artificial Sequence
  Description of Artificial Sequence: Synthetic oligonucleotide
uuuccaaugcugcagaguc

SEQ ID NO: 3169120 - RNA, 19 nt, Artificial Sequence
  Description of Artificial Sequence: Synthetic oligonucleotide
gugauugaaacauaacccc

SEQ ID NO: 3169121 - RNA, 19 nt, Artificial Sequence
  Description of Artificial Sequence: Synthetic oligonucleotide
agugcaauaaaaugcuuug

SEQ ID NO: 3169122 - RNA, 19 nt, Artificial Sequence
  Description of Artificial Sequence: Synthetic oligonucleotide
auguaauaaagucugcuca

SEQ ID NO: 3169123 - RNA, 19 nt, Artificial Sequence
  Description of Artificial Sequence: Synthetic oligonucleotide
aaaagguccuauucuaagu

SEQ ID NO: 3169124 - RNA, 19 nt, Artificial Sequence
  Description of Artificial Sequence: Synthetic oligonucleotide
ugaaaguagacacgcagcu

SEQ ID NO: 3169125 - RNA, 19 nt, Artificial Sequence
  Description of Artificial Sequence: Synthetic oligonucleotide
caugccugaaaguagacac

SEQ ID NO: 3169126 - RNA, 19 nt, Artificial Sequence
  Description of Artificial Sequence: Synthetic oligonucleotide
gaaaagguccuauucuaag

SEQ ID NO: 3169127 - RNA, 19 nt, Artificial Sequence
  Description of Artificial Sequence: Synthetic oligonucleotide
acuguuugugaaguuagcc

SEQ ID NO: 3169128 - RNA, 19 nt, Artificial Sequence
  Description of Artificial Sequence: Synthetic oligonucleotide
ugaguuacuuucaugccug

SEQ ID NO: 3169129 - RNA, 19 nt, Artificial Sequence
  Description of Artificial Sequence: Synthetic oligonucleotide
agcuucugcagccaucucc

SEQ ID NO: 3169130 - RNA, 19 nt, Artificial Sequence
  Description of Artificial Sequence: Synthetic oligonucleotide
gaagaauauggacauguac

SEQ ID NO: 3169131 - RNA, 19 nt, Artificial Sequence
  Description of Artificial Sequence: Synthetic oligonucleotide
aacugagaaacuguggcag

SEQ ID NO: 3169132 - RNA, 19 nt, Artificial Sequence
  Description of Artificial Sequence: Synthetic oligonucleotide
cuuauuuucauccaggcua

SEQ ID NO: 3169133 - RNA, 19 nt, Artificial Sequence
  Description of Artificial Sequence: Synthetic oligonucleotide
uuucuggagcucaucauag

SEQ ID NO: 3169134 - RNA, 19 nt, Artificial Sequence
  Description of Artificial Sequence: Synthetic oligonucleotide
gauguaauaaagucugcuc

SEQ ID NO: 3169135 - RNA, 19 nt, Artificial Sequence
  Description of Artificial Sequence: Synthetic oligonucleotide
uccucagaucuccaaaggg

SEQ ID NO: 3169136 - RNA, 19 nt, Artificial Sequence
  Description of Artificial Sequence: Synthetic oligonucleotide
ugauugaaacauaacccca

SEQ ID NO: 3169137 - RNA, 19 nt, Artificial Sequence
  Description of Artificial Sequence: Synthetic oligonucleotide
uuuguuugaguuacuuuca

SEQ ID NO: 3169138 - RNA, 19 nt, Artificial Sequence
  Description of Artificial Sequence: Synthetic oligonucleotide
aaaggcugcagaaccaugg

SEQ ID NO: 3169139 - RNA, 19 nt, Artificial Sequence
  Description of Artificial Sequence: Synthetic oligonucleotide
uugaguuacuuucaugccu

SEQ ID NO: 3169140 - RNA, 19 nt, Artificial Sequence
  Description of Artificial Sequence: Synthetic oligonucleotide
uuucaugccugaaaguaga

SEQ ID NO: 3169141 - RNA, 19 nt, Artificial Sequence
  Description of Artificial Sequence: Synthetic oligonucleotide
ugcugcagaguccagaaga

SEQ ID NO: 3169142 - RNA, 19 nt, Artificial Sequence
  Description of Artificial Sequence: Synthetic oligonucleotide
uaauaaagucugcucagcu

SEQ ID NO: 3169143 - RNA, 19 nt, Artificial Sequence
  Description of Artificial Sequence: Synthetic oligonucleotide
cauaacugagaaacugugg

SEQ ID NO: 3169144 - RNA, 19 nt, Artificial Sequence
  Description of Artificial Sequence: Synthetic oligonucleotide
auugcuacuguuugugaag

SEQ ID NO: 3169145 - RNA, 19 nt, Artificial Sequence
  Description of Artificial Sequence: Synthetic oligonucleotide
uuugcaaaaggcugcagaa

SEQ ID NO: 3169146 - RNA, 19 nt, Artificial Sequence
  Description of Artificial Sequence: Synthetic oligonucleotide
cucagcuucauuuccaaug

SEQ ID NO: 3169147 - RNA, 19 nt, Artificial Sequence
  Description of Artificial Sequence: Synthetic oligonucleotide
uuugaguuacuuucaugcc

SEQ ID NO: 3169148 - RNA, 19 nt, Artificial Sequence
  Description of Artificial Sequence: Synthetic oligonucleotide
aaagguccuauucuaagua

SEQ ID NO: 3169149 - RNA, 19 nt, Artificial Sequence
  Description of Artificial Sequence: Synthetic oligonucleotide
auucuaaguaacauaacug

SEQ ID NO: 3169150 - RNA, 19 nt, Artificial Sequence
  Description of Artificial Sequence: Synthetic oligonucleotide
gauugaaacauaaccccag

SEQ ID NO: 3169151 - RNA, 19 nt, Artificial Sequence
  Description of Artificial Sequence: Synthetic oligonucleotide
aauaaagucugcucagcuu

SEQ ID NO: 3169152 - RNA, 19 nt, Artificial Sequence
  Description of Artificial Sequence: Synthetic oligonucleotide
uagccugucagucaucgug

SEQ ID NO: 3169153 - RNA, 19 nt, Artificial Sequence
  Description of Artificial Sequence: Synthetic oligonucleotide
uccacaagugcaauaaaau

SEQ ID NO: 3169154 - RNA, 19 nt, Artificial Sequence
  Description of Artificial Sequence: Synthetic oligonucleotide
uugaaacauaaccccagug

SEQ ID NO: 3169155 - RNA, 19 nt, Artificial Sequence
  Description of Artificial Sequence: Synthetic oligonucleotide
uccucuuuugucauguuuc

SEQ ID NO: 3169156 - RNA, 19 nt, Artificial Sequence
  Description of Artificial Sequence: Synthetic oligonucleotide
aaaugcuuugcaaaaggcu

SEQ ID NO: 3169157 - RNA, 19 nt, Artificial Sequence
  Description of Artificial Sequence: Synthetic oligonucleotide
agaauauggacauguacau

SEQ ID NO: 3169158 - RNA, 19 nt, Artificial Sequence
  Description of Artificial Sequence: Synthetic oligonucleotide
cuaagggacaguuugaaaa

SEQ ID NO: 3169159 - RNA, 19 nt, Artificial Sequence
  Description of Artificial Sequence: Synthetic oligonucleotide
cugucagucaucgugauug

SEQ ID NO: 3169160 - RNA, 19 nt, Artificial Sequence
  Description of Artificial Sequence: Synthetic oligonucleotide
uuuccuuaugccuugggau

SEQ ID NO: 3169161 - RNA, 19 nt, Artificial Sequence
  Description of Artificial Sequence: Synthetic oligonucleotide
uucauuuccaaugcugcag

SEQ ID NO: 3169162 - RNA, 19 nt, Artificial Sequence
  Description of Artificial Sequence: Synthetic oligonucleotide
cuaaguaacauaacugaga

SEQ ID NO: 3169163 - RNA, 19 nt, Artificial Sequence
  Description of Artificial Sequence: Synthetic oligonucleotide
aaugcugcagaguccagaa

SEQ ID NO: 3169164 - RNA, 19 nt, Artificial Sequence
  Description of Artificial Sequence: Synthetic oligonucleotide
cuacuguuugugaaguuag

SEQ ID NO: 3169165 - RNA, 19 nt, Artificial Sequence
  Description of Artificial Sequence: Synthetic oligonucleotide
ucaucauagaugcugucau

SEQ ID NO: 3169166 - RNA, 19 nt, Artificial Sequence
  Description of Artificial Sequence: Synthetic oligonucleotide
cugaaaguagacacgcagc

SEQ ID NO: 3169167 - RNA, 19 nt, Artificial Sequence
  Description of Artificial Sequence: Synthetic oligonucleotide
uucauccaggcuaagggac

SEQ ID NO: 3169168 - RNA, 19 nt, Artificial Sequence
  Description of Artificial Sequence: Synthetic oligonucleotide
uuauuuucauccaggcuaa

SEQ ID NO: 3169169 - RNA, 19 nt, Artificial Sequence
  Description of Artificial Sequence: Synthetic oligonucleotide
cuuucaugccugaaaguag

SEQ ID NO: 3169170 - RNA, 19 nt, Artificial Sequence
  Description of Artificial Sequence: Synthetic oligonucleotide
aacauaacugagaaacugu

SEQ ID NO: 3169171 - RNA, 19 nt, Artificial Sequence
  Description of Artificial Sequence: Synthetic oligonucleotide
ucagucaucgugauugaaa

SEQ ID NO: 3169172 - RNA, 19 nt, Artificial Sequence
  Description of Artificial Sequence: Synthetic oligonucleotide
guuugaaaagguccuauuc

SEQ ID NO: 3169173 - RNA, 19 nt, Artificial Sequence
  Description of Artificial Sequence: Synthetic oligonucleotide
aaggcugcagaaccauggg

SEQ ID NO: 3169174 - RNA, 19 nt, Artificial Sequence
  Description of Artificial Sequence: Synthetic oligonucleotide
uuccacaagugcaauaaaa

SEQ ID NO: 3169175 - RNA, 19 nt, Artificial Sequence
  Description of Artificial Sequence: Synthetic oligonucleotide
ucugcucagcuucauuucc

SEQ ID NO: 3169176 - RNA, 19 nt, Artificial Sequence
  Description of Artificial Sequence: Synthetic oligonucleotide
auaaaaugcuuugcaaaag

SEQ ID NO: 3169177 - RNA, 19 nt, Artificial Sequence
  Description of Artificial Sequence: Synthetic oligonucleotide
aggcccauuuccuuaugcc

SEQ ID NO: 3169178 - RNA, 19 nt, Artificial Sequence
  Description of Artificial Sequence: Synthetic oligonucleotide
accacuuauuuucauccag

SEQ ID NO: 3169179 - RNA, 19 nt, Artificial Sequence
  Description of Artificial Sequence: Synthetic oligonucleotide
ucuccaaagggcuggggag

SEQ ID NO: 3169180 - RNA, 19 nt, Artificial Sequence
  Description of Artificial Sequence: Synthetic oligonucleotide
ucauuucugcggaaguccc

SEQ ID NO: 3169181 - RNA, 19 nt, Artificial Sequence
  Description of Artificial Sequence: Synthetic oligonucleotide
caauaaaaugcuuugcaaa

SEQ ID NO: 3169182 - RNA, 19 nt, Artificial Sequence
  Description of Artificial Sequence: Synthetic oligonucleotide
uuucauccaggcuaaggga

SEQ ID NO: 3169183 - RNA, 19 nt, Artificial Sequence
  Description of Artificial Sequence: Synthetic oligonucleotide
cacuuauuuucauccaggc

SEQ ID NO: 3169184 - RNA, 19 nt, Artificial Sequence
  Description of Artificial Sequence: Synthetic oligonucleotide
uuuucuguagcuuugaugg

SEQ ID NO: 3169185 - RNA, 19 nt, Artificial Sequence
  Description of Artificial Sequence: Synthetic oligonucleotide
ucuucuaaagaaauuacgg

SEQ ID NO: 3169186 - RNA, 19 nt, Artificial Sequence
  Description of Artificial Sequence: Synthetic oligonucleotide
aaucacccaaacuauaggc

SEQ ID NO: 3169187 - RNA, 19 nt, Artificial Sequence
  Description of Artificial Sequence: Synthetic oligonucleotide
ucggauaacaucuuggugg

SEQ ID NO: 3169188 - RNA, 19 nt, Artificial Sequence
  Description of Artificial Sequence: Synthetic oligonucleotide
aagaacuucauccucagug

SEQ ID NO: 3169189 - RNA, 19 nt, Artificial Sequence
  Description of Artificial Sequence: Synthetic oligonucleotide
aaaaccuucuucuaaagaa

SEQ ID NO: 3169190 - RNA, 19 nt, Artificial Sequence
  Description of Artificial Sequence: Synthetic oligonucleotide
gaaguuguagaacucaucc

SEQ ID NO: 3169191 - RNA, 19 nt, Artificial Sequence
  Description of Artificial Sequence: Synthetic oligonucleotide
auucguuggaguuucaugg

SEQ ID NO: 3169192 - RNA, 19 nt, Artificial Sequence
  Description of Artificial Sequence: Synthetic oligonucleotide
uuugauggaaguuuugugc

SEQ ID NO: 3169193 - RNA, 19 nt, Artificial Sequence
  Description of Artificial Sequence: Synthetic oligonucleotide
aaaacgauagacccaaaga

SEQ ID NO: 3169194 - RNA, 19 nt, Artificial Sequence
  Description of Artificial Sequence: Synthetic oligonucleotide
gcuaaugucaucuaguccg

SEQ ID NO: 3169195 - RNA, 19 nt, Artificial Sequence
  Description of Artificial Sequence: Synthetic oligonucleotide
uucuucuaaagaaauuacg

SEQ ID NO: 3169196 - RNA, 19 nt, Artificial Sequence
  Description of Artificial Sequence: Synthetic oligonucleotide
gacccaaagaacuucaucc

SEQ ID NO: 3169197 - RNA, 19 nt, Artificial Sequence
  Description of Artificial Sequence: Synthetic oligonucleotide
uucuaaagaaauuacggga

SEQ ID NO: 3169198 - RNA, 19 nt, Artificial Sequence
  Description of Artificial Sequence: Synthetic oligonucleotide
aguuguagaacucauccuc

SEQ ID NO: 3169199 - RNA, 19 nt, Artificial Sequence
  Description of Artificial Sequence: Synthetic oligonucleotide
aaacgauagacccaaagaa

SEQ ID NO: 3169200 - RNA, 19 nt, Artificial Sequence
  Description of Artificial Sequence: Synthetic oligonucleotide
cuucuaaagaaauuacggg

SEQ ID NO: 3169201 - RNA, 19 nt, Artificial Sequence
  Description of Artificial Sequence: Synthetic oligonucleotide
aaaucacccaaacuauagg

SEQ ID NO: 3169202 - RNA, 19 nt, Artificial Sequence
  Description of Artificial Sequence: Synthetic oligonucleotide
uguugcauggaacugggag

SEQ ID NO: 3169203 - RNA, 19 nt, Artificial Sequence
  Description of Artificial Sequence: Synthetic oligonucleotide
ugcucuuucacacuguaug

SEQ ID NO: 3169204 - RNA, 19 nt, Artificial Sequence
  Description of Artificial Sequence: Synthetic oligonucleotide
ugaauugugucuuucuuug

SEQ ID NO: 3169205 - RNA, 19 nt, Artificial Sequence
  Description of Artificial Sequence: Synthetic oligonucleotide
ucuaaagaaauuacgggaa

SEQ ID NO: 3169206 - RNA, 19 nt, Artificial Sequence
  Description of Artificial Sequence: Synthetic oligonucleotide
ucaaauguugcauggaacu

SEQ ID NO: 3169207 - RNA, 19 nt, Artificial Sequence
  Description of Artificial Sequence: Synthetic oligonucleotide
uuucacacuguauggaggg

SEQ ID NO: 3169208 - RNA, 19 nt, Artificial Sequence
  Description of Artificial Sequence: Synthetic oligonucleotide
aaauguugcauggaacugg

SEQ ID NO: 3169209 - RNA, 19 nt, Artificial Sequence
  Description of Artificial Sequence: Synthetic oligonucleotide
aauugugucuuucuuugcu

SEQ ID NO: 3169210 - RNA, 19 nt, Artificial Sequence
  Description of Artificial Sequence: Synthetic oligonucleotide
aacgauagacccaaagaac

SEQ ID NO: 3169211 - RNA, 19 nt, Artificial Sequence
  Description of Artificial Sequence: Synthetic oligonucleotide
uuucugaaguuguagaacu

SEQ ID NO: 3169212 - RNA, 19 nt, Artificial Sequence
  Description of Artificial Sequence: Synthetic oligonucleotide
uguaugauguccgagcuug

SEQ ID NO: 3169213 - RNA, 19 nt, Artificial Sequence
  Description of Artificial Sequence: Synthetic oligonucleotide
aucuaguccgucuaagcac

SEQ ID NO: 3169214 - RNA, 19 nt, Artificial Sequence
  Description of Artificial Sequence: Synthetic oligonucleotide
uuuugugcuaaugucaucu

SEQ ID NO: 3169215 - RNA, 19 nt, Artificial Sequence
  Description of Artificial Sequence: Synthetic oligonucleotide
gaguaaucaaacuuuaaaa

SEQ ID NO: 3169216 - RNA, 19 nt, Artificial Sequence
  Description of Artificial Sequence: Synthetic oligonucleotide
uuugcuguuuguuauggcu

SEQ ID NO: 3169217 - RNA, 19 nt, Artificial Sequence
  Description of Artificial Sequence: Synthetic oligonucleotide
gacuucaaauguugcaugg

SEQ ID NO: 3169218 - RNA, 19 nt, Artificial Sequence
  Description of Artificial Sequence: Synthetic oligonucleotide
uuaaaggugaggacaugag

SEQ ID NO: 3169219 - RNA, 19 nt, Artificial Sequence
  Description of Artificial Sequence: Synthetic oligonucleotide
uuucaugggcaaaucaccc

SEQ ID NO: 3169220 - RNA, 19 nt, Artificial Sequence
  Description of Artificial Sequence: Synthetic oligonucleotide
ucuuggugguuuuagagac

SEQ ID NO: 3169221 - RNA, 19 nt, Artificial Sequence
  Description of Artificial Sequence: Synthetic oligonucleotide
uguuuguuauggcuggugc

SEQ ID NO: 3169222 - RNA, 19 nt, Artificial Sequence
  Description of Artificial Sequence: Synthetic oligonucleotide
aaccgaacuuauucguugg

SEQ ID NO: 3169223 - RNA, 19 nt, Artificial Sequence
  Description of Artificial Sequence: Synthetic oligonucleotide
aaugucaucuaguccgucu

SEQ ID NO: 3169224 - RNA, 19 nt, Artificial Sequence
  Description of Artificial Sequence: Synthetic oligonucleotide
ucuuucacacuguauggag

SEQ ID NO: 3169225 - RNA, 19 nt, Artificial Sequence
  Description of Artificial Sequence: Synthetic oligonucleotide
aagcauuuccuccugcucu

SEQ ID NO: 3169226 - RNA, 19 nt, Artificial Sequence
  Description of Artificial Sequence: Synthetic oligonucleotide
caaaucacccaaacuauag

SEQ ID NO: 3169227 - RNA, 19 nt, Artificial Sequence
  Description of Artificial Sequence: Synthetic oligonucleotide
uuuugggaaagucuucucu

SEQ ID NO: 3169228 - RNA, 19 nt, Artificial Sequence
  Description of Artificial Sequence: Synthetic oligonucleotide
caugagaagcauuuccucc

SEQ ID NO: 3169229 - RNA, 19 nt, Artificial Sequence
  Description of Artificial Sequence: Synthetic oligonucleotide
ugugcuaaugucaucuagu

SEQ ID NO: 3169230 - RNA, 19 nt, Artificial Sequence
  Description of Artificial Sequence: Synthetic oligonucleotide
gaaguuuugugcuaauguc

SEQ ID NO: 3169231 - RNA, 19 nt, Artificial Sequence
  Description of Artificial Sequence: Synthetic oligonucleotide
uguagaacucauccucagg

SEQ ID NO: 3169232 - RNA, 19 nt, Artificial Sequence
  Description of Artificial Sequence: Synthetic oligonucleotide
uuuuccuccgaguugccag

SEQ ID NO: 3169233 - RNA, 19 nt, Artificial Sequence
  Description of Artificial Sequence: Synthetic oligonucleotide
auuuucuguagcuuugaug

SEQ ID NO: 3169234 - RNA, 19 nt, Artificial Sequence
  Description of Artificial Sequence: Synthetic oligonucleotide
aguuucaugggcaaaucac

SEQ ID NO: 3169235 - RNA, 19 nt, Artificial Sequence
  Description of Artificial Sequence: Synthetic oligonucleotide
aaggugaggacaugagaag

SEQ ID NO: 3169236 - RNA, 19 nt, Artificial Sequence
  Description of Artificial Sequence: Synthetic oligonucleotide
aaaggugaggacaugagaa

SEQ ID NO: 3169237 - RNA, 19 nt, Artificial Sequence
  Description of Artificial Sequence: Synthetic oligonucleotide
aguaauuuucuguagcuuu

SEQ ID NO: 3169238 - RNA, 19 nt, Artificial Sequence
  Description of Artificial Sequence: Synthetic oligonucleotide
uaaaggugaggacaugaga

SEQ ID NO: 3169239 - RNA, 19 nt, Artificial Sequence
  Description of Artificial Sequence: Synthetic oligonucleotide
aauguugcauggaacuggg

SEQ ID NO: 3169240 - RNA, 19 nt, Artificial Sequence
  Description of Artificial Sequence: Synthetic oligonucleotide
uucaaauguugcauggaac

SEQ ID NO: 3169241 - RNA, 19 nt, Artificial Sequence
  Description of Artificial Sequence: Synthetic oligonucleotide
uugauggaaguuuugugcu

SEQ ID NO: 3169242 - RNA, 19 nt, Artificial Sequence
  Description of Artificial Sequence: Synthetic oligonucleotide
ugauguccgagcuugacaa

SEQ ID NO: 3169243 - RNA, 19 nt, Artificial Sequence
  Description of Artificial Sequence: Synthetic oligonucleotide
uauucguuggaguuucaug

SEQ ID NO: 3169244 - RNA, 19 nt, Artificial Sequence
  Description of Artificial Sequence: Synthetic oligonucleotide
acaugagaagcauuuccuc

SEQ ID NO: 3169245 - RNA, 19 nt, Artificial Sequence
  Description of Artificial Sequence: Synthetic oligonucleotide
ucuguagcuuugauggaag

SEQ ID NO: 3169246 - RNA, 19 nt, Artificial Sequence
  Description of Artificial Sequence: Synthetic oligonucleotide
cuuucacacuguauggagg

SEQ ID NO: 3169247 - RNA, 19 nt, Artificial Sequence
  Description of Artificial Sequence: Synthetic oligonucleotide
ucuuugcuguuuguuaugg

SEQ ID NO: 3169248 - RNA, 19 nt, Artificial Sequence
  Description of Artificial Sequence: Synthetic oligonucleotide
ugcuguuuguuauggcugg

SEQ ID NO: 3169249 - RNA, 19 nt, Artificial Sequence
  Description of Artificial Sequence: Synthetic oligonucleotide
aaguuuugugcuaauguca

SEQ ID NO: 3169250 - RNA, 19 nt, Artificial Sequence
  Description of Artificial Sequence: Synthetic oligonucleotide
gaaccgaacuuauucguug

SEQ ID NO: 3169251 - RNA, 19 nt, Artificial Sequence
  Description of Artificial Sequence: Synthetic oligonucleotide
ucuaguccgucuaagcacu

SEQ ID NO: 3169252 - RNA, 19 nt, Artificial Sequence
  Description of Artificial Sequence: Synthetic oligonucleotide
cuucuucuaaagaaauuac

SEQ ID NO: 3169253 - RNA, 19 nt, Artificial Sequence
  Description of Artificial Sequence: Synthetic oligonucleotide
aaguuguagaacucauccu

SEQ ID NO: 3169254 - RNA, 19 nt, Artificial Sequence
  Description of Artificial Sequence: Synthetic oligonucleotide
caucuuggugguuuuagag

SEQ ID NO: 3169255 - RNA, 19 nt, Artificial Sequence
  Description of Artificial Sequence: Synthetic oligonucleotide
aaagucuucucucccagua

SEQ ID NO: 3169256 - RNA, 19 nt, Artificial Sequence
  Description of Artificial Sequence: Synthetic oligonucleotide
uugcuguuuguuauggcug

SEQ ID NO: 3169257 - RNA, 19 nt, Artificial Sequence
  Description of Artificial Sequence: Synthetic oligonucleotide
uugugcuaaugucaucuag

SEQ ID NO: 3169258 - RNA, 19 nt, Artificial Sequence
  Description of Artificial Sequence: Synthetic oligonucleotide
aacaucuuggugguuuuag

SEQ ID NO: 3169259 - RNA, 19 nt, Artificial Sequence
  Description of Artificial Sequence: Synthetic oligonucleotide
guagaacucauccucagga

SEQ ID NO: 3169260 - RNA, 19 nt, Artificial Sequence
  Description of Artificial Sequence: Synthetic oligonucleotide
ucauccucaguguaugaug

SEQ ID NO: 3169261 - RNA, 19 nt, Artificial Sequence
  Description of Artificial Sequence: Synthetic oligonucleotide
ugcuaaugucaucuagucc

SEQ ID NO: 3169262 - RNA, 19 nt, Artificial Sequence
  Description of Artificial Sequence: Synthetic oligonucleotide
uuuucugaaguuguagaac

SEQ ID NO: 3169263 - RNA, 19 nt, Artificial Sequence
  Description of Artificial Sequence: Synthetic oligonucleotide
acuuauucguuggaguuuc

SEQ ID NO: 3169264 - RNA, 19 nt, Artificial Sequence
  Description of Artificial Sequence: Synthetic oligonucleotide
uuugggaaagucuucucuc

SEQ ID NO: 3169265 - RNA, 19 nt, Artificial Sequence
  Description of Artificial Sequence: Synthetic oligonucleotide
cuuugauggaaguuuugug

SEQ ID NO: 3169266 - RNA, 19 nt, Artificial Sequence
  Description of Artificial Sequence: Synthetic oligonucleotide
agaacuucauccucagugu

SEQ ID NO: 3169267 - RNA, 19 nt, Artificial Sequence
  Description of Artificial Sequence: Synthetic oligonucleotide
ucugaaguuguagaacuca

SEQ ID NO: 3169268 - RNA, 19 nt, Artificial Sequence
  Description of Artificial Sequence: Synthetic oligonucleotide
uuucuuugcuguuuguuau

SEQ ID NO: 3169269 - RNA, 19 nt, Artificial Sequence
  Description of Artificial Sequence: Synthetic oligonucleotide
ucucccaguaauuuucugu

SEQ ID NO: 3169270 - RNA, 19 nt, Artificial Sequence
  Description of Artificial Sequence: Synthetic oligonucleotide
aggugaggacaugagaagc

SEQ ID NO: 3169271 - RNA, 19 nt, Artificial Sequence
  Description of Artificial Sequence: Synthetic oligonucleotide
uggcuggugcuauuaaagg

SEQ ID NO: 3169272 - RNA, 19 nt, Artificial Sequence
  Description of Artificial Sequence: Synthetic oligonucleotide
caggaaccgaacuuauucg

SEQ ID NO: 3169273 - RNA, 19 nt, Artificial Sequence
  Description of Artificial Sequence: Synthetic oligonucleotide
uucguuggaguuucauggg

SEQ ID NO: 3169274 - RNA, 19 nt, Artificial Sequence
  Description of Artificial Sequence: Synthetic oligonucleotide
agacccaaagaacuucauc

SEQ ID NO: 3169275 - RNA, 19 nt, Artificial Sequence
  Description of Artificial Sequence: Synthetic oligonucleotide
ugucuuucuuugcuguuug

SEQ ID NO: 3169276 - RNA, 19 nt, Artificial Sequence
  Description of Artificial Sequence: Synthetic oligonucleotide
uucucucccaguaauuuuc

SEQ ID NO: 3169277 - RNA, 19 nt, Artificial Sequence
  Description of Artificial Sequence: Synthetic oligonucleotide
ucaucuaguccgucuaagc

SEQ ID NO: 3169278 - RNA, 19 nt, Artificial Sequence
  Description of Artificial Sequence: Synthetic oligonucleotide
acugggaguaaucaaacuu

SEQ ID NO: 3169279 - RNA, 19 nt, Artificial Sequence
  Description of Artificial Sequence: Synthetic oligonucleotide
aguguaugauguccgagcu

SEQ ID NO: 3169280 - RNA, 19 nt, Artificial Sequence
  Description of Artificial Sequence: Synthetic oligonucleotide
augggcaaaucacccaaac

SEQ ID NO: 3169281 - RNA, 19 nt, Artificial Sequence
  Description of Artificial Sequence: Synthetic oligonucleotide
auuaaaggugaggacauga

SEQ ID NO: 3169282 - RNA, 19 nt, Artificial Sequence
  Description of Artificial Sequence: Synthetic oligonucleotide
caugggaucggauaacauc

SEQ ID NO: 3169283 - RNA, 19 nt, Artificial Sequence
  Description of Artificial Sequence: Synthetic oligonucleotide
caguguaugauguccgagc

SEQ ID NO: 3169284 - RNA, 19 nt, Artificial Sequence
  Description of Artificial Sequence: Synthetic oligonucleotide
aauauaaucauacucacuc

SEQ ID NO: 3169285 - RNA, 19 nt, Artificial Sequence
  Description of Artificial Sequence: Synthetic oligonucleotide
uaagagauaaauaaaacag

SEQ ID NO: 3169286 - RNA, 19 nt, Artificial Sequence
  Description of Artificial Sequence: Synthetic oligonucleotide
auucacaccauauuuaacc

SEQ ID NO: 3169287 - RNA, 19 nt, Artificial Sequence
  Description of Artificial Sequence: Synthetic oligonucleotide
aaacauaaauuauauaucu

SEQ ID NO: 3169288 - RNA, 19 nt, Artificial Sequence
  Description of Artificial Sequence: Synthetic oligonucleotide
auagaaauaauuuugacau

SEQ ID NO: 3169289 - RNA, 19 nt, Artificial Sequence
  Description of Artificial Sequence: Synthetic oligonucleotide
uaaggaaugaauuucaacu

SEQ ID NO: 3169290 - RNA, 19 nt, Artificial Sequence
  Description of Artificial Sequence: Synthetic oligonucleotide
aauaaccauaauuauggag

SEQ ID NO: 3169291 - RNA, 19 nt, Artificial Sequence
  Description of Artificial Sequence: Synthetic oligonucleotide
aaauucagcacuuccauug

SEQ ID NO: 3169292 - RNA, 19 nt, Artificial Sequence
  Description of Artificial Sequence: Synthetic oligonucleotide
uguuucuuuaaucaaaaca

SEQ ID NO: 3169293 - RNA, 19 nt, Artificial Sequence
  Description of Artificial Sequence: Synthetic oligonucleotide
uauagaaauaauuuugaca

SEQ ID NO: 3169294 - RNA, 19 nt, Artificial Sequence
  Description of Artificial Sequence: Synthetic oligonucleotide
ugaauuucaacuuuuacaa

SEQ ID NO: 3169295 - RNA, 19 nt, Artificial Sequence
  Description of Artificial Sequence: Synthetic oligonucleotide
aguaguaacaauuugaauu

SEQ ID NO: 3169296 - RNA, 19 nt, Artificial Sequence
  Description of Artificial Sequence: Synthetic oligonucleotide
auuggucuaguuuugacac

SEQ ID NO: 3169297 - RNA, 19 nt, Artificial Sequence
  Description of Artificial Sequence: Synthetic oligonucleotide
aagagauaaauaaaacagc

SEQ ID NO: 3169298 - RNA, 19 nt, Artificial Sequence
  Description of Artificial Sequence: Synthetic oligonucleotide
auaaacaaaauacuguuca

SEQ ID NO: 3169299 - RNA, 19 nt, Artificial Sequence
  Description of Artificial Sequence: Synthetic oligonucleotide
uaguauagaaauaauuuug

SEQ ID NO: 3169300 - RNA, 19 nt, Artificial Sequence
  Description of Artificial Sequence: Synthetic oligonucleotide
ugguuugugaauauaauca

SEQ ID NO: 3169301 - RNA, 19 nt, Artificial Sequence
  Description of Artificial Sequence: Synthetic oligonucleotide
ucuaguauagaaauaauuu

SEQ ID NO: 3169302 - RNA, 19 nt, Artificial Sequence
  Description of Artificial Sequence: Synthetic oligonucleotide
ugugaauauaaucauacuc

SEQ ID NO: 3169303 - RNA, 19 nt, Artificial Sequence
  Description of Artificial Sequence: Synthetic oligonucleotide
aaaucaagaaucuaguaua

SEQ ID NO: 3169304 - RNA, 19 nt, Artificial Sequence
  Description of Artificial Sequence: Synthetic oligonucleotide
uuaaauuagggacugggga

SEQ ID NO: 3169305 - RNA, 19 nt, Artificial Sequence
  Description of Artificial Sequence: Synthetic oligonucleotide
uauaucuccaacaggacug

SEQ ID NO: 3169306 - RNA, 19 nt, Artificial Sequence
  Description of Artificial Sequence: Synthetic oligonucleotide
uuuaaauuagggacugggg

SEQ ID NO: 3169307 - RNA, 19 nt, Artificial Sequence
  Description of Artificial Sequence: Synthetic oligonucleotide
aaaaccauaacaucucagu

SEQ ID NO: 3169308 - RNA, 19 nt, Artificial Sequence
  Description of Artificial Sequence: Synthetic oligonucleotide
uuuacaucaacagagacaa

SEQ ID NO: 3169309 - RNA, 19 nt, Artificial Sequence
  Description of Artificial Sequence: Synthetic oligonucleotide
aaagauuuacaucaacaga

SEQ ID NO: 3169310 - RNA, 19 nt, Artificial Sequence
  Description of Artificial Sequence: Synthetic oligonucleotide
uaaauuauauaucuccaac

SEQ ID NO: 3169311 - RNA, 19 nt, Artificial Sequence
  Description of Artificial Sequence: Synthetic oligonucleotide
aaugguaaguaacagacuu

SEQ ID NO: 3169312 - RNA, 19 nt, Artificial Sequence
  Description of Artificial Sequence: Synthetic oligonucleotide
uuuuguuauaacuuuaaaa

SEQ ID NO: 3169313 - RNA, 19 nt, Artificial Sequence
  Description of Artificial Sequence: Synthetic oligonucleotide
acagugucuucucagaggc

SEQ ID NO: 3169314 - RNA, 19 nt, Artificial Sequence
  Description of Artificial Sequence: Synthetic oligonucleotide
uguauuuccauuaaagcua

SEQ ID NO: 3169315 - RNA, 19 nt, Artificial Sequence
  Description of Artificial Sequence: Synthetic oligonucleotide
uucagagccacucugcagg

SEQ ID NO: 3169316 - RNA, 19 nt, Artificial Sequence
  Description of Artificial Sequence: Synthetic oligonucleotide
uaagacuucaauaaagcuc

SEQ ID NO: 3169317 - RNA, 19 nt, Artificial Sequence
  Description of Artificial Sequence: Synthetic oligonucleotide
aacaacaauacuuaugguu

SEQ ID NO: 3169318 - RNA, 19 nt, Artificial Sequence
  Description of Artificial Sequence: Synthetic oligonucleotide
aaauaagccagugacagca

SEQ ID NO: 3169319 - RNA, 19 nt, Artificial Sequence
  Description of Artificial Sequence: Synthetic oligonucleotide
uucuuuugcaaauucagca

SEQ ID NO: 3169320 - RNA, 19 nt, Artificial Sequence
  Description of Artificial Sequence: Synthetic oligonucleotide
gaaagcuaaacauucugcc

SEQ ID NO: 3169321 - RNA, 19 nt, Artificial Sequence
  Description of Artificial Sequence: Synthetic oligonucleotide
uuuuagaccuucuucuagg

SEQ ID NO: 3169322 - RNA, 19 nt, Artificial Sequence
  Description of Artificial Sequence: Synthetic oligonucleotide
uuccuugaaaaccauaaca

SEQ ID NO: 3169323 - RNA, 19 nt, Artificial Sequence
  Description of Artificial Sequence: Synthetic oligonucleotide
ucaagaaucuaguauagaa

SEQ ID NO: 3169324 - RNA, 19 nt, Artificial Sequence
  Description of Artificial Sequence: Synthetic oligonucleotide
uuaaagugcaguuaaguau

SEQ ID NO: 3169325 - RNA, 19 nt, Artificial Sequence
  Description of Artificial Sequence: Synthetic oligonucleotide
ucuaggaaaagccaacugu

SEQ ID NO: 3169326 - RNA, 19 nt, Artificial Sequence
  Description of Artificial Sequence: Synthetic oligonucleotide
guaaguaacagacuuacca

SEQ ID NO: 3169327 - RNA, 19 nt, Artificial Sequence
  Description of Artificial Sequence: Synthetic oligonucleotide
uaaagcaaugguaaguaac

SEQ ID NO: 3169328 - RNA, 19 nt, Artificial Sequence
  Description of Artificial Sequence: Synthetic oligonucleotide
acuucaauaaagcucauau

SEQ ID NO: 3169329 - RNA, 19 nt, Artificial Sequence
  Description of Artificial Sequence: Synthetic oligonucleotide
uuuuccuugaaaaccauaa

SEQ ID NO: 3169330 - RNA, 19 nt, Artificial Sequence
  Description of Artificial Sequence: Synthetic oligonucleotide
acuuuauuugaacauagga

SEQ ID NO: 3169331 - RNA, 19 nt, Artificial Sequence
  Description of Artificial Sequence: Synthetic oligonucleotide
aaucauacucacucuacug

SEQ ID NO: 3169332 - RNA, 19 nt, Artificial Sequence
  Description of Artificial Sequence: Synthetic oligonucleotide
aacaacagacuuuauuuga

SEQ ID NO: 3169333 - RNA, 19 nt, Artificial Sequence
  Description of Artificial Sequence: Synthetic oligonucleotide
augguuugugaauauaauc

SEQ ID NO: 3169334 - RNA, 19 nt, Artificial Sequence
  Description of Artificial Sequence: Synthetic oligonucleotide
ugcaggucacuaaugaagg

SEQ ID NO: 3169335 - RNA, 19 nt, Artificial Sequence
  Description of Artificial Sequence: Synthetic oligonucleotide
auuuaaauuagggacuggg

SEQ ID NO: 3169336 - RNA, 19 nt, Artificial Sequence
  Description of Artificial Sequence: Synthetic oligonucleotide
auaaccauaauuauggagu

SEQ ID NO: 3169337 - RNA, 19 nt, Artificial Sequence
  Description of Artificial Sequence: Synthetic oligonucleotide
aacagugucuucucagagg

SEQ ID NO: 3169338 - RNA, 19 nt, Artificial Sequence
  Description of Artificial Sequence: Synthetic oligonucleotide
ugguuaauauguuuuaaga

SEQ ID NO: 3169339 - RNA, 19 nt, Artificial Sequence
  Description of Artificial Sequence: Synthetic oligonucleotide
aacauuaaggaaugaauuu

SEQ ID NO: 3169340 - RNA, 19 nt, Artificial Sequence
  Description of Artificial Sequence: Synthetic oligonucleotide
ucuucucagaggcagaucu

SEQ ID NO: 3169341 - RNA, 19 nt, Artificial Sequence
  Description of Artificial Sequence: Synthetic oligonucleotide
auaauuauggaguaugguu

SEQ ID NO: 3169342 - RNA, 19 nt, Artificial Sequence
  Description of Artificial Sequence: Synthetic oligonucleotide
aaauuuaaauuagggacug

SEQ ID NO: 3169343 - RNA, 19 nt, Artificial Sequence
  Description of Artificial Sequence: Synthetic oligonucleotide
aaagcuaaacauucugccu

SEQ ID NO: 3169344 - RNA, 19 nt, Artificial Sequence
  Description of Artificial Sequence: Synthetic oligonucleotide
aaagauaggcagucuuuuc

SEQ ID NO: 3169345 - RNA, 19 nt, Artificial Sequence
  Description of Artificial Sequence: Synthetic oligonucleotide
acauaggaguucuauuccc

SEQ ID NO: 3169346 - RNA, 19 nt, Artificial Sequence
  Description of Artificial Sequence: Synthetic oligonucleotide
aauucagcacuuccauugg

SEQ ID NO: 3169347 - RNA, 19 nt, Artificial Sequence
  Description of Artificial Sequence: Synthetic oligonucleotide
ucuaugguuaauauguuuu

SEQ ID NO: 3169348 - RNA, 19 nt, Artificial Sequence
  Description of Artificial Sequence: Synthetic oligonucleotide
aauaaaacagcuaggugga

SEQ ID NO: 3169349 - RNA, 19 nt, Artificial Sequence
  Description of Artificial Sequence: Synthetic oligonucleotide
aacagagacaaagaugcag

SEQ ID NO: 3169350 - RNA, 19 nt, Artificial Sequence
  Description of Artificial Sequence: Synthetic oligonucleotide
acauuaaggaaugaauuuc

SEQ ID NO: 3169351 - RNA, 19 nt, Artificial Sequence
  Description of Artificial Sequence: Synthetic oligonucleotide
aacauaaauuauauaucuc

SEQ ID NO: 3169352 - RNA, 19 nt, Artificial Sequence
  Description of Artificial Sequence: Synthetic oligonucleotide
caaauuuaguaguaguaac

SEQ ID NO: 3169353 - RNA, 19 nt, Artificial Sequence
  Description of Artificial Sequence: Synthetic oligonucleotide
uaaacaaaauacuguucag

SEQ ID NO: 3169354 - RNA, 19 nt, Artificial Sequence
  Description of Artificial Sequence: Synthetic oligonucleotide
uuaagacuucaauaaagcu

SEQ ID NO: 3169355 - RNA, 19 nt, Artificial Sequence
  Description of Artificial Sequence: Synthetic oligonucleotide
uuuugacacaccccaaacc

SEQ ID NO: 3169356 - RNA, 19 nt, Artificial Sequence
  Description of Artificial Sequence: Synthetic oligonucleotide
guuaauauguuuuaagacu

SEQ ID NO: 3169357 - RNA, 19 nt, Artificial Sequence
  Description of Artificial Sequence: Synthetic oligonucleotide
agugcaguuaaguaucuug

SEQ ID NO: 3169358 - RNA, 19 nt, Artificial Sequence
  Description of Artificial Sequence: Synthetic oligonucleotide
augguuaauauguuuuaag

SEQ ID NO: 3169359 - RNA, 19 nt, Artificial Sequence
  Description of Artificial Sequence: Synthetic oligonucleotide
aauuuaguaguaguaacaa

SEQ ID NO: 3169360 - RNA, 19 nt, Artificial Sequence
  Description of Artificial Sequence: Synthetic oligonucleotide
uacaaauuuaguaguagua

SEQ ID NO: 3169361 - RNA, 19 nt, Artificial Sequence
  Description of Artificial Sequence: Synthetic oligonucleotide
aaauacuguucagagccac

SEQ ID NO: 3169362 - RNA, 19 nt, Artificial Sequence
  Description of Artificial Sequence: Synthetic oligonucleotide
aaacccaacauuaaggaau

SEQ ID NO: 3169363 - RNA, 19 nt, Artificial Sequence
  Description of Artificial Sequence: Synthetic oligonucleotide
aaagcaaugguaaguaaca

SEQ ID NO: 3169364 - RNA, 19 nt, Artificial Sequence
  Description of Artificial Sequence: Synthetic oligonucleotide
uggaaaugcuucuuuuagg

SEQ ID NO: 3169365 - RNA, 19 nt, Artificial Sequence
  Description of Artificial Sequence: Synthetic oligonucleotide
ugcaauugaaguaaauuuu

SEQ ID NO: 3169366 - RNA, 19 nt, Artificial Sequence
  Description of Artificial Sequence: Synthetic oligonucleotide
cucuacugagaguagaccc

SEQ ID NO: 3169367 - RNA, 19 nt, Artificial Sequence
  Description of Artificial Sequence: Synthetic oligonucleotide
guacccagaaaccuuaaag

SEQ ID NO: 3169368 - RNA, 19 nt, Artificial Sequence
  Description of Artificial Sequence: Synthetic oligonucleotide
ucuaguuuugacacacccc

SEQ ID NO: 3169369 - RNA, 19 nt, Artificial Sequence
  Description of Artificial Sequence: Synthetic oligonucleotide
auuuccauuaaagcuacuc

SEQ ID NO: 3169370 - RNA, 19 nt, Artificial Sequence
  Description of Artificial Sequence: Synthetic oligonucleotide
uuaaggaaugaauuucaac

SEQ ID NO: 3169371 - RNA, 19 nt, Artificial Sequence
  Description of Artificial Sequence: Synthetic oligonucleotide
gagaaagcuaaacauucug

SEQ ID NO: 3169372 - RNA, 19 nt, Artificial Sequence
  Description of Artificial Sequence: Synthetic oligonucleotide
ugcaaauucagcacuucca

SEQ ID NO: 3169373 - RNA, 19 nt, Artificial Sequence
  Description of Artificial Sequence: Synthetic oligonucleotide
uaaauuagggacuggggaa

SEQ ID NO: 3169374 - RNA, 19 nt, Artificial Sequence
  Description of Artificial Sequence: Synthetic oligonucleotide
agaauuuuguuauaacuuu

SEQ ID NO: 3169375 - RNA, 19 nt, Artificial Sequence
  Description of Artificial Sequence: Synthetic oligonucleotide
gaaucuaguauagaaauaa

SEQ ID NO: 3169376 - RNA, 19 nt, Artificial Sequence
  Description of Artificial Sequence: Synthetic oligonucleotide
ucauacucacucuacugag

SEQ ID NO: 3169377 - RNA, 19 nt, Artificial Sequence
  Description of Artificial Sequence: Synthetic oligonucleotide
agugacagcacuugcuuag

SEQ ID NO: 3169378 - RNA, 19 nt, Artificial Sequence
  Description of Artificial Sequence: Synthetic oligonucleotide
gauuuacaucaacagagac

SEQ ID NO: 3169379 - RNA, 19 nt, Artificial Sequence
  Description of Artificial Sequence: Synthetic oligonucleotide
uuuuaaaaccaaccaccug

SEQ ID NO: 3169380 - RNA, 19 nt, Artificial Sequence
  Description of Artificial Sequence: Synthetic oligonucleotide
uacccagaaaccuuaaagu

SEQ ID NO: 3169381 - RNA, 19 nt, Artificial Sequence
  Description of Artificial Sequence: Synthetic oligonucleotide
aaucaagaaucuaguauag

SEQ ID NO: 3169382 - RNA, 19 nt, Artificial Sequence
  Description of Artificial Sequence: Synthetic oligonucleotide
aaagcaaaacuacuauuuu

SEQ ID NO: 3169383 - RNA, 19 nt, Artificial Sequence
  Description of Artificial Sequence: Synthetic oligonucleotide
auauaucuccaacaggacu

SEQ ID NO: 3169384 - RNA, 19 nt, Artificial Sequence
  Description of Artificial Sequence: Synthetic oligonucleotide
uucguguauacaaagaacg

SEQ ID NO: 3169385 - RNA, 19 nt, Artificial Sequence
  Description of Artificial Sequence: Synthetic oligonucleotide
aaaccagacaacugcagcc

SEQ ID NO: 3169386 - RNA, 19 nt, Artificial Sequence
  Description of Artificial Sequence: Synthetic oligonucleotide
uaaauaaggagauagcaca

SEQ ID NO: 3169387 - RNA, 19 nt, Artificial Sequence
  Description of Artificial Sequence: Synthetic oligonucleotide
aauacauucagugugugug

SEQ ID NO: 3169388 - RNA, 19 nt, Artificial Sequence
  Description of Artificial Sequence: Synthetic oligonucleotide
uuagcguucaguuaaauaa

SEQ ID NO: 3169389 - RNA, 19 nt, Artificial Sequence
  Description of Artificial Sequence: Synthetic oligonucleotide
aaacauuggugacagcuac

SEQ ID NO: 3169390 - RNA, 19 nt, Artificial Sequence
  Description of Artificial Sequence: Synthetic oligonucleotide
aacgcaaaccaacagguag

SEQ ID NO: 3169391 - RNA, 19 nt, Artificial Sequence
  Description of Artificial Sequence: Synthetic oligonucleotide
aaugaaaucagaguugugu

SEQ ID NO: 3169392 - RNA, 19 nt, Artificial Sequence
  Description of Artificial Sequence: Synthetic oligonucleotide
uguacaagagauuucauuc

SEQ ID NO: 3169393 - RNA, 19 nt, Artificial Sequence
  Description of Artificial Sequence: Synthetic oligonucleotide
ugagaguuaaaacauuagc

SEQ ID NO: 3169394 - RNA, 19 nt, Artificial Sequence
  Description of Artificial Sequence: Synthetic oligonucleotide
caaagaacgauauuguuac

SEQ ID NO: 3169395 - RNA, 19 nt, Artificial Sequence
  Description of Artificial Sequence: Synthetic oligonucleotide
uauauagagaucauugagu

SEQ ID NO: 3169396 - RNA, 19 nt, Artificial Sequence
  Description of Artificial Sequence: Synthetic oligonucleotide
uuaaauaaggagauagcac

SEQ ID NO: 3169397 - RNA, 19 nt, Artificial Sequence
  Description of Artificial Sequence: Synthetic oligonucleotide
aaacuugccugacagcugg

SEQ ID NO: 3169398 - RNA, 19 nt, Artificial Sequence
  Description of Artificial Sequence: Synthetic oligonucleotide
aggaaauacauucagugug

SEQ ID NO: 3169399 - RNA, 19 nt, Artificial Sequence
  Description of Artificial Sequence: Synthetic oligonucleotide
uugguuguaaacauuggug

SEQ ID NO: 3169400 - RNA, 19 nt, Artificial Sequence
  Description of Artificial Sequence: Synthetic oligonucleotide
aauucuuauacagacauua

SEQ ID NO: 3169401 - RNA, 19 nt, Artificial Sequence
  Description of Artificial Sequence: Synthetic oligonucleotide
gauauuguuacaaauacaa

SEQ ID NO: 3169402 - RNA, 19 nt, Artificial Sequence
  Description of Artificial Sequence: Synthetic oligonucleotide
caauacuauacuuuucccg

SEQ ID NO: 3169403 - RNA, 19 nt, Artificial Sequence
  Description of Artificial Sequence: Synthetic oligonucleotide
aacauuagcaagagguggc

SEQ ID NO: 3169404 - RNA, 19 nt, Artificial Sequence
  Description of Artificial Sequence: Synthetic oligonucleotide
agaucauugaguuucgugu

SEQ ID NO: 3169405 - RNA, 19 nt, Artificial Sequence
  Description of Artificial Sequence: Synthetic oligonucleotide
ugucagaggaaauacauuc

SEQ ID NO: 3169406 - RNA, 19 nt, Artificial Sequence
  Description of Artificial Sequence: Synthetic oligonucleotide
gagauagcacauuaaauac

SEQ ID NO: 3169407 - RNA, 19 nt, Artificial Sequence
  Description of Artificial Sequence: Synthetic oligonucleotide
auaaagcugcucucuagcc

SEQ ID NO: 3169408 - RNA, 19 nt, Artificial Sequence
  Description of Artificial Sequence: Synthetic oligonucleotide
uucaguuaaauaaggagau

SEQ ID NO: 3169409 - RNA, 19 nt, Artificial Sequence
  Description of Artificial Sequence: Synthetic oligonucleotide
ugcgaguucauacuccagg

SEQ ID NO: 3169410 - RNA, 19 nt, Artificial Sequence
  Description of Artificial Sequence: Synthetic oligonucleotide
uuuacaguaagcgcuaaug

SEQ ID NO: 3169411 - RNA, 19 nt, Artificial Sequence
  Description of Artificial Sequence: Synthetic oligonucleotide
gaguucauacuccaggugc

SEQ ID NO: 3169412 - RNA, 19 nt, Artificial Sequence
  Description of Artificial Sequence: Synthetic oligonucleotide
ugguuguaaacauugguga

SEQ ID NO: 3169413 - RNA, 19 nt, Artificial Sequence
  Description of Artificial Sequence: Synthetic oligonucleotide
uguauacaaagaacgauau

SEQ ID NO: 3169414 - RNA, 19 nt, Artificial Sequence
  Description of Artificial Sequence: Synthetic oligonucleotide
uguagauauauuuuauuua

SEQ ID NO: 3169415 - RNA, 19 nt, Artificial Sequence
  Description of Artificial Sequence: Synthetic oligonucleotide
gagaguuaaaacauuagca

SEQ ID NO: 3169416 - RNA, 19 nt, Artificial Sequence
  Description of Artificial Sequence: Synthetic oligonucleotide
auacaucacaaccccaaac

SEQ ID NO: 3169417 - RNA, 19 nt, Artificial Sequence
  Description of Artificial Sequence: Synthetic oligonucleotide
aguuaaauaaggagauagc

SEQ ID NO: 3169418 - RNA, 19 nt, Artificial Sequence
  Description of Artificial Sequence: Synthetic oligonucleotide
ucaucagugugcagcaagg

SEQ ID NO: 3169419 - RNA, 19 nt, Artificial Sequence
  Description of Artificial Sequence: Synthetic oligonucleotide
uuucguguauacaaagaac

SEQ ID NO: 3169420 - RNA, 19 nt, Artificial Sequence
  Description of Artificial Sequence: Synthetic oligonucleotide
ugaccagacugucagagga

SEQ ID NO: 3169421 - RNA, 19 nt, Artificial Sequence
  Description of Artificial Sequence: Synthetic oligonucleotide
ugaaaucagaguugugugc

SEQ ID NO: 3169422 - RNA, 19 nt, Artificial Sequence
  Description of Artificial Sequence: Synthetic oligonucleotide
auauagagaucauugaguu

SEQ ID NO: 3169423 - RNA, 19 nt, Artificial Sequence
  Description of Artificial Sequence: Synthetic oligonucleotide
augaaaucagaguugugug

SEQ ID NO: 3169424 - RNA, 19 nt, Artificial Sequence
  Description of Artificial Sequence: Synthetic oligonucleotide
uucaucagugugcagcaag

SEQ ID NO: 3169425 - RNA, 19 nt, Artificial Sequence
  Description of Artificial Sequence: Synthetic oligonucleotide
uacaguaagcgcuaaugca

SEQ ID NO: 3169426 - RNA, 19 nt, Artificial Sequence
  Description of Artificial Sequence: Synthetic oligonucleotide
acaguaagcgcuaaugcac

SEQ ID NO: 3169427 - RNA, 19 nt, Artificial Sequence
  Description of Artificial Sequence: Synthetic oligonucleotide
uaagcgcuaaugcaccccg

SEQ ID NO: 3169428 - RNA, 19 nt, Artificial Sequence
  Description of Artificial Sequence: Synthetic oligonucleotide
uuguaaacauuggugacag

SEQ ID NO: 3169429 - RNA, 19 nt, Artificial Sequence
  Description of Artificial Sequence: Synthetic oligonucleotide
guuaaauaaggagauagca

SEQ ID NO: 3169430 - RNA, 19 nt, Artificial Sequence
  Description of Artificial Sequence: Synthetic oligonucleotide
uuucauucccacacgguca

SEQ ID NO: 3169431 - RNA, 19 nt, Artificial Sequence
  Description of Artificial Sequence: Synthetic oligonucleotide
aaguauguacaagagauuu

SEQ ID NO: 3169432 - RNA, 19 nt, Artificial Sequence
  Description of Artificial Sequence: Synthetic oligonucleotide
aaauacaauacuauacuuu

SEQ ID NO: 3169433 - RNA, 19 nt, Artificial Sequence
  Description of Artificial Sequence: Synthetic oligonucleotide
uggagggaaaaugaaauca

SEQ ID NO: 3169434 - RNA, 19 nt, Artificial Sequence
  Description of Artificial Sequence: Synthetic oligonucleotide
uuauuguugcagcaauucu

SEQ ID NO: 3169435 - RNA, 19 nt, Artificial Sequence
  Description of Artificial Sequence: Synthetic oligonucleotide
cuaaguauguacaagagau

SEQ ID NO: 3169436 - RNA, 19 nt, Artificial Sequence
  Description of Artificial Sequence: Synthetic oligonucleotide
aaugcaccccguuacagaa

SEQ ID NO: 3169437 - RNA, 19 nt, Artificial Sequence
  Description of Artificial Sequence: Synthetic oligonucleotide
guucaguuaaauaaggaga

SEQ ID NO: 3169438 - RNA, 19 nt, Artificial Sequence
  Description of Artificial Sequence: Synthetic oligonucleotide
uuauacagacauuagcguu

SEQ ID NO: 3169439 - RNA, 19 nt, Artificial Sequence
  Description of Artificial Sequence: Synthetic oligonucleotide
gaguuucguguauacaaag

SEQ ID NO: 3169440 - RNA, 19 nt, Artificial Sequence
  Description of Artificial Sequence: Synthetic oligonucleotide
aaaucagaguugugugcuc

SEQ ID NO: 3169441 - RNA, 19 nt, Artificial Sequence
  Description of Artificial Sequence: Synthetic oligonucleotide
ugugcuaaguauguacaag

SEQ ID NO: 3169442 - RNA, 19 nt, Artificial Sequence
  Description of Artificial Sequence: Synthetic oligonucleotide
gagaucauugaguuucgug

SEQ ID NO: 3169443 - RNA, 19 nt, Artificial Sequence
  Description of Artificial Sequence: Synthetic oligonucleotide
agugucaacauuccaggcu

SEQ ID NO: 3169444 - RNA, 19 nt, Artificial Sequence
  Description of Artificial Sequence: Synthetic oligonucleotide
ugacagcuacaccaguggg

SEQ ID NO: 3169445 - RNA, 19 nt, Artificial Sequence
  Description of Artificial Sequence: Synthetic oligonucleotide
aguaagcgcuaaugcaccc

SEQ ID NO: 3169446 - RNA, 19 nt, Artificial Sequence
  Description of Artificial Sequence: Synthetic oligonucleotide
ugugcagugucaacauucc

SEQ ID NO: 3169447 - RNA, 19 nt, Artificial Sequence
  Description of Artificial Sequence: Synthetic oligonucleotide
acggaggugaaacgcaaac

SEQ ID NO: 3169448 - RNA, 19 nt, Artificial Sequence
  Description of Artificial Sequence: Synthetic oligonucleotide
aaauacaucacaaccccaa

SEQ ID NO: 3169449 - RNA, 19 nt, Artificial Sequence
  Description of Artificial Sequence: Synthetic oligonucleotide
agggaaaaugaaaucagag

SEQ ID NO: 3169450 - RNA, 19 nt, Artificial Sequence
  Description of Artificial Sequence: Synthetic oligonucleotide
uaaauacaucacaacccca

SEQ ID NO: 3169451 - RNA, 19 nt, Artificial Sequence
  Description of Artificial Sequence: Synthetic oligonucleotide
ucguguauacaaagaacga

SEQ ID NO: 3169452 - RNA, 19 nt, Artificial Sequence
  Description of Artificial Sequence: Synthetic oligonucleotide
aaccgggaccgacagccgc

SEQ ID NO: 3169453 - RNA, 19 nt, Artificial Sequence
  Description of Artificial Sequence: Synthetic oligonucleotide
caaguggacccuaaccagg

SEQ ID NO: 3169454 - RNA, 19 nt, Artificial Sequence
  Description of Artificial Sequence: Synthetic oligonucleotide
caagagauuucauucccac

SEQ ID NO: 3169455 - RNA, 19 nt, Artificial Sequence
  Description of Artificial Sequence: Synthetic oligonucleotide
aacgauauuguuacaaaua

SEQ ID NO: 3169456 - RNA, 19 nt, Artificial Sequence
  Description of Artificial Sequence: Synthetic oligonucleotide
acuauacuuuucccgaugu

SEQ ID NO: 3169457 - RNA, 19 nt, Artificial Sequence
  Description of Artificial Sequence: Synthetic oligonucleotide
agccacggcacaaagaagg

SEQ ID NO: 3169458 - RNA, 19 nt, Artificial Sequence
  Description of Artificial Sequence: Synthetic oligonucleotide
uauacuuuucccgauguuu

SEQ ID NO: 3169459 - RNA, 19 nt, Artificial Sequence
  Description of Artificial Sequence: Synthetic oligonucleotide
auuagcaagagguggcccu

SEQ ID NO: 3169460 - RNA, 19 nt, Artificial Sequence
  Description of Artificial Sequence: Synthetic oligonucleotide
auaaggagauagcacauua

SEQ ID NO: 3169461 - RNA, 19 nt, Artificial Sequence
  Description of Artificial Sequence: Synthetic oligonucleotide
uugccugacagcugggucc

SEQ ID NO: 3169462 - RNA, 19 nt, Artificial Sequence
  Description of Artificial Sequence: Synthetic oligonucleotide
ggagauagcacauuaaaua

SEQ ID NO: 3169463 - RNA, 19 nt, Artificial Sequence
  Description of Artificial Sequence: Synthetic oligonucleotide
gugacagcuacaccagugg

SEQ ID NO: 3169464 - RNA, 19 nt, Artificial Sequence
  Description of Artificial Sequence: Synthetic oligonucleotide
uacaccaguggguggagag

SEQ ID NO: 3169465 - RNA, 19 nt, Artificial Sequence
  Description of Artificial Sequence: Synthetic oligonucleotide
ugcaccccguuacagaaug

SEQ ID NO: 3169466 - RNA, 19 nt, Artificial Sequence
  Description of Artificial Sequence: Synthetic oligonucleotide
ucccacacggucaucacac

SEQ ID NO: 3169467 - RNA, 19 nt, Artificial Sequence
  Description of Artificial Sequence: Synthetic oligonucleotide
aggugaaacgcaaaccaac

SEQ ID NO: 3169468 - RNA, 19 nt, Artificial Sequence
  Description of Artificial Sequence: Synthetic oligonucleotide
guuucguguauacaaagaa

SEQ ID NO: 3169469 - RNA, 19 nt, Artificial Sequence
  Description of Artificial Sequence: Synthetic oligonucleotide
uaaacauuggugacagcua

SEQ ID NO: 3169470 - RNA, 19 nt, Artificial Sequence
  Description of Artificial Sequence: Synthetic oligonucleotide
aagccugggaauaaagcug

SEQ ID NO: 3169471 - RNA, 19 nt, Artificial Sequence
  Description of Artificial Sequence: Synthetic oligonucleotide
agaacgauauuguuacaaa

SEQ ID NO: 3169472 - RNA, 19 nt, Artificial Sequence
  Description of Artificial Sequence: Synthetic oligonucleotide
aaagaaggugagggugggc

SEQ ID NO: 3169473 - RNA, 19 nt, Artificial Sequence
  Description of Artificial Sequence: Synthetic oligonucleotide
uaaggagauagcacauuaa

SEQ ID NO: 3169474 - RNA, 19 nt, Artificial Sequence
  Description of Artificial Sequence: Synthetic oligonucleotide
ucacguguagauauauuuu

SEQ ID NO: 3169475 - RNA, 19 nt, Artificial Sequence
  Description of Artificial Sequence: Synthetic oligonucleotide
aaguggacccuaaccaggg

SEQ ID NO: 3169476 - RNA, 19 nt, Artificial Sequence
  Description of Artificial Sequence: Synthetic oligonucleotide
gcagugucaacauuccagg

SEQ ID NO: 3169477 - RNA, 19 nt, Artificial Sequence
  Description of Artificial Sequence: Synthetic oligonucleotide
acgcaaaccaacagguagc

SEQ ID NO: 3169478 - RNA, 19 nt, Artificial Sequence
  Description of Artificial Sequence: Synthetic oligonucleotide
aaucagaguugugugcuca

SEQ ID NO: 3169479 - RNA, 19 nt, Artificial Sequence
  Description of Artificial Sequence: Synthetic oligonucleotide
aguauguacaagagauuuc

SEQ ID NO: 3169480 - RNA, 19 nt, Artificial Sequence
  Description of Artificial Sequence: Synthetic oligonucleotide
caguaagcgcuaaugcacc

SEQ ID NO: 3169481 - RNA, 19 nt, Artificial Sequence
  Description of Artificial Sequence: Synthetic oligonucleotide
uggagagaccugagcaggg

SEQ ID NO: 3169482 - RNA, 19 nt, Artificial Sequence
  Description of Artificial Sequence: Synthetic oligonucleotide
guaaacauuggugacagcu

SEQ ID NO: 3169483 - RNA, 19 nt, Artificial Sequence
  Description of Artificial Sequence: Synthetic oligonucleotide
gugaaacgcaaaccaacag

SEQ ID NO: 3169484 - RNA, 19 nt, Artificial Sequence
  Description of Artificial Sequence: Synthetic oligonucleotide
auaaauuucaaaugucacc

SEQ ID NO: 3169485 - RNA, 19 nt, Artificial Sequence
  Description of Artificial Sequence: Synthetic oligonucleotide
auuauugaguucuucuugc

SEQ ID NO: 3169486 - RNA, 19 nt, Artificial Sequence
  Description of Artificial Sequence: Synthetic oligonucleotide
aauuucaaaugucaccuuc

SEQ ID NO: 3169487 - RNA, 19 nt, Artificial Sequence
  Description of Artificial Sequence: Synthetic oligonucleotide
gacuugaucccuuuaaugg

SEQ ID NO: 3169488 - RNA, 19 nt, Artificial Sequence
  Description of Artificial Sequence: Synthetic oligonucleotide
uguggcaugagccaggaag

SEQ ID NO: 3169489 - RNA, 19 nt, Artificial Sequence
  Description of Artificial Sequence: Synthetic oligonucleotide
ucacagaaaaccaggaggg

SEQ ID NO: 3169490 - RNA, 19 nt, Artificial Sequence
  Description of Artificial Sequence: Synthetic oligonucleotide
ucauaaauuucaaauguca

SEQ ID NO: 3169491 - RNA, 19 nt, Artificial Sequence
  Description of Artificial Sequence: Synthetic oligonucleotide
aaagcgaaggaaugcaagg

SEQ ID NO: 3169492 - RNA, 19 nt, Artificial Sequence
  Description of Artificial Sequence: Synthetic oligonucleotide
guauccauucuucagaggg

SEQ ID NO: 3169493 - RNA, 19 nt, Artificial Sequence
  Description of Artificial Sequence: Synthetic oligonucleotide
uaaauuucaaaugucaccu

SEQ ID NO: 3169494 - RNA, 19 nt, Artificial Sequence
  Description of Artificial Sequence: Synthetic oligonucleotide
uucucguugacauugaacu

SEQ ID NO: 3169495 - RNA, 19 nt, Artificial Sequence
  Description of Artificial Sequence: Synthetic oligonucleotide
agagggacugaucuaaacc

SEQ ID NO: 3169496 - RNA, 19 nt, Artificial Sequence
  Description of Artificial Sequence: Synthetic oligonucleotide
uggaucauaaauuucaaau

SEQ ID NO: 3169497 - RNA, 19 nt, Artificial Sequence
  Description of Artificial Sequence: Synthetic oligonucleotide
acucucuucucucucaacc

SEQ ID NO: 3169498 - RNA, 19 nt, Artificial Sequence
  Description of Artificial Sequence: Synthetic oligonucleotide
cucacagaaaaccaggagg

SEQ ID NO: 3169499 - RNA, 19 nt, Artificial Sequence
  Description of Artificial Sequence: Synthetic oligonucleotide
ucauagaccacaaagcgaa

SEQ ID NO: 3169500 - RNA, 19 nt, Artificial Sequence
  Description of Artificial Sequence: Synthetic oligonucleotide
ucuucagagggacugaucu

SEQ ID NO: 3169501 - RNA, 19 nt, Artificial Sequence
  Description of Artificial Sequence: Synthetic oligonucleotide
gaacauguccuccucauag

SEQ ID NO: 3169502 - RNA, 19 nt, Artificial Sequence
  Description of Artificial Sequence: Synthetic oligonucleotide
uauugaguucuucuugccg

SEQ ID NO: 3169503 - RNA, 19 nt, Artificial Sequence
  Description of Artificial Sequence: Synthetic oligonucleotide
gauuauugaguucuucuug

SEQ ID NO: 3169504 - RNA, 19 nt, Artificial Sequence
  Description of Artificial Sequence: Synthetic oligonucleotide
cuaaacccugacuugaucc

SEQ ID NO: 3169505 - RNA, 19 nt, Artificial Sequence
  Description of Artificial Sequence: Synthetic oligonucleotide
cuuuaaugggguauguggc

SEQ ID NO: 3169506 - RNA, 19 nt, Artificial Sequence
  Description of Artificial Sequence: Synthetic oligonucleotide
cauaaauuucaaaugucac

SEQ ID NO: 3169507 - RNA, 19 nt, Artificial Sequence
  Description of Artificial Sequence: Synthetic oligonucleotide
gagggacugaucuaaaccc

SEQ ID NO: 3169508 - RNA, 19 nt, Artificial Sequence
  Description of Artificial Sequence: Synthetic oligonucleotide
acuugaucccuuuaauggg

SEQ ID NO: 3169509 - RNA, 19 nt, Artificial Sequence
  Description of Artificial Sequence: Synthetic oligonucleotide
uugaacuccuucaccaagg

SEQ ID NO: 3169510 - RNA, 19 nt, Artificial Sequence
  Description of Artificial Sequence: Synthetic oligonucleotide
uccucauagaccacaaagc

SEQ ID NO: 3169511 - RNA, 19 nt, Artificial Sequence
  Description of Artificial Sequence: Synthetic oligonucleotide
uugacauugaacuccuuca

SEQ ID NO: 3169512 - RNA, 19 nt, Artificial Sequence
  Description of Artificial Sequence: Synthetic oligonucleotide
uuccucuucacacuccagg

SEQ ID NO: 3169513 - RNA, 19 nt, Artificial Sequence
  Description of Artificial Sequence: Synthetic oligonucleotide
gaucauaaauuucaaaugu

SEQ ID NO: 3169514 - RNA, 19 nt, Artificial Sequence
  Description of Artificial Sequence: Synthetic oligonucleotide
gaaugcaagguuuggauca

SEQ ID NO: 3169515 - RNA, 19 nt, Artificial Sequence
  Description of Artificial Sequence: Synthetic oligonucleotide
acauugaacuccuucacca

SEQ ID NO: 3169516 - RNA, 19 nt, Artificial Sequence
  Description of Artificial Sequence: Synthetic oligonucleotide
cuugaucccuuuaaugggg

SEQ ID NO: 3169517 - RNA, 19 nt, Artificial Sequence
  Description of Artificial Sequence: Synthetic oligonucleotide
ucuucacacuccaggaccg

SEQ ID NO: 3169518 - RNA, 19 nt, Artificial Sequence
  Description of Artificial Sequence: Synthetic oligonucleotide
auugaguucuucuugccgu

SEQ ID NO: 3169519 - RNA, 19 nt, Artificial Sequence
  Description of Artificial Sequence: Synthetic oligonucleotide
caucucacagaaaaccagg

SEQ ID NO: 3169520 - RNA, 19 nt, Artificial Sequence
  Description of Artificial Sequence: Synthetic oligonucleotide
cuccucauagaccacaaag

SEQ ID NO: 3169521 - RNA, 19 nt, Artificial Sequence
  Description of Artificial Sequence: Synthetic oligonucleotide
acuguauccauucuucaga

SEQ ID NO: 3169522 - RNA, 19 nt, Artificial Sequence
  Description of Artificial Sequence: Synthetic oligonucleotide
uucacuguauccauucuuc

SEQ ID NO: 3169523 - RNA, 19 nt, Artificial Sequence
  Description of Artificial Sequence: Synthetic oligonucleotide
uuuaaugggguauguggca

SEQ ID NO: 3169524 - RNA, 19 nt, Artificial Sequence
  Description of Artificial Sequence: Synthetic oligonucleotide
aacuccuucaccaaggcau

SEQ ID NO: 3169525 - RNA, 19 nt, Artificial Sequence
  Description of Artificial Sequence: Synthetic oligonucleotide
ucucacagaaaaccaggag

SEQ ID NO: 3169526 - RNA, 19 nt, Artificial Sequence
  Description of Artificial Sequence: Synthetic oligonucleotide
ugacuugaucccuuuaaug

SEQ ID NO: 3169527 - RNA, 19 nt, Artificial Sequence
  Description of Artificial Sequence: Synthetic oligonucleotide
agggaagccaacucgaugu

SEQ ID NO: 3169528 - RNA, 19 nt, Artificial Sequence
  Description of Artificial Sequence: Synthetic oligonucleotide
acauguccuccucauagac

SEQ ID NO: 3169529 - RNA, 19 nt, Artificial Sequence
  Description of Artificial Sequence: Synthetic oligonucleotide
guagaguuccucuucacac

SEQ ID NO: 3169530 - RNA, 19 nt, Artificial Sequence
  Description of Artificial Sequence: Synthetic oligonucleotide
ggaucauaaauuucaaaug

SEQ ID NO: 3169531 - RNA, 19 nt, Artificial Sequence
  Description of Artificial Sequence: Synthetic oligonucleotide
auguccuccucauagacca

SEQ ID NO: 3169532 - RNA, 19 nt, Artificial Sequence
  Description of Artificial Sequence: Synthetic oligonucleotide
aaggcaucgcgguuggcuc

SEQ ID NO: 3169533 - RNA, 19 nt, Artificial Sequence
  Description of Artificial Sequence: Synthetic oligonucleotide
aagagcugauuauugaguu

SEQ ID NO: 3169534 - RNA, 19 nt, Artificial Sequence
  Description of Artificial Sequence: Synthetic oligonucleotide
aaaaccaggagggaagcca

SEQ ID NO: 3169535 - RNA, 19 nt, Artificial Sequence
  Description of Artificial Sequence: Synthetic oligonucleotide
guuuggaucauaaauuuca

SEQ ID NO: 3169536 - RNA, 19 nt, Artificial Sequence
  Description of Artificial Sequence: Synthetic oligonucleotide
gugugugucguacaggaag

SEQ ID NO: 3169537 - RNA, 19 nt, Artificial Sequence
  Description of Artificial Sequence: Synthetic oligonucleotide
aaguuggggucacugaaca

SEQ ID NO: 3169538 - RNA, 19 nt, Artificial Sequence
  Description of Artificial Sequence: Synthetic oligonucleotide
ucaaccuccgguuacacuu

SEQ ID NO: 3169539 - RNA, 19 nt, Artificial Sequence
  Description of Artificial Sequence: Synthetic oligonucleotide
acaggaggaguagaguucc

SEQ ID NO: 3169540 - RNA, 19 nt, Artificial Sequence
  Description of Artificial Sequence: Synthetic oligonucleotide
ucaguuggcgacaggagga

SEQ ID NO: 3169541 - RNA, 19 nt, Artificial Sequence
  Description of Artificial Sequence: Synthetic oligonucleotide
auugaacuccuucaccaag

SEQ ID NO: 3169542 - RNA, 19 nt, Artificial Sequence
  Description of Artificial Sequence: Synthetic oligonucleotide
ugagccaggaaguuggggu

SEQ ID NO: 3169543 - RNA, 19 nt, Artificial Sequence
  Description of Artificial Sequence: Synthetic oligonucleotide
ucuggugugugucguacag

SEQ ID NO: 3169544 - RNA, 19 nt, Artificial Sequence
  Description of Artificial Sequence: Synthetic oligonucleotide
aucauaaauuucaaauguc

SEQ ID NO: 3169545 - RNA, 19 nt, Artificial Sequence
  Description of Artificial Sequence: Synthetic oligonucleotide
uagaccacaaagcgaagga

SEQ ID NO: 3169546 - RNA, 19 nt, Artificial Sequence
  Description of Artificial Sequence: Synthetic oligonucleotide
aacucgaugucuucacugu

SEQ ID NO: 3169547 - RNA, 19 nt, Artificial Sequence
  Description of Artificial Sequence: Synthetic oligonucleotide
ugaucuaaacccugacuug

SEQ ID NO: 3169548 - RNA, 19 nt, Artificial Sequence
  Description of Artificial Sequence: Synthetic oligonucleotide
agaguuccucuucacacuc

SEQ ID NO: 3169549 - RNA, 19 nt, Artificial Sequence
  Description of Artificial Sequence: Synthetic oligonucleotide
ccuuuaaugggguaugugg

SEQ ID NO: 3169550 - RNA, 19 nt, Artificial Sequence
  Description of Artificial Sequence: Synthetic oligonucleotide
gacauugaacuccuucacc

SEQ ID NO: 3169551 - RNA, 19 nt, Artificial Sequence
  Description of Artificial Sequence: Synthetic oligonucleotide
cagaaaaccaggagggaag

SEQ ID NO: 3169552 - RNA, 19 nt, Artificial Sequence
  Description of Artificial Sequence: Synthetic oligonucleotide
aguucuucuugccgucucc

SEQ ID NO: 3169553 - RNA, 19 nt, Artificial Sequence
  Description of Artificial Sequence: Synthetic oligonucleotide
uaaacccugacuugauccc

SEQ ID NO: 3169554 - RNA, 19 nt, Artificial Sequence
  Description of Artificial Sequence: Synthetic oligonucleotide
caaagcgaaggaaugcaag

SEQ ID NO: 3169555 - RNA, 19 nt, Artificial Sequence
  Description of Artificial Sequence: Synthetic oligonucleotide
ugugugucguacaggaaga

SEQ ID NO: 3169556 - RNA, 19 nt, Artificial Sequence
  Description of Artificial Sequence: Synthetic oligonucleotide
uugccgucuccucaguugg

SEQ ID NO: 3169557 - RNA, 19 nt, Artificial Sequence
  Description of Artificial Sequence: Synthetic oligonucleotide
cucuucacacuccaggacc

SEQ ID NO: 3169558 - RNA, 19 nt, Artificial Sequence
  Description of Artificial Sequence: Synthetic oligonucleotide
cucguugacauugaacucc

SEQ ID NO: 3169559 - RNA, 19 nt, Artificial Sequence
  Description of Artificial Sequence: Synthetic oligonucleotide
agaaaaccaggagggaagc

SEQ ID NO: 3169560 - RNA, 19 nt, Artificial Sequence
  Description of Artificial Sequence: Synthetic oligonucleotide
uuuggaucauaaauuucaa

SEQ ID NO: 3169561 - RNA, 19 nt, Artificial Sequence
  Description of Artificial Sequence: Synthetic oligonucleotide
auagaccacaaagcgaagg

SEQ ID NO: 3169562 - RNA, 19 nt, Artificial Sequence
  Description of Artificial Sequence: Synthetic oligonucleotide
uggugugugucguacagga

SEQ ID NO: 3169563 - RNA, 19 nt, Artificial Sequence
  Description of Artificial Sequence: Synthetic oligonucleotide
ucuucuugccgucuccuca

SEQ ID NO: 3169564 - RNA, 19 nt, Artificial Sequence
  Description of Artificial Sequence: Synthetic oligonucleotide
aucgcgguuggcuccacgc

SEQ ID NO: 3169565 - RNA, 19 nt, Artificial Sequence
  Description of Artificial Sequence: Synthetic oligonucleotide
aagguuuggaucauaaauu

SEQ ID NO: 3169566 - RNA, 19 nt, Artificial Sequence
  Description of Artificial Sequence: Synthetic oligonucleotide
ucuucucucucaaccuccg

SEQ ID NO: 3169567 - RNA, 19 nt, Artificial Sequence
  Description of Artificial Sequence: Synthetic oligonucleotide
cucaguuggcgacaggagg

SEQ ID NO: 3169568 - RNA, 19 nt, Artificial Sequence
  Description of Artificial Sequence: Synthetic oligonucleotide
uuauugaguucuucuugcc

SEQ ID NO: 3169569 - RNA, 19 nt, Artificial Sequence
  Description of Artificial Sequence: Synthetic oligonucleotide
ugggguauguggcaugagc

SEQ ID NO: 3169570 - RNA, 19 nt, Artificial Sequence
  Description of Artificial Sequence: Synthetic oligonucleotide
ugacauugaacuccuucac

SEQ ID NO: 3169571 - RNA, 19 nt, Artificial Sequence
  Description of Artificial Sequence: Synthetic oligonucleotide
gaugucuucacuguaucca

SEQ ID NO: 3169572 - RNA, 19 nt, Artificial Sequence
  Description of Artificial Sequence: Synthetic oligonucleotide
aggaguagaguuccucuuc

SEQ ID NO: 3169573 - RNA, 19 nt, Artificial Sequence
  Description of Artificial Sequence: Synthetic oligonucleotide
agagcugauuauugaguuc

SEQ ID NO: 3169574 - RNA, 19 nt, Artificial Sequence
  Description of Artificial Sequence: Synthetic oligonucleotide
ugauuauugaguucuucuu

SEQ ID NO: 3169575 - RNA, 19 nt, Artificial Sequence
  Description of Artificial Sequence: Synthetic oligonucleotide
uucucucucaaccuccggu

SEQ ID NO: 3169576 - RNA, 19 nt, Artificial Sequence
  Description of Artificial Sequence: Synthetic oligonucleotide
guugacauugaacuccuuc

SEQ ID NO: 3169577 - RNA, 19 nt, Artificial Sequence
  Description of Artificial Sequence: Synthetic oligonucleotide
cuguauccauucuucagag

SEQ ID NO: 3169578 - RNA, 19 nt, Artificial Sequence
  Description of Artificial Sequence: Synthetic oligonucleotide
aguagaguuccucuucaca

SEQ ID NO: 3169579 - RNA, 19 nt, Artificial Sequence
  Description of Artificial Sequence: Synthetic oligonucleotide
uguauccauucuucagagg

SEQ ID NO: 3169580 - RNA, 19 nt, Artificial Sequence
  Description of Artificial Sequence: Synthetic oligonucleotide
uucaccaaggcaucgcggu

SEQ ID NO: 3169581 - RNA, 19 nt, Artificial Sequence
  Description of Artificial Sequence: Synthetic oligonucleotide
acugaucuaaacccugacu

SEQ ID NO: 3169582 - RNA, 19 nt, Artificial Sequence
  Description of Artificial Sequence: Synthetic oligonucleotide
uuacacuucuccugguaca

SEQ ID NO: 3169583 - RNA, 19 nt, Artificial Sequence
  Description of Artificial Sequence: Synthetic oligonucleotide
uccgguuacacuucuccug

SEQ ID NO: 3169584 - RNA, 19 nt, Artificial Sequence
  Description of Artificial Sequence: Synthetic oligonucleotide
aguaugaacucucugaugg

SEQ ID NO: 3169585 - RNA, 19 nt, Artificial Sequence
  Description of Artificial Sequence: Synthetic oligonucleotide
auuccugacaacuauaagg

SEQ ID NO: 3169586 - RNA, 19 nt, Artificial Sequence
  Description of Artificial Sequence: Synthetic oligonucleotide
uaaguugugagucauaugu

SEQ ID NO: 3169587 - RNA, 19 nt, Artificial Sequence
  Description of Artificial Sequence: Synthetic oligonucleotide
uaaaagaugugucacauuc

SEQ ID NO: 3169588 - RNA, 19 nt, Artificial Sequence
  Description of Artificial Sequence: Synthetic oligonucleotide
aguaugaacuauuugaugu

SEQ ID NO: 3169589 - RNA, 19 nt, Artificial Sequence
  Description of Artificial Sequence: Synthetic oligonucleotide
uuuaguaugaacucucuga

SEQ ID NO: 3169590 - RNA, 19 nt, Artificial Sequence
  Description of Artificial Sequence: Synthetic oligonucleotide
uccaguaugaacuauuuga

SEQ ID NO: 3169591 - RNA, 19 nt, Artificial Sequence
  Description of Artificial Sequence: Synthetic oligonucleotide
auuuguaaggucucucucc

SEQ ID NO: 3169592 - RNA, 19 nt, Artificial Sequence
  Description of Artificial Sequence: Synthetic oligonucleotide
ucuagcuuuguuuugaugu

SEQ ID NO: 3169593 - RNA, 19 nt, Artificial Sequence
  Description of Artificial Sequence: Synthetic oligonucleotide
auuccuuacauuuguaagg

SEQ ID NO: 3169594 - RNA, 19 nt, Artificial Sequence
  Description of Artificial Sequence: Synthetic oligonucleotide
uauguaaaggauuugucac

SEQ ID NO: 3169595 - RNA, 19 nt, Artificial Sequence
  Description of Artificial Sequence: Synthetic oligonucleotide
ucucucuuuaguaugaacu

SEQ ID NO: 3169596 - RNA, 19 nt, Artificial Sequence
  Description of Artificial Sequence: Synthetic oligonucleotide
auucuuugcauuuguaagg

SEQ ID NO: 3169597 - RNA, 19 nt, Artificial Sequence
  Description of Artificial Sequence: Synthetic oligonucleotide
uaaaggauuugucacauuc

SEQ ID NO: 3169598 - RNA, 19 nt, Artificial Sequence
  Description of Artificial Sequence: Synthetic oligonucleotide
aaagaugugucacauuccu

SEQ ID NO: 3169599 - RNA, 19 nt, Artificial Sequence
  Description of Artificial Sequence: Synthetic oligonucleotide
ucucucuccaguaugaacu

SEQ ID NO: 3169600 - RNA, 19 nt, Artificial Sequence
  Description of Artificial Sequence: Synthetic oligonucleotide
auauguaaaggauuuguca

SEQ ID NO: 3169601 - RNA, 19 nt, Artificial Sequence
  Description of Artificial Sequence: Synthetic oligonucleotide
cauucuuugcauuuguaag

SEQ ID NO: 3169602 - RNA, 19 nt, Artificial Sequence
  Description of Artificial Sequence: Synthetic oligonucleotide
aaaggauuugucacauucc

SEQ ID NO: 3169603 - RNA, 19 nt, Artificial Sequence
  Description of Artificial Sequence: Synthetic oligonucleotide
uuccugacaacuauaaggu

SEQ ID NO: 3169604 - RNA, 19 nt, Artificial Sequence
  Description of Artificial Sequence: Synthetic oligonucleotide
aaggauuugucacauuccu

SEQ ID NO: 3169605 - RNA, 19 nt, Artificial Sequence
  Description of Artificial Sequence: Synthetic oligonucleotide
aaaagaugugucacauucc

SEQ ID NO: 3169606 - RNA, 19 nt, Artificial Sequence
  Description of Artificial Sequence: Synthetic oligonucleotide
uugugagucauauguaaag

SEQ ID NO: 3169607 - RNA, 19 nt, Artificial Sequence
  Description of Artificial Sequence: Synthetic oligonucleotide
agaugugucacauuccuga

SEQ ID NO: 3169608 - RNA, 19 nt, Artificial Sequence
  Description of Artificial Sequence: Synthetic oligonucleotide
ugugagucauauguaaagg

SEQ ID NO: 3169609 - RNA, 19 nt, Artificial Sequence
  Description of Artificial Sequence: Synthetic oligonucleotide
ugugucacauuccugacaa

SEQ ID NO: 3169610 - RNA, 19 nt, Artificial Sequence
  Description of Artificial Sequence: Synthetic oligonucleotide
ucugauggcuucuaaguug

SEQ ID NO: 3169611 - RNA, 19 nt, Artificial Sequence
  Description of Artificial Sequence: Synthetic oligonucleotide
acaacuauaaggucucucu

SEQ ID NO: 3169612 - RNA, 19 nt, Artificial Sequence
  Description of Artificial Sequence: Synthetic oligonucleotide
uuuucacacauucuuugca

SEQ ID NO: 3169613 - RNA, 19 nt, Artificial Sequence
  Description of Artificial Sequence: Synthetic oligonucleotide
uauaaggucucucuuuagu

SEQ ID NO: 3169614 - RNA, 19 nt, Artificial Sequence
  Description of Artificial Sequence: Synthetic oligonucleotide
cauuccuuacauuuguaag

SEQ ID NO: 3169615 - RNA, 19 nt, Artificial Sequence
  Description of Artificial Sequence: Synthetic oligonucleotide
uuuguuuugaugugucuac

SEQ ID NO: 3169616 - RNA, 19 nt, Artificial Sequence
  Description of Artificial Sequence: Synthetic oligonucleotide
uuaguaugaacucucugau

SEQ ID NO: 3169617 - RNA, 19 nt, Artificial Sequence
  Description of Artificial Sequence: Synthetic oligonucleotide
uuuguaaggucucucucca

SEQ ID NO: 3169618 - RNA, 19 nt, Artificial Sequence
  Description of Artificial Sequence: Synthetic oligonucleotide
uuugucacauuccuuacau

SEQ ID NO: 3169619 - RNA, 19 nt, Artificial Sequence
  Description of Artificial Sequence: Synthetic oligonucleotide
ugagucauauguaaaggau

SEQ ID NO: 3169620 - RNA, 19 nt, Artificial Sequence
  Description of Artificial Sequence: Synthetic oligonucleotide
aaggucucucuuuaguaug

SEQ ID NO: 3169621 - RNA, 19 nt, Artificial Sequence
  Description of Artificial Sequence: Synthetic oligonucleotide
ugucacauuccuuacauuu

SEQ ID NO: 3169622 - RNA, 19 nt, Artificial Sequence
  Description of Artificial Sequence: Synthetic oligonucleotide
ucauauguaaaggauuugu

SEQ ID NO: 3169623 - RNA, 19 nt, Artificial Sequence
  Description of Artificial Sequence: Synthetic oligonucleotide
auggcuucuaaguugugag

SEQ ID NO: 3169624 - RNA, 19 nt, Artificial Sequence
  Description of Artificial Sequence: Synthetic oligonucleotide
ucucugauggcuucuaagu

SEQ ID NO: 3169625 - RNA, 19 nt, Artificial Sequence
  Description of Artificial Sequence: Synthetic oligonucleotide
uguaaggucucucuccagu

SEQ ID NO: 3169626 - RNA, 19 nt, Artificial Sequence
  Description of Artificial Sequence: Synthetic oligonucleotide
aacuauaaggucucucuuu

SEQ ID NO: 3169627 - RNA, 19 nt, Artificial Sequence
  Description of Artificial Sequence: Synthetic oligonucleotide
ucacauuccuuacauuugu

SEQ ID NO: 3169628 - RNA, 19 nt, Artificial Sequence
  Description of Artificial Sequence: Synthetic oligonucleotide
uuuucuagcuuuguuuuga

SEQ ID NO: 3169629 - RNA, 19 nt, Artificial Sequence
  Description of Artificial Sequence: Synthetic oligonucleotide
cauauguaaaggauuuguc

SEQ ID NO: 3169630 - RNA, 19 nt, Artificial Sequence
  Description of Artificial Sequence: Synthetic oligonucleotide
aaggucucucuccaguaug

SEQ ID NO: 3169631 - RNA, 19 nt, Artificial Sequence
  Description of Artificial Sequence: Synthetic oligonucleotide
ugucacauuccugacaacu

SEQ ID NO: 3169632 - RNA, 19 nt, Artificial Sequence
  Description of Artificial Sequence: Synthetic oligonucleotide
aguugugagucauauguaa

SEQ ID NO: 3169633 - RNA, 19 nt, Artificial Sequence
  Description of Artificial Sequence: Synthetic oligonucleotide
uuugcauuuguaaggucuc

SEQ ID NO: 3169634 - RNA, 19 nt, Artificial Sequence
  Description of Artificial Sequence: Synthetic oligonucleotide
ucuaaguugugagucauau

SEQ ID NO: 3169635 - RNA, 19 nt, Artificial Sequence
  Description of Artificial Sequence: Synthetic oligonucleotide
acauucuuugcauuuguaa

SEQ ID NO: 3169636 - RNA, 19 nt, Artificial Sequence
  Description of Artificial Sequence: Synthetic oligonucleotide
ucuuuaguaugaacucucu

SEQ ID NO: 3169637 - RNA, 19 nt, Artificial Sequence
  Description of Artificial Sequence: Synthetic oligonucleotide
auguaaaggauuugucaca

SEQ ID NO: 3169638 - RNA, 19 nt, Artificial Sequence
  Description of Artificial Sequence: Synthetic oligonucleotide
cucucuuuaguaugaacuc

SEQ ID NO: 3169639 - RNA, 19 nt, Artificial Sequence
  Description of Artificial Sequence: Synthetic oligonucleotide
uuucacacauucuuugcau

SEQ ID NO: 3169640 - RNA, 19 nt, Artificial Sequence
  Description of Artificial Sequence: Synthetic oligonucleotide
cucuuuaguaugaacucuc

SEQ ID NO: 3169641 - RNA, 19 nt, Artificial Sequence
  Description of Artificial Sequence: Synthetic oligonucleotide
uaaggucucucuuuaguau

SEQ ID NO: 3169642 - RNA, 19 nt, Artificial Sequence
  Description of Artificial Sequence: Synthetic oligonucleotide
acuauaaggucucucuuua

SEQ ID NO: 3169643 - RNA, 19 nt, Artificial Sequence
  Description of Artificial Sequence: Synthetic oligonucleotide
uuccuuacauuuguaaggu

SEQ ID NO: 3169644 - RNA, 19 nt, Artificial Sequence
  Description of Artificial Sequence: Synthetic oligonucleotide
uaugaacucucugauggcu

SEQ ID NO: 3169645 - RNA, 19 nt, Artificial Sequence
  Description of Artificial Sequence: Synthetic oligonucleotide
uguaaaggauuugucacau

SEQ ID NO: 3169646 - RNA, 19 nt, Artificial Sequence
  Description of Artificial Sequence: Synthetic oligonucleotide
gauuugucacauuccuuac

SEQ ID NO: 3169647 - RNA, 19 nt, Artificial Sequence
  Description of Artificial Sequence: Synthetic oligonucleotide
uucuuugcauuuguaaggu

SEQ ID NO: 3169648 - RNA, 19 nt, Artificial Sequence
  Description of Artificial Sequence: Synthetic oligonucleotide
cuagcuuuguuuugaugug

SEQ ID NO: 3169649 - RNA, 19 nt, Artificial Sequence
  Description of Artificial Sequence: Synthetic oligonucleotide
ucacauuccugacaacuau

SEQ ID NO: 3169650 - RNA, 19 nt, Artificial Sequence
  Description of Artificial Sequence: Synthetic oligonucleotide
auaaggucucucuuuagua

SEQ ID NO: 3169651 - RNA, 19 nt, Artificial Sequence
  Description of Artificial Sequence: Synthetic oligonucleotide
cuuuaguaugaacucucug

SEQ ID NO: 3169652 - RNA, 19 nt, Artificial Sequence
  Description of Artificial Sequence: Synthetic oligonucleotide
cugacaacuauaaggucuc

SEQ ID NO: 3169653 - RNA, 19 nt, Artificial Sequence
  Description of Artificial Sequence: Synthetic oligonucleotide
ucucuuuaguaugaacucu

SEQ ID NO: 3169654 - RNA, 19 nt, Artificial Sequence
  Description of Artificial Sequence: Synthetic oligonucleotide
acauuccuuacauuuguaa

SEQ ID NO: 3169655 - RNA, 19 nt, Artificial Sequence
  Description of Artificial Sequence: Synthetic oligonucleotide
uaguaugaacucucugaug

SEQ ID NO: 3169656 - RNA, 19 nt, Artificial Sequence
  Description of Artificial Sequence: Synthetic oligonucleotide
caguaugaacuauuugaug

SEQ ID NO: 3169657 - RNA, 19 nt, Artificial Sequence
  Description of Artificial Sequence: Synthetic oligonucleotide
gugagucauauguaaagga

SEQ ID NO: 3169658 - RNA, 19 nt, Artificial Sequence
  Description of Artificial Sequence: Synthetic oligonucleotide
auuugucacauuccuuaca

SEQ ID NO: 3169659 - RNA, 19 nt, Artificial Sequence
  Description of Artificial Sequence: Synthetic oligonucleotide
cuuugcauuuguaaggucu

SEQ ID NO: 3169660 - RNA, 19 nt, Artificial Sequence
  Description of Artificial Sequence: Synthetic oligonucleotide
cucucugauggcuucuaag

SEQ ID NO: 3169661 - RNA, 19 nt, Artificial Sequence
  Description of Artificial Sequence: Synthetic oligonucleotide
gaugugucacauuccugac

SEQ ID NO: 3169662 - RNA, 19 nt, Artificial Sequence
  Description of Artificial Sequence: Synthetic oligonucleotide
uucuagcuuuguuuugaug

SEQ ID NO: 3169663 - RNA, 19 nt, Artificial Sequence
  Description of Artificial Sequence: Synthetic oligonucleotide
cuauaaggucucucuuuag

SEQ ID NO: 3169664 - RNA, 19 nt, Artificial Sequence
  Description of Artificial Sequence: Synthetic oligonucleotide
cauuuguaaggucucucuc

SEQ ID NO: 3169665 - RNA, 19 nt, Artificial Sequence
  Description of Artificial Sequence: Synthetic oligonucleotide
agucauauguaaaggauuu

SEQ ID NO: 3169666 - RNA, 19 nt, Artificial Sequence
  Description of Artificial Sequence: Synthetic oligonucleotide
ucuccaguaugaacuauuu

SEQ ID NO: 3169667 - RNA, 19 nt, Artificial Sequence
  Description of Artificial Sequence: Synthetic oligonucleotide
ucacacauucuuugcauuu

SEQ ID NO: 3169668 - RNA, 19 nt, Artificial Sequence
  Description of Artificial Sequence: Synthetic oligonucleotide
uaugaacuauuugauguuu

SEQ ID NO: 3169669 - RNA, 19 nt, Artificial Sequence
  Description of Artificial Sequence: Synthetic oligonucleotide
acacauucuuugcauuugu

SEQ ID NO: 3169670 - RNA, 19 nt, Artificial Sequence
  Description of Artificial Sequence: Synthetic oligonucleotide
ggauuugucacauuccuua

SEQ ID NO: 3169671 - RNA, 19 nt, Artificial Sequence
  Description of Artificial Sequence: Synthetic oligonucleotide
ugaacucucugauggcuuc

SEQ ID NO: 3169672 - RNA, 19 nt, Artificial Sequence
  Description of Artificial Sequence: Synthetic oligonucleotide
cuaaguugugagucauaug

SEQ ID NO: 3169673 - RNA, 19 nt, Artificial Sequence
  Description of Artificial Sequence: Synthetic oligonucleotide
cauuccugacaacuauaag

SEQ ID NO: 3169674 - RNA, 19 nt, Artificial Sequence
  Description of Artificial Sequence: Synthetic oligonucleotide
guaugaacucucugauggc

SEQ ID NO: 3169675 - RNA, 19 nt, Artificial Sequence
  Description of Artificial Sequence: Synthetic oligonucleotide
gauggcuucuaaguuguga

SEQ ID NO: 3169676 - RNA, 19 nt, Artificial Sequence
  Description of Artificial Sequence: Synthetic oligonucleotide
agcuuuguuuugauguguc

SEQ ID NO: 3169677 - RNA, 19 nt, Artificial Sequence
  Description of Artificial Sequence: Synthetic oligonucleotide
uaaggucucucuccaguau

SEQ ID NO: 3169678 - RNA, 19 nt, Artificial Sequence
  Description of Artificial Sequence: Synthetic oligonucleotide
uuguuuugaugugucuaca

SEQ ID NO: 3169679 - RNA, 19 nt, Artificial Sequence
  Description of Artificial Sequence: Synthetic oligonucleotide
gucacauuccuuacauuug

SEQ ID NO: 3169680 - RNA, 19 nt, Artificial Sequence
  Description of Artificial Sequence: Synthetic oligonucleotide
aagaugugucacauuccug

SEQ ID NO: 3169681 - RNA, 19 nt, Artificial Sequence
  Description of Artificial Sequence: Synthetic oligonucleotide
uucacacauucuuugcauu

SEQ ID NO: 3169682 - RNA, 19 nt, Artificial Sequence
  Description of Artificial Sequence: Synthetic oligonucleotide
augugucacauuccugaca

SEQ ID NO: 3169683 - RNA, 19 nt, Artificial Sequence
  Description of Artificial Sequence: Synthetic oligonucleotide
uuguaaggucucucuccag

SEQ ID NO: 3169684 - RNA, 19 nt, Artificial Sequence
  Description of Artificial Sequence: Synthetic oligonucleotide
auauaaaaugcacugggcc

SEQ ID NO: 3169685 - RNA, 19 nt, Artificial Sequence
  Description of Artificial Sequence: Synthetic oligonucleotide
gaauauaaaaugcacuggg

SEQ ID NO: 3169686 - RNA, 19 nt, Artificial Sequence
  Description of Artificial Sequence: Synthetic oligonucleotide
ugugaugugacauugauuc

SEQ ID NO: 3169687 - RNA, 19 nt, Artificial Sequence
  Description of Artificial Sequence: Synthetic oligonucleotide
uaaagagaauauaaaaugc

SEQ ID NO: 3169688 - RNA, 19 nt, Artificial Sequence
  Description of Artificial Sequence: Synthetic oligonucleotide
guaaagagaauauaaaaug

SEQ ID NO: 3169689 - RNA, 19 nt, Artificial Sequence
  Description of Artificial Sequence: Synthetic oligonucleotide
gagaauauaaaaugcacug

SEQ ID NO: 3169690 - RNA, 19 nt, Artificial Sequence
  Description of Artificial Sequence: Synthetic oligonucleotide
uguaaagagaauauaaaau

SEQ ID NO: 3169691 - RNA, 19 nt, Artificial Sequence
  Description of Artificial Sequence: Synthetic oligonucleotide
uguacguagauaccgaugc

SEQ ID NO: 3169692 - RNA, 19 nt, Artificial Sequence
  Description of Artificial Sequence: Synthetic oligonucleotide
aauauaaaaugcacugggc

SEQ ID NO: 3169693 - RNA, 19 nt, Artificial Sequence
  Description of Artificial Sequence: Synthetic oligonucleotide
aagagaauauaaaaugcac

SEQ ID NO: 3169694 - RNA, 19 nt, Artificial Sequence
  Description of Artificial Sequence: Synthetic oligonucleotide
aucuccuguacguagauac

SEQ ID NO: 3169695 - RNA, 19 nt, Artificial Sequence
  Description of Artificial Sequence: Synthetic oligonucleotide
uauaaaaugcacugggccc

SEQ ID NO: 3169696 - RNA, 19 nt, Artificial Sequence
  Description of Artificial Sequence: Synthetic oligonucleotide
aaguacacauucuucagug

SEQ ID NO: 3169697 - RNA, 19 nt, Artificial Sequence
  Description of Artificial Sequence: Synthetic oligonucleotide
ucaaagagcaggaaguaca

SEQ ID NO: 3169698 - RNA, 19 nt, Artificial Sequence
  Description of Artificial Sequence: Synthetic oligonucleotide
aaauggggccgauauggcc

SEQ ID NO: 3169699 - RNA, 19 nt, Artificial Sequence
  Description of Artificial Sequence: Synthetic oligonucleotide
uuuguaaagagaauauaaa

SEQ ID NO: 3169700 - RNA, 19 nt, Artificial Sequence
  Description of Artificial Sequence: Synthetic oligonucleotide
uuguaaagagaauauaaaa

SEQ ID NO: 3169701 - RNA, 19 nt, Artificial Sequence
  Description of Artificial Sequence: Synthetic oligonucleotide
aaagagaauauaaaaugca

SEQ ID NO: 3169702 - RNA, 19 nt, Artificial Sequence
  Description of Artificial Sequence: Synthetic oligonucleotide
auugauucuccuccguccc

SEQ ID NO: 3169703 - RNA, 19 nt, Artificial Sequence
  Description of Artificial Sequence: Synthetic oligonucleotide
auaaaaugcacugggcccc

SEQ ID NO: 3169704 - RNA, 19 nt, Artificial Sequence
  Description of Artificial Sequence: Synthetic oligonucleotide
aagagcaggaaguacacau

SEQ ID NO: 3169705 - RNA, 19 nt, Artificial Sequence
  Description of Artificial Sequence: Synthetic oligonucleotide
uccucaauccuuuugaaaa

SEQ ID NO: 3169706 - RNA, 19 nt, Artificial Sequence
  Description of Artificial Sequence: Synthetic oligonucleotide
gccgauauggccuugaggg

SEQ ID NO: 3169707 - RNA, 19 nt, Artificial Sequence
  Description of Artificial Sequence: Synthetic oligonucleotide
gugacauugauucuccucc

SEQ ID NO: 3169708 - RNA, 19 nt, Artificial Sequence
  Description of Artificial Sequence: Synthetic oligonucleotide
agaauauaaaaugcacugg

SEQ ID NO: 3169709 - RNA, 19 nt, Artificial Sequence
  Description of Artificial Sequence: Synthetic oligonucleotide
uguuuaggaaagcaguuuc

SEQ ID NO: 3169710 - RNA, 19 nt, Artificial Sequence
  Description of Artificial Sequence: Synthetic oligonucleotide
ugucuguuuaggaaagcag

SEQ ID NO: 3169711 - RNA, 19 nt, Artificial Sequence
  Description of Artificial Sequence: Synthetic oligonucleotide
uacacauucuucagugagg

SEQ ID NO: 3169712 - RNA, 19 nt, Artificial Sequence
  Description of Artificial Sequence: Synthetic oligonucleotide
cauucuucagugaggaugc

SEQ ID NO: 3169713 - RNA, 19 nt, Artificial Sequence
  Description of Artificial Sequence: Synthetic oligonucleotide
ucuucagugaggaugcgcu

SEQ ID NO: 3169714 - RNA, 19 nt, Artificial Sequence
  Description of Artificial Sequence: Synthetic oligonucleotide
uugagggucaccugggcgg

SEQ ID NO: 3169715 - RNA, 19 nt, Artificial Sequence
  Description of Artificial Sequence: Synthetic oligonucleotide
cuuuguaaagagaauauaa

SEQ ID NO: 3169716 - RNA, 19 nt, Artificial Sequence
  Description of Artificial Sequence: Synthetic oligonucleotide
aggaaguacacauucuuca

SEQ ID NO: 3169717 - RNA, 19 nt, Artificial Sequence
  Description of Artificial Sequence: Synthetic oligonucleotide
uugguguccaguuuggcca

SEQ ID NO: 3169718 - RNA, 19 nt, Artificial Sequence
  Description of Artificial Sequence: Synthetic oligonucleotide
acauucuucagugaggaug

SEQ ID NO: 3169719 - RNA, 19 nt, Artificial Sequence
  Description of Artificial Sequence: Synthetic oligonucleotide
guacacauucuucagugag

SEQ ID NO: 3169720 - RNA, 19 nt, Artificial Sequence
  Description of Artificial Sequence: Synthetic oligonucleotide
gaugcucucgcugucaaag

SEQ ID NO: 3169721 - RNA, 19 nt, Artificial Sequence
  Description of Artificial Sequence: Synthetic oligonucleotide
ugaggaugcgcucgagucg

SEQ ID NO: 3169722 - RNA, 19 nt, Artificial Sequence
  Description of Artificial Sequence: Synthetic oligonucleotide
cauugauucuccuccgucc

SEQ ID NO: 3169723 - RNA, 19 nt, Artificial Sequence
  Description of Artificial Sequence: Synthetic oligonucleotide
uccaguuuggccaucuccu

SEQ ID NO: 3169724 - RNA, 19 nt, Artificial Sequence
  Description of Artificial Sequence: Synthetic oligonucleotide
cucgcugucaaagagcagg

SEQ ID NO: 3169725 - RNA, 19 nt, Artificial Sequence
  Description of Artificial Sequence: Synthetic oligonucleotide
uuugcuacccuuagccacc

SEQ ID NO: 3169726 - RNA, 19 nt, Artificial Sequence
  Description of Artificial Sequence: Synthetic oligonucleotide
ucuccaggcaggcaggacc

SEQ ID NO: 3169727 - RNA, 19 nt, Artificial Sequence
  Description of Artificial Sequence: Synthetic oligonucleotide
gauaccgaugcucucgcug

SEQ ID NO: 3169728 - RNA, 19 nt, Artificial Sequence
  Description of Artificial Sequence: Synthetic oligonucleotide
cuuugcuacccuuagccac

SEQ ID NO: 3169729 - RNA, 19 nt, Artificial Sequence
  Description of Artificial Sequence: Synthetic oligonucleotide
acauugauucuccuccguc

SEQ ID NO: 3169730 - RNA, 19 nt, Artificial Sequence
  Description of Artificial Sequence: Synthetic oligonucleotide
agagaauauaaaaugcacu

SEQ ID NO: 3169731 - RNA, 19 nt, Artificial Sequence
  Description of Artificial Sequence: Synthetic oligonucleotide
cuugguguccaguuuggcc

SEQ ID NO: 3169732 - RNA, 19 nt, Artificial Sequence
  Description of Artificial Sequence: Synthetic oligonucleotide
guagauaccgaugcucucg

SEQ ID NO: 3169733 - RNA, 19 nt, Artificial Sequence
  Description of Artificial Sequence: Synthetic oligonucleotide
uucagugaggaugcgcucg

SEQ ID NO: 3169734 - RNA, 19 nt, Artificial Sequence
  Description of Artificial Sequence: Synthetic oligonucleotide
ugacauugauucuccuccg

SEQ ID NO: 3169735 - RNA, 19 nt, Artificial Sequence
  Description of Artificial Sequence: Synthetic oligonucleotide
aggaccuguucccacugcc

SEQ ID NO: 3169736 - RNA, 19 nt, Artificial Sequence
  Description of Artificial Sequence: Synthetic oligonucleotide
aaaugcacugggccccuuc

SEQ ID NO: 3169737 - RNA, 19 nt, Artificial Sequence
  Description of Artificial Sequence: Synthetic oligonucleotide
ucuguuuaggaaagcaguu

SEQ ID NO: 3169738 - RNA, 19 nt, Artificial Sequence
  Description of Artificial Sequence: Synthetic oligonucleotide
uuuggccaucuccuguacg

SEQ ID NO: 3169739 - RNA, 19 nt, Artificial Sequence
  Description of Artificial Sequence: Synthetic oligonucleotide
gagucgucgaaauggggcc

SEQ ID NO: 3169740 - RNA, 19 nt, Artificial Sequence
  Description of Artificial Sequence: Synthetic oligonucleotide
ugcucucgcugucaaagag

SEQ ID NO: 3169741 - RNA, 19 nt, Artificial Sequence
  Description of Artificial Sequence: Synthetic oligonucleotide
gaugugacauugauucucc

SEQ ID NO: 3169742 - RNA, 19 nt, Artificial Sequence
  Description of Artificial Sequence: Synthetic oligonucleotide
uacuugguguccaguuugg

SEQ ID NO: 3169743 - RNA, 19 nt, Artificial Sequence
  Description of Artificial Sequence: Synthetic oligonucleotide
aauggggccgauauggccu

SEQ ID NO: 3169744 - RNA, 19 nt, Artificial Sequence
  Description of Artificial Sequence: Synthetic oligonucleotide
ugaugugacauugauucuc

SEQ ID NO: 3169745 - RNA, 19 nt, Artificial Sequence
  Description of Artificial Sequence: Synthetic oligonucleotide
ugugacauugauucuccuc

SEQ ID NO: 3169746 - RNA, 19 nt, Artificial Sequence
  Description of Artificial Sequence: Synthetic oligonucleotide
caaagagcaggaaguacac

SEQ ID NO: 3169747 - RNA, 19 nt, Artificial Sequence
  Description of Artificial Sequence: Synthetic oligonucleotide
cuacuugguguccaguuug

SEQ ID NO: 3169748 - RNA, 19 nt, Artificial Sequence
  Description of Artificial Sequence: Synthetic oligonucleotide
cuugagggucaccugggcg

SEQ ID NO: 3169749 - RNA, 19 nt, Artificial Sequence
  Description of Artificial Sequence: Synthetic oligonucleotide
gagcaggaaguacacauuc

SEQ ID NO: 3169750 - RNA, 19 nt, Artificial Sequence
  Description of Artificial Sequence: Synthetic oligonucleotide
aaugcacugggccccuucu

SEQ ID NO: 3169751 - RNA, 19 nt, Artificial Sequence
  Description of Artificial Sequence: Synthetic oligonucleotide
uagauaccgaugcucucgc

SEQ ID NO: 3169752 - RNA, 19 nt, Artificial Sequence
  Description of Artificial Sequence: Synthetic oligonucleotide
uuggccaucuccuguacgu

SEQ ID NO: 3169753 - RNA, 19 nt, Artificial Sequence
  Description of Artificial Sequence: Synthetic oligonucleotide
ugcacugggccccuucucc

SEQ ID NO: 3169754 - RNA, 19 nt, Artificial Sequence
  Description of Artificial Sequence: Synthetic oligonucleotide
uucuccuccguccccacug

SEQ ID NO: 3169755 - RNA, 19 nt, Artificial Sequence
  Description of Artificial Sequence: Synthetic oligonucleotide
gcugucaaagagcaggaag

SEQ ID NO: 3169756 - RNA, 19 nt, Artificial Sequence
  Description of Artificial Sequence: Synthetic oligonucleotide
cuuagccacccucugcucc

SEQ ID NO: 3169757 - RNA, 19 nt, Artificial Sequence
  Description of Artificial Sequence: Synthetic oligonucleotide
cuccuguacguagauaccg

SEQ ID NO: 3169758 - RNA, 19 nt, Artificial Sequence
  Description of Artificial Sequence: Synthetic oligonucleotide
augucaccguuccucaauc

SEQ ID NO: 3169759 - RNA, 19 nt, Artificial Sequence
  Description of Artificial Sequence: Synthetic oligonucleotide
cucgagucgucgaaauggg

SEQ ID NO: 3169760 - RNA, 19 nt, Artificial Sequence
  Description of Artificial Sequence: Synthetic oligonucleotide
ggaaguacacauucuucag

SEQ ID NO: 3169761 - RNA, 19 nt, Artificial Sequence
  Description of Artificial Sequence: Synthetic oligonucleotide
ucuccuguacguagauacc

SEQ ID NO: 3169762 - RNA, 19 nt, Artificial Sequence
  Description of Artificial Sequence: Synthetic oligonucleotide
auaccgaugcucucgcugu

SEQ ID NO: 3169763 - RNA, 19 nt, Artificial Sequence
  Description of Artificial Sequence: Synthetic oligonucleotide
ucgagucgucgaaaugggg

SEQ ID NO: 3169764 - RNA, 19 nt, Artificial Sequence
  Description of Artificial Sequence: Synthetic oligonucleotide
ucuugugaugugacauuga

SEQ ID NO: 3169765 - RNA, 19 nt, Artificial Sequence
  Description of Artificial Sequence: Synthetic oligonucleotide
acacauucuucagugagga

SEQ ID NO: 3169766 - RNA, 19 nt, Artificial Sequence
  Description of Artificial Sequence: Synthetic oligonucleotide
uuagccacccucugcuccc

SEQ ID NO: 3169767 - RNA, 19 nt, Artificial Sequence
  Description of Artificial Sequence: Synthetic oligonucleotide
acuggagagcuacuuggug

SEQ ID NO: 3169768 - RNA, 19 nt, Artificial Sequence
  Description of Artificial Sequence: Synthetic oligonucleotide
gccuuugcuacccuuagcc

SEQ ID NO: 3169769 - RNA, 19 nt, Artificial Sequence
  Description of Artificial Sequence: Synthetic oligonucleotide
uccuguacguagauaccga

SEQ ID NO: 3169770 - RNA, 19 nt, Artificial Sequence
  Description of Artificial Sequence: Synthetic oligonucleotide
acccuuagccacccucugc

SEQ ID NO: 3169771 - RNA, 19 nt, Artificial Sequence
  Description of Artificial Sequence: Synthetic oligonucleotide
uacguagauaccgaugcuc

SEQ ID NO: 3169772 - RNA, 19 nt, Artificial Sequence
  Description of Artificial Sequence: Synthetic oligonucleotide
caggaaguacacauucuuc

SEQ ID NO: 3169773 - RNA, 19 nt, Artificial Sequence
  Description of Artificial Sequence: Synthetic oligonucleotide
guccaguuuggccaucucc

SEQ ID NO: 3169774 - RNA, 19 nt, Artificial Sequence
  Description of Artificial Sequence: Synthetic oligonucleotide
ugcucuugugaugugacau

SEQ ID NO: 3169775 - RNA, 19 nt, Artificial Sequence
  Description of Artificial Sequence: Synthetic oligonucleotide
aguacacauucuucaguga

SEQ ID NO: 3169776 - RNA, 19 nt, Artificial Sequence
  Description of Artificial Sequence: Synthetic oligonucleotide
gugaggaugcgcucgaguc

SEQ ID NO: 3169777 - RNA, 19 nt, Artificial Sequence
  Description of Artificial Sequence: Synthetic oligonucleotide
gcucgagucgucgaaaugg

SEQ ID NO: 3169778 - RNA, 19 nt, Artificial Sequence
  Description of Artificial Sequence: Synthetic oligonucleotide
agaggcccuuuguaaagag

SEQ ID NO: 3169779 - RNA, 19 nt, Artificial Sequence
  Description of Artificial Sequence: Synthetic oligonucleotide
uuccucaauccuuuugaaa

SEQ ID NO: 3169780 - RNA, 19 nt, Artificial Sequence
  Description of Artificial Sequence: Synthetic oligonucleotide
uggagagcuacuugguguc

SEQ ID NO: 3169781 - RNA, 19 nt, Artificial Sequence
  Description of Artificial Sequence: Synthetic oligonucleotide
cuguacguagauaccgaug

SEQ ID NO: 3169782 - RNA, 19 nt, Artificial Sequence
  Description of Artificial Sequence: Synthetic oligonucleotide
uucccacugccuuugcuac

SEQ ID NO: 3169783 - RNA, 19 nt, Artificial Sequence
  Description of Artificial Sequence: Synthetic oligonucleotide
ucgaaauggggccgauaug

SEQ ID NO: 3169784 - RNA, 19 nt, Artificial Sequence
  Description of Artificial Sequence: Synthetic oligonucleotide
ucaucaucaaaauagaugg

SEQ ID NO: 3169785 - RNA, 19 nt, Artificial Sequence
  Description of Artificial Sequence: Synthetic oligonucleotide
aauagauggacauauauga

SEQ ID NO: 3169786 - RNA, 19 nt, Artificial Sequence
  Description of Artificial Sequence: Synthetic oligonucleotide
auuaucucuaaucagcugc

SEQ ID NO: 3169787 - RNA, 19 nt, Artificial Sequence
  Description of Artificial Sequence: Synthetic oligonucleotide
uuuaguauaaaucuuguaa

SEQ ID NO: 3169788 - RNA, 19 nt, Artificial Sequence
  Description of Artificial Sequence: Synthetic oligonucleotide
ugguucaucaucaaaauag

SEQ ID NO: 3169789 - RNA, 19 nt, Artificial Sequence
  Description of Artificial Sequence: Synthetic oligonucleotide
acuuaauuuagguuucgcc

SEQ ID NO: 3169790 - RNA, 19 nt, Artificial Sequence
  Description of Artificial Sequence: Synthetic oligonucleotide
uuuggaaagcuucugagug

SEQ ID NO: 3169791 - RNA, 19 nt, Artificial Sequence
  Description of Artificial Sequence: Synthetic oligonucleotide
guauaaaucuuguaaagcc

SEQ ID NO: 3169792 - RNA, 19 nt, Artificial Sequence
  Description of Artificial Sequence: Synthetic oligonucleotide
aaaauagauggacauauau

SEQ ID NO: 3169793 - RNA, 19 nt, Artificial Sequence
  Description of Artificial Sequence: Synthetic oligonucleotide
uuguauagcauccuggagc

SEQ ID NO: 3169794 - RNA, 19 nt, Artificial Sequence
  Description of Artificial Sequence: Synthetic oligonucleotide
ucugcuaugaucugggaag

SEQ ID NO: 3169795 - RNA, 19 nt, Artificial Sequence
  Description of Artificial Sequence: Synthetic oligonucleotide
uguaaaagggccuucaagu

SEQ ID NO: 3169796 - RNA, 19 nt, Artificial Sequence
  Description of Artificial Sequence: Synthetic oligonucleotide
ucacccauuacccagucgg

SEQ ID NO: 3169797 - RNA, 19 nt, Artificial Sequence
  Description of Artificial Sequence: Synthetic oligonucleotide
aguaacaagcuuugcauac

SEQ ID NO: 3169798 - RNA, 19 nt, Artificial Sequence
  Description of Artificial Sequence: Synthetic oligonucleotide
agcauaugcaguaacaagc

SEQ ID NO: 3169799 - RNA, 19 nt, Artificial Sequence
  Description of Artificial Sequence: Synthetic oligonucleotide
ucugggaagauuuggaaag

SEQ ID NO: 3169800 - RNA, 19 nt, Artificial Sequence
  Description of Artificial Sequence: Synthetic oligonucleotide
uuaguauaaaucuuguaaa

SEQ ID NO: 3169801 - RNA, 19 nt, Artificial Sequence
  Description of Artificial Sequence: Synthetic oligonucleotide
aaagcuucugaguguauuc

SEQ ID NO: 3169802 - RNA, 19 nt, Artificial Sequence
  Description of Artificial Sequence: Synthetic oligonucleotide
ugaagcucugcuaugaucu

SEQ ID NO: 3169803 - RNA, 19 nt, Artificial Sequence
  Description of Artificial Sequence: Synthetic oligonucleotide
ucuucaaacuuuuguauag

SEQ ID NO: 3169804 - RNA, 19 nt, Artificial Sequence
  Description of Artificial Sequence: Synthetic oligonucleotide
uauaugaugguaauguuuu

SEQ ID NO: 3169805 - RNA, 19 nt, Artificial Sequence
  Description of Artificial Sequence: Synthetic oligonucleotide
uuaauuuagguuucgccug

SEQ ID NO: 3169806 - RNA, 19 nt, Artificial Sequence
  Description of Artificial Sequence: Synthetic oligonucleotide
uauaaaucuuguaaagccu

SEQ ID NO: 3169807 - RNA, 19 nt, Artificial Sequence
  Description of Artificial Sequence: Synthetic oligonucleotide
auucacuuaauuuagguuu

SEQ ID NO: 3169808 - RNA, 19 nt, Artificial Sequence
  Description of Artificial Sequence: Synthetic oligonucleotide
uaguauaaaucuuguaaag

SEQ ID NO: 3169809 - RNA, 19 nt, Artificial Sequence
  Description of Artificial Sequence: Synthetic oligonucleotide
aucaucaaaauagauggac

SEQ ID NO: 3169810 - RNA, 19 nt, Artificial Sequence
  Description of Artificial Sequence: Synthetic oligonucleotide
uguauagcauccuggagcc

SEQ ID NO: 3169811 - RNA, 19 nt, Artificial Sequence
  Description of Artificial Sequence: Synthetic oligonucleotide
aagcauaugcaguaacaag

SEQ ID NO: 3169812 - RNA, 19 nt, Artificial Sequence
  Description of Artificial Sequence: Synthetic oligonucleotide
gauuuggaaagcuucugag

SEQ ID NO: 3169813 - RNA, 19 nt, Artificial Sequence
  Description of Artificial Sequence: Synthetic oligonucleotide
caugauucacuuaauuuag

SEQ ID NO: 3169814 - RNA, 19 nt, Artificial Sequence
  Description of Artificial Sequence: Synthetic oligonucleotide
aggacguuuguguaaaagg

SEQ ID NO: 3169815 - RNA, 19 nt, Artificial Sequence
  Description of Artificial Sequence: Synthetic oligonucleotide
cuuuuguauagcauccugg

SEQ ID NO: 3169816 - RNA, 19 nt, Artificial Sequence
  Description of Artificial Sequence: Synthetic oligonucleotide
agagguacugccaugauuc

SEQ ID NO: 3169817 - RNA, 19 nt, Artificial Sequence
  Description of Artificial Sequence: Synthetic oligonucleotide
aaccuuuugguugugcugg

SEQ ID NO: 3169818 - RNA, 19 nt, Artificial Sequence
  Description of Artificial Sequence: Synthetic oligonucleotide
aaauagauggacauauaug

SEQ ID NO: 3169819 - RNA, 19 nt, Artificial Sequence
  Description of Artificial Sequence: Synthetic oligonucleotide
uagauggacauauaugaug

SEQ ID NO: 3169820 - RNA, 19 nt, Artificial Sequence
  Description of Artificial Sequence: Synthetic oligonucleotide
acauauaugaugguaaugu

SEQ ID NO: 3169821 - RNA, 19 nt, Artificial Sequence
  Description of Artificial Sequence: Synthetic oligonucleotide
agauggacauauaugaugg

SEQ ID NO: 3169822 - RNA, 19 nt, Artificial Sequence
  Description of Artificial Sequence: Synthetic oligonucleotide
acaagcuuugcauacaggu

SEQ ID NO: 3169823 - RNA, 19 nt, Artificial Sequence
  Description of Artificial Sequence: Synthetic oligonucleotide
uuuuguauagcauccugga

SEQ ID NO: 3169824 - RNA, 19 nt, Artificial Sequence
  Description of Artificial Sequence: Synthetic oligonucleotide
aguguauuccuucucgauc

SEQ ID NO: 3169825 - RNA, 19 nt, Artificial Sequence
  Description of Artificial Sequence: Synthetic oligonucleotide
uccaguucacccauuaccc

SEQ ID NO: 3169826 - RNA, 19 nt, Artificial Sequence
  Description of Artificial Sequence: Synthetic oligonucleotide
uaugcaguaacaagcuuug

SEQ ID NO: 3169827 - RNA, 19 nt, Artificial Sequence
  Description of Artificial Sequence: Synthetic oligonucleotide
aaguacuccucgccuaagc

SEQ ID NO: 3169828 - RNA, 19 nt, Artificial Sequence
  Description of Artificial Sequence: Synthetic oligonucleotide
aaaugguugucugaagcuc

SEQ ID NO: 3169829 - RNA, 19 nt, Artificial Sequence
  Description of Artificial Sequence: Synthetic oligonucleotide
gacuugaaccuuuugguug

SEQ ID NO: 3169830 - RNA, 19 nt, Artificial Sequence
  Description of Artificial Sequence: Synthetic oligonucleotide
ugcaguaacaagcuuugca

SEQ ID NO: 3169831 - RNA, 19 nt, Artificial Sequence
  Description of Artificial Sequence: Synthetic oligonucleotide
uguugucuuccccagaaga

SEQ ID NO: 3169832 - RNA, 19 nt, Artificial Sequence
  Description of Artificial Sequence: Synthetic oligonucleotide
aagcuucugaguguauucc

SEQ ID NO: 3169833 - RNA, 19 nt, Artificial Sequence
  Description of Artificial Sequence: Synthetic oligonucleotide
uuagguuucgccugucucc

SEQ ID NO: 3169834 - RNA, 19 nt, Artificial Sequence
  Description of Artificial Sequence: Synthetic oligonucleotide
acugccaugauucacuuaa

SEQ ID NO: 3169835 - RNA, 19 nt, Artificial Sequence
  Description of Artificial Sequence: Synthetic oligonucleotide
uuuucacccuuucugauuc

SEQ ID NO: 3169836 - RNA, 19 nt, Artificial Sequence
  Description of Artificial Sequence: Synthetic oligonucleotide
uuuguauagcauccuggag

SEQ ID NO: 3169837 - RNA, 19 nt, Artificial Sequence
  Description of Artificial Sequence: Synthetic oligonucleotide
guugacagcggucucgugg

SEQ ID NO: 3169838 - RNA, 19 nt, Artificial Sequence
  Description of Artificial Sequence: Synthetic oligonucleotide
uucagggaggaaaugguug

SEQ ID NO: 3169839 - RNA, 19 nt, Artificial Sequence
  Description of Artificial Sequence: Synthetic oligonucleotide
uggacauauaugaugguaa

SEQ ID NO: 3169840 - RNA, 19 nt, Artificial Sequence
  Description of Artificial Sequence: Synthetic oligonucleotide
gucauuaucucuaaucagc

SEQ ID NO: 3169841 - RNA, 19 nt, Artificial Sequence
  Description of Artificial Sequence: Synthetic oligonucleotide
acguuuguguaaaagggcc

SEQ ID NO: 3169842 - RNA, 19 nt, Artificial Sequence
  Description of Artificial Sequence: Synthetic oligonucleotide
ugauucagccuucaacuug

SEQ ID NO: 3169843 - RNA, 19 nt, Artificial Sequence
  Description of Artificial Sequence: Synthetic oligonucleotide
uucaaacuuuuguauagca

SEQ ID NO: 3169844 - RNA, 19 nt, Artificial Sequence
  Description of Artificial Sequence: Synthetic oligonucleotide
ucaucuucaaacuuuugua

SEQ ID NO: 3169845 - RNA, 19 nt, Artificial Sequence
  Description of Artificial Sequence: Synthetic oligonucleotide
cuuguaaagccuugauugc

SEQ ID NO: 3169846 - RNA, 19 nt, Artificial Sequence
  Description of Artificial Sequence: Synthetic oligonucleotide
ucaacuuguugacagcggu

SEQ ID NO: 3169847 - RNA, 19 nt, Artificial Sequence
  Description of Artificial Sequence: Synthetic oligonucleotide
uucaacuuguugacagcgg

SEQ ID NO: 3169848 - RNA, 19 nt, Artificial Sequence
  Description of Artificial Sequence: Synthetic oligonucleotide
auguguccuuuucagcucc

SEQ ID NO: 3169849 - RNA, 19 nt, Artificial Sequence
  Description of Artificial Sequence: Synthetic oligonucleotide
ucaucucagucucagcggc

SEQ ID NO: 3169850 - RNA, 19 nt, Artificial Sequence
  Description of Artificial Sequence: Synthetic oligonucleotide
cugaguguauuccuucucg

SEQ ID NO: 3169851 - RNA, 19 nt, Artificial Sequence
  Description of Artificial Sequence: Synthetic oligonucleotide
cuccaguucacccauuacc

SEQ ID NO: 3169852 - RNA, 19 nt, Artificial Sequence
  Description of Artificial Sequence: Synthetic oligonucleotide
cacccuuucugauucagcc

SEQ ID NO: 3169853 - RNA, 19 nt, Artificial Sequence
  Description of Artificial Sequence: Synthetic oligonucleotide
aacuuguugacagcggucu

SEQ ID NO: 3169854 - RNA, 19 nt, Artificial Sequence
  Description of Artificial Sequence: Synthetic oligonucleotide
uuugcauacagguuccgau

SEQ ID NO: 3169855 - RNA, 19 nt, Artificial Sequence
  Description of Artificial Sequence: Synthetic oligonucleotide
uauagcauccuggagccgc

SEQ ID NO: 3169856 - RNA, 19 nt, Artificial Sequence
  Description of Artificial Sequence: Synthetic oligonucleotide
cuuaauuuagguuucgccu

SEQ ID NO: 3169857 - RNA, 19 nt, Artificial Sequence
  Description of Artificial Sequence: Synthetic oligonucleotide
cuucaacuuguugacagcg

SEQ ID NO: 3169858 - RNA, 19 nt, Artificial Sequence
  Description of Artificial Sequence: Synthetic oligonucleotide
auuugguucaucaucaaaa

SEQ ID NO: 3169859 - RNA, 19 nt, Artificial Sequence
  Description of Artificial Sequence: Synthetic oligonucleotide
auuuggaaagcuucugagu

SEQ ID NO: 3169860 - RNA, 19 nt, Artificial Sequence
  Description of Artificial Sequence: Synthetic oligonucleotide
uuaucucuaaucagcugcu

SEQ ID NO: 3169861 - RNA, 19 nt, Artificial Sequence
  Description of Artificial Sequence: Synthetic oligonucleotide
uuuagguuucgccugucuc

SEQ ID NO: 3169862 - RNA, 19 nt, Artificial Sequence
  Description of Artificial Sequence: Synthetic oligonucleotide
uauuccuucucgaucugcu

SEQ ID NO: 3169863 - RNA, 19 nt, Artificial Sequence
  Description of Artificial Sequence: Synthetic oligonucleotide
aaaagggccuucaaguacu

SEQ ID NO: 3169864 - RNA, 19 nt, Artificial Sequence
  Description of Artificial Sequence: Synthetic oligonucleotide
uugucuuccccagaagagg

SEQ ID NO: 3169865 - RNA, 19 nt, Artificial Sequence
  Description of Artificial Sequence: Synthetic oligonucleotide
acugcucuccucuuucagg

SEQ ID NO: 3169866 - RNA, 19 nt, Artificial Sequence
  Description of Artificial Sequence: Synthetic oligonucleotide
agauuuggaaagcuucuga

SEQ ID NO: 3169867 - RNA, 19 nt, Artificial Sequence
  Description of Artificial Sequence: Synthetic oligonucleotide
ugaaccuuuugguugugcu

SEQ ID NO: 3169868 - RNA, 19 nt, Artificial Sequence
  Description of Artificial Sequence: Synthetic oligonucleotide
cucgccuaagcauaugcag

SEQ ID NO: 3169869 - RNA, 19 nt, Artificial Sequence
  Description of Artificial Sequence: Synthetic oligonucleotide
uaugaucugggaagauuug

SEQ ID NO: 3169870 - RNA, 19 nt, Artificial Sequence
  Description of Artificial Sequence: Synthetic oligonucleotide
cugcucuccucuuucaggg

SEQ ID NO: 3169871 - RNA, 19 nt, Artificial Sequence
  Description of Artificial Sequence: Synthetic oligonucleotide
uaauuuagguuucgccugu

SEQ ID NO: 3169872 - RNA, 19 nt, Artificial Sequence
  Description of Artificial Sequence: Synthetic oligonucleotide
acuugaaccuuuugguugu

SEQ ID NO: 3169873 - RNA, 19 nt, Artificial Sequence
  Description of Artificial Sequence: Synthetic oligonucleotide
ggacguuuguguaaaaggg

SEQ ID NO: 3169874 - RNA, 19 nt, Artificial Sequence
  Description of Artificial Sequence: Synthetic oligonucleotide
ugcauacagguuccgauuc

SEQ ID NO: 3169875 - RNA, 19 nt, Artificial Sequence
  Description of Artificial Sequence: Synthetic oligonucleotide
ucagggaggaaaugguugu

SEQ ID NO: 3169876 - RNA, 19 nt, Artificial Sequence
  Description of Artificial Sequence: Synthetic oligonucleotide
uuuuaguguuccuggcuca

SEQ ID NO: 3169877 - RNA, 19 nt, Artificial Sequence
  Description of Artificial Sequence: Synthetic oligonucleotide
gacguuuguguaaaagggc

SEQ ID NO: 3169878 - RNA, 19 nt, Artificial Sequence
  Description of Artificial Sequence: Synthetic oligonucleotide
uugguugugcuggauuugg

SEQ ID NO: 3169879 - RNA, 19 nt, Artificial Sequence
  Description of Artificial Sequence: Synthetic oligonucleotide
gaaccuuuugguugugcug

SEQ ID NO: 3169880 - RNA, 19 nt, Artificial Sequence
  Description of Artificial Sequence: Synthetic oligonucleotide
uccucgccuaagcauaugc

SEQ ID NO: 3169881 - RNA, 19 nt, Artificial Sequence
  Description of Artificial Sequence: Synthetic oligonucleotide
uccagggucaucucagucu

SEQ ID NO: 3169882 - RNA, 19 nt, Artificial Sequence
  Description of Artificial Sequence: Synthetic oligonucleotide
gucaucucagucucagcgg

SEQ ID NO: 3169883 - RNA, 19 nt, Artificial Sequence
  Description of Artificial Sequence: Synthetic oligonucleotide
agucggguagcuucucugg

SEQ ID NO: 3169884 - RNA, 19 nt, Artificial Sequence
  Description of Artificial Sequence: Synthetic oligonucleotide
aguaauuuuaccuucagag

SEQ ID NO: 3169885 - RNA, 19 nt, Artificial Sequence
  Description of Artificial Sequence: Synthetic oligonucleotide
auuuccauauguuucacac

SEQ ID NO: 3169886 - RNA, 19 nt, Artificial Sequence
  Description of Artificial Sequence: Synthetic oligonucleotide
aacuucuucaaccaaagcu

SEQ ID NO: 3169887 - RNA, 19 nt, Artificial Sequence
  Description of Artificial Sequence: Synthetic oligonucleotide
uuuuaaggcuucuucauag

SEQ ID NO: 3169888 - RNA, 19 nt, Artificial Sequence
  Description of Artificial Sequence: Synthetic oligonucleotide
uuucagacgaugaagcucc

SEQ ID NO: 3169889 - RNA, 19 nt, Artificial Sequence
  Description of Artificial Sequence: Synthetic oligonucleotide
uuccuugucuaauagaugc

SEQ ID NO: 3169890 - RNA, 19 nt, Artificial Sequence
  Description of Artificial Sequence: Synthetic oligonucleotide
uaauacugcacuuuguuga

SEQ ID NO: 3169891 - RNA, 19 nt, Artificial Sequence
  Description of Artificial Sequence: Synthetic oligonucleotide
aauuauagcuccauucuuc

SEQ ID NO: 3169892 - RNA, 19 nt, Artificial Sequence
  Description of Artificial Sequence: Synthetic oligonucleotide
uuuagugacauuuccauau

SEQ ID NO: 3169893 - RNA, 19 nt, Artificial Sequence
  Description of Artificial Sequence: Synthetic oligonucleotide
agauucauaauucuuuuca

SEQ ID NO: 3169894 - RNA, 19 nt, Artificial Sequence
  Description of Artificial Sequence: Synthetic oligonucleotide
ucuuuauuuaagucugggg

SEQ ID NO: 3169895 - RNA, 19 nt, Artificial Sequence
  Description of Artificial Sequence: Synthetic oligonucleotide
uggaguuccaacuuaagcu

SEQ ID NO: 3169896 - RNA, 19 nt, Artificial Sequence
  Description of Artificial Sequence: Synthetic oligonucleotide
uauagcuccauucuucuga

SEQ ID NO: 3169897 - RNA, 19 nt, Artificial Sequence
  Description of Artificial Sequence: Synthetic oligonucleotide
uuaaacugaucuuucaagu

SEQ ID NO: 3169898 - RNA, 19 nt, Artificial Sequence
  Description of Artificial Sequence: Synthetic oligonucleotide
uuccauauguuucacacgu

SEQ ID NO: 3169899 - RNA, 19 nt, Artificial Sequence
  Description of Artificial Sequence: Synthetic oligonucleotide
guuaaacugaucuuucaag

SEQ ID NO: 3169900 - RNA, 19 nt, Artificial Sequence
  Description of Artificial Sequence: Synthetic oligonucleotide
gauuguuuucagcagucgg

SEQ ID NO: 3169901 - RNA, 19 nt, Artificial Sequence
  Description of Artificial Sequence: Synthetic oligonucleotide
cauaauucuuuucacauuc

SEQ ID NO: 3169902 - RNA, 19 nt, Artificial Sequence
  Description of Artificial Sequence: Synthetic oligonucleotide
cuuuauuuaagucugggga

SEQ ID NO: 3169903 - RNA, 19 nt, Artificial Sequence
  Description of Artificial Sequence: Synthetic oligonucleotide
auucuauccacaauuauag

SEQ ID NO: 3169904 - RNA, 19 nt, Artificial Sequence
  Description of Artificial Sequence: Synthetic oligonucleotide
aaugauuuguguaaacugu

SEQ ID NO: 3169905 - RNA, 19 nt, Artificial Sequence
  Description of Artificial Sequence: Synthetic oligonucleotide
uucauugacaguaauuuua

SEQ ID NO: 3169906 - RNA, 19 nt, Artificial Sequence
  Description of Artificial Sequence: Synthetic oligonucleotide
ucaacugcaguuucucugg

SEQ ID NO: 3169907 - RNA, 19 nt, Artificial Sequence
  Description of Artificial Sequence: Synthetic oligonucleotide
aaagcugcgguccuuucag

SEQ ID NO: 3169908 - RNA, 19 nt, Artificial Sequence
  Description of Artificial Sequence: Synthetic oligonucleotide
ucuucuuccagccuuuugu

SEQ ID NO: 3169909 - RNA, 19 nt, Artificial Sequence
  Description of Artificial Sequence: Synthetic oligonucleotide
auuucuucugcaguuauuc

SEQ ID NO: 3169910 - RNA, 19 nt, Artificial Sequence
  Description of Artificial Sequence: Synthetic oligonucleotide
aacuuaagcuuuaauuuuc

SEQ ID NO: 3169911 - RNA, 19 nt, Artificial Sequence
  Description of Artificial Sequence: Synthetic oligonucleotide
uuuucuucaggguuaauau

SEQ ID NO: 3169912 - RNA, 19 nt, Artificial Sequence
  Description of Artificial Sequence: Synthetic oligonucleotide
uucuucauagguacuuagg

SEQ ID NO: 3169913 - RNA, 19 nt, Artificial Sequence
  Description of Artificial Sequence: Synthetic oligonucleotide
ugagauaaugauuugugua

SEQ ID NO: 3169914 - RNA, 19 nt, Artificial Sequence
  Description of Artificial Sequence: Synthetic oligonucleotide
uguaguaaacucguaaugu

SEQ ID NO: 3169915 - RNA, 19 nt, Artificial Sequence
  Description of Artificial Sequence: Synthetic oligonucleotide
ccuuguacaagacaaaugg

SEQ ID NO: 3169916 - RNA, 19 nt, Artificial Sequence
  Description of Artificial Sequence: Synthetic oligonucleotide
uccauaauacugcacuuug

SEQ ID NO: 3169917 - RNA, 19 nt, Artificial Sequence
  Description of Artificial Sequence: Synthetic oligonucleotide
guaauuuuaccuucagagc

SEQ ID NO: 3169918 - RNA, 19 nt, Artificial Sequence
  Description of Artificial Sequence: Synthetic oligonucleotide
ucuaucacugcauucauuu

SEQ ID NO: 3169919 - RNA, 19 nt, Artificial Sequence
  Description of Artificial Sequence: Synthetic oligonucleotide
uccaacuuaagcuuuaauu

SEQ ID NO: 3169920 - RNA, 19 nt, Artificial Sequence
  Description of Artificial Sequence: Synthetic oligonucleotide
ugcagucugcacauaauag

SEQ ID NO: 3169921 - RNA, 19 nt, Artificial Sequence
  Description of Artificial Sequence: Synthetic oligonucleotide
auagaugcauguuuuccuc

SEQ ID NO: 3169922 - RNA, 19 nt, Artificial Sequence
  Description of Artificial Sequence: Synthetic oligonucleotide
uugucuaauagaugcaugu

SEQ ID NO: 3169923 - RNA, 19 nt, Artificial Sequence
  Description of Artificial Sequence: Synthetic oligonucleotide
uguguaaacuguaguaaac

SEQ ID NO: 3169924 - RNA, 19 nt, Artificial Sequence
  Description of Artificial Sequence: Synthetic oligonucleotide
cuauccacaauuauagcuc

SEQ ID NO: 3169925 - RNA, 19 nt, Artificial Sequence
  Description of Artificial Sequence: Synthetic oligonucleotide
uuuucacauuccauaauac

SEQ ID NO: 3169926 - RNA, 19 nt, Artificial Sequence
  Description of Artificial Sequence: Synthetic oligonucleotide
uucaacugcaguuucucug

SEQ ID NO: 3169927 - RNA, 19 nt, Artificial Sequence
  Description of Artificial Sequence: Synthetic oligonucleotide
agucuggggaacuugauga

SEQ ID NO: 3169928 - RNA, 19 nt, Artificial Sequence
  Description of Artificial Sequence: Synthetic oligonucleotide
auaauacugcacuuuguug

SEQ ID NO: 3169929 - RNA, 19 nt, Artificial Sequence
  Description of Artificial Sequence: Synthetic oligonucleotide
uguugaugccccuucaucu

SEQ ID NO: 3169930 - RNA, 19 nt, Artificial Sequence
  Description of Artificial Sequence: Synthetic oligonucleotide
uuauugcuuguucugagaa

SEQ ID NO: 3169931 - RNA, 19 nt, Artificial Sequence
  Description of Artificial Sequence: Synthetic oligonucleotide
uagggcaugguuaaacuga

SEQ ID NO: 3169932 - RNA, 19 nt, Artificial Sequence
  Description of Artificial Sequence: Synthetic oligonucleotide
uuuccauauguuucacacg

SEQ ID NO: 3169933 - RNA, 19 nt, Artificial Sequence
  Description of Artificial Sequence: Synthetic oligonucleotide
uugcacugagacaaagccg

SEQ ID NO: 3169934 - RNA, 19 nt, Artificial Sequence
  Description of Artificial Sequence: Synthetic oligonucleotide
aauaaacuucuucaaccaa

SEQ ID NO: 3169935 - RNA, 19 nt, Artificial Sequence
  Description of Artificial Sequence: Synthetic oligonucleotide
uuuucauuggcugcuuggg

SEQ ID NO: 3169936 - RNA, 19 nt, Artificial Sequence
  Description of Artificial Sequence: Synthetic oligonucleotide
uucugaauagcuagcccag

SEQ ID NO: 3169937 - RNA, 19 nt, Artificial Sequence
  Description of Artificial Sequence: Synthetic oligonucleotide
auucuuuucacauuccaua

SEQ ID NO: 3169938 - RNA, 19 nt, Artificial Sequence
  Description of Artificial Sequence: Synthetic oligonucleotide
auuccuguaaugucauguc

SEQ ID NO: 3169939 - RNA, 19 nt, Artificial Sequence
  Description of Artificial Sequence: Synthetic oligonucleotide
ucuucuugagauaaugauu

SEQ ID NO: 3169940 - RNA, 19 nt, Artificial Sequence
  Description of Artificial Sequence: Synthetic oligonucleotide
cucuucaagggcuaacugc

SEQ ID NO: 3169941 - RNA, 19 nt, Artificial Sequence
  Description of Artificial Sequence: Synthetic oligonucleotide
uccagauucauaauucuuu

SEQ ID NO: 3169942 - RNA, 19 nt, Artificial Sequence
  Description of Artificial Sequence: Synthetic oligonucleotide
aauggcuguguuugcacug

SEQ ID NO: 3169943 - RNA, 19 nt, Artificial Sequence
  Description of Artificial Sequence: Synthetic oligonucleotide
gauaaugauuuguguaaac

SEQ ID NO: 3169944 - RNA, 19 nt, Artificial Sequence
  Description of Artificial Sequence: Synthetic oligonucleotide
auuauagcuccauucuucu

SEQ ID NO: 3169945 - RNA, 19 nt, Artificial Sequence
  Description of Artificial Sequence: Synthetic oligonucleotide
acugagacaaagccgcauc

SEQ ID NO: 3169946 - RNA, 19 nt, Artificial Sequence
  Description of Artificial Sequence: Synthetic oligonucleotide
cuuguacaagacaaauggc

SEQ ID NO: 3169947 - RNA, 19 nt, Artificial Sequence
  Description of Artificial Sequence: Synthetic oligonucleotide
agucggaugucucauguug

SEQ ID NO: 3169948 - RNA, 19 nt, Artificial Sequence
  Description of Artificial Sequence: Synthetic oligonucleotide
uugagauaaugauuugugu

SEQ ID NO: 3169949 - RNA, 19 nt, Artificial Sequence
  Description of Artificial Sequence: Synthetic oligonucleotide
uguaaugucaugucauuuu

SEQ ID NO: 3169950 - RNA, 19 nt, Artificial Sequence
  Description of Artificial Sequence: Synthetic oligonucleotide
uaaauugcuggaguuauuc

SEQ ID NO: 3169951 - RNA, 19 nt, Artificial Sequence
  Description of Artificial Sequence: Synthetic oligonucleotide
uugggagaccucuacagca

SEQ ID NO: 3169952 - RNA, 19 nt, Artificial Sequence
  Description of Artificial Sequence: Synthetic oligonucleotide
cauguuuuccucagaauuc

SEQ ID NO: 3169953 - RNA, 19 nt, Artificial Sequence
  Description of Artificial Sequence: Synthetic oligonucleotide
acuguaguaaacucguaau

SEQ ID NO: 3169954 - RNA, 19 nt, Artificial Sequence
  Description of Artificial Sequence: Synthetic oligonucleotide
uuucacacgugcaacugcu

SEQ ID NO: 3169955 - RNA, 19 nt, Artificial Sequence
  Description of Artificial Sequence: Synthetic oligonucleotide
aauucauagucagcugcuc

SEQ ID NO: 3169956 - RNA, 19 nt, Artificial Sequence
  Description of Artificial Sequence: Synthetic oligonucleotide
uuagggcaugguuaaacug

SEQ ID NO: 3169957 - RNA, 19 nt, Artificial Sequence
  Description of Artificial Sequence: Synthetic oligonucleotide
ucuacugcugcacucucac

SEQ ID NO: 3169958 - RNA, 19 nt, Artificial Sequence
  Description of Artificial Sequence: Synthetic oligonucleotide
aaauggcuguguuugcacu

SEQ ID NO: 3169959 - RNA, 19 nt, Artificial Sequence
  Description of Artificial Sequence: Synthetic oligonucleotide
aauacugcacuuuguugau

SEQ ID NO: 3169960 - RNA, 19 nt, Artificial Sequence
  Description of Artificial Sequence: Synthetic oligonucleotide
auggaaacaacgugcucuc

SEQ ID NO: 3169961 - RNA, 19 nt, Artificial Sequence
  Description of Artificial Sequence: Synthetic oligonucleotide
ucuugagauaaugauuugu

SEQ ID NO: 3169962 - RNA, 19 nt, Artificial Sequence
  Description of Artificial Sequence: Synthetic oligonucleotide
uguaaauugcuggaguuau

SEQ ID NO: 3169963 - RNA, 19 nt, Artificial Sequence
  Description of Artificial Sequence: Synthetic oligonucleotide
aaacucguaaugucuguau

SEQ ID NO: 3169964 - RNA, 19 nt, Artificial Sequence
  Description of Artificial Sequence: Synthetic oligonucleotide
uugaugccccuucaucugg

SEQ ID NO: 3169965 - RNA, 19 nt, Artificial Sequence
  Description of Artificial Sequence: Synthetic oligonucleotide
uugaagacagucuacuguu

SEQ ID NO: 3169966 - RNA, 19 nt, Artificial Sequence
  Description of Artificial Sequence: Synthetic oligonucleotide
uguuuauucugcucaguaa

SEQ ID NO: 3169967 - RNA, 19 nt, Artificial Sequence
  Description of Artificial Sequence: Synthetic oligonucleotide
uccucagaauucauaguca

SEQ ID NO: 3169968 - RNA, 19 nt, Artificial Sequence
  Description of Artificial Sequence: Synthetic oligonucleotide
uaauuuucucuuuucuuua

SEQ ID NO: 3169969 - RNA, 19 nt, Artificial Sequence
  Description of Artificial Sequence: Synthetic oligonucleotide
acagucuacuguuaucucu

SEQ ID NO: 3169970 - RNA, 19 nt, Artificial Sequence
  Description of Artificial Sequence: Synthetic oligonucleotide
gaauagcuagcccaguguc

SEQ ID NO: 3169971 - RNA, 19 nt, Artificial Sequence
  Description of Artificial Sequence: Synthetic oligonucleotide
auauguuucacacgugcaa

SEQ ID NO: 3169972 - RNA, 19 nt, Artificial Sequence
  Description of Artificial Sequence: Synthetic oligonucleotide
uuugcugaagucugcuucu

SEQ ID NO: 3169973 - RNA, 19 nt, Artificial Sequence
  Description of Artificial Sequence: Synthetic oligonucleotide
ugucucauguuguuugcug

SEQ ID NO: 3169974 - RNA, 19 nt, Artificial Sequence
  Description of Artificial Sequence: Synthetic oligonucleotide
ugcucaguaauuccuguaa

SEQ ID NO: 3169975 - RNA, 19 nt, Artificial Sequence
  Description of Artificial Sequence: Synthetic oligonucleotide
gcacauaauagcuucauca

SEQ ID NO: 3169976 - RNA, 19 nt, Artificial Sequence
  Description of Artificial Sequence: Synthetic oligonucleotide
ugagaauuuccaauucuuu

SEQ ID NO: 3169977 - RNA, 19 nt, Artificial Sequence
  Description of Artificial Sequence: Synthetic oligonucleotide
acaguaauuuuaccuucag

SEQ ID NO: 3169978 - RNA, 19 nt, Artificial Sequence
  Description of Artificial Sequence: Synthetic oligonucleotide
cuguaguaaacucguaaug

SEQ ID NO: 3169979 - RNA, 19 nt, Artificial Sequence
  Description of Artificial Sequence: Synthetic oligonucleotide
aagacaaauggcuguguuu

SEQ ID NO: 3169980 - RNA, 19 nt, Artificial Sequence
  Description of Artificial Sequence: Synthetic oligonucleotide
gauaaggaccaauggccug

SEQ ID NO: 3169981 - RNA, 19 nt, Artificial Sequence
  Description of Artificial Sequence: Synthetic oligonucleotide
ugacaguaauuuuaccuuc

SEQ ID NO: 3169982 - RNA, 19 nt, Artificial Sequence
  Description of Artificial Sequence: Synthetic oligonucleotide
aguaaacucguaaugucug

SEQ ID NO: 3169983 - RNA, 19 nt, Artificial Sequence
  Description of Artificial Sequence: Synthetic oligonucleotide
uucucguggaguuccaacu

SEQ ID NO: 3169984 - RNA, 19 nt, Artificial Sequence
  Description of Artificial Sequence: Synthetic oligonucleotide
aauuauuuugucuuguugg

SEQ ID NO: 3169985 - RNA, 19 nt, Artificial Sequence
  Description of Artificial Sequence: Synthetic oligonucleotide
aagaauucucuauaaaucc

SEQ ID NO: 3169986 - RNA, 19 nt, Artificial Sequence
  Description of Artificial Sequence: Synthetic oligonucleotide
uauaaauccauccauguaa

SEQ ID NO: 3169987 - RNA, 19 nt, Artificial Sequence
  Description of Artificial Sequence: Synthetic oligonucleotide
aauccauccauguaaaaga

SEQ ID NO: 3169988 - RNA, 19 nt, Artificial Sequence
  Description of Artificial Sequence: Synthetic oligonucleotide
ucauuuucagaaaagaauc

SEQ ID NO: 3169989 - RNA, 19 nt, Artificial Sequence
  Description of Artificial Sequence: Synthetic oligonucleotide
auucucuauaaauccaucc

SEQ ID NO: 3169990 - RNA, 19 nt, Artificial Sequence
  Description of Artificial Sequence: Synthetic oligonucleotide
ugucauuagaauuauuuug

SEQ ID NO: 3169991 - RNA, 19 nt, Artificial Sequence
  Description of Artificial Sequence: Synthetic oligonucleotide
ucagaaaagaaucucuucu

SEQ ID NO: 3169992 - RNA, 19 nt, Artificial Sequence
  Description of Artificial Sequence: Synthetic oligonucleotide
auuagaauuauuuugucuu

SEQ ID NO: 3169993 - RNA, 19 nt, Artificial Sequence
  Description of Artificial Sequence: Synthetic oligonucleotide
aaauccauccauguaaaag

SEQ ID NO: 3169994 - RNA, 19 nt, Artificial Sequence
  Description of Artificial Sequence: Synthetic oligonucleotide
ucuacuucuucacuucugg

SEQ ID NO: 3169995 - RNA, 19 nt, Artificial Sequence
  Description of Artificial Sequence: Synthetic oligonucleotide
uuuucagaaaagaaucucu

SEQ ID NO: 3169996 - RNA, 19 nt, Artificial Sequence
  Description of Artificial Sequence: Synthetic oligonucleotide
uuuaguucggcuucugucc

SEQ ID NO: 3169997 - RNA, 19 nt, Artificial Sequence
  Description of Artificial Sequence: Synthetic oligonucleotide
auguaaaagacuucgcaag

SEQ ID NO: 3169998 - RNA, 19 nt, Artificial Sequence
  Description of Artificial Sequence: Synthetic oligonucleotide
auuucgugaguuuugagcu

SEQ ID NO: 3169999 - RNA, 19 nt, Artificial Sequence
  Description of Artificial Sequence: Synthetic oligonucleotide
ucuacagucagcauuucgu

SEQ ID NO: 3170000 - RNA, 19 nt, Artificial Sequence
  Description of Artificial Sequence: Synthetic oligonucleotide
caagaauucucuauaaauc

SEQ ID NO: 3170001 - RNA, 19 nt, Artificial Sequence
  Description of Artificial Sequence: Synthetic oligonucleotide
uucucuauaaauccaucca

SEQ ID NO: 3170002 - RNA, 19 nt, Artificial Sequence
  Description of Artificial Sequence: Synthetic oligonucleotide
cauuucgugaguuuugagc

SEQ ID NO: 3170003 - RNA, 19 nt, Artificial Sequence
  Description of Artificial Sequence: Synthetic oligonucleotide
acaagaauucucuauaaau

SEQ ID NO: 3170004 - RNA, 19 nt, Artificial Sequence
  Description of Artificial Sequence: Synthetic oligonucleotide
ucuauaaauccauccaugu

SEQ ID NO: 3170005 - RNA, 19 nt, Artificial Sequence
  Description of Artificial Sequence: Synthetic oligonucleotide
uauuuugucuuguuggaga

SEQ ID NO: 3170006 - RNA, 19 nt, Artificial Sequence
  Description of Artificial Sequence: Synthetic oligonucleotide
ugaggcagagcucugaacu

SEQ ID NO: 3170007 - RNA, 19 nt, Artificial Sequence
  Description of Artificial Sequence: Synthetic oligonucleotide
gaauuauuuugucuuguug

SEQ ID NO: 3170008 - RNA, 19 nt, Artificial Sequence
  Description of Artificial Sequence: Synthetic oligonucleotide
ugaguuuugagcucugugu

SEQ ID NO: 3170009 - RNA, 19 nt, Artificial Sequence
  Description of Artificial Sequence: Synthetic oligonucleotide
uuagaauuauuuugucuug

SEQ ID NO: 3170010 - RNA, 19 nt, Artificial Sequence
  Description of Artificial Sequence: Synthetic oligonucleotide
ucauguacuuugcuagggg

SEQ ID NO: 3170011 - RNA, 19 nt, Artificial Sequence
  Description of Artificial Sequence: Synthetic oligonucleotide
ucuuucuuguaucuuuagc

SEQ ID NO: 3170012 - RNA, 19 nt, Artificial Sequence
  Description of Artificial Sequence: Synthetic oligonucleotide
uguaaaagacuucgcaagu

SEQ ID NO: 3170013 - RNA, 19 nt, Artificial Sequence
  Description of Artificial Sequence: Synthetic oligonucleotide
auuuucagaaaagaaucuc

SEQ ID NO: 3170014 - RNA, 19 nt, Artificial Sequence
  Description of Artificial Sequence: Synthetic oligonucleotide
auccauguaaaagacuucg

SEQ ID NO: 3170015 - RNA, 19 nt, Artificial Sequence
  Description of Artificial Sequence: Synthetic oligonucleotide
ucucauuuucagaaaagaa

SEQ ID NO: 3170016 - RNA, 19 nt, Artificial Sequence
  Description of Artificial Sequence: Synthetic oligonucleotide
acuuucucuacuucuucac

SEQ ID NO: 3170017 - RNA, 19 nt, Artificial Sequence
  Description of Artificial Sequence: Synthetic oligonucleotide
acagucagcauuucgugag

SEQ ID NO: 3170018 - RNA, 19 nt, Artificial Sequence
  Description of Artificial Sequence: Synthetic oligonucleotide
auuauuuugucuuguugga

SEQ ID NO: 3170019 - RNA, 19 nt, Artificial Sequence
  Description of Artificial Sequence: Synthetic oligonucleotide
uuaguucggcuucuguccg

SEQ ID NO: 3170020 - RNA, 19 nt, Artificial Sequence
  Description of Artificial Sequence: Synthetic oligonucleotide
ucuucuuuaguucggcuuc

SEQ ID NO: 3170021 - RNA, 19 nt, Artificial Sequence
  Description of Artificial Sequence: Synthetic oligonucleotide
ucucuauaaauccauccau

SEQ ID NO: 3170022 - RNA, 19 nt, Artificial Sequence
  Description of Artificial Sequence: Synthetic oligonucleotide
aauucucuauaaauccauc

SEQ ID NO: 3170023 - RNA, 19 nt, Artificial Sequence
  Description of Artificial Sequence: Synthetic oligonucleotide
aguccucccuuccuggugc

SEQ ID NO: 3170024 - RNA, 19 nt, Artificial Sequence
  Description of Artificial Sequence: Synthetic oligonucleotide
cucuauaaauccauccaug

SEQ ID NO: 3170025 - RNA, 19 nt, Artificial Sequence
  Description of Artificial Sequence: Synthetic oligonucleotide
agaccuuucucugucaguc

SEQ ID NO: 3170026 - RNA, 19 nt, Artificial Sequence
  Description of Artificial Sequence: Synthetic oligonucleotide
uuagcugaggcagagcucu

SEQ ID NO: 3170027 - RNA, 19 nt, Artificial Sequence
  Description of Artificial Sequence: Synthetic oligonucleotide
uuucagaaaagaaucucuu

SEQ ID NO: 3170028 - RNA, 19 nt, Artificial Sequence
  Description of Artificial Sequence: Synthetic oligonucleotide
uucucauuuucagaaaaga

SEQ ID NO: 3170029 - RNA, 19 nt, Artificial Sequence
  Description of Artificial Sequence: Synthetic oligonucleotide
ugagcucugugucugucag

SEQ ID NO: 3170030 - RNA, 19 nt, Artificial Sequence
  Description of Artificial Sequence: Synthetic oligonucleotide
cuuuaguucggcuucuguc

SEQ ID NO: 3170031 - RNA, 19 nt, Artificial Sequence
  Description of Artificial Sequence: Synthetic oligonucleotide
uuugcuaggggaucucuac

SEQ ID NO: 3170032 - RNA, 19 nt, Artificial Sequence
  Description of Artificial Sequence: Synthetic oligonucleotide
uuauuuugucuuguuggag

SEQ ID NO: 3170033 - RNA, 19 nt, Artificial Sequence
  Description of Artificial Sequence: Synthetic oligonucleotide
ccugucacgaguuugcugg

SEQ ID NO: 3170034 - RNA, 19 nt, Artificial Sequence
  Description of Artificial Sequence: Synthetic oligonucleotide
ucugucagaccuuucucug

SEQ ID NO: 3170035 - RNA, 19 nt, Artificial Sequence
  Description of Artificial Sequence: Synthetic oligonucleotide
agcucugugucugucagac

SEQ ID NO: 3170036 - RNA, 19 nt, Artificial Sequence
  Description of Artificial Sequence: Synthetic oligonucleotide
ugcuaggggaucucuacag

SEQ ID NO: 3170037 - RNA, 19 nt, Artificial Sequence
  Description of Artificial Sequence: Synthetic oligonucleotide
uucagaaaagaaucucuuc

SEQ ID NO: 3170038 - RNA, 19 nt, Artificial Sequence
  Description of Artificial Sequence: Synthetic oligonucleotide
ucuucuuucuuguaucuuu

SEQ ID NO: 3170039 - RNA, 19 nt, Artificial Sequence
  Description of Artificial Sequence: Synthetic oligonucleotide
cuucucauuuucagaaaag

SEQ ID NO: 3170040 - RNA, 19 nt, Artificial Sequence
  Description of Artificial Sequence: Synthetic oligonucleotide
uuccuggugccuuuguucc

SEQ ID NO: 3170041 - RNA, 19 nt, Artificial Sequence
  Description of Artificial Sequence: Synthetic oligonucleotide
ucagaccuuucucugucag

SEQ ID NO: 3170042 - RNA, 19 nt, Artificial Sequence
  Description of Artificial Sequence: Synthetic oligonucleotide
acgcuucuucuuuaguucg

SEQ ID NO: 3170043 - RNA, 19 nt, Artificial Sequence
  Description of Artificial Sequence: Synthetic oligonucleotide
gaguuuugagcucuguguc

SEQ ID NO: 3170044 - RNA, 19 nt, Artificial Sequence
  Description of Artificial Sequence: Synthetic oligonucleotide
cuuucuuguaucuuuagcu

SEQ ID NO: 3170045 - RNA, 19 nt, Artificial Sequence
  Description of Artificial Sequence: Synthetic oligonucleotide
uuuguuccucccuuccucc

SEQ ID NO: 3170046 - RNA, 19 nt, Artificial Sequence
  Description of Artificial Sequence: Synthetic oligonucleotide
uucucugucaguccucccu

SEQ ID NO: 3170047 - RNA, 19 nt, Artificial Sequence
  Description of Artificial Sequence: Synthetic oligonucleotide
ucauuagaauuauuuuguc

SEQ ID NO: 3170048 - RNA, 19 nt, Artificial Sequence
  Description of Artificial Sequence: Synthetic oligonucleotide
guuucuucuuucuuguauc

SEQ ID NO: 3170049 - RNA, 19 nt, Artificial Sequence
  Description of Artificial Sequence: Synthetic oligonucleotide
uccauguaaaagacuucgc

SEQ ID NO: 3170050 - RNA, 19 nt, Artificial Sequence
  Description of Artificial Sequence: Synthetic oligonucleotide
uuucuucuuucuuguaucu

SEQ ID NO: 3170051 - RNA, 19 nt, Artificial Sequence
  Description of Artificial Sequence: Synthetic oligonucleotide
uacuuucucuacuucuuca

SEQ ID NO: 3170052 - RNA, 19 nt, Artificial Sequence
  Description of Artificial Sequence: Synthetic oligonucleotide
agaaaagaaucucuucuuu

SEQ ID NO: 3170053 - RNA, 19 nt, Artificial Sequence
  Description of Artificial Sequence: Synthetic oligonucleotide
agcucugaacugcuggagg

SEQ ID NO: 3170054 - RNA, 19 nt, Artificial Sequence
  Description of Artificial Sequence: Synthetic oligonucleotide
cauguaaaagacuucgcaa

SEQ ID NO: 3170055 - RNA, 19 nt, Artificial Sequence
  Description of Artificial Sequence: Synthetic oligonucleotide
cuguccgucauguacuuug

SEQ ID NO: 3170056 - RNA, 19 nt, Artificial Sequence
  Description of Artificial Sequence: Synthetic oligonucleotide
uaggggaucucuacaguca

SEQ ID NO: 3170057 - RNA, 19 nt, Artificial Sequence
  Description of Artificial Sequence: Synthetic oligonucleotide
uucuuucuuguaucuuuag

SEQ ID NO: 3170058 - RNA, 19 nt, Artificial Sequence
  Description of Artificial Sequence: Synthetic oligonucleotide
uuucucuacuucuucacuu

SEQ ID NO: 3170059 - RNA, 19 nt, Artificial Sequence
  Description of Artificial Sequence: Synthetic oligonucleotide
cagagcucugaacugcugg

SEQ ID NO: 3170060 - RNA, 19 nt, Artificial Sequence
  Description of Artificial Sequence: Synthetic oligonucleotide
uacagucagcauuucguga

SEQ ID NO: 3170061 - RNA, 19 nt, Artificial Sequence
  Description of Artificial Sequence: Synthetic oligonucleotide
uagaauuauuuugucuugu

SEQ ID NO: 3170062 - RNA, 19 nt, Artificial Sequence
  Description of Artificial Sequence: Synthetic oligonucleotide
cuacagucagcauuucgug

SEQ ID NO: 3170063 - RNA, 19 nt, Artificial Sequence
  Description of Artificial Sequence: Synthetic oligonucleotide
uucuucuuuaguucggcuu

SEQ ID NO: 3170064 - RNA, 19 nt, Artificial Sequence
  Description of Artificial Sequence: Synthetic oligonucleotide
ucuuuaguucggcuucugu

SEQ ID NO: 3170065 - RNA, 19 nt, Artificial Sequence
  Description of Artificial Sequence: Synthetic oligonucleotide
aguuuugagcucugugucu

SEQ ID NO: 3170066 - RNA, 19 nt, Artificial Sequence
  Description of Artificial Sequence: Synthetic oligonucleotide
cucauuuucagaaaagaau

SEQ ID NO: 3170067 - RNA, 19 nt, Artificial Sequence
  Description of Artificial Sequence: Synthetic oligonucleotide
ugucagaccuuucucuguc

SEQ ID NO: 3170068 - RNA, 19 nt, Artificial Sequence
  Description of Artificial Sequence: Synthetic oligonucleotide
guaaaagacuucgcaagug

SEQ ID NO: 3170069 - RNA, 19 nt, Artificial Sequence
  Description of Artificial Sequence: Synthetic oligonucleotide
auccauccauguaaaagac

SEQ ID NO: 3170070 - RNA, 19 nt, Artificial Sequence
  Description of Artificial Sequence: Synthetic oligonucleotide
ucugucaguccucccuucc

SEQ ID NO: 3170071 - RNA, 19 nt, Artificial Sequence
  Description of Artificial Sequence: Synthetic oligonucleotide
cuaggggaucucuacaguc

SEQ ID NO: 3170072 - RNA, 19 nt, Artificial Sequence
  Description of Artificial Sequence: Synthetic oligonucleotide
ugucaguccucccuuccug

SEQ ID NO: 3170073 - RNA, 19 nt, Artificial Sequence
  Description of Artificial Sequence: Synthetic oligonucleotide
cucuacagucagcauuucg

SEQ ID NO: 3170074 - RNA, 19 nt, Artificial Sequence
  Description of Artificial Sequence: Synthetic oligonucleotide
ucucuacuucuucacuucu

SEQ ID NO: 3170075 - RNA, 19 nt, Artificial Sequence
  Description of Artificial Sequence: Synthetic oligonucleotide
agaauucucuauaaaucca

SEQ ID NO: 3170076 - RNA, 19 nt, Artificial Sequence
  Description of Artificial Sequence: Synthetic oligonucleotide
uucucuacuucuucacuuc

SEQ ID NO: 3170077 - RNA, 19 nt, Artificial Sequence
  Description of Artificial Sequence: Synthetic oligonucleotide
gucauguacuuugcuaggg

SEQ ID NO: 3170078 - RNA, 19 nt, Artificial Sequence
  Description of Artificial Sequence: Synthetic oligonucleotide
uccauccauguaaaagacu

SEQ ID NO: 3170079 - RNA, 19 nt, Artificial Sequence
  Description of Artificial Sequence: Synthetic oligonucleotide
aggggaucucuacagucag

SEQ ID NO: 3170080 - RNA, 19 nt, Artificial Sequence
  Description of Artificial Sequence: Synthetic oligonucleotide
agaauuauuuugucuuguu

SEQ ID NO: 3170081 - RNA, 19 nt, Artificial Sequence
  Description of Artificial Sequence: Synthetic oligonucleotide
gugaguuuugagcucugug

SEQ ID NO: 3170082 - RNA, 19 nt, Artificial Sequence
  Description of Artificial Sequence: Synthetic oligonucleotide
cuuccuggugccuuuguuc

SEQ ID NO: 3170083 - RNA, 19 nt, Artificial Sequence
  Description of Artificial Sequence: Synthetic oligonucleotide
gucauuagaauuauuuugu

SEQ ID NO: 3170084 - RNA, 19 nt, Artificial Sequence
  Description of Artificial Sequence: Synthetic oligonucleotide
agaaccauaguacacagcc

SEQ ID NO: 3170085 - RNA, 19 nt, Artificial Sequence
  Description of Artificial Sequence: Synthetic oligonucleotide
uacugguuggucaagaugg

SEQ ID NO: 3170086 - RNA, 19 nt, Artificial Sequence
  Description of Artificial Sequence: Synthetic oligonucleotide
aauaacagaagcuccaggu

SEQ ID NO: 3170087 - RNA, 19 nt, Artificial Sequence
  Description of Artificial Sequence: Synthetic oligonucleotide
ucuaucuuggcauggaggg

SEQ ID NO: 3170088 - RNA, 19 nt, Artificial Sequence
  Description of Artificial Sequence: Synthetic oligonucleotide
gaggaaagcacacaaagcc

SEQ ID NO: 3170089 - RNA, 19 nt, Artificial Sequence
  Description of Artificial Sequence: Synthetic oligonucleotide
auucaucucugucacagcc

SEQ ID NO: 3170090 - RNA, 19 nt, Artificial Sequence
  Description of Artificial Sequence: Synthetic oligonucleotide
acauacagaggcuuagugc

SEQ ID NO: 3170091 - RNA, 19 nt, Artificial Sequence
  Description of Artificial Sequence: Synthetic oligonucleotide
cauacagaggcuuagugcc

SEQ ID NO: 3170092 - RNA, 19 nt, Artificial Sequence
  Description of Artificial Sequence: Synthetic oligonucleotide
aaccauaguacacagccug

SEQ ID NO: 3170093 - RNA, 19 nt, Artificial Sequence
  Description of Artificial Sequence: Synthetic oligonucleotide
gagaggaaagcacacaaag

SEQ ID NO: 3170094 - RNA, 19 nt, Artificial Sequence
  Description of Artificial Sequence: Synthetic oligonucleotide
gacaguaaguaguugguag

SEQ ID NO: 3170095 - RNA, 19 nt, Artificial Sequence
  Description of Artificial Sequence: Synthetic oligonucleotide
uggaaggagcucaagacag

SEQ ID NO: 3170096 - RNA, 19 nt, Artificial Sequence
  Description of Artificial Sequence: Synthetic oligonucleotide
uucuaucuuggcauggagg

SEQ ID NO: 3170097 - RNA, 19 nt, Artificial Sequence
  Description of Artificial Sequence: Synthetic oligonucleotide
uaacagaagcuccagguug

SEQ ID NO: 3170098 - RNA, 19 nt, Artificial Sequence
  Description of Artificial Sequence: Synthetic oligonucleotide
uguagacugggauacagca

SEQ ID NO: 3170099 - RNA, 19 nt, Artificial Sequence
  Description of Artificial Sequence: Synthetic oligonucleotide
aggagcucaagacagggcg

SEQ ID NO: 3170100 - RNA, 19 nt, Artificial Sequence
  Description of Artificial Sequence: Synthetic oligonucleotide
agagcugccgccuauacug

SEQ ID NO: 3170101 - RNA, 19 nt, Artificial Sequence
  Description of Artificial Sequence: Synthetic oligonucleotide
acugggauacagcagacag

SEQ ID NO: 3170102 - RNA, 19 nt, Artificial Sequence
  Description of Artificial Sequence: Synthetic oligonucleotide
acaguaaguaguugguagg

SEQ ID NO: 3170103 - RNA, 19 nt, Artificial Sequence
  Description of Artificial Sequence: Synthetic oligonucleotide
gagccauggagccagaacc

SEQ ID NO: 3170104 - RNA, 19 nt, Artificial Sequence
  Description of Artificial Sequence: Synthetic oligonucleotide
uccaucuccagcagcaugc

SEQ ID NO: 3170105 - RNA, 19 nt, Artificial Sequence
  Description of Artificial Sequence: Synthetic oligonucleotide
cauggagccagaaccauag

SEQ ID NO: 3170106 - RNA, 19 nt, Artificial Sequence
  Description of Artificial Sequence: Synthetic oligonucleotide
agcagcaugcccguggucc

SEQ ID NO: 3170107 - RNA, 19 nt, Artificial Sequence
  Description of Artificial Sequence: Synthetic oligonucleotide
guaguugguaggcugcugg

SEQ ID NO: 3170108 - RNA, 19 nt, Artificial Sequence
  Description of Artificial Sequence: Synthetic oligonucleotide
ucaagacagggcgagagag

SEQ ID NO: 3170109 - RNA, 19 nt, Artificial Sequence
  Description of Artificial Sequence: Synthetic oligonucleotide
uguguucaguuccuguugc

SEQ ID NO: 3170110 - RNA, 19 nt, Artificial Sequence
  Description of Artificial Sequence: Synthetic oligonucleotide
uccagcaauaacagaagcu

SEQ ID NO: 3170111 - RNA, 19 nt, Artificial Sequence
  Description of Artificial Sequence: Synthetic oligonucleotide
uacagcagacaguaaguag

SEQ ID NO: 3170112 - RNA, 19 nt, Artificial Sequence
  Description of Artificial Sequence: Synthetic oligonucleotide
guaaguaguugguaggcug

SEQ ID NO: 3170113 - RNA, 19 nt, Artificial Sequence
  Description of Artificial Sequence: Synthetic oligonucleotide
agaggaaagcacacaaagc

SEQ ID NO: 3170114 - RNA, 19 nt, Artificial Sequence
  Description of Artificial Sequence: Synthetic oligonucleotide
ggauacagcagacaguaag

SEQ ID NO: 3170115 - RNA, 19 nt, Artificial Sequence
  Description of Artificial Sequence: Synthetic oligonucleotide
uucuggagaggaaagcaca

SEQ ID NO: 3170116 - RNA, 19 nt, Artificial Sequence
  Description of Artificial Sequence: Synthetic oligonucleotide
gcagacaguaaguaguugg

SEQ ID NO: 3170117 - RNA, 19 nt, Artificial Sequence
  Description of Artificial Sequence: Synthetic oligonucleotide
ugcaucggagccauggagc

SEQ ID NO: 3170118 - RNA, 19 nt, Artificial Sequence
  Description of Artificial Sequence: Synthetic oligonucleotide
uuagugcccacgaugcgcc

SEQ ID NO: 3170119 - RNA, 19 nt, Artificial Sequence
  Description of Artificial Sequence: Synthetic oligonucleotide
agaagcuccagguugucca

SEQ ID NO: 3170120 - RNA, 19 nt, Artificial Sequence
  Description of Artificial Sequence: Synthetic oligonucleotide
auaguacacagccugugcu

SEQ ID NO: 3170121 - RNA, 19 nt, Artificial Sequence
  Description of Artificial Sequence: Synthetic oligonucleotide
gaaggagcucaagacaggg

SEQ ID NO: 3170122 - RNA, 19 nt, Artificial Sequence
  Description of Artificial Sequence: Synthetic oligonucleotide
uggagaggaaagcacacaa

SEQ ID NO: 3170123 - RNA, 19 nt, Artificial Sequence
  Description of Artificial Sequence: Synthetic oligonucleotide
ugaugcgcccgcaacacug

SEQ ID NO: 3170124 - RNA, 19 nt, Artificial Sequence
  Description of Artificial Sequence: Synthetic oligonucleotide
aguuccuguugccuuuggc

SEQ ID NO: 3170125 - RNA, 19 nt, Artificial Sequence
  Description of Artificial Sequence: Synthetic oligonucleotide
uccagcagcaugcccgugg

SEQ ID NO: 3170126 - RNA, 19 nt, Artificial Sequence
  Description of Artificial Sequence: Synthetic oligonucleotide
ucuucuggagaggaaagca

SEQ ID NO: 3170127 - RNA, 19 nt, Artificial Sequence
  Description of Artificial Sequence: Synthetic oligonucleotide
aagacagggcgagagagcu

SEQ ID NO: 3170128 - RNA, 19 nt, Artificial Sequence
  Description of Artificial Sequence: Synthetic oligonucleotide
augcccgugguccaugugg

SEQ ID NO: 3170129 - RNA, 19 nt, Artificial Sequence
  Description of Artificial Sequence: Synthetic oligonucleotide
acccgcuguguucaguucc

SEQ ID NO: 3170130 - RNA, 19 nt, Artificial Sequence
  Description of Artificial Sequence: Synthetic oligonucleotide
auacugguuggucaagaug

SEQ ID NO: 3170131 - RNA, 19 nt, Artificial Sequence
  Description of Artificial Sequence: Synthetic oligonucleotide
guugguaggcugcuggaag

SEQ ID NO: 3170132 - RNA, 19 nt, Artificial Sequence
  Description of Artificial Sequence: Synthetic oligonucleotide
ugcuggaaggagcucaaga

SEQ ID NO: 3170133 - RNA, 19 nt, Artificial Sequence
  Description of Artificial Sequence: Synthetic oligonucleotide
uugcaucggagccauggag

SEQ ID NO: 3170134 - RNA, 19 nt, Artificial Sequence
  Description of Artificial Sequence: Synthetic oligonucleotide
caauaacagaagcuccagg

SEQ ID NO: 3170135 - RNA, 19 nt, Artificial Sequence
  Description of Artificial Sequence: Synthetic oligonucleotide
cagcaauaacagaagcucc

SEQ ID NO: 3170136 - RNA, 19 nt, Artificial Sequence
  Description of Artificial Sequence: Synthetic oligonucleotide
cauaguacacagccugugc

SEQ ID NO: 3170137 - RNA, 19 nt, Artificial Sequence
  Description of Artificial Sequence: Synthetic oligonucleotide
ugggauacagcagacagua

SEQ ID NO: 3170138 - RNA, 19 nt, Artificial Sequence
  Description of Artificial Sequence: Synthetic oligonucleotide
cuccauuuccugaugcgcc

SEQ ID NO: 3170139 - RNA, 19 nt, Artificial Sequence
  Description of Artificial Sequence: Synthetic oligonucleotide
acagcagacaguaaguagu

SEQ ID NO: 3170140 - RNA, 19 nt, Artificial Sequence
  Description of Artificial Sequence: Synthetic oligonucleotide
uaucuuggcauggagggac

SEQ ID NO: 3170141 - RNA, 19 nt, Artificial Sequence
  Description of Artificial Sequence: Synthetic oligonucleotide
ucuggagaggaaagcacac

SEQ ID NO: 3170142 - RNA, 19 nt, Artificial Sequence
  Description of Artificial Sequence: Synthetic oligonucleotide
agguuguccaucuccagca

SEQ ID NO: 3170143 - RNA, 19 nt, Artificial Sequence
  Description of Artificial Sequence: Synthetic oligonucleotide
ugugcuguagacugggaua

SEQ ID NO: 3170144 - RNA, 19 nt, Artificial Sequence
  Description of Artificial Sequence: Synthetic oligonucleotide
cagggccacauacagaggc

SEQ ID NO: 3170145 - RNA, 19 nt, Artificial Sequence
  Description of Artificial Sequence: Synthetic oligonucleotide
agggcgagagagcugccgc

SEQ ID NO: 3170146 - RNA, 19 nt, Artificial Sequence
  Description of Artificial Sequence: Synthetic oligonucleotide
uccagguuguccaucucca

SEQ ID NO: 3170147 - RNA, 19 nt, Artificial Sequence
  Description of Artificial Sequence: Synthetic oligonucleotide
ugccuuuggcuccauuucc

SEQ ID NO: 3170148 - RNA, 19 nt, Artificial Sequence
  Description of Artificial Sequence: Synthetic oligonucleotide
aaggagcucaagacagggc

SEQ ID NO: 3170149 - RNA, 19 nt, Artificial Sequence
  Description of Artificial Sequence: Synthetic oligonucleotide
uggacugcccaccuggggu

SEQ ID NO: 3170150 - RNA, 19 nt, Artificial Sequence
  Description of Artificial Sequence: Synthetic oligonucleotide
gucagguugcaucggagcc

SEQ ID NO: 3170151 - RNA, 19 nt, Artificial Sequence
  Description of Artificial Sequence: Synthetic oligonucleotide
uguuguccucuucuggaga

SEQ ID NO: 3170152 - RNA, 19 nt, Artificial Sequence
  Description of Artificial Sequence: Synthetic oligonucleotide
cuucuggagaggaaagcac

SEQ ID NO: 3170153 - RNA, 19 nt, Artificial Sequence
  Description of Artificial Sequence: Synthetic oligonucleotide
cuuagugcccacgaugcgc

SEQ ID NO: 3170154 - RNA, 19 nt, Artificial Sequence
  Description of Artificial Sequence: Synthetic oligonucleotide
uuuggcuccauuuccugau

SEQ ID NO: 3170155 - RNA, 19 nt, Artificial Sequence
  Description of Artificial Sequence: Synthetic oligonucleotide
gacagggcgagagagcugc

SEQ ID NO: 3170156 - RNA, 19 nt, Artificial Sequence
  Description of Artificial Sequence: Synthetic oligonucleotide
uggagccagaaccauagua

SEQ ID NO: 3170157 - RNA, 19 nt, Artificial Sequence
  Description of Artificial Sequence: Synthetic oligonucleotide
ugugccagggccacauaca

SEQ ID NO: 3170158 - RNA, 19 nt, Artificial Sequence
  Description of Artificial Sequence: Synthetic oligonucleotide
cacauacagaggcuuagug

SEQ ID NO: 3170159 - RNA, 19 nt, Artificial Sequence
  Description of Artificial Sequence: Synthetic oligonucleotide
agagagcugccgccuauac

SEQ ID NO: 3170160 - RNA, 19 nt, Artificial Sequence
  Description of Artificial Sequence: Synthetic oligonucleotide
cuuguuguccucuucugga

SEQ ID NO: 3170161 - RNA, 19 nt, Artificial Sequence
  Description of Artificial Sequence: Synthetic oligonucleotide
uuccuguugccuuuggcuc

SEQ ID NO: 3170162 - RNA, 19 nt, Artificial Sequence
  Description of Artificial Sequence: Synthetic oligonucleotide
uccauuuccugaugcgccc

SEQ ID NO: 3170163 - RNA, 19 nt, Artificial Sequence
  Description of Artificial Sequence: Synthetic oligonucleotide
uucaucucugucacagccu

SEQ ID NO: 3170164 - RNA, 19 nt, Artificial Sequence
  Description of Artificial Sequence: Synthetic oligonucleotide
ugguccauguggcuggacu

SEQ ID NO: 3170165 - RNA, 19 nt, Artificial Sequence
  Description of Artificial Sequence: Synthetic oligonucleotide
ugucacagccuuguugucc

SEQ ID NO: 3170166 - RNA, 19 nt, Artificial Sequence
  Description of Artificial Sequence: Synthetic oligonucleotide
caagauggccuuccgcucc

SEQ ID NO: 3170167 - RNA, 19 nt, Artificial Sequence
  Description of Artificial Sequence: Synthetic oligonucleotide
aggcuuagugcccacgaug

SEQ ID NO: 3170168 - RNA, 19 nt, Artificial Sequence
  Description of Artificial Sequence: Synthetic oligonucleotide
auaacagaagcuccagguu

SEQ ID NO: 3170169 - RNA, 19 nt, Artificial Sequence
  Description of Artificial Sequence: Synthetic oligonucleotide
cuugcgcugugccagggcc

SEQ ID NO: 3170170 - RNA, 19 nt, Artificial Sequence
  Description of Artificial Sequence: Synthetic oligonucleotide
cuccagcaauaacagaagc

SEQ ID NO: 3170171 - RNA, 19 nt, Artificial Sequence
  Description of Artificial Sequence: Synthetic oligonucleotide
ucaucucugucacagccuu

SEQ ID NO: 3170172 - RNA, 19 nt, Artificial Sequence
  Description of Artificial Sequence: Synthetic oligonucleotide
aacagaagcuccagguugu

SEQ ID NO: 3170173 - RNA, 19 nt, Artificial Sequence
  Description of Artificial Sequence: Synthetic oligonucleotide
uguucaguuccuguugccu

SEQ ID NO: 3170174 - RNA, 19 nt, Artificial Sequence
  Description of Artificial Sequence: Synthetic oligonucleotide
cuccagguuguccaucucc

SEQ ID NO: 3170175 - RNA, 19 nt, Artificial Sequence
  Description of Artificial Sequence: Synthetic oligonucleotide
uugccuuuggcuccauuuc

SEQ ID NO: 3170176 - RNA, 19 nt, Artificial Sequence
  Description of Artificial Sequence: Synthetic oligonucleotide
caguaaguaguugguaggc

SEQ ID NO: 3170177 - RNA, 19 nt, Artificial Sequence
  Description of Artificial Sequence: Synthetic oligonucleotide
cuucuaucuuggcauggag

SEQ ID NO: 3170178 - RNA, 19 nt, Artificial Sequence
  Description of Artificial Sequence: Synthetic oligonucleotide
ucggucguggguucucccg

SEQ ID NO: 3170179 - RNA, 19 nt, Artificial Sequence
  Description of Artificial Sequence: Synthetic oligonucleotide
cagguuguccaucuccagc

SEQ ID NO: 3170180 - RNA, 19 nt, Artificial Sequence
  Description of Artificial Sequence: Synthetic oligonucleotide
gagccagaaccauaguaca

SEQ ID NO: 3170181 - RNA, 19 nt, Artificial Sequence
  Description of Artificial Sequence: Synthetic oligonucleotide
cuguagacugggauacagc

SEQ ID NO: 3170182 - RNA, 19 nt, Artificial Sequence
  Description of Artificial Sequence: Synthetic oligonucleotide
uccugaugcgcccgcaaca

SEQ ID NO: 3170183 - RNA, 19 nt, Artificial Sequence
  Description of Artificial Sequence: Synthetic oligonucleotide
agcaauaacagaagcucca

SEQ ID NO: 3170184 - RNA, 19 nt, Artificial Sequence
  Description of Artificial Sequence: Synthetic oligonucleotide
uuugaaauaauuuuaaaca

SEQ ID NO: 3170185 - RNA, 19 nt, Artificial Sequence
  Description of Artificial Sequence: Synthetic oligonucleotide
auuugaaauaauuuuaaac

SEQ ID NO: 3170186 - RNA, 19 nt, Artificial Sequence
  Description of Artificial Sequence: Synthetic oligonucleotide
aauaauuuuaaacaucuga

SEQ ID NO: 3170187 - RNA, 19 nt, Artificial Sequence
  Description of Artificial Sequence: Synthetic oligonucleotide
uuuaaauauacaaacaacu

SEQ ID NO: 3170188 - RNA, 19 nt, Artificial Sequence
  Description of Artificial Sequence: Synthetic oligonucleotide
aacaagauuacacaaaugu

SEQ ID NO: 3170189 - RNA, 19 nt, Artificial Sequence
  Description of Artificial Sequence: Synthetic oligonucleotide
agcauuuaaauauacaaac

SEQ ID NO: 3170190 - RNA, 19 nt, Artificial Sequence
  Description of Artificial Sequence: Synthetic oligonucleotide
aauuuuaaacaucugacca

SEQ ID NO: 3170191 - RNA, 19 nt, Artificial Sequence
  Description of Artificial Sequence: Synthetic oligonucleotide
acaguaauagaauauggcc

SEQ ID NO: 3170192 - RNA, 19 nt, Artificial Sequence
  Description of Artificial Sequence: Synthetic oligonucleotide
caagauuacacaaaugugg

SEQ ID NO: 3170193 - RNA, 19 nt, Artificial Sequence
  Description of Artificial Sequence: Synthetic oligonucleotide
aaauauacaaacaacuuug

SEQ ID NO: 3170194 - RNA, 19 nt, Artificial Sequence
  Description of Artificial Sequence: Synthetic oligonucleotide
uauacaaacaacuuugggu

SEQ ID NO: 3170195 - RNA, 19 nt, Artificial Sequence
  Description of Artificial Sequence: Synthetic oligonucleotide
acauauacacaauuuacgg

SEQ ID NO: 3170196 - RNA, 19 nt, Artificial Sequence
  Description of Artificial Sequence: Synthetic oligonucleotide
auaauuuuaaacaucugac

SEQ ID NO: 3170197 - RNA, 19 nt, Artificial Sequence
  Description of Artificial Sequence: Synthetic oligonucleotide
aacaguaauagaauauggc

SEQ ID NO: 3170198 - RNA, 19 nt, Artificial Sequence
  Description of Artificial Sequence: Synthetic oligonucleotide
uaagcauuuaaauauacaa

SEQ ID NO: 3170199 - RNA, 19 nt, Artificial Sequence
  Description of Artificial Sequence: Synthetic oligonucleotide
aauagaauauggccguaac

SEQ ID NO: 3170200 - RNA, 19 nt, Artificial Sequence
  Description of Artificial Sequence: Synthetic oligonucleotide
aacauauacacaauuuacg

SEQ ID NO: 3170201 - RNA, 19 nt, Artificial Sequence
  Description of Artificial Sequence: Synthetic oligonucleotide
aagcuaagcauuuaaauau

SEQ ID NO: 3170202 - RNA, 19 nt, Artificial Sequence
  Description of Artificial Sequence: Synthetic oligonucleotide
auauacacaauuuacggca

SEQ ID NO: 3170203 - RNA, 19 nt, Artificial Sequence
  Description of Artificial Sequence: Synthetic oligonucleotide
agagugauauacuagaggu

SEQ ID NO: 3170204 - RNA, 19 nt, Artificial Sequence
  Description of Artificial Sequence: Synthetic oligonucleotide
caguaauagaauauggccg

SEQ ID NO: 3170205 - RNA, 19 nt, Artificial Sequence
  Description of Artificial Sequence: Synthetic oligonucleotide
uaauuuuaaacaucugacc

SEQ ID NO: 3170206 - RNA, 19 nt, Artificial Sequence
  Description of Artificial Sequence: Synthetic oligonucleotide
uguauuugaaauaauuuua

SEQ ID NO: 3170207 - RNA, 19 nt, Artificial Sequence
  Description of Artificial Sequence: Synthetic oligonucleotide
uagaauauggccguaacag

SEQ ID NO: 3170208 - RNA, 19 nt, Artificial Sequence
  Description of Artificial Sequence: Synthetic oligonucleotide
acuguggcuaauuaaacuc

SEQ ID NO: 3170209 - RNA, 19 nt, Artificial Sequence
  Description of Artificial Sequence: Synthetic oligonucleotide
aaagcuaagcauuuaaaua

SEQ ID NO: 3170210 - RNA, 19 nt, Artificial Sequence
  Description of Artificial Sequence: Synthetic oligonucleotide
gauuacacaaaugugggag

SEQ ID NO: 3170211 - RNA, 19 nt, Artificial Sequence
  Description of Artificial Sequence: Synthetic oligonucleotide
auuuaaauauacaaacaac

SEQ ID NO: 3170212 - RNA, 19 nt, Artificial Sequence
  Description of Artificial Sequence: Synthetic oligonucleotide
aauuaaacucuuaacaaca

SEQ ID NO: 3170213 - RNA, 19 nt, Artificial Sequence
  Description of Artificial Sequence: Synthetic oligonucleotide
uaacauauacacaauuuac

SEQ ID NO: 3170214 - RNA, 19 nt, Artificial Sequence
  Description of Artificial Sequence: Synthetic oligonucleotide
cuuaacaacaguaauagaa

SEQ ID NO: 3170215 - RNA, 19 nt, Artificial Sequence
  Description of Artificial Sequence: Synthetic oligonucleotide
aauaaagcuaagcauuuaa

SEQ ID NO: 3170216 - RNA, 19 nt, Artificial Sequence
  Description of Artificial Sequence: Synthetic oligonucleotide
uaaacaucugaccaacaag

SEQ ID NO: 3170217 - RNA, 19 nt, Artificial Sequence
  Description of Artificial Sequence: Synthetic oligonucleotide
uaaauauacaaacaacuuu

SEQ ID NO: 3170218 - RNA, 19 nt, Artificial Sequence
  Description of Artificial Sequence: Synthetic oligonucleotide
aaaugugggagcauacugc

SEQ ID NO: 3170219 - RNA, 19 nt, Artificial Sequence
  Description of Artificial Sequence: Synthetic oligonucleotide
aagauuacacaaauguggg

SEQ ID NO: 3170220 - RNA, 19 nt, Artificial Sequence
  Description of Artificial Sequence: Synthetic oligonucleotide
uaaacucuuaacaacagua

SEQ ID NO: 3170221 - RNA, 19 nt, Artificial Sequence
  Description of Artificial Sequence: Synthetic oligonucleotide
uuaacauauacacaauuua

SEQ ID NO: 3170222 - RNA, 19 nt, Artificial Sequence
  Description of Artificial Sequence: Synthetic oligonucleotide
uacauaacuugcuaaaaca

SEQ ID NO: 3170223 - RNA, 19 nt, Artificial Sequence
  Description of Artificial Sequence: Synthetic oligonucleotide
uaauuaaacucuuaacaac

SEQ ID NO: 3170224 - RNA, 19 nt, Artificial Sequence
  Description of Artificial Sequence: Synthetic oligonucleotide
aagaacaggauggagagug

SEQ ID NO: 3170225 - RNA, 19 nt, Artificial Sequence
  Description of Artificial Sequence: Synthetic oligonucleotide
ugaaauaauuuuaaacauc

SEQ ID NO: 3170226 - RNA, 19 nt, Artificial Sequence
  Description of Artificial Sequence: Synthetic oligonucleotide
auuuacggcauuuacauaa

SEQ ID NO: 3170227 - RNA, 19 nt, Artificial Sequence
  Description of Artificial Sequence: Synthetic oligonucleotide
uuaaauauacaaacaacuu

SEQ ID NO: 3170228 - RNA, 19 nt, Artificial Sequence
  Description of Artificial Sequence: Synthetic oligonucleotide
auuacacaaaugugggagc

SEQ ID NO: 3170229 - RNA, 19 nt, Artificial Sequence
  Description of Artificial Sequence: Synthetic oligonucleotide
uugaaauaauuuuaaacau

SEQ ID NO: 3170230 - RNA, 19 nt, Artificial Sequence
  Description of Artificial Sequence: Synthetic oligonucleotide
uuaacaacaguaauagaau

SEQ ID NO: 3170231 - RNA, 19 nt, Artificial Sequence
  Description of Artificial Sequence: Synthetic oligonucleotide
uuuaacauauacacaauuu

SEQ ID NO: 3170232 - RNA, 19 nt, Artificial Sequence
  Description of Artificial Sequence: Synthetic oligonucleotide
aacaacuuuggguauagau

SEQ ID NO: 3170233 - RNA, 19 nt, Artificial Sequence
  Description of Artificial Sequence: Synthetic oligonucleotide
aauauacaaacaacuuugg

SEQ ID NO: 3170234 - RNA, 19 nt, Artificial Sequence
  Description of Artificial Sequence: Synthetic oligonucleotide
auauacuagagguguuucc

SEQ ID NO: 3170235 - RNA, 19 nt, Artificial Sequence
  Description of Artificial Sequence: Synthetic oligonucleotide
auauacaaacaacuuuggg

SEQ ID NO: 3170236 - RNA, 19 nt, Artificial Sequence
  Description of Artificial Sequence: Synthetic oligonucleotide
gagagugauauacuagagg

SEQ ID NO: 3170237 - RNA, 19 nt, Artificial Sequence
  Description of Artificial Sequence: Synthetic oligonucleotide
auacaaacaacuuugggua

SEQ ID NO: 3170238 - RNA, 19 nt, Artificial Sequence
  Description of Artificial Sequence: Synthetic oligonucleotide
uuacauaacuugcuaaaac

SEQ ID NO: 3170239 - RNA, 19 nt, Artificial Sequence
  Description of Artificial Sequence: Synthetic oligonucleotide
aguaauagaauauggccgu

SEQ ID NO: 3170240 - RNA, 19 nt, Artificial Sequence
  Description of Artificial Sequence: Synthetic oligonucleotide
aaacaucugaccaacaaga

SEQ ID NO: 3170241 - RNA, 19 nt, Artificial Sequence
  Description of Artificial Sequence: Synthetic oligonucleotide
cauauacacaauuuacggc

SEQ ID NO: 3170242 - RNA, 19 nt, Artificial Sequence
  Description of Artificial Sequence: Synthetic oligonucleotide
auauggccguaacagaccc

SEQ ID NO: 3170243 - RNA, 19 nt, Artificial Sequence
  Description of Artificial Sequence: Synthetic oligonucleotide
cucuuaacaacaguaauag

SEQ ID NO: 3170244 - RNA, 19 nt, Artificial Sequence
  Description of Artificial Sequence: Synthetic oligonucleotide
aauauggccguaacagacc

SEQ ID NO: 3170245 - RNA, 19 nt, Artificial Sequence
  Description of Artificial Sequence: Synthetic oligonucleotide
uaaagcuaagcauuuaaau

SEQ ID NO: 3170246 - RNA, 19 nt, Artificial Sequence
  Description of Artificial Sequence: Synthetic oligonucleotide
uggaagaacaggauggaga

SEQ ID NO: 3170247 - RNA, 19 nt, Artificial Sequence
  Description of Artificial Sequence: Synthetic oligonucleotide
caacaguaauagaauaugg

SEQ ID NO: 3170248 - RNA, 19 nt, Artificial Sequence
  Description of Artificial Sequence: Synthetic oligonucleotide
uuggguauagauuucuugu

SEQ ID NO: 3170249 - RNA, 19 nt, Artificial Sequence
  Description of Artificial Sequence: Synthetic oligonucleotide
uuaaacaucugaccaacaa

SEQ ID NO: 3170250 - RNA, 19 nt, Artificial Sequence
  Description of Artificial Sequence: Synthetic oligonucleotide
aggauggagagugauauac

SEQ ID NO: 3170251 - RNA, 19 nt, Artificial Sequence
  Description of Artificial Sequence: Synthetic oligonucleotide
aaaacuguggcuaauuaaa

SEQ ID NO: 3170252 - RNA, 19 nt, Artificial Sequence
  Description of Artificial Sequence: Synthetic oligonucleotide
gcuaauuaaacucuuaaca

SEQ ID NO: 3170253 - RNA, 19 nt, Artificial Sequence
  Description of Artificial Sequence: Synthetic oligonucleotide
uuuuaacauauacacaauu

SEQ ID NO: 3170254 - RNA, 19 nt, Artificial Sequence
  Description of Artificial Sequence: Synthetic oligonucleotide
uuuggguauagauuucuug

SEQ ID NO: 3170255 - RNA, 19 nt, Artificial Sequence
  Description of Artificial Sequence: Synthetic oligonucleotide
cugaccaacaagauuacac

SEQ ID NO: 3170256 - RNA, 19 nt, Artificial Sequence
  Description of Artificial Sequence: Synthetic oligonucleotide
aaugugggagcauacugca

SEQ ID NO: 3170257 - RNA, 19 nt, Artificial Sequence
  Description of Artificial Sequence: Synthetic oligonucleotide
gaaauaauuuuaaacaucu

SEQ ID NO: 3170258 - RNA, 19 nt, Artificial Sequence
  Description of Artificial Sequence: Synthetic oligonucleotide
agugauauacuagaggugu

SEQ ID NO: 3170259 - RNA, 19 nt, Artificial Sequence
  Description of Artificial Sequence: Synthetic oligonucleotide
uggagagugauauacuaga

SEQ ID NO: 3170260 - RNA, 19 nt, Artificial Sequence
  Description of Artificial Sequence: Synthetic oligonucleotide
aacuguggcuaauuaaacu

SEQ ID NO: 3170261 - RNA, 19 nt, Artificial Sequence
  Description of Artificial Sequence: Synthetic oligonucleotide
uauacuagagguguuuccc

SEQ ID NO: 3170262 - RNA, 19 nt, Artificial Sequence
  Description of Artificial Sequence: Synthetic oligonucleotide
cuaauuaaacucuuaacaa

SEQ ID NO: 3170263 - RNA, 19 nt, Artificial Sequence
  Description of Artificial Sequence: Synthetic oligonucleotide
acggcauuuacauaacuug

SEQ ID NO: 3170264 - RNA, 19 nt, Artificial Sequence
  Description of Artificial Sequence: Synthetic oligonucleotide
auacuagagguguuucccc

SEQ ID NO: 3170265 - RNA, 19 nt, Artificial Sequence
  Description of Artificial Sequence: Synthetic oligonucleotide
ugaccaacaagauuacaca

SEQ ID NO: 3170266 - RNA, 19 nt, Artificial Sequence
  Description of Artificial Sequence: Synthetic oligonucleotide
cauuuaaauauacaaacaa

SEQ ID NO: 3170267 - RNA, 19 nt, Artificial Sequence
  Description of Artificial Sequence: Synthetic oligonucleotide
agauuucuuguuaaguuac

SEQ ID NO: 3170268 - RNA, 19 nt, Artificial Sequence
  Description of Artificial Sequence: Synthetic oligonucleotide
aacucuuaacaacaguaau

SEQ ID NO: 3170269 - RNA, 19 nt, Artificial Sequence
  Description of Artificial Sequence: Synthetic oligonucleotide
auuuacauaacuugcuaaa

SEQ ID NO: 3170270 - RNA, 19 nt, Artificial Sequence
  Description of Artificial Sequence: Synthetic oligonucleotide
uauagauuucuuguuaagu

SEQ ID NO: 3170271 - RNA, 19 nt, Artificial Sequence
  Description of Artificial Sequence: Synthetic oligonucleotide
auagauuucuuguuaaguu

SEQ ID NO: 3170272 - RNA, 19 nt, Artificial Sequence
  Description of Artificial Sequence: Synthetic oligonucleotide
uuuuaaacaucugaccaac

SEQ ID NO: 3170273 - RNA, 19 nt, Artificial Sequence
  Description of Artificial Sequence: Synthetic oligonucleotide
uuaaacucuuaacaacagu

SEQ ID NO: 3170274 - RNA, 19 nt, Artificial Sequence
  Description of Artificial Sequence: Synthetic oligonucleotide
ugugggagcauacugcacu

SEQ ID NO: 3170275 - RNA, 19 nt, Artificial Sequence
  Description of Artificial Sequence: Synthetic oligonucleotide
aaacuguggcuaauuaaac

SEQ ID NO: 3170276 - RNA, 19 nt, Artificial Sequence
  Description of Artificial Sequence: Synthetic oligonucleotide
uucuuguuaaguuacuuuu

SEQ ID NO: 3170277 - RNA, 19 nt, Artificial Sequence
  Description of Artificial Sequence: Synthetic oligonucleotide
acaacaguaauagaauaug

SEQ ID NO: 3170278 - RNA, 19 nt, Artificial Sequence
  Description of Artificial Sequence: Synthetic oligonucleotide
caucugaccaacaagauua

SEQ ID NO: 3170279 - RNA, 19 nt, Artificial Sequence
  Description of Artificial Sequence: Synthetic oligonucleotide
uauuugaaauaauuuuaaa

SEQ ID NO: 3170280 - RNA, 19 nt, Artificial Sequence
  Description of Artificial Sequence: Synthetic oligonucleotide
auuuuaaacaucugaccaa

SEQ ID NO: 3170281 - RNA, 19 nt, Artificial Sequence
  Description of Artificial Sequence: Synthetic oligonucleotide
gaauauggccguaacagac

SEQ ID NO: 3170282 - RNA, 19 nt, Artificial Sequence
  Description of Artificial Sequence: Synthetic oligonucleotide
ggaagaacaggauggagag

SEQ ID NO: 3170283 - RNA, 19 nt, Artificial Sequence
  Description of Artificial Sequence: Synthetic oligonucleotide
uggcuaauuaaacucuuaa

SEQ ID NO: 3170284 - RNA, 19 nt, Artificial Sequence
  Description of Artificial Sequence: Synthetic oligonucleotide
auauagacauucuagacgc

SEQ ID NO: 3170285 - RNA, 19 nt, Artificial Sequence
  Description of Artificial Sequence: Synthetic oligonucleotide
uuucauauagacauucuag

SEQ ID NO: 3170286 - RNA, 19 nt, Artificial Sequence
  Description of Artificial Sequence: Synthetic oligonucleotide
cauauagacauucuagacg

SEQ ID NO: 3170287 - RNA, 19 nt, Artificial Sequence
  Description of Artificial Sequence: Synthetic oligonucleotide
uucaggacaggcaugaagc

SEQ ID NO: 3170288 - RNA, 19 nt, Artificial Sequence
  Description of Artificial Sequence: Synthetic oligonucleotide
aacuucguggaguccagcc

SEQ ID NO: 3170289 - RNA, 19 nt, Artificial Sequence
  Description of Artificial Sequence: Synthetic oligonucleotide
uucauauagacauucuaga

SEQ ID NO: 3170290 - RNA, 19 nt, Artificial Sequence
  Description of Artificial Sequence: Synthetic oligonucleotide
cucaaagcugccuucaucc

SEQ ID NO: 3170291 - RNA, 19 nt, Artificial Sequence
  Description of Artificial Sequence: Synthetic oligonucleotide
ugugcgauggugaggacag

SEQ ID NO: 3170292 - RNA, 19 nt, Artificial Sequence
  Description of Artificial Sequence: Synthetic oligonucleotide
ucauauagacauucuagac

SEQ ID NO: 3170293 - RNA, 19 nt, Artificial Sequence
  Description of Artificial Sequence: Synthetic oligonucleotide
uagacauucuagacgcugg

SEQ ID NO: 3170294 - RNA, 19 nt, Artificial Sequence
  Description of Artificial Sequence: Synthetic oligonucleotide
caugaagcuggauaccucg

SEQ ID NO: 3170295 - RNA, 19 nt, Artificial Sequence
  Description of Artificial Sequence: Synthetic oligonucleotide
uuuucauauagacauucua

SEQ ID NO: 3170296 - RNA, 19 nt, Artificial Sequence
  Description of Artificial Sequence: Synthetic oligonucleotide
agaguguccccucacagag

SEQ ID NO: 3170297 - RNA, 19 nt, Artificial Sequence
  Description of Artificial Sequence: Synthetic oligonucleotide
ugcaagacccugcucaaag

SEQ ID NO: 3170298 - RNA, 19 nt, Artificial Sequence
  Description of Artificial Sequence: Synthetic oligonucleotide
  modified_base (14)..(14): a, c, u, g, unknown or other
uagacgcuggguunccucg

SEQ ID NO: 3170299 - RNA, 19 nt, Artificial Sequence
  Description of Artificial Sequence: Synthetic oligonucleotide
cuggauaccucgcugaagc

SEQ ID NO: 3170300 - RNA, 19 nt, Artificial Sequence
  Description of Artificial Sequence: Synthetic oligonucleotide
aaagcugccuucauccacg

SEQ ID NO: 3170301 - RNA, 19 nt, Artificial Sequence
  Description of Artificial Sequence: Synthetic oligonucleotide
gagcuuuucauauagacau

SEQ ID NO: 3170302 - RNA, 19 nt, Artificial Sequence
  Description of Artificial Sequence: Synthetic oligonucleotide
ugagaguguccccucacag

SEQ ID NO: 3170303 - RNA, 19 nt, Artificial Sequence
  Description of Artificial Sequence: Synthetic oligonucleotide
cagagcuuuucauauagac

SEQ ID NO: 3170304 - RNA, 19 nt, Artificial Sequence
  Description of Artificial Sequence: Synthetic oligonucleotide
cacagagcuuuucauauag

SEQ ID NO: 3170305 - RNA, 19 nt, Artificial Sequence
  Description of Artificial Sequence: Synthetic oligonucleotide
cacgcaucgggcaacuucg

SEQ ID NO: 3170306 - RNA, 19 nt, Artificial Sequence
  Description of Artificial Sequence: Synthetic oligonucleotide
ugcagcuugugugcgaugg

SEQ ID NO: 3170307 - RNA, 19 nt, Artificial Sequence
  Description of Artificial Sequence: Synthetic oligonucleotide
gauaccucgcugaagcugc

SEQ ID NO: 3170308 - RNA, 19 nt, Artificial Sequence
  Description of Artificial Sequence: Synthetic oligonucleotide
caggcaugaagcuggauac

SEQ ID NO: 3170309 - RNA, 19 nt, Artificial Sequence
  Description of Artificial Sequence: Synthetic oligonucleotide
accucgcugaagcugcugc

SEQ ID NO: 3170310 - RNA, 19 nt, Artificial Sequence
  Description of Artificial Sequence: Synthetic oligonucleotide
aggacaggcaugaagcugg

SEQ ID NO: 3170311 - RNA, 19 nt, Artificial Sequence
  Description of Artificial Sequence: Synthetic oligonucleotide
aggacaugcggugagagug

SEQ ID NO: 3170312 - RNA, 19 nt, Artificial Sequence
  Description of Artificial Sequence: Synthetic oligonucleotide
uugugugcgauggugagga

SEQ ID NO: 3170313 - RNA, 19 nt, Artificial Sequence
  Description of Artificial Sequence: Synthetic oligonucleotide
agacauucuagacgcuggg

SEQ ID NO: 3170314 - RNA, 19 nt, Artificial Sequence
  Description of Artificial Sequence: Synthetic oligonucleotide
gugaggacagccuucagga

SEQ ID NO: 3170315 - RNA, 19 nt, Artificial Sequence
  Description of Artificial Sequence: Synthetic oligonucleotide
agcccugcagcuugugugc

SEQ ID NO: 3170316 - RNA, 19 nt, Artificial Sequence
  Description of Artificial Sequence: Synthetic oligonucleotide
aguguccccucacagagcu

SEQ ID NO: 3170317 - RNA, 19 nt, Artificial Sequence
  Description of Artificial Sequence: Synthetic oligonucleotide
cuucaggacaggcaugaag

SEQ ID NO: 3170318 - RNA, 19 nt, Artificial Sequence
  Description of Artificial Sequence: Synthetic oligonucleotide
gaagcuggauaccucgcug

SEQ ID NO: 3170319 - RNA, 19 nt, Artificial Sequence
  Description of Artificial Sequence: Synthetic oligonucleotide
  modified_base (18)..(18): a, c, u, g, unknown or other
auucuagacgcuggguunc

SEQ ID NO: 3170320 - RNA, 19 nt, Artificial Sequence
  Description of Artificial Sequence: Synthetic oligonucleotide
aagcuggauaccucgcuga

SEQ ID NO: 3170321 - RNA, 19 nt, Artificial Sequence
  Description of Artificial Sequence: Synthetic oligonucleotide
acaggcaugaagcuggaua

SEQ ID NO: 3170322 - RNA, 19 nt, Artificial Sequence
  Description of Artificial Sequence: Synthetic oligonucleotide
agacccugcucaaagcugc

SEQ ID NO: 3170323 - RNA, 19 nt, Artificial Sequence
  Description of Artificial Sequence: Synthetic oligonucleotide
auagacauucuagacgcug

SEQ ID NO: 3170324 - RNA, 19 nt, Artificial Sequence
  Description of Artificial Sequence: Synthetic oligonucleotide
gaggacagccuucaggaca

SEQ ID NO: 3170325 - RNA, 19 nt, Artificial Sequence
  Description of Artificial Sequence: Synthetic oligonucleotide
  modified_base (7)..(7): a, c, u, g, unknown or other
uggguunccucguccagcu

SEQ ID NO: 3170326 - RNA, 19 nt, Artificial Sequence
  Description of Artificial Sequence: Synthetic oligonucleotide
aagcugccuucauccacgc

SEQ ID NO: 3170327 - RNA, 19 nt, Artificial Sequence
  Description of Artificial Sequence: Synthetic oligonucleotide
caugcggugagaguguccc

SEQ ID NO: 3170328 - RNA, 19 nt, Artificial Sequence
  Description of Artificial Sequence: Synthetic oligonucleotide
ugaagcuggauaccucgcu

SEQ ID NO: 3170329 - RNA, 19 nt, Artificial Sequence
  Description of Artificial Sequence: Synthetic oligonucleotide
cuucguggaguccagccag

SEQ ID NO: 3170330 - RNA, 19 nt, Artificial Sequence
  Description of Artificial Sequence: Synthetic oligonucleotide
ggugaggacagccuucagg

SEQ ID NO: 3170331 - RNA, 19 nt, Artificial Sequence
  Description of Artificial Sequence: Synthetic oligonucleotide
uagcccugcagcuugugug

SEQ ID NO: 3170332 - RNA, 19 nt, Artificial Sequence
  Description of Artificial Sequence: Synthetic oligonucleotide
acauucuagacgcuggguu

SEQ ID NO: 3170333 - RNA, 19 nt, Artificial Sequence
  Description of Artificial Sequence: Synthetic oligonucleotide
guggaguccagccaggaca

SEQ ID NO: 3170334 - RNA, 19 nt, Artificial Sequence
  Description of Artificial Sequence: Synthetic oligonucleotide
ugcacugcaagacccugcu

SEQ ID NO: 3170335 - RNA, 19 nt, Artificial Sequence
  Description of Artificial Sequence: Synthetic oligonucleotide
gcaucgggcaacuucgugg

SEQ ID NO: 3170336 - RNA, 19 nt, Artificial Sequence
  Description of Artificial Sequence: Synthetic oligonucleotide
ucgcugaagcugcugcagg

SEQ ID NO: 3170337 - RNA, 19 nt, Artificial Sequence
  Description of Artificial Sequence: Synthetic oligonucleotide
agagcuuuucauauagaca

SEQ ID NO: 3170338 - RNA, 19 nt, Artificial Sequence
  Description of Artificial Sequence: Synthetic oligonucleotide
uucauccacgcaucgggca

SEQ ID NO: 3170339 - RNA, 19 nt, Artificial Sequence
  Description of Artificial Sequence: Synthetic oligonucleotide
cacugcaagacccugcuca

SEQ ID NO: 3170340 - RNA, 19 nt, Artificial Sequence
  Description of Artificial Sequence: Synthetic oligonucleotide
cugaagcugcugcaggccg

SEQ ID NO: 3170341 - RNA, 19 nt, Artificial Sequence
  Description of Artificial Sequence: Synthetic oligonucleotide
ugcgauggugaggacagcc

SEQ ID NO: 3170342 - RNA, 19 nt, Artificial Sequence
  Description of Artificial Sequence: Synthetic oligonucleotide
ucaaagcugccuucaucca

SEQ ID NO: 3170343 - RNA, 19 nt, Artificial Sequence
  Description of Artificial Sequence: Synthetic oligonucleotide
caaagcugccuucauccac

SEQ ID NO: 3170344 - RNA, 19 nt, Artificial Sequence
  Description of Artificial Sequence: Synthetic oligonucleotide
ccuucauccacgcaucggg

SEQ ID NO: 3170345 - RNA, 19 nt, Artificial Sequence
  Description of Artificial Sequence: Synthetic oligonucleotide
ucaggacaggcaugaagcu

SEQ ID NO: 3170346 - RNA, 19 nt, Artificial Sequence
  Description of Artificial Sequence: Synthetic oligonucleotide
cuucauccacgcaucgggc

SEQ ID NO: 3170347 - RNA, 19 nt, Artificial Sequence
  Description of Artificial Sequence: Synthetic oligonucleotide
gaguccagccaggacaugc

SEQ ID NO: 3170348 - RNA, 19 nt, Artificial Sequence
  Description of Artificial Sequence: Synthetic oligonucleotide
ugaagcugcugcaggccgc

SEQ ID NO: 3170349 - RNA, 19 nt, Artificial Sequence
  Description of Artificial Sequence: Synthetic oligonucleotide
uucguggaguccagccagg

SEQ ID NO: 3170350 - RNA, 19 nt, Artificial Sequence
  Description of Artificial Sequence: Synthetic oligonucleotide
ucauccacgcaucgggcaa

SEQ ID NO: 3170351 - RNA, 19 nt, Artificial Sequence
  Description of Artificial Sequence: Synthetic oligonucleotide
ugggcaugcacugcaagac

SEQ ID NO: 3170352 - RNA, 19 nt, Artificial Sequence
  Description of Artificial Sequence: Synthetic oligonucleotide
uauagacauucuagacgcu

SEQ ID NO: 3170353 - RNA, 19 nt, Artificial Sequence
  Description of Artificial Sequence: Synthetic oligonucleotide
ugccuucauccacgcaucg

SEQ ID NO: 3170354 - RNA, 19 nt, Artificial Sequence
  Description of Artificial Sequence: Synthetic oligonucleotide
acuucguggaguccagcca

SEQ ID NO: 3170355 - RNA, 19 nt, Artificial Sequence
  Description of Artificial Sequence: Synthetic oligonucleotide
aagacccugcucaaagcug

SEQ ID NO: 3170356 - RNA, 19 nt, Artificial Sequence
  Description of Artificial Sequence: Synthetic oligonucleotide
  modified_base (11)..(11): a, c, u, g, unknown or other
acgcuggguunccucgucc

SEQ ID NO: 3170357 - RNA, 19 nt, Artificial Sequence
  Description of Artificial Sequence: Synthetic oligonucleotide
uuagcccugcagcuugugu

SEQ ID NO: 3170358 - RNA, 19 nt, Artificial Sequence
  Description of Artificial Sequence: Synthetic oligonucleotide
augaagcuggauaccucgc

SEQ ID NO: 3170359 - RNA, 19 nt, Artificial Sequence
  Description of Artificial Sequence: Synthetic oligonucleotide
uggaguccagccaggacau

SEQ ID NO: 3170360 - RNA, 19 nt, Artificial Sequence
  Description of Artificial Sequence: Synthetic oligonucleotide
uccagccaggacaugcggu

SEQ ID NO: 3170361 - RNA, 19 nt, Artificial Sequence
  Description of Artificial Sequence: Synthetic oligonucleotide
gagaguguccccucacaga

SEQ ID NO: 3170362 - RNA, 19 nt, Artificial Sequence
  Description of Artificial Sequence: Synthetic oligonucleotide
aggacagccuucaggacag

SEQ ID NO: 3170363 - RNA, 19 nt, Artificial Sequence
  Description of Artificial Sequence: Synthetic oligonucleotide
aggcaugaagcuggauacc

SEQ ID NO: 3170364 - RNA, 19 nt, Artificial Sequence
  Description of Artificial Sequence: Synthetic oligonucleotide
cuugugugcgauggugagg

SEQ ID NO: 3170365 - RNA, 19 nt, Artificial Sequence
  Description of Artificial Sequence: Synthetic oligonucleotide
agcugcugcaggccgccac

SEQ ID NO: 3170366 - RNA, 19 nt, Artificial Sequence
  Description of Artificial Sequence: Synthetic oligonucleotide
ugcggugagaguguccccu

SEQ ID NO: 3170367 - RNA, 19 nt, Artificial Sequence
  Description of Artificial Sequence: Synthetic oligonucleotide
gcuuuucauauagacauuc

SEQ ID NO: 3170368 - RNA, 19 nt, Artificial Sequence
  Description of Artificial Sequence: Synthetic oligonucleotide
augcacugcaagacccugc

SEQ ID NO: 3170369 - RNA, 19 nt, Artificial Sequence
  Description of Artificial Sequence: Synthetic oligonucleotide
  modified_base (15)..(15): a, c, u, g, unknown or other
cuagacgcuggguunccuc

SEQ ID NO: 3170370 - RNA, 19 nt, Artificial Sequence
  Description of Artificial Sequence: Synthetic oligonucleotide
  modified_base (19)..(19): a, c, u, g, unknown or other
cauucuagacgcuggguun

SEQ ID NO: 3170371 - RNA, 19 nt, Artificial Sequence
  Description of Artificial Sequence: Synthetic oligonucleotide
ccuggcuuagcccugcagc

SEQ ID NO: 3170372 - RNA, 19 nt, Artificial Sequence
  Description of Artificial Sequence: Synthetic oligonucleotide
uguccccucacagagcuuu

SEQ ID NO: 3170373 - RNA, 19 nt, Artificial Sequence
  Description of Artificial Sequence: Synthetic oligonucleotide
cucacagagcuuuucauau

SEQ ID NO: 3170374 - RNA, 19 nt, Artificial Sequence
  Description of Artificial Sequence: Synthetic oligonucleotide
ucgggcaacuucguggagu

SEQ ID NO: 3170375 - RNA, 19 nt, Artificial Sequence
  Description of Artificial Sequence: Synthetic oligonucleotide
gauggugaggacagccuuc

SEQ ID NO: 3170376 - RNA, 19 nt, Artificial Sequence
  Description of Artificial Sequence: Synthetic oligonucleotide
aguccagccaggacaugcg

SEQ ID NO: 3170377 - RNA, 19 nt, Artificial Sequence
  Description of Artificial Sequence: Synthetic oligonucleotide
ugaggacagccuucaggac

SEQ ID NO: 3170378 - RNA, 19 nt, Artificial Sequence
  Description of Artificial Sequence: Synthetic oligonucleotide
  modified_base (2)..(2): a, c, u, g, unknown or other
unccucguccagcuuuccu

SEQ ID NO: 3170379 - RNA, 19 nt, Artificial Sequence
  Description of Artificial Sequence: Synthetic oligonucleotide
  modified_base (16)..(16): a, c, u, g, unknown or other
ucuagacgcuggguunccu

SEQ ID NO: 3170380 - RNA, 19 nt, Artificial Sequence
  Description of Artificial Sequence: Synthetic oligonucleotide
agccaggacaugcggugag

SEQ ID NO: 3170381 - RNA, 19 nt, Artificial Sequence
  Description of Artificial Sequence: Synthetic oligonucleotide
caucgggcaacuucgugga

SEQ ID NO: 3170382 - RNA, 19 nt, Artificial Sequence
  Description of Artificial Sequence: Synthetic oligonucleotide
guccagccaggacaugcgg

SEQ ID NO: 3170383 - RNA, 19 nt, Artificial Sequence
  Description of Artificial Sequence: Synthetic oligonucleotide
ucacagagcuuuucauaua

SEQ ID NO: 3170384 - RNA, 19 nt, Artificial Sequence
  Description of Artificial Sequence: Synthetic oligonucleotide
aaaauaguuguacaagcgc

SEQ ID NO: 3170385 - RNA, 19 nt, Artificial Sequence
  Description of Artificial Sequence: Synthetic oligonucleotide
uguuccauuaaguagaagg

SEQ ID NO: 3170386 - RNA, 19 nt, Artificial Sequence
  Description of Artificial Sequence: Synthetic oligonucleotide
auaagcaacaauaacaucc

SEQ ID NO: 3170387 - RNA, 19 nt, Artificial Sequence
  Description of Artificial Sequence: Synthetic oligonucleotide
aaaugaaucacccaucaca

SEQ ID NO: 3170388 - RNA, 19 nt, Artificial Sequence
  Description of Artificial Sequence: Synthetic oligonucleotide
aagacauuuaauuaacuca

SEQ ID NO: 3170389 - RNA, 19 nt, Artificial Sequence
  Description of Artificial Sequence: Synthetic oligonucleotide
uuuauguuaacuaugcuaa

SEQ ID NO: 3170390 - RNA, 19 nt, Artificial Sequence
  Description of Artificial Sequence: Synthetic oligonucleotide
uuaauuaacucaauaugag

SEQ ID NO: 3170391 - RNA, 19 nt, Artificial Sequence
  Description of Artificial Sequence: Synthetic oligonucleotide
aaauaguuguacaagcgcc

SEQ ID NO: 3170392 - RNA, 19 nt, Artificial Sequence
  Description of Artificial Sequence: Synthetic oligonucleotide
uuguauauguuccacagcc

SEQ ID NO: 3170393 - RNA, 19 nt, Artificial Sequence
  Description of Artificial Sequence: Synthetic oligonucleotide
aauuaacucaauaugagga

SEQ ID NO: 3170394 - RNA, 19 nt, Artificial Sequence
  Description of Artificial Sequence: Synthetic oligonucleotide
uaauuaacucaauaugagg

SEQ ID NO: 3170395 - RNA, 19 nt, Artificial Sequence
  Description of Artificial Sequence: Synthetic oligonucleotide
auauuugccauuucuugcc

SEQ ID NO: 3170396 - RNA, 19 nt, Artificial Sequence
  Description of Artificial Sequence: Synthetic oligonucleotide
auuguagauaaucugagcu

SEQ ID NO: 3170397 - RNA, 19 nt, Artificial Sequence
  Description of Artificial Sequence: Synthetic oligonucleotide
aaacacaugaaguacagua

SEQ ID NO: 3170398 - RNA, 19 nt, Artificial Sequence
  Description of Artificial Sequence: Synthetic oligonucleotide
ucaauaugaggacauacug

SEQ ID NO: 3170399 - RNA, 19 nt, Artificial Sequence
  Description of Artificial Sequence: Synthetic oligonucleotide
auuaacucaauaugaggac

SEQ ID NO: 3170400 - RNA, 19 nt, Artificial Sequence
  Description of Artificial Sequence: Synthetic oligonucleotide
gauaguguuacacucaaca

SEQ ID NO: 3170401 - RNA, 19 nt, Artificial Sequence
  Description of Artificial Sequence: Synthetic oligonucleotide
aauaugaggacauacuguu

SEQ ID NO: 3170402 - RNA, 19 nt, Artificial Sequence
  Description of Artificial Sequence: Synthetic oligonucleotide
gaaggaaucaucuucagaa

SEQ ID NO: 3170403 - RNA, 19 nt, Artificial Sequence
  Description of Artificial Sequence: Synthetic oligonucleotide
ugauuuauugccgauagug

SEQ ID NO: 3170404 - RNA, 19 nt, Artificial Sequence
  Description of Artificial Sequence: Synthetic oligonucleotide
uauuaaaucuuucccaccu

SEQ ID NO: 3170405 - RNA, 19 nt, Artificial Sequence
  Description of Artificial Sequence: Synthetic oligonucleotide
aauccgacccuguuuacac

SEQ ID NO: 3170406 - RNA, 19 nt, Artificial Sequence
  Description of Artificial Sequence: Synthetic oligonucleotide
aauuuucaaagccauucug

SEQ ID NO: 3170407 - RNA, 19 nt, Artificial Sequence
  Description of Artificial Sequence: Synthetic oligonucleotide
ugaaucacccaucacaaga

SEQ ID NO: 3170408 - RNA, 19 nt, Artificial Sequence
  Description of Artificial Sequence: Synthetic oligonucleotide
agccucaugaauccgaccc

SEQ ID NO: 3170409 - RNA, 19 nt, Artificial Sequence
  Description of Artificial Sequence: Synthetic oligonucleotide
aagaauucuucuuggacug

SEQ ID NO: 3170410 - RNA, 19 nt, Artificial Sequence
  Description of Artificial Sequence: Synthetic oligonucleotide
uguacaagcgcccucagcu

SEQ ID NO: 3170411 - RNA, 19 nt, Artificial Sequence
  Description of Artificial Sequence: Synthetic oligonucleotide
uguuguauauguuccacag

SEQ ID NO: 3170412 - RNA, 19 nt, Artificial Sequence
  Description of Artificial Sequence: Synthetic oligonucleotide
agagguaaaguccuugaac

SEQ ID NO: 3170413 - RNA, 19 nt, Artificial Sequence
  Description of Artificial Sequence: Synthetic oligonucleotide
uaaauuuguucauuguacc

SEQ ID NO: 3170414 - RNA, 19 nt, Artificial Sequence
  Description of Artificial Sequence: Synthetic oligonucleotide
aagaugcucuauuaaaucu

SEQ ID NO: 3170415 - RNA, 19 nt, Artificial Sequence
  Description of Artificial Sequence: Synthetic oligonucleotide
uugaguaagacauuuaauu

SEQ ID NO: 3170416 - RNA, 19 nt, Artificial Sequence
  Description of Artificial Sequence: Synthetic oligonucleotide
uguuaacuaugcuaaaccc

SEQ ID NO: 3170417 - RNA, 19 nt, Artificial Sequence
  Description of Artificial Sequence: Synthetic oligonucleotide
acagccuuaaauuuguuca

SEQ ID NO: 3170418 - RNA, 19 nt, Artificial Sequence
  Description of Artificial Sequence: Synthetic oligonucleotide
auauauuugccauuucuug

SEQ ID NO: 3170419 - RNA, 19 nt, Artificial Sequence
  Description of Artificial Sequence: Synthetic oligonucleotide
ucauuguagauaaucugag

SEQ ID NO: 3170420 - RNA, 19 nt, Artificial Sequence
  Description of Artificial Sequence: Synthetic oligonucleotide
aaaaugaaucacccaucac

SEQ ID NO: 3170421 - RNA, 19 nt, Artificial Sequence
  Description of Artificial Sequence: Synthetic oligonucleotide
ucauuaaacaaauuuucaa

SEQ ID NO: 3170422 - RNA, 19 nt, Artificial Sequence
  Description of Artificial Sequence: Synthetic oligonucleotide
uuaaguagaaggaaucauc

SEQ ID NO: 3170423 - RNA, 19 nt, Artificial Sequence
  Description of Artificial Sequence: Synthetic oligonucleotide
aaaugucagcuuuuccugg

SEQ ID NO: 3170424 - RNA, 19 nt, Artificial Sequence
  Description of Artificial Sequence: Synthetic oligonucleotide
aaugggagaggcuuuccuc

SEQ ID NO: 3170425 - RNA, 19 nt, Artificial Sequence
  Description of Artificial Sequence: Synthetic oligonucleotide
gacaugauaucauuaaaca

SEQ ID NO: 3170426 - RNA, 19 nt, Artificial Sequence
  Description of Artificial Sequence: Synthetic oligonucleotide
aaauuuucaaagccauucu

SEQ ID NO: 3170427 - RNA, 19 nt, Artificial Sequence
  Description of Artificial Sequence: Synthetic oligonucleotide
auuuauguuaacuaugcua

SEQ ID NO: 3170428 - RNA, 19 nt, Artificial Sequence
  Description of Artificial Sequence: Synthetic oligonucleotide
uauuuugaagaauucuucu

SEQ ID NO: 3170429 - RNA, 19 nt, Artificial Sequence
  Description of Artificial Sequence: Synthetic oligonucleotide
aaugucagcuuuuccuggg

SEQ ID NO: 3170430 - RNA, 19 nt, Artificial Sequence
  Description of Artificial Sequence: Synthetic oligonucleotide
ugaaguacaguaaggacaa

SEQ ID NO: 3170431 - RNA, 19 nt, Artificial Sequence
  Description of Artificial Sequence: Synthetic oligonucleotide
ucagcugguuaaaauaaag

SEQ ID NO: 3170432 - RNA, 19 nt, Artificial Sequence
  Description of Artificial Sequence: Synthetic oligonucleotide
aacaagaguaaugggagag

SEQ ID NO: 3170433 - RNA, 19 nt, Artificial Sequence
  Description of Artificial Sequence: Synthetic oligonucleotide
uucaaagccauucuguaaa

SEQ ID NO: 3170434 - RNA, 19 nt, Artificial Sequence
  Description of Artificial Sequence: Synthetic oligonucleotide
aaauaaagaacuaccaaaa

SEQ ID NO: 3170435 - RNA, 19 nt, Artificial Sequence
  Description of Artificial Sequence: Synthetic oligonucleotide
aaagccauucuguaaacau

SEQ ID NO: 3170436 - RNA, 19 nt, Artificial Sequence
  Description of Artificial Sequence: Synthetic oligonucleotide
uccugggugacccaguggg

SEQ ID NO: 3170437 - RNA, 19 nt, Artificial Sequence
  Description of Artificial Sequence: Synthetic oligonucleotide
ugcucuauuaaaucuuucc

SEQ ID NO: 3170438 - RNA, 19 nt, Artificial Sequence
  Description of Artificial Sequence: Synthetic oligonucleotide
agcaaaaugaaucacccau

SEQ ID NO: 3170439 - RNA, 19 nt, Artificial Sequence
  Description of Artificial Sequence: Synthetic oligonucleotide
gauaguccacauuugauuc

SEQ ID NO: 3170440 - RNA, 19 nt, Artificial Sequence
  Description of Artificial Sequence: Synthetic oligonucleotide
uucuguaaacauauauuug

SEQ ID NO: 3170441 - RNA, 19 nt, Artificial Sequence
  Description of Artificial Sequence: Synthetic oligonucleotide
uggguaacuaaaucaagcc

SEQ ID NO: 3170442 - RNA, 19 nt, Artificial Sequence
  Description of Artificial Sequence: Synthetic oligonucleotide
uaugaggacauacuguuau

SEQ ID NO: 3170443 - RNA, 19 nt, Artificial Sequence
  Description of Artificial Sequence: Synthetic oligonucleotide
aagaagagcuuucuugugu

SEQ ID NO: 3170444 - RNA, 19 nt, Artificial Sequence
  Description of Artificial Sequence: Synthetic oligonucleotide
aaacauguuccauuaagua

SEQ ID NO: 3170445 - RNA, 19 nt, Artificial Sequence
  Description of Artificial Sequence: Synthetic oligonucleotide
aacuaaaucaagccguuuu

SEQ ID NO: 3170446 - RNA, 19 nt, Artificial Sequence
  Description of Artificial Sequence: Synthetic oligonucleotide
cauuaucaggucaucagag

SEQ ID NO: 3170447 - RNA, 19 nt, Artificial Sequence
  Description of Artificial Sequence: Synthetic oligonucleotide
ugaguaagacauuuaauua

SEQ ID NO: 3170448 - RNA, 19 nt, Artificial Sequence
  Description of Artificial Sequence: Synthetic oligonucleotide
uuucugaaacuccagccug

SEQ ID NO: 3170449 - RNA, 19 nt, Artificial Sequence
  Description of Artificial Sequence: Synthetic oligonucleotide
uuucccauaucuuucuuga

SEQ ID NO: 3170450 - RNA, 19 nt, Artificial Sequence
  Description of Artificial Sequence: Synthetic oligonucleotide
auaguccacauuugauucc

SEQ ID NO: 3170451 - RNA, 19 nt, Artificial Sequence
  Description of Artificial Sequence: Synthetic oligonucleotide
auuaacaggacguuugaaa

SEQ ID NO: 3170452 - RNA, 19 nt, Artificial Sequence
  Description of Artificial Sequence: Synthetic oligonucleotide
aagcaacaauaacaucccc

SEQ ID NO: 3170453 - RNA, 19 nt, Artificial Sequence
  Description of Artificial Sequence: Synthetic oligonucleotide
agcugguuaaaauaaagaa

SEQ ID NO: 3170454 - RNA, 19 nt, Artificial Sequence
  Description of Artificial Sequence: Synthetic oligonucleotide
ucagaaauuucugaaacuc

SEQ ID NO: 3170455 - RNA, 19 nt, Artificial Sequence
  Description of Artificial Sequence: Synthetic oligonucleotide
uuugauucccuccaggguu

SEQ ID NO: 3170456 - RNA, 19 nt, Artificial Sequence
  Description of Artificial Sequence: Synthetic oligonucleotide
caaauuuucaaagccauuc

SEQ ID NO: 3170457 - RNA, 19 nt, Artificial Sequence
  Description of Artificial Sequence: Synthetic oligonucleotide
uuucuuguguagaugacau

SEQ ID NO: 3170458 - RNA, 19 nt, Artificial Sequence
  Description of Artificial Sequence: Synthetic oligonucleotide
ucauuguaccaauauuuug

SEQ ID NO: 3170459 - RNA, 19 nt, Artificial Sequence
  Description of Artificial Sequence: Synthetic oligonucleotide
uccauuaaguagaaggaau

SEQ ID NO: 3170460 - RNA, 19 nt, Artificial Sequence
  Description of Artificial Sequence: Synthetic oligonucleotide
auugccgauaguguuacac

SEQ ID NO: 3170461 - RNA, 19 nt, Artificial Sequence
  Description of Artificial Sequence: Synthetic oligonucleotide
acguuugaaagcaugacuc

SEQ ID NO: 3170462 - RNA, 19 nt, Artificial Sequence
  Description of Artificial Sequence: Synthetic oligonucleotide
cugaaguaguuuaaugccc

SEQ ID NO: 3170463 - RNA, 19 nt, Artificial Sequence
  Description of Artificial Sequence: Synthetic oligonucleotide
gaguaagacauuuaauuaa

SEQ ID NO: 3170464 - RNA, 19 nt, Artificial Sequence
  Description of Artificial Sequence: Synthetic oligonucleotide
gaaggagcaaaaugaauca

SEQ ID NO: 3170465 - RNA, 19 nt, Artificial Sequence
  Description of Artificial Sequence: Synthetic oligonucleotide
cauuaaacaaauuuucaaa

SEQ ID NO: 3170466 - RNA, 19 nt, Artificial Sequence
  Description of Artificial Sequence: Synthetic oligonucleotide
auuucugaaacuccagccu

SEQ ID NO: 3170467 - RNA, 19 nt, Artificial Sequence
  Description of Artificial Sequence: Synthetic oligonucleotide
aacaggacguuugaaagca

SEQ ID NO: 3170468 - RNA, 19 nt, Artificial Sequence
  Description of Artificial Sequence: Synthetic oligonucleotide
ugacuccugcuaaauauag

SEQ ID NO: 3170469 - RNA, 19 nt, Artificial Sequence
  Description of Artificial Sequence: Synthetic oligonucleotide
aucuauuuauguuaacuau

SEQ ID NO: 3170470 - RNA, 19 nt, Artificial Sequence
  Description of Artificial Sequence: Synthetic oligonucleotide
aaugaaucacccaucacaa

SEQ ID NO: 3170471 - RNA, 19 nt, Artificial Sequence
  Description of Artificial Sequence: Synthetic oligonucleotide
aacauauauuugccauuuc

SEQ ID NO: 3170472 - RNA, 19 nt, Artificial Sequence
  Description of Artificial Sequence: Synthetic oligonucleotide
aaagcaugacuccugcuaa

SEQ ID NO: 3170473 - RNA, 19 nt, Artificial Sequence
  Description of Artificial Sequence: Synthetic oligonucleotide
uucauauccgcggaaaaca

SEQ ID NO: 3170474 - RNA, 19 nt, Artificial Sequence
  Description of Artificial Sequence: Synthetic oligonucleotide
uagauaaucugagcuaaag

SEQ ID NO: 3170475 - RNA, 19 nt, Artificial Sequence
  Description of Artificial Sequence: Synthetic oligonucleotide
uauguuaacuaugcuaaac

SEQ ID NO: 3170476 - RNA, 19 nt, Artificial Sequence
  Description of Artificial Sequence: Synthetic oligonucleotide
gaaaacacaugaaguacag

SEQ ID NO: 3170477 - RNA, 19 nt, Artificial Sequence
  Description of Artificial Sequence: Synthetic oligonucleotide
augaaguacaguaaggaca

SEQ ID NO: 3170478 - RNA, 19 nt, Artificial Sequence
  Description of Artificial Sequence: Synthetic oligonucleotide
cagaaauuucugaaacucc

SEQ ID NO: 3170479 - RNA, 19 nt, Artificial Sequence
  Description of Artificial Sequence: Synthetic oligonucleotide
guuaacuaugcuaaacccc

SEQ ID NO: 3170480 - RNA, 19 nt, Artificial Sequence
  Description of Artificial Sequence: Synthetic oligonucleotide
uuaacucaauaugaggaca

SEQ ID NO: 3170481 - RNA, 19 nt, Artificial Sequence
  Description of Artificial Sequence: Synthetic oligonucleotide
aacaaauuuucaaagccau

SEQ ID NO: 3170482 - RNA, 19 nt, Artificial Sequence
  Description of Artificial Sequence: Synthetic oligonucleotide
uguagauaaucugagcuaa

SEQ ID NO: 3170483 - RNA, 19 nt, Artificial Sequence
  Description of Artificial Sequence: Synthetic oligonucleotide
uuuauugccgauaguguua

SEQ ID NO: 3170484 - RNA, 19 nt, Artificial Sequence
  Description of Artificial Sequence: Synthetic oligonucleotide
agaauuauaaacuaacugc

SEQ ID NO: 3170485 - RNA, 19 nt, Artificial Sequence
  Description of Artificial Sequence: Synthetic oligonucleotide
aaagugagaaaacagagug

SEQ ID NO: 3170486 - RNA, 19 nt, Artificial Sequence
  Description of Artificial Sequence: Synthetic oligonucleotide
aagagguuaaccuugauca

SEQ ID NO: 3170487 - RNA, 19 nt, Artificial Sequence
  Description of Artificial Sequence: Synthetic oligonucleotide
cuuuauauagaguuaaggg

SEQ ID NO: 3170488 - RNA, 19 nt, Artificial Sequence
  Description of Artificial Sequence: Synthetic oligonucleotide
uuauauacaauuauguacu

SEQ ID NO: 3170489 - RNA, 19 nt, Artificial Sequence
  Description of Artificial Sequence: Synthetic oligonucleotide
aagaauuauaaacuaacug

SEQ ID NO: 3170490 - RNA, 19 nt, Artificial Sequence
  Description of Artificial Sequence: Synthetic oligonucleotide
aaucauuuaaaaggaagcc

SEQ ID NO: 3170491 - RNA, 19 nt, Artificial Sequence
  Description of Artificial Sequence: Synthetic oligonucleotide
uuuauauagaguuaaggga

SEQ ID NO: 3170492 - RNA, 19 nt, Artificial Sequence
  Description of Artificial Sequence: Synthetic oligonucleotide
aaacacaaacucuggagcc

SEQ ID NO: 3170493 - RNA, 19 nt, Artificial Sequence
  Description of Artificial Sequence: Synthetic oligonucleotide
uuaucauuuguaaaacugg

SEQ ID NO: 3170494 - RNA, 19 nt, Artificial Sequence
  Description of Artificial Sequence: Synthetic oligonucleotide
uaauucauugauaaguacc

SEQ ID NO: 3170495 - RNA, 19 nt, Artificial Sequence
  Description of Artificial Sequence: Synthetic oligonucleotide
uuguauauugccaaugucc

SEQ ID NO: 3170496 - RNA, 19 nt, Artificial Sequence
  Description of Artificial Sequence: Synthetic oligonucleotide
aauaaguuaauauuuuaaa

SEQ ID NO: 3170497 - RNA, 19 nt, Artificial Sequence
  Description of Artificial Sequence: Synthetic oligonucleotide
uagauuauaaacuaucacu

SEQ ID NO: 3170498 - RNA, 19 nt, Artificial Sequence
  Description of Artificial Sequence: Synthetic oligonucleotide
uguuuauauacaauuaugu

SEQ ID NO: 3170499 - RNA, 19 nt, Artificial Sequence
  Description of Artificial Sequence: Synthetic oligonucleotide
aauugaauaaguuaauauu

SEQ ID NO: 3170500 - RNA, 19 nt, Artificial Sequence
  Description of Artificial Sequence: Synthetic oligonucleotide
aaagagguuaaccuugauc

SEQ ID NO: 3170501 - RNA, 19 nt, Artificial Sequence
  Description of Artificial Sequence: Synthetic oligonucleotide
aauuauguacuuuuguggu

SEQ ID NO: 3170502 - RNA, 19 nt, Artificial Sequence
  Description of Artificial Sequence: Synthetic oligonucleotide
uuauauagaguuaagggaa

SEQ ID NO: 3170503 - RNA, 19 nt, Artificial Sequence
  Description of Artificial Sequence: Synthetic oligonucleotide
aagccuagcacauagugag

SEQ ID NO: 3170504 - RNA, 19 nt, Artificial Sequence
  Description of Artificial Sequence: Synthetic oligonucleotide
uaucauuuguaaaacuggg

SEQ ID NO: 3170505 - RNA, 19 nt, Artificial Sequence
  Description of Artificial Sequence: Synthetic oligonucleotide
uuauaauuuauggugauug

SEQ ID NO: 3170506 - RNA, 19 nt, Artificial Sequence
  Description of Artificial Sequence: Synthetic oligonucleotide
aauaaauguuuauauacaa

SEQ ID NO: 3170507 - RNA, 19 nt, Artificial Sequence
  Description of Artificial Sequence: Synthetic oligonucleotide
aaaacacugaacaaaagug

SEQ ID NO: 3170508 - RNA, 19 nt, Artificial Sequence
  Description of Artificial Sequence: Synthetic oligonucleotide
uuuaaaaggaagccuagca

SEQ ID NO: 3170509 - RNA, 19 nt, Artificial Sequence
  Description of Artificial Sequence: Synthetic oligonucleotide
aauuauaaacuaacugccc

SEQ ID NO: 3170510 - RNA, 19 nt, Artificial Sequence
  Description of Artificial Sequence: Synthetic oligonucleotide
uuuauuaucaaaucuuuau

SEQ ID NO: 3170511 - RNA, 19 nt, Artificial Sequence
  Description of Artificial Sequence: Synthetic oligonucleotide
ucaacaaguaaauaacccc

SEQ ID NO: 3170512 - RNA, 19 nt, Artificial Sequence
  Description of Artificial Sequence: Synthetic oligonucleotide
uaaacuaucacuuucuguu

SEQ ID NO: 3170513 - RNA, 19 nt, Artificial Sequence
  Description of Artificial Sequence: Synthetic oligonucleotide
aguuacguaauaucucugc

SEQ ID NO: 3170514 - RNA, 19 nt, Artificial Sequence
  Description of Artificial Sequence: Synthetic oligonucleotide
caauuauguacuuuugugg

SEQ ID NO: 3170515 - RNA, 19 nt, Artificial Sequence
  Description of Artificial Sequence: Synthetic oligonucleotide
uugaucaacaaguaaauaa

SEQ ID NO: 3170516 - RNA, 19 nt, Artificial Sequence
  Description of Artificial Sequence: Synthetic oligonucleotide
gaauuauaaacuaacugcc

SEQ ID NO: 3170517 - RNA, 19 nt, Artificial Sequence
  Description of Artificial Sequence: Synthetic oligonucleotide
uguuucaaaacucagucuc

SEQ ID NO: 3170518 - RNA, 19 nt, Artificial Sequence
  Description of Artificial Sequence: Synthetic oligonucleotide
ugaucaacaaguaaauaac

SEQ ID NO: 3170519 - RNA, 19 nt, Artificial Sequence
  Description of Artificial Sequence: Synthetic oligonucleotide
cuuaucauuuguaaaacug

SEQ ID NO: 3170520 - RNA, 19 nt, Artificial Sequence
  Description of Artificial Sequence: Synthetic oligonucleotide
auaauuuauggugauugcc

SEQ ID NO: 3170521 - RNA, 19 nt, Artificial Sequence
  Description of Artificial Sequence: Synthetic oligonucleotide
uugauaaguaccaauggac

SEQ ID NO: 3170522 - RNA, 19 nt, Artificial Sequence
  Description of Artificial Sequence: Synthetic oligonucleotide
uguauauugccaaugucca

SEQ ID NO: 3170523 - RNA, 19 nt, Artificial Sequence
  Description of Artificial Sequence: Synthetic oligonucleotide
uccacaauuauaauuuaug

SEQ ID NO: 3170524 - RNA, 19 nt, Artificial Sequence
  Description of Artificial Sequence: Synthetic oligonucleotide
aacaaugccuacuuuauau

SEQ ID NO: 3170525 - RNA, 19 nt, Artificial Sequence
  Description of Artificial Sequence: Synthetic oligonucleotide
auauuucuaggcaacagcc

SEQ ID NO: 3170526 - RNA, 19 nt, Artificial Sequence
  Description of Artificial Sequence: Synthetic oligonucleotide
acaauuauguacuuuugug

SEQ ID NO: 3170527 - RNA, 19 nt, Artificial Sequence
  Description of Artificial Sequence: Synthetic oligonucleotide
ucauuuguaaaacugggau

SEQ ID NO: 3170528 - RNA, 19 nt, Artificial Sequence
  Description of Artificial Sequence: Synthetic oligonucleotide
uaauuuauggugauugccu

SEQ ID NO: 3170529 - RNA, 19 nt, Artificial Sequence
  Description of Artificial Sequence: Synthetic oligonucleotide
uuugugguuauucauucug

SEQ ID NO: 3170530 - RNA, 19 nt, Artificial Sequence
  Description of Artificial Sequence: Synthetic oligonucleotide
cuauguucuaucauuagug

SEQ ID NO: 3170531 - RNA, 19 nt, Artificial Sequence
  Description of Artificial Sequence: Synthetic oligonucleotide
uauuaucaaaucuuuauua

SEQ ID NO: 3170532 - RNA, 19 nt, Artificial Sequence
  Description of Artificial Sequence: Synthetic oligonucleotide
auaauucauugauaaguac

SEQ ID NO: 3170533 - RNA, 19 nt, Artificial Sequence
  Description of Artificial Sequence: Synthetic oligonucleotide
aucaacaaguaaauaaccc

SEQ ID NO: 3170534 - RNA, 19 nt, Artificial Sequence
  Description of Artificial Sequence: Synthetic oligonucleotide
auuauaaacuaacugccca

SEQ ID NO: 3170535 - RNA, 19 nt, Artificial Sequence
  Description of Artificial Sequence: Synthetic oligonucleotide
ugauaaguaccaauggaca

SEQ ID NO: 3170536 - RNA, 19 nt, Artificial Sequence
  Description of Artificial Sequence: Synthetic oligonucleotide
uuaaaaggaagccuagcac

SEQ ID NO: 3170537 - RNA, 19 nt, Artificial Sequence
  Description of Artificial Sequence: Synthetic oligonucleotide
aauguccacaauuauaauu

SEQ ID NO: 3170538 - RNA, 19 nt, Artificial Sequence
  Description of Artificial Sequence: Synthetic oligonucleotide
uugccuaaaagaauuauaa

SEQ ID NO: 3170539 - RNA, 19 nt, Artificial Sequence
  Description of Artificial Sequence: Synthetic oligonucleotide
uaaguuacguaauaucucu

SEQ ID NO: 3170540 - RNA, 19 nt, Artificial Sequence
  Description of Artificial Sequence: Synthetic oligonucleotide
ucuguuuuguauauugcca

SEQ ID NO: 3170541 - RNA, 19 nt, Artificial Sequence
  Description of Artificial Sequence: Synthetic oligonucleotide
uccuuuacuaagcuguucc

SEQ ID NO: 3170542 - RNA, 19 nt, Artificial Sequence
  Description of Artificial Sequence: Synthetic oligonucleotide
acauagugagugcauaugg

SEQ ID NO: 3170543 - RNA, 19 nt, Artificial Sequence
  Description of Artificial Sequence: Synthetic oligonucleotide
uaaaagaauuauaaacuaa

SEQ ID NO: 3170544 - RNA, 19 nt, Artificial Sequence
  Description of Artificial Sequence: Synthetic oligonucleotide
aauuuuauuaucaaaucuu

SEQ ID NO: 3170545 - RNA, 19 nt, Artificial Sequence
  Description of Artificial Sequence: Synthetic oligonucleotide
aacuaucacuuucuguuuc

SEQ ID NO: 3170546 - RNA, 19 nt, Artificial Sequence
  Description of Artificial Sequence: Synthetic oligonucleotide
aguaccaauggacacugac

SEQ ID NO: 3170547 - RNA, 19 nt, Artificial Sequence
  Description of Artificial Sequence: Synthetic oligonucleotide
ucauuuaaaaggaagccua

SEQ ID NO: 3170548 - RNA, 19 nt, Artificial Sequence
  Description of Artificial Sequence: Synthetic oligonucleotide
uguucuaucauuagugauc

SEQ ID NO: 3170549 - RNA, 19 nt, Artificial Sequence
  Description of Artificial Sequence: Synthetic oligonucleotide
aaaacucagucucauauuu

SEQ ID NO: 3170550 - RNA, 19 nt, Artificial Sequence
  Description of Artificial Sequence: Synthetic oligonucleotide
aaauaaauguuuauauaca

SEQ ID NO: 3170551 - RNA, 19 nt, Artificial Sequence
  Description of Artificial Sequence: Synthetic oligonucleotide
acuuuauauagaguuaagg

SEQ ID NO: 3170552 - RNA, 19 nt, Artificial Sequence
  Description of Artificial Sequence: Synthetic oligonucleotide
aacucagucucauauuucu

SEQ ID NO: 3170553 - RNA, 19 nt, Artificial Sequence
  Description of Artificial Sequence: Synthetic oligonucleotide
gacacacuagauuauaaac

SEQ ID NO: 3170554 - RNA, 19 nt, Artificial Sequence
  Description of Artificial Sequence: Synthetic oligonucleotide
ugggauagcaacaaugccu

SEQ ID NO: 3170555 - RNA, 19 nt, Artificial Sequence
  Description of Artificial Sequence: Synthetic oligonucleotide
uuuuguauauugccaaugu

SEQ ID NO: 3170556 - RNA, 19 nt, Artificial Sequence
  Description of Artificial Sequence: Synthetic oligonucleotide
uucuguuuuguauauugcc

SEQ ID NO: 3170557 - RNA, 19 nt, Artificial Sequence
  Description of Artificial Sequence: Synthetic oligonucleotide
uauggugauugccuaaaag

SEQ ID NO: 3170558 - RNA, 19 nt, Artificial Sequence
  Description of Artificial Sequence: Synthetic oligonucleotide
auugauaaguaccaaugga

SEQ ID NO: 3170559 - RNA, 19 nt, Artificial Sequence
  Description of Artificial Sequence: Synthetic oligonucleotide
ucuauguucuaucauuagu

SEQ ID NO: 3170560 - RNA, 19 nt, Artificial Sequence
  Description of Artificial Sequence: Synthetic oligonucleotide
uaccaauggacacugacac

SEQ ID NO: 3170561 - RNA, 19 nt, Artificial Sequence
  Description of Artificial Sequence: Synthetic oligonucleotide
aauuauaauuuauggugau

SEQ ID NO: 3170562 - RNA, 19 nt, Artificial Sequence
  Description of Artificial Sequence: Synthetic oligonucleotide
uuagugaucuccuuuacua

SEQ ID NO: 3170563 - RNA, 19 nt, Artificial Sequence
  Description of Artificial Sequence: Synthetic oligonucleotide
auggugauugccuaaaaga

SEQ ID NO: 3170564 - RNA, 19 nt, Artificial Sequence
  Description of Artificial Sequence: Synthetic oligonucleotide
cauucuguuuuguauauug

SEQ ID NO: 3170565 - RNA, 19 nt, Artificial Sequence
  Description of Artificial Sequence: Synthetic oligonucleotide
uacguaauaucucugcuuc

SEQ ID NO: 3170566 - RNA, 19 nt, Artificial Sequence
  Description of Artificial Sequence: Synthetic oligonucleotide
cauugauaaguaccaaugg

SEQ ID NO: 3170567 - RNA, 19 nt, Artificial Sequence
  Description of Artificial Sequence: Synthetic oligonucleotide
ugaacaaaagugagaaaac

SEQ ID NO: 3170568 - RNA, 19 nt, Artificial Sequence
  Description of Artificial Sequence: Synthetic oligonucleotide
aagggaauugaauaaguua

SEQ ID NO: 3170569 - RNA, 19 nt, Artificial Sequence
  Description of Artificial Sequence: Synthetic oligonucleotide
uauaauuuauggugauugc

SEQ ID NO: 3170570 - RNA, 19 nt, Artificial Sequence
  Description of Artificial Sequence: Synthetic oligonucleotide
gauaaguaccaauggacac

SEQ ID NO: 3170571 - RNA, 19 nt, Artificial Sequence
  Description of Artificial Sequence: Synthetic oligonucleotide
auuaucaaaucuuuauuau

SEQ ID NO: 3170572 - RNA, 19 nt, Artificial Sequence
  Description of Artificial Sequence: Synthetic oligonucleotide
acugggauagcaacaaugc

SEQ ID NO: 3170573 - RNA, 19 nt, Artificial Sequence
  Description of Artificial Sequence: Synthetic oligonucleotide
aacacugaacaaaagugag

SEQ ID NO: 3170574 - RNA, 19 nt, Artificial Sequence
  Description of Artificial Sequence: Synthetic oligonucleotide
aaagaauuauaaacuaacu

SEQ ID NO: 3170575 - RNA, 19 nt, Artificial Sequence
  Description of Artificial Sequence: Synthetic oligonucleotide
uacaauuauguacuuuugu

SEQ ID NO: 3170576 - RNA, 19 nt, Artificial Sequence
  Description of Artificial Sequence: Synthetic oligonucleotide
aacagucucaacuguucuc

SEQ ID NO: 3170577 - RNA, 19 nt, Artificial Sequence
  Description of Artificial Sequence: Synthetic oligonucleotide
uauaaacuaucacuuucug

SEQ ID NO: 3170578 - RNA, 19 nt, Artificial Sequence
  Description of Artificial Sequence: Synthetic oligonucleotide
acuaagcuguuccaaagag

SEQ ID NO: 3170579 - RNA, 19 nt, Artificial Sequence
  Description of Artificial Sequence: Synthetic oligonucleotide
uuauuaucaaaucuuuauu

SEQ ID NO: 3170580 - RNA, 19 nt, Artificial Sequence
  Description of Artificial Sequence: Synthetic oligonucleotide
acagucucaacuguucucc

SEQ ID NO: 3170581 - RNA, 19 nt, Artificial Sequence
  Description of Artificial Sequence: Synthetic oligonucleotide
aauaucucugcuucuacuu

SEQ ID NO: 3170582 - RNA, 19 nt, Artificial Sequence
  Description of Artificial Sequence: Synthetic oligonucleotide
uauucauucuguuuuguau

SEQ ID NO: 3170583 - RNA, 19 nt, Artificial Sequence
  Description of Artificial Sequence: Synthetic oligonucleotide
uuaagggaauugaauaagu

SEQ ID NO: 3170584 - RNA, 19 nt, Artificial Sequence
  Description of Artificial Sequence: Synthetic oligonucleotide
uaaguuauugcauaaaagc

SEQ ID NO: 3170585 - RNA, 19 nt, Artificial Sequence
  Description of Artificial Sequence: Synthetic oligonucleotide
aauucuuuccuucuccagc

SEQ ID NO: 3170586 - RNA, 19 nt, Artificial Sequence
  Description of Artificial Sequence: Synthetic oligonucleotide
uucaacuucauuaucaagc

SEQ ID NO: 3170587 - RNA, 19 nt, Artificial Sequence
  Description of Artificial Sequence: Synthetic oligonucleotide
aaaagagaaauauguuggc

SEQ ID NO: 3170588 - RNA, 19 nt, Artificial Sequence
  Description of Artificial Sequence: Synthetic oligonucleotide
uuaaguuauugcauaaaag

SEQ ID NO: 3170589 - RNA, 19 nt, Artificial Sequence
  Description of Artificial Sequence: Synthetic oligonucleotide
aauaacaagauuugcuugu

SEQ ID NO: 3170590 - RNA, 19 nt, Artificial Sequence
  Description of Artificial Sequence: Synthetic oligonucleotide
aagagaaauauguuggcug

SEQ ID NO: 3170591 - RNA, 19 nt, Artificial Sequence
  Description of Artificial Sequence: Synthetic oligonucleotide
aauauguuggcuguacugg

SEQ ID NO: 3170592 - RNA, 19 nt, Artificial Sequence
  Description of Artificial Sequence: Synthetic oligonucleotide
uugguaguaacuuucaucu

SEQ ID NO: 3170593 - RNA, 19 nt, Artificial Sequence
  Description of Artificial Sequence: Synthetic oligonucleotide
acuuucaucuuccuuuucc

SEQ ID NO: 3170594 - RNA, 19 nt, Artificial Sequence
  Description of Artificial Sequence: Synthetic oligonucleotide
ucaacuucauuaucaagcg

SEQ ID NO: 3170595 - RNA, 19 nt, Artificial Sequence
  Description of Artificial Sequence: Synthetic oligonucleotide
aaauauguuggcuguacug

SEQ ID NO: 3170596 - RNA, 19 nt, Artificial Sequence
  Description of Artificial Sequence: Synthetic oligonucleotide
ugucuuuucaacuucauua

SEQ ID NO: 3170597 - RNA, 19 nt, Artificial Sequence
  Description of Artificial Sequence: Synthetic oligonucleotide
uuuaaguuauugcauaaaa

SEQ ID NO: 3170598 - RNA, 19 nt, Artificial Sequence
  Description of Artificial Sequence: Synthetic oligonucleotide
auaaaagcugaauucuuuc

SEQ ID NO: 3170599 - RNA, 19 nt, Artificial Sequence
  Description of Artificial Sequence: Synthetic oligonucleotide
ucaacgucaaccuugcuga

SEQ ID NO: 3170600 - RNA, 19 nt, Artificial Sequence
  Description of Artificial Sequence: Synthetic oligonucleotide
acugguuuaaguuauugca

SEQ ID NO: 3170601 - RNA, 19 nt, Artificial Sequence
  Description of Artificial Sequence: Synthetic oligonucleotide
ucuacaagguggaaaagug

SEQ ID NO: 3170602 - RNA, 19 nt, Artificial Sequence
  Description of Artificial Sequence: Synthetic oligonucleotide
acugcuuggagcuuucuac

SEQ ID NO: 3170603 - RNA, 19 nt, Artificial Sequence
  Description of Artificial Sequence: Synthetic oligonucleotide
aaaagcugaauucuuuccu

SEQ ID NO: 3170604 - RNA, 19 nt, Artificial Sequence
  Description of Artificial Sequence: Synthetic oligonucleotide
uuaauaacaagauuugcuu

SEQ ID NO: 3170605 - RNA, 19 nt, Artificial Sequence
  Description of Artificial Sequence: Synthetic oligonucleotide
uuguuaauaacaagauuug

SEQ ID NO: 3170606 - RNA, 19 nt, Artificial Sequence
  Description of Artificial Sequence: Synthetic oligonucleotide
ucccacuucagucuagucg

SEQ ID NO: 3170607 - RNA, 19 nt, Artificial Sequence
  Description of Artificial Sequence: Synthetic oligonucleotide
auuugcuugucuuuucaac

SEQ ID NO: 3170608 - RNA, 19 nt, Artificial Sequence
  Description of Artificial Sequence: Synthetic oligonucleotide
uaauaacaagauuugcuug

SEQ ID NO: 3170609 - RNA, 19 nt, Artificial Sequence
  Description of Artificial Sequence: Synthetic oligonucleotide
uuucucaacgucaaccuug

SEQ ID NO: 3170610 - RNA, 19 nt, Artificial Sequence
  Description of Artificial Sequence: Synthetic oligonucleotide
uucuguuucuccuucuggg

SEQ ID NO: 3170611 - RNA, 19 nt, Artificial Sequence
  Description of Artificial Sequence: Synthetic oligonucleotide
uacaagguggaaaagugcu

SEQ ID NO: 3170612 - RNA, 19 nt, Artificial Sequence
  Description of Artificial Sequence: Synthetic oligonucleotide
aaguuauugcauaaaagcu

SEQ ID NO: 3170613 - RNA, 19 nt, Artificial Sequence
  Description of Artificial Sequence: Synthetic oligonucleotide
uaaaagcugaauucuuucc

SEQ ID NO: 3170614 - RNA, 19 nt, Artificial Sequence
  Description of Artificial Sequence: Synthetic oligonucleotide
uucauuaucaagcguauuu

SEQ ID NO: 3170615 - RNA, 19 nt, Artificial Sequence
  Description of Artificial Sequence: Synthetic oligonucleotide
cuuggagcuuucuacaagg

SEQ ID NO: 3170616 - RNA, 19 nt, Artificial Sequence
  Description of Artificial Sequence: Synthetic oligonucleotide
auugcauaaaagcugaauu

SEQ ID NO: 3170617 - RNA, 19 nt, Artificial Sequence
  Description of Artificial Sequence: Synthetic oligonucleotide
agugcuucaugcuucuugg

SEQ ID NO: 3170618 - RNA, 19 nt, Artificial Sequence
  Description of Artificial Sequence: Synthetic oligonucleotide
ucagucuagucgaauaccc

SEQ ID NO: 3170619 - RNA, 19 nt, Artificial Sequence
  Description of Artificial Sequence: Synthetic oligonucleotide
cuggaugucuuucucaacg

SEQ ID NO: 3170620 - RNA, 19 nt, Artificial Sequence
  Description of Artificial Sequence: Synthetic oligonucleotide
acgucaaccuugcugaugg

SEQ ID NO: 3170621 - RNA, 19 nt, Artificial Sequence
  Description of Artificial Sequence: Synthetic oligonucleotide
uuugcuugucuuuucaacu

SEQ ID NO: 3170622 - RNA, 19 nt, Artificial Sequence
  Description of Artificial Sequence: Synthetic oligonucleotide
ugcuucuugguacucauca

SEQ ID NO: 3170623 - RNA, 19 nt, Artificial Sequence
  Description of Artificial Sequence: Synthetic oligonucleotide
uuugguaguaacuuucauc

SEQ ID NO: 3170624 - RNA, 19 nt, Artificial Sequence
  Description of Artificial Sequence: Synthetic oligonucleotide
guggaaaagugcuucaugc

SEQ ID NO: 3170625 - RNA, 19 nt, Artificial Sequence
  Description of Artificial Sequence: Synthetic oligonucleotide
aagcugaauucuuuccuuc

SEQ ID NO: 3170626 - RNA, 19 nt, Artificial Sequence
  Description of Artificial Sequence: Synthetic oligonucleotide
aagugcuucaugcuucuug

SEQ ID NO: 3170627 - RNA, 19 nt, Artificial Sequence
  Description of Artificial Sequence: Synthetic oligonucleotide
ucuuguagcuguuuuccag

SEQ ID NO: 3170628 - RNA, 19 nt, Artificial Sequence
  Description of Artificial Sequence: Synthetic oligonucleotide
cuuuucaacuucauuauca

SEQ ID NO: 3170629 - RNA, 19 nt, Artificial Sequence
  Description of Artificial Sequence: Synthetic oligonucleotide
uugcauaaaagcugaauuc

SEQ ID NO: 3170630 - RNA, 19 nt, Artificial Sequence
  Description of Artificial Sequence: Synthetic oligonucleotide
uuucaguuuguugaggagc

SEQ ID NO: 3170631 - RNA, 19 nt, Artificial Sequence
  Description of Artificial Sequence: Synthetic oligonucleotide
aguuauugcauaaaagcug

SEQ ID NO: 3170632 - RNA, 19 nt, Artificial Sequence
  Description of Artificial Sequence: Synthetic oligonucleotide
aagauuugcuugucuuuuc

SEQ ID NO: 3170633 - RNA, 19 nt, Artificial Sequence
  Description of Artificial Sequence: Synthetic oligonucleotide
aacaagauuugcuugucuu

SEQ ID NO: 3170634 - RNA, 19 nt, Artificial Sequence
  Description of Artificial Sequence: Synthetic oligonucleotide
uguuaauaacaagauuugc

SEQ ID NO: 3170635 - RNA, 19 nt, Artificial Sequence
  Description of Artificial Sequence: Synthetic oligonucleotide
aaagagaaauauguuggcu

SEQ ID NO: 3170636 - RNA, 19 nt, Artificial Sequence
  Description of Artificial Sequence: Synthetic oligonucleotide
ugcauaaaagcugaauucu

SEQ ID NO: 3170637 - RNA, 19 nt, Artificial Sequence
  Description of Artificial Sequence: Synthetic oligonucleotide
agaaauauguuggcuguac

SEQ ID NO: 3170638 - RNA, 19 nt, Artificial Sequence
  Description of Artificial Sequence: Synthetic oligonucleotide
agagaaauauguuggcugu

SEQ ID NO: 3170639 - RNA, 19 nt, Artificial Sequence
  Description of Artificial Sequence: Synthetic oligonucleotide
auguggucaacgucugucc

SEQ ID NO: 3170640 - RNA, 19 nt, Artificial Sequence
  Description of Artificial Sequence: Synthetic oligonucleotide
ucuucucuugcuauacuca

SEQ ID NO: 3170641 - RNA, 19 nt, Artificial Sequence
  Description of Artificial Sequence: Synthetic oligonucleotide
uucaguuuguugaggagcu

SEQ ID NO: 3170642 - RNA, 19 nt, Artificial Sequence
  Description of Artificial Sequence: Synthetic oligonucleotide
uuaucaagcguauuuucuc

SEQ ID NO: 3170643 - RNA, 19 nt, Artificial Sequence
  Description of Artificial Sequence: Synthetic oligonucleotide
uugcugauggcacagugga

SEQ ID NO: 3170644 - RNA, 19 nt, Artificial Sequence
  Description of Artificial Sequence: Synthetic oligonucleotide
ggagcuuucuacaaggugg

SEQ ID NO: 3170645 - RNA, 19 nt, Artificial Sequence
  Description of Artificial Sequence: Synthetic oligonucleotide
uuuucuuagccuugauuug

SEQ ID NO: 3170646 - RNA, 19 nt, Artificial Sequence
  Description of Artificial Sequence: Synthetic oligonucleotide
uccagcaugcucuuguagc

SEQ ID NO: 3170647 - RNA, 19 nt, Artificial Sequence
  Description of Artificial Sequence: Synthetic oligonucleotide
ucuuucucaacgucaaccu

SEQ ID NO: 3170648 - RNA, 19 nt, Artificial Sequence
  Description of Artificial Sequence: Synthetic oligonucleotide
uuuucucuucuucucuugc

SEQ ID NO: 3170649 - RNA, 19 nt, Artificial Sequence
  Description of Artificial Sequence: Synthetic oligonucleotide
uuucaacuucauuaucaag

SEQ ID NO: 3170650 - RNA, 19 nt, Artificial Sequence
  Description of Artificial Sequence: Synthetic oligonucleotide
uacugguuuaaguuauugc

SEQ ID NO: 3170651 - RNA, 19 nt, Artificial Sequence
  Description of Artificial Sequence: Synthetic oligonucleotide
cuugauuugcugauuccag

SEQ ID NO: 3170652 - RNA, 19 nt, Artificial Sequence
  Description of Artificial Sequence: Synthetic oligonucleotide
uuuguugaggagcuucugu

SEQ ID NO: 3170653 - RNA, 19 nt, Artificial Sequence
  Description of Artificial Sequence: Synthetic oligonucleotide
uccagcuccagcaugcucu

SEQ ID NO: 3170654 - RNA, 19 nt, Artificial Sequence
  Description of Artificial Sequence: Synthetic oligonucleotide
uuuucaacuucauuaucaa

SEQ ID NO: 3170655 - RNA, 19 nt, Artificial Sequence
  Description of Artificial Sequence: Synthetic oligonucleotide
aacuucauuaucaagcgua

SEQ ID NO: 3170656 - RNA, 19 nt, Artificial Sequence
  Description of Artificial Sequence: Synthetic oligonucleotide
agcguauuuucucuucuuc

SEQ ID NO: 3170657 - RNA, 19 nt, Artificial Sequence
  Description of Artificial Sequence: Synthetic oligonucleotide
agucuagucgaauacccug

SEQ ID NO: 3170658 - RNA, 19 nt, Artificial Sequence
  Description of Artificial Sequence: Synthetic oligonucleotide
ucaaccuugcugauggcac

SEQ ID NO: 3170659 - RNA, 19 nt, Artificial Sequence
  Description of Artificial Sequence: Synthetic oligonucleotide
cuuguagcuguuuuccagc

SEQ ID NO: 3170660 - RNA, 19 nt, Artificial Sequence
  Description of Artificial Sequence: Synthetic oligonucleotide
uuuucaguuuguugaggag

SEQ ID NO: 3170661 - RNA, 19 nt, Artificial Sequence
  Description of Artificial Sequence: Synthetic oligonucleotide
uuucuuagccuugauuugc

SEQ ID NO: 3170662 - RNA, 19 nt, Artificial Sequence
  Description of Artificial Sequence: Synthetic oligonucleotide
aaaagugcuucaugcuucu

SEQ ID NO: 3170663 - RNA, 19 nt, Artificial Sequence
  Description of Artificial Sequence: Synthetic oligonucleotide
guuguuaauaacaagauuu

SEQ ID NO: 3170664 - RNA, 19 nt, Artificial Sequence
  Description of Artificial Sequence: Synthetic oligonucleotide
uggcauguggucaacgucu

SEQ ID NO: 3170665 - RNA, 19 nt, Artificial Sequence
  Description of Artificial Sequence: Synthetic oligonucleotide
aucuguguguggcaugugg

SEQ ID NO: 3170666 - RNA, 19 nt, Artificial Sequence
  Description of Artificial Sequence: Synthetic oligonucleotide
uuuuccagcgugcucuccc

SEQ ID NO: 3170667 - RNA, 19 nt, Artificial Sequence
  Description of Artificial Sequence: Synthetic oligonucleotide
uccaguuguuaauaacaag

SEQ ID NO: 3170668 - RNA, 19 nt, Artificial Sequence
  Description of Artificial Sequence: Synthetic oligonucleotide
gauuccaguuguuaauaac

SEQ ID NO: 3170669 - RNA, 19 nt, Artificial Sequence
  Description of Artificial Sequence: Synthetic oligonucleotide
ucuuuccuucuccagcucc

SEQ ID NO: 3170670 - RNA, 19 nt, Artificial Sequence
  Description of Artificial Sequence: Synthetic oligonucleotide
cucaacgucaaccuugcug

SEQ ID NO: 3170671 - RNA, 19 nt, Artificial Sequence
  Description of Artificial Sequence: Synthetic oligonucleotide
uucucuugcuauacucagg

SEQ ID NO: 3170672 - RNA, 19 nt, Artificial Sequence
  Description of Artificial Sequence: Synthetic oligonucleotide
uaucaagcguauuuucucu

SEQ ID NO: 3170673 - RNA, 19 nt, Artificial Sequence
  Description of Artificial Sequence: Synthetic oligonucleotide
uuguagcuguuuuccagcg

SEQ ID NO: 3170674 - RNA, 19 nt, Artificial Sequence
  Description of Artificial Sequence: Synthetic oligonucleotide
aaagcugaauucuuuccuu

SEQ ID NO: 3170675 - RNA, 19 nt, Artificial Sequence
  Description of Artificial Sequence: Synthetic oligonucleotide
cugaauucuuuccuucucc

SEQ ID NO: 3170676 - RNA, 19 nt, Artificial Sequence
  Description of Artificial Sequence: Synthetic oligonucleotide
ugaauucuuuccuucucca

SEQ ID NO: 3170677 - RNA, 19 nt, Artificial Sequence
  Description of Artificial Sequence: Synthetic oligonucleotide
gauuugcugauuccaguug

SEQ ID NO: 3170678 - RNA, 19 nt, Artificial Sequence
  Description of Artificial Sequence: Synthetic oligonucleotide
guagcuguuuuccagcgug

SEQ ID NO: 3170679 - RNA, 19 nt, Artificial Sequence
  Description of Artificial Sequence: Synthetic oligonucleotide
cuacaagguggaaaagugc

SEQ ID NO: 3170680 - RNA, 19 nt, Artificial Sequence
  Description of Artificial Sequence: Synthetic oligonucleotide
cuugcugauggcacagugg

SEQ ID NO: 3170681 - RNA, 19 nt, Artificial Sequence
  Description of Artificial Sequence: Synthetic oligonucleotide
auuccaguuguuaauaaca

SEQ ID NO: 3170682 - RNA, 19 nt, Artificial Sequence
  Description of Artificial Sequence: Synthetic oligonucleotide
auucuuuccuucuccagcu

SEQ ID NO: 3170683 - RNA, 19 nt, Artificial Sequence
  Description of Artificial Sequence: Synthetic oligonucleotide
auuugcugauuccaguugu

SEQ ID NO: 3170684 - RNA, 19 nt, Artificial Sequence
  Description of Artificial Sequence: Synthetic oligonucleotide
aguuucaagacuugguucc

SEQ ID NO: 3170685 - RNA, 19 nt, Artificial Sequence
  Description of Artificial Sequence: Synthetic oligonucleotide
ugaagaaguaauugcaucg

SEQ ID NO: 3170686 - RNA, 19 nt, Artificial Sequence
  Description of Artificial Sequence: Synthetic oligonucleotide
acuagaaagagcucggucg

SEQ ID NO: 3170687 - RNA, 19 nt, Artificial Sequence
  Description of Artificial Sequence: Synthetic oligonucleotide
aauugcaucgaagagaucu

SEQ ID NO: 3170688 - RNA, 19 nt, Artificial Sequence
  Description of Artificial Sequence: Synthetic oligonucleotide
ucaaccaacaggaugaugu

SEQ ID NO: 3170689 - RNA, 19 nt, Artificial Sequence
  Description of Artificial Sequence: Synthetic oligonucleotide
cauacuagaagauucuccg

SEQ ID NO: 3170690 - RNA, 19 nt, Artificial Sequence
  Description of Artificial Sequence: Synthetic oligonucleotide
uccaucacuagaaagagcu

SEQ ID NO: 3170691 - RNA, 19 nt, Artificial Sequence
  Description of Artificial Sequence: Synthetic oligonucleotide
auauucacauacuagaaga

SEQ ID NO: 3170692 - RNA, 19 nt, Artificial Sequence
  Description of Artificial Sequence: Synthetic oligonucleotide
gauauucacauacuagaag

SEQ ID NO: 3170693 - RNA, 19 nt, Artificial Sequence
  Description of Artificial Sequence: Synthetic oligonucleotide
uguacuugguugaagaagu

SEQ ID NO: 3170694 - RNA, 19 nt, Artificial Sequence
  Description of Artificial Sequence: Synthetic oligonucleotide
aacaggaugauguugggau

SEQ ID NO: 3170695 - RNA, 19 nt, Artificial Sequence
  Description of Artificial Sequence: Synthetic oligonucleotide
uucacauacuagaagauuc

SEQ ID NO: 3170696 - RNA, 19 nt, Artificial Sequence
  Description of Artificial Sequence: Synthetic oligonucleotide
gaaguaauugcaucgaaga

SEQ ID NO: 3170697 - RNA, 19 nt, Artificial Sequence
  Description of Artificial Sequence: Synthetic oligonucleotide
aagacuugguuccauccgg

SEQ ID NO: 3170698 - RNA, 19 nt, Artificial Sequence
  Description of Artificial Sequence: Synthetic oligonucleotide
aaguaauugcaucgaagag

SEQ ID NO: 3170699 - RNA, 19 nt, Artificial Sequence
  Description of Artificial Sequence: Synthetic oligonucleotide
uccucaaccaacaggauga

SEQ ID NO: 3170700 - RNA, 19 nt, Artificial Sequence
  Description of Artificial Sequence: Synthetic oligonucleotide
cuguguacaaugcugaggc

SEQ ID NO: 3170701 - RNA, 19 nt, Artificial Sequence
  Description of Artificial Sequence: Synthetic oligonucleotide
gagaucuccaccuuugacc

SEQ ID NO: 3170702 - RNA, 19 nt, Artificial Sequence
  Description of Artificial Sequence: Synthetic oligonucleotide
uacuagaagauucuccggc

SEQ ID NO: 3170703 - RNA, 19 nt, Artificial Sequence
  Description of Artificial Sequence: Synthetic oligonucleotide
aguauugacacuucauucu

SEQ ID NO: 3170704 - RNA, 19 nt, Artificial Sequence
  Description of Artificial Sequence: Synthetic oligonucleotide
uccaccuuugaccaguucc

SEQ ID NO: 3170705 - RNA, 19 nt, Artificial Sequence
  Description of Artificial Sequence: Synthetic oligonucleotide
acuuccaucucucucagug

SEQ ID NO: 3170706 - RNA, 19 nt, Artificial Sequence
  Description of Artificial Sequence: Synthetic oligonucleotide
agauucuccggcuugaugu

SEQ ID NO: 3170707 - RNA, 19 nt, Artificial Sequence
  Description of Artificial Sequence: Synthetic oligonucleotide
aagucucccaguuucaaga

SEQ ID NO: 3170708 - RNA, 19 nt, Artificial Sequence
  Description of Artificial Sequence: Synthetic oligonucleotide
gaugucucuguguacaaug

SEQ ID NO: 3170709 - RNA, 19 nt, Artificial Sequence
  Description of Artificial Sequence: Synthetic oligonucleotide
ugguugaagaaguaauugc

SEQ ID NO: 3170710 - RNA, 19 nt, Artificial Sequence
  Description of Artificial Sequence: Synthetic oligonucleotide
uucacuuugcgcaguauug

SEQ ID NO: 3170711 - RNA, 19 nt, Artificial Sequence
  Description of Artificial Sequence: Synthetic oligonucleotide
acauacuagaagauucucc

SEQ ID NO: 3170712 - RNA, 19 nt, Artificial Sequence
  Description of Artificial Sequence: Synthetic oligonucleotide
uauaccauggcacuuccau

SEQ ID NO: 3170713 - RNA, 19 nt, Artificial Sequence
  Description of Artificial Sequence: Synthetic oligonucleotide
gagggcauuggcuagguug

SEQ ID NO: 3170714 - RNA, 19 nt, Artificial Sequence
  Description of Artificial Sequence: Synthetic oligonucleotide
aguaauugcaucgaagaga

SEQ ID NO: 3170715 - RNA, 19 nt, Artificial Sequence
  Description of Artificial Sequence: Synthetic oligonucleotide
caucacuagaaagagcucg

SEQ ID NO: 3170716 - RNA, 19 nt, Artificial Sequence
  Description of Artificial Sequence: Synthetic oligonucleotide
cuuugcgcaguauugacac

SEQ ID NO: 3170717 - RNA, 19 nt, Artificial Sequence
  Description of Artificial Sequence: Synthetic oligonucleotide
aaagucucccaguuucaag

SEQ ID NO: 3170718 - RNA, 19 nt, Artificial Sequence
  Description of Artificial Sequence: Synthetic oligonucleotide
uagguuguauaccauggca

SEQ ID NO: 3170719 - RNA, 19 nt, Artificial Sequence
  Description of Artificial Sequence: Synthetic oligonucleotide
ucucucucaguguacuugg

SEQ ID NO: 3170720 - RNA, 19 nt, Artificial Sequence
  Description of Artificial Sequence: Synthetic oligonucleotide
uuggcuagguuguauacca

SEQ ID NO: 3170721 - RNA, 19 nt, Artificial Sequence
  Description of Artificial Sequence: Synthetic oligonucleotide
ucaagacuugguuccaucc

SEQ ID NO: 3170722 - RNA, 19 nt, Artificial Sequence
  Description of Artificial Sequence: Synthetic oligonucleotide
ucucuguguacaaugcuga

SEQ ID NO: 3170723 - RNA, 19 nt, Artificial Sequence
  Description of Artificial Sequence: Synthetic oligonucleotide
uugaagaaguaauugcauc

SEQ ID NO: 3170724 - RNA, 19 nt, Artificial Sequence
  Description of Artificial Sequence: Synthetic oligonucleotide
uugguugaagaaguaauug

SEQ ID NO: 3170725 - RNA, 19 nt, Artificial Sequence
  Description of Artificial Sequence: Synthetic oligonucleotide
cauccggauauucacauac

SEQ ID NO: 3170726 - RNA, 19 nt, Artificial Sequence
  Description of Artificial Sequence: Synthetic oligonucleotide
aaugcugaggccaugcaga

SEQ ID NO: 3170727 - RNA, 19 nt, Artificial Sequence
  Description of Artificial Sequence: Synthetic oligonucleotide
gauaucugagggcauuggc

SEQ ID NO: 3170728 - RNA, 19 nt, Artificial Sequence
  Description of Artificial Sequence: Synthetic oligonucleotide
auuggcuagguuguauacc

SEQ ID NO: 3170729 - RNA, 19 nt, Artificial Sequence
  Description of Artificial Sequence: Synthetic oligonucleotide
agagaucuccaccuuugac

SEQ ID NO: 3170730 - RNA, 19 nt, Artificial Sequence
  Description of Artificial Sequence: Synthetic oligonucleotide
ucuguguacaaugcugagg

SEQ ID NO: 3170731 - RNA, 19 nt, Artificial Sequence
  Description of Artificial Sequence: Synthetic oligonucleotide
agaucuccaccuuugacca

SEQ ID NO: 3170732 - RNA, 19 nt, Artificial Sequence
  Description of Artificial Sequence: Synthetic oligonucleotide
aucgaagagaucuccaccu

SEQ ID NO: 3170733 - RNA, 19 nt, Artificial Sequence
  Description of Artificial Sequence: Synthetic oligonucleotide
uaccauggcacuuccaucu

SEQ ID NO: 3170734 - RNA, 19 nt, Artificial Sequence
  Description of Artificial Sequence: Synthetic oligonucleotide
auacuagaagauucuccgg

SEQ ID NO: 3170735 - RNA, 19 nt, Artificial Sequence
  Description of Artificial Sequence: Synthetic oligonucleotide
ucacauacuagaagauucu

SEQ ID NO: 3170736 - RNA, 19 nt, Artificial Sequence
  Description of Artificial Sequence: Synthetic oligonucleotide
cucucaguguacuugguug

SEQ ID NO: 3170737 - RNA, 19 nt, Artificial Sequence
  Description of Artificial Sequence: Synthetic oligonucleotide
accaacaggaugauguugg

SEQ ID NO: 3170738 - RNA, 19 nt, Artificial Sequence
  Description of Artificial Sequence: Synthetic oligonucleotide
guugggaugcuucacuuug

SEQ ID NO: 3170739 - RNA, 19 nt, Artificial Sequence
  Description of Artificial Sequence: Synthetic oligonucleotide
gaugcuucacuuugcgcag

SEQ ID NO: 3170740 - RNA, 19 nt, Artificial Sequence
  Description of Artificial Sequence: Synthetic oligonucleotide
ugggaugcuucacuuugcg

SEQ ID NO: 3170741 - RNA, 19 nt, Artificial Sequence
  Description of Artificial Sequence: Synthetic oligonucleotide
aguuccaucacuagaaaga

SEQ ID NO: 3170742 - RNA, 19 nt, Artificial Sequence
  Description of Artificial Sequence: Synthetic oligonucleotide
cuagaaagagcucggucgc

SEQ ID NO: 3170743 - RNA, 19 nt, Artificial Sequence
  Description of Artificial Sequence: Synthetic oligonucleotide
uagaagauucuccggcuug

SEQ ID NO: 3170744 - RNA, 19 nt, Artificial Sequence
  Description of Artificial Sequence: Synthetic oligonucleotide
agguuguauaccauggcac

SEQ ID NO: 3170745 - RNA, 19 nt, Artificial Sequence
  Description of Artificial Sequence: Synthetic oligonucleotide
uguauaccauggcacuucc

SEQ ID NO: 3170746 - RNA, 19 nt, Artificial Sequence
  Description of Artificial Sequence: Synthetic oligonucleotide
caguauugacacuucauuc

SEQ ID NO: 3170747 - RNA, 19 nt, Artificial Sequence
  Description of Artificial Sequence: Synthetic oligonucleotide
uauucacauacuagaagau

SEQ ID NO: 3170748 - RNA, 19 nt, Artificial Sequence
  Description of Artificial Sequence: Synthetic oligonucleotide
guuuccaucuccucaacca

SEQ ID NO: 3170749 - RNA, 19 nt, Artificial Sequence
  Description of Artificial Sequence: Synthetic oligonucleotide
uauugacacuucauucuca

SEQ ID NO: 3170750 - RNA, 19 nt, Artificial Sequence
  Description of Artificial Sequence: Synthetic oligonucleotide
caugcagauaucugagggc

SEQ ID NO: 3170751 - RNA, 19 nt, Artificial Sequence
  Description of Artificial Sequence: Synthetic oligonucleotide
agaaguaauugcaucgaag

SEQ ID NO: 3170752 - RNA, 19 nt, Artificial Sequence
  Description of Artificial Sequence: Synthetic oligonucleotide
aagaaguaauugcaucgaa

SEQ ID NO: 3170753 - RNA, 19 nt, Artificial Sequence
  Description of Artificial Sequence: Synthetic oligonucleotide
caagacuugguuccauccg

SEQ ID NO: 3170754 - RNA, 19 nt, Artificial Sequence
  Description of Artificial Sequence: Synthetic oligonucleotide
uguuuccaucuccucaacc

SEQ ID NO: 3170755 - RNA, 19 nt, Artificial Sequence
  Description of Artificial Sequence: Synthetic oligonucleotide
aucuccucaaccaacagga

SEQ ID NO: 3170756 - RNA, 19 nt, Artificial Sequence
  Description of Artificial Sequence: Synthetic oligonucleotide
aagauucuccggcuugaug

SEQ ID NO: 3170757 - RNA, 19 nt, Artificial Sequence
  Description of Artificial Sequence: Synthetic oligonucleotide
caucuccucaaccaacagg

SEQ ID NO: 3170758 - RNA, 19 nt, Artificial Sequence
  Description of Artificial Sequence: Synthetic oligonucleotide
uccaucuccucaaccaaca

SEQ ID NO: 3170759 - RNA, 19 nt, Artificial Sequence
  Description of Artificial Sequence: Synthetic oligonucleotide
ucucaguguacuugguuga

SEQ ID NO: 3170760 - RNA, 19 nt, Artificial Sequence
  Description of Artificial Sequence: Synthetic oligonucleotide
gaagagaucuccaccuuug

SEQ ID NO: 3170761 - RNA, 19 nt, Artificial Sequence
  Description of Artificial Sequence: Synthetic oligonucleotide
auaccauggcacuuccauc

SEQ ID NO: 3170762 - RNA, 19 nt, Artificial Sequence
  Description of Artificial Sequence: Synthetic oligonucleotide
gaugauguugggaugcuuc

SEQ ID NO: 3170763 - RNA, 19 nt, Artificial Sequence
  Description of Artificial Sequence: Synthetic oligonucleotide
uaucugagggcauuggcua

SEQ ID NO: 3170764 - RNA, 19 nt, Artificial Sequence
  Description of Artificial Sequence: Synthetic oligonucleotide
agucucccaguuucaagac

SEQ ID NO: 3170765 - RNA, 19 nt, Artificial Sequence
  Description of Artificial Sequence: Synthetic oligonucleotide
caucgaagagaucuccacc

SEQ ID NO: 3170766 - RNA, 19 nt, Artificial Sequence
  Description of Artificial Sequence: Synthetic oligonucleotide
ucucccaguuucaagacuu

SEQ ID NO: 3170767 - RNA, 19 nt, Artificial Sequence
  Description of Artificial Sequence: Synthetic oligonucleotide
guuccaucacuagaaagag

SEQ ID NO: 3170768 - RNA, 19 nt, Artificial Sequence
  Description of Artificial Sequence: Synthetic oligonucleotide
acuagaagauucuccggcu

SEQ ID NO: 3170769 - RNA, 19 nt, Artificial Sequence
  Description of Artificial Sequence: Synthetic oligonucleotide
ucaaccacugucgccagcc

SEQ ID NO: 3170770 - RNA, 19 nt, Artificial Sequence
  Description of Artificial Sequence: Synthetic oligonucleotide
uugaccaguuccaucacua

SEQ ID NO: 3170771 - RNA, 19 nt, Artificial Sequence
  Description of Artificial Sequence: Synthetic oligonucleotide
ggaugcuucacuuugcgca

SEQ ID NO: 3170772 - RNA, 19 nt, Artificial Sequence
  Description of Artificial Sequence: Synthetic oligonucleotide
uguacaaugcugaggccau

SEQ ID NO: 3170773 - RNA, 19 nt, Artificial Sequence
  Description of Artificial Sequence: Synthetic oligonucleotide
uuuccaucuccucaaccaa

SEQ ID NO: 3170774 - RNA, 19 nt, Artificial Sequence
  Description of Artificial Sequence: Synthetic oligonucleotide
uuugaccaguuccaucacu

SEQ ID NO: 3170775 - RNA, 19 nt, Artificial Sequence
  Description of Artificial Sequence: Synthetic oligonucleotide
guuccauccggauauucac

SEQ ID NO: 3170776 - RNA, 19 nt, Artificial Sequence
  Description of Artificial Sequence: Synthetic oligonucleotide
guguacuugguugaagaag

SEQ ID NO: 3170777 - RNA, 19 nt, Artificial Sequence
  Description of Artificial Sequence: Synthetic oligonucleotide
augucucuguguacaaugc

SEQ ID NO: 3170778 - RNA, 19 nt, Artificial Sequence
  Description of Artificial Sequence: Synthetic oligonucleotide
cuagguuguauaccauggc

SEQ ID NO: 3170779 - RNA, 19 nt, Artificial Sequence
  Description of Artificial Sequence: Synthetic oligonucleotide
caguuccaucacuagaaag

SEQ ID NO: 3170780 - RNA, 19 nt, Artificial Sequence
  Description of Artificial Sequence: Synthetic oligonucleotide
guauugacacuucauucuc

SEQ ID NO: 3170781 - RNA, 19 nt, Artificial Sequence
  Description of Artificial Sequence: Synthetic oligonucleotide
uccggauauucacauacua

SEQ ID NO: 3170782 - RNA, 19 nt, Artificial Sequence
  Description of Artificial Sequence: Synthetic oligonucleotide
caguuucaagacuugguuc

SEQ ID NO: 3170783 - RNA, 19 nt, Artificial Sequence
  Description of Artificial Sequence: Synthetic oligonucleotide
aagagaucuccaccuuuga

SEQ ID NO: 3170784 - RNA, 19 nt, Artificial Sequence
  Description of Artificial Sequence: Synthetic oligonucleotide
aaaguaaaacuuuaaauca

SEQ ID NO: 3170785 - RNA, 19 nt, Artificial Sequence
  Description of Artificial Sequence: Synthetic oligonucleotide
aaaacuuuaaaucaggcua

SEQ ID NO: 3170786 - RNA, 19 nt, Artificial Sequence
  Description of Artificial Sequence: Synthetic oligonucleotide
gaaaguaaaacuuuaaauc

SEQ ID NO: 3170787 - RNA, 19 nt, Artificial Sequence
  Description of Artificial Sequence: Synthetic oligonucleotide
aaucaaaagaaaguaaaac

SEQ ID NO: 3170788 - RNA, 19 nt, Artificial Sequence
  Description of Artificial Sequence: Synthetic oligonucleotide
ucauaaaaucaaaagaaag

SEQ ID NO: 3170789 - RNA, 19 nt, Artificial Sequence
  Description of Artificial Sequence: Synthetic oligonucleotide
auaagaaacacaugaaagg

SEQ ID NO: 3170790 - RNA, 19 nt, Artificial Sequence
  Description of Artificial Sequence: Synthetic oligonucleotide
agaaaugccucuuauaagg

SEQ ID NO: 3170791 - RNA, 19 nt, Artificial Sequence
  Description of Artificial Sequence: Synthetic oligonucleotide
aaauaaacuauuauuagug

SEQ ID NO: 3170792 - RNA, 19 nt, Artificial Sequence
  Description of Artificial Sequence: Synthetic oligonucleotide
ucuuauaaggaaauaaacu

SEQ ID NO: 3170793 - RNA, 19 nt, Artificial Sequence
  Description of Artificial Sequence: Synthetic oligonucleotide
aacuuuacucauaagaaac

SEQ ID NO: 3170794 - RNA, 19 nt, Artificial Sequence
  Description of Artificial Sequence: Synthetic oligonucleotide
gaaagguuagacuugagug

SEQ ID NO: 3170795 - RNA, 19 nt, Artificial Sequence
  Description of Artificial Sequence: Synthetic oligonucleotide
aaucaggcuacagaaaugc

SEQ ID NO: 3170796 - RNA, 19 nt, Artificial Sequence
  Description of Artificial Sequence: Synthetic oligonucleotide
uuuaaaucaggcuacagaa

SEQ ID NO: 3170797 - RNA, 19 nt, Artificial Sequence
  Description of Artificial Sequence: Synthetic oligonucleotide
cauaagaaacacaugaaag

SEQ ID NO: 3170798 - RNA, 19 nt, Artificial Sequence
  Description of Artificial Sequence: Synthetic oligonucleotide
ugagucauaaaaucaaaag

SEQ ID NO: 3170799 - RNA, 19 nt, Artificial Sequence
  Description of Artificial Sequence: Synthetic oligonucleotide
cauauaagcagcaugaguc

SEQ ID NO: 3170800 - RNA, 19 nt, Artificial Sequence
  Description of Artificial Sequence: Synthetic oligonucleotide
aucaaaagaaaguaaaacu

SEQ ID NO: 3170801 - RNA, 19 nt, Artificial Sequence
  Description of Artificial Sequence: Synthetic oligonucleotide
acucauaagaaacacauga

SEQ ID NO: 3170802 - RNA, 19 nt, Artificial Sequence
  Description of Artificial Sequence: Synthetic oligonucleotide
ucaaaagaaaguaaaacuu

SEQ ID NO: 3170803 - RNA, 19 nt, Artificial Sequence
  Description of Artificial Sequence: Synthetic oligonucleotide
aaggaaauaaacuauuauu

SEQ ID NO: 3170804 - RNA, 19 nt, Artificial Sequence
  Description of Artificial Sequence: Synthetic oligonucleotide
aauaaacuauuauuagugu

SEQ ID NO: 3170805 - RNA, 19 nt, Artificial Sequence
  Description of Artificial Sequence: Synthetic oligonucleotide
cuauuauuaguguaacugg

SEQ ID NO: 3170806 - RNA, 19 nt, Artificial Sequence
  Description of Artificial Sequence: Synthetic oligonucleotide
uaaacuauuauuaguguaa

SEQ ID NO: 3170807 - RNA, 19 nt, Artificial Sequence
  Description of Artificial Sequence: Synthetic oligonucleotide
uauuauuaguguaacuggc

SEQ ID NO: 3170808 - RNA, 19 nt, Artificial Sequence
  Description of Artificial Sequence: Synthetic oligonucleotide
acuauuauuaguguaacug

SEQ ID NO: 3170809 - RNA, 19 nt, Artificial Sequence
  Description of Artificial Sequence: Synthetic oligonucleotide
uuacucauaagaaacacau

SEQ ID NO: 3170810 - RNA, 19 nt, Artificial Sequence
  Description of Artificial Sequence: Synthetic oligonucleotide
aacacaugaaagguuagac

SEQ ID NO: 3170811 - RNA, 19 nt, Artificial Sequence
  Description of Artificial Sequence: Synthetic oligonucleotide
ugaacuuuacucauaagaa

SEQ ID NO: 3170812 - RNA, 19 nt, Artificial Sequence
  Description of Artificial Sequence: Synthetic oligonucleotide
agaaaguaaaacuuuaaau

SEQ ID NO: 3170813 - RNA, 19 nt, Artificial Sequence
  Description of Artificial Sequence: Synthetic oligonucleotide
aaagguuagacuugaguga

SEQ ID NO: 3170814 - RNA, 19 nt, Artificial Sequence
  Description of Artificial Sequence: Synthetic oligonucleotide
aaaaucaaaagaaaguaaa

SEQ ID NO: 3170815 - RNA, 19 nt, Artificial Sequence
  Description of Artificial Sequence: Synthetic oligonucleotide
gacaacugcauauaagcag

SEQ ID NO: 3170816 - RNA, 19 nt, Artificial Sequence
  Description of Artificial Sequence: Synthetic oligonucleotide
aaacuuuaaaucaggcuac

SEQ ID NO: 3170817 - RNA, 19 nt, Artificial Sequence
  Description of Artificial Sequence: Synthetic oligonucleotide
uuauaaggaaauaaacuau

SEQ ID NO: 3170818 - RNA, 19 nt, Artificial Sequence
  Description of Artificial Sequence: Synthetic oligonucleotide
aagaaaguaaaacuuuaaa

SEQ ID NO: 3170819 - RNA, 19 nt, Artificial Sequence
  Description of Artificial Sequence: Synthetic oligonucleotide
uaaaaucaaaagaaaguaa

SEQ ID NO: 3170820 - RNA, 19 nt, Artificial Sequence
  Description of Artificial Sequence: Synthetic oligonucleotide
aaacuauuauuaguguaac

SEQ ID NO: 3170821 - RNA, 19 nt, Artificial Sequence
  Description of Artificial Sequence: Synthetic oligonucleotide
ucauaagaaacacaugaaa

SEQ ID NO: 3170822 - RNA, 19 nt, Artificial Sequence
  Description of Artificial Sequence: Synthetic oligonucleotide
uuuccagugaacuuuacuc

SEQ ID NO: 3170823 - RNA, 19 nt, Artificial Sequence
  Description of Artificial Sequence: Synthetic oligonucleotide
gagucauaaaaucaaaaga

SEQ ID NO: 3170824 - RNA, 19 nt, Artificial Sequence
  Description of Artificial Sequence: Synthetic oligonucleotide
uaaaucaggcuacagaaau

SEQ ID NO: 3170825 - RNA, 19 nt, Artificial Sequence
  Description of Artificial Sequence: Synthetic oligonucleotide
uaaaacuuuaaaucaggcu

SEQ ID NO: 3170826 - RNA, 19 nt, Artificial Sequence
  Description of Artificial Sequence: Synthetic oligonucleotide
cuuauaaggaaauaaacua

SEQ ID NO: 3170827 - RNA, 19 nt, Artificial Sequence
  Description of Artificial Sequence: Synthetic oligonucleotide
acaacugcauauaagcagc

SEQ ID NO: 3170828 - RNA, 19 nt, Artificial Sequence
  Description of Artificial Sequence: Synthetic oligonucleotide
acagaaaugccucuuauaa

SEQ ID NO: 3170829 - RNA, 19 nt, Artificial Sequence
  Description of Artificial Sequence: Synthetic oligonucleotide
aaguaaaacuuuaaaucag

SEQ ID NO: 3170830 - RNA, 19 nt, Artificial Sequence
  Description of Artificial Sequence: Synthetic oligonucleotide
uaagaaacacaugaaaggu

SEQ ID NO: 3170831 - RNA, 19 nt, Artificial Sequence
  Description of Artificial Sequence: Synthetic oligonucleotide
uuuacucauaagaaacaca

SEQ ID NO: 3170832 - RNA, 19 nt, Artificial Sequence
  Description of Artificial Sequence: Synthetic oligonucleotide
cucuuauaaggaaauaaac

SEQ ID NO: 3170833 - RNA, 19 nt, Artificial Sequence
  Description of Artificial Sequence: Synthetic oligonucleotide
uauaaggaaauaaacuauu

SEQ ID NO: 3170834 - RNA, 19 nt, Artificial Sequence
  Description of Artificial Sequence: Synthetic oligonucleotide
gugaacuuuacucauaaga

SEQ ID NO: 3170835 - RNA, 19 nt, Artificial Sequence
  Description of Artificial Sequence: Synthetic oligonucleotide
uaaggaaauaaacuauuau

SEQ ID NO: 3170836 - RNA, 19 nt, Artificial Sequence
  Description of Artificial Sequence: Synthetic oligonucleotide
ugaaagguuagacuugagu

SEQ ID NO: 3170837 - RNA, 19 nt, Artificial Sequence
  Description of Artificial Sequence: Synthetic oligonucleotide
agcagcaugagucauaaaa

SEQ ID NO: 3170838 - RNA, 19 nt, Artificial Sequence
  Description of Artificial Sequence: Synthetic oligonucleotide
auaaaaucaaaagaaagua

SEQ ID NO: 3170839 - RNA, 19 nt, Artificial Sequence
  Description of Artificial Sequence: Synthetic oligonucleotide
ggaaauaaacuauuauuag

SEQ ID NO: 3170840 - RNA, 19 nt, Artificial Sequence
  Description of Artificial Sequence: Synthetic oligonucleotide
aguaaaacuuuaaaucagg

SEQ ID NO: 3170841 - RNA, 19 nt, Artificial Sequence
  Description of Artificial Sequence: Synthetic oligonucleotide
uuagacuugagugaagcca

SEQ ID NO: 3170842 - RNA, 19 nt, Artificial Sequence
  Description of Artificial Sequence: Synthetic oligonucleotide
agucauaaaaucaaaagaa

SEQ ID NO: 3170843 - RNA, 19 nt, Artificial Sequence
  Description of Artificial Sequence: Synthetic oligonucleotide
acugcauauaagcagcaug

SEQ ID NO: 3170844 - RNA, 19 nt, Artificial Sequence
  Description of Artificial Sequence: Synthetic oligonucleotide
gaaauaaacuauuauuagu

SEQ ID NO: 3170845 - RNA, 19 nt, Artificial Sequence
  Description of Artificial Sequence: Synthetic oligonucleotide
aguguaacuggcuuuccag

SEQ ID NO: 3170846 - RNA, 19 nt, Artificial Sequence
  Description of Artificial Sequence: Synthetic oligonucleotide
ucaggcuacagaaaugccu

SEQ ID NO: 3170847 - RNA, 19 nt, Artificial Sequence
  Description of Artificial Sequence: Synthetic oligonucleotide
auuaguguaacuggcuuuc

SEQ ID NO: 3170848 - RNA, 19 nt, Artificial Sequence
  Description of Artificial Sequence: Synthetic oligonucleotide
cauaaaaucaaaagaaagu

SEQ ID NO: 3170849 - RNA, 19 nt, Artificial Sequence
  Description of Artificial Sequence: Synthetic oligonucleotide
auaaacuauuauuagugua

SEQ ID NO: 3170850 - RNA, 19 nt, Artificial Sequence
  Description of Artificial Sequence: Synthetic oligonucleotide
aacuauuauuaguguaacu

SEQ ID NO: 3170851 - RNA, 19 nt, Artificial Sequence
  Description of Artificial Sequence: Synthetic oligonucleotide
uguaacuggcuuuccagug

SEQ ID NO: 3170852 - RNA, 19 nt, Artificial Sequence
  Description of Artificial Sequence: Synthetic oligonucleotide
aaaagaaaguaaaacuuua

SEQ ID NO: 3170853 - RNA, 19 nt, Artificial Sequence
  Description of Artificial Sequence: Synthetic oligonucleotide
aaaucaaaagaaaguaaaa

SEQ ID NO: 3170854 - RNA, 19 nt, Artificial Sequence
  Description of Artificial Sequence: Synthetic oligonucleotide
uuauuaguguaacuggcuu

SEQ ID NO: 3170855 - RNA, 19 nt, Artificial Sequence
  Description of Artificial Sequence: Synthetic oligonucleotide
aggaaauaaacuauuauua

SEQ ID NO: 3170856 - RNA, 19 nt, Artificial Sequence
  Description of Artificial Sequence: Synthetic oligonucleotide
uuccagugaacuuuacuca

SEQ ID NO: 3170857 - RNA, 19 nt, Artificial Sequence
  Description of Artificial Sequence: Synthetic oligonucleotide
cuuuaaaucaggcuacaga

SEQ ID NO: 3170858 - RNA, 19 nt, Artificial Sequence
  Description of Artificial Sequence: Synthetic oligonucleotide
uccuguuccgacaacugca

SEQ ID NO: 3170859 - RNA, 19 nt, Artificial Sequence
  Description of Artificial Sequence: Synthetic oligonucleotide
uccgacaacugcauauaag

SEQ ID NO: 3170860 - RNA, 19 nt, Artificial Sequence
  Description of Artificial Sequence: Synthetic oligonucleotide
uuaaaucaggcuacagaaa

SEQ ID NO: 3170861 - RNA, 19 nt, Artificial Sequence
  Description of Artificial Sequence: Synthetic oligonucleotide
guaaaacuuuaaaucaggc

SEQ ID NO: 3170862 - RNA, 19 nt, Artificial Sequence
  Description of Artificial Sequence: Synthetic oligonucleotide
auauaagcagcaugaguca

SEQ ID NO: 3170863 - RNA, 19 nt, Artificial Sequence
  Description of Artificial Sequence: Synthetic oligonucleotide
uguuccgacaacugcauau

SEQ ID NO: 3170864 - RNA, 19 nt, Artificial Sequence
  Description of Artificial Sequence: Synthetic oligonucleotide
acacaugaaagguuagacu

SEQ ID NO: 3170865 - RNA, 19 nt, Artificial Sequence
  Description of Artificial Sequence: Synthetic oligonucleotide
aaagaaaguaaaacuuuaa

SEQ ID NO: 3170866 - RNA, 19 nt, Artificial Sequence
  Description of Artificial Sequence: Synthetic oligonucleotide
gaacuuuacucauaagaaa

SEQ ID NO: 3170867 - RNA, 19 nt, Artificial Sequence
  Description of Artificial Sequence: Synthetic oligonucleotide
aaaugccucuuauaaggaa

SEQ ID NO: 3170868 - RNA, 19 nt, Artificial Sequence
  Description of Artificial Sequence: Synthetic oligonucleotide
cuuuacucauaagaaacac

SEQ ID NO: 3170869 - RNA, 19 nt, Artificial Sequence
  Description of Artificial Sequence: Synthetic oligonucleotide
cugcauauaagcagcauga

SEQ ID NO: 3170870 - RNA, 19 nt, Artificial Sequence
  Description of Artificial Sequence: Synthetic oligonucleotide
uacucauaagaaacacaug

SEQ ID NO: 3170871 - RNA, 19 nt, Artificial Sequence
  Description of Artificial Sequence: Synthetic oligonucleotide
aaugccucuuauaaggaaa

SEQ ID NO: 3170872 - RNA, 19 nt, Artificial Sequence
  Description of Artificial Sequence: Synthetic oligonucleotide
cagaaaugccucuuauaag

SEQ ID NO: 3170873 - RNA, 19 nt, Artificial Sequence
  Description of Artificial Sequence: Synthetic oligonucleotide
aaacacaugaaagguuaga

SEQ ID NO: 3170874 - RNA, 19 nt, Artificial Sequence
  Description of Artificial Sequence: Synthetic oligonucleotide
ccgacaacugcauauaagc

SEQ ID NO: 3170875 - RNA, 19 nt, Artificial Sequence
  Description of Artificial Sequence: Synthetic oligonucleotide
aagguuagacuugagugaa

SEQ ID NO: 3170876 - RNA, 19 nt, Artificial Sequence
  Description of Artificial Sequence: Synthetic oligonucleotide
caggcuacagaaaugccuc

SEQ ID NO: 3170877 - RNA, 19 nt, Artificial Sequence
  Description of Artificial Sequence: Synthetic oligonucleotide
cagcaugagucauaaaauc

SEQ ID NO: 3170878 - RNA, 19 nt, Artificial Sequence
  Description of Artificial Sequence: Synthetic oligonucleotide
aaaucaggcuacagaaaug

SEQ ID NO: 3170879 - RNA, 19 nt, Artificial Sequence
  Description of Artificial Sequence: Synthetic oligonucleotide
uauuaguguaacuggcuuu

SEQ ID NO: 3170880 - RNA, 19 nt, Artificial Sequence
  Description of Artificial Sequence: Synthetic oligonucleotide
guuagacuugagugaagcc

SEQ ID NO: 3170881 - RNA, 19 nt, Artificial Sequence
  Description of Artificial Sequence: Synthetic oligonucleotide
agaaacacaugaaagguua

SEQ ID NO: 3170882 - RNA, 19 nt, Artificial Sequence
  Description of Artificial Sequence: Synthetic oligonucleotide
auuauuaguguaacuggcu

SEQ ID NO: 3170883 - RNA, 19 nt, Artificial Sequence
  Description of Artificial Sequence: Synthetic oligonucleotide
agcaugagucauaaaauca

SEQ ID NO: 3170884 - RNA, 19 nt, Artificial Sequence
  Description of Artificial Sequence: Synthetic oligonucleotide
aaugguuucuucgaguucc

SEQ ID NO: 3170885 - RNA, 19 nt, Artificial Sequence
  Description of Artificial Sequence: Synthetic oligonucleotide
aaauaaugcugcuaugaac

SEQ ID NO: 3170886 - RNA, 19 nt, Artificial Sequence
  Description of Artificial Sequence: Synthetic oligonucleotide
aaugcugcuaugaacaugg

SEQ ID NO: 3170887 - RNA, 19 nt, Artificial Sequence
  Description of Artificial Sequence: Synthetic oligonucleotide
aauaaugcugcuaugaaca

SEQ ID NO: 3170888 - RNA, 19 nt, Artificial Sequence
  Description of Artificial Sequence: Synthetic oligonucleotide
uaaaauccacauaugagug

SEQ ID NO: 3170889 - RNA, 19 nt, Artificial Sequence
  Description of Artificial Sequence: Synthetic oligonucleotide
aaauguaccacaauuucuc

SEQ ID NO: 3170890 - RNA, 19 nt, Artificial Sequence
  Description of Artificial Sequence: Synthetic oligonucleotide
cuggcuauuacaaauaaug

SEQ ID NO: 3170891 - RNA, 19 nt, Artificial Sequence
  Description of Artificial Sequence: Synthetic oligonucleotide
caugguugaacauaugucc

SEQ ID NO: 3170892 - RNA, 19 nt, Artificial Sequence
  Description of Artificial Sequence: Synthetic oligonucleotide
uaugagugaguacauauca

SEQ ID NO: 3170893 - RNA, 19 nt, Artificial Sequence
  Description of Artificial Sequence: Synthetic oligonucleotide
aacaugguugaacauaugu

SEQ ID NO: 3170894 - RNA, 19 nt, Artificial Sequence
  Description of Artificial Sequence: Synthetic oligonucleotide
uuuccugcaaauuucaaga

SEQ ID NO: 3170895 - RNA, 19 nt, Artificial Sequence
  Description of Artificial Sequence: Synthetic oligonucleotide
aaauuucaagauuccauug

SEQ ID NO: 3170896 - RNA, 19 nt, Artificial Sequence
  Description of Artificial Sequence: Synthetic oligonucleotide
uguuauaugaaugugcuuc

SEQ ID NO: 3170897 - RNA, 19 nt, Artificial Sequence
  Description of Artificial Sequence: Synthetic oligonucleotide
uugugauuggguuaccucg

SEQ ID NO: 3170898 - RNA, 19 nt, Artificial Sequence
  Description of Artificial Sequence: Synthetic oligonucleotide
aauuucaagauuccauugu

SEQ ID NO: 3170899 - RNA, 19 nt, Artificial Sequence
  Description of Artificial Sequence: Synthetic oligonucleotide
guuucuucgaguuccaucc

SEQ ID NO: 3170900 - RNA, 19 nt, Artificial Sequence
  Description of Artificial Sequence: Synthetic oligonucleotide
aauugcuggaucuuguggu

SEQ ID NO: 3170901 - RNA, 19 nt, Artificial Sequence
  Description of Artificial Sequence: Synthetic oligonucleotide
uuacaaauaaugcugcuau

SEQ ID NO: 3170902 - RNA, 19 nt, Artificial Sequence
  Description of Artificial Sequence: Synthetic oligonucleotide
uuuuccugcaaauuucaag

SEQ ID NO: 3170903 - RNA, 19 nt, Artificial Sequence
  Description of Artificial Sequence: Synthetic oligonucleotide
cuaggaguggaauugcugg

SEQ ID NO: 3170904 - RNA, 19 nt, Artificial Sequence
  Description of Artificial Sequence: Synthetic oligonucleotide
uucucuauccauucuuugg

SEQ ID NO: 3170905 - RNA, 19 nt, Artificial Sequence
  Description of Artificial Sequence: Synthetic oligonucleotide
augaaugugcuucuuuugg

SEQ ID NO: 3170906 - RNA, 19 nt, Artificial Sequence
  Description of Artificial Sequence: Synthetic oligonucleotide
aaauccacauaugagugag

SEQ ID NO: 3170907 - RNA, 19 nt, Artificial Sequence
  Description of Artificial Sequence: Synthetic oligonucleotide
cuauuacaaauaaugcugc

SEQ ID NO: 3170908 - RNA, 19 nt, Artificial Sequence
  Description of Artificial Sequence: Synthetic oligonucleotide
uaaauguaccacaauuucu

SEQ ID NO: 3170909 - RNA, 19 nt, Artificial Sequence
  Description of Artificial Sequence: Synthetic oligonucleotide
uccauuguguaaauguacc

SEQ ID NO: 3170910 - RNA, 19 nt, Artificial Sequence
  Description of Artificial Sequence: Synthetic oligonucleotide
acaauuucucuauccauuc

SEQ ID NO: 3170911 - RNA, 19 nt, Artificial Sequence
  Description of Artificial Sequence: Synthetic oligonucleotide
ucuugugguagacugauuc

SEQ ID NO: 3170912 - RNA, 19 nt, Artificial Sequence
  Description of Artificial Sequence: Synthetic oligonucleotide
uguccuuguuauaugaaug

SEQ ID NO: 3170913 - RNA, 19 nt, Artificial Sequence
  Description of Artificial Sequence: Synthetic oligonucleotide
uguaaauguaccacaauuu

SEQ ID NO: 3170914 - RNA, 19 nt, Artificial Sequence
  Description of Artificial Sequence: Synthetic oligonucleotide
ugagugaguacauaucaug

SEQ ID NO: 3170915 - RNA, 19 nt, Artificial Sequence
  Description of Artificial Sequence: Synthetic oligonucleotide
auucccauuuucuugagga

SEQ ID NO: 3170916 - RNA, 19 nt, Artificial Sequence
  Description of Artificial Sequence: Synthetic oligonucleotide
cauucuuugguugaggggc

SEQ ID NO: 3170917 - RNA, 19 nt, Artificial Sequence
  Description of Artificial Sequence: Synthetic oligonucleotide
cuucuuuuggguauaugcc

SEQ ID NO: 3170918 - RNA, 19 nt, Artificial Sequence
  Description of Artificial Sequence: Synthetic oligonucleotide
ugaguacauaucauguuug

SEQ ID NO: 3170919 - RNA, 19 nt, Artificial Sequence
  Description of Artificial Sequence: Synthetic oligonucleotide
ugaaugugcuucuuuuggg

SEQ ID NO: 3170920 - RNA, 19 nt, Artificial Sequence
  Description of Artificial Sequence: Synthetic oligonucleotide
uacuccauuguguaaaugu

SEQ ID NO: 3170921 - RNA, 19 nt, Artificial Sequence
  Description of Artificial Sequence: Synthetic oligonucleotide
uggcuauuacaaauaaugc

SEQ ID NO: 3170922 - RNA, 19 nt, Artificial Sequence
  Description of Artificial Sequence: Synthetic oligonucleotide
uuggguauaugccuaggag

SEQ ID NO: 3170923 - RNA, 19 nt, Artificial Sequence
  Description of Artificial Sequence: Synthetic oligonucleotide
gaauugcuggaucuugugg

SEQ ID NO: 3170924 - RNA, 19 nt, Artificial Sequence
  Description of Artificial Sequence: Synthetic oligonucleotide
uggaucuugugguagacug

SEQ ID NO: 3170925 - RNA, 19 nt, Artificial Sequence
  Description of Artificial Sequence: Synthetic oligonucleotide
uccauucuuugguugaggg

SEQ ID NO: 3170926 - RNA, 19 nt, Artificial Sequence
  Description of Artificial Sequence: Synthetic oligonucleotide
aauuucucuauccauucuu

SEQ ID NO: 3170927 - RNA, 19 nt, Artificial Sequence
  Description of Artificial Sequence: Synthetic oligonucleotide
auuguguaaauguaccaca

SEQ ID NO: 3170928 - RNA, 19 nt, Artificial Sequence
  Description of Artificial Sequence: Synthetic oligonucleotide
ugaguaguacuccauugug

SEQ ID NO: 3170929 - RNA, 19 nt, Artificial Sequence
  Description of Artificial Sequence: Synthetic oligonucleotide
guuccauccauuuuccugc

SEQ ID NO: 3170930 - RNA, 19 nt, Artificial Sequence
  Description of Artificial Sequence: Synthetic oligonucleotide
ucgaguuccauccauuuuc

SEQ ID NO: 3170931 - RNA, 19 nt, Artificial Sequence
  Description of Artificial Sequence: Synthetic oligonucleotide
acugauucccauuuucuug

SEQ ID NO: 3170932 - RNA, 19 nt, Artificial Sequence
  Description of Artificial Sequence: Synthetic oligonucleotide
aaaauccacauaugaguga

SEQ ID NO: 3170933 - RNA, 19 nt, Artificial Sequence
  Description of Artificial Sequence: Synthetic oligonucleotide
ugaacaugguugaacauau

SEQ ID NO: 3170934 - RNA, 19 nt, Artificial Sequence
  Description of Artificial Sequence: Synthetic oligonucleotide
uugaggggcaucuaggcug

SEQ ID NO: 3170935 - RNA, 19 nt, Artificial Sequence
  Description of Artificial Sequence: Synthetic oligonucleotide
ucucuauccauucuuuggu

SEQ ID NO: 3170936 - RNA, 19 nt, Artificial Sequence
  Description of Artificial Sequence: Synthetic oligonucleotide
guaaauguaccacaauuuc

SEQ ID NO: 3170937 - RNA, 19 nt, Artificial Sequence
  Description of Artificial Sequence: Synthetic oligonucleotide
ucagaaugguuucuucgag

SEQ ID NO: 3170938 - RNA, 19 nt, Artificial Sequence
  Description of Artificial Sequence: Synthetic oligonucleotide
gcuauuacaaauaaugcug

SEQ ID NO: 3170939 - RNA, 19 nt, Artificial Sequence
  Description of Artificial Sequence: Synthetic oligonucleotide
ugaggagucgccauacuga

SEQ ID NO: 3170940 - RNA, 19 nt, Artificial Sequence
  Description of Artificial Sequence: Synthetic oligonucleotide
uguaccacaauuucucuau

SEQ ID NO: 3170941 - RNA, 19 nt, Artificial Sequence
  Description of Artificial Sequence: Synthetic oligonucleotide
uucuuuuggguauaugccu

SEQ ID NO: 3170942 - RNA, 19 nt, Artificial Sequence
  Description of Artificial Sequence: Synthetic oligonucleotide
aguuccauccauuuuccug

SEQ ID NO: 3170943 - RNA, 19 nt, Artificial Sequence
  Description of Artificial Sequence: Synthetic oligonucleotide
uccauuuuccugcaaauuu

SEQ ID NO: 3170944 - RNA, 19 nt, Artificial Sequence
  Description of Artificial Sequence: Synthetic oligonucleotide
uaugaaugugcuucuuuug

SEQ ID NO: 3170945 - RNA, 19 nt, Artificial Sequence
  Description of Artificial Sequence: Synthetic oligonucleotide
ugaacauauguccuuguua

SEQ ID NO: 3170946 - RNA, 19 nt, Artificial Sequence
  Description of Artificial Sequence: Synthetic oligonucleotide
ucuauccauucuuugguug

SEQ ID NO: 3170947 - RNA, 19 nt, Artificial Sequence
  Description of Artificial Sequence: Synthetic oligonucleotide
aauguaccacaauuucucu

SEQ ID NO: 3170948 - RNA, 19 nt, Artificial Sequence
  Description of Artificial Sequence: Synthetic oligonucleotide
acaaauaaugcugcuauga

SEQ ID NO: 3170949 - RNA, 19 nt, Artificial Sequence
  Description of Artificial Sequence: Synthetic oligonucleotide
uggguauaugccuaggagu

SEQ ID NO: 3170950 - RNA, 19 nt, Artificial Sequence
  Description of Artificial Sequence: Synthetic oligonucleotide
gcugcuaugaacaugguug

SEQ ID NO: 3170951 - RNA, 19 nt, Artificial Sequence
  Description of Artificial Sequence: Synthetic oligonucleotide
uucaagauuccauuguuuu

SEQ ID NO: 3170952 - RNA, 19 nt, Artificial Sequence
  Description of Artificial Sequence: Synthetic oligonucleotide
gcuucuuuuggguauaugc

SEQ ID NO: 3170953 - RNA, 19 nt, Artificial Sequence
  Description of Artificial Sequence: Synthetic oligonucleotide
uuuggguauaugccuagga

SEQ ID NO: 3170954 - RNA, 19 nt, Artificial Sequence
  Description of Artificial Sequence: Synthetic oligonucleotide
auauguccuuguuauauga

SEQ ID NO: 3170955 - RNA, 19 nt, Artificial Sequence
  Description of Artificial Sequence: Synthetic oligonucleotide
uuugcugaguaguacucca

SEQ ID NO: 3170956 - RNA, 19 nt, Artificial Sequence
  Description of Artificial Sequence: Synthetic oligonucleotide
ugugauuggguuaccucgc

SEQ ID NO: 3170957 - RNA, 19 nt, Artificial Sequence
  Description of Artificial Sequence: Synthetic oligonucleotide
uugguugaggggcaucuag

SEQ ID NO: 3170958 - RNA, 19 nt, Artificial Sequence
  Description of Artificial Sequence: Synthetic oligonucleotide
uugaggagucgccauacug

SEQ ID NO: 3170959 - RNA, 19 nt, Artificial Sequence
  Description of Artificial Sequence: Synthetic oligonucleotide
cuaugaacaugguugaaca

SEQ ID NO: 3170960 - RNA, 19 nt, Artificial Sequence
  Description of Artificial Sequence: Synthetic oligonucleotide
guacauaucauguuugucu

SEQ ID NO: 3170961 - RNA, 19 nt, Artificial Sequence
  Description of Artificial Sequence: Synthetic oligonucleotide
ugguugaggggcaucuagg

SEQ ID NO: 3170962 - RNA, 19 nt, Artificial Sequence
  Description of Artificial Sequence: Synthetic oligonucleotide
gauuggguuaccucgcuca

SEQ ID NO: 3170963 - RNA, 19 nt, Artificial Sequence
  Description of Artificial Sequence: Synthetic oligonucleotide
uaccacaauuucucuaucc

SEQ ID NO: 3170964 - RNA, 19 nt, Artificial Sequence
  Description of Artificial Sequence: Synthetic oligonucleotide
acaugguugaacauauguc

SEQ ID NO: 3170965 - RNA, 19 nt, Artificial Sequence
  Description of Artificial Sequence: Synthetic oligonucleotide
aguaguacuccauugugua

SEQ ID NO: 3170966 - RNA, 19 nt, Artificial Sequence
  Description of Artificial Sequence: Synthetic oligonucleotide
uuguguaaauguaccacaa

SEQ ID NO: 3170967 - RNA, 19 nt, Artificial Sequence
  Description of Artificial Sequence: Synthetic oligonucleotide
uauaugaaugugcuucuuu

SEQ ID NO: 3170968 - RNA, 19 nt, Artificial Sequence
  Description of Artificial Sequence: Synthetic oligonucleotide
auuuucuugaggagucgcc

SEQ ID NO: 3170969 - RNA, 19 nt, Artificial Sequence
  Description of Artificial Sequence: Synthetic oligonucleotide
cuugugguagacugauucc

SEQ ID NO: 3170970 - RNA, 19 nt, Artificial Sequence
  Description of Artificial Sequence: Synthetic oligonucleotide
gguuaccucgcucagaaug

SEQ ID NO: 3170971 - RNA, 19 nt, Artificial Sequence
  Description of Artificial Sequence: Synthetic oligonucleotide
uauuacaaauaaugcugcu

SEQ ID NO: 3170972 - RNA, 19 nt, Artificial Sequence
  Description of Artificial Sequence: Synthetic oligonucleotide
auaugaaugugcuucuuuu

SEQ ID NO: 3170973 - RNA, 19 nt, Artificial Sequence
  Description of Artificial Sequence: Synthetic oligonucleotide
gaacauauguccuuguuau

SEQ ID NO: 3170974 - RNA, 19 nt, Artificial Sequence
  Description of Artificial Sequence: Synthetic oligonucleotide
uuucucuauccauucuuug

SEQ ID NO: 3170975 - RNA, 19 nt, Artificial Sequence
  Description of Artificial Sequence: Synthetic oligonucleotide
uagacugauucccauuuuc

SEQ ID NO: 3170976 - RNA, 19 nt, Artificial Sequence
  Description of Artificial Sequence: Synthetic oligonucleotide
accacaauuucucuaucca

SEQ ID NO: 3170977 - RNA, 19 nt, Artificial Sequence
  Description of Artificial Sequence: Synthetic oligonucleotide
cauuguguaaauguaccac

SEQ ID NO: 3170978 - RNA, 19 nt, Artificial Sequence
  Description of Artificial Sequence: Synthetic oligonucleotide
uuugugauuggguuaccuc

SEQ ID NO: 3170979 - RNA, 19 nt, Artificial Sequence
  Description of Artificial Sequence: Synthetic oligonucleotide
aguacauaucauguuuguc

SEQ ID NO: 3170980 - RNA, 19 nt, Artificial Sequence
  Description of Artificial Sequence: Synthetic oligonucleotide
gauucccauuuucuugagg

SEQ ID NO: 3170981 - RNA, 19 nt, Artificial Sequence
  Description of Artificial Sequence: Synthetic oligonucleotide
uugugguagacugauuccc

SEQ ID NO: 3170982 - RNA, 19 nt, Artificial Sequence
  Description of Artificial Sequence: Synthetic oligonucleotide
aaugugcuucuuuugggua

SEQ ID NO: 3170983 - RNA, 19 nt, Artificial Sequence
  Description of Artificial Sequence: Synthetic oligonucleotide
ccugcaaauuucaagauuc

SEQ ID NO: 3170984 - RNA, 19 nt, Artificial Sequence
  Description of Artificial Sequence: Synthetic oligonucleotide
  modified_base (5)..(5): a, c, u, g, unknown or other
aaagngaugugccaguccc

SEQ ID NO: 3170985 - RNA, 19 nt, Artificial Sequence
  Description of Artificial Sequence: Synthetic oligonucleotide
agcacaaugaugaugaagc

SEQ ID NO: 3170986 - RNA, 19 nt, Artificial Sequence
  Description of Artificial Sequence: Synthetic oligonucleotide
augaugaugaagcagauga

SEQ ID NO: 3170987 - RNA, 19 nt, Artificial Sequence
  Description of Artificial Sequence: Synthetic oligonucleotide
uggaaaggcaucuugagug

SEQ ID NO: 3170988 - RNA, 19 nt, Artificial Sequence
  Description of Artificial Sequence: Synthetic oligonucleotide
uucaggaugauguagcucu

SEQ ID NO: 3170989 - RNA, 19 nt, Artificial Sequence
  Description of Artificial Sequence: Synthetic oligonucleotide
gaugauguagcucuuccag

SEQ ID NO: 3170990 - RNA, 19 nt, Artificial Sequence
  Description of Artificial Sequence: Synthetic oligonucleotide
accagcaccacaaagagcg

SEQ ID NO: 3170991 - RNA, 19 nt, Artificial Sequence
  Description of Artificial Sequence: Synthetic oligonucleotide
uucucugucauguucagga

SEQ ID NO: 3170992 - RNA, 19 nt, Artificial Sequence
  Description of Artificial Sequence: Synthetic oligonucleotide
accaaugaucaccagcacc

SEQ ID NO: 3170993 - RNA, 19 nt, Artificial Sequence
  Description of Artificial Sequence: Synthetic oligonucleotide
aagagcgucccguagucac

SEQ ID NO: 3170994 - RNA, 19 nt, Artificial Sequence
  Description of Artificial Sequence: Synthetic oligonucleotide
aagcagaugacaccaauga

SEQ ID NO: 3170995 - RNA, 19 nt, Artificial Sequence
  Description of Artificial Sequence: Synthetic oligonucleotide
ucugucauguucaggauga

SEQ ID NO: 3170996 - RNA, 19 nt, Artificial Sequence
  Description of Artificial Sequence: Synthetic oligonucleotide
gaugacaccaaugaucacc

SEQ ID NO: 3170997 - RNA, 19 nt, Artificial Sequence
  Description of Artificial Sequence: Synthetic oligonucleotide
agcucuuccagccagguug

SEQ ID NO: 3170998 - RNA, 19 nt, Artificial Sequence
  Description of Artificial Sequence: Synthetic oligonucleotide
aggaugauguagcucuucc

SEQ ID NO: 3170999 - RNA, 19 nt, Artificial Sequence
  Description of Artificial Sequence: Synthetic oligonucleotide
aagugucaucagcaggugc

SEQ ID NO: 3171000 - RNA, 19 nt, Artificial Sequence
  Description of Artificial Sequence: Synthetic oligonucleotide
ugauguagcucuuccagcc

SEQ ID NO: 3171001 - RNA, 19 nt, Artificial Sequence
  Description of Artificial Sequence: Synthetic oligonucleotide
aacacuucacagucuaugu

SEQ ID NO: 3171002 - RNA, 19 nt, Artificial Sequence
  Description of Artificial Sequence: Synthetic oligonucleotide
ucuugaguggguaccaccc

SEQ ID NO: 3171003 - RNA, 19 nt, Artificial Sequence
  Description of Artificial Sequence: Synthetic oligonucleotide
augauguagcucuuccagc

SEQ ID NO: 3171004 - RNA, 19 nt, Artificial Sequence
  Description of Artificial Sequence: Synthetic oligonucleotide
ucuauguucucugucaugu

SEQ ID NO: 3171005 - RNA, 19 nt, Artificial Sequence
  Description of Artificial Sequence: Synthetic oligonucleotide
ucaccagcaccacaaagag

SEQ ID NO: 3171006 - RNA, 19 nt, Artificial Sequence
  Description of Artificial Sequence: Synthetic oligonucleotide
augccaaucuccuccagac

SEQ ID NO: 3171007 - RNA, 19 nt, Artificial Sequence
  Description of Artificial Sequence: Synthetic oligonucleotide
aaacacuucacagucuaug

SEQ ID NO: 3171008 - RNA, 19 nt, Artificial Sequence
  Description of Artificial Sequence: Synthetic oligonucleotide
ugcucuuucucacugggcu

SEQ ID NO: 3171009 - RNA, 19 nt, Artificial Sequence
  Description of Artificial Sequence: Synthetic oligonucleotide
gacaccaaugaucaccagc

SEQ ID NO: 3171010 - RNA, 19 nt, Artificial Sequence
  Description of Artificial Sequence: Synthetic oligonucleotide
uguggaguaggccaagcac

SEQ ID NO: 3171011 - RNA, 19 nt, Artificial Sequence
  Description of Artificial Sequence: Synthetic oligonucleotide
acaaugaugaugaagcaga

SEQ ID NO: 3171012 - RNA, 19 nt, Artificial Sequence
  Description of Artificial Sequence: Synthetic oligonucleotide
gaguaggccaagcacaaug

SEQ ID NO: 3171013 - RNA, 19 nt, Artificial Sequence
  Description of Artificial Sequence: Synthetic oligonucleotide
augaugaagcagaugacac

SEQ ID NO: 3171014 - RNA, 19 nt, Artificial Sequence
  Description of Artificial Sequence: Synthetic oligonucleotide
ucucccacaagugucauca

SEQ ID NO: 3171015 - RNA, 19 nt, Artificial Sequence
  Description of Artificial Sequence: Synthetic oligonucleotide
agggcuaggagcuguaguc

SEQ ID NO: 3171016 - RNA, 19 nt, Artificial Sequence
  Description of Artificial Sequence: Synthetic oligonucleotide
aucuugaguggguaccacc

SEQ ID NO: 3171017 - RNA, 19 nt, Artificial Sequence
  Description of Artificial Sequence: Synthetic oligonucleotide
uauguucucugucauguuc

SEQ ID NO: 3171018 - RNA, 19 nt, Artificial Sequence
  Description of Artificial Sequence: Synthetic oligonucleotide
  modified_base (16)..(16): a, c, u, g, unknown or other
ugggcuugcucaaagngau

SEQ ID NO: 3171019 - RNA, 19 nt, Artificial Sequence
  Description of Artificial Sequence: Synthetic oligonucleotide
cuggaugccaaucuccucc

SEQ ID NO: 3171020 - RNA, 19 nt, Artificial Sequence
  Description of Artificial Sequence: Synthetic oligonucleotide
gaugaagcagaugacacca

SEQ ID NO: 3171021 - RNA, 19 nt, Artificial Sequence
  Description of Artificial Sequence: Synthetic oligonucleotide
  modified_base (11)..(11): a, c, u, g, unknown or other
uugcucaaagngaugugcc

SEQ ID NO: 3171022 - RNA, 19 nt, Artificial Sequence
  Description of Artificial Sequence: Synthetic oligonucleotide
cuuccagccagguugcucc

SEQ ID NO: 3171023 - RNA, 19 nt, Artificial Sequence
  Description of Artificial Sequence: Synthetic oligonucleotide
  modified_base (18)..(18): a, c, u, g, unknown or other
acugggcuugcucaaagng

SEQ ID NO: 3171024 - RNA, 19 nt, Artificial Sequence
  Description of Artificial Sequence: Synthetic oligonucleotide
auguucaggaugauguagc

SEQ ID NO: 3171025 - RNA, 19 nt, Artificial Sequence
  Description of Artificial Sequence: Synthetic oligonucleotide
ugaugaagcagaugacacc

SEQ ID NO: 3171026 - RNA, 19 nt, Artificial Sequence
  Description of Artificial Sequence: Synthetic oligonucleotide
uaggccaagcacaaugaug

SEQ ID NO: 3171027 - RNA, 19 nt, Artificial Sequence
  Description of Artificial Sequence: Synthetic oligonucleotide
aagcacaaugaugaugaag

SEQ ID NO: 3171028 - RNA, 19 nt, Artificial Sequence
  Description of Artificial Sequence: Synthetic oligonucleotide
cagaugacaccaaugauca

SEQ ID NO: 3171029 - RNA, 19 nt, Artificial Sequence
  Description of Artificial Sequence: Synthetic oligonucleotide
aucuccuccagacuccuuc

SEQ ID NO: 3171030 - RNA, 19 nt, Artificial Sequence
  Description of Artificial Sequence: Synthetic oligonucleotide
aguucuggaugccaaucuc

SEQ ID NO: 3171031 - RNA, 19 nt, Artificial Sequence
  Description of Artificial Sequence: Synthetic oligonucleotide
acagucuauguucucuguc

SEQ ID NO: 3171032 - RNA, 19 nt, Artificial Sequence
  Description of Artificial Sequence: Synthetic oligonucleotide
  modified_base (12)..(12): a, c, u, g, unknown or other
cuugcucaaagngaugugc

SEQ ID NO: 3171033 - RNA, 19 nt, Artificial Sequence
  Description of Artificial Sequence: Synthetic oligonucleotide
uccaccagggcuaggagcu

SEQ ID NO: 3171034 - RNA, 19 nt, Artificial Sequence
  Description of Artificial Sequence: Synthetic oligonucleotide
ucggaugccacugagcaug

SEQ ID NO: 3171035 - RNA, 19 nt, Artificial Sequence
  Description of Artificial Sequence: Synthetic oligonucleotide
gaugaugaagcagaugaca

SEQ ID NO: 3171036 - RNA, 19 nt, Artificial Sequence
  Description of Artificial Sequence: Synthetic oligonucleotide
aaugaucaccagcaccaca

SEQ ID NO: 3171037 - RNA, 19 nt, Artificial Sequence
  Description of Artificial Sequence: Synthetic oligonucleotide
cauggaaaggcaucuugag

SEQ ID NO: 3171038 - RNA, 19 nt, Artificial Sequence
  Description of Artificial Sequence: Synthetic oligonucleotide
cacuucacagucuauguuc

SEQ ID NO: 3171039 - RNA, 19 nt, Artificial Sequence
  Description of Artificial Sequence: Synthetic oligonucleotide
gucacugcgcaccugagug

SEQ ID NO: 3171040 - RNA, 19 nt, Artificial Sequence
  Description of Artificial Sequence: Synthetic oligonucleotide
  modified_base (10)..(10): a, c, u, g, unknown or other
ugcucaaagngaugugcca

SEQ ID NO: 3171041 - RNA, 19 nt, Artificial Sequence
  Description of Artificial Sequence: Synthetic oligonucleotide
aaugaugaugaagcagaug

SEQ ID NO: 3171042 - RNA, 19 nt, Artificial Sequence
  Description of Artificial Sequence: Synthetic oligonucleotide
uucucacugggcuugcuca

SEQ ID NO: 3171043 - RNA, 19 nt, Artificial Sequence
  Description of Artificial Sequence: Synthetic oligonucleotide
gaucaccagcaccacaaag

SEQ ID NO: 3171044 - RNA, 19 nt, Artificial Sequence
  Description of Artificial Sequence: Synthetic oligonucleotide
agcauggaaaggcaucuug

SEQ ID NO: 3171045 - RNA, 19 nt, Artificial Sequence
  Description of Artificial Sequence: Synthetic oligonucleotide
  modified_base (4)..(4): a, c, u, g, unknown or other
aagngaugugccagucccc

SEQ ID NO: 3171046 - RNA, 19 nt, Artificial Sequence
  Description of Artificial Sequence: Synthetic oligonucleotide
cacaagugucaucagcagg

SEQ ID NO: 3171047 - RNA, 19 nt, Artificial Sequence
  Description of Artificial Sequence: Synthetic oligonucleotide
uccagacuccuucggaugc

SEQ ID NO: 3171048 - RNA, 19 nt, Artificial Sequence
  Description of Artificial Sequence: Synthetic oligonucleotide
ugugccaguccccacggug

SEQ ID NO: 3171049 - RNA, 19 nt, Artificial Sequence
  Description of Artificial Sequence: Synthetic oligonucleotide
aggccaagcacaaugauga

SEQ ID NO: 3171050 - RNA, 19 nt, Artificial Sequence
  Description of Artificial Sequence: Synthetic oligonucleotide
acaagugucaucagcaggu

SEQ ID NO: 3171051 - RNA, 19 nt, Artificial Sequence
  Description of Artificial Sequence: Synthetic oligonucleotide
uucuggaugccaaucuccu

SEQ ID NO: 3171052 - RNA, 19 nt, Artificial Sequence
  Description of Artificial Sequence: Synthetic oligonucleotide
uaguucuggaugccaaucu

SEQ ID NO: 3171053 - RNA, 19 nt, Artificial Sequence
  Description of Artificial Sequence: Synthetic oligonucleotide
agcaccacaaagagcgucc

SEQ ID NO: 3171054 - RNA, 19 nt, Artificial Sequence
  Description of Artificial Sequence: Synthetic oligonucleotide
uguagcucuuccagccagg

SEQ ID NO: 3171055 - RNA, 19 nt, Artificial Sequence
  Description of Artificial Sequence: Synthetic oligonucleotide
acaccaaugaucaccagca

SEQ ID NO: 3171056 - RNA, 19 nt, Artificial Sequence
  Description of Artificial Sequence: Synthetic oligonucleotide
gaugugccaguccccacgg

SEQ ID NO: 3171057 - RNA, 19 nt, Artificial Sequence
  Description of Artificial Sequence: Synthetic oligonucleotide
ugaugaugaagcagaugac

SEQ ID NO: 3171058 - RNA, 19 nt, Artificial Sequence
  Description of Artificial Sequence: Synthetic oligonucleotide
cacaaugaugaugaagcag

SEQ ID NO: 3171059 - RNA, 19 nt, Artificial Sequence
  Description of Artificial Sequence: Synthetic oligonucleotide
guggaguaguucuggaugc

SEQ ID NO: 3171060 - RNA, 19 nt, Artificial Sequence
  Description of Artificial Sequence: Synthetic oligonucleotide
ugccacugagcauggaaag

SEQ ID NO: 3171061 - RNA, 19 nt, Artificial Sequence
  Description of Artificial Sequence: Synthetic oligonucleotide
aguaccuccuccaccaggg

SEQ ID NO: 3171062 - RNA, 19 nt, Artificial Sequence
  Description of Artificial Sequence: Synthetic oligonucleotide
ucacagucuauguucucug

SEQ ID NO: 3171063 - RNA, 19 nt, Artificial Sequence
  Description of Artificial Sequence: Synthetic oligonucleotide
acaaagagcgucccguagu

SEQ ID NO: 3171064 - RNA, 19 nt, Artificial Sequence
  Description of Artificial Sequence: Synthetic oligonucleotide
gguggaguaguucuggaug

SEQ ID NO: 3171065 - RNA, 19 nt, Artificial Sequence
  Description of Artificial Sequence: Synthetic oligonucleotide
gaagcagaugacaccaaug

SEQ ID NO: 3171066 - RNA, 19 nt, Artificial Sequence
  Description of Artificial Sequence: Synthetic oligonucleotide
uucacagucuauguucucu

SEQ ID NO: 3171067 - RNA, 19 nt, Artificial Sequence
  Description of Artificial Sequence: Synthetic oligonucleotide
ucccacaagugucaucagc

SEQ ID NO: 3171068 - RNA, 19 nt, Artificial Sequence
  Description of Artificial Sequence: Synthetic oligonucleotide
cauguucaggaugauguag

SEQ ID NO: 3171069 - RNA, 19 nt, Artificial Sequence
  Description of Artificial Sequence: Synthetic oligonucleotide
ugagcauggaaaggcaucu

SEQ ID NO: 3171070 - RNA, 19 nt, Artificial Sequence
  Description of Artificial Sequence: Synthetic oligonucleotide
auggaaaggcaucuugagu

SEQ ID NO: 3171071 - RNA, 19 nt, Artificial Sequence
  Description of Artificial Sequence: Synthetic oligonucleotide
ucuccuccagacuccuucg

SEQ ID NO: 3171072 - RNA, 19 nt, Artificial Sequence
  Description of Artificial Sequence: Synthetic oligonucleotide
ugaagcagaugacaccaau

SEQ ID NO: 3171073 - RNA, 19 nt, Artificial Sequence
  Description of Artificial Sequence: Synthetic oligonucleotide
cuucggaugccacugagca

SEQ ID NO: 3171074 - RNA, 19 nt, Artificial Sequence
  Description of Artificial Sequence: Synthetic oligonucleotide
uguucaggaugauguagcu

SEQ ID NO: 3171075 - RNA, 19 nt, Artificial Sequence
  Description of Artificial Sequence: Synthetic oligonucleotide
auguagcucuuccagccag

SEQ ID NO: 3171076 - RNA, 19 nt, Artificial Sequence
  Description of Artificial Sequence: Synthetic oligonucleotide
gaaaggcaucuugaguggg

SEQ ID NO: 3171077 - RNA, 19 nt, Artificial Sequence
  Description of Artificial Sequence: Synthetic oligonucleotide
gagcuguaguccccgaugc

SEQ ID NO: 3171078 - RNA, 19 nt, Artificial Sequence
  Description of Artificial Sequence: Synthetic oligonucleotide
uuguggaguaggccaagca

SEQ ID NO: 3171079 - RNA, 19 nt, Artificial Sequence
  Description of Artificial Sequence: Synthetic oligonucleotide
ucacugggcuugcucaaag

SEQ ID NO: 3171080 - RNA, 19 nt, Artificial Sequence
  Description of Artificial Sequence: Synthetic oligonucleotide
uguucucugucauguucag

SEQ ID NO: 3171081 - RNA, 19 nt, Artificial Sequence
  Description of Artificial Sequence: Synthetic oligonucleotide
  modified_base (6)..(6): a, c, u, g, unknown or other
caaagngaugugccagucc

SEQ ID NO: 3171082 - RNA, 19 nt, Artificial Sequence
  Description of Artificial Sequence: Synthetic oligonucleotide
agugucaucagcaggugcu

SEQ ID NO: 3171083 - RNA, 19 nt, Artificial Sequence
  Description of Artificial Sequence: Synthetic oligonucleotide
aggugcugcucuuucucac

SEQ ID NO: 3171084 - RNA, 19 nt, Artificial Sequence
  Description of Artificial Sequence: Synthetic oligonucleotide
uauacagaaaauaugacag

SEQ ID NO: 3171085 - RNA, 19 nt, Artificial Sequence
  Description of Artificial Sequence: Synthetic oligonucleotide
auauauaacauuuguauac

SEQ ID NO: 3171086 - RNA, 19 nt, Artificial Sequence
  Description of Artificial Sequence: Synthetic oligonucleotide
uauacuuaggccuucauag

SEQ ID NO: 3171087 - RNA, 19 nt, Artificial Sequence
  Description of Artificial Sequence: Synthetic oligonucleotide
guaaucuucaaauucaccg

SEQ ID NO: 3171088 - RNA, 19 nt, Artificial Sequence
  Description of Artificial Sequence: Synthetic oligonucleotide
acacuuguaaguuaaagac

SEQ ID NO: 3171089 - RNA, 19 nt, Artificial Sequence
  Description of Artificial Sequence: Synthetic oligonucleotide
uuauauauaacauuuguau

SEQ ID NO: 3171090 - RNA, 19 nt, Artificial Sequence
  Description of Artificial Sequence: Synthetic oligonucleotide
aaagauagauuugauuucc

SEQ ID NO: 3171091 - RNA, 19 nt, Artificial Sequence
  Description of Artificial Sequence: Synthetic oligonucleotide
uguuuauuauaacaaacag

SEQ ID NO: 3171092 - RNA, 19 nt, Artificial Sequence
  Description of Artificial Sequence: Synthetic oligonucleotide
aacacugagggguaaacac

SEQ ID NO: 3171093 - RNA, 19 nt, Artificial Sequence
  Description of Artificial Sequence: Synthetic oligonucleotide
aacauuuguauacagaaaa

SEQ ID NO: 3171094 - RNA, 19 nt, Artificial Sequence
  Description of Artificial Sequence: Synthetic oligonucleotide
uuuguauacagaaaauaug

SEQ ID NO: 3171095 - RNA, 19 nt, Artificial Sequence
  Description of Artificial Sequence: Synthetic oligonucleotide
uauaacagacacaaugucc

SEQ ID NO: 3171096 - RNA, 19 nt, Artificial Sequence
  Description of Artificial Sequence: Synthetic oligonucleotide
aaaacaccuauaaucauac

SEQ ID NO: 3171097 - RNA, 19 nt, Artificial Sequence
  Description of Artificial Sequence: Synthetic oligonucleotide
aauacuuggaacugaugag

SEQ ID NO: 3171098 - RNA, 19 nt, Artificial Sequence
  Description of Artificial Sequence: Synthetic oligonucleotide
uaagaugcugacaaaaucu

SEQ ID NO: 3171099 - RNA, 19 nt, Artificial Sequence
  Description of Artificial Sequence: Synthetic oligonucleotide
ucaaaaggcaguuuucagg

SEQ ID NO: 3171100 - RNA, 19 nt, Artificial Sequence
  Description of Artificial Sequence: Synthetic oligonucleotide
uauguaauuuugaagacaa

SEQ ID NO: 3171101 - RNA, 19 nt, Artificial Sequence
  Description of Artificial Sequence: Synthetic oligonucleotide
aaaauauauaugacaaguc

SEQ ID NO: 3171102 - RNA, 19 nt, Artificial Sequence
  Description of Artificial Sequence: Synthetic oligonucleotide
uauuuucuacauuuuauug

SEQ ID NO: 3171103 - RNA, 19 nt, Artificial Sequence
  Description of Artificial Sequence: Synthetic oligonucleotide
aaugcgaacaccucucuug

SEQ ID NO: 3171104 - RNA, 19 nt, Artificial Sequence
  Description of Artificial Sequence: Synthetic oligonucleotide
auaugauuuacacuuuguc

SEQ ID NO: 3171105 - RNA, 19 nt, Artificial Sequence
  Description of Artificial Sequence: Synthetic oligonucleotide
aaauaugauuuacacuuug

SEQ ID NO: 3171106 - RNA, 19 nt, Artificial Sequence
  Description of Artificial Sequence: Synthetic oligonucleotide
ucccaauccagucagaaug

SEQ ID NO: 3171107 - RNA, 19 nt, Artificial Sequence
  Description of Artificial Sequence: Synthetic oligonucleotide
uaaugcacagaaaacaccu

SEQ ID NO: 3171108 - RNA, 19 nt, Artificial Sequence
  Description of Artificial Sequence: Synthetic oligonucleotide
uucuauaaaauacuuggaa

SEQ ID NO: 3171109 - RNA, 19 nt, Artificial Sequence
  Description of Artificial Sequence: Synthetic oligonucleotide
uauuacaagucaaucacgu

SEQ ID NO: 3171110 - RNA, 19 nt, Artificial Sequence
  Description of Artificial Sequence: Synthetic oligonucleotide
cuuaaugucucuagaaaag

SEQ ID NO: 3171111 - RNA, 19 nt, Artificial Sequence
  Description of Artificial Sequence: Synthetic oligonucleotide
aguauguaauuuugaagac

SEQ ID NO: 3171112 - RNA, 19 nt, Artificial Sequence
  Description of Artificial Sequence: Synthetic oligonucleotide
aaaguauuuucccaaucca

SEQ ID NO: 3171113 - RNA, 19 nt, Artificial Sequence
  Description of Artificial Sequence: Synthetic oligonucleotide
aaauucaccguaugaaacu

SEQ ID NO: 3171114 - RNA, 19 nt, Artificial Sequence
  Description of Artificial Sequence: Synthetic oligonucleotide
gaauucuccauaaucaacc

SEQ ID NO: 3171115 - RNA, 19 nt, Artificial Sequence
  Description of Artificial Sequence: Synthetic oligonucleotide
uucauuuugugacacaaaa

SEQ ID NO: 3171116 - RNA, 19 nt, Artificial Sequence
  Description of Artificial Sequence: Synthetic oligonucleotide
uuaugucuauaacagacac

SEQ ID NO: 3171117 - RNA, 19 nt, Artificial Sequence
  Description of Artificial Sequence: Synthetic oligonucleotide
uuugaucugaauuggguca

SEQ ID NO: 3171118 - RNA, 19 nt, Artificial Sequence
  Description of Artificial Sequence: Synthetic oligonucleotide
ucucuaacagcccacuucc

SEQ ID NO: 3171119 - RNA, 19 nt, Artificial Sequence
  Description of Artificial Sequence: Synthetic oligonucleotide
ugggucauuaaauugagaa

SEQ ID NO: 3171120 - RNA, 19 nt, Artificial Sequence
  Description of Artificial Sequence: Synthetic oligonucleotide
uguaaguuaaagacuuuca

SEQ ID NO: 3171121 - RNA, 19 nt, Artificial Sequence
  Description of Artificial Sequence: Synthetic oligonucleotide
caguauguaauuuugaaga

SEQ ID NO: 3171122 - RNA, 19 nt, Artificial Sequence
  Description of Artificial Sequence: Synthetic oligonucleotide
guaaguuaaagacuuucag

SEQ ID NO: 3171123 - RNA, 19 nt, Artificial Sequence
  Description of Artificial Sequence: Synthetic oligonucleotide
uauuucuacauuccaauau

SEQ ID NO: 3171124 - RNA, 19 nt, Artificial Sequence
  Description of Artificial Sequence: Synthetic oligonucleotide
ucuuaaugucucuagaaaa

SEQ ID NO: 3171125 - RNA, 19 nt, Artificial Sequence
  Description of Artificial Sequence: Synthetic oligonucleotide
uauaaaauacuuggaacug

SEQ ID NO: 3171126 - RNA, 19 nt, Artificial Sequence
  Description of Artificial Sequence: Synthetic oligonucleotide
auagauuugauuuccuccu

SEQ ID NO: 3171127 - RNA, 19 nt, Artificial Sequence
  Description of Artificial Sequence: Synthetic oligonucleotide
uugccuugcagaauuagcc

SEQ ID NO: 3171128 - RNA, 19 nt, Artificial Sequence
  Description of Artificial Sequence: Synthetic oligonucleotide
aaucacguuuuauauaaaa

SEQ ID NO: 3171129 - RNA, 19 nt, Artificial Sequence
  Description of Artificial Sequence: Synthetic oligonucleotide
cucaaaauccuguucagac

SEQ ID NO: 3171130 - RNA, 19 nt, Artificial Sequence
  Description of Artificial Sequence: Synthetic oligonucleotide
aacagagguacuuaggaua

SEQ ID NO: 3171131 - RNA, 19 nt, Artificial Sequence
  Description of Artificial Sequence: Synthetic oligonucleotide
gaauucuucacuuaguagu

SEQ ID NO: 3171132 - RNA, 19 nt, Artificial Sequence
  Description of Artificial Sequence: Synthetic oligonucleotide
cuuucuuaugucuauaaca

SEQ ID NO: 3171133 - RNA, 19 nt, Artificial Sequence
  Description of Artificial Sequence: Synthetic oligonucleotide
aauucuucacuuaguaguc

SEQ ID NO: 3171134 - RNA, 19 nt, Artificial Sequence
  Description of Artificial Sequence: Synthetic oligonucleotide
ugugccuccugacucaagg

SEQ ID NO: 3171135 - RNA, 19 nt, Artificial Sequence
  Description of Artificial Sequence: Synthetic oligonucleotide
ucugaauugggucauuaaa

SEQ ID NO: 3171136 - RNA, 19 nt, Artificial Sequence
  Description of Artificial Sequence: Synthetic oligonucleotide
aaauggcacguuugaauuc

SEQ ID NO: 3171137 - RNA, 19 nt, Artificial Sequence
  Description of Artificial Sequence: Synthetic oligonucleotide
uuauaacaaacagagguac

SEQ ID NO: 3171138 - RNA, 19 nt, Artificial Sequence
  Description of Artificial Sequence: Synthetic oligonucleotide
ugaauucuucacuuaguag

SEQ ID NO: 3171139 - RNA, 19 nt, Artificial Sequence
  Description of Artificial Sequence: Synthetic oligonucleotide
guauacagaaaauaugaca

SEQ ID NO: 3171140 - RNA, 19 nt, Artificial Sequence
  Description of Artificial Sequence: Synthetic oligonucleotide
gaauugggucauuaaauug

SEQ ID NO: 3171141 - RNA, 19 nt, Artificial Sequence
  Description of Artificial Sequence: Synthetic oligonucleotide
augauuuacacuuugucua

SEQ ID NO: 3171142 - RNA, 19 nt, Artificial Sequence
  Description of Artificial Sequence: Synthetic oligonucleotide
aagucaaucacguuuuaua

SEQ ID NO: 3171143 - RNA, 19 nt, Artificial Sequence
  Description of Artificial Sequence: Synthetic oligonucleotide
acuuucuuaugucuauaac

SEQ ID NO: 3171144 - RNA, 19 nt, Artificial Sequence
  Description of Artificial Sequence: Synthetic oligonucleotide
aaacuguugaguuauccuu

SEQ ID NO: 3171145 - RNA, 19 nt, Artificial Sequence
  Description of Artificial Sequence: Synthetic oligonucleotide
uauaaucauacugauuaug

SEQ ID NO: 3171146 - RNA, 19 nt, Artificial Sequence
  Description of Artificial Sequence: Synthetic oligonucleotide
ucugcuaucucuauacuua

SEQ ID NO: 3171147 - RNA, 19 nt, Artificial Sequence
  Description of Artificial Sequence: Synthetic oligonucleotide
ucauguucgucaaaaggca

SEQ ID NO: 3171148 - RNA, 19 nt, Artificial Sequence
  Description of Artificial Sequence: Synthetic oligonucleotide
uacuuaggauaucacaucu

SEQ ID NO: 3171149 - RNA, 19 nt, Artificial Sequence
  Description of Artificial Sequence: Synthetic oligonucleotide
ugcauuauuuaaaacuaaa

SEQ ID NO: 3171150 - RNA, 19 nt, Artificial Sequence
  Description of Artificial Sequence: Synthetic oligonucleotide
uauucauucauuucuccaa

SEQ ID NO: 3171151 - RNA, 19 nt, Artificial Sequence
  Description of Artificial Sequence: Synthetic oligonucleotide
auuuucccaauccagucag

SEQ ID NO: 3171152 - RNA, 19 nt, Artificial Sequence
  Description of Artificial Sequence: Synthetic oligonucleotide
ugccuuguccaaaugauga

SEQ ID NO: 3171153 - RNA, 19 nt, Artificial Sequence
  Description of Artificial Sequence: Synthetic oligonucleotide
uuuugaucugaauuggguc

SEQ ID NO: 3171154 - RNA, 19 nt, Artificial Sequence
  Description of Artificial Sequence: Synthetic oligonucleotide
auaaugcacagaaaacacc

SEQ ID NO: 3171155 - RNA, 19 nt, Artificial Sequence
  Description of Artificial Sequence: Synthetic oligonucleotide
gaagauauuucuacauucc

SEQ ID NO: 3171156 - RNA, 19 nt, Artificial Sequence
  Description of Artificial Sequence: Synthetic oligonucleotide
gaauuagccaggaagacuc

SEQ ID NO: 3171157 - RNA, 19 nt, Artificial Sequence
  Description of Artificial Sequence: Synthetic oligonucleotide
aaccuuauucuugccaugg

SEQ ID NO: 3171158 - RNA, 19 nt, Artificial Sequence
  Description of Artificial Sequence: Synthetic oligonucleotide
gacacuuguaaguuaaaga

SEQ ID NO: 3171159 - RNA, 19 nt, Artificial Sequence
  Description of Artificial Sequence: Synthetic oligonucleotide
ugaauucuccauaaucaac

SEQ ID NO: 3171160 - RNA, 19 nt, Artificial Sequence
  Description of Artificial Sequence: Synthetic oligonucleotide
ugaugaaaguauuuuccca

SEQ ID NO: 3171161 - RNA, 19 nt, Artificial Sequence
  Description of Artificial Sequence: Synthetic oligonucleotide
augcccugaaaucacacuc

SEQ ID NO: 3171162 - RNA, 19 nt, Artificial Sequence
  Description of Artificial Sequence: Synthetic oligonucleotide
gaacugaugagacugugca

SEQ ID NO: 3171163 - RNA, 19 nt, Artificial Sequence
  Description of Artificial Sequence: Synthetic oligonucleotide
aaguauuuucccaauccag

SEQ ID NO: 3171164 - RNA, 19 nt, Artificial Sequence
  Description of Artificial Sequence: Synthetic oligonucleotide
augucucuagaaaagauag

SEQ ID NO: 3171165 - RNA, 19 nt, Artificial Sequence
  Description of Artificial Sequence: Synthetic oligonucleotide
aauucuccauaaucaaccu

SEQ ID NO: 3171166 - RNA, 19 nt, Artificial Sequence
  Description of Artificial Sequence: Synthetic oligonucleotide
uugagaaucuauuucuaaa

SEQ ID NO: 3171167 - RNA, 19 nt, Artificial Sequence
  Description of Artificial Sequence: Synthetic oligonucleotide
auaacagacacaaugucca

SEQ ID NO: 3171168 - RNA, 19 nt, Artificial Sequence
  Description of Artificial Sequence: Synthetic oligonucleotide
uguugaguuauccuugaau

SEQ ID NO: 3171169 - RNA, 19 nt, Artificial Sequence
  Description of Artificial Sequence: Synthetic oligonucleotide
auauucauucauuucucca

SEQ ID NO: 3171170 - RNA, 19 nt, Artificial Sequence
  Description of Artificial Sequence: Synthetic oligonucleotide
auaaucauacugauuauga

SEQ ID NO: 3171171 - RNA, 19 nt, Artificial Sequence
  Description of Artificial Sequence: Synthetic oligonucleotide
uucaccguaugaaacuuca

SEQ ID NO: 3171172 - RNA, 19 nt, Artificial Sequence
  Description of Artificial Sequence: Synthetic oligonucleotide
cauuuugugacacaaaaua

SEQ ID NO: 3171173 - RNA, 19 nt, Artificial Sequence
  Description of Artificial Sequence: Synthetic oligonucleotide
ucuaacagcccacuuccug

SEQ ID NO: 3171174 - RNA, 19 nt, Artificial Sequence
  Description of Artificial Sequence: Synthetic oligonucleotide
cauacugauuaugacauug

SEQ ID NO: 3171175 - RNA, 19 nt, Artificial Sequence
  Description of Artificial Sequence: Synthetic oligonucleotide
ucuucaaauucaccguaug

SEQ ID NO: 3171176 - RNA, 19 nt, Artificial Sequence
  Description of Artificial Sequence: Synthetic oligonucleotide
uaaucauacugauuaugac

SEQ ID NO: 3171177 - RNA, 19 nt, Artificial Sequence
  Description of Artificial Sequence: Synthetic oligonucleotide
uuucaugaaggccuuucga

SEQ ID NO: 3171178 - RNA, 19 nt, Artificial Sequence
  Description of Artificial Sequence: Synthetic oligonucleotide
uuucuaaauaggucuuccc

SEQ ID NO: 3171179 - RNA, 19 nt, Artificial Sequence
  Description of Artificial Sequence: Synthetic oligonucleotide
augcgaacaccucucuugc

SEQ ID NO: 3171180 - RNA, 19 nt, Artificial Sequence
  Description of Artificial Sequence: Synthetic oligonucleotide
uuaaugucucuagaaaaga

SEQ ID NO: 3171181 - RNA, 19 nt, Artificial Sequence
  Description of Artificial Sequence: Synthetic oligonucleotide
agaaaagauagauuugauu

SEQ ID NO: 3171182 - RNA, 19 nt, Artificial Sequence
  Description of Artificial Sequence: Synthetic oligonucleotide
auuccaauauuuucuacau

SEQ ID NO: 3171183 - RNA, 19 nt, Artificial Sequence
  Description of Artificial Sequence: Synthetic oligonucleotide
uaugaaacuucaucagacu

SEQ ID NO: 3171184 - RNA, 19 nt, Artificial Sequence
  Description of Artificial Sequence: Synthetic oligonucleotide
ucaaaguuuagaauuaugg

SEQ ID NO: 3171185 - RNA, 19 nt, Artificial Sequence
  Description of Artificial Sequence: Synthetic oligonucleotide
caaauguugaauaugaggc

SEQ ID NO: 3171186 - RNA, 19 nt, Artificial Sequence
  Description of Artificial Sequence: Synthetic oligonucleotide
aaaguuuagaauuauggga

SEQ ID NO: 3171187 - RNA, 19 nt, Artificial Sequence
  Description of Artificial Sequence: Synthetic oligonucleotide
aaaucgaagauuuccacuc

SEQ ID NO: 3171188 - RNA, 19 nt, Artificial Sequence
  Description of Artificial Sequence: Synthetic oligonucleotide
uugucuaucaugaagaacu

SEQ ID NO: 3171189 - RNA, 19 nt, Artificial Sequence
  Description of Artificial Sequence: Synthetic oligonucleotide
gaucauuuaaauuaauuug

SEQ ID NO: 3171190 - RNA, 19 nt, Artificial Sequence
  Description of Artificial Sequence: Synthetic oligonucleotide
ucaaauguugaauaugagg

SEQ ID NO: 3171191 - RNA, 19 nt, Artificial Sequence
  Description of Artificial Sequence: Synthetic oligonucleotide
ucuuuaagaaauaaguucu

SEQ ID NO: 3171192 - RNA, 19 nt, Artificial Sequence
  Description of Artificial Sequence: Synthetic oligonucleotide
aauuaauuugucuaucaug

SEQ ID NO: 3171193 - RNA, 19 nt, Artificial Sequence
  Description of Artificial Sequence: Synthetic oligonucleotide
aaauguaacauccccauca

SEQ ID NO: 3171194 - RNA, 19 nt, Artificial Sequence
  Description of Artificial Sequence: Synthetic oligonucleotide
aauuaugggaucaugcccc

SEQ ID NO: 3171195 - RNA, 19 nt, Artificial Sequence
  Description of Artificial Sequence: Synthetic oligonucleotide
uucaauuguaaacaccucg

SEQ ID NO: 3171196 - RNA, 19 nt, Artificial Sequence
  Description of Artificial Sequence: Synthetic oligonucleotide
aaaagcugaauccaaaaca

SEQ ID NO: 3171197 - RNA, 19 nt, Artificial Sequence
  Description of Artificial Sequence: Synthetic oligonucleotide
aauuguaaacaccucgggg

SEQ ID NO: 3171198 - RNA, 19 nt, Artificial Sequence
  Description of Artificial Sequence: Synthetic oligonucleotide
caaaacaaauguaacaucc

SEQ ID NO: 3171199 - RNA, 19 nt, Artificial Sequence
  Description of Artificial Sequence: Synthetic oligonucleotide
uguaacauccccaucauca

SEQ ID NO: 3171200 - RNA, 19 nt, Artificial Sequence
  Description of Artificial Sequence: Synthetic oligonucleotide
uuaaucaaaguuuagaauu

SEQ ID NO: 3171201 - RNA, 19 nt, Artificial Sequence
  Description of Artificial Sequence: Synthetic oligonucleotide
agaauuaugggaucaugcc

SEQ ID NO: 3171202 - RNA, 19 nt, Artificial Sequence
  Description of Artificial Sequence: Synthetic oligonucleotide
uugucuuuaagaaauaagu

SEQ ID NO: 3171203 - RNA, 19 nt, Artificial Sequence
  Description of Artificial Sequence: Synthetic oligonucleotide
aucaucacagaacagugcc

SEQ ID NO: 3171204 - RNA, 19 nt, Artificial Sequence
  Description of Artificial Sequence: Synthetic oligonucleotide
ucuucaauuguaaacaccu

SEQ ID NO: 3171205 - RNA, 19 nt, Artificial Sequence
  Description of Artificial Sequence: Synthetic oligonucleotide
uuucaaauguugaauauga

SEQ ID NO: 3171206 - RNA, 19 nt, Artificial Sequence
  Description of Artificial Sequence: Synthetic oligonucleotide
ucaauuguaaacaccucgg

SEQ ID NO: 3171207 - RNA, 19 nt, Artificial Sequence
  Description of Artificial Sequence: Synthetic oligonucleotide
uaauuugucuaucaugaag

SEQ ID NO: 3171208 - RNA, 19 nt, Artificial Sequence
  Description of Artificial Sequence: Synthetic oligonucleotide
uuuuaaucaaaguuuagaa

SEQ ID NO: 3171209 - RNA, 19 nt, Artificial Sequence
  Description of Artificial Sequence: Synthetic oligonucleotide
aauaaguucuuacuaugug

SEQ ID NO: 3171210 - RNA, 19 nt, Artificial Sequence
  Description of Artificial Sequence: Synthetic oligonucleotide
aagauuuccacucccaacu

SEQ ID NO: 3171211 - RNA, 19 nt, Artificial Sequence
  Description of Artificial Sequence: Synthetic oligonucleotide
caaaguuuagaauuauggg

SEQ ID NO: 3171212 - RNA, 19 nt, Artificial Sequence
  Description of Artificial Sequence: Synthetic oligonucleotide
uguuucaucagcaaaucga

SEQ ID NO: 3171213 - RNA, 19 nt, Artificial Sequence
  Description of Artificial Sequence: Synthetic oligonucleotide
uuugucuuuaagaaauaag

SEQ ID NO: 3171214 - RNA, 19 nt, Artificial Sequence
  Description of Artificial Sequence: Synthetic oligonucleotide
aaaacaaauguaacauccc

SEQ ID NO: 3171215 - RNA, 19 nt, Artificial Sequence
  Description of Artificial Sequence: Synthetic oligonucleotide
aauaugaggcaucauuucu

SEQ ID NO: 3171216 - RNA, 19 nt, Artificial Sequence
  Description of Artificial Sequence: Synthetic oligonucleotide
uuaagaaauaaguucuuac

SEQ ID NO: 3171217 - RNA, 19 nt, Artificial Sequence
  Description of Artificial Sequence: Synthetic oligonucleotide
aauuugucuaucaugaaga

SEQ ID NO: 3171218 - RNA, 19 nt, Artificial Sequence
  Description of Artificial Sequence: Synthetic oligonucleotide
uaagaaauaaguucuuacu

SEQ ID NO: 3171219 - RNA, 19 nt, Artificial Sequence
  Description of Artificial Sequence: Synthetic oligonucleotide
uagaauuaugggaucaugc

SEQ ID NO: 3171220 - RNA, 19 nt, Artificial Sequence
  Description of Artificial Sequence: Synthetic oligonucleotide
uuuaaauuaauuugucuau

SEQ ID NO: 3171221 - RNA, 19 nt, Artificial Sequence
  Description of Artificial Sequence: Synthetic oligonucleotide
aauacgagaaagucuucag

SEQ ID NO: 3171222 - RNA, 19 nt, Artificial Sequence
  Description of Artificial Sequence: Synthetic oligonucleotide
auuaauuugucuaucauga

SEQ ID NO: 3171223 - RNA, 19 nt, Artificial Sequence
  Description of Artificial Sequence: Synthetic oligonucleotide
auuguaaacaccucggggu

SEQ ID NO: 3171224 - RNA, 19 nt, Artificial Sequence
  Description of Artificial Sequence: Synthetic oligonucleotide
aucaugaagaacugucacc

SEQ ID NO: 3171225 - RNA, 19 nt, Artificial Sequence
  Description of Artificial Sequence: Synthetic oligonucleotide
aaucgaagauuuccacucc

SEQ ID NO: 3171226 - RNA, 19 nt, Artificial Sequence
  Description of Artificial Sequence: Synthetic oligonucleotide
ucuaucaugaagaacuguc

SEQ ID NO: 3171227 - RNA, 19 nt, Artificial Sequence
  Description of Artificial Sequence: Synthetic oligonucleotide
gaaauaaguucuuacuaug

SEQ ID NO: 3171228 - RNA, 19 nt, Artificial Sequence
  Description of Artificial Sequence: Synthetic oligonucleotide
aagaaauaaguucuuacua

SEQ ID NO: 3171229 - RNA, 19 nt, Artificial Sequence
  Description of Artificial Sequence: Synthetic oligonucleotide
uaaauuaauuugucuauca

SEQ ID NO: 3171230 - RNA, 19 nt, Artificial Sequence
  Description of Artificial Sequence: Synthetic oligonucleotide
uucaucagcaaaucgaaga

SEQ ID NO: 3171231 - RNA, 19 nt, Artificial Sequence
  Description of Artificial Sequence: Synthetic oligonucleotide
augaagaacugucaccagc

SEQ ID NO: 3171232 - RNA, 19 nt, Artificial Sequence
  Description of Artificial Sequence: Synthetic oligonucleotide
aauccaaaacaaauguaac

SEQ ID NO: 3171233 - RNA, 19 nt, Artificial Sequence
  Description of Artificial Sequence: Synthetic oligonucleotide
uaaguucuuacuaugugcu

SEQ ID NO: 3171234 - RNA, 19 nt, Artificial Sequence
  Description of Artificial Sequence: Synthetic oligonucleotide
agaucauuuaaauuaauuu

SEQ ID NO: 3171235 - RNA, 19 nt, Artificial Sequence
  Description of Artificial Sequence: Synthetic oligonucleotide
ugaagaacugucaccagcc

SEQ ID NO: 3171236 - RNA, 19 nt, Artificial Sequence
  Description of Artificial Sequence: Synthetic oligonucleotide
aguucuuacuaugugcucc

SEQ ID NO: 3171237 - RNA, 19 nt, Artificial Sequence
  Description of Artificial Sequence: Synthetic oligonucleotide
gaauuaugggaucaugccc

SEQ ID NO: 3171238 - RNA, 19 nt, Artificial Sequence
  Description of Artificial Sequence: Synthetic oligonucleotide
acucccaacuccuaacugc

SEQ ID NO: 3171239 - RNA, 19 nt, Artificial Sequence
  Description of Artificial Sequence: Synthetic oligonucleotide
aaauguugaauaugaggca

SEQ ID NO: 3171240 - RNA, 19 nt, Artificial Sequence
  Description of Artificial Sequence: Synthetic oligonucleotide
cauuucuucaauuguaaac

SEQ ID NO: 3171241 - RNA, 19 nt, Artificial Sequence
  Description of Artificial Sequence: Synthetic oligonucleotide
auuucuucaauuguaaaca

SEQ ID NO: 3171242 - RNA, 19 nt, Artificial Sequence
  Description of Artificial Sequence: Synthetic oligonucleotide
uacgagaaagucuucagga

SEQ ID NO: 3171243 - RNA, 19 nt, Artificial Sequence
  Description of Artificial Sequence: Synthetic oligonucleotide
aaauuaauuugucuaucau

SEQ ID NO: 3171244 - RNA, 19 nt, Artificial Sequence
  Description of Artificial Sequence: Synthetic oligonucleotide
uaacugcuugccaagauca

SEQ ID NO: 3171245 - RNA, 19 nt, Artificial Sequence
  Description of Artificial Sequence: Synthetic oligonucleotide
ucaugaagaacugucacca

SEQ ID NO: 3171246 - RNA, 19 nt, Artificial Sequence
  Description of Artificial Sequence: Synthetic oligonucleotide
agaaauaaguucuuacuau

SEQ ID NO: 3171247 - RNA, 19 nt, Artificial Sequence
  Description of Artificial Sequence: Synthetic oligonucleotide
ugcagcauuagucauugga

SEQ ID NO: 3171248 - RNA, 19 nt, Artificial Sequence
  Description of Artificial Sequence: Synthetic oligonucleotide
uuccagaaaagcugaaucc

SEQ ID NO: 3171249 - RNA, 19 nt, Artificial Sequence
  Description of Artificial Sequence: Synthetic oligonucleotide
uugaauaugaggcaucauu

SEQ ID NO: 3171250 - RNA, 19 nt, Artificial Sequence
  Description of Artificial Sequence: Synthetic oligonucleotide
auagcgagggcgccgagcc

SEQ ID NO: 3171251 - RNA, 19 nt, Artificial Sequence
  Description of Artificial Sequence: Synthetic oligonucleotide
ugaauaugaggcaucauuu

SEQ ID NO: 3171252 - RNA, 19 nt, Artificial Sequence
  Description of Artificial Sequence: Synthetic oligonucleotide
uucacaaauacgagaaagu

SEQ ID NO: 3171253 - RNA, 19 nt, Artificial Sequence
  Description of Artificial Sequence: Synthetic oligonucleotide
uccaaaacaaauguaacau

SEQ ID NO: 3171254 - RNA, 19 nt, Artificial Sequence
  Description of Artificial Sequence: Synthetic oligonucleotide
ucauuuaaauuaauuuguc

SEQ ID NO: 3171255 - RNA, 19 nt, Artificial Sequence
  Description of Artificial Sequence: Synthetic oligonucleotide
uaucaugaagaacugucac

SEQ ID NO: 3171256 - RNA, 19 nt, Artificial Sequence
  Description of Artificial Sequence: Synthetic oligonucleotide
aucauuuaaauuaauuugu

SEQ ID NO: 3171257 - RNA, 19 nt, Artificial Sequence
  Description of Artificial Sequence: Synthetic oligonucleotide
uuucauguccaccuuccag

SEQ ID NO: 3171258 - RNA, 19 nt, Artificial Sequence
  Description of Artificial Sequence: Synthetic oligonucleotide
gaaaagcugaauccaaaac

SEQ ID NO: 3171259 - RNA, 19 nt, Artificial Sequence
  Description of Artificial Sequence: Synthetic oligonucleotide
aagaacugucaccagccag

SEQ ID NO: 3171260 - RNA, 19 nt, Artificial Sequence
  Description of Artificial Sequence: Synthetic oligonucleotide
auacgagaaagucuucagg

SEQ ID NO: 3171261 - RNA, 19 nt, Artificial Sequence
  Description of Artificial Sequence: Synthetic oligonucleotide
acugucaccagccaguagu

SEQ ID NO: 3171262 - RNA, 19 nt, Artificial Sequence
  Description of Artificial Sequence: Synthetic oligonucleotide
aucgaagauuuccacuccc

SEQ ID NO: 3171263 - RNA, 19 nt, Artificial Sequence
  Description of Artificial Sequence: Synthetic oligonucleotide
ugucuuuaagaaauaaguu

SEQ ID NO: 3171264 - RNA, 19 nt, Artificial Sequence
  Description of Artificial Sequence: Synthetic oligonucleotide
uucauguccaccuuccaga

SEQ ID NO: 3171265 - RNA, 19 nt, Artificial Sequence
  Description of Artificial Sequence: Synthetic oligonucleotide
cuucacaaauacgagaaag

SEQ ID NO: 3171266 - RNA, 19 nt, Artificial Sequence
  Description of Artificial Sequence: Synthetic oligonucleotide
auccaaaacaaauguaaca

SEQ ID NO: 3171267 - RNA, 19 nt, Artificial Sequence
  Description of Artificial Sequence: Synthetic oligonucleotide
uucuucaauuguaaacacc

SEQ ID NO: 3171268 - RNA, 19 nt, Artificial Sequence
  Description of Artificial Sequence: Synthetic oligonucleotide
auuggaugaaaguauacuu

SEQ ID NO: 3171269 - RNA, 19 nt, Artificial Sequence
  Description of Artificial Sequence: Synthetic oligonucleotide
uaaucaaaguuuagaauua

SEQ ID NO: 3171270 - RNA, 19 nt, Artificial Sequence
  Description of Artificial Sequence: Synthetic oligonucleotide
aaauacgagaaagucuuca

SEQ ID NO: 3171271 - RNA, 19 nt, Artificial Sequence
  Description of Artificial Sequence: Synthetic oligonucleotide
uucaaauguugaauaugag

SEQ ID NO: 3171272 - RNA, 19 nt, Artificial Sequence
  Description of Artificial Sequence: Synthetic oligonucleotide
gaauccaaaacaaauguaa

SEQ ID NO: 3171273 - RNA, 19 nt, Artificial Sequence
  Description of Artificial Sequence: Synthetic oligonucleotide
aaagcugaauccaaaacaa

SEQ ID NO: 3171274 - RNA, 19 nt, Artificial Sequence
  Description of Artificial Sequence: Synthetic oligonucleotide
aauguugaauaugaggcau

SEQ ID NO: 3171275 - RNA, 19 nt, Artificial Sequence
  Description of Artificial Sequence: Synthetic oligonucleotide
uuagucauuggaugaaagu

SEQ ID NO: 3171276 - RNA, 19 nt, Artificial Sequence
  Description of Artificial Sequence: Synthetic oligonucleotide
aaauaaguucuuacuaugu

SEQ ID NO: 3171277 - RNA, 19 nt, Artificial Sequence
  Description of Artificial Sequence: Synthetic oligonucleotide
uccccaucaucacagaaca

SEQ ID NO: 3171278 - RNA, 19 nt, Artificial Sequence
  Description of Artificial Sequence: Synthetic oligonucleotide
aguuuagaauuaugggauc

SEQ ID NO: 3171279 - RNA, 19 nt, Artificial Sequence
  Description of Artificial Sequence: Synthetic oligonucleotide
uccaccuuccagaaaagcu

SEQ ID NO: 3171280 - RNA, 19 nt, Artificial Sequence
  Description of Artificial Sequence: Synthetic oligonucleotide
agagguguggcacagccug

SEQ ID NO: 3171281 - RNA, 19 nt, Artificial Sequence
  Description of Artificial Sequence: Synthetic oligonucleotide
aacauccccaucaucacag

SEQ ID NO: 3171282 - RNA, 19 nt, Artificial Sequence
  Description of Artificial Sequence: Synthetic oligonucleotide
guagccuucacaaauacga

SEQ ID NO: 3171283 - RNA, 19 nt, Artificial Sequence
  Description of Artificial Sequence: Synthetic oligonucleotide
aaguucuuacuaugugcuc

SEQ ID NO: 3171284 - RNA, 19 nt, Artificial Sequence
  Description of Artificial Sequence: Synthetic oligonucleotide
aaaggugugggccaccacc

SEQ ID NO: 3171285 - RNA, 19 nt, Artificial Sequence
  Description of Artificial Sequence: Synthetic oligonucleotide
uggucuugaacucacagag

SEQ ID NO: 3171286 - RNA, 19 nt, Artificial Sequence
  Description of Artificial Sequence: Synthetic oligonucleotide
cuugaacucacagagaucc

SEQ ID NO: 3171287 - RNA, 19 nt, Artificial Sequence
  Description of Artificial Sequence: Synthetic oligonucleotide
ucucuguguauuuuggagg

SEQ ID NO: 3171288 - RNA, 19 nt, Artificial Sequence
  Description of Artificial Sequence: Synthetic oligonucleotide
uucucuguguauuuuggag

SEQ ID NO: 3171289 - RNA, 19 nt, Artificial Sequence
  Description of Artificial Sequence: Synthetic oligonucleotide
uuguagaccaggcuggucu

SEQ ID NO: 3171290 - RNA, 19 nt, Artificial Sequence
  Description of Artificial Sequence: Synthetic oligonucleotide
aacuagcucuuguagacca

SEQ ID NO: 3171291 - RNA, 19 nt, Artificial Sequence
  Description of Artificial Sequence: Synthetic oligonucleotide
uuugagacaggguuucucu

SEQ ID NO: 3171292 - RNA, 19 nt, Artificial Sequence
  Description of Artificial Sequence: Synthetic oligonucleotide
acagagauccgccugccuc

SEQ ID NO: 3171293 - RNA, 19 nt, Artificial Sequence
  Description of Artificial Sequence: Synthetic oligonucleotide
cucuguguauuuuggaggc

SEQ ID NO: 3171294 - RNA, 19 nt, Artificial Sequence
  Description of Artificial Sequence: Synthetic oligonucleotide
uguauuuuggaggcugucc

SEQ ID NO: 3171295 - RNA, 19 nt, Artificial Sequence
  Description of Artificial Sequence: Synthetic oligonucleotide
cucuuguagaccaggcugg

SEQ ID NO: 3171296 - RNA, 19 nt, Artificial Sequence
  Description of Artificial Sequence: Synthetic oligonucleotide
uggaacuagcucuuguaga

SEQ ID NO: 3171297 - RNA, 19 nt, Artificial Sequence
  Description of Artificial Sequence: Synthetic oligonucleotide
agugcugggauuaaaggug

SEQ ID NO: 3171298 - RNA, 19 nt, Artificial Sequence
  Description of Artificial Sequence: Synthetic oligonucleotide
auuuuggaggcuguccugg

SEQ ID NO: 3171299 - RNA, 19 nt, Artificial Sequence
  Description of Artificial Sequence: Synthetic oligonucleotide
ugaacucacagagauccgc

SEQ ID NO: 3171300 - RNA, 19 nt, Artificial Sequence
  Description of Artificial Sequence: Synthetic oligonucleotide
agauccgccugccucugcc

SEQ ID NO: 3171301 - RNA, 19 nt, Artificial Sequence
  Description of Artificial Sequence: Synthetic oligonucleotide
cugggauuaaagguguggg

SEQ ID NO: 3171302 - RNA, 19 nt, Artificial Sequence
  Description of Artificial Sequence: Synthetic oligonucleotide
ugggauuaaaggugugggc

SEQ ID NO: 3171303 - RNA, 19 nt, Artificial Sequence
  Description of Artificial Sequence: Synthetic oligonucleotide
guuucucuguguauuuugg

SEQ ID NO: 3171304 - RNA, 19 nt, Artificial Sequence
  Description of Artificial Sequence: Synthetic oligonucleotide
cuggaacuagcucuuguag

SEQ ID NO: 3171305 - RNA, 19 nt, Artificial Sequence
  Description of Artificial Sequence: Synthetic oligonucleotide
accaggcuggucuugaacu

SEQ ID NO: 3171306 - RNA, 19 nt, Artificial Sequence
  Description of Artificial Sequence: Synthetic oligonucleotide
ugagacaggguuucucugu

SEQ ID NO: 3171307 - RNA, 19 nt, Artificial Sequence
  Description of Artificial Sequence: Synthetic oligonucleotide
uuucucuguguauuuugga

SEQ ID NO: 3171308 - RNA, 19 nt, Artificial Sequence
  Description of Artificial Sequence: Synthetic oligonucleotide
uugaacucacagagauccg

SEQ ID NO: 3171309 - RNA, 19 nt, Artificial Sequence
  Description of Artificial Sequence: Synthetic oligonucleotide
uauuuuggaggcuguccug

SEQ ID NO: 3171310 - RNA, 19 nt, Artificial Sequence
  Description of Artificial Sequence: Synthetic oligonucleotide
ggaacuagcucuuguagac

SEQ ID NO: 3171311 - RNA, 19 nt, Artificial Sequence
  Description of Artificial Sequence: Synthetic oligonucleotide
uuggaggcuguccuggaac

SEQ ID NO: 3171312 - RNA, 19 nt, Artificial Sequence
  Description of Artificial Sequence: Synthetic oligonucleotide
aacucacagagauccgccu

SEQ ID NO: 3171313 - RNA, 19 nt, Artificial Sequence
  Description of Artificial Sequence: Synthetic oligonucleotide
uguguauuuuggaggcugu

SEQ ID NO: 3171314 - RNA, 19 nt, Artificial Sequence
  Description of Artificial Sequence: Synthetic oligonucleotide
ucugccucccgagugcugg

SEQ ID NO: 3171315 - RNA, 19 nt, Artificial Sequence
  Description of Artificial Sequence: Synthetic oligonucleotide
gggauuaaaggugugggcc

SEQ ID NO: 3171316 - RNA, 19 nt, Artificial Sequence
  Description of Artificial Sequence: Synthetic oligonucleotide
uugagacaggguuucucug

SEQ ID NO: 3171317 - RNA, 19 nt, Artificial Sequence
  Description of Artificial Sequence: Synthetic oligonucleotide
ugggccaccaccacccagc

SEQ ID NO: 3171318 - RNA, 19 nt, Artificial Sequence
  Description of Artificial Sequence: Synthetic oligonucleotide
cucacagagauccgccugc

SEQ ID NO: 3171319 - RNA, 19 nt, Artificial Sequence
  Description of Artificial Sequence: Synthetic oligonucleotide
gcucuuguagaccaggcug

SEQ ID NO: 3171320 - RNA, 19 nt, Artificial Sequence
  Description of Artificial Sequence: Synthetic oligonucleotide
gagacaggguuucucugug

SEQ ID NO: 3171321 - RNA, 19 nt, Artificial Sequence
  Description of Artificial Sequence: Synthetic oligonucleotide
gaacucacagagauccgcc

SEQ ID NO: 3171322 - RNA, 19 nt, Artificial Sequence
  Description of Artificial Sequence: Synthetic oligonucleotide
auuaaaggugugggccacc

SEQ ID NO: 3171323 - RNA, 19 nt, Artificial Sequence
  Description of Artificial Sequence: Synthetic oligonucleotide
cuagcucuuguagaccagg

SEQ ID NO: 3171324 - RNA, 19 nt, Artificial Sequence
  Description of Artificial Sequence: Synthetic oligonucleotide
uagcucuuguagaccaggc

SEQ ID NO: 3171325 - RNA, 19 nt, Artificial Sequence
  Description of Artificial Sequence: Synthetic oligonucleotide
acucacagagauccgccug

SEQ ID NO: 3171326 - RNA, 19 nt, Artificial Sequence
  Description of Artificial Sequence: Synthetic oligonucleotide
uuaaaggugugggccacca

SEQ ID NO: 3171327 - RNA, 19 nt, Artificial Sequence
  Description of Artificial Sequence: Synthetic oligonucleotide
ucuugaacucacagagauc

SEQ ID NO: 3171328 - RNA, 19 nt, Artificial Sequence
  Description of Artificial Sequence: Synthetic oligonucleotide
gguuucucuguguauuuug

SEQ ID NO: 3171329 - RNA, 19 nt, Artificial Sequence
  Description of Artificial Sequence: Synthetic oligonucleotide
uuuugagacaggguuucuc

SEQ ID NO: 3171330 - RNA, 19 nt, Artificial Sequence
  Description of Artificial Sequence: Synthetic oligonucleotide
gagugcugggauuaaaggu

SEQ ID NO: 3171331 - RNA, 19 nt, Artificial Sequence
  Description of Artificial Sequence: Synthetic oligonucleotide
cuguguauuuuggaggcug

SEQ ID NO: 3171332 - RNA, 19 nt, Artificial Sequence
  Description of Artificial Sequence: Synthetic oligonucleotide
gucuugaacucacagagau

SEQ ID NO: 3171333 - RNA, 19 nt, Artificial Sequence
  Description of Artificial Sequence: Synthetic oligonucleotide
gaggcuguccuggaacuag

SEQ ID NO: 3171334 - RNA, 19 nt, Artificial Sequence
  Description of Artificial Sequence: Synthetic oligonucleotide
gauuaaaggugugggccac

SEQ ID NO: 3171335 - RNA, 19 nt, Artificial Sequence
  Description of Artificial Sequence: Synthetic oligonucleotide
gaacuagcucuuguagacc

SEQ ID NO: 3171336 - RNA, 19 nt, Artificial Sequence
  Description of Artificial Sequence: Synthetic oligonucleotide
uccuggaacuagcucuugu

SEQ ID NO: 3171337 - RNA, 19 nt, Artificial Sequence
  Description of Artificial Sequence: Synthetic oligonucleotide
guauuuuggaggcuguccu

SEQ ID NO: 3171338 - RNA, 19 nt, Artificial Sequence
  Description of Artificial Sequence: Synthetic oligonucleotide
agcucuuguagaccaggcu

SEQ ID NO: 3171339 - RNA, 19 nt, Artificial Sequence
  Description of Artificial Sequence: Synthetic oligonucleotide
gcuggucuugaacucacag

SEQ ID NO: 3171340 - RNA, 19 nt, Artificial Sequence
  Description of Artificial Sequence: Synthetic oligonucleotide
uggaggcuguccuggaacu

SEQ ID NO: 3171341 - RNA, 19 nt, Artificial Sequence
  Description of Artificial Sequence: Synthetic oligonucleotide
uuuggaggcuguccuggaa

SEQ ID NO: 3171342 - RNA, 19 nt, Artificial Sequence
  Description of Artificial Sequence: Synthetic oligonucleotide
aaggugugggccaccacca

SEQ ID NO: 3171343 - RNA, 19 nt, Artificial Sequence
  Description of Artificial Sequence: Synthetic oligonucleotide
ugccucugccucccgagug

SEQ ID NO: 3171344 - RNA, 19 nt, Artificial Sequence
  Description of Artificial Sequence: Synthetic oligonucleotide
uuuuggaggcuguccugga

SEQ ID NO: 3171345 - RNA, 19 nt, Artificial Sequence
  Description of Artificial Sequence: Synthetic oligonucleotide
cuguccuggaacuagcucu

SEQ ID NO: 3171346 - RNA, 19 nt, Artificial Sequence
  Description of Artificial Sequence: Synthetic oligonucleotide
cuggucuugaacucacaga

SEQ ID NO: 3171347 - RNA, 19 nt, Artificial Sequence
  Description of Artificial Sequence: Synthetic oligonucleotide
uguccuggaacuagcucuu

SEQ ID NO: 3171348 - RNA, 19 nt, Artificial Sequence
  Description of Artificial Sequence: Synthetic oligonucleotide
ggauuaaaggugugggcca

SEQ ID NO: 3171349 - RNA, 19 nt, Artificial Sequence
  Description of Artificial Sequence: Synthetic oligonucleotide
gacaggguuucucugugua

SEQ ID NO: 3171350 - RNA, 19 nt, Artificial Sequence
  Description of Artificial Sequence: Synthetic oligonucleotide
gcugggauuaaaggugugg

SEQ ID NO: 3171351 - RNA, 19 nt, Artificial Sequence
  Description of Artificial Sequence: Synthetic oligonucleotide
gaccaggcuggucuugaac

SEQ ID NO: 3171352 - RNA, 19 nt, Artificial Sequence
  Description of Artificial Sequence: Synthetic oligonucleotide
gugugggccaccaccaccc

SEQ ID NO: 3171353 - RNA, 19 nt, Artificial Sequence
  Description of Artificial Sequence: Synthetic oligonucleotide
uaaaggugugggccaccac

SEQ ID NO: 3171354 - RNA, 19 nt, Artificial Sequence
  Description of Artificial Sequence: Synthetic oligonucleotide
ugcugggauuaaaggugug

SEQ ID NO: 3171355 - RNA, 19 nt, Artificial Sequence
  Description of Artificial Sequence: Synthetic oligonucleotide
acaggguuucucuguguau

SEQ ID NO: 3171356 - RNA, 19 nt, Artificial Sequence
  Description of Artificial Sequence: Synthetic oligonucleotide
auccgccugccucugccuc

SEQ ID NO: 3171357 - RNA, 19 nt, Artificial Sequence
  Description of Artificial Sequence: Synthetic oligonucleotide
uguagaccaggcuggucuu

SEQ ID NO: 3171358 - RNA, 19 nt, Artificial Sequence
  Description of Artificial Sequence: Synthetic oligonucleotide
cgagugcugggauuaaagg

SEQ ID NO: 3171359 - RNA, 19 nt, Artificial Sequence
  Description of Artificial Sequence: Synthetic oligonucleotide
uagaccaggcuggucuuga

SEQ ID NO: 3171360 - RNA, 19 nt, Artificial Sequence
  Description of Artificial Sequence: Synthetic oligonucleotide
aggugugggccaccaccac

SEQ ID NO: 3171361 - RNA, 19 nt, Artificial Sequence
  Description of Artificial Sequence: Synthetic oligonucleotide
ucuuguagaccaggcuggu

SEQ ID NO: 3171362 - RNA, 19 nt, Artificial Sequence
  Description of Artificial Sequence: Synthetic oligonucleotide
ucuguguauuuuggaggcu

SEQ ID NO: 3171363 - RNA, 19 nt, Artificial Sequence
  Description of Artificial Sequence: Synthetic oligonucleotide
ucacagagauccgccugcc

SEQ ID NO: 3171364 - RNA, 19 nt, Artificial Sequence
  Description of Artificial Sequence: Synthetic oligonucleotide
aggcuguccuggaacuagc

SEQ ID NO: 3171365 - RNA, 19 nt, Artificial Sequence
  Description of Artificial Sequence: Synthetic oligonucleotide
agacaggguuucucugugu

SEQ ID NO: 3171366 - RNA, 19 nt, Artificial Sequence
  Description of Artificial Sequence: Synthetic oligonucleotide
aggguuucucuguguauuu

SEQ ID NO: 3171367 - RNA, 19 nt, Artificial Sequence
  Description of Artificial Sequence: Synthetic oligonucleotide
aggcuggucuugaacucac

SEQ ID NO: 3171368 - RNA, 19 nt, Artificial Sequence
  Description of Artificial Sequence: Synthetic oligonucleotide
ccgagugcugggauuaaag

SEQ ID NO: 3171369 - RNA, 19 nt, Artificial Sequence
  Description of Artificial Sequence: Synthetic oligonucleotide
ggugugggccaccaccacc

SEQ ID NO: 3171370 - RNA, 19 nt, Artificial Sequence
  Description of Artificial Sequence: Synthetic oligonucleotide
uccgccugccucugccucc

SEQ ID NO: 3171371 - RNA, 19 nt, Artificial Sequence
  Description of Artificial Sequence: Synthetic oligonucleotide
acuagcucuuguagaccag

SEQ ID NO: 3171372 - RNA, 19 nt, Artificial Sequence
  Description of Artificial Sequence: Synthetic oligonucleotide
ugugggccaccaccaccca

SEQ ID NO: 3171373 - RNA, 19 nt, Artificial Sequence
  Description of Artificial Sequence: Synthetic oligonucleotide
cuuguagaccaggcugguc

SEQ ID NO: 3171374 - RNA, 19 nt, Artificial Sequence
  Description of Artificial Sequence: Synthetic oligonucleotide
guguauuuuggaggcuguc

SEQ ID NO: 3171375 - RNA, 19 nt, Artificial Sequence
  Description of Artificial Sequence: Synthetic oligonucleotide
gugggccaccaccacccag

SEQ ID NO: 3171376 - RNA, 19 nt, Artificial Sequence
  Description of Artificial Sequence: Synthetic oligonucleotide
guagaccaggcuggucuug

SEQ ID NO: 3171377 - RNA, 19 nt, Artificial Sequence
  Description of Artificial Sequence: Synthetic oligonucleotide
agagauccgccugccucug

SEQ ID NO: 3171378 - RNA, 19 nt, Artificial Sequence
  Description of Artificial Sequence: Synthetic oligonucleotide
gagauccgccugccucugc

SEQ ID NO: 3171379 - RNA, 19 nt, Artificial Sequence
  Description of Artificial Sequence: Synthetic oligonucleotide
gcuguccuggaacuagcuc

SEQ ID NO: 3171380 - RNA, 19 nt, Artificial Sequence
  Description of Artificial Sequence: Synthetic oligonucleotide
cugccucccgagugcuggg

SEQ ID NO: 3171381 - RNA, 19 nt, Artificial Sequence
  Description of Artificial Sequence: Synthetic oligonucleotide
cagagauccgccugccucu

SEQ ID NO: 3171382 - RNA, 19 nt, Artificial Sequence
  Description of Artificial Sequence: Synthetic oligonucleotide
ccugccucugccucccgag

SEQ ID NO: 3171383 - RNA, 19 nt, Artificial Sequence
  Description of Artificial Sequence: Synthetic oligonucleotide
agaccaggcuggucuugaa

SEQ ID NO: 3171384 - RNA, 19 nt, Artificial Sequence
  Description of Artificial Sequence: Synthetic oligonucleotide
aauaucucguuuuagauuc

SEQ ID NO: 3171385 - RNA, 19 nt, Artificial Sequence
  Description of Artificial Sequence: Synthetic oligonucleotide
ucuuccaugacacuaaugg

SEQ ID NO: 3171386 - RNA, 19 nt, Artificial Sequence
  Description of Artificial Sequence: Synthetic oligonucleotide
aaucguggcacucauaagg

SEQ ID NO: 3171387 - RNA, 19 nt, Artificial Sequence
  Description of Artificial Sequence: Synthetic oligonucleotide
aaauuuuccuuucagaccu

SEQ ID NO: 3171388 - RNA, 19 nt, Artificial Sequence
  Description of Artificial Sequence: Synthetic oligonucleotide
ugaauuauaaggcuugagc

SEQ ID NO: 3171389 - RNA, 19 nt, Artificial Sequence
  Description of Artificial Sequence: Synthetic oligonucleotide
uugacuuuccgauagcugg

SEQ ID NO: 3171390 - RNA, 19 nt, Artificial Sequence
  Description of Artificial Sequence: Synthetic oligonucleotide
uccaucuccucaaagaagg

SEQ ID NO: 3171391 - RNA, 19 nt, Artificial Sequence
  Description of Artificial Sequence: Synthetic oligonucleotide
auucuuacuaacuuuaccu

SEQ ID NO: 3171392 - RNA, 19 nt, Artificial Sequence
  Description of Artificial Sequence: Synthetic oligonucleotide
aaacuuuugccauaucuga

SEQ ID NO: 3171393 - RNA, 19 nt, Artificial Sequence
  Description of Artificial Sequence: Synthetic oligonucleotide
augaaauuggaacugucuc

SEQ ID NO: 3171394 - RNA, 19 nt, Artificial Sequence
  Description of Artificial Sequence: Synthetic oligonucleotide
ucucuuuugagucuuuccc

SEQ ID NO: 3171395 - RNA, 19 nt, Artificial Sequence
  Description of Artificial Sequence: Synthetic oligonucleotide
caaguaauguccuaugcag

SEQ ID NO: 3171396 - RNA, 19 nt, Artificial Sequence
  Description of Artificial Sequence: Synthetic oligonucleotide
uucggaagacgacagaugc

SEQ ID NO: 3171397 - RNA, 19 nt, Artificial Sequence
  Description of Artificial Sequence: Synthetic oligonucleotide
gauaagucaggacuguacc

SEQ ID NO: 3171398 - RNA, 19 nt, Artificial Sequence
  Description of Artificial Sequence: Synthetic oligonucleotide
aaguuucuggugcuugacc

SEQ ID NO: 3171399 - RNA, 19 nt, Artificial Sequence
  Description of Artificial Sequence: Synthetic oligonucleotide
aaugagaacuguuauuaaa

SEQ ID NO: 3171400 - RNA, 19 nt, Artificial Sequence
  Description of Artificial Sequence: Synthetic oligonucleotide
uguaccuauacucuucucu

SEQ ID NO: 3171401 - RNA, 19 nt, Artificial Sequence
  Description of Artificial Sequence: Synthetic oligonucleotide
aauuauaaggcuugagcuu

SEQ ID NO: 3171402 - RNA, 19 nt, Artificial Sequence
  Description of Artificial Sequence: Synthetic oligonucleotide
cauuucuucaaagaagggg

SEQ ID NO: 3171403 - RNA, 19 nt, Artificial Sequence
  Description of Artificial Sequence: Synthetic oligonucleotide
agucaggacacacaugggg

SEQ ID NO: 3171404 - RNA, 19 nt, Artificial Sequence
  Description of Artificial Sequence: Synthetic oligonucleotide
ucuuacuaacuuuaccuug

SEQ ID NO: 3171405 - RNA, 19 nt, Artificial Sequence
  Description of Artificial Sequence: Synthetic oligonucleotide
accuugauuagcaugacgg

SEQ ID NO: 3171406 - RNA, 19 nt, Artificial Sequence
  Description of Artificial Sequence: Synthetic oligonucleotide
gaauuauaaggcuugagcu

SEQ ID NO: 3171407 - RNA, 19 nt, Artificial Sequence
  Description of Artificial Sequence: Synthetic oligonucleotide
ugagaacuguuauuaaagc

SEQ ID NO: 3171408 - RNA, 19 nt, Artificial Sequence
  Description of Artificial Sequence: Synthetic oligonucleotide
aaauaucucguuuuagauu

SEQ ID NO: 3171409 - RNA, 19 nt, Artificial Sequence
  Description of Artificial Sequence: Synthetic oligonucleotide
aaguaauguccuaugcagc

SEQ ID NO: 3171410 - RNA, 19 nt, Artificial Sequence
  Description of Artificial Sequence: Synthetic oligonucleotide
uuauuaaagcuucucccac

SEQ ID NO: 3171411 - RNA, 19 nt, Artificial Sequence
  Description of Artificial Sequence: Synthetic oligonucleotide
cuuaccacagucaggacac

SEQ ID NO: 3171412 - RNA, 19 nt, Artificial Sequence
  Description of Artificial Sequence: Synthetic oligonucleotide
uucacuugggcuucggaag

SEQ ID NO: 3171413 - RNA, 19 nt, Artificial Sequence
  Description of Artificial Sequence: Synthetic oligonucleotide
aaacauucauucuuacuaa

SEQ ID NO: 3171414 - RNA, 19 nt, Artificial Sequence
  Description of Artificial Sequence: Synthetic oligonucleotide
aggggcaaguuucuggugc

SEQ ID NO: 3171415 - RNA, 19 nt, Artificial Sequence
  Description of Artificial Sequence: Synthetic oligonucleotide
caaagaaggggcaaguuuc

SEQ ID NO: 3171416 - RNA, 19 nt, Artificial Sequence
  Description of Artificial Sequence: Synthetic oligonucleotide
aguaauguccuaugcagcu

SEQ ID NO: 3171417 - RNA, 19 nt, Artificial Sequence
  Description of Artificial Sequence: Synthetic oligonucleotide
agaccuugcaaguaauguc

SEQ ID NO: 3171418 - RNA, 19 nt, Artificial Sequence
  Description of Artificial Sequence: Synthetic oligonucleotide
aaugaaauuggaacugucu

SEQ ID NO: 3171419 - RNA, 19 nt, Artificial Sequence
  Description of Artificial Sequence: Synthetic oligonucleotide
aucuccucaaagaaggggc

SEQ ID NO: 3171420 - RNA, 19 nt, Artificial Sequence
  Description of Artificial Sequence: Synthetic oligonucleotide
ugggccaaaacuuuugcca

SEQ ID NO: 3171421 - RNA, 19 nt, Artificial Sequence
  Description of Artificial Sequence: Synthetic oligonucleotide
uaggcuuuuaaauucacuu

SEQ ID NO: 3171422 - RNA, 19 nt, Artificial Sequence
  Description of Artificial Sequence: Synthetic oligonucleotide
uggugaauuauaaggcuug

SEQ ID NO: 3171423 - RNA, 19 nt, Artificial Sequence
  Description of Artificial Sequence: Synthetic oligonucleotide
ugcuugaccauucuugacu

SEQ ID NO: 3171424 - RNA, 19 nt, Artificial Sequence
  Description of Artificial Sequence: Synthetic oligonucleotide
uguacuuccucagaaauau

SEQ ID NO: 3171425 - RNA, 19 nt, Artificial Sequence
  Description of Artificial Sequence: Synthetic oligonucleotide
ucaucacuagguuggacag

SEQ ID NO: 3171426 - RNA, 19 nt, Artificial Sequence
  Description of Artificial Sequence: Synthetic oligonucleotide
ucaaagaaggggcagguuu

SEQ ID NO: 3171427 - RNA, 19 nt, Artificial Sequence
  Description of Artificial Sequence: Synthetic oligonucleotide
ugauaagucaggacuguac

SEQ ID NO: 3171428 - RNA, 19 nt, Artificial Sequence
  Description of Artificial Sequence: Synthetic oligonucleotide
uugauuagcaugacgggaa

SEQ ID NO: 3171429 - RNA, 19 nt, Artificial Sequence
  Description of Artificial Sequence: Synthetic oligonucleotide
ugauaaacauucauucuua

SEQ ID NO: 3171430 - RNA, 19 nt, Artificial Sequence
  Description of Artificial Sequence: Synthetic oligonucleotide
guuauuaaagcuucuccca

SEQ ID NO: 3171431 - RNA, 19 nt, Artificial Sequence
  Description of Artificial Sequence: Synthetic oligonucleotide
uuauauggauucucuaccu

SEQ ID NO: 3171432 - RNA, 19 nt, Artificial Sequence
  Description of Artificial Sequence: Synthetic oligonucleotide
aauaagacuggagcacggg

SEQ ID NO: 3171433 - RNA, 19 nt, Artificial Sequence
  Description of Artificial Sequence: Synthetic oligonucleotide
gaaaugagaacuguuauua

SEQ ID NO: 3171434 - RNA, 19 nt, Artificial Sequence
  Description of Artificial Sequence: Synthetic oligonucleotide
augagaacuguuauuaaag

SEQ ID NO: 3171435 - RNA, 19 nt, Artificial Sequence
  Description of Artificial Sequence: Synthetic oligonucleotide
ugcacugaaaugagaacug

SEQ ID NO: 3171436 - RNA, 19 nt, Artificial Sequence
  Description of Artificial Sequence: Synthetic oligonucleotide
acaaucguggcacucauaa

SEQ ID NO: 3171437 - RNA, 19 nt, Artificial Sequence
  Description of Artificial Sequence: Synthetic oligonucleotide
uuggacagcaacacgggca

SEQ ID NO: 3171438 - RNA, 19 nt, Artificial Sequence
  Description of Artificial Sequence: Synthetic oligonucleotide
ucuuuugagucuuucccca

SEQ ID NO: 3171439 - RNA, 19 nt, Artificial Sequence
  Description of Artificial Sequence: Synthetic oligonucleotide
ucggaaaccuuucccacag

SEQ ID NO: 3171440 - RNA, 19 nt, Artificial Sequence
  Description of Artificial Sequence: Synthetic oligonucleotide
auauggauucucuaccuga

SEQ ID NO: 3171441 - RNA, 19 nt, Artificial Sequence
  Description of Artificial Sequence: Synthetic oligonucleotide
aaugggcaaugcaaugacc

SEQ ID NO: 3171442 - RNA, 19 nt, Artificial Sequence
  Description of Artificial Sequence: Synthetic oligonucleotide
ucuccgauggguaaugaaa

SEQ ID NO: 3171443 - RNA, 19 nt, Artificial Sequence
  Description of Artificial Sequence: Synthetic oligonucleotide
ucucgguguuuauuaaggg

SEQ ID NO: 3171444 - RNA, 19 nt, Artificial Sequence
  Description of Artificial Sequence: Synthetic oligonucleotide
uugauugaagcguuuucca

SEQ ID NO: 3171445 - RNA, 19 nt, Artificial Sequence
  Description of Artificial Sequence: Synthetic oligonucleotide
uggauugucaggguccugg

SEQ ID NO: 3171446 - RNA, 19 nt, Artificial Sequence
  Description of Artificial Sequence: Synthetic oligonucleotide
uuugggccaaaacuuuugc

SEQ ID NO: 3171447 - RNA, 19 nt, Artificial Sequence
  Description of Artificial Sequence: Synthetic oligonucleotide
agacgacagaugcaggugg

SEQ ID NO: 3171448 - RNA, 19 nt, Artificial Sequence
  Description of Artificial Sequence: Synthetic oligonucleotide
uuuccugaagguagcaaga

SEQ ID NO: 3171449 - RNA, 19 nt, Artificial Sequence
  Description of Artificial Sequence: Synthetic oligonucleotide
ucaaagaaggggcaaguuu

SEQ ID NO: 3171450 - RNA, 19 nt, Artificial Sequence
  Description of Artificial Sequence: Synthetic oligonucleotide
ugaugaggcgugcacuccg

SEQ ID NO: 3171451 - RNA, 19 nt, Artificial Sequence
  Description of Artificial Sequence: Synthetic oligonucleotide
acuguuauuaaagcuucuc

SEQ ID NO: 3171452 - RNA, 19 nt, Artificial Sequence
  Description of Artificial Sequence: Synthetic oligonucleotide
cucgguguuuauuaagggc

SEQ ID NO: 3171453 - RNA, 19 nt, Artificial Sequence
  Description of Artificial Sequence: Synthetic oligonucleotide
uccgauagcugguuuguag

SEQ ID NO: 3171454 - RNA, 19 nt, Artificial Sequence
  Description of Artificial Sequence: Synthetic oligonucleotide
uguguccucggcuugcucc

SEQ ID NO: 3171455 - RNA, 19 nt, Artificial Sequence
  Description of Artificial Sequence: Synthetic oligonucleotide
cucuuuugagucuuucccc

SEQ ID NO: 3171456 - RNA, 19 nt, Artificial Sequence
  Description of Artificial Sequence: Synthetic oligonucleotide
aggggcagguuucaggugg

SEQ ID NO: 3171457 - RNA, 19 nt, Artificial Sequence
  Description of Artificial Sequence: Synthetic oligonucleotide
aggcuuuuaaauucacuug

SEQ ID NO: 3171458 - RNA, 19 nt, Artificial Sequence
  Description of Artificial Sequence: Synthetic oligonucleotide
guaccuauacucuucucug

SEQ ID NO: 3171459 - RNA, 19 nt, Artificial Sequence
  Description of Artificial Sequence: Synthetic oligonucleotide
uaccuugauuagcaugacg

SEQ ID NO: 3171460 - RNA, 19 nt, Artificial Sequence
  Description of Artificial Sequence: Synthetic oligonucleotide
aaaugagaacuguuauuaa

SEQ ID NO: 3171461 - RNA, 19 nt, Artificial Sequence
  Description of Artificial Sequence: Synthetic oligonucleotide
uuacugaagcacuugccac

SEQ ID NO: 3171462 - RNA, 19 nt, Artificial Sequence
  Description of Artificial Sequence: Synthetic oligonucleotide
uaccuauacucuucucugg

SEQ ID NO: 3171463 - RNA, 19 nt, Artificial Sequence
  Description of Artificial Sequence: Synthetic oligonucleotide
ugucucggaaaccuuuccc

SEQ ID NO: 3171464 - RNA, 19 nt, Artificial Sequence
  Description of Artificial Sequence: Synthetic oligonucleotide
uccucaugcugccaggccc

SEQ ID NO: 3171465 - RNA, 19 nt, Artificial Sequence
  Description of Artificial Sequence: Synthetic oligonucleotide
aguuucagugucugccugg

SEQ ID NO: 3171466 - RNA, 19 nt, Artificial Sequence
  Description of Artificial Sequence: Synthetic oligonucleotide
ucuucaaagaaggggcaag

SEQ ID NO: 3171467 - RNA, 19 nt, Artificial Sequence
  Description of Artificial Sequence: Synthetic oligonucleotide
ugauugaagcguuuuccac

SEQ ID NO: 3171468 - RNA, 19 nt, Artificial Sequence
  Description of Artificial Sequence: Synthetic oligonucleotide
uaaugaaauuggaacuguc

SEQ ID NO: 3171469 - RNA, 19 nt, Artificial Sequence
  Description of Artificial Sequence: Synthetic oligonucleotide
ugaaaugagaacuguuauu

SEQ ID NO: 3171470 - RNA, 19 nt, Artificial Sequence
  Description of Artificial Sequence: Synthetic oligonucleotide
cuuacuaacuuuaccuuga

SEQ ID NO: 3171471 - RNA, 19 nt, Artificial Sequence
  Description of Artificial Sequence: Synthetic oligonucleotide
cuggucucugauaagucag

SEQ ID NO: 3171472 - RNA, 19 nt, Artificial Sequence
  Description of Artificial Sequence: Synthetic oligonucleotide
uguguguguccuccgaugu

SEQ ID NO: 3171473 - RNA, 19 nt, Artificial Sequence
  Description of Artificial Sequence: Synthetic oligonucleotide
uuaagggcagagcucuuac

SEQ ID NO: 3171474 - RNA, 19 nt, Artificial Sequence
  Description of Artificial Sequence: Synthetic oligonucleotide
gaggcgugcacuccgacug

SEQ ID NO: 3171475 - RNA, 19 nt, Artificial Sequence
  Description of Artificial Sequence: Synthetic oligonucleotide
cugaugggauaccugauac

SEQ ID NO: 3171476 - RNA, 19 nt, Artificial Sequence
  Description of Artificial Sequence: Synthetic oligonucleotide
auaagucaggacuguaccu

SEQ ID NO: 3171477 - RNA, 19 nt, Artificial Sequence
  Description of Artificial Sequence: Synthetic oligonucleotide
gacacuaaugggcaaugca

SEQ ID NO: 3171478 - RNA, 19 nt, Artificial Sequence
  Description of Artificial Sequence: Synthetic oligonucleotide
ucagugucugccuggcuag

SEQ ID NO: 3171479 - RNA, 19 nt, Artificial Sequence
  Description of Artificial Sequence: Synthetic oligonucleotide
uggucucugauaagucagg

SEQ ID NO: 3171480 - RNA, 19 nt, Artificial Sequence
  Description of Artificial Sequence: Synthetic oligonucleotide
uggaauaagacuggagcac

SEQ ID NO: 3171481 - RNA, 19 nt, Artificial Sequence
  Description of Artificial Sequence: Synthetic oligonucleotide
cuuacugaagcacuugcca

SEQ ID NO: 3171482 - RNA, 19 nt, Artificial Sequence
  Description of Artificial Sequence: Synthetic oligonucleotide
acgggcacugaccagagca

SEQ ID NO: 3171483 - RNA, 19 nt, Artificial Sequence
  Description of Artificial Sequence: Synthetic oligonucleotide
agcaugacgggaaauuuuc

SEQ ID NO: 3171484 - RNA, 19 nt, Artificial Sequence
  Description of Artificial Sequence: Synthetic oligonucleotide
aacagugccaguuauaaac

SEQ ID NO: 3171485 - RNA, 19 nt, Artificial Sequence
  Description of Artificial Sequence: Synthetic oligonucleotide
aacacaguggucuucuucc

SEQ ID NO: 3171486 - RNA, 19 nt, Artificial Sequence
  Description of Artificial Sequence: Synthetic oligonucleotide
cuaaggaaaaccaacacag

SEQ ID NO: 3171487 - RNA, 19 nt, Artificial Sequence
  Description of Artificial Sequence: Synthetic oligonucleotide
uaaacuuacaaccagucac

SEQ ID NO: 3171488 - RNA, 19 nt, Artificial Sequence
  Description of Artificial Sequence: Synthetic oligonucleotide
caguuauaaacuuacaacc

SEQ ID NO: 3171489 - RNA, 19 nt, Artificial Sequence
  Description of Artificial Sequence: Synthetic oligonucleotide
aaaaccaacacaguggucu

SEQ ID NO: 3171490 - RNA, 19 nt, Artificial Sequence
  Description of Artificial Sequence: Synthetic oligonucleotide
gaugacuuagacuuggccc

SEQ ID NO: 3171491 - RNA, 19 nt, Artificial Sequence
  Description of Artificial Sequence: Synthetic oligonucleotide
caagcagacaaauaaauac

SEQ ID NO: 3171492 - RNA, 19 nt, Artificial Sequence
  Description of Artificial Sequence: Synthetic oligonucleotide
cuauuuguagucaucagag

SEQ ID NO: 3171493 - RNA, 19 nt, Artificial Sequence
  Description of Artificial Sequence: Synthetic oligonucleotide
uaugcauacaggcaacccg

SEQ ID NO: 3171494 - RNA, 19 nt, Artificial Sequence
  Description of Artificial Sequence: Synthetic oligonucleotide
auugggagagcacagagag

SEQ ID NO: 3171495 - RNA, 19 nt, Artificial Sequence
  Description of Artificial Sequence: Synthetic oligonucleotide
cuuagcuucacaguaaccg

SEQ ID NO: 3171496 - RNA, 19 nt, Artificial Sequence
  Description of Artificial Sequence: Synthetic oligonucleotide
ugucacgucacucuagucc

SEQ ID NO: 3171497 - RNA, 19 nt, Artificial Sequence
  Description of Artificial Sequence: Synthetic oligonucleotide
uuagaagacacgaugacuu

SEQ ID NO: 3171498 - RNA, 19 nt, Artificial Sequence
  Description of Artificial Sequence: Synthetic oligonucleotide
ugggagagcacagagaggg

SEQ ID NO: 3171499 - RNA, 19 nt, Artificial Sequence
  Description of Artificial Sequence: Synthetic oligonucleotide
cagacaaauaaauacauca

SEQ ID NO: 3171500 - RNA, 19 nt, Artificial Sequence
  Description of Artificial Sequence: Synthetic oligonucleotide
gacucauacacacaucugc

SEQ ID NO: 3171501 - RNA, 19 nt, Artificial Sequence
  Description of Artificial Sequence: Synthetic oligonucleotide
uauaaacuuacaaccaguc

SEQ ID NO: 3171502 - RNA, 19 nt, Artificial Sequence
  Description of Artificial Sequence: Synthetic oligonucleotide
auuuguagucaucagagau

SEQ ID NO: 3171503 - RNA, 19 nt, Artificial Sequence
  Description of Artificial Sequence: Synthetic oligonucleotide
aacgcacccggacucauac

SEQ ID NO: 3171504 - RNA, 19 nt, Artificial Sequence
  Description of Artificial Sequence: Synthetic oligonucleotide
aaauacaucaagcguuaga

SEQ ID NO: 3171505 - RNA, 19 nt, Artificial Sequence
  Description of Artificial Sequence: Synthetic oligonucleotide
ucuucuuccugucuuggag

SEQ ID NO: 3171506 - RNA, 19 nt, Artificial Sequence
  Description of Artificial Sequence: Synthetic oligonucleotide
aagacacgaugacuuagac

SEQ ID NO: 3171507 - RNA, 19 nt, Artificial Sequence
  Description of Artificial Sequence: Synthetic oligonucleotide
acuaaggaaaaccaacaca

SEQ ID NO: 3171508 - RNA, 19 nt, Artificial Sequence
  Description of Artificial Sequence: Synthetic oligonucleotide
aguccaagcagacaaauaa

SEQ ID NO: 3171509 - RNA, 19 nt, Artificial Sequence
  Description of Artificial Sequence: Synthetic oligonucleotide
gacacgaugacuuagacuu

SEQ ID NO: 3171510 - RNA, 19 nt, Artificial Sequence
  Description of Artificial Sequence: Synthetic oligonucleotide
ucagagauggccuguuggg

SEQ ID NO: 3171511 - RNA, 19 nt, Artificial Sequence
  Description of Artificial Sequence: Synthetic oligonucleotide
agaauugucccguguaguc

SEQ ID NO: 3171512 - RNA, 19 nt, Artificial Sequence
  Description of Artificial Sequence: Synthetic oligonucleotide
cuuggagcaucccagacag

SEQ ID NO: 3171513 - RNA, 19 nt, Artificial Sequence
  Description of Artificial Sequence: Synthetic oligonucleotide
cagugugucaggcauaugc

SEQ ID NO: 3171514 - RNA, 19 nt, Artificial Sequence
  Description of Artificial Sequence: Synthetic oligonucleotide
accaaagacuaaugagucc

SEQ ID NO: 3171515 - RNA, 19 nt, Artificial Sequence
  Description of Artificial Sequence: Synthetic oligonucleotide
aaugaguccaguguugacu

SEQ ID NO: 3171516 - RNA, 19 nt, Artificial Sequence
  Description of Artificial Sequence: Synthetic oligonucleotide
caggcauaugcauacaggc

SEQ ID NO: 3171517 - RNA, 19 nt, Artificial Sequence
  Description of Artificial Sequence: Synthetic oligonucleotide
aucagagauggccuguugg

SEQ ID NO: 3171518 - RNA, 19 nt, Artificial Sequence
  Description of Artificial Sequence: Synthetic oligonucleotide
aacgguucuguccaccuug

SEQ ID NO: 3171519 - RNA, 19 nt, Artificial Sequence
  Description of Artificial Sequence: Synthetic oligonucleotide
agcguuagaagacacgaug

SEQ ID NO: 3171520 - RNA, 19 nt, Artificial Sequence
  Description of Artificial Sequence: Synthetic oligonucleotide
ucaagcguuagaagacacg

SEQ ID NO: 3171521 - RNA, 19 nt, Artificial Sequence
  Description of Artificial Sequence: Synthetic oligonucleotide
ugggaaagcaggcacuaag

SEQ ID NO: 3171522 - RNA, 19 nt, Artificial Sequence
  Description of Artificial Sequence: Synthetic oligonucleotide
aggaaaaccaacacagugg

SEQ ID NO: 3171523 - RNA, 19 nt, Artificial Sequence
  Description of Artificial Sequence: Synthetic oligonucleotide
auauugggagagcacagag

SEQ ID NO: 3171524 - RNA, 19 nt, Artificial Sequence
  Description of Artificial Sequence: Synthetic oligonucleotide
ucauacacacaucugcccu

SEQ ID NO: 3171525 - RNA, 19 nt, Artificial Sequence
  Description of Artificial Sequence: Synthetic oligonucleotide
acaguagcuggguugauug

SEQ ID NO: 3171526 - RNA, 19 nt, Artificial Sequence
  Description of Artificial Sequence: Synthetic oligonucleotide
guagucauuuccccggugg

SEQ ID NO: 3171527 - RNA, 19 nt, Artificial Sequence
  Description of Artificial Sequence: Synthetic oligonucleotide
augaguccaguguugacuc

SEQ ID NO: 3171528 - RNA, 19 nt, Artificial Sequence
  Description of Artificial Sequence: Synthetic oligonucleotide
gucacuuauucuuucuuag

SEQ ID NO: 3171529 - RNA, 19 nt, Artificial Sequence
  Description of Artificial Sequence: Synthetic oligonucleotide
uguuuuaggcaguucuacc

SEQ ID NO: 3171530 - RNA, 19 nt, Artificial Sequence
  Description of Artificial Sequence: Synthetic oligonucleotide
augacuuagacuuggccca

SEQ ID NO: 3171531 - RNA, 19 nt, Artificial Sequence
  Description of Artificial Sequence: Synthetic oligonucleotide
aggcaguucuaccacuugc

SEQ ID NO: 3171532 - RNA, 19 nt, Artificial Sequence
  Description of Artificial Sequence: Synthetic oligonucleotide
uccaagcagacaaauaaau

SEQ ID NO: 3171533 - RNA, 19 nt, Artificial Sequence
  Description of Artificial Sequence: Synthetic oligonucleotide
cuuggagagaccaacuguc

SEQ ID NO: 3171534 - RNA, 19 nt, Artificial Sequence
  Description of Artificial Sequence: Synthetic oligonucleotide
acaguaaccgcaccaaaga

SEQ ID NO: 3171535 - RNA, 19 nt, Artificial Sequence
  Description of Artificial Sequence: Synthetic oligonucleotide
aauugucccguguagucau

SEQ ID NO: 3171536 - RNA, 19 nt, Artificial Sequence
  Description of Artificial Sequence: Synthetic oligonucleotide
auaugcauacaggcaaccc

SEQ ID NO: 3171537 - RNA, 19 nt, Artificial Sequence
  Description of Artificial Sequence: Synthetic oligonucleotide
acaucaagcguuagaagac

SEQ ID NO: 3171538 - RNA, 19 nt, Artificial Sequence
  Description of Artificial Sequence: Synthetic oligonucleotide
ccaguuauaaacuuacaac

SEQ ID NO: 3171539 - RNA, 19 nt, Artificial Sequence
  Description of Artificial Sequence: Synthetic oligonucleotide
uagucaucagagauggccu

SEQ ID NO: 3171540 - RNA, 19 nt, Artificial Sequence
  Description of Artificial Sequence: Synthetic oligonucleotide
ucacuuauucuuucuuagc

SEQ ID NO: 3171541 - RNA, 19 nt, Artificial Sequence
  Description of Artificial Sequence: Synthetic oligonucleotide
auacaggcaacccgaacag

SEQ ID NO: 3171542 - RNA, 19 nt, Artificial Sequence
  Description of Artificial Sequence: Synthetic oligonucleotide
aaacuuacaaccagucacu

SEQ ID NO: 3171543 - RNA, 19 nt, Artificial Sequence
  Description of Artificial Sequence: Synthetic oligonucleotide
ucacucuaguccaagcaga

SEQ ID NO: 3171544 - RNA, 19 nt, Artificial Sequence
  Description of Artificial Sequence: Synthetic oligonucleotide
aguuauaaacuuacaacca

SEQ ID NO: 3171545 - RNA, 19 nt, Artificial Sequence
  Description of Artificial Sequence: Synthetic oligonucleotide
guuuuaggcaguucuacca

SEQ ID NO: 3171546 - RNA, 19 nt, Artificial Sequence
  Description of Artificial Sequence: Synthetic oligonucleotide
uggagcaucccagacaggc

SEQ ID NO: 3171547 - RNA, 19 nt, Artificial Sequence
  Description of Artificial Sequence: Synthetic oligonucleotide
ucuuggagcaucccagaca

SEQ ID NO: 3171548 - RNA, 19 nt, Artificial Sequence
  Description of Artificial Sequence: Synthetic oligonucleotide
cacaguaaccgcaccaaag

SEQ ID NO: 3171549 - RNA, 19 nt, Artificial Sequence
  Description of Artificial Sequence: Synthetic oligonucleotide
guucuguccaccuuggaga

SEQ ID NO: 3171550 - RNA, 19 nt, Artificial Sequence
  Description of Artificial Sequence: Synthetic oligonucleotide
gagaccaacugucacguca

SEQ ID NO: 3171551 - RNA, 19 nt, Artificial Sequence
  Description of Artificial Sequence: Synthetic oligonucleotide
auacaucaagcguuagaag

SEQ ID NO: 3171552 - RNA, 19 nt, Artificial Sequence
  Description of Artificial Sequence: Synthetic oligonucleotide
aggcaacccgaacagugcc

SEQ ID NO: 3171553 - RNA, 19 nt, Artificial Sequence
  Description of Artificial Sequence: Synthetic oligonucleotide
cauacaggcaacccgaaca

SEQ ID NO: 3171554 - RNA, 19 nt, Artificial Sequence
  Description of Artificial Sequence: Synthetic oligonucleotide
uauugggagagcacagaga

SEQ ID NO: 3171555 - RNA, 19 nt, Artificial Sequence
  Description of Artificial Sequence: Synthetic oligonucleotide
guugauuggccccaagaac

SEQ ID NO: 3171556 - RNA, 19 nt, Artificial Sequence
  Description of Artificial Sequence: Synthetic oligonucleotide
uauuuguagucaucagaga

SEQ ID NO: 3171557 - RNA, 19 nt, Artificial Sequence
  Description of Artificial Sequence: Synthetic oligonucleotide
gacauauugggagagcaca

SEQ ID NO: 3171558 - RNA, 19 nt, Artificial Sequence
  Description of Artificial Sequence: Synthetic oligonucleotide
uucuaccacuugcugaggc

SEQ ID NO: 3171559 - RNA, 19 nt, Artificial Sequence
  Description of Artificial Sequence: Synthetic oligonucleotide
cuucuuccugucuuggagc

SEQ ID NO: 3171560 - RNA, 19 nt, Artificial Sequence
  Description of Artificial Sequence: Synthetic oligonucleotide
uacaaccagucacuuauuc

SEQ ID NO: 3171561 - RNA, 19 nt, Artificial Sequence
  Description of Artificial Sequence: Synthetic oligonucleotide
uccaguguugacucagggc

SEQ ID NO: 3171562 - RNA, 19 nt, Artificial Sequence
  Description of Artificial Sequence: Synthetic oligonucleotide
uagcuucacaguaaccgca

SEQ ID NO: 3171563 - RNA, 19 nt, Artificial Sequence
  Description of Artificial Sequence: Synthetic oligonucleotide
ucccguguagucauuuccc

SEQ ID NO: 3171564 - RNA, 19 nt, Artificial Sequence
  Description of Artificial Sequence: Synthetic oligonucleotide
cugucuuggagcaucccag

SEQ ID NO: 3171565 - RNA, 19 nt, Artificial Sequence
  Description of Artificial Sequence: Synthetic oligonucleotide
cacagcagaacgcacccgg

SEQ ID NO: 3171566 - RNA, 19 nt, Artificial Sequence
  Description of Artificial Sequence: Synthetic oligonucleotide
ggagagaccaacugucacg

SEQ ID NO: 3171567 - RNA, 19 nt, Artificial Sequence
  Description of Artificial Sequence: Synthetic oligonucleotide
aagaauugucccguguagu

SEQ ID NO: 3171568 - RNA, 19 nt, Artificial Sequence
  Description of Artificial Sequence: Synthetic oligonucleotide
ugauuggccccaagaaccc

SEQ ID NO: 3171569 - RNA, 19 nt, Artificial Sequence
  Description of Artificial Sequence: Synthetic oligonucleotide
uucuguccaccuuggagag

SEQ ID NO: 3171570 - RNA, 19 nt, Artificial Sequence
  Description of Artificial Sequence: Synthetic oligonucleotide
ggcagguuguuuuaggcag

SEQ ID NO: 3171571 - RNA, 19 nt, Artificial Sequence
  Description of Artificial Sequence: Synthetic oligonucleotide
uuugucugcccugggaaag

SEQ ID NO: 3171572 - RNA, 19 nt, Artificial Sequence
  Description of Artificial Sequence: Synthetic oligonucleotide
ucuuagcuucacaguaacc

SEQ ID NO: 3171573 - RNA, 19 nt, Artificial Sequence
  Description of Artificial Sequence: Synthetic oligonucleotide
uggacauauugggagagca

SEQ ID NO: 3171574 - RNA, 19 nt, Artificial Sequence
  Description of Artificial Sequence: Synthetic oligonucleotide
acucagggcagauuugucu

SEQ ID NO: 3171575 - RNA, 19 nt, Artificial Sequence
  Description of Artificial Sequence: Synthetic oligonucleotide
ugugucaggcauaugcaua

SEQ ID NO: 3171576 - RNA, 19 nt, Artificial Sequence
  Description of Artificial Sequence: Synthetic oligonucleotide
gauuugucugcccugggaa

SEQ ID NO: 3171577 - RNA, 19 nt, Artificial Sequence
  Description of Artificial Sequence: Synthetic oligonucleotide
gguuaggaggcgaacaacg

SEQ ID NO: 3171578 - RNA, 19 nt, Artificial Sequence
  Description of Artificial Sequence: Synthetic oligonucleotide
uuguuuuaggcaguucuac

SEQ ID NO: 3171579 - RNA, 19 nt, Artificial Sequence
  Description of Artificial Sequence: Synthetic oligonucleotide
uuuaggcaguucuaccacu

SEQ ID NO: 3171580 - RNA, 19 nt, Artificial Sequence
  Description of Artificial Sequence: Synthetic oligonucleotide
ugggcagguuguuuuaggc

SEQ ID NO: 3171581 - RNA, 19 nt, Artificial Sequence
  Description of Artificial Sequence: Synthetic oligonucleotide
cuuacaaccagucacuuau

SEQ ID NO: 3171582 - RNA, 19 nt, Artificial Sequence
  Description of Artificial Sequence: Synthetic oligonucleotide
gccauggacauauugggag

SEQ ID NO: 3171583 - RNA, 19 nt, Artificial Sequence
  Description of Artificial Sequence: Synthetic oligonucleotide
accagucacuuauucuuuc

SEQ ID NO: 3171584 - RNA, 19 nt, Artificial Sequence
  Description of Artificial Sequence: Synthetic oligonucleotide
uauccuuuaacaaggaugg

SEQ ID NO: 3171585 - RNA, 19 nt, Artificial Sequence
  Description of Artificial Sequence: Synthetic oligonucleotide
aauaacaaugucaugcugc

SEQ ID NO: 3171586 - RNA, 19 nt, Artificial Sequence
  Description of Artificial Sequence: Synthetic oligonucleotide
gauacauucacccaugaug

SEQ ID NO: 3171587 - RNA, 19 nt, Artificial Sequence
  Description of Artificial Sequence: Synthetic oligonucleotide
aaaauuucaagaguuuugg

SEQ ID NO: 3171588 - RNA, 19 nt, Artificial Sequence
  Description of Artificial Sequence: Synthetic oligonucleotide
uuauccuuuaacaaggaug

SEQ ID NO: 3171589 - RNA, 19 nt, Artificial Sequence
  Description of Artificial Sequence: Synthetic oligonucleotide
aaguuuauccuuuaacaag

SEQ ID NO: 3171590 - RNA, 19 nt, Artificial Sequence
  Description of Artificial Sequence: Synthetic oligonucleotide
uuuuccuucauccuuuggg

SEQ ID NO: 3171591 - RNA, 19 nt, Artificial Sequence
  Description of Artificial Sequence: Synthetic oligonucleotide
uuaggaaugacaaccaccc

SEQ ID NO: 3171592 - RNA, 19 nt, Artificial Sequence
  Description of Artificial Sequence: Synthetic oligonucleotide
gacaauaacaaugucaugc

SEQ ID NO: 3171593 - RNA, 19 nt, Artificial Sequence
  Description of Artificial Sequence: Synthetic oligonucleotide
aacgcaacccaauuugagc

SEQ ID NO: 3171594 - RNA, 19 nt, Artificial Sequence
  Description of Artificial Sequence: Synthetic oligonucleotide
uacacaaaaguuaagcaug

SEQ ID NO: 3171595 - RNA, 19 nt, Artificial Sequence
  Description of Artificial Sequence: Synthetic oligonucleotide
auuucaagaguuuugguug

SEQ ID NO: 3171596 - RNA, 19 nt, Artificial Sequence
  Description of Artificial Sequence: Synthetic oligonucleotide
uuaacaaggauggagaaga

SEQ ID NO: 3171597 - RNA, 19 nt, Artificial Sequence
  Description of Artificial Sequence: Synthetic oligonucleotide
uucuucuucagugagagag

SEQ ID NO: 3171598 - RNA, 19 nt, Artificial Sequence
  Description of Artificial Sequence: Synthetic oligonucleotide
uucaagauccugaaugagg

SEQ ID NO: 3171599 - RNA, 19 nt, Artificial Sequence
  Description of Artificial Sequence: Synthetic oligonucleotide
aaaaguuaagcauggugug

SEQ ID NO: 3171600 - RNA, 19 nt, Artificial Sequence
  Description of Artificial Sequence: Synthetic oligonucleotide
ugaaacgcaacccaauuug

SEQ ID NO: 3171601 - RNA, 19 nt, Artificial Sequence
  Description of Artificial Sequence: Synthetic oligonucleotide
guucuacucaaucugaggg

SEQ ID NO: 3171602 - RNA, 19 nt, Artificial Sequence
  Description of Artificial Sequence: Synthetic oligonucleotide
uuuaggaaugacaaccacc

SEQ ID NO: 3171603 - RNA, 19 nt, Artificial Sequence
  Description of Artificial Sequence: Synthetic oligonucleotide
aauuucaagaguuuugguu

SEQ ID NO: 3171604 - RNA, 19 nt, Artificial Sequence
  Description of Artificial Sequence: Synthetic oligonucleotide
uaaaaguuuauccuuuaac

SEQ ID NO: 3171605 - RNA, 19 nt, Artificial Sequence
  Description of Artificial Sequence: Synthetic oligonucleotide
aaaguuuauccuuuaacaa

SEQ ID NO: 3171606 - RNA, 19 nt, Artificial Sequence
  Description of Artificial Sequence: Synthetic oligonucleotide
aaagaucuggaaguuuucc

SEQ ID NO: 3171607 - RNA, 19 nt, Artificial Sequence
  Description of Artificial Sequence: Synthetic oligonucleotide
uuuauucaaggccucaaug

SEQ ID NO: 3171608 - RNA, 19 nt, Artificial Sequence
  Description of Artificial Sequence: Synthetic oligonucleotide
ucuuauuguaccuuuuccc

SEQ ID NO: 3171609 - RNA, 19 nt, Artificial Sequence
  Description of Artificial Sequence: Synthetic oligonucleotide
uugguugggugaaauaugg

SEQ ID NO: 3171610 - RNA, 19 nt, Artificial Sequence
  Description of Artificial Sequence: Synthetic oligonucleotide
cuuauuguaccuuuucccc

SEQ ID NO: 3171611 - RNA, 19 nt, Artificial Sequence
  Description of Artificial Sequence: Synthetic oligonucleotide
acgcaacccaauuugagcc

SEQ ID NO: 3171612 - RNA, 19 nt, Artificial Sequence
  Description of Artificial Sequence: Synthetic oligonucleotide
ugagagagaagucaaagau

SEQ ID NO: 3171613 - RNA, 19 nt, Artificial Sequence
  Description of Artificial Sequence: Synthetic oligonucleotide
uuauauuuggagaggguug

SEQ ID NO: 3171614 - RNA, 19 nt, Artificial Sequence
  Description of Artificial Sequence: Synthetic oligonucleotide
uaagcgacaauaacaaugu

SEQ ID NO: 3171615 - RNA, 19 nt, Artificial Sequence
  Description of Artificial Sequence: Synthetic oligonucleotide
acaaaaguuaagcauggug

SEQ ID NO: 3171616 - RNA, 19 nt, Artificial Sequence
  Description of Artificial Sequence: Synthetic oligonucleotide
auacauucacccaugaugg

SEQ ID NO: 3171617 - RNA, 19 nt, Artificial Sequence
  Description of Artificial Sequence: Synthetic oligonucleotide
ucauacuacacaaaaguua

SEQ ID NO: 3171618 - RNA, 19 nt, Artificial Sequence
  Description of Artificial Sequence: Synthetic oligonucleotide
uuauucaaggccucaaugu

SEQ ID NO: 3171619 - RNA, 19 nt, Artificial Sequence
  Description of Artificial Sequence: Synthetic oligonucleotide
ucuuuugaagaacugucca

SEQ ID NO: 3171620 - RNA, 19 nt, Artificial Sequence
  Description of Artificial Sequence: Synthetic oligonucleotide
uggguauucaggaugguca

SEQ ID NO: 3171621 - RNA, 19 nt, Artificial Sequence
  Description of Artificial Sequence: Synthetic oligonucleotide
uccccagugaguuuaaaag

SEQ ID NO: 3171622 - RNA, 19 nt, Artificial Sequence
  Description of Artificial Sequence: Synthetic oligonucleotide
ugaagaacuguccauguuc

SEQ ID NO: 3171623 - RNA, 19 nt, Artificial Sequence
  Description of Artificial Sequence: Synthetic oligonucleotide
aagaguuuugguuggguga

SEQ ID NO: 3171624 - RNA, 19 nt, Artificial Sequence
  Description of Artificial Sequence: Synthetic oligonucleotide
auaagcgacaauaacaaug

SEQ ID NO: 3171625 - RNA, 19 nt, Artificial Sequence
  Description of Artificial Sequence: Synthetic oligonucleotide
aaauggguauucaggaugg

SEQ ID NO: 3171626 - RNA, 19 nt, Artificial Sequence
  Description of Artificial Sequence: Synthetic oligonucleotide
cacuucaagauccugaaug

SEQ ID NO: 3171627 - RNA, 19 nt, Artificial Sequence
  Description of Artificial Sequence: Synthetic oligonucleotide
uggauguugaaacgcaacc

SEQ ID NO: 3171628 - RNA, 19 nt, Artificial Sequence
  Description of Artificial Sequence: Synthetic oligonucleotide
uuucaagaguuuugguugg

SEQ ID NO: 3171629 - RNA, 19 nt, Artificial Sequence
  Description of Artificial Sequence: Synthetic oligonucleotide
acuacacaaaaguuaagca

SEQ ID NO: 3171630 - RNA, 19 nt, Artificial Sequence
  Description of Artificial Sequence: Synthetic oligonucleotide
augaaauggguauucagga

SEQ ID NO: 3171631 - RNA, 19 nt, Artificial Sequence
  Description of Artificial Sequence: Synthetic oligonucleotide
ugagcaacuccacgaagcg

SEQ ID NO: 3171632 - RNA, 19 nt, Artificial Sequence
  Description of Artificial Sequence: Synthetic oligonucleotide
uguucuacucaaucugagg

SEQ ID NO: 3171633 - RNA, 19 nt, Artificial Sequence
  Description of Artificial Sequence: Synthetic oligonucleotide
uggggauuaaagcuuuuag

SEQ ID NO: 3171634 - RNA, 19 nt, Artificial Sequence
  Description of Artificial Sequence: Synthetic oligonucleotide
ucaaucugaggguagcaag

SEQ ID NO: 3171635 - RNA, 19 nt, Artificial Sequence
  Description of Artificial Sequence: Synthetic oligonucleotide
uccccaaagggcuauaagc

SEQ ID NO: 3171636 - RNA, 19 nt, Artificial Sequence
  Description of Artificial Sequence: Synthetic oligonucleotide
agagagaagucaaagaucu

SEQ ID NO: 3171637 - RNA, 19 nt, Artificial Sequence
  Description of Artificial Sequence: Synthetic oligonucleotide
uuuugaagaacuguccaug

SEQ ID NO: 3171638 - RNA, 19 nt, Artificial Sequence
  Description of Artificial Sequence: Synthetic oligonucleotide
ucaaagaucuggaaguuuu

SEQ ID NO: 3171639 - RNA, 19 nt, Artificial Sequence
  Description of Artificial Sequence: Synthetic oligonucleotide
agaagauacauucacccau

SEQ ID NO: 3171640 - RNA, 19 nt, Artificial Sequence
  Description of Artificial Sequence: Synthetic oligonucleotide
ggagaagauacauucaccc

SEQ ID NO: 3171641 - RNA, 19 nt, Artificial Sequence
  Description of Artificial Sequence: Synthetic oligonucleotide
cauccuuuggggauuaaag

SEQ ID NO: 3171642 - RNA, 19 nt, Artificial Sequence
  Description of Artificial Sequence: Synthetic oligonucleotide
aaugucaugcugcuggcaa

SEQ ID NO: 3171643 - RNA, 19 nt, Artificial Sequence
  Description of Artificial Sequence: Synthetic oligonucleotide
uuugguugggugaaauaug

SEQ ID NO: 3171644 - RNA, 19 nt, Artificial Sequence
  Description of Artificial Sequence: Synthetic oligonucleotide
aguuuaaaaguuuauccuu

SEQ ID NO: 3171645 - RNA, 19 nt, Artificial Sequence
  Description of Artificial Sequence: Synthetic oligonucleotide
uauuguaccuuuuccccag

SEQ ID NO: 3171646 - RNA, 19 nt, Artificial Sequence
  Description of Artificial Sequence: Synthetic oligonucleotide
aagaucuggaaguuuuccu

SEQ ID NO: 3171647 - RNA, 19 nt, Artificial Sequence
  Description of Artificial Sequence: Synthetic oligonucleotide
uauauuuggagaggguugc

SEQ ID NO: 3171648 - RNA, 19 nt, Artificial Sequence
  Description of Artificial Sequence: Synthetic oligonucleotide
aaauuucaagaguuuuggu

SEQ ID NO: 3171649 - RNA, 19 nt, Artificial Sequence
  Description of Artificial Sequence: Synthetic oligonucleotide
acaauaacaaugucaugcu

SEQ ID NO: 3171650 - RNA, 19 nt, Artificial Sequence
  Description of Artificial Sequence: Synthetic oligonucleotide
uauucaaggccucaauguc

SEQ ID NO: 3171651 - RNA, 19 nt, Artificial Sequence
  Description of Artificial Sequence: Synthetic oligonucleotide
aggaaugacaaccaccccu

SEQ ID NO: 3171652 - RNA, 19 nt, Artificial Sequence
  Description of Artificial Sequence: Synthetic oligonucleotide
aaucugaggguagcaagac

SEQ ID NO: 3171653 - RNA, 19 nt, Artificial Sequence
  Description of Artificial Sequence: Synthetic oligonucleotide
cauacuacacaaaaguuaa

SEQ ID NO: 3171654 - RNA, 19 nt, Artificial Sequence
  Description of Artificial Sequence: Synthetic oligonucleotide
guauucgucaugaaauggg

SEQ ID NO: 3171655 - RNA, 19 nt, Artificial Sequence
  Description of Artificial Sequence: Synthetic oligonucleotide
uuuauauuuggagaggguu

SEQ ID NO: 3171656 - RNA, 19 nt, Artificial Sequence
  Description of Artificial Sequence: Synthetic oligonucleotide
uguguucuacucaaucuga

SEQ ID NO: 3171657 - RNA, 19 nt, Artificial Sequence
  Description of Artificial Sequence: Synthetic oligonucleotide
augagcaacuccacgaagc

SEQ ID NO: 3171658 - RNA, 19 nt, Artificial Sequence
  Description of Artificial Sequence: Synthetic oligonucleotide
guugcucacuucaagaucc

SEQ ID NO: 3171659 - RNA, 19 nt, Artificial Sequence
  Description of Artificial Sequence: Synthetic oligonucleotide
uguucaguauucgucauga

SEQ ID NO: 3171660 - RNA, 19 nt, Artificial Sequence
  Description of Artificial Sequence: Synthetic oligonucleotide
uucagugagagagaaguca

SEQ ID NO: 3171661 - RNA, 19 nt, Artificial Sequence
  Description of Artificial Sequence: Synthetic oligonucleotide
auaacaaugucaugcugcu

SEQ ID NO: 3171662 - RNA, 19 nt, Artificial Sequence
  Description of Artificial Sequence: Synthetic oligonucleotide
uuuugguugggugaaauau

SEQ ID NO: 3171663 - RNA, 19 nt, Artificial Sequence
  Description of Artificial Sequence: Synthetic oligonucleotide
uauucgucaugaaaugggu

SEQ ID NO: 3171664 - RNA, 19 nt, Artificial Sequence
  Description of Artificial Sequence: Synthetic oligonucleotide
auucaaggccucaaugucc

SEQ ID NO: 3171665 - RNA, 19 nt, Artificial Sequence
  Description of Artificial Sequence: Synthetic oligonucleotide
uuaaaaguuuauccuuuaa

SEQ ID NO: 3171666 - RNA, 19 nt, Artificial Sequence
  Description of Artificial Sequence: Synthetic oligonucleotide
cuauaagcgacaauaacaa

SEQ ID NO: 3171667 - RNA, 19 nt, Artificial Sequence
  Description of Artificial Sequence: Synthetic oligonucleotide
uucgucaugaaauggguau

SEQ ID NO: 3171668 - RNA, 19 nt, Artificial Sequence
  Description of Artificial Sequence: Synthetic oligonucleotide
cucuuuugaagaacugucc

SEQ ID NO: 3171669 - RNA, 19 nt, Artificial Sequence
  Description of Artificial Sequence: Synthetic oligonucleotide
aguauucgucaugaaaugg

SEQ ID NO: 3171670 - RNA, 19 nt, Artificial Sequence
  Description of Artificial Sequence: Synthetic oligonucleotide
ucacccaugauggauuccg

SEQ ID NO: 3171671 - RNA, 19 nt, Artificial Sequence
  Description of Artificial Sequence: Synthetic oligonucleotide
guucauacuacacaaaagu

SEQ ID NO: 3171672 - RNA, 19 nt, Artificial Sequence
  Description of Artificial Sequence: Synthetic oligonucleotide
uuauuguaccuuuucccca

SEQ ID NO: 3171673 - RNA, 19 nt, Artificial Sequence
  Description of Artificial Sequence: Synthetic oligonucleotide
gggauuaaagcuuuuagga

SEQ ID NO: 3171674 - RNA, 19 nt, Artificial Sequence
  Description of Artificial Sequence: Synthetic oligonucleotide
ggaaagaccucuuuugaag

SEQ ID NO: 3171675 - RNA, 19 nt, Artificial Sequence
  Description of Artificial Sequence: Synthetic oligonucleotide
caaaaguuaagcauggugu

SEQ ID NO: 3171676 - RNA, 19 nt, Artificial Sequence
  Description of Artificial Sequence: Synthetic oligonucleotide
gauuaaagcuuuuaggaau

SEQ ID NO: 3171677 - RNA, 19 nt, Artificial Sequence
  Description of Artificial Sequence: Synthetic oligonucleotide
guaccuuuuccccagugag

SEQ ID NO: 3171678 - RNA, 19 nt, Artificial Sequence
  Description of Artificial Sequence: Synthetic oligonucleotide
uccugaaugagggaaagac

SEQ ID NO: 3171679 - RNA, 19 nt, Artificial Sequence
  Description of Artificial Sequence: Synthetic oligonucleotide
agugagagagaagucaaag

SEQ ID NO: 3171680 - RNA, 19 nt, Artificial Sequence
  Description of Artificial Sequence: Synthetic oligonucleotide
uuugaagaacuguccaugu

SEQ ID NO: 3171681 - RNA, 19 nt, Artificial Sequence
  Description of Artificial Sequence: Synthetic oligonucleotide
uucauacuacacaaaaguu

SEQ ID NO: 3171682 - RNA, 19 nt, Artificial Sequence
  Description of Artificial Sequence: Synthetic oligonucleotide
uggcaaaauuucaagaguu

SEQ ID NO: 3171683 - RNA, 19 nt, Artificial Sequence
  Description of Artificial Sequence: Synthetic oligonucleotide
acuucaagauccugaauga

SEQ ID NO: 3171684 - RNA, 19 nt, Artificial Sequence
  Description of Artificial Sequence: Synthetic oligonucleotide
uguacuuacaccaugaagc

SEQ ID NO: 3171685 - RNA, 19 nt, Artificial Sequence
  Description of Artificial Sequence: Synthetic oligonucleotide
aaaacaggcucccaggucc

SEQ ID NO: 3171686 - RNA, 19 nt, Artificial Sequence
  Description of Artificial Sequence: Synthetic oligonucleotide
ugcaaaacaacacaagggg

SEQ ID NO: 3171687 - RNA, 19 nt, Artificial Sequence
  Description of Artificial Sequence: Synthetic oligonucleotide
uuuacaaacaccauaccca

SEQ ID NO: 3171688 - RNA, 19 nt, Artificial Sequence
  Description of Artificial Sequence: Synthetic oligonucleotide
uuuuacaaacaccauaccc

SEQ ID NO: 3171689 - RNA, 19 nt, Artificial Sequence
  Description of Artificial Sequence: Synthetic oligonucleotide
uacaccaugaagcagagga

SEQ ID NO: 3171690 - RNA, 19 nt, Artificial Sequence
  Description of Artificial Sequence: Synthetic oligonucleotide
gacaucaauguuuugauug

SEQ ID NO: 3171691 - RNA, 19 nt, Artificial Sequence
  Description of Artificial Sequence: Synthetic oligonucleotide
auuaauuguccucagucac

SEQ ID NO: 3171692 - RNA, 19 nt, Artificial Sequence
  Description of Artificial Sequence: Synthetic oligonucleotide
ugauacuuaaacauggcga

SEQ ID NO: 3171693 - RNA, 19 nt, Artificial Sequence
  Description of Artificial Sequence: Synthetic oligonucleotide
aaccagugcacauauaaag

SEQ ID NO: 3171694 - RNA, 19 nt, Artificial Sequence
  Description of Artificial Sequence: Synthetic oligonucleotide
acauuaauuguccucaguc

SEQ ID NO: 3171695 - RNA, 19 nt, Artificial Sequence
  Description of Artificial Sequence: Synthetic oligonucleotide
acaaacaccauacccagac

SEQ ID NO: 3171696 - RNA, 19 nt, Artificial Sequence
  Description of Artificial Sequence: Synthetic oligonucleotide
uuuugauugauaauucgca

SEQ ID NO: 3171697 - RNA, 19 nt, Artificial Sequence
  Description of Artificial Sequence: Synthetic oligonucleotide
aauguuuugauugauaauu

SEQ ID NO: 3171698 - RNA, 19 nt, Artificial Sequence
  Description of Artificial Sequence: Synthetic oligonucleotide
aaaaccagugcacauauaa

SEQ ID NO: 3171699 - RNA, 19 nt, Artificial Sequence
  Description of Artificial Sequence: Synthetic oligonucleotide
uguuuugauugauaauucg

SEQ ID NO: 3171700 - RNA, 19 nt, Artificial Sequence
  Description of Artificial Sequence: Synthetic oligonucleotide
guugcuccuaaccagaagg

SEQ ID NO: 3171701 - RNA, 19 nt, Artificial Sequence
  Description of Artificial Sequence: Synthetic oligonucleotide
uugaucucaggucacaacc

SEQ ID NO: 3171702 - RNA, 19 nt, Artificial Sequence
  Description of Artificial Sequence: Synthetic oligonucleotide
gauacuuaaacauggcgac

SEQ ID NO: 3171703 - RNA, 19 nt, Artificial Sequence
  Description of Artificial Sequence: Synthetic oligonucleotide
ucugaugucagaagcagug

SEQ ID NO: 3171704 - RNA, 19 nt, Artificial Sequence
  Description of Artificial Sequence: Synthetic oligonucleotide
auuguccucagucacuccc

SEQ ID NO: 3171705 - RNA, 19 nt, Artificial Sequence
  Description of Artificial Sequence: Synthetic oligonucleotide
aguguugaaaaccagugca

SEQ ID NO: 3171706 - RNA, 19 nt, Artificial Sequence
  Description of Artificial Sequence: Synthetic oligonucleotide
auggucugaugucagaagc

SEQ ID NO: 3171707 - RNA, 19 nt, Artificial Sequence
  Description of Artificial Sequence: Synthetic oligonucleotide
aaggucaacccaaacaugg

SEQ ID NO: 3171708 - RNA, 19 nt, Artificial Sequence
  Description of Artificial Sequence: Synthetic oligonucleotide
auugaauggccugugauac

SEQ ID NO: 3171709 - RNA, 19 nt, Artificial Sequence
  Description of Artificial Sequence: Synthetic oligonucleotide
ucaauguuuugauugauaa

SEQ ID NO: 3171710 - RNA, 19 nt, Artificial Sequence
  Description of Artificial Sequence: Synthetic oligonucleotide
ucaguguugaaaaccagug

SEQ ID NO: 3171711 - RNA, 19 nt, Artificial Sequence
  Description of Artificial Sequence: Synthetic oligonucleotide
cugugauacuuaaacaugg

SEQ ID NO: 3171712 - RNA, 19 nt, Artificial Sequence
  Description of Artificial Sequence: Synthetic oligonucleotide
ugaugucagaagcaguggg

SEQ ID NO: 3171713 - RNA, 19 nt, Artificial Sequence
  Description of Artificial Sequence: Synthetic oligonucleotide
uucuauuugcuuuugccug

SEQ ID NO: 3171714 - RNA, 19 nt, Artificial Sequence
  Description of Artificial Sequence: Synthetic oligonucleotide
uuacaaacaccauacccag

SEQ ID NO: 3171715 - RNA, 19 nt, Artificial Sequence
  Description of Artificial Sequence: Synthetic oligonucleotide
ucaucagaaaggcucagug

SEQ ID NO: 3171716 - RNA, 19 nt, Artificial Sequence
  Description of Artificial Sequence: Synthetic oligonucleotide
cugcaaaacaacacaaggg

SEQ ID NO: 3171717 - RNA, 19 nt, Artificial Sequence
  Description of Artificial Sequence: Synthetic oligonucleotide
aaccaccuagaguugcucc

SEQ ID NO: 3171718 - RNA, 19 nt, Artificial Sequence
  Description of Artificial Sequence: Synthetic oligonucleotide
agaggaaacauuaauuguc

SEQ ID NO: 3171719 - RNA, 19 nt, Artificial Sequence
  Description of Artificial Sequence: Synthetic oligonucleotide
aaaggcucaguguugaaaa

SEQ ID NO: 3171720 - RNA, 19 nt, Artificial Sequence
  Description of Artificial Sequence: Synthetic oligonucleotide
uauaaagcagucacuguac

SEQ ID NO: 3171721 - RNA, 19 nt, Artificial Sequence
  Description of Artificial Sequence: Synthetic oligonucleotide
uuugcuuuugccugccagg

SEQ ID NO: 3171722 - RNA, 19 nt, Artificial Sequence
  Description of Artificial Sequence: Synthetic oligonucleotide
gaaacauuaauuguccuca

SEQ ID NO: 3171723 - RNA, 19 nt, Artificial Sequence
  Description of Artificial Sequence: Synthetic oligonucleotide
ugaagcagaggaaacauua

SEQ ID NO: 3171724 - RNA, 19 nt, Artificial Sequence
  Description of Artificial Sequence: Synthetic oligonucleotide
agucacuguacuuacacca

SEQ ID NO: 3171725 - RNA, 19 nt, Artificial Sequence
  Description of Artificial Sequence: Synthetic oligonucleotide
aaacaccauacccagacau

SEQ ID NO: 3171726 - RNA, 19 nt, Artificial Sequence
  Description of Artificial Sequence: Synthetic oligonucleotide
aaggggaagcaucuggcuc

SEQ ID NO: 3171727 - RNA, 19 nt, Artificial Sequence
  Description of Artificial Sequence: Synthetic oligonucleotide
gugauacuuaaacauggcg

SEQ ID NO: 3171728 - RNA, 19 nt, Artificial Sequence
  Description of Artificial Sequence: Synthetic oligonucleotide
aaacaacacaaggggaagc

SEQ ID NO: 3171729 - RNA, 19 nt, Artificial Sequence
  Description of Artificial Sequence: Synthetic oligonucleotide
uuuucaucagaaaggcuca

SEQ ID NO: 3171730 - RNA, 19 nt, Artificial Sequence
  Description of Artificial Sequence: Synthetic oligonucleotide
ucaggucacaaccaccuag

SEQ ID NO: 3171731 - RNA, 19 nt, Artificial Sequence
  Description of Artificial Sequence: Synthetic oligonucleotide
acauauaaagcagucacug

SEQ ID NO: 3171732 - RNA, 19 nt, Artificial Sequence
  Description of Artificial Sequence: Synthetic oligonucleotide
uuugauugauaauucgcac

SEQ ID NO: 3171733 - RNA, 19 nt, Artificial Sequence
  Description of Artificial Sequence: Synthetic oligonucleotide
ugacuaagcuucuauuugc

SEQ ID NO: 3171734 - RNA, 19 nt, Artificial Sequence
  Description of Artificial Sequence: Synthetic oligonucleotide
aaaacaacacaaggggaag

SEQ ID NO: 3171735 - RNA, 19 nt, Artificial Sequence
  Description of Artificial Sequence: Synthetic oligonucleotide
uugauugauaauucgcacu

SEQ ID NO: 3171736 - RNA, 19 nt, Artificial Sequence
  Description of Artificial Sequence: Synthetic oligonucleotide
auauaaagcagucacugua

SEQ ID NO: 3171737 - RNA, 19 nt, Artificial Sequence
  Description of Artificial Sequence: Synthetic oligonucleotide
ucugcaaaggucaacccaa

SEQ ID NO: 3171738 - RNA, 19 nt, Artificial Sequence
  Description of Artificial Sequence: Synthetic oligonucleotide
ugauugauaauucgcacuu

SEQ ID NO: 3171739 - RNA, 19 nt, Artificial Sequence
  Description of Artificial Sequence: Synthetic oligonucleotide
aagcagucacuguacuuac

SEQ ID NO: 3171740 - RNA, 19 nt, Artificial Sequence
  Description of Artificial Sequence: Synthetic oligonucleotide
uggccugugauacuuaaac

SEQ ID NO: 3171741 - RNA, 19 nt, Artificial Sequence
  Description of Artificial Sequence: Synthetic oligonucleotide
aaacauuaauuguccucag

SEQ ID NO: 3171742 - RNA, 19 nt, Artificial Sequence
  Description of Artificial Sequence: Synthetic oligonucleotide
ugugauacuuaaacauggc

SEQ ID NO: 3171743 - RNA, 19 nt, Artificial Sequence
  Description of Artificial Sequence: Synthetic oligonucleotide
uagaguugcuccuaaccag

SEQ ID NO: 3171744 - RNA, 19 nt, Artificial Sequence
  Description of Artificial Sequence: Synthetic oligonucleotide
guuuugauugauaauucgc

SEQ ID NO: 3171745 - RNA, 19 nt, Artificial Sequence
  Description of Artificial Sequence: Synthetic oligonucleotide
ugaaaaccagugcacauau

SEQ ID NO: 3171746 - RNA, 19 nt, Artificial Sequence
  Description of Artificial Sequence: Synthetic oligonucleotide
ucucaggucacaaccaccu

SEQ ID NO: 3171747 - RNA, 19 nt, Artificial Sequence
  Description of Artificial Sequence: Synthetic oligonucleotide
ucaccuuaucacaugguga

SEQ ID NO: 3171748 - RNA, 19 nt, Artificial Sequence
  Description of Artificial Sequence: Synthetic oligonucleotide
ucagugguagagcacuugc

SEQ ID NO: 3171749 - RNA, 19 nt, Artificial Sequence
  Description of Artificial Sequence: Synthetic oligonucleotide
uggcucauuccauugaaug

SEQ ID NO: 3171750 - RNA, 19 nt, Artificial Sequence
  Description of Artificial Sequence: Synthetic oligonucleotide
aauuguccucagucacucc

SEQ ID NO: 3171751 - RNA, 19 nt, Artificial Sequence
  Description of Artificial Sequence: Synthetic oligonucleotide
aaggcucaguguugaaaac

SEQ ID NO: 3171752 - RNA, 19 nt, Artificial Sequence
  Description of Artificial Sequence: Synthetic oligonucleotide
accagugcacauauaaagc

SEQ ID NO: 3171753 - RNA, 19 nt, Artificial Sequence
  Description of Artificial Sequence: Synthetic oligonucleotide
ucuauuugcuuuugccugc

SEQ ID NO: 3171754 - RNA, 19 nt, Artificial Sequence
  Description of Artificial Sequence: Synthetic oligonucleotide
gaggaaacauuaauugucc

SEQ ID NO: 3171755 - RNA, 19 nt, Artificial Sequence
  Description of Artificial Sequence: Synthetic oligonucleotide
aacauuaauuguccucagu

SEQ ID NO: 3171756 - RNA, 19 nt, Artificial Sequence
  Description of Artificial Sequence: Synthetic oligonucleotide
uuaauuguccucagucacu

SEQ ID NO: 3171757 - RNA, 19 nt, Artificial Sequence
  Description of Artificial Sequence: Synthetic oligonucleotide
aaagcagucacuguacuua

SEQ ID NO: 3171758 - RNA, 19 nt, Artificial Sequence
  Description of Artificial Sequence: Synthetic oligonucleotide
aucagaaaggcucaguguu

SEQ ID NO: 3171759 - RNA, 19 nt, Artificial Sequence
  Description of Artificial Sequence: Synthetic oligonucleotide
uucugcaaaggucaaccca

SEQ ID NO: 3171760 - RNA, 19 nt, Artificial Sequence
  Description of Artificial Sequence: Synthetic oligonucleotide
gucacaaccaccuagaguu

SEQ ID NO: 3171761 - RNA, 19 nt, Artificial Sequence
  Description of Artificial Sequence: Synthetic oligonucleotide
gcagaggaaacauuaauug

SEQ ID NO: 3171762 - RNA, 19 nt, Artificial Sequence
  Description of Artificial Sequence: Synthetic oligonucleotide
gaugucagaagcagugggg

SEQ ID NO: 3171763 - RNA, 19 nt, Artificial Sequence
  Description of Artificial Sequence: Synthetic oligonucleotide
auuugcuuuugccugccag

SEQ ID NO: 3171764 - RNA, 19 nt, Artificial Sequence
  Description of Artificial Sequence: Synthetic oligonucleotide
ugguagagcacuugcuuag

SEQ ID NO: 3171765 - RNA, 19 nt, Artificial Sequence
  Description of Artificial Sequence: Synthetic oligonucleotide
uugcuccuaaccagaaggg

SEQ ID NO: 3171766 - RNA, 19 nt, Artificial Sequence
  Description of Artificial Sequence: Synthetic oligonucleotide
uuaaacauggcgacauuuu

SEQ ID NO: 3171767 - RNA, 19 nt, Artificial Sequence
  Description of Artificial Sequence: Synthetic oligonucleotide
aagcagaggaaacauuaau

SEQ ID NO: 3171768 - RNA, 19 nt, Artificial Sequence
  Description of Artificial Sequence: Synthetic oligonucleotide
caccuuaucacauggugac

SEQ ID NO: 3171769 - RNA, 19 nt, Artificial Sequence
  Description of Artificial Sequence: Synthetic oligonucleotide
cugacuaagcuucuauuug

SEQ ID NO: 3171770 - RNA, 19 nt, Artificial Sequence
  Description of Artificial Sequence: Synthetic oligonucleotide
aagcaucuggcucauucca

SEQ ID NO: 3171771 - RNA, 19 nt, Artificial Sequence
  Description of Artificial Sequence: Synthetic oligonucleotide
gaagcaucuggcucauucc

SEQ ID NO: 3171772 - RNA, 19 nt, Artificial Sequence
  Description of Artificial Sequence: Synthetic oligonucleotide
ucagaaaggcucaguguug

SEQ ID NO: 3171773 - RNA, 19 nt, Artificial Sequence
  Description of Artificial Sequence: Synthetic oligonucleotide
uguugaaaaccagugcaca

SEQ ID NO: 3171774 - RNA, 19 nt, Artificial Sequence
  Description of Artificial Sequence: Synthetic oligonucleotide
aacaacacaaggggaagca

SEQ ID NO: 3171775 - RNA, 19 nt, Artificial Sequence
  Description of Artificial Sequence: Synthetic oligonucleotide
acaucaauguuuugauuga

SEQ ID NO: 3171776 - RNA, 19 nt, Artificial Sequence
  Description of Artificial Sequence: Synthetic oligonucleotide
aggcucaguguugaaaacc

SEQ ID NO: 3171777 - RNA, 19 nt, Artificial Sequence
  Description of Artificial Sequence: Synthetic oligonucleotide
auugauaauucgcacuuuu

SEQ ID NO: 3171778 - RNA, 19 nt, Artificial Sequence
  Description of Artificial Sequence: Synthetic oligonucleotide
gucaccuuaucacauggug

SEQ ID NO: 3171779 - RNA, 19 nt, Artificial Sequence
  Description of Artificial Sequence: Synthetic oligonucleotide
ugaucucaggucacaacca

SEQ ID NO: 3171780 - RNA, 19 nt, Artificial Sequence
  Description of Artificial Sequence: Synthetic oligonucleotide
cuguacuuacaccaugaag

SEQ ID NO: 3171781 - RNA, 19 nt, Artificial Sequence
  Description of Artificial Sequence: Synthetic oligonucleotide
caaaacaacacaaggggaa

SEQ ID NO: 3171782 - RNA, 19 nt, Artificial Sequence
  Description of Artificial Sequence: Synthetic oligonucleotide
acuuacaccaugaagcaga

SEQ ID NO: 3171783 - RNA, 19 nt, Artificial Sequence
  Description of Artificial Sequence: Synthetic oligonucleotide
ccugcaaaacaacacaagg

SEQ ID NO: 3171784 - RNA, 19 nt, Artificial Sequence
  Description of Artificial Sequence: Synthetic oligonucleotide
auauauauggcucaugucc

SEQ ID NO: 3171785 - RNA, 19 nt, Artificial Sequence
  Description of Artificial Sequence: Synthetic oligonucleotide
aauaugauaaaguuuaugu

SEQ ID NO: 3171786 - RNA, 19 nt, Artificial Sequence
  Description of Artificial Sequence: Synthetic oligonucleotide
acaaacaagguuuuaaucc

SEQ ID NO: 3171787 - RNA, 19 nt, Artificial Sequence
  Description of Artificial Sequence: Synthetic oligonucleotide
uuuauuauuauuauuauua

SEQ ID NO: 3171788 - RNA, 19 nt, Artificial Sequence
  Description of Artificial Sequence: Synthetic oligonucleotide
uguaccauaaauaugauaa

SEQ ID NO: 3171789 - RNA, 19 nt, Artificial Sequence
  Description of Artificial Sequence: Synthetic oligonucleotide
aagagcauuaguuaguagg

SEQ ID NO: 3171790 - RNA, 19 nt, Artificial Sequence
  Description of Artificial Sequence: Synthetic oligonucleotide
aacguauucaaagagaagg

SEQ ID NO: 3171791 - RNA, 19 nt, Artificial Sequence
  Description of Artificial Sequence: Synthetic oligonucleotide
auugacacagguuaaauuc

SEQ ID NO: 3171792 - RNA, 19 nt, Artificial Sequence
  Description of Artificial Sequence: Synthetic oligonucleotide
auuaguguucuuuugacgg

SEQ ID NO: 3171793 - RNA, 19 nt, Artificial Sequence
  Description of Artificial Sequence: Synthetic oligonucleotide
aauucaguaaagcccauuc

SEQ ID NO: 3171794 - RNA, 19 nt, Artificial Sequence
  Description of Artificial Sequence: Synthetic oligonucleotide
auaagauuaaaacguauuc

SEQ ID NO: 3171795 - RNA, 19 nt, Artificial Sequence
  Description of Artificial Sequence: Synthetic oligonucleotide
uuaaaacguauucaaagag

SEQ ID NO: 3171796 - RNA, 19 nt, Artificial Sequence
  Description of Artificial Sequence: Synthetic oligonucleotide
aaagcaaugaaagcuuucc

SEQ ID NO: 3171797 - RNA, 19 nt, Artificial Sequence
  Description of Artificial Sequence: Synthetic oligonucleotide
aaagaacuuacaauaaugg

SEQ ID NO: 3171798 - RNA, 19 nt, Artificial Sequence
  Description of Artificial Sequence: Synthetic oligonucleotide
uuauuuacaggcaugugcc

SEQ ID NO: 3171799 - RNA, 19 nt, Artificial Sequence
  Description of Artificial Sequence: Synthetic oligonucleotide
ucguguauucuuuacaggg

SEQ ID NO: 3171800 - RNA, 19 nt, Artificial Sequence
  Description of Artificial Sequence: Synthetic oligonucleotide
aauucauuaugccaucaug

SEQ ID NO: 3171801 - RNA, 19 nt, Artificial Sequence
  Description of Artificial Sequence: Synthetic oligonucleotide
ugaggauuuaaacucagga

SEQ ID NO: 3171802 - RNA, 19 nt, Artificial Sequence
  Description of Artificial Sequence: Synthetic oligonucleotide
aaugaagggaacuaugaaa

SEQ ID NO: 3171803 - RNA, 19 nt, Artificial Sequence
  Description of Artificial Sequence: Synthetic oligonucleotide
auuauuauuauuauuauua

SEQ ID NO: 3171804 - RNA, 19 nt, Artificial Sequence
  Description of Artificial Sequence: Synthetic oligonucleotide
auuauuauuauuauuauuu

SEQ ID NO: 3171805 - RNA, 19 nt, Artificial Sequence
  Description of Artificial Sequence: Synthetic oligonucleotide
auagucaucuucaagaguc

SEQ ID NO: 3171806 - RNA, 19 nt, Artificial Sequence
  Description of Artificial Sequence: Synthetic oligonucleotide
auugaagaguacugaaagc

SEQ ID NO: 3171807 - RNA, 19 nt, Artificial Sequence
  Description of Artificial Sequence: Synthetic oligonucleotide
auaaauaugauaaaguuua

SEQ ID NO: 3171808 - RNA, 19 nt, Artificial Sequence
  Description of Artificial Sequence: Synthetic oligonucleotide
uuuacauauauauggcuca

SEQ ID NO: 3171809 - RNA, 19 nt, Artificial Sequence
  Description of Artificial Sequence: Synthetic oligonucleotide
aagcaaugaaagcuuuccc

SEQ ID NO: 3171810 - RNA, 19 nt, Artificial Sequence
  Description of Artificial Sequence: Synthetic oligonucleotide
uuguuuugagaacugaaca

SEQ ID NO: 3171811 - RNA, 19 nt, Artificial Sequence
  Description of Artificial Sequence: Synthetic oligonucleotide
ugugucaagaaagaacugg

SEQ ID NO: 3171812 - RNA, 19 nt, Artificial Sequence
  Description of Artificial Sequence: Synthetic oligonucleotide
uuuucauugugauacguga

SEQ ID NO: 3171813 - RNA, 19 nt, Artificial Sequence
  Description of Artificial Sequence: Synthetic oligonucleotide
auaaaguuuauguaggaaa

SEQ ID NO: 3171814 - RNA, 19 nt, Artificial Sequence
  Description of Artificial Sequence: Synthetic oligonucleotide
ucuacuaaaaccuggcuuc

SEQ ID NO: 3171815 - RNA, 19 nt, Artificial Sequence
  Description of Artificial Sequence: Synthetic oligonucleotide
ugagaacugaacaaguaga

SEQ ID NO: 3171816 - RNA, 19 nt, Artificial Sequence
  Description of Artificial Sequence: Synthetic oligonucleotide
uaucguguauucuuuacag

SEQ ID NO: 3171817 - RNA, 19 nt, Artificial Sequence
  Description of Artificial Sequence: Synthetic oligonucleotide
agaacuggaagagagaaag

SEQ ID NO: 3171818 - RNA, 19 nt, Artificial Sequence
  Description of Artificial Sequence: Synthetic oligonucleotide
cauugaagaguacugaaag

SEQ ID NO: 3171819 - RNA, 19 nt, Artificial Sequence
  Description of Artificial Sequence: Synthetic oligonucleotide
caaagaacuuacaauaaug

SEQ ID NO: 3171820 - RNA, 19 nt, Artificial Sequence
  Description of Artificial Sequence: Synthetic oligonucleotide
uuuguaugggugcugagga

SEQ ID NO: 3171821 - RNA, 19 nt, Artificial Sequence
  Description of Artificial Sequence: Synthetic oligonucleotide
augaagggaacuaugaaac

SEQ ID NO: 3171822 - RNA, 19 nt, Artificial Sequence
  Description of Artificial Sequence: Synthetic oligonucleotide
uaaaguuuauguaggaaaa

SEQ ID NO: 3171823 - RNA, 19 nt, Artificial Sequence
  Description of Artificial Sequence: Synthetic oligonucleotide
uagcuaaccagcaagcuca

SEQ ID NO: 3171824 - RNA, 19 nt, Artificial Sequence
  Description of Artificial Sequence: Synthetic oligonucleotide
uugcuuaguauauauaggu

SEQ ID NO: 3171825 - RNA, 19 nt, Artificial Sequence
  Description of Artificial Sequence: Synthetic oligonucleotide
uucgcaaggcacuagaaca

SEQ ID NO: 3171826 - RNA, 19 nt, Artificial Sequence
  Description of Artificial Sequence: Synthetic oligonucleotide
gauuccauuacauaaggaa

SEQ ID NO: 3171827 - RNA, 19 nt, Artificial Sequence
  Description of Artificial Sequence: Synthetic oligonucleotide
auucaguaaagcccauucc

SEQ ID NO: 3171828 - RNA, 19 nt, Artificial Sequence
  Description of Artificial Sequence: Synthetic oligonucleotide
cuuuacauauauauggcuc

SEQ ID NO: 3171829 - RNA, 19 nt, Artificial Sequence
  Description of Artificial Sequence: Synthetic oligonucleotide
uauauauggcucaugucca

SEQ ID NO: 3171830 - RNA, 19 nt, Artificial Sequence
  Description of Artificial Sequence: Synthetic oligonucleotide
aauaauggagguuuccuuu

SEQ ID NO: 3171831 - RNA, 19 nt, Artificial Sequence
  Description of Artificial Sequence: Synthetic oligonucleotide
acauauauauggcucaugu

SEQ ID NO: 3171832 - RNA, 19 nt, Artificial Sequence
  Description of Artificial Sequence: Synthetic oligonucleotide
uaggaaaagagcauuaguu

SEQ ID NO: 3171833 - RNA, 19 nt, Artificial Sequence
  Description of Artificial Sequence: Synthetic oligonucleotide
uuccaauguauuuacacac

SEQ ID NO: 3171834 - RNA, 19 nt, Artificial Sequence
  Description of Artificial Sequence: Synthetic oligonucleotide
uaccauaaauaugauaaag

SEQ ID NO: 3171835 - RNA, 19 nt, Artificial Sequence
  Description of Artificial Sequence: Synthetic oligonucleotide
guuguuuuaguuaauaaga

SEQ ID NO: 3171836 - RNA, 19 nt, Artificial Sequence
  Description of Artificial Sequence: Synthetic oligonucleotide
uuagagauacgcuccaaug

SEQ ID NO: 3171837 - RNA, 19 nt, Artificial Sequence
  Description of Artificial Sequence: Synthetic oligonucleotide
caucauguuugcuacaaag

SEQ ID NO: 3171838 - RNA, 19 nt, Artificial Sequence
  Description of Artificial Sequence: Synthetic oligonucleotide
uauggauccuuucaugaca

SEQ ID NO: 3171839 - RNA, 19 nt, Artificial Sequence
  Description of Artificial Sequence: Synthetic oligonucleotide
cuuaguauauauagguuuc

SEQ ID NO: 3171840 - RNA, 19 nt, Artificial Sequence
  Description of Artificial Sequence: Synthetic oligonucleotide
acaaguagagauaaucccg

SEQ ID NO: 3171841 - RNA, 19 nt, Artificial Sequence
  Description of Artificial Sequence: Synthetic oligonucleotide
uguucuuucaugugucaag

SEQ ID NO: 3171842 - RNA, 19 nt, Artificial Sequence
  Description of Artificial Sequence: Synthetic oligonucleotide
uuauuauuauuauuauuau

SEQ ID NO: 3171843 - RNA, 19 nt, Artificial Sequence
  Description of Artificial Sequence: Synthetic oligonucleotide
aaguuuauguaggaaaaga

SEQ ID NO: 3171844 - RNA, 19 nt, Artificial Sequence
  Description of Artificial Sequence: Synthetic oligonucleotide
uuccauuacauaaggaaaa

SEQ ID NO: 3171845 - RNA, 19 nt, Artificial Sequence
  Description of Artificial Sequence: Synthetic oligonucleotide
uauaaagcuguucuccagu

SEQ ID NO: 3171846 - RNA, 19 nt, Artificial Sequence
  Description of Artificial Sequence: Synthetic oligonucleotide
uuaaauauucauagucauc

SEQ ID NO: 3171847 - RNA, 19 nt, Artificial Sequence
  Description of Artificial Sequence: Synthetic oligonucleotide
aaaguuuauguaggaaaag

SEQ ID NO: 3171848 - RNA, 19 nt, Artificial Sequence
  Description of Artificial Sequence: Synthetic oligonucleotide
guacugaaagcaaugaaag

SEQ ID NO: 3171849 - RNA, 19 nt, Artificial Sequence
  Description of Artificial Sequence: Synthetic oligonucleotide
uguuaugugcuguugagua

SEQ ID NO: 3171850 - RNA, 19 nt, Artificial Sequence
  Description of Artificial Sequence: Synthetic oligonucleotide
auccucgaaggauacagac

SEQ ID NO: 3171851 - RNA, 19 nt, Artificial Sequence
  Description of Artificial Sequence: Synthetic oligonucleotide
aaaacacaagauucuucug

SEQ ID NO: 3171852 - RNA, 19 nt, Artificial Sequence
  Description of Artificial Sequence: Synthetic oligonucleotide
guagagauaaucccgcaug

SEQ ID NO: 3171853 - RNA, 19 nt, Artificial Sequence
  Description of Artificial Sequence: Synthetic oligonucleotide
uagagauacgcuccaaugu

SEQ ID NO: 3171854 - RNA, 19 nt, Artificial Sequence
  Description of Artificial Sequence: Synthetic oligonucleotide
gaauaagugaagguuuugc

SEQ ID NO: 3171855 - RNA, 19 nt, Artificial Sequence
  Description of Artificial Sequence: Synthetic oligonucleotide
uccuuuguucuauauuuag

SEQ ID NO: 3171856 - RNA, 19 nt, Artificial Sequence
  Description of Artificial Sequence: Synthetic oligonucleotide
agggauuugaacauaacug

SEQ ID NO: 3171857 - RNA, 19 nt, Artificial Sequence
  Description of Artificial Sequence: Synthetic oligonucleotide
gaaggauacagacuccaug

SEQ ID NO: 3171858 - RNA, 19 nt, Artificial Sequence
  Description of Artificial Sequence: Synthetic oligonucleotide
uguguuaugugcuguugag

SEQ ID NO: 3171859 - RNA, 19 nt, Artificial Sequence
  Description of Artificial Sequence: Synthetic oligonucleotide
agagauacgcuccaaugug

SEQ ID NO: 3171860 - RNA, 19 nt, Artificial Sequence
  Description of Artificial Sequence: Synthetic oligonucleotide
uuaguguucuuuugacggg

SEQ ID NO: 3171861 - RNA, 19 nt, Artificial Sequence
  Description of Artificial Sequence: Synthetic oligonucleotide
uuuuauuauuauuauuauu

SEQ ID NO: 3171862 - RNA, 19 nt, Artificial Sequence
  Description of Artificial Sequence: Synthetic oligonucleotide
auagguuucucuaagaaau

SEQ ID NO: 3171863 - RNA, 19 nt, Artificial Sequence
  Description of Artificial Sequence: Synthetic oligonucleotide
uguucuuuugacgggaacc

SEQ ID NO: 3171864 - RNA, 19 nt, Artificial Sequence
  Description of Artificial Sequence: Synthetic oligonucleotide
uuauuauuauuauuauuuu

SEQ ID NO: 3171865 - RNA, 19 nt, Artificial Sequence
  Description of Artificial Sequence: Synthetic oligonucleotide
uauuauuauuauuauuauu

SEQ ID NO: 3171866 - RNA, 19 nt, Artificial Sequence
  Description of Artificial Sequence: Synthetic oligonucleotide
uauagguuucucuaagaaa

SEQ ID NO: 3171867 - RNA, 19 nt, Artificial Sequence
  Description of Artificial Sequence: Synthetic oligonucleotide
aaacgugaaggcuuuucca

SEQ ID NO: 3171868 - RNA, 19 nt, Artificial Sequence
  Description of Artificial Sequence: Synthetic oligonucleotide
agaaccaugaguacuguag

SEQ ID NO: 3171869 - RNA, 19 nt, Artificial Sequence
  Description of Artificial Sequence: Synthetic oligonucleotide
uagagauaaucccgcaugc

SEQ ID NO: 3171870 - RNA, 19 nt, Artificial Sequence
  Description of Artificial Sequence: Synthetic oligonucleotide
guagcuuuggagccuaucc

SEQ ID NO: 3171871 - RNA, 19 nt, Artificial Sequence
  Description of Artificial Sequence: Synthetic oligonucleotide
uuaguaggauuccauuaca

SEQ ID NO: 3171872 - RNA, 19 nt, Artificial Sequence
  Description of Artificial Sequence: Synthetic oligonucleotide
uauauagguuucucuaaga

SEQ ID NO: 3171873 - RNA, 19 nt, Artificial Sequence
  Description of Artificial Sequence: Synthetic oligonucleotide
ucccgcaugcuuuacauug

SEQ ID NO: 3171874 - RNA, 19 nt, Artificial Sequence
  Description of Artificial Sequence: Synthetic oligonucleotide
auacagacuccauggcugc

SEQ ID NO: 3171875 - RNA, 19 nt, Artificial Sequence
  Description of Artificial Sequence: Synthetic oligonucleotide
uugacacagguuaaauuca

SEQ ID NO: 3171876 - RNA, 19 nt, Artificial Sequence
  Description of Artificial Sequence: Synthetic oligonucleotide
ugcaaugggaagaauuuuc

SEQ ID NO: 3171877 - RNA, 19 nt, Artificial Sequence
  Description of Artificial Sequence: Synthetic oligonucleotide
ggcuuauucacauugcuug

SEQ ID NO: 3171878 - RNA, 19 nt, Artificial Sequence
  Description of Artificial Sequence: Synthetic oligonucleotide
aaaaccuggcuucucugca

SEQ ID NO: 3171879 - RNA, 19 nt, Artificial Sequence
  Description of Artificial Sequence: Synthetic oligonucleotide
uguuguuuugagaacugaa

SEQ ID NO: 3171880 - RNA, 19 nt, Artificial Sequence
  Description of Artificial Sequence: Synthetic oligonucleotide
uguguagccucuuuuggga

SEQ ID NO: 3171881 - RNA, 19 nt, Artificial Sequence
  Description of Artificial Sequence: Synthetic oligonucleotide
aaauucauuaugccaucau

SEQ ID NO: 3171882 - RNA, 19 nt, Artificial Sequence
  Description of Artificial Sequence: Synthetic oligonucleotide
uggcucauguccauuaugu

SEQ ID NO: 3171883 - RNA, 19 nt, Artificial Sequence
  Description of Artificial Sequence: Synthetic oligonucleotide
ucuuuugacgggaaccaga

SEQ ID NO: 3171884 - RNA, 19 nt, Artificial Sequence
  Description of Artificial Sequence: Synthetic oligonucleotide
aucuucuucauccugacgc

SEQ ID NO: 3171885 - RNA, 19 nt, Artificial Sequence
  Description of Artificial Sequence: Synthetic oligonucleotide
uuugagaagucgaugaccg

SEQ ID NO: 3171886 - RNA, 19 nt, Artificial Sequence
  Description of Artificial Sequence: Synthetic oligonucleotide
uucauccugacgcagaagg

SEQ ID NO: 3171887 - RNA, 19 nt, Artificial Sequence
  Description of Artificial Sequence: Synthetic oligonucleotide
ucuagcuucguuccgauug

SEQ ID NO: 3171888 - RNA, 19 nt, Artificial Sequence
  Description of Artificial Sequence: Synthetic oligonucleotide
uuuucuuucuuucuuuucu

SEQ ID NO: 3171889 - RNA, 19 nt, Artificial Sequence
  Description of Artificial Sequence: Synthetic oligonucleotide
uuuucuuuucuuuucuuug

SEQ ID NO: 3171890 - RNA, 19 nt, Artificial Sequence
  Description of Artificial Sequence: Synthetic oligonucleotide
uuucuuuucuuugagaagu

SEQ ID NO: 3171891 - RNA, 19 nt, Artificial Sequence
  Description of Artificial Sequence: Synthetic oligonucleotide
uucuuugagaagucgauga

SEQ ID NO: 3171892 - RNA, 19 nt, Artificial Sequence
  Description of Artificial Sequence: Synthetic oligonucleotide
uaagauggcagccuccgcc

SEQ ID NO: 3171893 - RNA, 19 nt, Artificial Sequence
  Description of Artificial Sequence: Synthetic oligonucleotide
uccgauuguaagauggcag

SEQ ID NO: 3171894 - RNA, 19 nt, Artificial Sequence
  Description of Artificial Sequence: Synthetic oligonucleotide
uuuucuuuucuuugagaag

SEQ ID NO: 3171895 - RNA, 19 nt, Artificial Sequence
  Description of Artificial Sequence: Synthetic oligonucleotide
auuguaagauggcagccuc

SEQ ID NO: 3171896 - RNA, 19 nt, Artificial Sequence
  Description of Artificial Sequence: Synthetic oligonucleotide
cucggaaucccguaggucc

SEQ ID NO: 3171897 - RNA, 19 nt, Artificial Sequence
  Description of Artificial Sequence: Synthetic oligonucleotide
aagcagaacugcaagcucg

SEQ ID NO: 3171898 - RNA, 19 nt, Artificial Sequence
  Description of Artificial Sequence: Synthetic oligonucleotide
uucuuuucuuuucuuugag

SEQ ID NO: 3171899 - RNA, 19 nt, Artificial Sequence
  Description of Artificial Sequence: Synthetic oligonucleotide
uguaagauggcagccuccg

SEQ ID NO: 3171900 - RNA, 19 nt, Artificial Sequence
  Description of Artificial Sequence: Synthetic oligonucleotide
cagaaggacggccagaccc

SEQ ID NO: 3171901 - RNA, 19 nt, Artificial Sequence
  Description of Artificial Sequence: Synthetic oligonucleotide
uuucuuuucuuuucuuuga

SEQ ID NO: 3171902 - RNA, 19 nt, Artificial Sequence
  Description of Artificial Sequence: Synthetic oligonucleotide
aacugcaagcucggaaucc

SEQ ID NO: 3171903 - RNA, 19 nt, Artificial Sequence
  Description of Artificial Sequence: Synthetic oligonucleotide
aaucccguagguccuuccg

SEQ ID NO: 3171904 - RNA, 19 nt, Artificial Sequence
  Description of Artificial Sequence: Synthetic oligonucleotide
gaagcggaaaagcuuccgg

SEQ ID NO: 3171905 - RNA, 19 nt, Artificial Sequence
  Description of Artificial Sequence: Synthetic oligonucleotide
uuuucuuugagaagucgau

SEQ ID NO: 3171906 - RNA, 19 nt, Artificial Sequence
  Description of Artificial Sequence: Synthetic oligonucleotide
uuucuuucuuuucuuuucu

SEQ ID NO: 3171907 - RNA, 19 nt, Artificial Sequence
  Description of Artificial Sequence: Synthetic oligonucleotide
cuuuucuuuucuuugagaa

SEQ ID NO: 3171908 - RNA, 19 nt, Artificial Sequence
  Description of Artificial Sequence: Synthetic oligonucleotide
ucuuuucuuugagaagucg

SEQ ID NO: 3171909 - RNA, 19 nt, Artificial Sequence
  Description of Artificial Sequence: Synthetic oligonucleotide
uucuuuucuuuucuuuucu

SEQ ID NO: 3171910 - RNA, 19 nt, Artificial Sequence
  Description of Artificial Sequence: Synthetic oligonucleotide
agaacugcaagcucggaau

SEQ ID NO: 3171911 - RNA, 19 nt, Artificial Sequence
  Description of Artificial Sequence: Synthetic oligonucleotide
aagcggaaaagcuuccgga

SEQ ID NO: 3171912 - RNA, 19 nt, Artificial Sequence
  Description of Artificial Sequence: Synthetic oligonucleotide
cuuucuuucuuuucuuuuc

SEQ ID NO: 3171913 - RNA, 19 nt, Artificial Sequence
  Description of Artificial Sequence: Synthetic oligonucleotide
uuucuuuucuuuucuuuuc

SEQ ID NO: 3171914 - RNA, 19 nt, Artificial Sequence
  Description of Artificial Sequence: Synthetic oligonucleotide
aaagcuuccggaaggcguc

SEQ ID NO: 3171915 - RNA, 19 nt, Artificial Sequence
  Description of Artificial Sequence: Synthetic oligonucleotide
aaaagcuuccggaaggcgu

SEQ ID NO: 3171916 - RNA, 19 nt, Artificial Sequence
  Description of Artificial Sequence: Synthetic oligonucleotide
aagcucggaaucccguagg

SEQ ID NO: 3171917 - RNA, 19 nt, Artificial Sequence
  Description of Artificial Sequence: Synthetic oligonucleotide
ucuuuucuuuucuuugaga

SEQ ID NO: 3171918 - RNA, 19 nt, Artificial Sequence
  Description of Artificial Sequence: Synthetic oligonucleotide
cuuugagaagucgaugacc

SEQ ID NO: 3171919 - RNA, 19 nt, Artificial Sequence
  Description of Artificial Sequence: Synthetic oligonucleotide
ugagaagucgaugaccgcu

SEQ ID NO: 3171920 - RNA, 19 nt, Artificial Sequence
  Description of Artificial Sequence: Synthetic oligonucleotide
ucgaugaccgcucccaggu

SEQ ID NO: 3171921 - RNA, 19 nt, Artificial Sequence
  Description of Artificial Sequence: Synthetic oligonucleotide
ucuuugagaagucgaugac

SEQ ID NO: 3171922 - RNA, 19 nt, Artificial Sequence
  Description of Artificial Sequence: Synthetic oligonucleotide
agaagucgaugaccgcucc

SEQ ID NO: 3171923 - RNA, 19 nt, Artificial Sequence
  Description of Artificial Sequence: Synthetic oligonucleotide
acugcaagcucggaauccc

SEQ ID NO: 3171924 - RNA, 19 nt, Artificial Sequence
  Description of Artificial Sequence: Synthetic oligonucleotide
uccugacgcagaaggacgg

SEQ ID NO: 3171925 - RNA, 19 nt, Artificial Sequence
  Description of Artificial Sequence: Synthetic oligonucleotide
uuucuuugagaagucgaug

SEQ ID NO: 3171926 - RNA, 19 nt, Artificial Sequence
  Description of Artificial Sequence: Synthetic oligonucleotide
ucuuucuuuucuuuucuuu

SEQ ID NO: 3171927 - RNA, 19 nt, Artificial Sequence
  Description of Artificial Sequence: Synthetic oligonucleotide
cuuuucuuugagaagucga

SEQ ID NO: 3171928 - RNA, 19 nt, Artificial Sequence
  Description of Artificial Sequence: Synthetic oligonucleotide
ucuucuucauccugacgca

SEQ ID NO: 3171929 - RNA, 19 nt, Artificial Sequence
  Description of Artificial Sequence: Synthetic oligonucleotide
guagaagcggaaaagcuuc

SEQ ID NO: 3171930 - RNA, 19 nt, Artificial Sequence
  Description of Artificial Sequence: Synthetic oligonucleotide
aacgaagccacggccgccg

SEQ ID NO: 3171931 - RNA, 19 nt, Artificial Sequence
  Description of Artificial Sequence: Synthetic oligonucleotide
ucuuucuuucuuuucuuuu

SEQ ID NO: 3171932 - RNA, 19 nt, Artificial Sequence
  Description of Artificial Sequence: Synthetic oligonucleotide
gaaaagcuuccggaaggcg

SEQ ID NO: 3171933 - RNA, 19 nt, Artificial Sequence
  Description of Artificial Sequence: Synthetic oligonucleotide
uccucuccagguucugucg

SEQ ID NO: 3171934 - RNA, 19 nt, Artificial Sequence
  Description of Artificial Sequence: Synthetic oligonucleotide
ucccguagguccuuccggg

SEQ ID NO: 3171935 - RNA, 19 nt, Artificial Sequence
  Description of Artificial Sequence: Synthetic oligonucleotide
uucuucauccugacgcaga

SEQ ID NO: 3171936 - RNA, 19 nt, Artificial Sequence
  Description of Artificial Sequence: Synthetic oligonucleotide
uuguaagauggcagccucc

SEQ ID NO: 3171937 - RNA, 19 nt, Artificial Sequence
  Description of Artificial Sequence: Synthetic oligonucleotide
ucuucauccugacgcagaa

SEQ ID NO: 3171938 - RNA, 19 nt, Artificial Sequence
  Description of Artificial Sequence: Synthetic oligonucleotide
ucugucgccagcguggcga

SEQ ID NO: 3171939 - RNA, 19 nt, Artificial Sequence
  Description of Artificial Sequence: Synthetic oligonucleotide
aagucgaugaccgcuccca

SEQ ID NO: 3171940 - RNA, 19 nt, Artificial Sequence
  Description of Artificial Sequence: Synthetic oligonucleotide
gccgccaucuucuucaucc

SEQ ID NO: 3171941 - RNA, 19 nt, Artificial Sequence
  Description of Artificial Sequence: Synthetic oligonucleotide
gaagcagaacugcaagcuc

SEQ ID NO: 3171942 - RNA, 19 nt, Artificial Sequence
  Description of Artificial Sequence: Synthetic oligonucleotide
uagaagcggaaaagcuucc

SEQ ID NO: 3171943 - RNA, 19 nt, Artificial Sequence
  Description of Artificial Sequence: Synthetic oligonucleotide
uuucuuucuuucuuuucuu

SEQ ID NO: 3171944 - RNA, 19 nt, Artificial Sequence
  Description of Artificial Sequence: Synthetic oligonucleotide
uucguuccgauuguaagau

SEQ ID NO: 3171945 - RNA, 19 nt, Artificial Sequence
  Description of Artificial Sequence: Synthetic oligonucleotide
aucccguagguccuuccgg

SEQ ID NO: 3171946 - RNA, 19 nt, Artificial Sequence
  Description of Artificial Sequence: Synthetic oligonucleotide
ugacgcagaaggacggcca

SEQ ID NO: 3171947 - RNA, 19 nt, Artificial Sequence
  Description of Artificial Sequence: Synthetic oligonucleotide
ucauccugacgcagaagga

SEQ ID NO: 3171948 - RNA, 19 nt, Artificial Sequence
  Description of Artificial Sequence: Synthetic oligonucleotide
uucuuuucuuugagaaguc

SEQ ID NO: 3171949 - RNA, 19 nt, Artificial Sequence
  Description of Artificial Sequence: Synthetic oligonucleotide
cguuccgauuguaagaugg

SEQ ID NO: 3171950 - RNA, 19 nt, Artificial Sequence
  Description of Artificial Sequence: Synthetic oligonucleotide
cuucguuccgauuguaaga

SEQ ID NO: 3171951 - RNA, 19 nt, Artificial Sequence
  Description of Artificial Sequence: Synthetic oligonucleotide
uuccgauuguaagauggca

SEQ ID NO: 3171952 - RNA, 19 nt, Artificial Sequence
  Description of Artificial Sequence: Synthetic oligonucleotide
gcuucguuccgauuguaag

SEQ ID NO: 3171953 - RNA, 19 nt, Artificial Sequence
  Description of Artificial Sequence: Synthetic oligonucleotide
auccugacgcagaaggacg

SEQ ID NO: 3171954 - RNA, 19 nt, Artificial Sequence
  Description of Artificial Sequence: Synthetic oligonucleotide
agaagcggaaaagcuuccg

SEQ ID NO: 3171955 - RNA, 19 nt, Artificial Sequence
  Description of Artificial Sequence: Synthetic oligonucleotide
caagcucggaaucccguag

SEQ ID NO: 3171956 - RNA, 19 nt, Artificial Sequence
  Description of Artificial Sequence: Synthetic oligonucleotide
gacggccagacccggaagc

SEQ ID NO: 3171957 - RNA, 19 nt, Artificial Sequence
  Description of Artificial Sequence: Synthetic oligonucleotide
uucuuucuuucuuuucuuu

SEQ ID NO: 3171958 - RNA, 19 nt, Artificial Sequence
  Description of Artificial Sequence: Synthetic oligonucleotide
agcggaaaagcuuccggaa

SEQ ID NO: 3171959 - RNA, 19 nt, Artificial Sequence
  Description of Artificial Sequence: Synthetic oligonucleotide
cauccugacgcagaaggac

SEQ ID NO: 3171960 - RNA, 19 nt, Artificial Sequence
  Description of Artificial Sequence: Synthetic oligonucleotide
ugcaagcucggaaucccgu

SEQ ID NO: 3171961 - RNA, 19 nt, Artificial Sequence
  Description of Artificial Sequence: Synthetic oligonucleotide
ucuuuucuuuucuuuucuu

SEQ ID NO: 3171962 - RNA, 19 nt, Artificial Sequence
  Description of Artificial Sequence: Synthetic oligonucleotide
agaaggacggccagacccg

SEQ ID NO: 3171963 - RNA, 19 nt, Artificial Sequence
  Description of Artificial Sequence: Synthetic oligonucleotide
gguucugucgccagcgugg

SEQ ID NO: 3171964 - RNA, 19 nt, Artificial Sequence
  Description of Artificial Sequence: Synthetic oligonucleotide
gacgcagaaggacggccag

SEQ ID NO: 3171965 - RNA, 19 nt, Artificial Sequence
  Description of Artificial Sequence: Synthetic oligonucleotide
aagcuuccggaaggcgucc

SEQ ID NO: 3171966 - RNA, 19 nt, Artificial Sequence
  Description of Artificial Sequence: Synthetic oligonucleotide
gucgaugaccgcucccagg

SEQ ID NO: 3171967 - RNA, 19 nt, Artificial Sequence
  Description of Artificial Sequence: Synthetic oligonucleotide
gaagucgaugaccgcuccc

SEQ ID NO: 3171968 - RNA, 19 nt, Artificial Sequence
  Description of Artificial Sequence: Synthetic oligonucleotide
uugagaagucgaugaccgc

SEQ ID NO: 3171969 - RNA, 19 nt, Artificial Sequence
  Description of Artificial Sequence: Synthetic oligonucleotide
caucuucuucauccugacg

SEQ ID NO: 3171970 - RNA, 19 nt, Artificial Sequence
  Description of Artificial Sequence: Synthetic oligonucleotide
ccgauuguaagauggcagc

SEQ ID NO: 3171971 - RNA, 19 nt, Artificial Sequence
  Description of Artificial Sequence: Synthetic oligonucleotide
guggcgaacgaagccacgg

SEQ ID NO: 3171972 - RNA, 19 nt, Artificial Sequence
  Description of Artificial Sequence: Synthetic oligonucleotide
ucggaaucccguagguccu

SEQ ID NO: 3171973 - RNA, 19 nt, Artificial Sequence
  Description of Artificial Sequence: Synthetic oligonucleotide
gaacugcaagcucggaauc

SEQ ID NO: 3171974 - RNA, 19 nt, Artificial Sequence
  Description of Artificial Sequence: Synthetic oligonucleotide
uccagguucugucgccagc

SEQ ID NO: 3171975 - RNA, 19 nt, Artificial Sequence
  Description of Artificial Sequence: Synthetic oligonucleotide
uccuuccggggucacgacc

SEQ ID NO: 3171976 - RNA, 19 nt, Artificial Sequence
  Description of Artificial Sequence: Synthetic oligonucleotide
uccggggucacgaccccag

SEQ ID NO: 3171977 - RNA, 19 nt, Artificial Sequence
  Description of Artificial Sequence: Synthetic oligonucleotide
uggcgaacgaagccacggc

SEQ ID NO: 3171978 - RNA, 19 nt, Artificial Sequence
  Description of Artificial Sequence: Synthetic oligonucleotide
uccggaaggcguccucucc

SEQ ID NO: 3171979 - RNA, 19 nt, Artificial Sequence
  Description of Artificial Sequence: Synthetic oligonucleotide
ugccgguagaagcggaaaa

SEQ ID NO: 3171980 - RNA, 19 nt, Artificial Sequence
  Description of Artificial Sequence: Synthetic oligonucleotide
agcagaacugcaagcucgg

SEQ ID NO: 3171981 - RNA, 19 nt, Artificial Sequence
  Description of Artificial Sequence: Synthetic oligonucleotide
aggcguccucuccagguuc

SEQ ID NO: 3171982 - RNA, 19 nt, Artificial Sequence
  Description of Artificial Sequence: Synthetic oligonucleotide
agguucugucgccagcgug

SEQ ID NO: 3171983 - RNA, 19 nt, Artificial Sequence
  Description of Artificial Sequence: Synthetic oligonucleotide
uucuuucuuuucuuuucuu

SEQ ID NO: 3171984 - RNA, 19 nt, Artificial Sequence
  Description of Artificial Sequence: Synthetic oligonucleotide
aauauuuauuuucagaagg

SEQ ID NO: 3171985 - RNA, 19 nt, Artificial Sequence
  Description of Artificial Sequence: Synthetic oligonucleotide
caaaacucuaucaaaaccg

SEQ ID NO: 3171986 - RNA, 19 nt, Artificial Sequence
  Description of Artificial Sequence: Synthetic oligonucleotide
aaauauuuauuuucagaag

SEQ ID NO: 3171987 - RNA, 19 nt, Artificial Sequence
  Description of Artificial Sequence: Synthetic oligonucleotide
ugaaagcacaagaacaugg

SEQ ID NO: 3171988 - RNA, 19 nt, Artificial Sequence
  Description of Artificial Sequence: Synthetic oligonucleotide
uauauucugagucaugcug

SEQ ID NO: 3171989 - RNA, 19 nt, Artificial Sequence
  Description of Artificial Sequence: Synthetic oligonucleotide
aaaucauacucuuaauugu

SEQ ID NO: 3171990 - RNA, 19 nt, Artificial Sequence
  Description of Artificial Sequence: Synthetic oligonucleotide
agcacaagaacauggaagg

SEQ ID NO: 3171991 - RNA, 19 nt, Artificial Sequence
  Description of Artificial Sequence: Synthetic oligonucleotide
ugugcuauuaacuuuccug

SEQ ID NO: 3171992 - RNA, 19 nt, Artificial Sequence
  Description of Artificial Sequence: Synthetic oligonucleotide
ugauaugcuaucuauuaag

SEQ ID NO: 3171993 - RNA, 19 nt, Artificial Sequence
  Description of Artificial Sequence: Synthetic oligonucleotide
aacauggaaggucaaaucu

SEQ ID NO: 3171994 - RNA, 19 nt, Artificial Sequence
  Description of Artificial Sequence: Synthetic oligonucleotide
caaaucauacucuuaauug

SEQ ID NO: 3171995 - RNA, 19 nt, Artificial Sequence
  Description of Artificial Sequence: Synthetic oligonucleotide
auuaagguugcugucaagc

SEQ ID NO: 3171996 - RNA, 19 nt, Artificial Sequence
  Description of Artificial Sequence: Synthetic oligonucleotide
ugagucaugcugcucaucg

SEQ ID NO: 3171997 - RNA, 19 nt, Artificial Sequence
  Description of Artificial Sequence: Synthetic oligonucleotide
aaaaccgggaacucugaac

SEQ ID NO: 3171998 - RNA, 19 nt, Artificial Sequence
  Description of Artificial Sequence: Synthetic oligonucleotide
uuuaaauauuuauuuucag

SEQ ID NO: 3171999 - RNA, 19 nt, Artificial Sequence
  Description of Artificial Sequence: Synthetic oligonucleotide
uugugaaagcacaagaaca

SEQ ID NO: 3172000 - RNA, 19 nt, Artificial Sequence
  Description of Artificial Sequence: Synthetic oligonucleotide
uuucauuucacaaacuaau

SEQ ID NO: 3172001 - RNA, 19 nt, Artificial Sequence
  Description of Artificial Sequence: Synthetic oligonucleotide
uuacaaaucauacucuuaa

SEQ ID NO: 3172002 - RNA, 19 nt, Artificial Sequence
  Description of Artificial Sequence: Synthetic oligonucleotide
agagccacaguugauaugc

SEQ ID NO: 3172003 - RNA, 19 nt, Artificial Sequence
  Description of Artificial Sequence: Synthetic oligonucleotide
aaugaacucuggaagagac

SEQ ID NO: 3172004 - RNA, 19 nt, Artificial Sequence
  Description of Artificial Sequence: Synthetic oligonucleotide
uguucuuccacuuucauuu

SEQ ID NO: 3172005 - RNA, 19 nt, Artificial Sequence
  Description of Artificial Sequence: Synthetic oligonucleotide
aacucuggaagagacagac

SEQ ID NO: 3172006 - RNA, 19 nt, Artificial Sequence
  Description of Artificial Sequence: Synthetic oligonucleotide
uucaugucaacacugacuc

SEQ ID NO: 3172007 - RNA, 19 nt, Artificial Sequence
  Description of Artificial Sequence: Synthetic oligonucleotide
aaaccgggaacucugaaca

SEQ ID NO: 3172008 - RNA, 19 nt, Artificial Sequence
  Description of Artificial Sequence: Synthetic oligonucleotide
uucugugcacaucagagcc

SEQ ID NO: 3172009 - RNA, 19 nt, Artificial Sequence
  Description of Artificial Sequence: Synthetic oligonucleotide
uuagcaggugacauguacg

SEQ ID NO: 3172010 - RNA, 19 nt, Artificial Sequence
  Description of Artificial Sequence: Synthetic oligonucleotide
uuuuccaaaacucuaucaa

SEQ ID NO: 3172011 - RNA, 19 nt, Artificial Sequence
  Description of Artificial Sequence: Synthetic oligonucleotide
uaucuauuaagguugcugu

SEQ ID NO: 3172012 - RNA, 19 nt, Artificial Sequence
  Description of Artificial Sequence: Synthetic oligonucleotide
gauaugcuaucuauuaagg

SEQ ID NO: 3172013 - RNA, 19 nt, Artificial Sequence
  Description of Artificial Sequence: Synthetic oligonucleotide
uauguucaugucaacacug

SEQ ID NO: 3172014 - RNA, 19 nt, Artificial Sequence
  Description of Artificial Sequence: Synthetic oligonucleotide
ugaacucuggaagagacag

SEQ ID NO: 3172015 - RNA, 19 nt, Artificial Sequence
  Description of Artificial Sequence: Synthetic oligonucleotide
cuuucugugcacaucagag

SEQ ID NO: 3172016 - RNA, 19 nt, Artificial Sequence
  Description of Artificial Sequence: Synthetic oligonucleotide
aaaacucuaucaaaaccgg

SEQ ID NO: 3172017 - RNA, 19 nt, Artificial Sequence
  Description of Artificial Sequence: Synthetic oligonucleotide
acucuuaauuguuauuggg

SEQ ID NO: 3172018 - RNA, 19 nt, Artificial Sequence
  Description of Artificial Sequence: Synthetic oligonucleotide
uaugcuaucuauuaagguu

SEQ ID NO: 3172019 - RNA, 19 nt, Artificial Sequence
  Description of Artificial Sequence: Synthetic oligonucleotide
cugaacaagaccuucauca

SEQ ID NO: 3172020 - RNA, 19 nt, Artificial Sequence
  Description of Artificial Sequence: Synthetic oligonucleotide
uuguuggucagauccaccg

SEQ ID NO: 3172021 - RNA, 19 nt, Artificial Sequence
  Description of Artificial Sequence: Synthetic oligonucleotide
acaagugucaccuuuucca

SEQ ID NO: 3172022 - RNA, 19 nt, Artificial Sequence
  Description of Artificial Sequence: Synthetic oligonucleotide
cucuuaauuguuauugggc

SEQ ID NO: 3172023 - RNA, 19 nt, Artificial Sequence
  Description of Artificial Sequence: Synthetic oligonucleotide
ucuaucaaaaccgggaacu

SEQ ID NO: 3172024 - RNA, 19 nt, Artificial Sequence
  Description of Artificial Sequence: Synthetic oligonucleotide
aagcacaagaacauggaag

SEQ ID NO: 3172025 - RNA, 19 nt, Artificial Sequence
  Description of Artificial Sequence: Synthetic oligonucleotide
aacucaagauucugggcuc

SEQ ID NO: 3172026 - RNA, 19 nt, Artificial Sequence
  Description of Artificial Sequence: Synthetic oligonucleotide
uacucuuaauuguuauugg

SEQ ID NO: 3172027 - RNA, 19 nt, Artificial Sequence
  Description of Artificial Sequence: Synthetic oligonucleotide
ugugaaagcacaagaacau

SEQ ID NO: 3172028 - RNA, 19 nt, Artificial Sequence
  Description of Artificial Sequence: Synthetic oligonucleotide
auacucuuaauuguuauug

SEQ ID NO: 3172029 - RNA, 19 nt, Artificial Sequence
  Description of Artificial Sequence: Synthetic oligonucleotide
guuauguucaugucaacac

SEQ ID NO: 3172030 - RNA, 19 nt, Artificial Sequence
  Description of Artificial Sequence: Synthetic oligonucleotide
auauucugagucaugcugc

SEQ ID NO: 3172031 - RNA, 19 nt, Artificial Sequence
  Description of Artificial Sequence: Synthetic oligonucleotide
aagaccuucaucagcuccc

SEQ ID NO: 3172032 - RNA, 19 nt, Artificial Sequence
  Description of Artificial Sequence: Synthetic oligonucleotide
uuuagcaggugacauguac

SEQ ID NO: 3172033 - RNA, 19 nt, Artificial Sequence
  Description of Artificial Sequence: Synthetic oligonucleotide
ucuucuccuauuuuagcag

SEQ ID NO: 3172034 - RNA, 19 nt, Artificial Sequence
  Description of Artificial Sequence: Synthetic oligonucleotide
uguuuacaaaucauacucu

SEQ ID NO: 3172035 - RNA, 19 nt, Artificial Sequence
  Description of Artificial Sequence: Synthetic oligonucleotide
aagagacagacucuuguga

SEQ ID NO: 3172036 - RNA, 19 nt, Artificial Sequence
  Description of Artificial Sequence: Synthetic oligonucleotide
ugugcugugaucacuauuu

SEQ ID NO: 3172037 - RNA, 19 nt, Artificial Sequence
  Description of Artificial Sequence: Synthetic oligonucleotide
uuccaaaacucuaucaaaa

SEQ ID NO: 3172038 - RNA, 19 nt, Artificial Sequence
  Description of Artificial Sequence: Synthetic oligonucleotide
uucugagucaugcugcuca

SEQ ID NO: 3172039 - RNA, 19 nt, Artificial Sequence
  Description of Artificial Sequence: Synthetic oligonucleotide
aagauucugggcucugcgg

SEQ ID NO: 3172040 - RNA, 19 nt, Artificial Sequence
  Description of Artificial Sequence: Synthetic oligonucleotide
uacguuauguucaugucaa

SEQ ID NO: 3172041 - RNA, 19 nt, Artificial Sequence
  Description of Artificial Sequence: Synthetic oligonucleotide
uuauguucaugucaacacu

SEQ ID NO: 3172042 - RNA, 19 nt, Artificial Sequence
  Description of Artificial Sequence: Synthetic oligonucleotide
agaauaugugcugugauca

SEQ ID NO: 3172043 - RNA, 19 nt, Artificial Sequence
  Description of Artificial Sequence: Synthetic oligonucleotide
ucuugugaaagcacaagaa

SEQ ID NO: 3172044 - RNA, 19 nt, Artificial Sequence
  Description of Artificial Sequence: Synthetic oligonucleotide
ucauuucacaaacuaauuu

SEQ ID NO: 3172045 - RNA, 19 nt, Artificial Sequence
  Description of Artificial Sequence: Synthetic oligonucleotide
auuuauuuucagaagguug

SEQ ID NO: 3172046 - RNA, 19 nt, Artificial Sequence
  Description of Artificial Sequence: Synthetic oligonucleotide
cuugugaaagcacaagaac

SEQ ID NO: 3172047 - RNA, 19 nt, Artificial Sequence
  Description of Artificial Sequence: Synthetic oligonucleotide
agauucugggcucugcggg

SEQ ID NO: 3172048 - RNA, 19 nt, Artificial Sequence
  Description of Artificial Sequence: Synthetic oligonucleotide
ggucuuguuggucagaucc

SEQ ID NO: 3172049 - RNA, 19 nt, Artificial Sequence
  Description of Artificial Sequence: Synthetic oligonucleotide
ucuauuaagguugcuguca

SEQ ID NO: 3172050 - RNA, 19 nt, Artificial Sequence
  Description of Artificial Sequence: Synthetic oligonucleotide
uuaagguugcugucaagcc

SEQ ID NO: 3172051 - RNA, 19 nt, Artificial Sequence
  Description of Artificial Sequence: Synthetic oligonucleotide
agaguaccgaacuuauuag

SEQ ID NO: 3172052 - RNA, 19 nt, Artificial Sequence
  Description of Artificial Sequence: Synthetic oligonucleotide
cauggaaggucaaaucugc

SEQ ID NO: 3172053 - RNA, 19 nt, Artificial Sequence
  Description of Artificial Sequence: Synthetic oligonucleotide
auguacguuauguucaugu

SEQ ID NO: 3172054 - RNA, 19 nt, Artificial Sequence
  Description of Artificial Sequence: Synthetic oligonucleotide
gaagguuguuuacaaauca

SEQ ID NO: 3172055 - RNA, 19 nt, Artificial Sequence
  Description of Artificial Sequence: Synthetic oligonucleotide
ugaacaagaccuucaucag

SEQ ID NO: 3172056 - RNA, 19 nt, Artificial Sequence
  Description of Artificial Sequence: Synthetic oligonucleotide
aacucuaucaaaaccggga

SEQ ID NO: 3172057 - RNA, 19 nt, Artificial Sequence
  Description of Artificial Sequence: Synthetic oligonucleotide
cucuggaagagacagacuc

SEQ ID NO: 3172058 - RNA, 19 nt, Artificial Sequence
  Description of Artificial Sequence: Synthetic oligonucleotide
uauuuuagcaggugacaug

SEQ ID NO: 3172059 - RNA, 19 nt, Artificial Sequence
  Description of Artificial Sequence: Synthetic oligonucleotide
ugacauguacguuauguuc

SEQ ID NO: 3172060 - RNA, 19 nt, Artificial Sequence
  Description of Artificial Sequence: Synthetic oligonucleotide
ugaucacuauuucuucucc

SEQ ID NO: 3172061 - RNA, 19 nt, Artificial Sequence
  Description of Artificial Sequence: Synthetic oligonucleotide
auuuuagcaggugacaugu

SEQ ID NO: 3172062 - RNA, 19 nt, Artificial Sequence
  Description of Artificial Sequence: Synthetic oligonucleotide
uuucaggagcagcagagac

SEQ ID NO: 3172063 - RNA, 19 nt, Artificial Sequence
  Description of Artificial Sequence: Synthetic oligonucleotide
ggaaggucaaaucugcuag

SEQ ID NO: 3172064 - RNA, 19 nt, Artificial Sequence
  Description of Artificial Sequence: Synthetic oligonucleotide
auuaacuuuccuguggucu

SEQ ID NO: 3172065 - RNA, 19 nt, Artificial Sequence
  Description of Artificial Sequence: Synthetic oligonucleotide
uuuccaaaacucuaucaaa

SEQ ID NO: 3172066 - RNA, 19 nt, Artificial Sequence
  Description of Artificial Sequence: Synthetic oligonucleotide
uccuauuuuagcaggugac

SEQ ID NO: 3172067 - RNA, 19 nt, Artificial Sequence
  Description of Artificial Sequence: Synthetic oligonucleotide
aagguugcugucaagccuc

SEQ ID NO: 3172068 - RNA, 19 nt, Artificial Sequence
  Description of Artificial Sequence: Synthetic oligonucleotide
gauccaccgaggcaaaugc

SEQ ID NO: 3172069 - RNA, 19 nt, Artificial Sequence
  Description of Artificial Sequence: Synthetic oligonucleotide
ugucaagccuccauggaga

SEQ ID NO: 3172070 - RNA, 19 nt, Artificial Sequence
  Description of Artificial Sequence: Synthetic oligonucleotide
aaagcacaagaacauggaa

SEQ ID NO: 3172071 - RNA, 19 nt, Artificial Sequence
  Description of Artificial Sequence: Synthetic oligonucleotide
uaagguugcugucaagccu

SEQ ID NO: 3172072 - RNA, 19 nt, Artificial Sequence
  Description of Artificial Sequence: Synthetic oligonucleotide
auuuucagaagguuguuua

SEQ ID NO: 3172073 - RNA, 19 nt, Artificial Sequence
  Description of Artificial Sequence: Synthetic oligonucleotide
ucaucguggacgcaacuca

SEQ ID NO: 3172074 - RNA, 19 nt, Artificial Sequence
  Description of Artificial Sequence: Synthetic oligonucleotide
gagaguaccgaacuuauua

SEQ ID NO: 3172075 - RNA, 19 nt, Artificial Sequence
  Description of Artificial Sequence: Synthetic oligonucleotide
aucuauuaagguugcuguc

SEQ ID NO: 3172076 - RNA, 19 nt, Artificial Sequence
  Description of Artificial Sequence: Synthetic oligonucleotide
acuuucauuucacaaacua

SEQ ID NO: 3172077 - RNA, 19 nt, Artificial Sequence
  Description of Artificial Sequence: Synthetic oligonucleotide
agcagagacaagugucacc

SEQ ID NO: 3172078 - RNA, 19 nt, Artificial Sequence
  Description of Artificial Sequence: Synthetic oligonucleotide
uccaaaacucuaucaaaac

SEQ ID NO: 3172079 - RNA, 19 nt, Artificial Sequence
  Description of Artificial Sequence: Synthetic oligonucleotide
uuuacaaaucauacucuua

SEQ ID NO: 3172080 - RNA, 19 nt, Artificial Sequence
  Description of Artificial Sequence: Synthetic oligonucleotide
auaugcuaucuauuaaggu

SEQ ID NO: 3172081 - RNA, 19 nt, Artificial Sequence
  Description of Artificial Sequence: Synthetic oligonucleotide
gaacaagaccuucaucagc

SEQ ID NO: 3172082 - RNA, 19 nt, Artificial Sequence
  Description of Artificial Sequence: Synthetic oligonucleotide
aggucaaaucugcuagccc

SEQ ID NO: 3172083 - RNA, 19 nt, Artificial Sequence
  Description of Artificial Sequence: Synthetic oligonucleotide
gcuauuaacuuuccugugg

SEQ ID NO: 3172084 - RNA, 19 nt, Artificial Sequence
  Description of Artificial Sequence: Synthetic oligonucleotide
aacugaacaauuuaaggac

SEQ ID NO: 3172085 - RNA, 19 nt, Artificial Sequence
  Description of Artificial Sequence: Synthetic oligonucleotide
aaaucaguccaucugaaac

SEQ ID NO: 3172086 - RNA, 19 nt, Artificial Sequence
  Description of Artificial Sequence: Synthetic oligonucleotide
auuuacucaauauaagucg

SEQ ID NO: 3172087 - RNA, 19 nt, Artificial Sequence
  Description of Artificial Sequence: Synthetic oligonucleotide
  modified_base (16)..(16): a, c, u, g, unknown or other
uuagcaaacaaaaganccg

SEQ ID NO: 3172088 - RNA, 19 nt, Artificial Sequence
  Description of Artificial Sequence: Synthetic oligonucleotide
uccaauauaaauuaauuga

SEQ ID NO: 3172089 - RNA, 19 nt, Artificial Sequence
  Description of Artificial Sequence: Synthetic oligonucleotide
auuaugaagaaaucuuugc

SEQ ID NO: 3172090 - RNA, 19 nt, Artificial Sequence
  Description of Artificial Sequence: Synthetic oligonucleotide
aaaccuuucuuucuauugc

SEQ ID NO: 3172091 - RNA, 19 nt, Artificial Sequence
  Description of Artificial Sequence: Synthetic oligonucleotide
ucugaaacauuuuaaaacc

SEQ ID NO: 3172092 - RNA, 19 nt, Artificial Sequence
  Description of Artificial Sequence: Synthetic oligonucleotide
aacacauaacuauuuugcc

SEQ ID NO: 3172093 - RNA, 19 nt, Artificial Sequence
  Description of Artificial Sequence: Synthetic oligonucleotide
  modified_base (7)..(7): a, c, u, g, unknown or other
aaaaganccggauggcucg

SEQ ID NO: 3172094 - RNA, 19 nt, Artificial Sequence
  Description of Artificial Sequence: Synthetic oligonucleotide
ucaauaauccccaaaauuc

SEQ ID NO: 3172095 - RNA, 19 nt, Artificial Sequence
  Description of Artificial Sequence: Synthetic oligonucleotide
uauuuugccacauuaaaca

SEQ ID NO: 3172096 - RNA, 19 nt, Artificial Sequence
  Description of Artificial Sequence: Synthetic oligonucleotide
uauacuguauuuuacuucc

SEQ ID NO: 3172097 - RNA, 19 nt, Artificial Sequence
  Description of Artificial Sequence: Synthetic oligonucleotide
auucagugcaaacuaaagc

SEQ ID NO: 3172098 - RNA, 19 nt, Artificial Sequence
  Description of Artificial Sequence: Synthetic oligonucleotide
aauauuuaaaauauacugu

SEQ ID NO: 3172099 - RNA, 19 nt, Artificial Sequence
  Description of Artificial Sequence: Synthetic oligonucleotide
uuuacuuccaaaucagucc

SEQ ID NO: 3172100 - RNA, 19 nt, Artificial Sequence
  Description of Artificial Sequence: Synthetic oligonucleotide
ugaauagcaucaauaaucc

SEQ ID NO: 3172101 - RNA, 19 nt, Artificial Sequence
  Description of Artificial Sequence: Synthetic oligonucleotide
uauaaauuaauugaacaca

SEQ ID NO: 3172102 - RNA, 19 nt, Artificial Sequence
  Description of Artificial Sequence: Synthetic oligonucleotide
aaauauacuguauuuuacu

SEQ ID NO: 3172103 - RNA, 19 nt, Artificial Sequence
  Description of Artificial Sequence: Synthetic oligonucleotide
aauuaauugaacacauaac

SEQ ID NO: 3172104 - RNA, 19 nt, Artificial Sequence
  Description of Artificial Sequence: Synthetic oligonucleotide
uauuuuacuuccaaaucag

SEQ ID NO: 3172105 - RNA, 19 nt, Artificial Sequence
  Description of Artificial Sequence: Synthetic oligonucleotide
aaaaccuuucuuucuauug

SEQ ID NO: 3172106 - RNA, 19 nt, Artificial Sequence
  Description of Artificial Sequence: Synthetic oligonucleotide
auagguaucggguaaaaug

SEQ ID NO: 3172107 - RNA, 19 nt, Artificial Sequence
  Description of Artificial Sequence: Synthetic oligonucleotide
aaaugcugacauuccaggc

SEQ ID NO: 3172108 - RNA, 19 nt, Artificial Sequence
  Description of Artificial Sequence: Synthetic oligonucleotide
uagauuuuaaaauacucgu

SEQ ID NO: 3172109 - RNA, 19 nt, Artificial Sequence
  Description of Artificial Sequence: Synthetic oligonucleotide
uauuuacucaauauaaguc

SEQ ID NO: 3172110 - RNA, 19 nt, Artificial Sequence
  Description of Artificial Sequence: Synthetic oligonucleotide
uuaugaagaaaucuuugca

SEQ ID NO: 3172111 - RNA, 19 nt, Artificial Sequence
  Description of Artificial Sequence: Synthetic oligonucleotide
uuugacuucuucauuagac

SEQ ID NO: 3172112 - RNA, 19 nt, Artificial Sequence
  Description of Artificial Sequence: Synthetic oligonucleotide
aaguugaaaauccaagaga

SEQ ID NO: 3172113 - RNA, 19 nt, Artificial Sequence
  Description of Artificial Sequence: Synthetic oligonucleotide
auauuuacucaauauaagu

SEQ ID NO: 3172114 - RNA, 19 nt, Artificial Sequence
  Description of Artificial Sequence: Synthetic oligonucleotide
uuuacucaauauaagucgc

SEQ ID NO: 3172115 - RNA, 19 nt, Artificial Sequence
  Description of Artificial Sequence: Synthetic oligonucleotide
uguagauuuuaaaauacuc

SEQ ID NO: 3172116 - RNA, 19 nt, Artificial Sequence
  Description of Artificial Sequence: Synthetic oligonucleotide
agagauagaguacuugagg

SEQ ID NO: 3172117 - RNA, 19 nt, Artificial Sequence
  Description of Artificial Sequence: Synthetic oligonucleotide
aaccucuuccuugaaaugc

SEQ ID NO: 3172118 - RNA, 19 nt, Artificial Sequence
  Description of Artificial Sequence: Synthetic oligonucleotide
gaacugaacaauuuaagga

SEQ ID NO: 3172119 - RNA, 19 nt, Artificial Sequence
  Description of Artificial Sequence: Synthetic oligonucleotide
gaaaugcugacauuccagg

SEQ ID NO: 3172120 - RNA, 19 nt, Artificial Sequence
  Description of Artificial Sequence: Synthetic oligonucleotide
ugacauuccaggcuuacag

SEQ ID NO: 3172121 - RNA, 19 nt, Artificial Sequence
  Description of Artificial Sequence: Synthetic oligonucleotide
ugucaaguauauacggugg

SEQ ID NO: 3172122 - RNA, 19 nt, Artificial Sequence
  Description of Artificial Sequence: Synthetic oligonucleotide
gaacacauaacuauuuugc

SEQ ID NO: 3172123 - RNA, 19 nt, Artificial Sequence
  Description of Artificial Sequence: Synthetic oligonucleotide
aauauacuguauuuuacuu

SEQ ID NO: 3172124 - RNA, 19 nt, Artificial Sequence
  Description of Artificial Sequence: Synthetic oligonucleotide
cauagaauuugccaucugg

SEQ ID NO: 3172125 - RNA, 19 nt, Artificial Sequence
  Description of Artificial Sequence: Synthetic oligonucleotide
agaauugaagauaugaaug

SEQ ID NO: 3172126 - RNA, 19 nt, Artificial Sequence
  Description of Artificial Sequence: Synthetic oligonucleotide
gaagauaugaaugaaucca

SEQ ID NO: 3172127 - RNA, 19 nt, Artificial Sequence
  Description of Artificial Sequence: Synthetic oligonucleotide
uuucaacugaaguuugggg

SEQ ID NO: 3172128 - RNA, 19 nt, Artificial Sequence
  Description of Artificial Sequence: Synthetic oligonucleotide
ugaaaugcugacauuccag

SEQ ID NO: 3172129 - RNA, 19 nt, Artificial Sequence
  Description of Artificial Sequence: Synthetic oligonucleotide
aaugcugacauuccaggcu

SEQ ID NO: 3172130 - RNA, 19 nt, Artificial Sequence
  Description of Artificial Sequence: Synthetic oligonucleotide
uacuugagguuacauaucc

SEQ ID NO: 3172131 - RNA, 19 nt, Artificial Sequence
  Description of Artificial Sequence: Synthetic oligonucleotide
acaaaugggaauugggaag

SEQ ID NO: 3172132 - RNA, 19 nt, Artificial Sequence
  Description of Artificial Sequence: Synthetic oligonucleotide
accuuaaaagaagagauag

SEQ ID NO: 3172133 - RNA, 19 nt, Artificial Sequence
  Description of Artificial Sequence: Synthetic oligonucleotide
uagguaucggguaaaaugu

SEQ ID NO: 3172134 - RNA, 19 nt, Artificial Sequence
  Description of Artificial Sequence: Synthetic oligonucleotide
aacaauuuaaggacuucac

SEQ ID NO: 3172135 - RNA, 19 nt, Artificial Sequence
  Description of Artificial Sequence: Synthetic oligonucleotide
cauauuuacucaauauaag

SEQ ID NO: 3172136 - RNA, 19 nt, Artificial Sequence
  Description of Artificial Sequence: Synthetic oligonucleotide
uugaaaauccaagagacaa

SEQ ID NO: 3172137 - RNA, 19 nt, Artificial Sequence
  Description of Artificial Sequence: Synthetic oligonucleotide
ugaacacauaacuauuuug

SEQ ID NO: 3172138 - RNA, 19 nt, Artificial Sequence
  Description of Artificial Sequence: Synthetic oligonucleotide
gaauugaagauaugaauga

SEQ ID NO: 3172139 - RNA, 19 nt, Artificial Sequence
  Description of Artificial Sequence: Synthetic oligonucleotide
uucaacugaaguuuggggu

SEQ ID NO: 3172140 - RNA, 19 nt, Artificial Sequence
  Description of Artificial Sequence: Synthetic oligonucleotide
gaauuugccaucuggaauc

SEQ ID NO: 3172141 - RNA, 19 nt, Artificial Sequence
  Description of Artificial Sequence: Synthetic oligonucleotide
aaacaauacaaaugggaau

SEQ ID NO: 3172142 - RNA, 19 nt, Artificial Sequence
  Description of Artificial Sequence: Synthetic oligonucleotide
cauaauggagaauugaaga

SEQ ID NO: 3172143 - RNA, 19 nt, Artificial Sequence
  Description of Artificial Sequence: Synthetic oligonucleotide
uuuugccacauuaaacaag

SEQ ID NO: 3172144 - RNA, 19 nt, Artificial Sequence
  Description of Artificial Sequence: Synthetic oligonucleotide
uggaacugaacaauuuaag

SEQ ID NO: 3172145 - RNA, 19 nt, Artificial Sequence
  Description of Artificial Sequence: Synthetic oligonucleotide
auucauagaauuugccauc

SEQ ID NO: 3172146 - RNA, 19 nt, Artificial Sequence
  Description of Artificial Sequence: Synthetic oligonucleotide
auuuuaaaauacucguucu

SEQ ID NO: 3172147 - RNA, 19 nt, Artificial Sequence
  Description of Artificial Sequence: Synthetic oligonucleotide
aaggacuucacauuaugaa

SEQ ID NO: 3172148 - RNA, 19 nt, Artificial Sequence
  Description of Artificial Sequence: Synthetic oligonucleotide
cuuggugugagaaaugcug

SEQ ID NO: 3172149 - RNA, 19 nt, Artificial Sequence
  Description of Artificial Sequence: Synthetic oligonucleotide
aaccaggugagauaauuca

SEQ ID NO: 3172150 - RNA, 19 nt, Artificial Sequence
  Description of Artificial Sequence: Synthetic oligonucleotide
agugcugauagguaucggg

SEQ ID NO: 3172151 - RNA, 19 nt, Artificial Sequence
  Description of Artificial Sequence: Synthetic oligonucleotide
aacaauacaaaugggaauu

SEQ ID NO: 3172152 - RNA, 19 nt, Artificial Sequence
  Description of Artificial Sequence: Synthetic oligonucleotide
gaaaucuuugcaugugucc

SEQ ID NO: 3172153 - RNA, 19 nt, Artificial Sequence
  Description of Artificial Sequence: Synthetic oligonucleotide
ugagguuacauauccauaa

SEQ ID NO: 3172154 - RNA, 19 nt, Artificial Sequence
  Description of Artificial Sequence: Synthetic oligonucleotide
aauauaagucgcaagugcu

SEQ ID NO: 3172155 - RNA, 19 nt, Artificial Sequence
  Description of Artificial Sequence: Synthetic oligonucleotide
uuuucaacugaaguuuggg

SEQ ID NO: 3172156 - RNA, 19 nt, Artificial Sequence
  Description of Artificial Sequence: Synthetic oligonucleotide
aucgauguagauuuuaaaa

SEQ ID NO: 3172157 - RNA, 19 nt, Artificial Sequence
  Description of Artificial Sequence: Synthetic oligonucleotide
uggagaauugaagauauga

SEQ ID NO: 3172158 - RNA, 19 nt, Artificial Sequence
  Description of Artificial Sequence: Synthetic oligonucleotide
ucgauguagauuuuaaaau

SEQ ID NO: 3172159 - RNA, 19 nt, Artificial Sequence
  Description of Artificial Sequence: Synthetic oligonucleotide
augucaaguauauacggug

SEQ ID NO: 3172160 - RNA, 19 nt, Artificial Sequence
  Description of Artificial Sequence: Synthetic oligonucleotide
aauccccaaaauucgaccu

SEQ ID NO: 3172161 - RNA, 19 nt, Artificial Sequence
  Description of Artificial Sequence: Synthetic oligonucleotide
aggacuucacauuaugaag

SEQ ID NO: 3172162 - RNA, 19 nt, Artificial Sequence
  Description of Artificial Sequence: Synthetic oligonucleotide
aguugaacaagcuucuggu

SEQ ID NO: 3172163 - RNA, 19 nt, Artificial Sequence
  Description of Artificial Sequence: Synthetic oligonucleotide
  modified_base (15)..(15): a, c, u, g, unknown or other
uagcaaacaaaaganccgg

SEQ ID NO: 3172164 - RNA, 19 nt, Artificial Sequence
  Description of Artificial Sequence: Synthetic oligonucleotide
augaauccaauauaaauua

SEQ ID NO: 3172165 - RNA, 19 nt, Artificial Sequence
  Description of Artificial Sequence: Synthetic oligonucleotide
uccaaacaauacaaauggg

SEQ ID NO: 3172166 - RNA, 19 nt, Artificial Sequence
  Description of Artificial Sequence: Synthetic oligonucleotide
aaauucgaccuuugcgggg

SEQ ID NO: 3172167 - RNA, 19 nt, Artificial Sequence
  Description of Artificial Sequence: Synthetic oligonucleotide
uccaacugcauccugaaua

SEQ ID NO: 3172168 - RNA, 19 nt, Artificial Sequence
  Description of Artificial Sequence: Synthetic oligonucleotide
aauccaagagacaaaguca

SEQ ID NO: 3172169 - RNA, 19 nt, Artificial Sequence
  Description of Artificial Sequence: Synthetic oligonucleotide
aauucagugcaaacuaaag

SEQ ID NO: 3172170 - RNA, 19 nt, Artificial Sequence
  Description of Artificial Sequence: Synthetic oligonucleotide
uguucaaaauguaggaaau

SEQ ID NO: 3172171 - RNA, 19 nt, Artificial Sequence
  Description of Artificial Sequence: Synthetic oligonucleotide
uccauaauggagaauugaa

SEQ ID NO: 3172172 - RNA, 19 nt, Artificial Sequence
  Description of Artificial Sequence: Synthetic oligonucleotide
cauuagacuaucgauguag

SEQ ID NO: 3172173 - RNA, 19 nt, Artificial Sequence
  Description of Artificial Sequence: Synthetic oligonucleotide
uuugcauguguccuuggug

SEQ ID NO: 3172174 - RNA, 19 nt, Artificial Sequence
  Description of Artificial Sequence: Synthetic oligonucleotide
aagucgcaagugcugauag

SEQ ID NO: 3172175 - RNA, 19 nt, Artificial Sequence
  Description of Artificial Sequence: Synthetic oligonucleotide
aucauauuuacucaauaua

SEQ ID NO: 3172176 - RNA, 19 nt, Artificial Sequence
  Description of Artificial Sequence: Synthetic oligonucleotide
uaacuauuuugccacauua

SEQ ID NO: 3172177 - RNA, 19 nt, Artificial Sequence
  Description of Artificial Sequence: Synthetic oligonucleotide
auaauggagaauugaagau

SEQ ID NO: 3172178 - RNA, 19 nt, Artificial Sequence
  Description of Artificial Sequence: Synthetic oligonucleotide
aauuugccaucuggaaucc

SEQ ID NO: 3172179 - RNA, 19 nt, Artificial Sequence
  Description of Artificial Sequence: Synthetic oligonucleotide
aauggagaauugaagauau

SEQ ID NO: 3172180 - RNA, 19 nt, Artificial Sequence
  Description of Artificial Sequence: Synthetic oligonucleotide
uuuuaaaaccaggugagau

SEQ ID NO: 3172181 - RNA, 19 nt, Artificial Sequence
  Description of Artificial Sequence: Synthetic oligonucleotide
aagucuucuccacaguccu

SEQ ID NO: 3172182 - RNA, 19 nt, Artificial Sequence
  Description of Artificial Sequence: Synthetic oligonucleotide
  modified_base (18)..(18): a, c, u, g, unknown or other
aguuagcaaacaaaaganc

SEQ ID NO: 3172183 - RNA, 19 nt, Artificial Sequence
  Description of Artificial Sequence: Synthetic oligonucleotide
ucaauauaagucgcaagug

SEQ ID NO: 3172184 - RNA, 19 nt, Artificial Sequence
  Description of Artificial Sequence: Synthetic oligonucleotide
aaugucuauccucaucgcc

SEQ ID NO: 3172185 - RNA, 19 nt, Artificial Sequence
  Description of Artificial Sequence: Synthetic oligonucleotide
ucaaguuucaucuucuuug

SEQ ID NO: 3172186 - RNA, 19 nt, Artificial Sequence
  Description of Artificial Sequence: Synthetic oligonucleotide
caaaugucuauccucaucg

SEQ ID NO: 3172187 - RNA, 19 nt, Artificial Sequence
  Description of Artificial Sequence: Synthetic oligonucleotide
aaucugcaaaugucuaucc

SEQ ID NO: 3172188 - RNA, 19 nt, Artificial Sequence
  Description of Artificial Sequence: Synthetic oligonucleotide
uucuguucaaguuucaucu

SEQ ID NO: 3172189 - RNA, 19 nt, Artificial Sequence
  Description of Artificial Sequence: Synthetic oligonucleotide
caaggcaggacauaguagg

SEQ ID NO: 3172190 - RNA, 19 nt, Artificial Sequence
  Description of Artificial Sequence: Synthetic oligonucleotide
aaaugucuauccucaucgc

SEQ ID NO: 3172191 - RNA, 19 nt, Artificial Sequence
  Description of Artificial Sequence: Synthetic oligonucleotide
uucucuuuacuucuggcgc

SEQ ID NO: 3172192 - RNA, 19 nt, Artificial Sequence
  Description of Artificial Sequence: Synthetic oligonucleotide
ucuucuuucuguuucuucu

SEQ ID NO: 3172193 - RNA, 19 nt, Artificial Sequence
  Description of Artificial Sequence: Synthetic oligonucleotide
aaguuucaucuucuuugcc

SEQ ID NO: 3172194 - RNA, 19 nt, Artificial Sequence
  Description of Artificial Sequence: Synthetic oligonucleotide
cuucucuuuacuucuggcg

SEQ ID NO: 3172195 - RNA, 19 nt, Artificial Sequence
  Description of Artificial Sequence: Synthetic oligonucleotide
cuguucuuggcucugauug

SEQ ID NO: 3172196 - RNA, 19 nt, Artificial Sequence
  Description of Artificial Sequence: Synthetic oligonucleotide
auugcauucuucuuucugu

SEQ ID NO: 3172197 - RNA, 19 nt, Artificial Sequence
  Description of Artificial Sequence: Synthetic oligonucleotide
aguuucaucuucuuugcca

SEQ ID NO: 3172198 - RNA, 19 nt, Artificial Sequence
  Description of Artificial Sequence: Synthetic oligonucleotide
uuucuguuucuucuguuca

SEQ ID NO: 3172199 - RNA, 19 nt, Artificial Sequence
  Description of Artificial Sequence: Synthetic oligonucleotide
acuucuggcgcuuuuccgg

SEQ ID NO: 3172200 - RNA, 19 nt, Artificial Sequence
  Description of Artificial Sequence: Synthetic oligonucleotide
ucugauugcauucuucuuu

SEQ ID NO: 3172201 - RNA, 19 nt, Artificial Sequence
  Description of Artificial Sequence: Synthetic oligonucleotide
augucuauccucaucgccc

SEQ ID NO: 3172202 - RNA, 19 nt, Artificial Sequence
  Description of Artificial Sequence: Synthetic oligonucleotide
gacauaguaggcaaucugc

SEQ ID NO: 3172203 - RNA, 19 nt, Artificial Sequence
  Description of Artificial Sequence: Synthetic oligonucleotide
auuacuucuucucuuuacu

SEQ ID NO: 3172204 - RNA, 19 nt, Artificial Sequence
  Description of Artificial Sequence: Synthetic oligonucleotide
uuugccauuacuucuucuc

SEQ ID NO: 3172205 - RNA, 19 nt, Artificial Sequence
  Description of Artificial Sequence: Synthetic oligonucleotide
ucuucuuugccauuacuuc

SEQ ID NO: 3172206 - RNA, 19 nt, Artificial Sequence
  Description of Artificial Sequence: Synthetic oligonucleotide
ucugcaaaugucuauccuc

SEQ ID NO: 3172207 - RNA, 19 nt, Artificial Sequence
  Description of Artificial Sequence: Synthetic oligonucleotide
acuggacuccucuuccucc

SEQ ID NO: 3172208 - RNA, 19 nt, Artificial Sequence
  Description of Artificial Sequence: Synthetic oligonucleotide
uguucaaguuucaucuucu

SEQ ID NO: 3172209 - RNA, 19 nt, Artificial Sequence
  Description of Artificial Sequence: Synthetic oligonucleotide
uucuucucuuuacuucugg

SEQ ID NO: 3172210 - RNA, 19 nt, Artificial Sequence
  Description of Artificial Sequence: Synthetic oligonucleotide
uuucuucuguucaaguuuc

SEQ ID NO: 3172211 - RNA, 19 nt, Artificial Sequence
  Description of Artificial Sequence: Synthetic oligonucleotide
acuucuucucuuuacuucu

SEQ ID NO: 3172212 - RNA, 19 nt, Artificial Sequence
  Description of Artificial Sequence: Synthetic oligonucleotide
agcaagagcagcaaggcag

SEQ ID NO: 3172213 - RNA, 19 nt, Artificial Sequence
  Description of Artificial Sequence: Synthetic oligonucleotide
gucuccucagaacuggugg

SEQ ID NO: 3172214 - RNA, 19 nt, Artificial Sequence
  Description of Artificial Sequence: Synthetic oligonucleotide
gauugcauucuucuuucug

SEQ ID NO: 3172215 - RNA, 19 nt, Artificial Sequence
  Description of Artificial Sequence: Synthetic oligonucleotide
caaguuucaucuucuuugc

SEQ ID NO: 3172216 - RNA, 19 nt, Artificial Sequence
  Description of Artificial Sequence: Synthetic oligonucleotide
auaguaggcaaucugcaaa

SEQ ID NO: 3172217 - RNA, 19 nt, Artificial Sequence
  Description of Artificial Sequence: Synthetic oligonucleotide
gaugucuccucagaacugg

SEQ ID NO: 3172218 - RNA, 19 nt, Artificial Sequence
  Description of Artificial Sequence: Synthetic oligonucleotide
agagcagcaaggcaggaca

SEQ ID NO: 3172219 - RNA, 19 nt, Artificial Sequence
  Description of Artificial Sequence: Synthetic oligonucleotide
uaggcaaucugcaaauguc

SEQ ID NO: 3172220 - RNA, 19 nt, Artificial Sequence
  Description of Artificial Sequence: Synthetic oligonucleotide
uuuuccggcgcuuugcagu

SEQ ID NO: 3172221 - RNA, 19 nt, Artificial Sequence
  Description of Artificial Sequence: Synthetic oligonucleotide
uguuccagaugucuccuca

SEQ ID NO: 3172222 - RNA, 19 nt, Artificial Sequence
  Description of Artificial Sequence: Synthetic oligonucleotide
uuacuucuggcgcuuuucc

SEQ ID NO: 3172223 - RNA, 19 nt, Artificial Sequence
  Description of Artificial Sequence: Synthetic oligonucleotide
aaggcaggacauaguaggc

SEQ ID NO: 3172224 - RNA, 19 nt, Artificial Sequence
  Description of Artificial Sequence: Synthetic oligonucleotide
uacuucuucucuuuacuuc

SEQ ID NO: 3172225 - RNA, 19 nt, Artificial Sequence
  Description of Artificial Sequence: Synthetic oligonucleotide
ucuucucuuuacuucuggc

SEQ ID NO: 3172226 - RNA, 19 nt, Artificial Sequence
  Description of Artificial Sequence: Synthetic oligonucleotide
cauuacuucuucucuuuac

SEQ ID NO: 3172227 - RNA, 19 nt, Artificial Sequence
  Description of Artificial Sequence: Synthetic oligonucleotide
acugguggcaugcuguucu

SEQ ID NO: 3172228 - RNA, 19 nt, Artificial Sequence
  Description of Artificial Sequence: Synthetic oligonucleotide
uccucaucgccccaugaug

SEQ ID NO: 3172229 - RNA, 19 nt, Artificial Sequence
  Description of Artificial Sequence: Synthetic oligonucleotide
ucuguuucuucuguucaag

SEQ ID NO: 3172230 - RNA, 19 nt, Artificial Sequence
  Description of Artificial Sequence: Synthetic oligonucleotide
cuucuguucaaguuucauc

SEQ ID NO: 3172231 - RNA, 19 nt, Artificial Sequence
  Description of Artificial Sequence: Synthetic oligonucleotide
aagagcagcaaggcaggac

SEQ ID NO: 3172232 - RNA, 19 nt, Artificial Sequence
  Description of Artificial Sequence: Synthetic oligonucleotide
cuuucuguuucuucuguuc

SEQ ID NO: 3172233 - RNA, 19 nt, Artificial Sequence
  Description of Artificial Sequence: Synthetic oligonucleotide
gacacuggacuccucuucc

SEQ ID NO: 3172234 - RNA, 19 nt, Artificial Sequence
  Description of Artificial Sequence: Synthetic oligonucleotide
uugccauuacuucuucucu

SEQ ID NO: 3172235 - RNA, 19 nt, Artificial Sequence
  Description of Artificial Sequence: Synthetic oligonucleotide
cucuguuccagaugucucc

SEQ ID NO: 3172236 - RNA, 19 nt, Artificial Sequence
  Description of Artificial Sequence: Synthetic oligonucleotide
uacuucuggcgcuuuuccg

SEQ ID NO: 3172237 - RNA, 19 nt, Artificial Sequence
  Description of Artificial Sequence: Synthetic oligonucleotide
ugucuauccucaucgcccc

SEQ ID NO: 3172238 - RNA, 19 nt, Artificial Sequence
  Description of Artificial Sequence: Synthetic oligonucleotide
caugaugacacuggacucc

SEQ ID NO: 3172239 - RNA, 19 nt, Artificial Sequence
  Description of Artificial Sequence: Synthetic oligonucleotide
uguuucuucuguucaaguu

SEQ ID NO: 3172240 - RNA, 19 nt, Artificial Sequence
  Description of Artificial Sequence: Synthetic oligonucleotide
uucuuucuguuucuucugu

SEQ ID NO: 3172241 - RNA, 19 nt, Artificial Sequence
  Description of Artificial Sequence: Synthetic oligonucleotide
uucaaguuucaucuucuuu

SEQ ID NO: 3172242 - RNA, 19 nt, Artificial Sequence
  Description of Artificial Sequence: Synthetic oligonucleotide
uguucuuggcucugauugc

SEQ ID NO: 3172243 - RNA, 19 nt, Artificial Sequence
  Description of Artificial Sequence: Synthetic oligonucleotide
cugauugcauucuucuuuc

SEQ ID NO: 3172244 - RNA, 19 nt, Artificial Sequence
  Description of Artificial Sequence: Synthetic oligonucleotide
ucuccucagaacugguggc

SEQ ID NO: 3172245 - RNA, 19 nt, Artificial Sequence
  Description of Artificial Sequence: Synthetic oligonucleotide
ucucuuuacuucuggcgcu

SEQ ID NO: 3172246 - RNA, 19 nt, Artificial Sequence
  Description of Artificial Sequence: Synthetic oligonucleotide
uaguaggcaaucugcaaau

SEQ ID NO: 3172247 - RNA, 19 nt, Artificial Sequence
  Description of Artificial Sequence: Synthetic oligonucleotide
uccagaugucuccucagaa

SEQ ID NO: 3172248 - RNA, 19 nt, Artificial Sequence
  Description of Artificial Sequence: Synthetic oligonucleotide
cuuggcucugauugcauuc

SEQ ID NO: 3172249 - RNA, 19 nt, Artificial Sequence
  Description of Artificial Sequence: Synthetic oligonucleotide
agcaaggcaggacauagua

SEQ ID NO: 3172250 - RNA, 19 nt, Artificial Sequence
  Description of Artificial Sequence: Synthetic oligonucleotide
cuguucaaguuucaucuuc

SEQ ID NO: 3172251 - RNA, 19 nt, Artificial Sequence
  Description of Artificial Sequence: Synthetic oligonucleotide
uucuuugccauuacuucuu

SEQ ID NO: 3172252 - RNA, 19 nt, Artificial Sequence
  Description of Artificial Sequence: Synthetic oligonucleotide
cuucuuucuguuucuucug

SEQ ID NO: 3172253 - RNA, 19 nt, Artificial Sequence
  Description of Artificial Sequence: Synthetic oligonucleotide
gguggcaugcuguucuugg

SEQ ID NO: 3172254 - RNA, 19 nt, Artificial Sequence
  Description of Artificial Sequence: Synthetic oligonucleotide
caaucugcaaaugucuauc

SEQ ID NO: 3172255 - RNA, 19 nt, Artificial Sequence
  Description of Artificial Sequence: Synthetic oligonucleotide
cugcaaaugucuauccuca

SEQ ID NO: 3172256 - RNA, 19 nt, Artificial Sequence
  Description of Artificial Sequence: Synthetic oligonucleotide
uuacuucuucucuuuacuu

SEQ ID NO: 3172257 - RNA, 19 nt, Artificial Sequence
  Description of Artificial Sequence: Synthetic oligonucleotide
ugucuccucagaacuggug

SEQ ID NO: 3172258 - RNA, 19 nt, Artificial Sequence
  Description of Artificial Sequence: Synthetic oligonucleotide
uggcaugcuguucuuggcu

SEQ ID NO: 3172259 - RNA, 19 nt, Artificial Sequence
  Description of Artificial Sequence: Synthetic oligonucleotide
uuccagaugucuccucaga

SEQ ID NO: 3172260 - RNA, 19 nt, Artificial Sequence
  Description of Artificial Sequence: Synthetic oligonucleotide
aucugcaaaugucuauccu

SEQ ID NO: 3172261 - RNA, 19 nt, Artificial Sequence
  Description of Artificial Sequence: Synthetic oligonucleotide
cucagaacugguggcaugc

SEQ ID NO: 3172262 - RNA, 19 nt, Artificial Sequence
  Description of Artificial Sequence: Synthetic oligonucleotide
caucgccccaugaugacac

SEQ ID NO: 3172263 - RNA, 19 nt, Artificial Sequence
  Description of Artificial Sequence: Synthetic oligonucleotide
ugacacuggacuccucuuc

SEQ ID NO: 3172264 - RNA, 19 nt, Artificial Sequence
  Description of Artificial Sequence: Synthetic oligonucleotide
uuuacuucuggcgcuuuuc

SEQ ID NO: 3172265 - RNA, 19 nt, Artificial Sequence
  Description of Artificial Sequence: Synthetic oligonucleotide
uucaucuucuuugccauua

SEQ ID NO: 3172266 - RNA, 19 nt, Artificial Sequence
  Description of Artificial Sequence: Synthetic oligonucleotide
ucuuccuccuccucuguuc

SEQ ID NO: 3172267 - RNA, 19 nt, Artificial Sequence
  Description of Artificial Sequence: Synthetic oligonucleotide
cuuccuccuccucuguucc

SEQ ID NO: 3172268 - RNA, 19 nt, Artificial Sequence
  Description of Artificial Sequence: Synthetic oligonucleotide
ucaucuucuuugccauuac

SEQ ID NO: 3172269 - RNA, 19 nt, Artificial Sequence
  Description of Artificial Sequence: Synthetic oligonucleotide
uucuucuuucuguuucuuc

SEQ ID NO: 3172270 - RNA, 19 nt, Artificial Sequence
  Description of Artificial Sequence: Synthetic oligonucleotide
agaacugguggcaugcugu

SEQ ID NO: 3172271 - RNA, 19 nt, Artificial Sequence
  Description of Artificial Sequence: Synthetic oligonucleotide
uccucuguuccagaugucu

SEQ ID NO: 3172272 - RNA, 19 nt, Artificial Sequence
  Description of Artificial Sequence: Synthetic oligonucleotide
cuucuggcgcuuuuccggc

SEQ ID NO: 3172273 - RNA, 19 nt, Artificial Sequence
  Description of Artificial Sequence: Synthetic oligonucleotide
uucuguuucuucuguucaa

SEQ ID NO: 3172274 - RNA, 19 nt, Artificial Sequence
  Description of Artificial Sequence: Synthetic oligonucleotide
gaugacacuggacuccucu

SEQ ID NO: 3172275 - RNA, 19 nt, Artificial Sequence
  Description of Artificial Sequence: Synthetic oligonucleotide
ggacauaguaggcaaucug

SEQ ID NO: 3172276 - RNA, 19 nt, Artificial Sequence
  Description of Artificial Sequence: Synthetic oligonucleotide
acauaguaggcaaucugca

SEQ ID NO: 3172277 - RNA, 19 nt, Artificial Sequence
  Description of Artificial Sequence: Synthetic oligonucleotide
uccucuuccuccuccucug

SEQ ID NO: 3172278 - RNA, 19 nt, Artificial Sequence
  Description of Artificial Sequence: Synthetic oligonucleotide
ucuggcgcuuuuccggcgc

SEQ ID NO: 3172279 - RNA, 19 nt, Artificial Sequence
  Description of Artificial Sequence: Synthetic oligonucleotide
uauccucaucgccccauga

SEQ ID NO: 3172280 - RNA, 19 nt, Artificial Sequence
  Description of Artificial Sequence: Synthetic oligonucleotide
guuccagaugucuccucag

SEQ ID NO: 3172281 - RNA, 19 nt, Artificial Sequence
  Description of Artificial Sequence: Synthetic oligonucleotide
uccuccucuguuccagaug

SEQ ID NO: 3172282 - RNA, 19 nt, Artificial Sequence
  Description of Artificial Sequence: Synthetic oligonucleotide
ucuuugccauuacuucuuc

SEQ ID NO: 3172283 - RNA, 19 nt, Artificial Sequence
  Description of Artificial Sequence: Synthetic oligonucleotide
uucuucuguucaaguuuca

SEQ ID NO: 3172284 - RNA, 19 nt, Artificial Sequence
  Description of Artificial Sequence: Synthetic oligonucleotide
aaagguuccaauaugaagc

SEQ ID NO: 3172285 - RNA, 19 nt, Artificial Sequence
  Description of Artificial Sequence: Synthetic oligonucleotide
agugaauuaagacugagac

SEQ ID NO: 3172286 - RNA, 19 nt, Artificial Sequence
  Description of Artificial Sequence: Synthetic oligonucleotide
aaagaaaugauguuggucu

SEQ ID NO: 3172287 - RNA, 19 nt, Artificial Sequence
  Description of Artificial Sequence: Synthetic oligonucleotide
gacuucauaaauaagagcg

SEQ ID NO: 3172288 - RNA, 19 nt, Artificial Sequence
  Description of Artificial Sequence: Synthetic oligonucleotide
ugaauuaagacugagacug

SEQ ID NO: 3172289 - RNA, 19 nt, Artificial Sequence
  Description of Artificial Sequence: Synthetic oligonucleotide
aucgaauaagauuaaauag

SEQ ID NO: 3172290 - RNA, 19 nt, Artificial Sequence
  Description of Artificial Sequence: Synthetic oligonucleotide
aaugauguuggucugccuc

SEQ ID NO: 3172291 - RNA, 19 nt, Artificial Sequence
  Description of Artificial Sequence: Synthetic oligonucleotide
gauuaaauagauauaaaac

SEQ ID NO: 3172292 - RNA, 19 nt, Artificial Sequence
  Description of Artificial Sequence: Synthetic oligonucleotide
ucgaauaagauuaaauaga

SEQ ID NO: 3172293 - RNA, 19 nt, Artificial Sequence
  Description of Artificial Sequence: Synthetic oligonucleotide
uuuccaucgaauaagauua

SEQ ID NO: 3172294 - RNA, 19 nt, Artificial Sequence
  Description of Artificial Sequence: Synthetic oligonucleotide
gucaacauuucuuaaauag

SEQ ID NO: 3172295 - RNA, 19 nt, Artificial Sequence
  Description of Artificial Sequence: Synthetic oligonucleotide
auuaacaucgacugguggg

SEQ ID NO: 3172296 - RNA, 19 nt, Artificial Sequence
  Description of Artificial Sequence: Synthetic oligonucleotide
aaaacaauuaacaucgacu

SEQ ID NO: 3172297 - RNA, 19 nt, Artificial Sequence
  Description of Artificial Sequence: Synthetic oligonucleotide
gguaauaaagucuaccugg

SEQ ID NO: 3172298 - RNA, 19 nt, Artificial Sequence
  Description of Artificial Sequence: Synthetic oligonucleotide
aaaccuacuagcacuaacc

SEQ ID NO: 3172299 - RNA, 19 nt, Artificial Sequence
  Description of Artificial Sequence: Synthetic oligonucleotide
auuugugcuaaacaaacag

SEQ ID NO: 3172300 - RNA, 19 nt, Artificial Sequence
  Description of Artificial Sequence: Synthetic oligonucleotide
uuacagaagcagcagaggg

SEQ ID NO: 3172301 - RNA, 19 nt, Artificial Sequence
  Description of Artificial Sequence: Synthetic oligonucleotide
aagagcgggucccagaccc

SEQ ID NO: 3172302 - RNA, 19 nt, Artificial Sequence
  Description of Artificial Sequence: Synthetic oligonucleotide
uucuaugggguauacaggg

SEQ ID NO: 3172303 - RNA, 19 nt, Artificial Sequence
  Description of Artificial Sequence: Synthetic oligonucleotide
uuauguacaacaagaacca

SEQ ID NO: 3172304 - RNA, 19 nt, Artificial Sequence
  Description of Artificial Sequence: Synthetic oligonucleotide
aaccuacuagcacuaaccc

SEQ ID NO: 3172305 - RNA, 19 nt, Artificial Sequence
  Description of Artificial Sequence: Synthetic oligonucleotide
uuuucugccagugagagca

SEQ ID NO: 3172306 - RNA, 19 nt, Artificial Sequence
  Description of Artificial Sequence: Synthetic oligonucleotide
aaaagaaaugauguugguc

SEQ ID NO: 3172307 - RNA, 19 nt, Artificial Sequence
  Description of Artificial Sequence: Synthetic oligonucleotide
agauuaaauagauauaaaa

SEQ ID NO: 3172308 - RNA, 19 nt, Artificial Sequence
  Description of Artificial Sequence: Synthetic oligonucleotide
aacagaacucacuccacac

SEQ ID NO: 3172309 - RNA, 19 nt, Artificial Sequence
  Description of Artificial Sequence: Synthetic oligonucleotide
aacaauuaacaucgacugg

SEQ ID NO: 3172310 - RNA, 19 nt, Artificial Sequence
  Description of Artificial Sequence: Synthetic oligonucleotide
  modified_base (17)..(17): a, c, u, g, unknown or other
acuagcacuaacccganag

SEQ ID NO: 3172311 - RNA, 19 nt, Artificial Sequence
  Description of Artificial Sequence: Synthetic oligonucleotide
  modified_base (2)..(2): a, c, u, g, unknown or other
anagcugacugguccagac

SEQ ID NO: 3172312 - RNA, 19 nt, Artificial Sequence
  Description of Artificial Sequence: Synthetic oligonucleotide
acaaaacagaacucacucc

SEQ ID NO: 3172313 - RNA, 19 nt, Artificial Sequence
  Description of Artificial Sequence: Synthetic oligonucleotide
acuccacacacacacaggc

SEQ ID NO: 3172314 - RNA, 19 nt, Artificial Sequence
  Description of Artificial Sequence: Synthetic oligonucleotide
agacuucauaaauaagagc

SEQ ID NO: 3172315 - RNA, 19 nt, Artificial Sequence
  Description of Artificial Sequence: Synthetic oligonucleotide
aauuaggcggggcugggcg

SEQ ID NO: 3172316 - RNA, 19 nt, Artificial Sequence
  Description of Artificial Sequence: Synthetic oligonucleotide
acggaaagugaauuaagac

SEQ ID NO: 3172317 - RNA, 19 nt, Artificial Sequence
  Description of Artificial Sequence: Synthetic oligonucleotide
aaugguaggggcgauaucu

SEQ ID NO: 3172318 - RNA, 19 nt, Artificial Sequence
  Description of Artificial Sequence: Synthetic oligonucleotide
gacccuuccagauuuacag

SEQ ID NO: 3172319 - RNA, 19 nt, Artificial Sequence
  Description of Artificial Sequence: Synthetic oligonucleotide
aagcaauuaauuuuccaaa

SEQ ID NO: 3172320 - RNA, 19 nt, Artificial Sequence
  Description of Artificial Sequence: Synthetic oligonucleotide
ugaucaaggucaaagguuc

SEQ ID NO: 3172321 - RNA, 19 nt, Artificial Sequence
  Description of Artificial Sequence: Synthetic oligonucleotide
aggaccaacuuuucuaugg

SEQ ID NO: 3172322 - RNA, 19 nt, Artificial Sequence
  Description of Artificial Sequence: Synthetic oligonucleotide
aaauaggugcguuauuuaa

SEQ ID NO: 3172323 - RNA, 19 nt, Artificial Sequence
  Description of Artificial Sequence: Synthetic oligonucleotide
guaacaggagcccaugagg

SEQ ID NO: 3172324 - RNA, 19 nt, Artificial Sequence
  Description of Artificial Sequence: Synthetic oligonucleotide
uacagaagcagcagagggg

SEQ ID NO: 3172325 - RNA, 19 nt, Artificial Sequence
  Description of Artificial Sequence: Synthetic oligonucleotide
acaagaaccacuuugcaua

SEQ ID NO: 3172326 - RNA, 19 nt, Artificial Sequence
  Description of Artificial Sequence: Synthetic oligonucleotide
uguacaacaagaaccacuu

SEQ ID NO: 3172327 - RNA, 19 nt, Artificial Sequence
  Description of Artificial Sequence: Synthetic oligonucleotide
auaagagcgggucccagac

SEQ ID NO: 3172328 - RNA, 19 nt, Artificial Sequence
  Description of Artificial Sequence: Synthetic oligonucleotide
ucguuguugucaaugaugu

SEQ ID NO: 3172329 - RNA, 19 nt, Artificial Sequence
  Description of Artificial Sequence: Synthetic oligonucleotide
uggaaauaauacaggguag

SEQ ID NO: 3172330 - RNA, 19 nt, Artificial Sequence
  Description of Artificial Sequence: Synthetic oligonucleotide
aggaacagcuaaaagaggg

SEQ ID NO: 3172331 - RNA, 19 nt, Artificial Sequence
  Description of Artificial Sequence: Synthetic oligonucleotide
aaaccugccacggaaagug

SEQ ID NO: 3172332 - RNA, 19 nt, Artificial Sequence
  Description of Artificial Sequence: Synthetic oligonucleotide
ugcuaugaagcacggaacc

SEQ ID NO: 3172333 - RNA, 19 nt, Artificial Sequence
  Description of Artificial Sequence: Synthetic oligonucleotide
ggaaagugaauuaagacug

SEQ ID NO: 3172334 - RNA, 19 nt, Artificial Sequence
  Description of Artificial Sequence: Synthetic oligonucleotide
aacaagaaccacuuugcau

SEQ ID NO: 3172335 - RNA, 19 nt, Artificial Sequence
  Description of Artificial Sequence: Synthetic oligonucleotide
gaaacgaacacaaaacaga

SEQ ID NO: 3172336 - RNA, 19 nt, Artificial Sequence
  Description of Artificial Sequence: Synthetic oligonucleotide
uaugaagcacggaaccggg

SEQ ID NO: 3172337 - RNA, 19 nt, Artificial Sequence
  Description of Artificial Sequence: Synthetic oligonucleotide
gauggggugacaugacugg

SEQ ID NO: 3172338 - RNA, 19 nt, Artificial Sequence
  Description of Artificial Sequence: Synthetic oligonucleotide
ucacuccacacacacacag

SEQ ID NO: 3172339 - RNA, 19 nt, Artificial Sequence
  Description of Artificial Sequence: Synthetic oligonucleotide
uacaauauggagacacugu

SEQ ID NO: 3172340 - RNA, 19 nt, Artificial Sequence
  Description of Artificial Sequence: Synthetic oligonucleotide
uuugcauagcgaugguggg

SEQ ID NO: 3172341 - RNA, 19 nt, Artificial Sequence
  Description of Artificial Sequence: Synthetic oligonucleotide
uaugggguauacagggagg

SEQ ID NO: 3172342 - RNA, 19 nt, Artificial Sequence
  Description of Artificial Sequence: Synthetic oligonucleotide
uuuacagaagcagcagagg

SEQ ID NO: 3172343 - RNA, 19 nt, Artificial Sequence
  Description of Artificial Sequence: Synthetic oligonucleotide
accuccaggaagaaaaggc

SEQ ID NO: 3172344 - RNA, 19 nt, Artificial Sequence
  Description of Artificial Sequence: Synthetic oligonucleotide
aacaacuaaagcaugguuu

SEQ ID NO: 3172345 - RNA, 19 nt, Artificial Sequence
  Description of Artificial Sequence: Synthetic oligonucleotide
aaaacaacuaaagcauggu

SEQ ID NO: 3172346 - RNA, 19 nt, Artificial Sequence
  Description of Artificial Sequence: Synthetic oligonucleotide
agaaacgaacacaaaacag

SEQ ID NO: 3172347 - RNA, 19 nt, Artificial Sequence
  Description of Artificial Sequence: Synthetic oligonucleotide
uccacacacacacaggcac

SEQ ID NO: 3172348 - RNA, 19 nt, Artificial Sequence
  Description of Artificial Sequence: Synthetic oligonucleotide
agggcuguagagcuggaac

SEQ ID NO: 3172349 - RNA, 19 nt, Artificial Sequence
  Description of Artificial Sequence: Synthetic oligonucleotide
uauuugugcuaaacaaaca

SEQ ID NO: 3172350 - RNA, 19 nt, Artificial Sequence
  Description of Artificial Sequence: Synthetic oligonucleotide
aagaauuaggcggggcugg

SEQ ID NO: 3172351 - RNA, 19 nt, Artificial Sequence
  Description of Artificial Sequence: Synthetic oligonucleotide
caaaacagaacucacucca

SEQ ID NO: 3172352 - RNA, 19 nt, Artificial Sequence
  Description of Artificial Sequence: Synthetic oligonucleotide
uugaucaaggucaaagguu

SEQ ID NO: 3172353 - RNA, 19 nt, Artificial Sequence
  Description of Artificial Sequence: Synthetic oligonucleotide
aaaacagaacucacuccac

SEQ ID NO: 3172354 - RNA, 19 nt, Artificial Sequence
  Description of Artificial Sequence: Synthetic oligonucleotide
uucauaaauaagagcgggu

SEQ ID NO: 3172355 - RNA, 19 nt, Artificial Sequence
  Description of Artificial Sequence: Synthetic oligonucleotide
aagucuaccuggcaaagua

SEQ ID NO: 3172356 - RNA, 19 nt, Artificial Sequence
  Description of Artificial Sequence: Synthetic oligonucleotide
ugaacacauuaguggaggg

SEQ ID NO: 3172357 - RNA, 19 nt, Artificial Sequence
  Description of Artificial Sequence: Synthetic oligonucleotide
aauaagagcgggucccaga

SEQ ID NO: 3172358 - RNA, 19 nt, Artificial Sequence
  Description of Artificial Sequence: Synthetic oligonucleotide
agugagcuacaauauggag

SEQ ID NO: 3172359 - RNA, 19 nt, Artificial Sequence
  Description of Artificial Sequence: Synthetic oligonucleotide
aaacgaacacaaaacagaa

SEQ ID NO: 3172360 - RNA, 19 nt, Artificial Sequence
  Description of Artificial Sequence: Synthetic oligonucleotide
ggaagcuggaaacaacugg

SEQ ID NO: 3172361 - RNA, 19 nt, Artificial Sequence
  Description of Artificial Sequence: Synthetic oligonucleotide
  modified_base (9)..(9): a, c, u, g, unknown or other
uaacccganagcugacugg

SEQ ID NO: 3172362 - RNA, 19 nt, Artificial Sequence
  Description of Artificial Sequence: Synthetic oligonucleotide
accuacuagcacuaacccg

SEQ ID NO: 3172363 - RNA, 19 nt, Artificial Sequence
  Description of Artificial Sequence: Synthetic oligonucleotide
caucgaauaagauuaaaua

SEQ ID NO: 3172364 - RNA, 19 nt, Artificial Sequence
  Description of Artificial Sequence: Synthetic oligonucleotide
uggggacacaggacgaugg

SEQ ID NO: 3172365 - RNA, 19 nt, Artificial Sequence
  Description of Artificial Sequence: Synthetic oligonucleotide
uaauaaagucuaccuggca

SEQ ID NO: 3172366 - RNA, 19 nt, Artificial Sequence
  Description of Artificial Sequence: Synthetic oligonucleotide
gaacucacuccacacacac

SEQ ID NO: 3172367 - RNA, 19 nt, Artificial Sequence
  Description of Artificial Sequence: Synthetic oligonucleotide
uacagaguccguuaagaaa

SEQ ID NO: 3172368 - RNA, 19 nt, Artificial Sequence
  Description of Artificial Sequence: Synthetic oligonucleotide
auaaagucuaccuggcaaa

SEQ ID NO: 3172369 - RNA, 19 nt, Artificial Sequence
  Description of Artificial Sequence: Synthetic oligonucleotide
gaccaacuuuucuaugggg

SEQ ID NO: 3172370 - RNA, 19 nt, Artificial Sequence
  Description of Artificial Sequence: Synthetic oligonucleotide
ugcguuauuuaaaucuuau

SEQ ID NO: 3172371 - RNA, 19 nt, Artificial Sequence
  Description of Artificial Sequence: Synthetic oligonucleotide
cuaugaagcacggaaccgg

SEQ ID NO: 3172372 - RNA, 19 nt, Artificial Sequence
  Description of Artificial Sequence: Synthetic oligonucleotide
aacuaaagcaugguuucca

SEQ ID NO: 3172373 - RNA, 19 nt, Artificial Sequence
  Description of Artificial Sequence: Synthetic oligonucleotide
guuuggaggugccagggag

SEQ ID NO: 3172374 - RNA, 19 nt, Artificial Sequence
  Description of Artificial Sequence: Synthetic oligonucleotide
ggagugagcuacaauaugg

SEQ ID NO: 3172375 - RNA, 19 nt, Artificial Sequence
  Description of Artificial Sequence: Synthetic oligonucleotide
auagcgaugguggggacac

SEQ ID NO: 3172376 - RNA, 19 nt, Artificial Sequence
  Description of Artificial Sequence: Synthetic oligonucleotide
ugaagcacggaaccggggu

SEQ ID NO: 3172377 - RNA, 19 nt, Artificial Sequence
  Description of Artificial Sequence: Synthetic oligonucleotide
ucuugucccaaugguaggg

SEQ ID NO: 3172378 - RNA, 19 nt, Artificial Sequence
  Description of Artificial Sequence: Synthetic oligonucleotide
auaugaagcucuaagaauu

SEQ ID NO: 3172379 - RNA, 19 nt, Artificial Sequence
  Description of Artificial Sequence: Synthetic oligonucleotide
  modified_base (10)..(10): a, c, u, g, unknown or other
cuaacccganagcugacug

SEQ ID NO: 3172380 - RNA, 19 nt, Artificial Sequence
  Description of Artificial Sequence: Synthetic oligonucleotide
uuaacaucgacuggugggu

SEQ ID NO: 3172381 - RNA, 19 nt, Artificial Sequence
  Description of Artificial Sequence: Synthetic oligonucleotide
uaagaauuaggcggggcug

SEQ ID NO: 3172382 - RNA, 19 nt, Artificial Sequence
  Description of Artificial Sequence: Synthetic oligonucleotide
uuccagauuuacagaagca

SEQ ID NO: 3172383 - RNA, 19 nt, Artificial Sequence
  Description of Artificial Sequence: Synthetic oligonucleotide
acagaguccguuaagaaaa

SEQ ID NO: 3172384 - RNA, 19 nt, Artificial Sequence
  Description of Artificial Sequence: Synthetic oligonucleotide
aagaucucggccugcaugc

SEQ ID NO: 3172385 - RNA, 19 nt, Artificial Sequence
  Description of Artificial Sequence: Synthetic oligonucleotide
auugacucuccuuuggcac

SEQ ID NO: 3172386 - RNA, 19 nt, Artificial Sequence
  Description of Artificial Sequence: Synthetic oligonucleotide
uguaucuucuccaccaggu

SEQ ID NO: 3172387 - RNA, 19 nt, Artificial Sequence
  Description of Artificial Sequence: Synthetic oligonucleotide
accagguucgcccacuggc

SEQ ID NO: 3172388 - RNA, 19 nt, Artificial Sequence
  Description of Artificial Sequence: Synthetic oligonucleotide
caugucuuccaccaggggc

SEQ ID NO: 3172389 - RNA, 19 nt, Artificial Sequence
  Description of Artificial Sequence: Synthetic oligonucleotide
ucuccuuuggcacggaggu

SEQ ID NO: 3172390 - RNA, 19 nt, Artificial Sequence
  Description of Artificial Sequence: Synthetic oligonucleotide
uacucauugacucuccuuu

SEQ ID NO: 3172391 - RNA, 19 nt, Artificial Sequence
  Description of Artificial Sequence: Synthetic oligonucleotide
ugcuccucuaccuuggcgc

SEQ ID NO: 3172392 - RNA, 19 nt, Artificial Sequence
  Description of Artificial Sequence: Synthetic oligonucleotide
cuugaggcgagccuggaag

SEQ ID NO: 3172393 - RNA, 19 nt, Artificial Sequence
  Description of Artificial Sequence: Synthetic oligonucleotide
ugcaugucuuccaccaggg

SEQ ID NO: 3172394 - RNA, 19 nt, Artificial Sequence
  Description of Artificial Sequence: Synthetic oligonucleotide
gaagaucucggccugcaug

SEQ ID NO: 3172395 - RNA, 19 nt, Artificial Sequence
  Description of Artificial Sequence: Synthetic oligonucleotide
gagggauacucauugacuc

SEQ ID NO: 3172396 - RNA, 19 nt, Artificial Sequence
  Description of Artificial Sequence: Synthetic oligonucleotide
uucuccaccagguucgccc

SEQ ID NO: 3172397 - RNA, 19 nt, Artificial Sequence
  Description of Artificial Sequence: Synthetic oligonucleotide
guagggauggggcugguag

SEQ ID NO: 3172398 - RNA, 19 nt, Artificial Sequence
  Description of Artificial Sequence: Synthetic oligonucleotide
uccaccaggggcucgaacc

SEQ ID NO: 3172399 - RNA, 19 nt, Artificial Sequence
  Description of Artificial Sequence: Synthetic oligonucleotide
uaucuucuccaccagguuc

SEQ ID NO: 3172400 - RNA, 19 nt, Artificial Sequence
  Description of Artificial Sequence: Synthetic oligonucleotide
uccuuuggcacggagguag

SEQ ID NO: 3172401 - RNA, 19 nt, Artificial Sequence
  Description of Artificial Sequence: Synthetic oligonucleotide
ucauugacucuccuuuggc

SEQ ID NO: 3172402 - RNA, 19 nt, Artificial Sequence
  Description of Artificial Sequence: Synthetic oligonucleotide
uugacucuccuuuggcacg

SEQ ID NO: 3172403 - RNA, 19 nt, Artificial Sequence
  Description of Artificial Sequence: Synthetic oligonucleotide
ucgaaccagcccuugaggc

SEQ ID NO: 3172404 - RNA, 19 nt, Artificial Sequence
  Description of Artificial Sequence: Synthetic oligonucleotide
ucuaccuuggcgcgcagcu

SEQ ID NO: 3172405 - RNA, 19 nt, Artificial Sequence
  Description of Artificial Sequence: Synthetic oligonucleotide
gagagggauacucauugac

SEQ ID NO: 3172406 - RNA, 19 nt, Artificial Sequence
  Description of Artificial Sequence: Synthetic oligonucleotide
agccuggaagaucucggcc

SEQ ID NO: 3172407 - RNA, 19 nt, Artificial Sequence
  Description of Artificial Sequence: Synthetic oligonucleotide
agcuccuccaucugcucgc

SEQ ID NO: 3172408 - RNA, 19 nt, Artificial Sequence
  Description of Artificial Sequence: Synthetic oligonucleotide
cucauugacucuccuuugg

SEQ ID NO: 3172409 - RNA, 19 nt, Artificial Sequence
  Description of Artificial Sequence: Synthetic oligonucleotide
uaccuuggcgcgcagcucc

SEQ ID NO: 3172410 - RNA, 19 nt, Artificial Sequence
  Description of Artificial Sequence: Synthetic oligonucleotide
cuuccaagcggucucgggc

SEQ ID NO: 3172411 - RNA, 19 nt, Artificial Sequence
  Description of Artificial Sequence: Synthetic oligonucleotide
aucuucuccaccagguucg

SEQ ID NO: 3172412 - RNA, 19 nt, Artificial Sequence
  Description of Artificial Sequence: Synthetic oligonucleotide
cugcaugucuuccaccagg

SEQ ID NO: 3172413 - RNA, 19 nt, Artificial Sequence
  Description of Artificial Sequence: Synthetic oligonucleotide
ucgcguaccucuuccaagc

SEQ ID NO: 3172414 - RNA, 19 nt, Artificial Sequence
  Description of Artificial Sequence: Synthetic oligonucleotide
gacgagggccaccugcugg

SEQ ID NO: 3172415 - RNA, 19 nt, Artificial Sequence
  Description of Artificial Sequence: Synthetic oligonucleotide
cucuccuuuggcacggagg

SEQ ID NO: 3172416 - RNA, 19 nt, Artificial Sequence
  Description of Artificial Sequence: Synthetic oligonucleotide
cucaccuccucccagccgc

SEQ ID NO: 3172417 - RNA, 19 nt, Artificial Sequence
  Description of Artificial Sequence: Synthetic oligonucleotide
acgagggccaccugcuggc

SEQ ID NO: 3172418 - RNA, 19 nt, Artificial Sequence
  Description of Artificial Sequence: Synthetic oligonucleotide
uuccaagcggucucgggcc

SEQ ID NO: 3172419 - RNA, 19 nt, Artificial Sequence
  Description of Artificial Sequence: Synthetic oligonucleotide
ucuuccaagcggucucggg

SEQ ID NO: 3172420 - RNA, 19 nt, Artificial Sequence
  Description of Artificial Sequence: Synthetic oligonucleotide
cugcaugcgcaucugcugg

SEQ ID NO: 3172421 - RNA, 19 nt, Artificial Sequence
  Description of Artificial Sequence: Synthetic oligonucleotide
accucuuccaagcggucuc

SEQ ID NO: 3172422 - RNA, 19 nt, Artificial Sequence
  Description of Artificial Sequence: Synthetic oligonucleotide
gggagagggauacucauug

SEQ ID NO: 3172423 - RNA, 19 nt, Artificial Sequence
  Description of Artificial Sequence: Synthetic oligonucleotide
agggauggggcugguagcc

SEQ ID NO: 3172424 - RNA, 19 nt, Artificial Sequence
  Description of Artificial Sequence: Synthetic oligonucleotide
aggggcucgaaccagcccu

SEQ ID NO: 3172425 - RNA, 19 nt, Artificial Sequence
  Description of Artificial Sequence: Synthetic oligonucleotide
acggagguagggauggggc

SEQ ID NO: 3172426 - RNA, 19 nt, Artificial Sequence
  Description of Artificial Sequence: Synthetic oligonucleotide
cucgaaccagcccuugagg

SEQ ID NO: 3172427 - RNA, 19 nt, Artificial Sequence
  Description of Artificial Sequence: Synthetic oligonucleotide
aggccuguaucuucuccac

SEQ ID NO: 3172428 - RNA, 19 nt, Artificial Sequence
  Description of Artificial Sequence: Synthetic oligonucleotide
cuguaucuucuccaccagg

SEQ ID NO: 3172429 - RNA, 19 nt, Artificial Sequence
  Description of Artificial Sequence: Synthetic oligonucleotide
acucauugacucuccuuug

SEQ ID NO: 3172430 - RNA, 19 nt, Artificial Sequence
  Description of Artificial Sequence: Synthetic oligonucleotide
uuuggcacggagguaggga

SEQ ID NO: 3172431 - RNA, 19 nt, Artificial Sequence
  Description of Artificial Sequence: Synthetic oligonucleotide
cuggccaugggugucgccg

SEQ ID NO: 3172432 - RNA, 19 nt, Artificial Sequence
  Description of Artificial Sequence: Synthetic oligonucleotide
agagggauacucauugacu

SEQ ID NO: 3172433 - RNA, 19 nt, Artificial Sequence
  Description of Artificial Sequence: Synthetic oligonucleotide
ugcaugcgcaucugcuggg

SEQ ID NO: 3172434 - RNA, 19 nt, Artificial Sequence
  Description of Artificial Sequence: Synthetic oligonucleotide
agggauacucauugacucu

SEQ ID NO: 3172435 - RNA, 19 nt, Artificial Sequence
  Description of Artificial Sequence: Synthetic oligonucleotide
ugacucuccuuuggcacgg

SEQ ID NO: 3172436 - RNA, 19 nt, Artificial Sequence
  Description of Artificial Sequence: Synthetic oligonucleotide
gaggccuguaucuucucca

SEQ ID NO: 3172437 - RNA, 19 nt, Artificial Sequence
  Description of Artificial Sequence: Synthetic oligonucleotide
caucugcugggccugcucc

SEQ ID NO: 3172438 - RNA, 19 nt, Artificial Sequence
  Description of Artificial Sequence: Synthetic oligonucleotide
augucuuccaccaggggcu

SEQ ID NO: 3172439 - RNA, 19 nt, Artificial Sequence
  Description of Artificial Sequence: Synthetic oligonucleotide
cucgcguaccucuuccaag

SEQ ID NO: 3172440 - RNA, 19 nt, Artificial Sequence
  Description of Artificial Sequence: Synthetic oligonucleotide
ugguugcucaccuccuccc

SEQ ID NO: 3172441 - RNA, 19 nt, Artificial Sequence
  Description of Artificial Sequence: Synthetic oligonucleotide
uugaggcgagccuggaaga

SEQ ID NO: 3172442 - RNA, 19 nt, Artificial Sequence
  Description of Artificial Sequence: Synthetic oligonucleotide
uagggauggggcugguagc

SEQ ID NO: 3172443 - RNA, 19 nt, Artificial Sequence
  Description of Artificial Sequence: Synthetic oligonucleotide
cauugacucuccuuuggca

SEQ ID NO: 3172444 - RNA, 19 nt, Artificial Sequence
  Description of Artificial Sequence: Synthetic oligonucleotide
cugguugcucaccuccucc

SEQ ID NO: 3172445 - RNA, 19 nt, Artificial Sequence
  Description of Artificial Sequence: Synthetic oligonucleotide
gagccuggaagaucucggc

SEQ ID NO: 3172446 - RNA, 19 nt, Artificial Sequence
  Description of Artificial Sequence: Synthetic oligonucleotide
augggugucgccgcggcgg

SEQ ID NO: 3172447 - RNA, 19 nt, Artificial Sequence
  Description of Artificial Sequence: Synthetic oligonucleotide
acuggcgcugcaugucuuc

SEQ ID NO: 3172448 - RNA, 19 nt, Artificial Sequence
  Description of Artificial Sequence: Synthetic oligonucleotide
ucggccugcaugcgcaucu

SEQ ID NO: 3172449 - RNA, 19 nt, Artificial Sequence
  Description of Artificial Sequence: Synthetic oligonucleotide
uuggcacggagguagggau

SEQ ID NO: 3172450 - RNA, 19 nt, Artificial Sequence
  Description of Artificial Sequence: Synthetic oligonucleotide
guugcucaccuccucccag

SEQ ID NO: 3172451 - RNA, 19 nt, Artificial Sequence
  Description of Artificial Sequence: Synthetic oligonucleotide
agccacggaggccuguauc

SEQ ID NO: 3172452 - RNA, 19 nt, Artificial Sequence
  Description of Artificial Sequence: Synthetic oligonucleotide
gaucucggccugcaugcgc

SEQ ID NO: 3172453 - RNA, 19 nt, Artificial Sequence
  Description of Artificial Sequence: Synthetic oligonucleotide
auacucauugacucuccuu

SEQ ID NO: 3172454 - RNA, 19 nt, Artificial Sequence
  Description of Artificial Sequence: Synthetic oligonucleotide
gagguagggauggggcugg

SEQ ID NO: 3172455 - RNA, 19 nt, Artificial Sequence
  Description of Artificial Sequence: Synthetic oligonucleotide
uugcucaccuccucccagc

SEQ ID NO: 3172456 - RNA, 19 nt, Artificial Sequence
  Description of Artificial Sequence: Synthetic oligonucleotide
uccaucugcucgcguaccu

SEQ ID NO: 3172457 - RNA, 19 nt, Artificial Sequence
  Description of Artificial Sequence: Synthetic oligonucleotide
ucucgggccugguugcuca

SEQ ID NO: 3172458 - RNA, 19 nt, Artificial Sequence
  Description of Artificial Sequence: Synthetic oligonucleotide
ugcucaccuccucccagcc

SEQ ID NO: 3172459 - RNA, 19 nt, Artificial Sequence
  Description of Artificial Sequence: Synthetic oligonucleotide
gaaccagcccuugaggcga

SEQ ID NO: 3172460 - RNA, 19 nt, Artificial Sequence
  Description of Artificial Sequence: Synthetic oligonucleotide
ugggccugcuccucuaccu

SEQ ID NO: 3172461 - RNA, 19 nt, Artificial Sequence
  Description of Artificial Sequence: Synthetic oligonucleotide
cagcuccuccaucugcucg

SEQ ID NO: 3172462 - RNA, 19 nt, Artificial Sequence
  Description of Artificial Sequence: Synthetic oligonucleotide
uccuccaucugcucgcgua

SEQ ID NO: 3172463 - RNA, 19 nt, Artificial Sequence
  Description of Artificial Sequence: Synthetic oligonucleotide
ucuccaccagguucgccca

SEQ ID NO: 3172464 - RNA, 19 nt, Artificial Sequence
  Description of Artificial Sequence: Synthetic oligonucleotide
gauggggcugguagccacg

SEQ ID NO: 3172465 - RNA, 19 nt, Artificial Sequence
  Description of Artificial Sequence: Synthetic oligonucleotide
ggggcugguagccacggag

SEQ ID NO: 3172466 - RNA, 19 nt, Artificial Sequence
  Description of Artificial Sequence: Synthetic oligonucleotide
caccugcuggccaugggug

SEQ ID NO: 3172467 - RNA, 19 nt, Artificial Sequence
  Description of Artificial Sequence: Synthetic oligonucleotide
cuuggcgcgcagcuccucc

SEQ ID NO: 3172468 - RNA, 19 nt, Artificial Sequence
  Description of Artificial Sequence: Synthetic oligonucleotide
augcgcaucugcugggccu

SEQ ID NO: 3172469 - RNA, 19 nt, Artificial Sequence
  Description of Artificial Sequence: Synthetic oligonucleotide
cugcuccucuaccuuggcg

SEQ ID NO: 3172470 - RNA, 19 nt, Artificial Sequence
  Description of Artificial Sequence: Synthetic oligonucleotide
uggaagaucucggccugca

SEQ ID NO: 3172471 - RNA, 19 nt, Artificial Sequence
  Description of Artificial Sequence: Synthetic oligonucleotide
uggcacggagguagggaug

SEQ ID NO: 3172472 - RNA, 19 nt, Artificial Sequence
  Description of Artificial Sequence: Synthetic oligonucleotide
ucugcucgcguaccucuuc

SEQ ID NO: 3172473 - RNA, 19 nt, Artificial Sequence
  Description of Artificial Sequence: Synthetic oligonucleotide
acucuccuuuggcacggag

SEQ ID NO: 3172474 - RNA, 19 nt, Artificial Sequence
  Description of Artificial Sequence: Synthetic oligonucleotide
cacggagguagggaugggg

SEQ ID NO: 3172475 - RNA, 19 nt, Artificial Sequence
  Description of Artificial Sequence: Synthetic oligonucleotide
gccuguaucuucuccacca

SEQ ID NO: 3172476 - RNA, 19 nt, Artificial Sequence
  Description of Artificial Sequence: Synthetic oligonucleotide
ggcacggagguagggaugg

SEQ ID NO: 3172477 - RNA, 19 nt, Artificial Sequence
  Description of Artificial Sequence: Synthetic oligonucleotide
caugcgcaucugcugggcc

SEQ ID NO: 3172478 - RNA, 19 nt, Artificial Sequence
  Description of Artificial Sequence: Synthetic oligonucleotide
accaggggcucgaaccagc

SEQ ID NO: 3172479 - RNA, 19 nt, Artificial Sequence
  Description of Artificial Sequence: Synthetic oligonucleotide
gcucgaaccagcccuugag

SEQ ID NO: 3172480 - RNA, 19 nt, Artificial Sequence
  Description of Artificial Sequence: Synthetic oligonucleotide
gauacucauugacucuccu

SEQ ID NO: 3172481 - RNA, 19 nt, Artificial Sequence
  Description of Artificial Sequence: Synthetic oligonucleotide
cagguucgcccacuggcgc

SEQ ID NO: 3172482 - RNA, 19 nt, Artificial Sequence
  Description of Artificial Sequence: Synthetic oligonucleotide
uaccucuuccaagcggucu

SEQ ID NO: 3172483 - RNA, 19 nt, Artificial Sequence
  Description of Artificial Sequence: Synthetic oligonucleotide
ucuuccaccaggggcucga

SEQ ID NO: 3172484 - RNA, 19 nt, Artificial Sequence
  Description of Artificial Sequence: Synthetic oligonucleotide
aacaaauacacacacacac

SEQ ID NO: 3172485 - RNA, 19 nt, Artificial Sequence
  Description of Artificial Sequence: Synthetic oligonucleotide
aauacacacacacacacac

SEQ ID NO: 3172486 - RNA, 19 nt, Artificial Sequence
  Description of Artificial Sequence: Synthetic oligonucleotide
acuaucaauaauuuaaaac

SEQ ID NO: 3172487 - RNA, 19 nt, Artificial Sequence
  Description of Artificial Sequence: Synthetic oligonucleotide
acuacguacaaucuggccc

SEQ ID NO: 3172488 - RNA, 19 nt, Artificial Sequence
  Description of Artificial Sequence: Synthetic oligonucleotide
uuuuguauuaaaagaaaag

SEQ ID NO: 3172489 - RNA, 19 nt, Artificial Sequence
  Description of Artificial Sequence: Synthetic oligonucleotide
aauccauuuucuuucaguc

SEQ ID NO: 3172490 - RNA, 19 nt, Artificial Sequence
  Description of Artificial Sequence: Synthetic oligonucleotide
aaugugauauccuagcaca

SEQ ID NO: 3172491 - RNA, 19 nt, Artificial Sequence
  Description of Artificial Sequence: Synthetic oligonucleotide
uguauauauauauauaaaa

SEQ ID NO: 3172492 - RNA, 19 nt, Artificial Sequence
  Description of Artificial Sequence: Synthetic oligonucleotide
aaacauuuaacaauuugac

SEQ ID NO: 3172493 - RNA, 19 nt, Artificial Sequence
  Description of Artificial Sequence: Synthetic oligonucleotide
uauguauauauauauauaa

SEQ ID NO: 3172494 - RNA, 19 nt, Artificial Sequence
  Description of Artificial Sequence: Synthetic oligonucleotide
uauauauguauauauauau

SEQ ID NO: 3172495 - RNA, 19 nt, Artificial Sequence
  Description of Artificial Sequence: Synthetic oligonucleotide
uauauauauauguauauau

SEQ ID NO: 3172496 - RNA, 19 nt, Artificial Sequence
  Description of Artificial Sequence: Synthetic oligonucleotide
aaacuugauauauauauau

SEQ ID NO: 3172497 - RNA, 19 nt, Artificial Sequence
  Description of Artificial Sequence: Synthetic oligonucleotide
uauauguauauauauauau

SEQ ID NO: 3172498 - RNA, 19 nt, Artificial Sequence
  Description of Artificial Sequence: Synthetic oligonucleotide
uauauauauguauauauau

SEQ ID NO: 3172499 - RNA, 19 nt, Artificial Sequence
  Description of Artificial Sequence: Synthetic oligonucleotide
uauuaaaagaaaagcauaa

SEQ ID NO: 3172500 - RNA, 19 nt, Artificial Sequence
  Description of Artificial Sequence: Synthetic oligonucleotide
acuugauauauauauaugu

SEQ ID NO: 3172501 - RNA, 19 nt, Artificial Sequence
  Description of Artificial Sequence: Synthetic oligonucleotide
aaugaaucaucuuucaaua

SEQ ID NO: 3172502 - RNA, 19 nt, Artificial Sequence
  Description of Artificial Sequence: Synthetic oligonucleotide
aauagcccaaaugauguac

SEQ ID NO: 3172503 - RNA, 19 nt, Artificial Sequence
  Description of Artificial Sequence: Synthetic oligonucleotide
aacauuuaacaauuugaca

SEQ ID NO: 3172504 - RNA, 19 nt, Artificial Sequence
  Description of Artificial Sequence: Synthetic oligonucleotide
ugauauauauauauguaua

SEQ ID NO: 3172505 - RNA, 19 nt, Artificial Sequence
  Description of Artificial Sequence: Synthetic oligonucleotide
caugguaaagacaauguac

SEQ ID NO: 3172506 - RNA, 19 nt, Artificial Sequence
  Description of Artificial Sequence: Synthetic oligonucleotide
aaauccuugaauaugucca

SEQ ID NO: 3172507 - RNA, 19 nt, Artificial Sequence
  Description of Artificial Sequence: Synthetic oligonucleotide
uuauccuugucuucaaugc

SEQ ID NO: 3172508 - RNA, 19 nt, Artificial Sequence
  Description of Artificial Sequence: Synthetic oligonucleotide
uugauauauauauauguau

SEQ ID NO: 3172509 - RNA, 19 nt, Artificial Sequence
  Description of Artificial Sequence: Synthetic oligonucleotide
uaauccauagagcuggcca

SEQ ID NO: 3172510 - RNA, 19 nt, Artificial Sequence
  Description of Artificial Sequence: Synthetic oligonucleotide
uguaaacuacucugcaacg

SEQ ID NO: 3172511 - RNA, 19 nt, Artificial Sequence
  Description of Artificial Sequence: Synthetic oligonucleotide
gaaauccuugaauaugucc

SEQ ID NO: 3172512 - RNA, 19 nt, Artificial Sequence
  Description of Artificial Sequence: Synthetic oligonucleotide
ucuuucagucagcucaugg

SEQ ID NO: 3172513 - RNA, 19 nt, Artificial Sequence
  Description of Artificial Sequence: Synthetic oligonucleotide
uugaaugugauauccuagc

SEQ ID NO: 3172514 - RNA, 19 nt, Artificial Sequence
  Description of Artificial Sequence: Synthetic oligonucleotide
uaauguuaugauacaagcu

SEQ ID NO: 3172515 - RNA, 19 nt, Artificial Sequence
  Description of Artificial Sequence: Synthetic oligonucleotide
uugggcacgagaaguaugg

SEQ ID NO: 3172516 - RNA, 19 nt, Artificial Sequence
  Description of Artificial Sequence: Synthetic oligonucleotide
caaauacacacacacacac

SEQ ID NO: 3172517 - RNA, 19 nt, Artificial Sequence
  Description of Artificial Sequence: Synthetic oligonucleotide
uacacacacacacacacac

SEQ ID NO: 3172518 - RNA, 19 nt, Artificial Sequence
  Description of Artificial Sequence: Synthetic oligonucleotide
aagggcaccguuuccugcc

SEQ ID NO: 3172519 - RNA, 19 nt, Artificial Sequence
  Description of Artificial Sequence: Synthetic oligonucleotide
acgagcguaagguggaacc

SEQ ID NO: 3172520 - RNA, 19 nt, Artificial Sequence
  Description of Artificial Sequence: Synthetic oligonucleotide
uagacgucggaauuugccg

SEQ ID NO: 3172521 - RNA, 19 nt, Artificial Sequence
  Description of Artificial Sequence: Synthetic oligonucleotide
cauuaaugaaccuuggcca

SEQ ID NO: 3172522 - RNA, 19 nt, Artificial Sequence
  Description of Artificial Sequence: Synthetic oligonucleotide
aauagucucuucuggugug

SEQ ID NO: 3172523 - RNA, 19 nt, Artificial Sequence
  Description of Artificial Sequence: Synthetic oligonucleotide
gaaacagcaggggacacgg

SEQ ID NO: 3172524 - RNA, 19 nt, Artificial Sequence
  Description of Artificial Sequence: Synthetic oligonucleotide
uaggucuuguucauaguag

SEQ ID NO: 3172525 - RNA, 19 nt, Artificial Sequence
  Description of Artificial Sequence: Synthetic oligonucleotide
aauguacgagcguaaggug

SEQ ID NO: 3172526 - RNA, 19 nt, Artificial Sequence
  Description of Artificial Sequence: Synthetic oligonucleotide
cucaauaauauuaauguua

SEQ ID NO: 3172527 - RNA, 19 nt, Artificial Sequence
  Description of Artificial Sequence: Synthetic oligonucleotide
ucuucaaugcccuuucccu

SEQ ID NO: 3172528 - RNA, 19 nt, Artificial Sequence
  Description of Artificial Sequence: Synthetic oligonucleotide
ucccaugggaagaugauga

SEQ ID NO: 3172529 - RNA, 19 nt, Artificial Sequence
  Description of Artificial Sequence: Synthetic oligonucleotide
ucagcacucagucuugggc

SEQ ID NO: 3172530 - RNA, 19 nt, Artificial Sequence
  Description of Artificial Sequence: Synthetic oligonucleotide
aauccagacaaacuaucaa

SEQ ID NO: 3172531 - RNA, 19 nt, Artificial Sequence
  Description of Artificial Sequence: Synthetic oligonucleotide
ucugccucugccaucacca

SEQ ID NO: 3172532 - RNA, 19 nt, Artificial Sequence
  Description of Artificial Sequence: Synthetic oligonucleotide
uacaaucuggcccuugcug

SEQ ID NO: 3172533 - RNA, 19 nt, Artificial Sequence
  Description of Artificial Sequence: Synthetic oligonucleotide
cuuccgcucauuaaggcag

SEQ ID NO: 3172534 - RNA, 19 nt, Artificial Sequence
  Description of Artificial Sequence: Synthetic oligonucleotide
cucucaauaauauuaaugu

SEQ ID NO: 3172535 - RNA, 19 nt, Artificial Sequence
  Description of Artificial Sequence: Synthetic oligonucleotide
aaccccaguugaucgaggg

SEQ ID NO: 3172536 - RNA, 19 nt, Artificial Sequence
  Description of Artificial Sequence: Synthetic oligonucleotide
aggaccagaauaaugaaug

SEQ ID NO: 3172537 - RNA, 19 nt, Artificial Sequence
  Description of Artificial Sequence: Synthetic oligonucleotide
cuagacgucggaauuugcc

SEQ ID NO: 3172538 - RNA, 19 nt, Artificial Sequence
  Description of Artificial Sequence: Synthetic oligonucleotide
gaacuucucuaauccauag

SEQ ID NO: 3172539 - RNA, 19 nt, Artificial Sequence
  Description of Artificial Sequence: Synthetic oligonucleotide
acuaauagcccaaaugaug

SEQ ID NO: 3172540 - RNA, 19 nt, Artificial Sequence
  Description of Artificial Sequence: Synthetic oligonucleotide
aacuugauauauauauaug

SEQ ID NO: 3172541 - RNA, 19 nt, Artificial Sequence
  Description of Artificial Sequence: Synthetic oligonucleotide
gaugauggggaaguaagug

SEQ ID NO: 3172542 - RNA, 19 nt, Artificial Sequence
  Description of Artificial Sequence: Synthetic oligonucleotide
uauccuugucuucaaugcc

SEQ ID NO: 3172543 - RNA, 19 nt, Artificial Sequence
  Description of Artificial Sequence: Synthetic oligonucleotide
gauauauauauauguauau

SEQ ID NO: 3172544 - RNA, 19 nt, Artificial Sequence
  Description of Artificial Sequence: Synthetic oligonucleotide
gaaugaaucacuucagccu

SEQ ID NO: 3172545 - RNA, 19 nt, Artificial Sequence
  Description of Artificial Sequence: Synthetic oligonucleotide
uuuuccuuuccugugagaa

SEQ ID NO: 3172546 - RNA, 19 nt, Artificial Sequence
  Description of Artificial Sequence: Synthetic oligonucleotide
caagaagggcugaagagug

SEQ ID NO: 3172547 - RNA, 19 nt, Artificial Sequence
  Description of Artificial Sequence: Synthetic oligonucleotide
aggaacucuaggccugucc

SEQ ID NO: 3172548 - RNA, 19 nt, Artificial Sequence
  Description of Artificial Sequence: Synthetic oligonucleotide
gaauauguccagucggaac

SEQ ID NO: 3172549 - RNA, 19 nt, Artificial Sequence
  Description of Artificial Sequence: Synthetic oligonucleotide
auagcuggaggagagagug

SEQ ID NO: 3172550 - RNA, 19 nt, Artificial Sequence
  Description of Artificial Sequence: Synthetic oligonucleotide
aggcgguucaguuuggcag

SEQ ID NO: 3172551 - RNA, 19 nt, Artificial Sequence
  Description of Artificial Sequence: Synthetic oligonucleotide
uucuaucccaaaccccagg

SEQ ID NO: 3172552 - RNA, 19 nt, Artificial Sequence
  Description of Artificial Sequence: Synthetic oligonucleotide
cacacacacacacacacac

SEQ ID NO: 3172553 - RNA, 19 nt, Artificial Sequence
  Description of Artificial Sequence: Synthetic oligonucleotide
uguacgagcguaaggugga

SEQ ID NO: 3172554 - RNA, 19 nt, Artificial Sequence
  Description of Artificial Sequence: Synthetic oligonucleotide
gaggaagaaggaccaaaag

SEQ ID NO: 3172555 - RNA, 19 nt, Artificial Sequence
  Description of Artificial Sequence: Synthetic oligonucleotide
cuucucuaauccauagagc

SEQ ID NO: 3172556 - RNA, 19 nt, Artificial Sequence
  Description of Artificial Sequence: Synthetic oligonucleotide
aagacugggaagggcaccg

SEQ ID NO: 3172557 - RNA, 19 nt, Artificial Sequence
  Description of Artificial Sequence: Synthetic oligonucleotide
agauguuagugauggaagu

SEQ ID NO: 3172558 - RNA, 19 nt, Artificial Sequence
  Description of Artificial Sequence: Synthetic oligonucleotide
ucugagauccuuugguuuc

SEQ ID NO: 3172559 - RNA, 19 nt, Artificial Sequence
  Description of Artificial Sequence: Synthetic oligonucleotide
guugugugaauccauuuuc

SEQ ID NO: 3172560 - RNA, 19 nt, Artificial Sequence
  Description of Artificial Sequence: Synthetic oligonucleotide
uugugugaauccauuuucu

SEQ ID NO: 3172561 - RNA, 19 nt, Artificial Sequence
  Description of Artificial Sequence: Synthetic oligonucleotide
uggggagaauccaugggcc

SEQ ID NO: 3172562 - RNA, 19 nt, Artificial Sequence
  Description of Artificial Sequence: Synthetic oligonucleotide
cuugauauauauauaugua

SEQ ID NO: 3172563 - RNA, 19 nt, Artificial Sequence
  Description of Artificial Sequence: Synthetic oligonucleotide
uguugugugaauccauuuu

SEQ ID NO: 3172564 - RNA, 19 nt, Artificial Sequence
  Description of Artificial Sequence: Synthetic oligonucleotide
uaaauucaagugucuucag

SEQ ID NO: 3172565 - RNA, 19 nt, Artificial Sequence
  Description of Artificial Sequence: Synthetic oligonucleotide
guugaaugugauauccuag

SEQ ID NO: 3172566 - RNA, 19 nt, Artificial Sequence
  Description of Artificial Sequence: Synthetic oligonucleotide
cuuucccaaagucagugug

SEQ ID NO: 3172567 - RNA, 19 nt, Artificial Sequence
  Description of Artificial Sequence: Synthetic oligonucleotide
cugagacuggccaaugccc

SEQ ID NO: 3172568 - RNA, 19 nt, Artificial Sequence
  Description of Artificial Sequence: Synthetic oligonucleotide
uucaaugcccuuucccuug

SEQ ID NO: 3172569 - RNA, 19 nt, Artificial Sequence
  Description of Artificial Sequence: Synthetic oligonucleotide
aggcugaaacuccccaacc

SEQ ID NO: 3172570 - RNA, 19 nt, Artificial Sequence
  Description of Artificial Sequence: Synthetic oligonucleotide
gugguagacauguugugug

SEQ ID NO: 3172571 - RNA, 19 nt, Artificial Sequence
  Description of Artificial Sequence: Synthetic oligonucleotide
uuucccaaagucagugugu

SEQ ID NO: 3172572 - RNA, 19 nt, Artificial Sequence
  Description of Artificial Sequence: Synthetic oligonucleotide
acgagaaguaugguugccc

SEQ ID NO: 3172573 - RNA, 19 nt, Artificial Sequence
  Description of Artificial Sequence: Synthetic oligonucleotide
ugcaacgucaacuccuaac

SEQ ID NO: 3172574 - RNA, 19 nt, Artificial Sequence
  Description of Artificial Sequence: Synthetic oligonucleotide
uuacucaggcucaaaacuu

SEQ ID NO: 3172575 - RNA, 19 nt, Artificial Sequence
  Description of Artificial Sequence: Synthetic oligonucleotide
ugagacuggccaaugccca

SEQ ID NO: 3172576 - RNA, 19 nt, Artificial Sequence
  Description of Artificial Sequence: Synthetic oligonucleotide
gguaaagacaauguacgag

SEQ ID NO: 3172577 - RNA, 19 nt, Artificial Sequence
  Description of Artificial Sequence: Synthetic oligonucleotide
ugaauccauuuucuuucag

SEQ ID NO: 3172578 - RNA, 19 nt, Artificial Sequence
  Description of Artificial Sequence: Synthetic oligonucleotide
cuaauagcccaaaugaugu

SEQ ID NO: 3172579 - RNA, 19 nt, Artificial Sequence
  Description of Artificial Sequence: Synthetic oligonucleotide
aucgguccuaaauucaagu

SEQ ID NO: 3172580 - RNA, 19 nt, Artificial Sequence
  Description of Artificial Sequence: Synthetic oligonucleotide
uaugguugcccguagcguc

SEQ ID NO: 3172581 - RNA, 19 nt, Artificial Sequence
  Description of Artificial Sequence: Synthetic oligonucleotide
ggaaccuucucugaaaagc

SEQ ID NO: 3172582 - RNA, 19 nt, Artificial Sequence
  Description of Artificial Sequence: Synthetic oligonucleotide
aaaccauaucuguagccuu

SEQ ID NO: 3172583 - RNA, 19 nt, Artificial Sequence
  Description of Artificial Sequence: Synthetic oligonucleotide
auauauauauauguauaua

SEQ ID NO: 3172584 - RNA, 19 nt, Artificial Sequence
  Description of Artificial Sequence: Synthetic oligonucleotide
aauguuuacaaccucaguc

SEQ ID NO: 3172585 - RNA, 19 nt, Artificial Sequence
  Description of Artificial Sequence: Synthetic oligonucleotide
aaucacacccacuacagcc

SEQ ID NO: 3172586 - RNA, 19 nt, Artificial Sequence
  Description of Artificial Sequence: Synthetic oligonucleotide
uauauauaaaacuagcuua

SEQ ID NO: 3172587 - RNA, 19 nt, Artificial Sequence
  Description of Artificial Sequence: Synthetic oligonucleotide
uuuaauguaguccucguca

SEQ ID NO: 3172588 - RNA, 19 nt, Artificial Sequence
  Description of Artificial Sequence: Synthetic oligonucleotide
auaaaacuagcuuauaaug

SEQ ID NO: 3172589 - RNA, 19 nt, Artificial Sequence
  Description of Artificial Sequence: Synthetic oligonucleotide
uguaagaccaccucagugg

SEQ ID NO: 3172590 - RNA, 19 nt, Artificial Sequence
  Description of Artificial Sequence: Synthetic oligonucleotide
aaaacugggugacaguggg

SEQ ID NO: 3172591 - RNA, 19 nt, Artificial Sequence
  Description of Artificial Sequence: Synthetic oligonucleotide
aacuguuuaauguaguccu

SEQ ID NO: 3172592 - RNA, 19 nt, Artificial Sequence
  Description of Artificial Sequence: Synthetic oligonucleotide
uauaauguuuacaaccuca

SEQ ID NO: 3172593 - RNA, 19 nt, Artificial Sequence
  Description of Artificial Sequence: Synthetic oligonucleotide
ugcaguaucgggcaguagg

SEQ ID NO: 3172594 - RNA, 19 nt, Artificial Sequence
  Description of Artificial Sequence: Synthetic oligonucleotide
gaugauccagggcagaacg

SEQ ID NO: 3172595 - RNA, 19 nt, Artificial Sequence
  Description of Artificial Sequence: Synthetic oligonucleotide
aucagugcagcuuuaguac

SEQ ID NO: 3172596 - RNA, 19 nt, Artificial Sequence
  Description of Artificial Sequence: Synthetic oligonucleotide
uguaguccucgucagaagg

SEQ ID NO: 3172597 - RNA, 19 nt, Artificial Sequence
  Description of Artificial Sequence: Synthetic oligonucleotide
uauaaaacuagcuuauaau

SEQ ID NO: 3172598 - RNA, 19 nt, Artificial Sequence
  Description of Artificial Sequence: Synthetic oligonucleotide
gauagcauagagcggaugc

SEQ ID NO: 3172599 - RNA, 19 nt, Artificial Sequence
  Description of Artificial Sequence: Synthetic oligonucleotide
uuuguaguggagcucagca

SEQ ID NO: 3172600 - RNA, 19 nt, Artificial Sequence
  Description of Artificial Sequence: Synthetic oligonucleotide
gcuuauaauguuuacaacc

SEQ ID NO: 3172601 - RNA, 19 nt, Artificial Sequence
  Description of Artificial Sequence: Synthetic oligonucleotide
uggaauauacaaauauaca

SEQ ID NO: 3172602 - RNA, 19 nt, Artificial Sequence
  Description of Artificial Sequence: Synthetic oligonucleotide
agacaacggacauaguccc

SEQ ID NO: 3172603 - RNA, 19 nt, Artificial Sequence
  Description of Artificial Sequence: Synthetic oligonucleotide
gaaaacucagugcugauga

SEQ ID NO: 3172604 - RNA, 19 nt, Artificial Sequence
  Description of Artificial Sequence: Synthetic oligonucleotide
acuuggaugacuuccaaca

SEQ ID NO: 3172605 - RNA, 19 nt, Artificial Sequence
  Description of Artificial Sequence: Synthetic oligonucleotide
uggggauggaaucacaccc

SEQ ID NO: 3172606 - RNA, 19 nt, Artificial Sequence
  Description of Artificial Sequence: Synthetic oligonucleotide
acaaccucagucucugugc

SEQ ID NO: 3172607 - RNA, 19 nt, Artificial Sequence
  Description of Artificial Sequence: Synthetic oligonucleotide
uuggaugacuuccaacacg

SEQ ID NO: 3172608 - RNA, 19 nt, Artificial Sequence
  Description of Artificial Sequence: Synthetic oligonucleotide
uagcuuauaauguuuacaa

SEQ ID NO: 3172609 - RNA, 19 nt, Artificial Sequence
  Description of Artificial Sequence: Synthetic oligonucleotide
uugaugcggucaaauaucg

SEQ ID NO: 3172610 - RNA, 19 nt, Artificial Sequence
  Description of Artificial Sequence: Synthetic oligonucleotide
aauaucgucggcugugucu

SEQ ID NO: 3172611 - RNA, 19 nt, Artificial Sequence
  Description of Artificial Sequence: Synthetic oligonucleotide
uuaauguaguccucgucag

SEQ ID NO: 3172612 - RNA, 19 nt, Artificial Sequence
  Description of Artificial Sequence: Synthetic oligonucleotide
agcuuuaguacucccuggc

SEQ ID NO: 3172613 - RNA, 19 nt, Artificial Sequence
  Description of Artificial Sequence: Synthetic oligonucleotide
uacgcagccacuuggauga

SEQ ID NO: 3172614 - RNA, 19 nt, Artificial Sequence
  Description of Artificial Sequence: Synthetic oligonucleotide
gaugcggucaaauaucguc

SEQ ID NO: 3172615 - RNA, 19 nt, Artificial Sequence
  Description of Artificial Sequence: Synthetic oligonucleotide
aaacucagugcugaugagg

SEQ ID NO: 3172616 - RNA, 19 nt, Artificial Sequence
  Description of Artificial Sequence: Synthetic oligonucleotide
agugugguacuuuccaggg

SEQ ID NO: 3172617 - RNA, 19 nt, Artificial Sequence
  Description of Artificial Sequence: Synthetic oligonucleotide
guggaauauacaaauauac

SEQ ID NO: 3172618 - RNA, 19 nt, Artificial Sequence
  Description of Artificial Sequence: Synthetic oligonucleotide
agcuuauaauguuuacaac

SEQ ID NO: 3172619 - RNA, 19 nt, Artificial Sequence
  Description of Artificial Sequence: Synthetic oligonucleotide
uguggaauauacaaauaua

SEQ ID NO: 3172620 - RNA, 19 nt, Artificial Sequence
  Description of Artificial Sequence: Synthetic oligonucleotide
agucucugugcucuugugc

SEQ ID NO: 3172621 - RNA, 19 nt, Artificial Sequence
  Description of Artificial Sequence: Synthetic oligonucleotide
auguggaauauacaaauau

SEQ ID NO: 3172622 - RNA, 19 nt, Artificial Sequence
  Description of Artificial Sequence: Synthetic oligonucleotide
uugcagacaacggacauag

SEQ ID NO: 3172623 - RNA, 19 nt, Artificial Sequence
  Description of Artificial Sequence: Synthetic oligonucleotide
acuagcuuauaauguuuac

SEQ ID NO: 3172624 - RNA, 19 nt, Artificial Sequence
  Description of Artificial Sequence: Synthetic oligonucleotide
auagcaacagugcugggca

SEQ ID NO: 3172625 - RNA, 19 nt, Artificial Sequence
  Description of Artificial Sequence: Synthetic oligonucleotide
gugcugaugagguugggcg

SEQ ID NO: 3172626 - RNA, 19 nt, Artificial Sequence
  Description of Artificial Sequence: Synthetic oligonucleotide
auuauaccugcuccagucg

SEQ ID NO: 3172627 - RNA, 19 nt, Artificial Sequence
  Description of Artificial Sequence: Synthetic oligonucleotide
gaacuguuuaauguagucc

SEQ ID NO: 3172628 - RNA, 19 nt, Artificial Sequence
  Description of Artificial Sequence: Synthetic oligonucleotide
ugugguacuuuccagggau

SEQ ID NO: 3172629 - RNA, 19 nt, Artificial Sequence
  Description of Artificial Sequence: Synthetic oligonucleotide
accauagcaacagugcugg

SEQ ID NO: 3172630 - RNA, 19 nt, Artificial Sequence
  Description of Artificial Sequence: Synthetic oligonucleotide
uuauaccugcuccagucgc

SEQ ID NO: 3172631 - RNA, 19 nt, Artificial Sequence
  Description of Artificial Sequence: Synthetic oligonucleotide
gauggaaucacacccacua

SEQ ID NO: 3172632 - RNA, 19 nt, Artificial Sequence
  Description of Artificial Sequence: Synthetic oligonucleotide
ugucuguaagaccaccuca

SEQ ID NO: 3172633 - RNA, 19 nt, Artificial Sequence
  Description of Artificial Sequence: Synthetic oligonucleotide
cauuauaccugcuccaguc

SEQ ID NO: 3172634 - RNA, 19 nt, Artificial Sequence
  Description of Artificial Sequence: Synthetic oligonucleotide
cuugaugcggucaaauauc

SEQ ID NO: 3172635 - RNA, 19 nt, Artificial Sequence
  Description of Artificial Sequence: Synthetic oligonucleotide
guaagaccaccucaguggg

SEQ ID NO: 3172636 - RNA, 19 nt, Artificial Sequence
  Description of Artificial Sequence: Synthetic oligonucleotide
aauguaguccucgucagaa

SEQ ID NO: 3172637 - RNA, 19 nt, Artificial Sequence
  Description of Artificial Sequence: Synthetic oligonucleotide
auuauugggagccgggccu

SEQ ID NO: 3172638 - RNA, 19 nt, Artificial Sequence
  Description of Artificial Sequence: Synthetic oligonucleotide
aaaacucagugcugaugag

SEQ ID NO: 3172639 - RNA, 19 nt, Artificial Sequence
  Description of Artificial Sequence: Synthetic oligonucleotide
uccacuuuguaguggagcu

SEQ ID NO: 3172640 - RNA, 19 nt, Artificial Sequence
  Description of Artificial Sequence: Synthetic oligonucleotide
ugcucuugugcacuggaug

SEQ ID NO: 3172641 - RNA, 19 nt, Artificial Sequence
  Description of Artificial Sequence: Synthetic oligonucleotide
aaauaucgucggcuguguc

SEQ ID NO: 3172642 - RNA, 19 nt, Artificial Sequence
  Description of Artificial Sequence: Synthetic oligonucleotide
uuauaauguuuacaaccuc

SEQ ID NO: 3172643 - RNA, 19 nt, Artificial Sequence
  Description of Artificial Sequence: Synthetic oligonucleotide
ucagugcugaugagguugg

SEQ ID NO: 3172644 - RNA, 19 nt, Artificial Sequence
  Description of Artificial Sequence: Synthetic oligonucleotide
uccaacacgguuugcagac

SEQ ID NO: 3172645 - RNA, 19 nt, Artificial Sequence
  Description of Artificial Sequence: Synthetic oligonucleotide
auagagcggaugcaguauc

SEQ ID NO: 3172646 - RNA, 19 nt, Artificial Sequence
  Description of Artificial Sequence: Synthetic oligonucleotide
uccagggauagcauagagc

SEQ ID NO: 3172647 - RNA, 19 nt, Artificial Sequence
  Description of Artificial Sequence: Synthetic oligonucleotide
uccaucggaaguccuugcg

SEQ ID NO: 3172648 - RNA, 19 nt, Artificial Sequence
  Description of Artificial Sequence: Synthetic oligonucleotide
ucgcccuugcagaugaucc

SEQ ID NO: 3172649 - RNA, 19 nt, Artificial Sequence
  Description of Artificial Sequence: Synthetic oligonucleotide
agccacuuggaugacuucc

SEQ ID NO: 3172650 - RNA, 19 nt, Artificial Sequence
  Description of Artificial Sequence: Synthetic oligonucleotide
aacugggugacagugggca

SEQ ID NO: 3172651 - RNA, 19 nt, Artificial Sequence
  Description of Artificial Sequence: Synthetic oligonucleotide
auaauguuuacaaccucag

SEQ ID NO: 3172652 - RNA, 19 nt, Artificial Sequence
  Description of Artificial Sequence: Synthetic oligonucleotide
uucuguccauuauugggag

SEQ ID NO: 3172653 - RNA, 19 nt, Artificial Sequence
  Description of Artificial Sequence: Synthetic oligonucleotide
aguaggcuuguagaucucc

SEQ ID NO: 3172654 - RNA, 19 nt, Artificial Sequence
  Description of Artificial Sequence: Synthetic oligonucleotide
auauauaaaacuagcuuau

SEQ ID NO: 3172655 - RNA, 19 nt, Artificial Sequence
  Description of Artificial Sequence: Synthetic oligonucleotide
cuguccauuauugggagcc

SEQ ID NO: 3172656 - RNA, 19 nt, Artificial Sequence
  Description of Artificial Sequence: Synthetic oligonucleotide
uagagcggaugcaguaucg

SEQ ID NO: 3172657 - RNA, 19 nt, Artificial Sequence
  Description of Artificial Sequence: Synthetic oligonucleotide
cagugugguacuuuccagg

SEQ ID NO: 3172658 - RNA, 19 nt, Artificial Sequence
  Description of Artificial Sequence: Synthetic oligonucleotide
gaucagugcagcuuuagua

SEQ ID NO: 3172659 - RNA, 19 nt, Artificial Sequence
  Description of Artificial Sequence: Synthetic oligonucleotide
aacucagugcugaugaggu

SEQ ID NO: 3172660 - RNA, 19 nt, Artificial Sequence
  Description of Artificial Sequence: Synthetic oligonucleotide
uuuaguacucccuggccuc

SEQ ID NO: 3172661 - RNA, 19 nt, Artificial Sequence
  Description of Artificial Sequence: Synthetic oligonucleotide
ugcggucaaauaucgucgg

SEQ ID NO: 3172662 - RNA, 19 nt, Artificial Sequence
  Description of Artificial Sequence: Synthetic oligonucleotide
acacgguuugcagacaacg

SEQ ID NO: 3172663 - RNA, 19 nt, Artificial Sequence
  Description of Artificial Sequence: Synthetic oligonucleotide
uguagaucuccaauuucuc

SEQ ID NO: 3172664 - RNA, 19 nt, Artificial Sequence
  Description of Artificial Sequence: Synthetic oligonucleotide
aucuccaauuucucuuugg

SEQ ID NO: 3172665 - RNA, 19 nt, Artificial Sequence
  Description of Artificial Sequence: Synthetic oligonucleotide
uuguaguggagcucagcag

SEQ ID NO: 3172666 - RNA, 19 nt, Artificial Sequence
  Description of Artificial Sequence: Synthetic oligonucleotide
ugugucuguaagaccaccu

SEQ ID NO: 3172667 - RNA, 19 nt, Artificial Sequence
  Description of Artificial Sequence: Synthetic oligonucleotide
cugcauguugucaccauag

SEQ ID NO: 3172668 - RNA, 19 nt, Artificial Sequence
  Description of Artificial Sequence: Synthetic oligonucleotide
uagaucuccaauuucucuu

SEQ ID NO: 3172669 - RNA, 19 nt, Artificial Sequence
  Description of Artificial Sequence: Synthetic oligonucleotide
agcggaugcaguaucgggc

SEQ ID NO: 3172670 - RNA, 19 nt, Artificial Sequence
  Description of Artificial Sequence: Synthetic oligonucleotide
uguuuaauguaguccucgu

SEQ ID NO: 3172671 - RNA, 19 nt, Artificial Sequence
  Description of Artificial Sequence: Synthetic oligonucleotide
cauuauugggagccgggcc

SEQ ID NO: 3172672 - RNA, 19 nt, Artificial Sequence
  Description of Artificial Sequence: Synthetic oligonucleotide
uuccagggauagcauagag

SEQ ID NO: 3172673 - RNA, 19 nt, Artificial Sequence
  Description of Artificial Sequence: Synthetic oligonucleotide
uggugcauaccccuagugu

SEQ ID NO: 3172674 - RNA, 19 nt, Artificial Sequence
  Description of Artificial Sequence: Synthetic oligonucleotide
agugcagcuuuaguacucc

SEQ ID NO: 3172675 - RNA, 19 nt, Artificial Sequence
  Description of Artificial Sequence: Synthetic oligonucleotide
uauaccugcuccagucgcc

SEQ ID NO: 3172676 - RNA, 19 nt, Artificial Sequence
  Description of Artificial Sequence: Synthetic oligonucleotide
ugcagaugauccagggcag

SEQ ID NO: 3172677 - RNA, 19 nt, Artificial Sequence
  Description of Artificial Sequence: Synthetic oligonucleotide
agggauagcauagagcgga

SEQ ID NO: 3172678 - RNA, 19 nt, Artificial Sequence
  Description of Artificial Sequence: Synthetic oligonucleotide
uacucauguggaauauaca

SEQ ID NO: 3172679 - RNA, 19 nt, Artificial Sequence
  Description of Artificial Sequence: Synthetic oligonucleotide
ugccuacgcagccacuugg

SEQ ID NO: 3172680 - RNA, 19 nt, Artificial Sequence
  Description of Artificial Sequence: Synthetic oligonucleotide
gagcggaugcaguaucggg

SEQ ID NO: 3172681 - RNA, 19 nt, Artificial Sequence
  Description of Artificial Sequence: Synthetic oligonucleotide
cuguaagaccaccucagug

SEQ ID NO: 3172682 - RNA, 19 nt, Artificial Sequence
  Description of Artificial Sequence: Synthetic oligonucleotide
ucauuauaccugcuccagu

SEQ ID NO: 3172683 - RNA, 19 nt, Artificial Sequence
  Description of Artificial Sequence: Synthetic oligonucleotide
uggagcucagcagaaaacu

SEQ ID NO: 3172684 - RNA, 19 nt, Artificial Sequence
  Description of Artificial Sequence: Synthetic oligonucleotide
uguaugaucuggaagauag

SEQ ID NO: 3172685 - RNA, 19 nt, Artificial Sequence
  Description of Artificial Sequence: Synthetic oligonucleotide
uuuaguaaaaccaauuccu

SEQ ID NO: 3172686 - RNA, 19 nt, Artificial Sequence
  Description of Artificial Sequence: Synthetic oligonucleotide
aguaaaaccaauuccugac

SEQ ID NO: 3172687 - RNA, 19 nt, Artificial Sequence
  Description of Artificial Sequence: Synthetic oligonucleotide
uaagguuuuguaaugaaga

SEQ ID NO: 3172688 - RNA, 19 nt, Artificial Sequence
  Description of Artificial Sequence: Synthetic oligonucleotide
ugagaaggcaguuuggccg

SEQ ID NO: 3172689 - RNA, 19 nt, Artificial Sequence
  Description of Artificial Sequence: Synthetic oligonucleotide
gauauuucucuucuugugg

SEQ ID NO: 3172690 - RNA, 19 nt, Artificial Sequence
  Description of Artificial Sequence: Synthetic oligonucleotide
aagguuuuguaaugaagac

SEQ ID NO: 3172691 - RNA, 19 nt, Artificial Sequence
  Description of Artificial Sequence: Synthetic oligonucleotide
auauuucucuucuuguggc

SEQ ID NO: 3172692 - RNA, 19 nt, Artificial Sequence
  Description of Artificial Sequence: Synthetic oligonucleotide
cuuugcuugcuauagaccc

SEQ ID NO: 3172693 - RNA, 19 nt, Artificial Sequence
  Description of Artificial Sequence: Synthetic oligonucleotide
uuaagguuuuguaaugaag

SEQ ID NO: 3172694 - RNA, 19 nt, Artificial Sequence
  Description of Artificial Sequence: Synthetic oligonucleotide
caggauaguaaauugggcg

SEQ ID NO: 3172695 - RNA, 19 nt, Artificial Sequence
  Description of Artificial Sequence: Synthetic oligonucleotide
ucuucuuguggccucaggg

SEQ ID NO: 3172696 - RNA, 19 nt, Artificial Sequence
  Description of Artificial Sequence: Synthetic oligonucleotide
aaaccaauuccugacagag

SEQ ID NO: 3172697 - RNA, 19 nt, Artificial Sequence
  Description of Artificial Sequence: Synthetic oligonucleotide
uuccaauuggccaacaaga

SEQ ID NO: 3172698 - RNA, 19 nt, Artificial Sequence
  Description of Artificial Sequence: Synthetic oligonucleotide
aggauaguaaauugggcgg

SEQ ID NO: 3172699 - RNA, 19 nt, Artificial Sequence
  Description of Artificial Sequence: Synthetic oligonucleotide
aacaaacagugccaacagc

SEQ ID NO: 3172700 - RNA, 19 nt, Artificial Sequence
  Description of Artificial Sequence: Synthetic oligonucleotide
ugaucuggaagauagcuga

SEQ ID NO: 3172701 - RNA, 19 nt, Artificial Sequence
  Description of Artificial Sequence: Synthetic oligonucleotide
aacccggggaaacagacag

SEQ ID NO: 3172702 - RNA, 19 nt, Artificial Sequence
  Description of Artificial Sequence: Synthetic oligonucleotide
uguaaugaagacauuuuau

SEQ ID NO: 3172703 - RNA, 19 nt, Artificial Sequence
  Description of Artificial Sequence: Synthetic oligonucleotide
cacuggaggacacagaugc

SEQ ID NO: 3172704 - RNA, 19 nt, Artificial Sequence
  Description of Artificial Sequence: Synthetic oligonucleotide
gacauuuuauuuuaguaaa

SEQ ID NO: 3172705 - RNA, 19 nt, Artificial Sequence
  Description of Artificial Sequence: Synthetic oligonucleotide
agagcacuacugcugaccc

SEQ ID NO: 3172706 - RNA, 19 nt, Artificial Sequence
  Description of Artificial Sequence: Synthetic oligonucleotide
agacagagagcacuacugc

SEQ ID NO: 3172707 - RNA, 19 nt, Artificial Sequence
  Description of Artificial Sequence: Synthetic oligonucleotide
caauuggccaacaagagca

SEQ ID NO: 3172708 - RNA, 19 nt, Artificial Sequence
  Description of Artificial Sequence: Synthetic oligonucleotide
uguauuggcaggauaguaa

SEQ ID NO: 3172709 - RNA, 19 nt, Artificial Sequence
  Description of Artificial Sequence: Synthetic oligonucleotide
accucuuuucuaucgaccg

SEQ ID NO: 3172710 - RNA, 19 nt, Artificial Sequence
  Description of Artificial Sequence: Synthetic oligonucleotide
aguaaauugggcggguagc

SEQ ID NO: 3172711 - RNA, 19 nt, Artificial Sequence
  Description of Artificial Sequence: Synthetic oligonucleotide
uuccugacagagaagagac

SEQ ID NO: 3172712 - RNA, 19 nt, Artificial Sequence
  Description of Artificial Sequence: Synthetic oligonucleotide
aaauugggcggguagcuca

SEQ ID NO: 3172713 - RNA, 19 nt, Artificial Sequence
  Description of Artificial Sequence: Synthetic oligonucleotide
uuauuuuaguaaaaccaau

SEQ ID NO: 3172714 - RNA, 19 nt, Artificial Sequence
  Description of Artificial Sequence: Synthetic oligonucleotide
uccaauuggccaacaagag

SEQ ID NO: 3172715 - RNA, 19 nt, Artificial Sequence
  Description of Artificial Sequence: Synthetic oligonucleotide
acaacagggaccucuuuuc

SEQ ID NO: 3172716 - RNA, 19 nt, Artificial Sequence
  Description of Artificial Sequence: Synthetic oligonucleotide
uuuuguaaugaagacauuu

SEQ ID NO: 3172717 - RNA, 19 nt, Artificial Sequence
  Description of Artificial Sequence: Synthetic oligonucleotide
uuuguaaugaagacauuuu

SEQ ID NO: 3172718 - RNA, 19 nt, Artificial Sequence
  Description of Artificial Sequence: Synthetic oligonucleotide
uacguuuccccucugggug

SEQ ID NO: 3172719 - RNA, 19 nt, Artificial Sequence
  Description of Artificial Sequence: Synthetic oligonucleotide
gcuauagacccacugaagg

SEQ ID NO: 3172720 - RNA, 19 nt, Artificial Sequence
  Description of Artificial Sequence: Synthetic oligonucleotide
accaauuccugacagagaa

SEQ ID NO: 3172721 - RNA, 19 nt, Artificial Sequence
  Description of Artificial Sequence: Synthetic oligonucleotide
uuggccaacaagagcagag

SEQ ID NO: 3172722 - RNA, 19 nt, Artificial Sequence
  Description of Artificial Sequence: Synthetic oligonucleotide
auagcugagccacagacaa

SEQ ID NO: 3172723 - RNA, 19 nt, Artificial Sequence
  Description of Artificial Sequence: Synthetic oligonucleotide
aagagacuguauuggcagg

SEQ ID NO: 3172724 - RNA, 19 nt, Artificial Sequence
  Description of Artificial Sequence: Synthetic oligonucleotide
cucuguaugaucuggaaga

SEQ ID NO: 3172725 - RNA, 19 nt, Artificial Sequence
  Description of Artificial Sequence: Synthetic oligonucleotide
uaugcucuguaugaucugg

SEQ ID NO: 3172726 - RNA, 19 nt, Artificial Sequence
  Description of Artificial Sequence: Synthetic oligonucleotide
uuguaaugaagacauuuua

SEQ ID NO: 3172727 - RNA, 19 nt, Artificial Sequence
  Description of Artificial Sequence: Synthetic oligonucleotide
aaggcaguuuggccggacc

SEQ ID NO: 3172728 - RNA, 19 nt, Artificial Sequence
  Description of Artificial Sequence: Synthetic oligonucleotide
ucgacucccaccugcaagg

SEQ ID NO: 3172729 - RNA, 19 nt, Artificial Sequence
  Description of Artificial Sequence: Synthetic oligonucleotide
aaaaccaauuccugacaga

SEQ ID NO: 3172730 - RNA, 19 nt, Artificial Sequence
  Description of Artificial Sequence: Synthetic oligonucleotide
uuuuaagguuuuguaauga

SEQ ID NO: 3172731 - RNA, 19 nt, Artificial Sequence
  Description of Artificial Sequence: Synthetic oligonucleotide
uggaagauagcugagccac

SEQ ID NO: 3172732 - RNA, 19 nt, Artificial Sequence
  Description of Artificial Sequence: Synthetic oligonucleotide
uuucuaucgaccgugguuc

SEQ ID NO: 3172733 - RNA, 19 nt, Artificial Sequence
  Description of Artificial Sequence: Synthetic oligonucleotide
uuggcaggauaguaaauug

SEQ ID NO: 3172734 - RNA, 19 nt, Artificial Sequence
  Description of Artificial Sequence: Synthetic oligonucleotide
cuuccaauuggccaacaag

SEQ ID NO: 3172735 - RNA, 19 nt, Artificial Sequence
  Description of Artificial Sequence: Synthetic oligonucleotide
ucuuuucuaucgaccgugg

SEQ ID NO: 3172736 - RNA, 19 nt, Artificial Sequence
  Description of Artificial Sequence: Synthetic oligonucleotide
ucugugguccuccaccugc

SEQ ID NO: 3172737 - RNA, 19 nt, Artificial Sequence
  Description of Artificial Sequence: Synthetic oligonucleotide
uggagugaacaacagggac

SEQ ID NO: 3172738 - RNA, 19 nt, Artificial Sequence
  Description of Artificial Sequence: Synthetic oligonucleotide
uuuaagguuuuguaaugaa

SEQ ID NO: 3172739 - RNA, 19 nt, Artificial Sequence
  Description of Artificial Sequence: Synthetic oligonucleotide
uggaggacacagaugcagg

SEQ ID NO: 3172740 - RNA, 19 nt, Artificial Sequence
  Description of Artificial Sequence: Synthetic oligonucleotide
uuuucuaucgaccgugguu

SEQ ID NO: 3172741 - RNA, 19 nt, Artificial Sequence
  Description of Artificial Sequence: Synthetic oligonucleotide
guagcucagggccacaugc

SEQ ID NO: 3172742 - RNA, 19 nt, Artificial Sequence
  Description of Artificial Sequence: Synthetic oligonucleotide
aacaacagggaccucuuuu

SEQ ID NO: 3172743 - RNA, 19 nt, Artificial Sequence
  Description of Artificial Sequence: Synthetic oligonucleotide
gagaaggcaguuuggccgg

SEQ ID NO: 3172744 - RNA, 19 nt, Artificial Sequence
  Description of Artificial Sequence: Synthetic oligonucleotide
augaagacauuuuauuuua

SEQ ID NO: 3172745 - RNA, 19 nt, Artificial Sequence
  Description of Artificial Sequence: Synthetic oligonucleotide
uccacuggaggacacagau

SEQ ID NO: 3172746 - RNA, 19 nt, Artificial Sequence
  Description of Artificial Sequence: Synthetic oligonucleotide
caggauauuucucuucuug

SEQ ID NO: 3172747 - RNA, 19 nt, Artificial Sequence
  Description of Artificial Sequence: Synthetic oligonucleotide
aggauauuucucuucuugu

SEQ ID NO: 3172748 - RNA, 19 nt, Artificial Sequence
  Description of Artificial Sequence: Synthetic oligonucleotide
uauuucucuucuuguggcc

SEQ ID NO: 3172749 - RNA, 19 nt, Artificial Sequence
  Description of Artificial Sequence: Synthetic oligonucleotide
cauccuuaugcucuguaug

SEQ ID NO: 3172750 - RNA, 19 nt, Artificial Sequence
  Description of Artificial Sequence: Synthetic oligonucleotide
agggaccucuuuucuaucg

SEQ ID NO: 3172751 - RNA, 19 nt, Artificial Sequence
  Description of Artificial Sequence: Synthetic oligonucleotide
uauagacccacugaagguc

SEQ ID NO: 3172752 - RNA, 19 nt, Artificial Sequence
  Description of Artificial Sequence: Synthetic oligonucleotide
aaacagugccaacagccau

SEQ ID NO: 3172753 - RNA, 19 nt, Artificial Sequence
  Description of Artificial Sequence: Synthetic oligonucleotide
uuagccauccggauccgcu

SEQ ID NO: 3172754 - RNA, 19 nt, Artificial Sequence
  Description of Artificial Sequence: Synthetic oligonucleotide
gaugcucucgacucccacc

SEQ ID NO: 3172755 - RNA, 19 nt, Artificial Sequence
  Description of Artificial Sequence: Synthetic oligonucleotide
aggauggccggggugagcc

SEQ ID NO: 3172756 - RNA, 19 nt, Artificial Sequence
  Description of Artificial Sequence: Synthetic oligonucleotide
ucucacaugcccauccuua

SEQ ID NO: 3172757 - RNA, 19 nt, Artificial Sequence
  Description of Artificial Sequence: Synthetic oligonucleotide
uacugcugaccccacacgu

SEQ ID NO: 3172758 - RNA, 19 nt, Artificial Sequence
  Description of Artificial Sequence: Synthetic oligonucleotide
gaaacagacagagagcacu

SEQ ID NO: 3172759 - RNA, 19 nt, Artificial Sequence
  Description of Artificial Sequence: Synthetic oligonucleotide
ggcaggauaguaaauuggg

SEQ ID NO: 3172760 - RNA, 19 nt, Artificial Sequence
  Description of Artificial Sequence: Synthetic oligonucleotide
aacaagagcagaguccuuu

SEQ ID NO: 3172761 - RNA, 19 nt, Artificial Sequence
  Description of Artificial Sequence: Synthetic oligonucleotide
auuccugacagagaagaga

SEQ ID NO: 3172762 - RNA, 19 nt, Artificial Sequence
  Description of Artificial Sequence: Synthetic oligonucleotide
ggauauuucucuucuugug

SEQ ID NO: 3172763 - RNA, 19 nt, Artificial Sequence
  Description of Artificial Sequence: Synthetic oligonucleotide
cuggccuucucacaugccc

SEQ ID NO: 3172764 - RNA, 19 nt, Artificial Sequence
  Description of Artificial Sequence: Synthetic oligonucleotide
gaagacauuuuauuuuagu

SEQ ID NO: 3172765 - RNA, 19 nt, Artificial Sequence
  Description of Artificial Sequence: Synthetic oligonucleotide
ucgaccgugguuccuuugc

SEQ ID NO: 3172766 - RNA, 19 nt, Artificial Sequence
  Description of Artificial Sequence: Synthetic oligonucleotide
acaugcacaccacagugaa

SEQ ID NO: 3172767 - RNA, 19 nt, Artificial Sequence
  Description of Artificial Sequence: Synthetic oligonucleotide
aauuccugacagagaagag

SEQ ID NO: 3172768 - RNA, 19 nt, Artificial Sequence
  Description of Artificial Sequence: Synthetic oligonucleotide
uuggcuacguuuccccucu

SEQ ID NO: 3172769 - RNA, 19 nt, Artificial Sequence
  Description of Artificial Sequence: Synthetic oligonucleotide
agguuuuguaaugaagaca

SEQ ID NO: 3172770 - RNA, 19 nt, Artificial Sequence
  Description of Artificial Sequence: Synthetic oligonucleotide
uuuggccggaccuccacca

SEQ ID NO: 3172771 - RNA, 19 nt, Artificial Sequence
  Description of Artificial Sequence: Synthetic oligonucleotide
cuuaugcucuguaugaucu

SEQ ID NO: 3172772 - RNA, 19 nt, Artificial Sequence
  Description of Artificial Sequence: Synthetic oligonucleotide
uugggcggguagcucaggg

SEQ ID NO: 3172773 - RNA, 19 nt, Artificial Sequence
  Description of Artificial Sequence: Synthetic oligonucleotide
accgugguuccuuugcuug

SEQ ID NO: 3172774 - RNA, 19 nt, Artificial Sequence
  Description of Artificial Sequence: Synthetic oligonucleotide
auggcuugggcgcuuggag

SEQ ID NO: 3172775 - RNA, 19 nt, Artificial Sequence
  Description of Artificial Sequence: Synthetic oligonucleotide
gaggacacagaugcagggg

SEQ ID NO: 3172776 - RNA, 19 nt, Artificial Sequence
  Description of Artificial Sequence: Synthetic oligonucleotide
cucuuuucuaucgaccgug

SEQ ID NO: 3172777 - RNA, 19 nt, Artificial Sequence
  Description of Artificial Sequence: Synthetic oligonucleotide
ugaaacccggggaaacaga

SEQ ID NO: 3172778 - RNA, 19 nt, Artificial Sequence
  Description of Artificial Sequence: Synthetic oligonucleotide
guaaugaagacauuuuauu

SEQ ID NO: 3172779 - RNA, 19 nt, Artificial Sequence
  Description of Artificial Sequence: Synthetic oligonucleotide
acagggaccucuuuucuau

SEQ ID NO: 3172780 - RNA, 19 nt, Artificial Sequence
  Description of Artificial Sequence: Synthetic oligonucleotide
gggauguccugugagaagg

SEQ ID NO: 3172781 - RNA, 19 nt, Artificial Sequence
  Description of Artificial Sequence: Synthetic oligonucleotide
caggagggcagcagcaucc

SEQ ID NO: 3172782 - RNA, 19 nt, Artificial Sequence
  Description of Artificial Sequence: Synthetic oligonucleotide
gaaacccggggaaacagac

SEQ ID NO: 3172783 - RNA, 19 nt, Artificial Sequence
  Description of Artificial Sequence: Synthetic oligonucleotide
guauuggcaggauaguaaa

SEQ ID NO: 3172784 - RNA, 19 nt, Artificial Sequence
  Description of Artificial Sequence: Synthetic oligonucleotide
uuuuguagcaggauccugg

SEQ ID NO: 3172785 - RNA, 19 nt, Artificial Sequence
  Description of Artificial Sequence: Synthetic oligonucleotide
ucaucuuuggcaucaauag

SEQ ID NO: 3172786 - RNA, 19 nt, Artificial Sequence
  Description of Artificial Sequence: Synthetic oligonucleotide
aucuuuggcaucaauaggc

SEQ ID NO: 3172787 - RNA, 19 nt, Artificial Sequence
  Description of Artificial Sequence: Synthetic oligonucleotide
uuuggcaucaauaggcggc

SEQ ID NO: 3172788 - RNA, 19 nt, Artificial Sequence
  Description of Artificial Sequence: Synthetic oligonucleotide
uguagcaggauccuggaga

SEQ ID NO: 3172789 - RNA, 19 nt, Artificial Sequence
  Description of Artificial Sequence: Synthetic oligonucleotide
uuugcccgcgacaacaggg

SEQ ID NO: 3172790 - RNA, 19 nt, Artificial Sequence
  Description of Artificial Sequence: Synthetic oligonucleotide
ucuuuggcaucaauaggcg

SEQ ID NO: 3172791 - RNA, 19 nt, Artificial Sequence
  Description of Artificial Sequence: Synthetic oligonucleotide
aaggcgaacagcgaguuug

SEQ ID NO: 3172792 - RNA, 19 nt, Artificial Sequence
  Description of Artificial Sequence: Synthetic oligonucleotide
uucaucuuuggcaucaaua

SEQ ID NO: 3172793 - RNA, 19 nt, Artificial Sequence
  Description of Artificial Sequence: Synthetic oligonucleotide
aaggcgguggugaggaugc

SEQ ID NO: 3172794 - RNA, 19 nt, Artificial Sequence
  Description of Artificial Sequence: Synthetic oligonucleotide
aggguguucaucuuuggca

SEQ ID NO: 3172795 - RNA, 19 nt, Artificial Sequence
  Description of Artificial Sequence: Synthetic oligonucleotide
gaggaugcagcccaaggug

SEQ ID NO: 3172796 - RNA, 19 nt, Artificial Sequence
  Description of Artificial Sequence: Synthetic oligonucleotide
augacgcucagcgugaagg

SEQ ID NO: 3172797 - RNA, 19 nt, Artificial Sequence
  Description of Artificial Sequence: Synthetic oligonucleotide
ugaggaugcagcccaaggu

SEQ ID NO: 3172798 - RNA, 19 nt, Artificial Sequence
  Description of Artificial Sequence: Synthetic oligonucleotide
gugacugccgccaugacgc

SEQ ID NO: 3172799 - RNA, 19 nt, Artificial Sequence
  Description of Artificial Sequence: Synthetic oligonucleotide
caucuuuggcaucaauagg

SEQ ID NO: 3172800 - RNA, 19 nt, Artificial Sequence
  Description of Artificial Sequence: Synthetic oligonucleotide
auccuggagacgugcaggc

SEQ ID NO: 3172801 - RNA, 19 nt, Artificial Sequence
  Description of Artificial Sequence: Synthetic oligonucleotide
ucuuugaaggcggugguga

SEQ ID NO: 3172802 - RNA, 19 nt, Artificial Sequence
  Description of Artificial Sequence: Synthetic oligonucleotide
agcgugaaggcgaacagcg

SEQ ID NO: 3172803 - RNA, 19 nt, Artificial Sequence
  Description of Artificial Sequence: Synthetic oligonucleotide
cuucugucuuugaaggcgg

SEQ ID NO: 3172804 - RNA, 19 nt, Artificial Sequence
  Description of Artificial Sequence: Synthetic oligonucleotide
ucaauaggcggcucccucc

SEQ ID NO: 3172805 - RNA, 19 nt, Artificial Sequence
  Description of Artificial Sequence: Synthetic oligonucleotide
ucagcgugaaggcgaacag

SEQ ID NO: 3172806 - RNA, 19 nt, Artificial Sequence
  Description of Artificial Sequence: Synthetic oligonucleotide
cuuuggcaucaauaggcgg

SEQ ID NO: 3172807 - RNA, 19 nt, Artificial Sequence
  Description of Artificial Sequence: Synthetic oligonucleotide
aucaauaggcggcucccuc

SEQ ID NO: 3172808 - RNA, 19 nt, Artificial Sequence
  Description of Artificial Sequence: Synthetic oligonucleotide
gauccuggagacgugcagg

SEQ ID NO: 3172809 - RNA, 19 nt, Artificial Sequence
  Description of Artificial Sequence: Synthetic oligonucleotide
cugucuuugaaggcggugg

SEQ ID NO: 3172810 - RNA, 19 nt, Artificial Sequence
  Description of Artificial Sequence: Synthetic oligonucleotide
uccagugaaguccuccacu

SEQ ID NO: 3172811 - RNA, 19 nt, Artificial Sequence
  Description of Artificial Sequence: Synthetic oligonucleotide
uuuguagcaggauccugga

SEQ ID NO: 3172812 - RNA, 19 nt, Artificial Sequence
  Description of Artificial Sequence: Synthetic oligonucleotide
agcccaaggugacugccgc

SEQ ID NO: 3172813 - RNA, 19 nt, Artificial Sequence
  Description of Artificial Sequence: Synthetic oligonucleotide
gacaacaggguguucaucu

SEQ ID NO: 3172814 - RNA, 19 nt, Artificial Sequence
  Description of Artificial Sequence: Synthetic oligonucleotide
agugaaguccuccacuuuu

SEQ ID NO: 3172815 - RNA, 19 nt, Artificial Sequence
  Description of Artificial Sequence: Synthetic oligonucleotide
aacaggguguucaucuuug

SEQ ID NO: 3172816 - RNA, 19 nt, Artificial Sequence
  Description of Artificial Sequence: Synthetic oligonucleotide
ucuccugguggcuggcucg

SEQ ID NO: 3172817 - RNA, 19 nt, Artificial Sequence
  Description of Artificial Sequence: Synthetic oligonucleotide
uuugaaggcgguggugagg

SEQ ID NO: 3172818 - RNA, 19 nt, Artificial Sequence
  Description of Artificial Sequence: Synthetic oligonucleotide
gccgccaugacgcucagcg

SEQ ID NO: 3172819 - RNA, 19 nt, Artificial Sequence
  Description of Artificial Sequence: Synthetic oligonucleotide
uugaaggcgguggugagga

SEQ ID NO: 3172820 - RNA, 19 nt, Artificial Sequence
  Description of Artificial Sequence: Synthetic oligonucleotide
gugaggaugcagcccaagg

SEQ ID NO: 3172821 - RNA, 19 nt, Artificial Sequence
  Description of Artificial Sequence: Synthetic oligonucleotide
guagcaggauccuggagac

SEQ ID NO: 3172822 - RNA, 19 nt, Artificial Sequence
  Description of Artificial Sequence: Synthetic oligonucleotide
uuuuguccgggguccagug

SEQ ID NO: 3172823 - RNA, 19 nt, Artificial Sequence
  Description of Artificial Sequence: Synthetic oligonucleotide
auaggcggcucccuccacg

SEQ ID NO: 3172824 - RNA, 19 nt, Artificial Sequence
  Description of Artificial Sequence: Synthetic oligonucleotide
cgaacagcgaguuugcccg

SEQ ID NO: 3172825 - RNA, 19 nt, Artificial Sequence
  Description of Artificial Sequence: Synthetic oligonucleotide
ugucuuugaaggcgguggu

SEQ ID NO: 3172826 - RNA, 19 nt, Artificial Sequence
  Description of Artificial Sequence: Synthetic oligonucleotide
aauaggcggcucccuccac

SEQ ID NO: 3172827 - RNA, 19 nt, Artificial Sequence
  Description of Artificial Sequence: Synthetic oligonucleotide
gcuucugucuuugaaggcg

SEQ ID NO: 3172828 - RNA, 19 nt, Artificial Sequence
  Description of Artificial Sequence: Synthetic oligonucleotide
aaggugacugccgccauga

SEQ ID NO: 3172829 - RNA, 19 nt, Artificial Sequence
  Description of Artificial Sequence: Synthetic oligonucleotide
agcaggauccuggagacgu

SEQ ID NO: 3172830 - RNA, 19 nt, Artificial Sequence
  Description of Artificial Sequence: Synthetic oligonucleotide
cuccacgcggcuuccaccg

SEQ ID NO: 3172831 - RNA, 19 nt, Artificial Sequence
  Description of Artificial Sequence: Synthetic oligonucleotide
uuguccgggguccagugaa

SEQ ID NO: 3172832 - RNA, 19 nt, Artificial Sequence
  Description of Artificial Sequence: Synthetic oligonucleotide
ggugacugccgccaugacg

SEQ ID NO: 3172833 - RNA, 19 nt, Artificial Sequence
  Description of Artificial Sequence: Synthetic oligonucleotide
acaggguguucaucuuugg

SEQ ID NO: 3172834 - RNA, 19 nt, Artificial Sequence
  Description of Artificial Sequence: Synthetic oligonucleotide
uuguagcaggauccuggag

SEQ ID NO: 3172835 - RNA, 19 nt, Artificial Sequence
  Description of Artificial Sequence: Synthetic oligonucleotide
gcgcuucugucuuugaagg

SEQ ID NO: 3172836 - RNA, 19 nt, Artificial Sequence
  Description of Artificial Sequence: Synthetic oligonucleotide
ugacgcucagcgugaaggc

SEQ ID NO: 3172837 - RNA, 19 nt, Artificial Sequence
  Description of Artificial Sequence: Synthetic oligonucleotide
cuuugaaggcgguggugag

SEQ ID NO: 3172838 - RNA, 19 nt, Artificial Sequence
  Description of Artificial Sequence: Synthetic oligonucleotide
gagacgugcaggcgcacug

SEQ ID NO: 3172839 - RNA, 19 nt, Artificial Sequence
  Description of Artificial Sequence: Synthetic oligonucleotide
aacagcgaguuugcccgcg

SEQ ID NO: 3172840 - RNA, 19 nt, Artificial Sequence
  Description of Artificial Sequence: Synthetic oligonucleotide
ugaugaagcccaggucgcg

SEQ ID NO: 3172841 - RNA, 19 nt, Artificial Sequence
  Description of Artificial Sequence: Synthetic oligonucleotide
caggguguucaucuuuggc

SEQ ID NO: 3172842 - RNA, 19 nt, Artificial Sequence
  Description of Artificial Sequence: Synthetic oligonucleotide
gaaggcgguggugaggaug

SEQ ID NO: 3172843 - RNA, 19 nt, Artificial Sequence
  Description of Artificial Sequence: Synthetic oligonucleotide
guggugaggaugcagccca

SEQ ID NO: 3172844 - RNA, 19 nt, Artificial Sequence
  Description of Artificial Sequence: Synthetic oligonucleotide
gaguuugcccgcgacaaca

SEQ ID NO: 3172845 - RNA, 19 nt, Artificial Sequence
  Description of Artificial Sequence: Synthetic oligonucleotide
gacgcucagcgugaaggcg

SEQ ID NO: 3172846 - RNA, 19 nt, Artificial Sequence
  Description of Artificial Sequence: Synthetic oligonucleotide
cugguggcuggcucgcucg

SEQ ID NO: 3172847 - RNA, 19 nt, Artificial Sequence
  Description of Artificial Sequence: Synthetic oligonucleotide
uuuguccgggguccaguga

SEQ ID NO: 3172848 - RNA, 19 nt, Artificial Sequence
  Description of Artificial Sequence: Synthetic oligonucleotide
ucugucuuugaaggcggug

SEQ ID NO: 3172849 - RNA, 19 nt, Artificial Sequence
  Description of Artificial Sequence: Synthetic oligonucleotide
uuggcaucaauaggcggcu

SEQ ID NO: 3172850 - RNA, 19 nt, Artificial Sequence
  Description of Artificial Sequence: Synthetic oligonucleotide
guuugcccgcgacaacagg

SEQ ID NO: 3172851 - RNA, 19 nt, Artificial Sequence
  Description of Artificial Sequence: Synthetic oligonucleotide
uugcccgcgacaacagggu

SEQ ID NO: 3172852 - RNA, 19 nt, Artificial Sequence
  Description of Artificial Sequence: Synthetic oligonucleotide
uaggcggcucccuccacgc

SEQ ID NO: 3172853 - RNA, 19 nt, Artificial Sequence
  Description of Artificial Sequence: Synthetic oligonucleotide
ggcaucaauaggcggcucc

SEQ ID NO: 3172854 - RNA, 19 nt, Artificial Sequence
  Description of Artificial Sequence: Synthetic oligonucleotide
ucgcguuuuguccgggguc

SEQ ID NO: 3172855 - RNA, 19 nt, Artificial Sequence
  Description of Artificial Sequence: Synthetic oligonucleotide
uguccgggguccagugaag

SEQ ID NO: 3172856 - RNA, 19 nt, Artificial Sequence
  Description of Artificial Sequence: Synthetic oligonucleotide
gcgaacagcgaguuugccc

SEQ ID NO: 3172857 - RNA, 19 nt, Artificial Sequence
  Description of Artificial Sequence: Synthetic oligonucleotide
agcgaguuugcccgcgaca

SEQ ID NO: 3172858 - RNA, 19 nt, Artificial Sequence
  Description of Artificial Sequence: Synthetic oligonucleotide
guguucaucuuuggcauca

SEQ ID NO: 3172859 - RNA, 19 nt, Artificial Sequence
  Description of Artificial Sequence: Synthetic oligonucleotide
gugaugaagcccaggucgc

SEQ ID NO: 3172860 - RNA, 19 nt, Artificial Sequence
  Description of Artificial Sequence: Synthetic oligonucleotide
cagcccaaggugacugccg

SEQ ID NO: 3172861 - RNA, 19 nt, Artificial Sequence
  Description of Artificial Sequence: Synthetic oligonucleotide
gacgugcaggcgcacuggc

SEQ ID NO: 3172862 - RNA, 19 nt, Artificial Sequence
  Description of Artificial Sequence: Synthetic oligonucleotide
uucugucuuugaaggcggu

SEQ ID NO: 3172863 - RNA, 19 nt, Artificial Sequence
  Description of Artificial Sequence: Synthetic oligonucleotide
aggcgaacagcgaguuugc

SEQ ID NO: 3172864 - RNA, 19 nt, Artificial Sequence
  Description of Artificial Sequence: Synthetic oligonucleotide
ccaggucgcguuuuguccg

SEQ ID NO: 3172865 - RNA, 19 nt, Artificial Sequence
  Description of Artificial Sequence: Synthetic oligonucleotide
ucgcucuccugguggcugg

SEQ ID NO: 3172866 - RNA, 19 nt, Artificial Sequence
  Description of Artificial Sequence: Synthetic oligonucleotide
ugaaggcgaacagcgaguu

SEQ ID NO: 3172867 - RNA, 19 nt, Artificial Sequence
  Description of Artificial Sequence: Synthetic oligonucleotide
ccuggagacgugcaggcgc

SEQ ID NO: 3172868 - RNA, 19 nt, Artificial Sequence
  Description of Artificial Sequence: Synthetic oligonucleotide
aagcccaggucgcguuuug

SEQ ID NO: 3172869 - RNA, 19 nt, Artificial Sequence
  Description of Artificial Sequence: Synthetic oligonucleotide
cucagcgugaaggcgaaca

SEQ ID NO: 3172870 - RNA, 19 nt, Artificial Sequence
  Description of Artificial Sequence: Synthetic oligonucleotide
augcagcccaaggugacug

SEQ ID NO: 3172871 - RNA, 19 nt, Artificial Sequence
  Description of Artificial Sequence: Synthetic oligonucleotide
uccuggagacgugcaggcg

SEQ ID NO: 3172872 - RNA, 19 nt, Artificial Sequence
  Description of Artificial Sequence: Synthetic oligonucleotide
agacgugcaggcgcacugg

SEQ ID NO: 3172873 - RNA, 19 nt, Artificial Sequence
  Description of Artificial Sequence: Synthetic oligonucleotide
caggauccuggagacgugc

SEQ ID NO: 3172874 - RNA, 19 nt, Artificial Sequence
  Description of Artificial Sequence: Synthetic oligonucleotide
aggaugcagcccaagguga

SEQ ID NO: 3172875 - RNA, 19 nt, Artificial Sequence
  Description of Artificial Sequence: Synthetic oligonucleotide
gaacagcgaguuugcccgc

SEQ ID NO: 3172876 - RNA, 19 nt, Artificial Sequence
  Description of Artificial Sequence: Synthetic oligonucleotide
ggauccuggagacgugcag

SEQ ID NO: 3172877 - RNA, 19 nt, Artificial Sequence
  Description of Artificial Sequence: Synthetic oligonucleotide
ugcagcccaaggugacugc

SEQ ID NO: 3172878 - RNA, 19 nt, Artificial Sequence
  Description of Artificial Sequence: Synthetic oligonucleotide
caggucgcguuuuguccgg

SEQ ID NO: 3172879 - RNA, 19 nt, Artificial Sequence
  Description of Artificial Sequence: Synthetic oligonucleotide
ugcccgcgacaacagggug

SEQ ID NO: 3172880 - RNA, 19 nt, Artificial Sequence
  Description of Artificial Sequence: Synthetic oligonucleotide
acaacaggguguucaucuu

SEQ ID NO: 3172881 - RNA, 19 nt, Artificial Sequence
  Description of Artificial Sequence: Synthetic oligonucleotide
cgugaaggcgaacagcgag

SEQ ID NO: 3172882 - RNA, 19 nt, Artificial Sequence
  Description of Artificial Sequence: Synthetic oligonucleotide
aguuugcccgcgacaacag

SEQ ID NO: 3172883 - RNA, 19 nt, Artificial Sequence
  Description of Artificial Sequence: Synthetic oligonucleotide
acugccgccaugacgcuca

SEQ ID NO: 3172884 - RNA, 19 nt, Artificial Sequence
  Description of Artificial Sequence: Synthetic oligonucleotide
aacauaacaaaauaaacug

SEQ ID NO: 3172885 - RNA, 19 nt, Artificial Sequence
  Description of Artificial Sequence: Synthetic oligonucleotide
aaugcguaauaacaaaucc

SEQ ID NO: 3172886 - RNA, 19 nt, Artificial Sequence
  Description of Artificial Sequence: Synthetic oligonucleotide
auuugcuucaucuuuaggc

SEQ ID NO: 3172887 - RNA, 19 nt, Artificial Sequence
  Description of Artificial Sequence: Synthetic oligonucleotide
ugugauuugacauauagga

SEQ ID NO: 3172888 - RNA, 19 nt, Artificial Sequence
  Description of Artificial Sequence: Synthetic oligonucleotide
uuugcaauaauuaauguaa

SEQ ID NO: 3172889 - RNA, 19 nt, Artificial Sequence
  Description of Artificial Sequence: Synthetic oligonucleotide
aaccugaaccaccagaugc

SEQ ID NO: 3172890 - RNA, 19 nt, Artificial Sequence
  Description of Artificial Sequence: Synthetic oligonucleotide
aauguaauucauaguagcc

SEQ ID NO: 3172891 - RNA, 19 nt, Artificial Sequence
  Description of Artificial Sequence: Synthetic oligonucleotide
  modified_base (4)..(4): a, c, u, g, unknown or other
guanaaagggaacauacag

SEQ ID NO: 3172892 - RNA, 19 nt, Artificial Sequence
  Description of Artificial Sequence: Synthetic oligonucleotide
uauuuaagcaaaugaagcc

SEQ ID NO: 3172893 - RNA, 19 nt, Artificial Sequence
  Description of Artificial Sequence: Synthetic oligonucleotide
auaacaaauccauacuuuc

SEQ ID NO: 3172894 - RNA, 19 nt, Artificial Sequence
  Description of Artificial Sequence: Synthetic oligonucleotide
caaaugaagguauuuaagc

SEQ ID NO: 3172895 - RNA, 19 nt, Artificial Sequence
  Description of Artificial Sequence: Synthetic oligonucleotide
uuuacuaaaacauuuuaua

SEQ ID NO: 3172896 - RNA, 19 nt, Artificial Sequence
  Description of Artificial Sequence: Synthetic oligonucleotide
aacuuacauacaaagacac

SEQ ID NO: 3172897 - RNA, 19 nt, Artificial Sequence
  Description of Artificial Sequence: Synthetic oligonucleotide
acaauauagguacugacug

SEQ ID NO: 3172898 - RNA, 19 nt, Artificial Sequence
  Description of Artificial Sequence: Synthetic oligonucleotide
agacauacuauacaaauga

SEQ ID NO: 3172899 - RNA, 19 nt, Artificial Sequence
  Description of Artificial Sequence: Synthetic oligonucleotide
cauggauuaacaauauagg

SEQ ID NO: 3172900 - RNA, 19 nt, Artificial Sequence
  Description of Artificial Sequence: Synthetic oligonucleotide
uaauguaauucauaguagc

SEQ ID NO: 3172901 - RNA, 19 nt, Artificial Sequence
  Description of Artificial Sequence: Synthetic oligonucleotide
auacaaagcaauuucaagu

SEQ ID NO: 3172902 - RNA, 19 nt, Artificial Sequence
  Description of Artificial Sequence: Synthetic oligonucleotide
auguauacaaagcaauuuc

SEQ ID NO: 3172903 - RNA, 19 nt, Artificial Sequence
  Description of Artificial Sequence: Synthetic oligonucleotide
aaaucaaugcguaauaaca

SEQ ID NO: 3172904 - RNA, 19 nt, Artificial Sequence
  Description of Artificial Sequence: Synthetic oligonucleotide
guaacaaauauacacaaga

SEQ ID NO: 3172905 - RNA, 19 nt, Artificial Sequence
  Description of Artificial Sequence: Synthetic oligonucleotide
auuuauguagcccaagcug

SEQ ID NO: 3172906 - RNA, 19 nt, Artificial Sequence
  Description of Artificial Sequence: Synthetic oligonucleotide
aguaaaauacauuuuguaa

SEQ ID NO: 3172907 - RNA, 19 nt, Artificial Sequence
  Description of Artificial Sequence: Synthetic oligonucleotide
uacaaagcaauuucaagug

SEQ ID NO: 3172908 - RNA, 19 nt, Artificial Sequence
  Description of Artificial Sequence: Synthetic oligonucleotide
uuucauuuugguacguuag

SEQ ID NO: 3172909 - RNA, 19 nt, Artificial Sequence
  Description of Artificial Sequence: Synthetic oligonucleotide
uuugcuuuuaagacgggug

SEQ ID NO: 3172910 - RNA, 19 nt, Artificial Sequence
  Description of Artificial Sequence: Synthetic oligonucleotide
uaggcuuuccauuuguggg

SEQ ID NO: 3172911 - RNA, 19 nt, Artificial Sequence
  Description of Artificial Sequence: Synthetic oligonucleotide
uugaauuaggcaaccauga

SEQ ID NO: 3172912 - RNA, 19 nt, Artificial Sequence
  Description of Artificial Sequence: Synthetic oligonucleotide
  modified_base (3)..(3): a, c, u, g, unknown or other
uanaaagggaacauacagu

SEQ ID NO: 3172913 - RNA, 19 nt, Artificial Sequence
  Description of Artificial Sequence: Synthetic oligonucleotide
uuucaagugagacauacua

SEQ ID NO: 3172914 - RNA, 19 nt, Artificial Sequence
  Description of Artificial Sequence: Synthetic oligonucleotide
ggauuaacaauauagguac

SEQ ID NO: 3172915 - RNA, 19 nt, Artificial Sequence
  Description of Artificial Sequence: Synthetic oligonucleotide
gguuuaacaguauuuaucc

SEQ ID NO: 3172916 - RNA, 19 nt, Artificial Sequence
  Description of Artificial Sequence: Synthetic oligonucleotide
uggauuaacaauauaggua

SEQ ID NO: 3172917 - RNA, 19 nt, Artificial Sequence
  Description of Artificial Sequence: Synthetic oligonucleotide
uuuaagcaaaugaagccca

SEQ ID NO: 3172918 - RNA, 19 nt, Artificial Sequence
  Description of Artificial Sequence: Synthetic oligonucleotide
aaauucuccagagcgaaag

SEQ ID NO: 3172919 - RNA, 19 nt, Artificial Sequence
  Description of Artificial Sequence: Synthetic oligonucleotide
uuuuguaaucuccaacuga

SEQ ID NO: 3172920 - RNA, 19 nt, Artificial Sequence
  Description of Artificial Sequence: Synthetic oligonucleotide
uuuguaaucuucauuuguc

SEQ ID NO: 3172921 - RNA, 19 nt, Artificial Sequence
  Description of Artificial Sequence: Synthetic oligonucleotide
ugaggcuaugagaagagcc

SEQ ID NO: 3172922 - RNA, 19 nt, Artificial Sequence
  Description of Artificial Sequence: Synthetic oligonucleotide
uaaaucuuuggcuguauug

SEQ ID NO: 3172923 - RNA, 19 nt, Artificial Sequence
  Description of Artificial Sequence: Synthetic oligonucleotide
uuugcuucaucuuuaggca

SEQ ID NO: 3172924 - RNA, 19 nt, Artificial Sequence
  Description of Artificial Sequence: Synthetic oligonucleotide
caugguguaaccuaaucac

SEQ ID NO: 3172925 - RNA, 19 nt, Artificial Sequence
  Description of Artificial Sequence: Synthetic oligonucleotide
uucauuuugguacguuagg

SEQ ID NO: 3172926 - RNA, 19 nt, Artificial Sequence
  Description of Artificial Sequence: Synthetic oligonucleotide
uaugagaagagccugugau

SEQ ID NO: 3172927 - RNA, 19 nt, Artificial Sequence
  Description of Artificial Sequence: Synthetic oligonucleotide
uuaggcaguacuuaaggac

SEQ ID NO: 3172928 - RNA, 19 nt, Artificial Sequence
  Description of Artificial Sequence: Synthetic oligonucleotide
acaggaguaaaauacauuu

SEQ ID NO: 3172929 - RNA, 19 nt, Artificial Sequence
  Description of Artificial Sequence: Synthetic oligonucleotide
uuucguaauugccaguuca

SEQ ID NO: 3172930 - RNA, 19 nt, Artificial Sequence
  Description of Artificial Sequence: Synthetic oligonucleotide
uaacaaauccauacuuucc

SEQ ID NO: 3172931 - RNA, 19 nt, Artificial Sequence
  Description of Artificial Sequence: Synthetic oligonucleotide
ugcguaauaacaaauccau

SEQ ID NO: 3172932 - RNA, 19 nt, Artificial Sequence
  Description of Artificial Sequence: Synthetic oligonucleotide
cuugaauuaggcaaccaug

SEQ ID NO: 3172933 - RNA, 19 nt, Artificial Sequence
  Description of Artificial Sequence: Synthetic oligonucleotide
uaaccauggauuaacaaua

SEQ ID NO: 3172934 - RNA, 19 nt, Artificial Sequence
  Description of Artificial Sequence: Synthetic oligonucleotide
uuuucccuaaaucuuuggc

SEQ ID NO: 3172935 - RNA, 19 nt, Artificial Sequence
  Description of Artificial Sequence: Synthetic oligonucleotide
auuaucuagagucuuuccu

SEQ ID NO: 3172936 - RNA, 19 nt, Artificial Sequence
  Description of Artificial Sequence: Synthetic oligonucleotide
acauauaggaaagcuaagg

SEQ ID NO: 3172937 - RNA, 19 nt, Artificial Sequence
  Description of Artificial Sequence: Synthetic oligonucleotide
uguaaccuaaucacaggag

SEQ ID NO: 3172938 - RNA, 19 nt, Artificial Sequence
  Description of Artificial Sequence: Synthetic oligonucleotide
ucuccaacugaacauuucc

SEQ ID NO: 3172939 - RNA, 19 nt, Artificial Sequence
  Description of Artificial Sequence: Synthetic oligonucleotide
uauuuauguagcccaagcu

SEQ ID NO: 3172940 - RNA, 19 nt, Artificial Sequence
  Description of Artificial Sequence: Synthetic oligonucleotide
uuuauguaguggauggaca

SEQ ID NO: 3172941 - RNA, 19 nt, Artificial Sequence
  Description of Artificial Sequence: Synthetic oligonucleotide
caacaaacagauuaaaaca

SEQ ID NO: 3172942 - RNA, 19 nt, Artificial Sequence
  Description of Artificial Sequence: Synthetic oligonucleotide
cucaacugacuaaugaacc

SEQ ID NO: 3172943 - RNA, 19 nt, Artificial Sequence
  Description of Artificial Sequence: Synthetic oligonucleotide
aauauagguacugacuggu

SEQ ID NO: 3172944 - RNA, 19 nt, Artificial Sequence
  Description of Artificial Sequence: Synthetic oligonucleotide
ucccuaaucuaacagaguc

SEQ ID NO: 3172945 - RNA, 19 nt, Artificial Sequence
  Description of Artificial Sequence: Synthetic oligonucleotide
aacaguauuuauccaacau

SEQ ID NO: 3172946 - RNA, 19 nt, Artificial Sequence
  Description of Artificial Sequence: Synthetic oligonucleotide
uuugacauauaggaaagcu

SEQ ID NO: 3172947 - RNA, 19 nt, Artificial Sequence
  Description of Artificial Sequence: Synthetic oligonucleotide
ugguuuaacaguauuuauc

SEQ ID NO: 3172948 - RNA, 19 nt, Artificial Sequence
  Description of Artificial Sequence: Synthetic oligonucleotide
uucccuaaaucuuuggcug

SEQ ID NO: 3172949 - RNA, 19 nt, Artificial Sequence
  Description of Artificial Sequence: Synthetic oligonucleotide
ucagccacgugacugcugg

SEQ ID NO: 3172950 - RNA, 19 nt, Artificial Sequence
  Description of Artificial Sequence: Synthetic oligonucleotide
aauucuccagagcgaaagg

SEQ ID NO: 3172951 - RNA, 19 nt, Artificial Sequence
  Description of Artificial Sequence: Synthetic oligonucleotide
ucuaacagagucuacuaaa

SEQ ID NO: 3172952 - RNA, 19 nt, Artificial Sequence
  Description of Artificial Sequence: Synthetic oligonucleotide
uuucccuaaaucuuuggcu

SEQ ID NO: 3172953 - RNA, 19 nt, Artificial Sequence
  Description of Artificial Sequence: Synthetic oligonucleotide
agugagacauacuauacaa

SEQ ID NO: 3172954 - RNA, 19 nt, Artificial Sequence
  Description of Artificial Sequence: Synthetic oligonucleotide
uacacugcucucuugaaga

SEQ ID NO: 3172955 - RNA, 19 nt, Artificial Sequence
  Description of Artificial Sequence: Synthetic oligonucleotide
aagacggguguauuuaugu

SEQ ID NO: 3172956 - RNA, 19 nt, Artificial Sequence
  Description of Artificial Sequence: Synthetic oligonucleotide
aacaaacagauuaaaacaa

SEQ ID NO: 3172957 - RNA, 19 nt, Artificial Sequence
  Description of Artificial Sequence: Synthetic oligonucleotide
gacggguguauuuauguag

SEQ ID NO: 3172958 - RNA, 19 nt, Artificial Sequence
  Description of Artificial Sequence: Synthetic oligonucleotide
uuugugggaccaaugcuag

SEQ ID NO: 3172959 - RNA, 19 nt, Artificial Sequence
  Description of Artificial Sequence: Synthetic oligonucleotide
aagugagacauacuauaca

SEQ ID NO: 3172960 - RNA, 19 nt, Artificial Sequence
  Description of Artificial Sequence: Synthetic oligonucleotide
acauacagucugcuguugc

SEQ ID NO: 3172961 - RNA, 19 nt, Artificial Sequence
  Description of Artificial Sequence: Synthetic oligonucleotide
ccauggauuaacaauauag

SEQ ID NO: 3172962 - RNA, 19 nt, Artificial Sequence
  Description of Artificial Sequence: Synthetic oligonucleotide
uuccuuuucguaauugcca

SEQ ID NO: 3172963 - RNA, 19 nt, Artificial Sequence
  Description of Artificial Sequence: Synthetic oligonucleotide
uuaucuagagucuuuccuc

SEQ ID NO: 3172964 - RNA, 19 nt, Artificial Sequence
  Description of Artificial Sequence: Synthetic oligonucleotide
aauguauacaaagcaauuu

SEQ ID NO: 3172965 - RNA, 19 nt, Artificial Sequence
  Description of Artificial Sequence: Synthetic oligonucleotide
acugauuugcaauaauuaa

SEQ ID NO: 3172966 - RNA, 19 nt, Artificial Sequence
  Description of Artificial Sequence: Synthetic oligonucleotide
agugaccguccucugagcc

SEQ ID NO: 3172967 - RNA, 19 nt, Artificial Sequence
  Description of Artificial Sequence: Synthetic oligonucleotide
auuugcaauaauuaaugua

SEQ ID NO: 3172968 - RNA, 19 nt, Artificial Sequence
  Description of Artificial Sequence: Synthetic oligonucleotide
ucacacaugaguucucacc

SEQ ID NO: 3172969 - RNA, 19 nt, Artificial Sequence
  Description of Artificial Sequence: Synthetic oligonucleotide
ugaauuaggcaaccaugag

SEQ ID NO: 3172970 - RNA, 19 nt, Artificial Sequence
  Description of Artificial Sequence: Synthetic oligonucleotide
uaguggauggacauggggu

SEQ ID NO: 3172971 - RNA, 19 nt, Artificial Sequence
  Description of Artificial Sequence: Synthetic oligonucleotide
cacacaugaguucucaccc

SEQ ID NO: 3172972 - RNA, 19 nt, Artificial Sequence
  Description of Artificial Sequence: Synthetic oligonucleotide
guauuuauguagcccaagc

SEQ ID NO: 3172973 - RNA, 19 nt, Artificial Sequence
  Description of Artificial Sequence: Synthetic oligonucleotide
ucccacaacaacaaacaga

SEQ ID NO: 3172974 - RNA, 19 nt, Artificial Sequence
  Description of Artificial Sequence: Synthetic oligonucleotide
ucuugaauuaggcaaccau

SEQ ID NO: 3172975 - RNA, 19 nt, Artificial Sequence
  Description of Artificial Sequence: Synthetic oligonucleotide
uuguaaucuucauuuguca

SEQ ID NO: 3172976 - RNA, 19 nt, Artificial Sequence
  Description of Artificial Sequence: Synthetic oligonucleotide
gguauuuaagcaaaugaag

SEQ ID NO: 3172977 - RNA, 19 nt, Artificial Sequence
  Description of Artificial Sequence: Synthetic oligonucleotide
aaacugcaauuuguuauac

SEQ ID NO: 3172978 - RNA, 19 nt, Artificial Sequence
  Description of Artificial Sequence: Synthetic oligonucleotide
ucaaugcguaauaacaaau

SEQ ID NO: 3172979 - RNA, 19 nt, Artificial Sequence
  Description of Artificial Sequence: Synthetic oligonucleotide
acauacuauacaaaugaag

SEQ ID NO: 3172980 - RNA, 19 nt, Artificial Sequence
  Description of Artificial Sequence: Synthetic oligonucleotide
auuuuguaaucuccaacug

SEQ ID NO: 3172981 - RNA, 19 nt, Artificial Sequence
  Description of Artificial Sequence: Synthetic oligonucleotide
acaugguguaaccuaauca

SEQ ID NO: 3172982 - RNA, 19 nt, Artificial Sequence
  Description of Artificial Sequence: Synthetic oligonucleotide
caauauagguacugacugg

SEQ ID NO: 3172983 - RNA, 19 nt, Artificial Sequence
  Description of Artificial Sequence: Synthetic oligonucleotide
ugaaccugaaccaccagau

SEQ ID NO: 3172984 - RNA, 19 nt, Artificial Sequence
  Description of Artificial Sequence: Synthetic oligonucleotide
aaagcgcuggcccagaacg

SEQ ID NO: 3172985 - RNA, 19 nt, Artificial Sequence
  Description of Artificial Sequence: Synthetic oligonucleotide
agaucaaugccauccaugc

SEQ ID NO: 3172986 - RNA, 19 nt, Artificial Sequence
  Description of Artificial Sequence: Synthetic oligonucleotide
uucuauuuuccaauugggg

SEQ ID NO: 3172987 - RNA, 19 nt, Artificial Sequence
  Description of Artificial Sequence: Synthetic oligonucleotide
uccgagagaaguacgaggg

SEQ ID NO: 3172988 - RNA, 19 nt, Artificial Sequence
  Description of Artificial Sequence: Synthetic oligonucleotide
aaugccauccaugcguucc

SEQ ID NO: 3172989 - RNA, 19 nt, Artificial Sequence
  Description of Artificial Sequence: Synthetic oligonucleotide
ugaacgaagaacuucugca

SEQ ID NO: 3172990 - RNA, 19 nt, Artificial Sequence
  Description of Artificial Sequence: Synthetic oligonucleotide
agccaugugcaccugaagc

SEQ ID NO: 3172991 - RNA, 19 nt, Artificial Sequence
  Description of Artificial Sequence: Synthetic oligonucleotide
ucuaggauguccuuucgag

SEQ ID NO: 3172992 - RNA, 19 nt, Artificial Sequence
  Description of Artificial Sequence: Synthetic oligonucleotide
aacgaagaacuucugcaag

SEQ ID NO: 3172993 - RNA, 19 nt, Artificial Sequence
  Description of Artificial Sequence: Synthetic oligonucleotide
cuugacaccuucuaggaug

SEQ ID NO: 3172994 - RNA, 19 nt, Artificial Sequence
  Description of Artificial Sequence: Synthetic oligonucleotide
acgaagaacuucugcaagc

SEQ ID NO: 3172995 - RNA, 19 nt, Artificial Sequence
  Description of Artificial Sequence: Synthetic oligonucleotide
acauggaaauggcugaggg

SEQ ID NO: 3172996 - RNA, 19 nt, Artificial Sequence
  Description of Artificial Sequence: Synthetic oligonucleotide
aucaaugccauccaugcgu

SEQ ID NO: 3172997 - RNA, 19 nt, Artificial Sequence
  Description of Artificial Sequence: Synthetic oligonucleotide
ggaaccuugagguugaggc

SEQ ID NO: 3172998 - RNA, 19 nt, Artificial Sequence
  Description of Artificial Sequence: Synthetic oligonucleotide
uuaagcacugucuaucggu

SEQ ID NO: 3172999 - RNA, 19 nt, Artificial Sequence
  Description of Artificial Sequence: Synthetic oligonucleotide
uguccuuucgagaugggga

SEQ ID NO: 3173000 - RNA, 19 nt, Artificial Sequence
  Description of Artificial Sequence: Synthetic oligonucleotide
ggauaguccccucagaagg

SEQ ID NO: 3173001 - RNA, 19 nt, Artificial Sequence
  Description of Artificial Sequence: Synthetic oligonucleotide
gagagcuucguccagcacc

SEQ ID NO: 3173002 - RNA, 19 nt, Artificial Sequence
  Description of Artificial Sequence: Synthetic oligonucleotide
agaaguacgaggguagggg

SEQ ID NO: 3173003 - RNA, 19 nt, Artificial Sequence
  Description of Artificial Sequence: Synthetic oligonucleotide
acugcguccuugcacuugc

SEQ ID NO: 3173004 - RNA, 19 nt, Artificial Sequence
  Description of Artificial Sequence: Synthetic oligonucleotide
uaagcacugucuaucggug

SEQ ID NO: 3173005 - RNA, 19 nt, Artificial Sequence
  Description of Artificial Sequence: Synthetic oligonucleotide
uucgagauggggaugucac

SEQ ID NO: 3173006 - RNA, 19 nt, Artificial Sequence
  Description of Artificial Sequence: Synthetic oligonucleotide
aacggugcccacucgagga

SEQ ID NO: 3173007 - RNA, 19 nt, Artificial Sequence
  Description of Artificial Sequence: Synthetic oligonucleotide
aguacgaggguaggggugc

SEQ ID NO: 3173008 - RNA, 19 nt, Artificial Sequence
  Description of Artificial Sequence: Synthetic oligonucleotide
uaggauguccuuucgagau

SEQ ID NO: 3173009 - RNA, 19 nt, Artificial Sequence
  Description of Artificial Sequence: Synthetic oligonucleotide
aucacauggaaauggcuga

SEQ ID NO: 3173010 - RNA, 19 nt, Artificial Sequence
  Description of Artificial Sequence: Synthetic oligonucleotide
aagaucaaugccauccaug

SEQ ID NO: 3173011 - RNA, 19 nt, Artificial Sequence
  Description of Artificial Sequence: Synthetic oligonucleotide
uggcuggccacagaaagcg

SEQ ID NO: 3173012 - RNA, 19 nt, Artificial Sequence
  Description of Artificial Sequence: Synthetic oligonucleotide
uccucuugacaccuucuag

SEQ ID NO: 3173013 - RNA, 19 nt, Artificial Sequence
  Description of Artificial Sequence: Synthetic oligonucleotide
cuugcuggaaccuugaggu

SEQ ID NO: 3173014 - RNA, 19 nt, Artificial Sequence
  Description of Artificial Sequence: Synthetic oligonucleotide
cuugagugaacgaagaacu

SEQ ID NO: 3173015 - RNA, 19 nt, Artificial Sequence
  Description of Artificial Sequence: Synthetic oligonucleotide
gaucaaugccauccaugcg

SEQ ID NO: 3173016 - RNA, 19 nt, Artificial Sequence
  Description of Artificial Sequence: Synthetic oligonucleotide
acucgaggagcauaggugu

SEQ ID NO: 3173017 - RNA, 19 nt, Artificial Sequence
  Description of Artificial Sequence: Synthetic oligonucleotide
agcuugguggucuuggcug

SEQ ID NO: 3173018 - RNA, 19 nt, Artificial Sequence
  Description of Artificial Sequence: Synthetic oligonucleotide
cuaucggugagagagccgc

SEQ ID NO: 3173019 - RNA, 19 nt, Artificial Sequence
  Description of Artificial Sequence: Synthetic oligonucleotide
cucuguucgcagaagcccg

SEQ ID NO: 3173020 - RNA, 19 nt, Artificial Sequence
  Description of Artificial Sequence: Synthetic oligonucleotide
gaagccugcaucucucggc

SEQ ID NO: 3173021 - RNA, 19 nt, Artificial Sequence
  Description of Artificial Sequence: Synthetic oligonucleotide
ucacaggcagacccugugg

SEQ ID NO: 3173022 - RNA, 19 nt, Artificial Sequence
  Description of Artificial Sequence: Synthetic oligonucleotide
uccacugcguccuugcacu

SEQ ID NO: 3173023 - RNA, 19 nt, Artificial Sequence
  Description of Artificial Sequence: Synthetic oligonucleotide
gguuaagcacugucuaucg

SEQ ID NO: 3173024 - RNA, 19 nt, Artificial Sequence
  Description of Artificial Sequence: Synthetic oligonucleotide
ugcucgcacaaccuggagc

SEQ ID NO: 3173025 - RNA, 19 nt, Artificial Sequence
  Description of Artificial Sequence: Synthetic oligonucleotide
gagagaaguacgaggguag

SEQ ID NO: 3173026 - RNA, 19 nt, Artificial Sequence
  Description of Artificial Sequence: Synthetic oligonucleotide
guuaagcacugucuaucgg

SEQ ID NO: 3173027 - RNA, 19 nt, Artificial Sequence
  Description of Artificial Sequence: Synthetic oligonucleotide
acuucugcaagcggcuugc

SEQ ID NO: 3173028 - RNA, 19 nt, Artificial Sequence
  Description of Artificial Sequence: Synthetic oligonucleotide
agcacugucuaucggugag

SEQ ID NO: 3173029 - RNA, 19 nt, Artificial Sequence
  Description of Artificial Sequence: Synthetic oligonucleotide
agauggggaugucacgggg

SEQ ID NO: 3173030 - RNA, 19 nt, Artificial Sequence
  Description of Artificial Sequence: Synthetic oligonucleotide
uggcagcacagaaagcaag

SEQ ID NO: 3173031 - RNA, 19 nt, Artificial Sequence
  Description of Artificial Sequence: Synthetic oligonucleotide
gaaccuugagguugaggcc

SEQ ID NO: 3173032 - RNA, 19 nt, Artificial Sequence
  Description of Artificial Sequence: Synthetic oligonucleotide
aacacugucaguggcugca

SEQ ID NO: 3173033 - RNA, 19 nt, Artificial Sequence
  Description of Artificial Sequence: Synthetic oligonucleotide
gacaccuucuaggaugucc

SEQ ID NO: 3173034 - RNA, 19 nt, Artificial Sequence
  Description of Artificial Sequence: Synthetic oligonucleotide
ugcgccagccgccagccgg

SEQ ID NO: 3173035 - RNA, 19 nt, Artificial Sequence
  Description of Artificial Sequence: Synthetic oligonucleotide
uguggcuuguucaguguca

SEQ ID NO: 3173036 - RNA, 19 nt, Artificial Sequence
  Description of Artificial Sequence: Synthetic oligonucleotide
ugcuggaaccuugagguug

SEQ ID NO: 3173037 - RNA, 19 nt, Artificial Sequence
  Description of Artificial Sequence: Synthetic oligonucleotide
uccuugcugauccaccaca

SEQ ID NO: 3173038 - RNA, 19 nt, Artificial Sequence
  Description of Artificial Sequence: Synthetic oligonucleotide
aaggcgucugaggagagcu

SEQ ID NO: 3173039 - RNA, 19 nt, Artificial Sequence
  Description of Artificial Sequence: Synthetic oligonucleotide
ugauccaccacagcugccc

SEQ ID NO: 3173040 - RNA, 19 nt, Artificial Sequence
  Description of Artificial Sequence: Synthetic oligonucleotide
uugacaccuucuaggaugu

SEQ ID NO: 3173041 - RNA, 19 nt, Artificial Sequence
  Description of Artificial Sequence: Synthetic oligonucleotide
cuggggaacacugucagug

SEQ ID NO: 3173042 - RNA, 19 nt, Artificial Sequence
  Description of Artificial Sequence: Synthetic oligonucleotide
gagguugaggccgaccccg

SEQ ID NO: 3173043 - RNA, 19 nt, Artificial Sequence
  Description of Artificial Sequence: Synthetic oligonucleotide
gugaugccacaguaggugg

SEQ ID NO: 3173044 - RNA, 19 nt, Artificial Sequence
  Description of Artificial Sequence: Synthetic oligonucleotide
uucuaggauguccuuucga

SEQ ID NO: 3173045 - RNA, 19 nt, Artificial Sequence
  Description of Artificial Sequence: Synthetic oligonucleotide
cacucgaggagcauaggug

SEQ ID NO: 3173046 - RNA, 19 nt, Artificial Sequence
  Description of Artificial Sequence: Synthetic oligonucleotide
ggugccacaaguucacuag

SEQ ID NO: 3173047 - RNA, 19 nt, Artificial Sequence
  Description of Artificial Sequence: Synthetic oligonucleotide
uggggaacacugucagugg

SEQ ID NO: 3173048 - RNA, 19 nt, Artificial Sequence
  Description of Artificial Sequence: Synthetic oligonucleotide
gaacgaagaacuucugcaa

SEQ ID NO: 3173049 - RNA, 19 nt, Artificial Sequence
  Description of Artificial Sequence: Synthetic oligonucleotide
uucuccuugagugaacgaa

SEQ ID NO: 3173050 - RNA, 19 nt, Artificial Sequence
  Description of Artificial Sequence: Synthetic oligonucleotide
acgccuccuuuccaggugc

SEQ ID NO: 3173051 - RNA, 19 nt, Artificial Sequence
  Description of Artificial Sequence: Synthetic oligonucleotide
ugacuggggaacacuguca

SEQ ID NO: 3173052 - RNA, 19 nt, Artificial Sequence
  Description of Artificial Sequence: Synthetic oligonucleotide
uguucgcagaagcccgggg

SEQ ID NO: 3173053 - RNA, 19 nt, Artificial Sequence
  Description of Artificial Sequence: Synthetic oligonucleotide
ucgaggagcauaggugugg

SEQ ID NO: 3173054 - RNA, 19 nt, Artificial Sequence
  Description of Artificial Sequence: Synthetic oligonucleotide
ucgagauggggaugucacg

SEQ ID NO: 3173055 - RNA, 19 nt, Artificial Sequence
  Description of Artificial Sequence: Synthetic oligonucleotide
ugaugccacaguagguggc

SEQ ID NO: 3173056 - RNA, 19 nt, Artificial Sequence
  Description of Artificial Sequence: Synthetic oligonucleotide
gaacggugcccacucgagg

SEQ ID NO: 3173057 - RNA, 19 nt, Artificial Sequence
  Description of Artificial Sequence: Synthetic oligonucleotide
ugucuaucggugagagagc

SEQ ID NO: 3173058 - RNA, 19 nt, Artificial Sequence
  Description of Artificial Sequence: Synthetic oligonucleotide
ucggugagagagccgcagg

SEQ ID NO: 3173059 - RNA, 19 nt, Artificial Sequence
  Description of Artificial Sequence: Synthetic oligonucleotide
ucagccagcuccuccgggc

SEQ ID NO: 3173060 - RNA, 19 nt, Artificial Sequence
  Description of Artificial Sequence: Synthetic oligonucleotide
uucugcaagcggcuugcug

SEQ ID NO: 3173061 - RNA, 19 nt, Artificial Sequence
  Description of Artificial Sequence: Synthetic oligonucleotide
ucguccagcaccugucucu

SEQ ID NO: 3173062 - RNA, 19 nt, Artificial Sequence
  Description of Artificial Sequence: Synthetic oligonucleotide
cuucuaggauguccuuucg

SEQ ID NO: 3173063 - RNA, 19 nt, Artificial Sequence
  Description of Artificial Sequence: Synthetic oligonucleotide
aagcacugucuaucgguga

SEQ ID NO: 3173064 - RNA, 19 nt, Artificial Sequence
  Description of Artificial Sequence: Synthetic oligonucleotide
ggauguccuuucgagaugg

SEQ ID NO: 3173065 - RNA, 19 nt, Artificial Sequence
  Description of Artificial Sequence: Synthetic oligonucleotide
cacggggauggcaagauca

SEQ ID NO: 3173066 - RNA, 19 nt, Artificial Sequence
  Description of Artificial Sequence: Synthetic oligonucleotide
auguccuuucgagaugggg

SEQ ID NO: 3173067 - RNA, 19 nt, Artificial Sequence
  Description of Artificial Sequence: Synthetic oligonucleotide
gugcaccugaagcugacug

SEQ ID NO: 3173068 - RNA, 19 nt, Artificial Sequence
  Description of Artificial Sequence: Synthetic oligonucleotide
accugaagcugacugggga

SEQ ID NO: 3173069 - RNA, 19 nt, Artificial Sequence
  Description of Artificial Sequence: Synthetic oligonucleotide
uucgcagaagcccggggaa

SEQ ID NO: 3173070 - RNA, 19 nt, Artificial Sequence
  Description of Artificial Sequence: Synthetic oligonucleotide
ugagagagccgcaggcacu

SEQ ID NO: 3173071 - RNA, 19 nt, Artificial Sequence
  Description of Artificial Sequence: Synthetic oligonucleotide
ugaggguccucuugacacc

SEQ ID NO: 3173072 - RNA, 19 nt, Artificial Sequence
  Description of Artificial Sequence: Synthetic oligonucleotide
aucagugaugccacaguag

SEQ ID NO: 3173073 - RNA, 19 nt, Artificial Sequence
  Description of Artificial Sequence: Synthetic oligonucleotide
uuucgagauggggauguca

SEQ ID NO: 3173074 - RNA, 19 nt, Artificial Sequence
  Description of Artificial Sequence: Synthetic oligonucleotide
aaguacgaggguaggggug

SEQ ID NO: 3173075 - RNA, 19 nt, Artificial Sequence
  Description of Artificial Sequence: Synthetic oligonucleotide
gugccacaaguucacuagg

SEQ ID NO: 3173076 - RNA, 19 nt, Artificial Sequence
  Description of Artificial Sequence: Synthetic oligonucleotide
acguggauaguccccucag

SEQ ID NO: 3173077 - RNA, 19 nt, Artificial Sequence
  Description of Artificial Sequence: Synthetic oligonucleotide
cugacuggggaacacuguc

SEQ ID NO: 3173078 - RNA, 19 nt, Artificial Sequence
  Description of Artificial Sequence: Synthetic oligonucleotide
cucuugacaccuucuagga

SEQ ID NO: 3173079 - RNA, 19 nt, Artificial Sequence
  Description of Artificial Sequence: Synthetic oligonucleotide
ucggccgugcgccagccgc

SEQ ID NO: 3173080 - RNA, 19 nt, Artificial Sequence
  Description of Artificial Sequence: Synthetic oligonucleotide
uugagugaacgaagaacuu

SEQ ID NO: 3173081 - RNA, 19 nt, Artificial Sequence
  Description of Artificial Sequence: Synthetic oligonucleotide
caggcgaaggcgucugagg

SEQ ID NO: 3173082 - RNA, 19 nt, Artificial Sequence
  Description of Artificial Sequence: Synthetic oligonucleotide
agggcugguccuccacugc

SEQ ID NO: 3173083 - RNA, 19 nt, Artificial Sequence
  Description of Artificial Sequence: Synthetic oligonucleotide
ggugcaagggcaucugggc

SEQ ID NO: 3173084 - RNA, 19 nt, Artificial Sequence
  Description of Artificial Sequence: Synthetic oligonucleotide
aaaaggagaacauacagac

SEQ ID NO: 3173085 - RNA, 19 nt, Artificial Sequence
  Description of Artificial Sequence: Synthetic oligonucleotide
aaauugguaacaaugaacc

SEQ ID NO: 3173086 - RNA, 19 nt, Artificial Sequence
  Description of Artificial Sequence: Synthetic oligonucleotide
aaggagaacauacagacag

SEQ ID NO: 3173087 - RNA, 19 nt, Artificial Sequence
  Description of Artificial Sequence: Synthetic oligonucleotide
aaaagauaggcacaaagug

SEQ ID NO: 3173088 - RNA, 19 nt, Artificial Sequence
  Description of Artificial Sequence: Synthetic oligonucleotide
aucacaaucacuaugagac

SEQ ID NO: 3173089 - RNA, 19 nt, Artificial Sequence
  Description of Artificial Sequence: Synthetic oligonucleotide
aagauaacagacuguaugg

SEQ ID NO: 3173090 - RNA, 19 nt, Artificial Sequence
  Description of Artificial Sequence: Synthetic oligonucleotide
aaaguuagcacacaucucu

SEQ ID NO: 3173091 - RNA, 19 nt, Artificial Sequence
  Description of Artificial Sequence: Synthetic oligonucleotide
gagaagaaaauguacaugc

SEQ ID NO: 3173092 - RNA, 19 nt, Artificial Sequence
  Description of Artificial Sequence: Synthetic oligonucleotide
uaagauaacagacuguaug

SEQ ID NO: 3173093 - RNA, 19 nt, Artificial Sequence
  Description of Artificial Sequence: Synthetic oligonucleotide
cauuuuauuaaaauagacc

SEQ ID NO: 3173094 - RNA, 19 nt, Artificial Sequence
  Description of Artificial Sequence: Synthetic oligonucleotide
uuuuaaguaacauauucca

SEQ ID NO: 3173095 - RNA, 19 nt, Artificial Sequence
  Description of Artificial Sequence: Synthetic oligonucleotide
uuuauugucagugaaaaga

SEQ ID NO: 3173096 - RNA, 19 nt, Artificial Sequence
  Description of Artificial Sequence: Synthetic oligonucleotide
uuaaguaacauauuccaug

SEQ ID NO: 3173097 - RNA, 19 nt, Artificial Sequence
  Description of Artificial Sequence: Synthetic oligonucleotide
uaacaaugaacccacagcc

SEQ ID NO: 3173098 - RNA, 19 nt, Artificial Sequence
  Description of Artificial Sequence: Synthetic oligonucleotide
aaguaaaaggagaacauac

SEQ ID NO: 3173099 - RNA, 19 nt, Artificial Sequence
  Description of Artificial Sequence: Synthetic oligonucleotide
gaaccaauuuguuagaccc

SEQ ID NO: 3173100 - RNA, 19 nt, Artificial Sequence
  Description of Artificial Sequence: Synthetic oligonucleotide
aauugguaacaaugaaccc

SEQ ID NO: 3173101 - RNA, 19 nt, Artificial Sequence
  Description of Artificial Sequence: Synthetic oligonucleotide
aauaccucccuuugcaaac

SEQ ID NO: 3173102 - RNA, 19 nt, Artificial Sequence
  Description of Artificial Sequence: Synthetic oligonucleotide
uuugcaaacauuuucugga

SEQ ID NO: 3173103 - RNA, 19 nt, Artificial Sequence
  Description of Artificial Sequence: Synthetic oligonucleotide
uugggaaccaauuuguuag

SEQ ID NO: 3173104 - RNA, 19 nt, Artificial Sequence
  Description of Artificial Sequence: Synthetic oligonucleotide
auuuuaaguaacauauucc

SEQ ID NO: 3173105 - RNA, 19 nt, Artificial Sequence
  Description of Artificial Sequence: Synthetic oligonucleotide
agaaaauguacaugcuucc

SEQ ID NO: 3173106 - RNA, 19 nt, Artificial Sequence
  Description of Artificial Sequence: Synthetic oligonucleotide
gaagaauuucuaaagauug

SEQ ID NO: 3173107 - RNA, 19 nt, Artificial Sequence
  Description of Artificial Sequence: Synthetic oligonucleotide
uguauuaaaguuagcacac

SEQ ID NO: 3173108 - RNA, 19 nt, Artificial Sequence
  Description of Artificial Sequence: Synthetic oligonucleotide
auuaaaauagaccauugau

SEQ ID NO: 3173109 - RNA, 19 nt, Artificial Sequence
  Description of Artificial Sequence: Synthetic oligonucleotide
uaugaaugagcauuuaaga

SEQ ID NO: 3173110 - RNA, 19 nt, Artificial Sequence
  Description of Artificial Sequence: Synthetic oligonucleotide
aacauuuucuggaaggaac

SEQ ID NO: 3173111 - RNA, 19 nt, Artificial Sequence
  Description of Artificial Sequence: Synthetic oligonucleotide
caaacagcuaacuuuauug

SEQ ID NO: 3173112 - RNA, 19 nt, Artificial Sequence
  Description of Artificial Sequence: Synthetic oligonucleotide
ucagugaaaagauaggcac

SEQ ID NO: 3173113 - RNA, 19 nt, Artificial Sequence
  Description of Artificial Sequence: Synthetic oligonucleotide
auguauuaaaguuagcaca

SEQ ID NO: 3173114 - RNA, 19 nt, Artificial Sequence
  Description of Artificial Sequence: Synthetic oligonucleotide
auguacaugcuuccaaucc

SEQ ID NO: 3173115 - RNA, 19 nt, Artificial Sequence
  Description of Artificial Sequence: Synthetic oligonucleotide
uaaagauuguggcaggcag

SEQ ID NO: 3173116 - RNA, 19 nt, Artificial Sequence
  Description of Artificial Sequence: Synthetic oligonucleotide
uuucuaaagauuguggcag

SEQ ID NO: 3173117 - RNA, 19 nt, Artificial Sequence
  Description of Artificial Sequence: Synthetic oligonucleotide
acacaucucuauuuuaagc

SEQ ID NO: 3173118 - RNA, 19 nt, Artificial Sequence
  Description of Artificial Sequence: Synthetic oligonucleotide
guaaaaggagaacauacag

SEQ ID NO: 3173119 - RNA, 19 nt, Artificial Sequence
  Description of Artificial Sequence: Synthetic oligonucleotide
cuuggaagaauuucuaaag

SEQ ID NO: 3173120 - RNA, 19 nt, Artificial Sequence
  Description of Artificial Sequence: Synthetic oligonucleotide
uuauuaaaauagaccauug

SEQ ID NO: 3173121 - RNA, 19 nt, Artificial Sequence
  Description of Artificial Sequence: Synthetic oligonucleotide
aauaggaucacaaucacua

SEQ ID NO: 3173122 - RNA, 19 nt, Artificial Sequence
  Description of Artificial Sequence: Synthetic oligonucleotide
uuuucaaacagcuaacuuu

SEQ ID NO: 3173123 - RNA, 19 nt, Artificial Sequence
  Description of Artificial Sequence: Synthetic oligonucleotide
uacgagaagaaaauguaca

SEQ ID NO: 3173124 - RNA, 19 nt, Artificial Sequence
  Description of Artificial Sequence: Synthetic oligonucleotide
cauuuuaaguaacauauuc

SEQ ID NO: 3173125 - RNA, 19 nt, Artificial Sequence
  Description of Artificial Sequence: Synthetic oligonucleotide
ucuugauuacagaauagga

SEQ ID NO: 3173126 - RNA, 19 nt, Artificial Sequence
  Description of Artificial Sequence: Synthetic oligonucleotide
agacaaaacaaauaaugga

SEQ ID NO: 3173127 - RNA, 19 nt, Artificial Sequence
  Description of Artificial Sequence: Synthetic oligonucleotide
uauuaaaauagaccauuga

SEQ ID NO: 3173128 - RNA, 19 nt, Artificial Sequence
  Description of Artificial Sequence: Synthetic oligonucleotide
uuugaaagcuucuuguaac

SEQ ID NO: 3173129 - RNA, 19 nt, Artificial Sequence
  Description of Artificial Sequence: Synthetic oligonucleotide
gaauuucuaaagauugugg

SEQ ID NO: 3173130 - RNA, 19 nt, Artificial Sequence
  Description of Artificial Sequence: Synthetic oligonucleotide
ugauuacagaauaggauca

SEQ ID NO: 3173131 - RNA, 19 nt, Artificial Sequence
  Description of Artificial Sequence: Synthetic oligonucleotide
auugucagugaaaagauag

SEQ ID NO: 3173132 - RNA, 19 nt, Artificial Sequence
  Description of Artificial Sequence: Synthetic oligonucleotide
ucuauuuuaagcugccaca

SEQ ID NO: 3173133 - RNA, 19 nt, Artificial Sequence
  Description of Artificial Sequence: Synthetic oligonucleotide
uaaguaacauauuccaugu

SEQ ID NO: 3173134 - RNA, 19 nt, Artificial Sequence
  Description of Artificial Sequence: Synthetic oligonucleotide
ugaaugagcauuuaagaua

SEQ ID NO: 3173135 - RNA, 19 nt, Artificial Sequence
  Description of Artificial Sequence: Synthetic oligonucleotide
cauguauuaaaguuagcac

SEQ ID NO: 3173136 - RNA, 19 nt, Artificial Sequence
  Description of Artificial Sequence: Synthetic oligonucleotide
agccauuuuauuaaaauag

SEQ ID NO: 3173137 - RNA, 19 nt, Artificial Sequence
  Description of Artificial Sequence: Synthetic oligonucleotide
uuccauguaugaaugagca

SEQ ID NO: 3173138 - RNA, 19 nt, Artificial Sequence
  Description of Artificial Sequence: Synthetic oligonucleotide
acaaaguggauuuaaccug

SEQ ID NO: 3173139 - RNA, 19 nt, Artificial Sequence
  Description of Artificial Sequence: Synthetic oligonucleotide
aaacagcuaacuuuauugu

SEQ ID NO: 3173140 - RNA, 19 nt, Artificial Sequence
  Description of Artificial Sequence: Synthetic oligonucleotide
acagugcaaaaguaaaagg

SEQ ID NO: 3173141 - RNA, 19 nt, Artificial Sequence
  Description of Artificial Sequence: Synthetic oligonucleotide
uuuaagauaacagacugua

SEQ ID NO: 3173142 - RNA, 19 nt, Artificial Sequence
  Description of Artificial Sequence: Synthetic oligonucleotide
uggcuaacagacaugagca

SEQ ID NO: 3173143 - RNA, 19 nt, Artificial Sequence
  Description of Artificial Sequence: Synthetic oligonucleotide
uuucaaacagcuaacuuua

SEQ ID NO: 3173144 - RNA, 19 nt, Artificial Sequence
  Description of Artificial Sequence: Synthetic oligonucleotide
uucuucucgaaccaucugc

SEQ ID NO: 3173145 - RNA, 19 nt, Artificial Sequence
  Description of Artificial Sequence: Synthetic oligonucleotide
uguuagacccauucaacag

SEQ ID NO: 3173146 - RNA, 19 nt, Artificial Sequence
  Description of Artificial Sequence: Synthetic oligonucleotide
cuuugcaaacauuuucugg

SEQ ID NO: 3173147 - RNA, 19 nt, Artificial Sequence
  Description of Artificial Sequence: Synthetic oligonucleotide
aauuuguuagacccauuca

SEQ ID NO: 3173148 - RNA, 19 nt, Artificial Sequence
  Description of Artificial Sequence: Synthetic oligonucleotide
uuugaucuaguucucuuga

SEQ ID NO: 3173149 - RNA, 19 nt, Artificial Sequence
  Description of Artificial Sequence: Synthetic oligonucleotide
ugcaaaaguaaaaggagaa

SEQ ID NO: 3173150 - RNA, 19 nt, Artificial Sequence
  Description of Artificial Sequence: Synthetic oligonucleotide
uuuauuaaaauagaccauu

SEQ ID NO: 3173151 - RNA, 19 nt, Artificial Sequence
  Description of Artificial Sequence: Synthetic oligonucleotide
guaacaaugaacccacagc

SEQ ID NO: 3173152 - RNA, 19 nt, Artificial Sequence
  Description of Artificial Sequence: Synthetic oligonucleotide
uguccuacugucaauggug

SEQ ID NO: 3173153 - RNA, 19 nt, Artificial Sequence
  Description of Artificial Sequence: Synthetic oligonucleotide
agaauaggaucacaaucac

SEQ ID NO: 3173154 - RNA, 19 nt, Artificial Sequence
  Description of Artificial Sequence: Synthetic oligonucleotide
auuauuuagauucuucaua

SEQ ID NO: 3173155 - RNA, 19 nt, Artificial Sequence
  Description of Artificial Sequence: Synthetic oligonucleotide
uaacauauuccauguauga

SEQ ID NO: 3173156 - RNA, 19 nt, Artificial Sequence
  Description of Artificial Sequence: Synthetic oligonucleotide
ugcuacgagaagaaaaugu

SEQ ID NO: 3173157 - RNA, 19 nt, Artificial Sequence
  Description of Artificial Sequence: Synthetic oligonucleotide
uuuuauuaaaauagaccau

SEQ ID NO: 3173158 - RNA, 19 nt, Artificial Sequence
  Description of Artificial Sequence: Synthetic oligonucleotide
gaaauugguaacaaugaac

SEQ ID NO: 3173159 - RNA, 19 nt, Artificial Sequence
  Description of Artificial Sequence: Synthetic oligonucleotide
uuuguuagacccauucaac

SEQ ID NO: 3173160 - RNA, 19 nt, Artificial Sequence
  Description of Artificial Sequence: Synthetic oligonucleotide
ucaacagugcaaaaguaaa

SEQ ID NO: 3173161 - RNA, 19 nt, Artificial Sequence
  Description of Artificial Sequence: Synthetic oligonucleotide
cauauuccauguaugaaug

SEQ ID NO: 3173162 - RNA, 19 nt, Artificial Sequence
  Description of Artificial Sequence: Synthetic oligonucleotide
uuauugucagugaaaagau

SEQ ID NO: 3173163 - RNA, 19 nt, Artificial Sequence
  Description of Artificial Sequence: Synthetic oligonucleotide
guaugaaugagcauuuaag

SEQ ID NO: 3173164 - RNA, 19 nt, Artificial Sequence
  Description of Artificial Sequence: Synthetic oligonucleotide
aaggaacacauuuuaagua

SEQ ID NO: 3173165 - RNA, 19 nt, Artificial Sequence
  Description of Artificial Sequence: Synthetic oligonucleotide
uuggaagaauuucuaaaga

SEQ ID NO: 3173166 - RNA, 19 nt, Artificial Sequence
  Description of Artificial Sequence: Synthetic oligonucleotide
uugucagugaaaagauagg

SEQ ID NO: 3173167 - RNA, 19 nt, Artificial Sequence
  Description of Artificial Sequence: Synthetic oligonucleotide
gacaaaacaaauaauggaa

SEQ ID NO: 3173168 - RNA, 19 nt, Artificial Sequence
  Description of Artificial Sequence: Synthetic oligonucleotide
auuuguuagacccauucaa

SEQ ID NO: 3173169 - RNA, 19 nt, Artificial Sequence
  Description of Artificial Sequence: Synthetic oligonucleotide
uauuccauguaugaaugag

SEQ ID NO: 3173170 - RNA, 19 nt, Artificial Sequence
  Description of Artificial Sequence: Synthetic oligonucleotide
uucaacagugcaaaaguaa

SEQ ID NO: 3173171 - RNA, 19 nt, Artificial Sequence
  Description of Artificial Sequence: Synthetic oligonucleotide
uugguaacaaugaacccac

SEQ ID NO: 3173172 - RNA, 19 nt, Artificial Sequence
  Description of Artificial Sequence: Synthetic oligonucleotide
uauuaaaguuagcacacau

SEQ ID NO: 3173173 - RNA, 19 nt, Artificial Sequence
  Description of Artificial Sequence: Synthetic oligonucleotide
aauagaccauugauaacac

SEQ ID NO: 3173174 - RNA, 19 nt, Artificial Sequence
  Description of Artificial Sequence: Synthetic oligonucleotide
acauauuccauguaugaau

SEQ ID NO: 3173175 - RNA, 19 nt, Artificial Sequence
  Description of Artificial Sequence: Synthetic oligonucleotide
uuacagaauaggaucacaa

SEQ ID NO: 3173176 - RNA, 19 nt, Artificial Sequence
  Description of Artificial Sequence: Synthetic oligonucleotide
aagauaggcacaaagugga

SEQ ID NO: 3173177 - RNA, 19 nt, Artificial Sequence
  Description of Artificial Sequence: Synthetic oligonucleotide
ugucagugaaaagauaggc

SEQ ID NO: 3173178 - RNA, 19 nt, Artificial Sequence
  Description of Artificial Sequence: Synthetic oligonucleotide
uuagacccauucaacagug

SEQ ID NO: 3173179 - RNA, 19 nt, Artificial Sequence
  Description of Artificial Sequence: Synthetic oligonucleotide
uguaugaaugagcauuuaa

SEQ ID NO: 3173180 - RNA, 19 nt, Artificial Sequence
  Description of Artificial Sequence: Synthetic oligonucleotide
caaaguggauuuaaccugc

SEQ ID NO: 3173181 - RNA, 19 nt, Artificial Sequence
  Description of Artificial Sequence: Synthetic oligonucleotide
auuuuaagcugccacauua

SEQ ID NO: 3173182 - RNA, 19 nt, Artificial Sequence
  Description of Artificial Sequence: Synthetic oligonucleotide
aaauucuucucgaaccauc

SEQ ID NO: 3173183 - RNA, 19 nt, Artificial Sequence
  Description of Artificial Sequence: Synthetic oligonucleotide
acaaauaauggaaaaccag

SEQ ID NO: 3173184 - RNA, 19 nt, Artificial Sequence
  Description of Artificial Sequence: Synthetic oligonucleotide
acuaccucaaaagagaucc

SEQ ID NO: 3173185 - RNA, 19 nt, Artificial Sequence
  Description of Artificial Sequence: Synthetic oligonucleotide
uauauacaaaaucaaacug

SEQ ID NO: 3173186 - RNA, 19 nt, Artificial Sequence
  Description of Artificial Sequence: Synthetic oligonucleotide
aauaccacauucugaacac

SEQ ID NO: 3173187 - RNA, 19 nt, Artificial Sequence
  Description of Artificial Sequence: Synthetic oligonucleotide
uguauuuaguuguagcugg

SEQ ID NO: 3173188 - RNA, 19 nt, Artificial Sequence
  Description of Artificial Sequence: Synthetic oligonucleotide
aaaccaaacaaacaaacaa

SEQ ID NO: 3173189 - RNA, 19 nt, Artificial Sequence
  Description of Artificial Sequence: Synthetic oligonucleotide
uaugggaaacggaagaggg

SEQ ID NO: 3173190 - RNA, 19 nt, Artificial Sequence
  Description of Artificial Sequence: Synthetic oligonucleotide
ucuugcucuaaaauggacg

SEQ ID NO: 3173191 - RNA, 19 nt, Artificial Sequence
  Description of Artificial Sequence: Synthetic oligonucleotide
cuauuggcaaccuugaccc

SEQ ID NO: 3173192 - RNA, 19 nt, Artificial Sequence
  Description of Artificial Sequence: Synthetic oligonucleotide
ucuaaaauggacgaggaca

SEQ ID NO: 3173193 - RNA, 19 nt, Artificial Sequence
  Description of Artificial Sequence: Synthetic oligonucleotide
ugucuuauucgucacuucg

SEQ ID NO: 3173194 - RNA, 19 nt, Artificial Sequence
  Description of Artificial Sequence: Synthetic oligonucleotide
uguucuauuggcaaccuug

SEQ ID NO: 3173195 - RNA, 19 nt, Artificial Sequence
  Description of Artificial Sequence: Synthetic oligonucleotide
aagacuucgguacuggcag

SEQ ID NO: 3173196 - RNA, 19 nt, Artificial Sequence
  Description of Artificial Sequence: Synthetic oligonucleotide
aaagauguuguauuuaguu

SEQ ID NO: 3173197 - RNA, 19 nt, Artificial Sequence
  Description of Artificial Sequence: Synthetic oligonucleotide
aaccaaacaaacaaacaac

SEQ ID NO: 3173198 - RNA, 19 nt, Artificial Sequence
  Description of Artificial Sequence: Synthetic oligonucleotide
aaagugggcaugauggucc

SEQ ID NO: 3173199 - RNA, 19 nt, Artificial Sequence
  Description of Artificial Sequence: Synthetic oligonucleotide
aaacaaacaacuuuauaua

SEQ ID NO: 3173200 - RNA, 19 nt, Artificial Sequence
  Description of Artificial Sequence: Synthetic oligonucleotide
acucgugccgucuagaagg

SEQ ID NO: 3173201 - RNA, 19 nt, Artificial Sequence
  Description of Artificial Sequence: Synthetic oligonucleotide
uccgucaucccucagaagc

SEQ ID NO: 3173202 - RNA, 19 nt, Artificial Sequence
  Description of Artificial Sequence: Synthetic oligonucleotide
uuuaguuguagcuggaacu

SEQ ID NO: 3173203 - RNA, 19 nt, Artificial Sequence
  Description of Artificial Sequence: Synthetic oligonucleotide
aagggaugaauauuccauc

SEQ ID NO: 3173204 - RNA, 19 nt, Artificial Sequence
  Description of Artificial Sequence: Synthetic oligonucleotide
ggcaaaaugacauucuagg

SEQ ID NO: 3173205 - RNA, 19 nt, Artificial Sequence
  Description of Artificial Sequence: Synthetic oligonucleotide
gacagguugacacagccag

SEQ ID NO: 3173206 - RNA, 19 nt, Artificial Sequence
  Description of Artificial Sequence: Synthetic oligonucleotide
aagagcuagagaaagaagu

SEQ ID NO: 3173207 - RNA, 19 nt, Artificial Sequence
  Description of Artificial Sequence: Synthetic oligonucleotide
auuuguuggcaucagaccu

SEQ ID NO: 3173208 - RNA, 19 nt, Artificial Sequence
  Description of Artificial Sequence: Synthetic oligonucleotide
uguuguauuuaguuguagc

SEQ ID NO: 3173209 - RNA, 19 nt, Artificial Sequence
  Description of Artificial Sequence: Synthetic oligonucleotide
aaucaaacugaaaccacgg

SEQ ID NO: 3173210 - RNA, 19 nt, Artificial Sequence
  Description of Artificial Sequence: Synthetic oligonucleotide
agaggcaagaauuauggga

SEQ ID NO: 3173211 - RNA, 19 nt, Artificial Sequence
  Description of Artificial Sequence: Synthetic oligonucleotide
ucuugugucguucugcugu

SEQ ID NO: 3173212 - RNA, 19 nt, Artificial Sequence
  Description of Artificial Sequence: Synthetic oligonucleotide
acuccugcaucucugcugc

SEQ ID NO: 3173213 - RNA, 19 nt, Artificial Sequence
  Description of Artificial Sequence: Synthetic oligonucleotide
uuuucaaccauccgcugca

SEQ ID NO: 3173214 - RNA, 19 nt, Artificial Sequence
  Description of Artificial Sequence: Synthetic oligonucleotide
ugugucaccacccuacuaa

SEQ ID NO: 3173215 - RNA, 19 nt, Artificial Sequence
  Description of Artificial Sequence: Synthetic oligonucleotide
auaaccaaaauacccucug

SEQ ID NO: 3173216 - RNA, 19 nt, Artificial Sequence
  Description of Artificial Sequence: Synthetic oligonucleotide
uuggcaucagaccuuauuc

SEQ ID NO: 3173217 - RNA, 19 nt, Artificial Sequence
  Description of Artificial Sequence: Synthetic oligonucleotide
accuaacggauacuggagc

SEQ ID NO: 3173218 - RNA, 19 nt, Artificial Sequence
  Description of Artificial Sequence: Synthetic oligonucleotide
gguuugaggccacagagcg

SEQ ID NO: 3173219 - RNA, 19 nt, Artificial Sequence
  Description of Artificial Sequence: Synthetic oligonucleotide
uuuagaagugucugcuugc

SEQ ID NO: 3173220 - RNA, 19 nt, Artificial Sequence
  Description of Artificial Sequence: Synthetic oligonucleotide
uuaugggaaacggaagagg

SEQ ID NO: 3173221 - RNA, 19 nt, Artificial Sequence
  Description of Artificial Sequence: Synthetic oligonucleotide
guuuagaagugucugcuug

SEQ ID NO: 3173222 - RNA, 19 nt, Artificial Sequence
  Description of Artificial Sequence: Synthetic oligonucleotide
cuacuaaccagcugcuugg

SEQ ID NO: 3173223 - RNA, 19 nt, Artificial Sequence
  Description of Artificial Sequence: Synthetic oligonucleotide
ugggccagagccaauacca

SEQ ID NO: 3173224 - RNA, 19 nt, Artificial Sequence
  Description of Artificial Sequence: Synthetic oligonucleotide
cuuaggcauguccugaagg

SEQ ID NO: 3173225 - RNA, 19 nt, Artificial Sequence
  Description of Artificial Sequence: Synthetic oligonucleotide
uccacauagcacaaacccc

SEQ ID NO: 3173226 - RNA, 19 nt, Artificial Sequence
  Description of Artificial Sequence: Synthetic oligonucleotide
agugucuacgucuugcugu

SEQ ID NO: 3173227 - RNA, 19 nt, Artificial Sequence
  Description of Artificial Sequence: Synthetic oligonucleotide
uuguauuuaguuguagcug

SEQ ID NO: 3173228 - RNA, 19 nt, Artificial Sequence
  Description of Artificial Sequence: Synthetic oligonucleotide
ucuuauucgucacuucggu

SEQ ID NO: 3173229 - RNA, 19 nt, Artificial Sequence
  Description of Artificial Sequence: Synthetic oligonucleotide
aaaacgguuguggcucucc

SEQ ID NO: 3173230 - RNA, 19 nt, Artificial Sequence
  Description of Artificial Sequence: Synthetic oligonucleotide
auuuccaagguugagggca

SEQ ID NO: 3173231 - RNA, 19 nt, Artificial Sequence
  Description of Artificial Sequence: Synthetic oligonucleotide
gauguucugugucaccacc

SEQ ID NO: 3173232 - RNA, 19 nt, Artificial Sequence
  Description of Artificial Sequence: Synthetic oligonucleotide
ucuuugaccacauccuccu

SEQ ID NO: 3173233 - RNA, 19 nt, Artificial Sequence
  Description of Artificial Sequence: Synthetic oligonucleotide
gaaagaggcaagaauuaug

SEQ ID NO: 3173234 - RNA, 19 nt, Artificial Sequence
  Description of Artificial Sequence: Synthetic oligonucleotide
ugaagggaugaauauucca

SEQ ID NO: 3173235 - RNA, 19 nt, Artificial Sequence
  Description of Artificial Sequence: Synthetic oligonucleotide
cugguuugaggccacagag

SEQ ID NO: 3173236 - RNA, 19 nt, Artificial Sequence
  Description of Artificial Sequence: Synthetic oligonucleotide
agcuugaucaccccugcag

SEQ ID NO: 3173237 - RNA, 19 nt, Artificial Sequence
  Description of Artificial Sequence: Synthetic oligonucleotide
aacuccugcaucucugcug

SEQ ID NO: 3173238 - RNA, 19 nt, Artificial Sequence
  Description of Artificial Sequence: Synthetic oligonucleotide
aaauacccucugcagcauc

SEQ ID NO: 3173239 - RNA, 19 nt, Artificial Sequence
  Description of Artificial Sequence: Synthetic oligonucleotide
uaaccaaaauacccucugc

SEQ ID NO: 3173240 - RNA, 19 nt, Artificial Sequence
  Description of Artificial Sequence: Synthetic oligonucleotide
uccguguucuguuuagaag

SEQ ID NO: 3173241 - RNA, 19 nt, Artificial Sequence
  Description of Artificial Sequence: Synthetic oligonucleotide
gagaaagaagugcugguuc

SEQ ID NO: 3173242 - RNA, 19 nt, Artificial Sequence
  Description of Artificial Sequence: Synthetic oligonucleotide
agagcgaaccuccguuucc

SEQ ID NO: 3173243 - RNA, 19 nt, Artificial Sequence
  Description of Artificial Sequence: Synthetic oligonucleotide
agaaagaagugcugguucu

SEQ ID NO: 3173244 - RNA, 19 nt, Artificial Sequence
  Description of Artificial Sequence: Synthetic oligonucleotide
aagacuacaagggcccuag

SEQ ID NO: 3173245 - RNA, 19 nt, Artificial Sequence
  Description of Artificial Sequence: Synthetic oligonucleotide
gagacagguugacacagcc

SEQ ID NO: 3173246 - RNA, 19 nt, Artificial Sequence
  Description of Artificial Sequence: Synthetic oligonucleotide
ucuacgucuugcugugugg

SEQ ID NO: 3173247 - RNA, 19 nt, Artificial Sequence
  Description of Artificial Sequence: Synthetic oligonucleotide
caucucaaggugcagcggg

SEQ ID NO: 3173248 - RNA, 19 nt, Artificial Sequence
  Description of Artificial Sequence: Synthetic oligonucleotide
uguaacaggcuccccacgu

SEQ ID NO: 3173249 - RNA, 19 nt, Artificial Sequence
  Description of Artificial Sequence: Synthetic oligonucleotide
aaacggaagagggcugggc

SEQ ID NO: 3173250 - RNA, 19 nt, Artificial Sequence
  Description of Artificial Sequence: Synthetic oligonucleotide
acauccauccacauagcac

SEQ ID NO: 3173251 - RNA, 19 nt, Artificial Sequence
  Description of Artificial Sequence: Synthetic oligonucleotide
uucaguuccagugugugaa

SEQ ID NO: 3173252 - RNA, 19 nt, Artificial Sequence
  Description of Artificial Sequence: Synthetic oligonucleotide
auuaugggaaacggaagag

SEQ ID NO: 3173253 - RNA, 19 nt, Artificial Sequence
  Description of Artificial Sequence: Synthetic oligonucleotide
gugaaucuuguucuccagg

SEQ ID NO: 3173254 - RNA, 19 nt, Artificial Sequence
  Description of Artificial Sequence: Synthetic oligonucleotide
ugcuccagcugcuuucugg

SEQ ID NO: 3173255 - RNA, 19 nt, Artificial Sequence
  Description of Artificial Sequence: Synthetic oligonucleotide
accaaacaaacaaacaacu

SEQ ID NO: 3173256 - RNA, 19 nt, Artificial Sequence
  Description of Artificial Sequence: Synthetic oligonucleotide
uaaaucccuauaaccaaaa

SEQ ID NO: 3173257 - RNA, 19 nt, Artificial Sequence
  Description of Artificial Sequence: Synthetic oligonucleotide
gauagcuugaucaccccug

SEQ ID NO: 3173258 - RNA, 19 nt, Artificial Sequence
  Description of Artificial Sequence: Synthetic oligonucleotide
agggaugaauauuccaucu

SEQ ID NO: 3173259 - RNA, 19 nt, Artificial Sequence
  Description of Artificial Sequence: Synthetic oligonucleotide
gagccaauaccacauucug

SEQ ID NO: 3173260 - RNA, 19 nt, Artificial Sequence
  Description of Artificial Sequence: Synthetic oligonucleotide
caccacuaccucaaaagag

SEQ ID NO: 3173261 - RNA, 19 nt, Artificial Sequence
  Description of Artificial Sequence: Synthetic oligonucleotide
aaauggacgaggacaggag

SEQ ID NO: 3173262 - RNA, 19 nt, Artificial Sequence
  Description of Artificial Sequence: Synthetic oligonucleotide
uccagugugugaaucuugu

SEQ ID NO: 3173263 - RNA, 19 nt, Artificial Sequence
  Description of Artificial Sequence: Synthetic oligonucleotide
uacuggagccuacaggacu

SEQ ID NO: 3173264 - RNA, 19 nt, Artificial Sequence
  Description of Artificial Sequence: Synthetic oligonucleotide
guuguauuuaguuguagcu

SEQ ID NO: 3173265 - RNA, 19 nt, Artificial Sequence
  Description of Artificial Sequence: Synthetic oligonucleotide
uggaaagaggcaagaauua

SEQ ID NO: 3173266 - RNA, 19 nt, Artificial Sequence
  Description of Artificial Sequence: Synthetic oligonucleotide
aacgguuguggcucuccuc

SEQ ID NO: 3173267 - RNA, 19 nt, Artificial Sequence
  Description of Artificial Sequence: Synthetic oligonucleotide
aaaagauguuguauuuagu

SEQ ID NO: 3173268 - RNA, 19 nt, Artificial Sequence
  Description of Artificial Sequence: Synthetic oligonucleotide
uaacaggcuccccacguug

SEQ ID NO: 3173269 - RNA, 19 nt, Artificial Sequence
  Description of Artificial Sequence: Synthetic oligonucleotide
gaaucccauggagagacag

SEQ ID NO: 3173270 - RNA, 19 nt, Artificial Sequence
  Description of Artificial Sequence: Synthetic oligonucleotide
cagaaucccauggagagac

SEQ ID NO: 3173271 - RNA, 19 nt, Artificial Sequence
  Description of Artificial Sequence: Synthetic oligonucleotide
aaagagcaccucuuccgga

SEQ ID NO: 3173272 - RNA, 19 nt, Artificial Sequence
  Description of Artificial Sequence: Synthetic oligonucleotide
ugaagcugguucuuguguc

SEQ ID NO: 3173273 - RNA, 19 nt, Artificial Sequence
  Description of Artificial Sequence: Synthetic oligonucleotide
aaaucccuauaaccaaaau

SEQ ID NO: 3173274 - RNA, 19 nt, Artificial Sequence
  Description of Artificial Sequence: Synthetic oligonucleotide
aagagggcugggccagagc

SEQ ID NO: 3173275 - RNA, 19 nt, Artificial Sequence
  Description of Artificial Sequence: Synthetic oligonucleotide
aucagaccuuauucugggc

SEQ ID NO: 3173276 - RNA, 19 nt, Artificial Sequence
  Description of Artificial Sequence: Synthetic oligonucleotide
gguacggcuauacugaaga

SEQ ID NO: 3173277 - RNA, 19 nt, Artificial Sequence
  Description of Artificial Sequence: Synthetic oligonucleotide
aagagcaccucuuccggaa

SEQ ID NO: 3173278 - RNA, 19 nt, Artificial Sequence
  Description of Artificial Sequence: Synthetic oligonucleotide
uuuccaaagagcaccucuu

SEQ ID NO: 3173279 - RNA, 19 nt, Artificial Sequence
  Description of Artificial Sequence: Synthetic oligonucleotide
guucaguaggcucugcuuc

SEQ ID NO: 3173280 - RNA, 19 nt, Artificial Sequence
  Description of Artificial Sequence: Synthetic oligonucleotide
agcagguucuagaggaggc

SEQ ID NO: 3173281 - RNA, 19 nt, Artificial Sequence
  Description of Artificial Sequence: Synthetic oligonucleotide
ugucguucugcuguccggg

SEQ ID NO: 3173282 - RNA, 19 nt, Artificial Sequence
  Description of Artificial Sequence: Synthetic oligonucleotide
uggcaucagaccuuauucu

SEQ ID NO: 3173283 - RNA, 19 nt, Artificial Sequence
  Description of Artificial Sequence: Synthetic oligonucleotide
uccaucgcagaccucacua

SEQ ID NO: 3173284 - RNA, 19 nt, Artificial Sequence
  Description of Artificial Sequence: Synthetic oligonucleotide
cugaacuugaguaagaugg

SEQ ID NO: 3173285 - RNA, 19 nt, Artificial Sequence
  Description of Artificial Sequence: Synthetic oligonucleotide
aaauuccacacacacaagc

SEQ ID NO: 3173286 - RNA, 19 nt, Artificial Sequence
  Description of Artificial Sequence: Synthetic oligonucleotide
ucuaucagaaucacaaggg

SEQ ID NO: 3173287 - RNA, 19 nt, Artificial Sequence
  Description of Artificial Sequence: Synthetic oligonucleotide
agacauaucagucuccacc

SEQ ID NO: 3173288 - RNA, 19 nt, Artificial Sequence
  Description of Artificial Sequence: Synthetic oligonucleotide
ucaaauaauagcgaucucg

SEQ ID NO: 3173289 - RNA, 19 nt, Artificial Sequence
  Description of Artificial Sequence: Synthetic oligonucleotide
uucuaucagaaucacaagg

SEQ ID NO: 3173290 - RNA, 19 nt, Artificial Sequence
  Description of Artificial Sequence: Synthetic oligonucleotide
auaauaaguauauucccac

SEQ ID NO: 3173291 - RNA, 19 nt, Artificial Sequence
  Description of Artificial Sequence: Synthetic oligonucleotide
aaugcuucacugucgaugg

SEQ ID NO: 3173292 - RNA, 19 nt, Artificial Sequence
  Description of Artificial Sequence: Synthetic oligonucleotide
aauuaucugaugaugaauc

SEQ ID NO: 3173293 - RNA, 19 nt, Artificial Sequence
  Description of Artificial Sequence: Synthetic oligonucleotide
ucuucuaucagaaucacaa

SEQ ID NO: 3173294 - RNA, 19 nt, Artificial Sequence
  Description of Artificial Sequence: Synthetic oligonucleotide
aauauuuccuuucacugug

SEQ ID NO: 3173295 - RNA, 19 nt, Artificial Sequence
  Description of Artificial Sequence: Synthetic oligonucleotide
uaugaaauaacuucuaaau

SEQ ID NO: 3173296 - RNA, 19 nt, Artificial Sequence
  Description of Artificial Sequence: Synthetic oligonucleotide
uauaauaaguauauuccca

SEQ ID NO: 3173297 - RNA, 19 nt, Artificial Sequence
  Description of Artificial Sequence: Synthetic oligonucleotide
ucuuuugucaugaucacug

SEQ ID NO: 3173298 - RNA, 19 nt, Artificial Sequence
  Description of Artificial Sequence: Synthetic oligonucleotide
aauaaugagguccguggcg

SEQ ID NO: 3173299 - RNA, 19 nt, Artificial Sequence
  Description of Artificial Sequence: Synthetic oligonucleotide
aauaauguuacaaauucca

SEQ ID NO: 3173300 - RNA, 19 nt, Artificial Sequence
  Description of Artificial Sequence: Synthetic oligonucleotide
ugcagaauaacucucaaaa

SEQ ID NO: 3173301 - RNA, 19 nt, Artificial Sequence
  Description of Artificial Sequence: Synthetic oligonucleotide
uggauaaacaaguauauaa

SEQ ID NO: 3173302 - RNA, 19 nt, Artificial Sequence
  Description of Artificial Sequence: Synthetic oligonucleotide
aguaguaauauuuccuuuc

SEQ ID NO: 3173303 - RNA, 19 nt, Artificial Sequence
  Description of Artificial Sequence: Synthetic oligonucleotide
uacaucaagaguuuguuca

SEQ ID NO: 3173304 - RNA, 19 nt, Artificial Sequence
  Description of Artificial Sequence: Synthetic oligonucleotide
uuauuucucaaauaauagc

SEQ ID NO: 3173305 - RNA, 19 nt, Artificial Sequence
  Description of Artificial Sequence: Synthetic oligonucleotide
uaugucaauaccauauggc

SEQ ID NO: 3173306 - RNA, 19 nt, Artificial Sequence
  Description of Artificial Sequence: Synthetic oligonucleotide
ucugcuauaauaaguauau

SEQ ID NO: 3173307 - RNA, 19 nt, Artificial Sequence
  Description of Artificial Sequence: Synthetic oligonucleotide
aucaaugagaugcuuuggc

SEQ ID NO: 3173308 - RNA, 19 nt, Artificial Sequence
  Description of Artificial Sequence: Synthetic oligonucleotide
uuuuguugaauacacauuu

SEQ ID NO: 3173309 - RNA, 19 nt, Artificial Sequence
  Description of Artificial Sequence: Synthetic oligonucleotide
uuuaagacauaucagucuc

SEQ ID NO: 3173310 - RNA, 19 nt, Artificial Sequence
  Description of Artificial Sequence: Synthetic oligonucleotide
uugaccuauuacuagacag

SEQ ID NO: 3173311 - RNA, 19 nt, Artificial Sequence
  Description of Artificial Sequence: Synthetic oligonucleotide
aagaauuuaaaagggaaga

SEQ ID NO: 3173312 - RNA, 19 nt, Artificial Sequence
  Description of Artificial Sequence: Synthetic oligonucleotide
uuuuauucuucuaucagaa

SEQ ID NO: 3173313 - RNA, 19 nt, Artificial Sequence
  Description of Artificial Sequence: Synthetic oligonucleotide
uucuauugugacaacaucu

SEQ ID NO: 3173314 - RNA, 19 nt, Artificial Sequence
  Description of Artificial Sequence: Synthetic oligonucleotide
auaugucaauaccauaugg

SEQ ID NO: 3173315 - RNA, 19 nt, Artificial Sequence
  Description of Artificial Sequence: Synthetic oligonucleotide
ugaccuauuacuagacagg

SEQ ID NO: 3173316 - RNA, 19 nt, Artificial Sequence
  Description of Artificial Sequence: Synthetic oligonucleotide
augguuuugaaucauacaa

SEQ ID NO: 3173317 - RNA, 19 nt, Artificial Sequence
  Description of Artificial Sequence: Synthetic oligonucleotide
auuauuuaggucgucauug

SEQ ID NO: 3173318 - RNA, 19 nt, Artificial Sequence
  Description of Artificial Sequence: Synthetic oligonucleotide
ugggaguugacgaugaugu

SEQ ID NO: 3173319 - RNA, 19 nt, Artificial Sequence
  Description of Artificial Sequence: Synthetic oligonucleotide
uuuuaagacauaucagucu

SEQ ID NO: 3173320 - RNA, 19 nt, Artificial Sequence
  Description of Artificial Sequence: Synthetic oligonucleotide
ugguauucaagucaucagc

SEQ ID NO: 3173321 - RNA, 19 nt, Artificial Sequence
  Description of Artificial Sequence: Synthetic oligonucleotide
auugugacaacaucuuuag

SEQ ID NO: 3173322 - RNA, 19 nt, Artificial Sequence
  Description of Artificial Sequence: Synthetic oligonucleotide
ucuuuuguugaauacacau

SEQ ID NO: 3173323 - RNA, 19 nt, Artificial Sequence
  Description of Artificial Sequence: Synthetic oligonucleotide
uuugcuuccguaauuauuu

SEQ ID NO: 3173324 - RNA, 19 nt, Artificial Sequence
  Description of Artificial Sequence: Synthetic oligonucleotide
uuauccagaguuuggcugg

SEQ ID NO: 3173325 - RNA, 19 nt, Artificial Sequence
  Description of Artificial Sequence: Synthetic oligonucleotide
auuauuucucaaauaauag

SEQ ID NO: 3173326 - RNA, 19 nt, Artificial Sequence
  Description of Artificial Sequence: Synthetic oligonucleotide
uuaugaaauaacuucuaaa

SEQ ID NO: 3173327 - RNA, 19 nt, Artificial Sequence
  Description of Artificial Sequence: Synthetic oligonucleotide
gagaugaacacugacaaac

SEQ ID NO: 3173328 - RNA, 19 nt, Artificial Sequence
  Description of Artificial Sequence: Synthetic oligonucleotide
uucauaaacuaucucuaca

SEQ ID NO: 3173329 - RNA, 19 nt, Artificial Sequence
  Description of Artificial Sequence: Synthetic oligonucleotide
uguuuaguugugucaauag

SEQ ID NO: 3173330 - RNA, 19 nt, Artificial Sequence
  Description of Artificial Sequence: Synthetic oligonucleotide
uggagaugaacacugacaa

SEQ ID NO: 3173331 - RNA, 19 nt, Artificial Sequence
  Description of Artificial Sequence: Synthetic oligonucleotide
auagauguauuacuggacu

SEQ ID NO: 3173332 - RNA, 19 nt, Artificial Sequence
  Description of Artificial Sequence: Synthetic oligonucleotide
aauauacucugucuccucu

SEQ ID NO: 3173333 - RNA, 19 nt, Artificial Sequence
  Description of Artificial Sequence: Synthetic oligonucleotide
agaauuuaaaagggaagac

SEQ ID NO: 3173334 - RNA, 19 nt, Artificial Sequence
  Description of Artificial Sequence: Synthetic oligonucleotide
ugaaucacugucauuauuu

SEQ ID NO: 3173335 - RNA, 19 nt, Artificial Sequence
  Description of Artificial Sequence: Synthetic oligonucleotide
uagauguaguccuugaccu

SEQ ID NO: 3173336 - RNA, 19 nt, Artificial Sequence
  Description of Artificial Sequence: Synthetic oligonucleotide
uuauuuaggucgucauugg

SEQ ID NO: 3173337 - RNA, 19 nt, Artificial Sequence
  Description of Artificial Sequence: Synthetic oligonucleotide
uaugauuucucugaucaug

SEQ ID NO: 3173338 - RNA, 19 nt, Artificial Sequence
  Description of Artificial Sequence: Synthetic oligonucleotide
acuucuggauuguuuauuc

SEQ ID NO: 3173339 - RNA, 19 nt, Artificial Sequence
  Description of Artificial Sequence: Synthetic oligonucleotide
guagauguaguccuugacc

SEQ ID NO: 3173340 - RNA, 19 nt, Artificial Sequence
  Description of Artificial Sequence: Synthetic oligonucleotide
ucauaagagcccaacucag

SEQ ID NO: 3173341 - RNA, 19 nt, Artificial Sequence
  Description of Artificial Sequence: Synthetic oligonucleotide
uuaaaagggaagacauacc

SEQ ID NO: 3173342 - RNA, 19 nt, Artificial Sequence
  Description of Artificial Sequence: Synthetic oligonucleotide
aagcaaaggugcuuucuuc

SEQ ID NO: 3173343 - RNA, 19 nt, Artificial Sequence
  Description of Artificial Sequence: Synthetic oligonucleotide
uauugugacaacaucuuua

SEQ ID NO: 3173344 - RNA, 19 nt, Artificial Sequence
  Description of Artificial Sequence: Synthetic oligonucleotide
uaaacuaucucuacacuua

SEQ ID NO: 3173345 - RNA, 19 nt, Artificial Sequence
  Description of Artificial Sequence: Synthetic oligonucleotide
aagaguuuguucaacugag

SEQ ID NO: 3173346 - RNA, 19 nt, Artificial Sequence
  Description of Artificial Sequence: Synthetic oligonucleotide
aaugacguauuucagccua

SEQ ID NO: 3173347 - RNA, 19 nt, Artificial Sequence
  Description of Artificial Sequence: Synthetic oligonucleotide
auuaucuccauggugcuuc

SEQ ID NO: 3173348 - RNA, 19 nt, Artificial Sequence
  Description of Artificial Sequence: Synthetic oligonucleotide
accaacauguacuugcucu

SEQ ID NO: 3173349 - RNA, 19 nt, Artificial Sequence
  Description of Artificial Sequence: Synthetic oligonucleotide
uugaauucugaauucugga

SEQ ID NO: 3173350 - RNA, 19 nt, Artificial Sequence
  Description of Artificial Sequence: Synthetic oligonucleotide
uauaauuuccauccaguuu

SEQ ID NO: 3173351 - RNA, 19 nt, Artificial Sequence
  Description of Artificial Sequence: Synthetic oligonucleotide
aguagauguaguccuugac

SEQ ID NO: 3173352 - RNA, 19 nt, Artificial Sequence
  Description of Artificial Sequence: Synthetic oligonucleotide
uguagaucguuucucuucu

SEQ ID NO: 3173353 - RNA, 19 nt, Artificial Sequence
  Description of Artificial Sequence: Synthetic oligonucleotide
uguuucacugccagucugg

SEQ ID NO: 3173354 - RNA, 19 nt, Artificial Sequence
  Description of Artificial Sequence: Synthetic oligonucleotide
uucuuuucuucccaugaug

SEQ ID NO: 3173355 - RNA, 19 nt, Artificial Sequence
  Description of Artificial Sequence: Synthetic oligonucleotide
uggcuuaacaaacccaaca

SEQ ID NO: 3173356 - RNA, 19 nt, Artificial Sequence
  Description of Artificial Sequence: Synthetic oligonucleotide
uguagaauaaaaugacgua

SEQ ID NO: 3173357 - RNA, 19 nt, Artificial Sequence
  Description of Artificial Sequence: Synthetic oligonucleotide
augauuucucugaucaugc

SEQ ID NO: 3173358 - RNA, 19 nt, Artificial Sequence
  Description of Artificial Sequence: Synthetic oligonucleotide
uguucaacugagacugcgg

SEQ ID NO: 3173359 - RNA, 19 nt, Artificial Sequence
  Description of Artificial Sequence: Synthetic oligonucleotide
uagaauaaugggcucuuga

SEQ ID NO: 3173360 - RNA, 19 nt, Artificial Sequence
  Description of Artificial Sequence: Synthetic oligonucleotide
ugucgaugguuauaugggg

SEQ ID NO: 3173361 - RNA, 19 nt, Artificial Sequence
  Description of Artificial Sequence: Synthetic oligonucleotide
uucacuuaaaagugcauau

SEQ ID NO: 3173362 - RNA, 19 nt, Artificial Sequence
  Description of Artificial Sequence: Synthetic oligonucleotide
gaagagaacguggagauga

SEQ ID NO: 3173363 - RNA, 19 nt, Artificial Sequence
  Description of Artificial Sequence: Synthetic oligonucleotide
gcaguuuuaagacauauca

SEQ ID NO: 3173364 - RNA, 19 nt, Artificial Sequence
  Description of Artificial Sequence: Synthetic oligonucleotide
acuguuuccacuuucucau

SEQ ID NO: 3173365 - RNA, 19 nt, Artificial Sequence
  Description of Artificial Sequence: Synthetic oligonucleotide
auaauguuacaaauuccac

SEQ ID NO: 3173366 - RNA, 19 nt, Artificial Sequence
  Description of Artificial Sequence: Synthetic oligonucleotide
ucaagaguuuguucaacug

SEQ ID NO: 3173367 - RNA, 19 nt, Artificial Sequence
  Description of Artificial Sequence: Synthetic oligonucleotide
uccuauaugaugauucaua

SEQ ID NO: 3173368 - RNA, 19 nt, Artificial Sequence
  Description of Artificial Sequence: Synthetic oligonucleotide
aguaagaugguccgggagu

SEQ ID NO: 3173369 - RNA, 19 nt, Artificial Sequence
  Description of Artificial Sequence: Synthetic oligonucleotide
agauguauuacuggacugg

SEQ ID NO: 3173370 - RNA, 19 nt, Artificial Sequence
  Description of Artificial Sequence: Synthetic oligonucleotide
uuacuagacaggcuucuug

SEQ ID NO: 3173371 - RNA, 19 nt, Artificial Sequence
  Description of Artificial Sequence: Synthetic oligonucleotide
guucaacugagacugcggg

SEQ ID NO: 3173372 - RNA, 19 nt, Artificial Sequence
  Description of Artificial Sequence: Synthetic oligonucleotide
ugguacacuauuauccaga

SEQ ID NO: 3173373 - RNA, 19 nt, Artificial Sequence
  Description of Artificial Sequence: Synthetic oligonucleotide
ugguuauaauaacugggga

SEQ ID NO: 3173374 - RNA, 19 nt, Artificial Sequence
  Description of Artificial Sequence: Synthetic oligonucleotide
uagaugaacuguccccugg

SEQ ID NO: 3173375 - RNA, 19 nt, Artificial Sequence
  Description of Artificial Sequence: Synthetic oligonucleotide
ucuugaaagaguccucuuc

SEQ ID NO: 3173376 - RNA, 19 nt, Artificial Sequence
  Description of Artificial Sequence: Synthetic oligonucleotide
aacuguaagacugcucuug

SEQ ID NO: 3173377 - RNA, 19 nt, Artificial Sequence
  Description of Artificial Sequence: Synthetic oligonucleotide
uucugcuauaauaaguaua

SEQ ID NO: 3173378 - RNA, 19 nt, Artificial Sequence
  Description of Artificial Sequence: Synthetic oligonucleotide
agagacacugacaauaaug

SEQ ID NO: 3173379 - RNA, 19 nt, Artificial Sequence
  Description of Artificial Sequence: Synthetic oligonucleotide
ucccaaguuuuaaauaaac

SEQ ID NO: 3173380 - RNA, 19 nt, Artificial Sequence
  Description of Artificial Sequence: Synthetic oligonucleotide
ugaucuucuuuugucauga

SEQ ID NO: 3173381 - RNA, 19 nt, Artificial Sequence
  Description of Artificial Sequence: Synthetic oligonucleotide
cacuucauuaguaccuucc

SEQ ID NO: 3173382 - RNA, 19 nt, Artificial Sequence
  Description of Artificial Sequence: Synthetic oligonucleotide
ucugggaaugugaaucuga

SEQ ID NO: 3173383 - RNA, 19 nt, Artificial Sequence
  Description of Artificial Sequence: Synthetic oligonucleotide
caaauaauagcgaucucga

SEQ ID NO: 3173384 - RNA, 19 nt, Artificial Sequence
  Description of Artificial Sequence: Synthetic oligonucleotide
aaguaaaugacuuuauagc

SEQ ID NO: 3173385 - RNA, 19 nt, Artificial Sequence
  Description of Artificial Sequence: Synthetic oligonucleotide
aauacugacgagcuguccc

SEQ ID NO: 3173386 - RNA, 19 nt, Artificial Sequence
  Description of Artificial Sequence: Synthetic oligonucleotide
aagauauaucaucaggagg

SEQ ID NO: 3173387 - RNA, 19 nt, Artificial Sequence
  Description of Artificial Sequence: Synthetic oligonucleotide
aaugagauguucuucaggu

SEQ ID NO: 3173388 - RNA, 19 nt, Artificial Sequence
  Description of Artificial Sequence: Synthetic oligonucleotide
uguucuucaggucugggcg

SEQ ID NO: 3173389 - RNA, 19 nt, Artificial Sequence
  Description of Artificial Sequence: Synthetic oligonucleotide
agauauaucaucaggaggg

SEQ ID NO: 3173390 - RNA, 19 nt, Artificial Sequence
  Description of Artificial Sequence: Synthetic oligonucleotide
aaugcuggggauuaggaug

SEQ ID NO: 3173391 - RNA, 19 nt, Artificial Sequence
  Description of Artificial Sequence: Synthetic oligonucleotide
ugggauaagggauacaucc

SEQ ID NO: 3173392 - RNA, 19 nt, Artificial Sequence
  Description of Artificial Sequence: Synthetic oligonucleotide
aguaaaugacuuuauagca

SEQ ID NO: 3173393 - RNA, 19 nt, Artificial Sequence
  Description of Artificial Sequence: Synthetic oligonucleotide
acuaguaagaggaacaggg

SEQ ID NO: 3173394 - RNA, 19 nt, Artificial Sequence
  Description of Artificial Sequence: Synthetic oligonucleotide
uuaugucuuucuaugauug

SEQ ID NO: 3173395 - RNA, 19 nt, Artificial Sequence
  Description of Artificial Sequence: Synthetic oligonucleotide
aaaugagauguucuucagg

SEQ ID NO: 3173396 - RNA, 19 nt, Artificial Sequence
  Description of Artificial Sequence: Synthetic oligonucleotide
aacucauaaaugucauugg

SEQ ID NO: 3173397 - RNA, 19 nt, Artificial Sequence
  Description of Artificial Sequence: Synthetic oligonucleotide
agucacaagauauaucauc

SEQ ID NO: 3173398 - RNA, 19 nt, Artificial Sequence
  Description of Artificial Sequence: Synthetic oligonucleotide
uuucugaacauuuuccuug

SEQ ID NO: 3173399 - RNA, 19 nt, Artificial Sequence
  Description of Artificial Sequence: Synthetic oligonucleotide
cuugugagaaauaggaggc

SEQ ID NO: 3173400 - RNA, 19 nt, Artificial Sequence
  Description of Artificial Sequence: Synthetic oligonucleotide
agauccaaacccaacaugc

SEQ ID NO: 3173401 - RNA, 19 nt, Artificial Sequence
  Description of Artificial Sequence: Synthetic oligonucleotide
ugaagugaccacuaguaag

SEQ ID NO: 3173402 - RNA, 19 nt, Artificial Sequence
  Description of Artificial Sequence: Synthetic oligonucleotide
ugacauuguaaacaucuag

SEQ ID NO: 3173403 - RNA, 19 nt, Artificial Sequence
  Description of Artificial Sequence: Synthetic oligonucleotide
aaacccaacaugcagcuga

SEQ ID NO: 3173404 - RNA, 19 nt, Artificial Sequence
  Description of Artificial Sequence: Synthetic oligonucleotide
uuguaaacaucuagguugg

SEQ ID NO: 3173405 - RNA, 19 nt, Artificial Sequence
  Description of Artificial Sequence: Synthetic oligonucleotide
ucauuuuccacccauccac

SEQ ID NO: 3173406 - RNA, 19 nt, Artificial Sequence
  Description of Artificial Sequence: Synthetic oligonucleotide
ugacuuuauagcaaggccu

SEQ ID NO: 3173407 - RNA, 19 nt, Artificial Sequence
  Description of Artificial Sequence: Synthetic oligonucleotide
uugaauguuucuuuggugu

SEQ ID NO: 3173408 - RNA, 19 nt, Artificial Sequence
  Description of Artificial Sequence: Synthetic oligonucleotide
agcauaaagguccuggcag

SEQ ID NO: 3173409 - RNA, 19 nt, Artificial Sequence
  Description of Artificial Sequence: Synthetic oligonucleotide
gacaccuuuauccugacca

SEQ ID NO: 3173410 - RNA, 19 nt, Artificial Sequence
  Description of Artificial Sequence: Synthetic oligonucleotide
aguuaaaucagcuucgcuu

SEQ ID NO: 3173411 - RNA, 19 nt, Artificial Sequence
  Description of Artificial Sequence: Synthetic oligonucleotide
ucauuggucacaaauccac

SEQ ID NO: 3173412 - RNA, 19 nt, Artificial Sequence
  Description of Artificial Sequence: Synthetic oligonucleotide
aaacccacuuucugaaggg

SEQ ID NO: 3173413 - RNA, 19 nt, Artificial Sequence
  Description of Artificial Sequence: Synthetic oligonucleotide
ugugcucaccuuaagaacu

SEQ ID NO: 3173414 - RNA, 19 nt, Artificial Sequence
  Description of Artificial Sequence: Synthetic oligonucleotide
uuauagaagguguuguacu

SEQ ID NO: 3173415 - RNA, 19 nt, Artificial Sequence
  Description of Artificial Sequence: Synthetic oligonucleotide
acuugccagagucacaaac

SEQ ID NO: 3173416 - RNA, 19 nt, Artificial Sequence
  Description of Artificial Sequence: Synthetic oligonucleotide
auagcaaggccuccgaguc

SEQ ID NO: 3173417 - RNA, 19 nt, Artificial Sequence
  Description of Artificial Sequence: Synthetic oligonucleotide
uaaauugugaugugcuccc

SEQ ID NO: 3173418 - RNA, 19 nt, Artificial Sequence
  Description of Artificial Sequence: Synthetic oligonucleotide
ugucuuaguaauauauuuc

SEQ ID NO: 3173419 - RNA, 19 nt, Artificial Sequence
  Description of Artificial Sequence: Synthetic oligonucleotide
gauacauccagaacuuggg

SEQ ID NO: 3173420 - RNA, 19 nt, Artificial Sequence
  Description of Artificial Sequence: Synthetic oligonucleotide
uuuauccugaccauuggaa

SEQ ID NO: 3173421 - RNA, 19 nt, Artificial Sequence
  Description of Artificial Sequence: Synthetic oligonucleotide
ucaccuuaagaacuggucu

SEQ ID NO: 3173422 - RNA, 19 nt, Artificial Sequence
  Description of Artificial Sequence: Synthetic oligonucleotide
ugaugguacaucaccacgc

SEQ ID NO: 3173423 - RNA, 19 nt, Artificial Sequence
  Description of Artificial Sequence: Synthetic oligonucleotide
gagcaaggagccuagaggc

SEQ ID NO: 3173424 - RNA, 19 nt, Artificial Sequence
  Description of Artificial Sequence: Synthetic oligonucleotide
uguacuuggcuucucguca

SEQ ID NO: 3173425 - RNA, 19 nt, Artificial Sequence
  Description of Artificial Sequence: Synthetic oligonucleotide
auuggucacaaauccacuc

SEQ ID NO: 3173426 - RNA, 19 nt, Artificial Sequence
  Description of Artificial Sequence: Synthetic oligonucleotide
cucaguuaaaucagcuucg

SEQ ID NO: 3173427 - RNA, 19 nt, Artificial Sequence
  Description of Artificial Sequence: Synthetic oligonucleotide
cuuucugaaggguucacag

SEQ ID NO: 3173428 - RNA, 19 nt, Artificial Sequence
  Description of Artificial Sequence: Synthetic oligonucleotide
cuaaauugugaugugcucc

SEQ ID NO: 3173429 - RNA, 19 nt, Artificial Sequence
  Description of Artificial Sequence: Synthetic oligonucleotide
uguguuguugaccugcuuc

SEQ ID NO: 3173430 - RNA, 19 nt, Artificial Sequence
  Description of Artificial Sequence: Synthetic oligonucleotide
aguugcagcacacuggcug

SEQ ID NO: 3173431 - RNA, 19 nt, Artificial Sequence
  Description of Artificial Sequence: Synthetic oligonucleotide
uccuaaauugugaugugcu

SEQ ID NO: 3173432 - RNA, 19 nt, Artificial Sequence
  Description of Artificial Sequence: Synthetic oligonucleotide
uguauggcagccccuaggc

SEQ ID NO: 3173433 - RNA, 19 nt, Artificial Sequence
  Description of Artificial Sequence: Synthetic oligonucleotide
uuuggcuuccucaaaguuc

SEQ ID NO: 3173434 - RNA, 19 nt, Artificial Sequence
  Description of Artificial Sequence: Synthetic oligonucleotide
ucagucuuugaaaagcauc

SEQ ID NO: 3173435 - RNA, 19 nt, Artificial Sequence
  Description of Artificial Sequence: Synthetic oligonucleotide
auucaaagcagccucucug

SEQ ID NO: 3173436 - RNA, 19 nt, Artificial Sequence
  Description of Artificial Sequence: Synthetic oligonucleotide
cuucauguugcaccggucg

SEQ ID NO: 3173437 - RNA, 19 nt, Artificial Sequence
  Description of Artificial Sequence: Synthetic oligonucleotide
aagaacuggucugagcauc

SEQ ID NO: 3173438 - RNA, 19 nt, Artificial Sequence
  Description of Artificial Sequence: Synthetic oligonucleotide
ccuugugagaaauaggagg

SEQ ID NO: 3173439 - RNA, 19 nt, Artificial Sequence
  Description of Artificial Sequence: Synthetic oligonucleotide
caagauucaaagcagccuc

SEQ ID NO: 3173440 - RNA, 19 nt, Artificial Sequence
  Description of Artificial Sequence: Synthetic oligonucleotide
cuggcugacaguuaucgag

SEQ ID NO: 3173441 - RNA, 19 nt, Artificial Sequence
  Description of Artificial Sequence: Synthetic oligonucleotide
cuccaggccuuauagaagg

SEQ ID NO: 3173442 - RNA, 19 nt, Artificial Sequence
  Description of Artificial Sequence: Synthetic oligonucleotide
aaacaucuagguuggggcu

SEQ ID NO: 3173443 - RNA, 19 nt, Artificial Sequence
  Description of Artificial Sequence: Synthetic oligonucleotide
uacauccagaacuugggga

SEQ ID NO: 3173444 - RNA, 19 nt, Artificial Sequence
  Description of Artificial Sequence: Synthetic oligonucleotide
gaaaugagauguucuucag

SEQ ID NO: 3173445 - RNA, 19 nt, Artificial Sequence
  Description of Artificial Sequence: Synthetic oligonucleotide
augucuuaguaauauauuu

SEQ ID NO: 3173446 - RNA, 19 nt, Artificial Sequence
  Description of Artificial Sequence: Synthetic oligonucleotide
uucaaagcagccucucugc

SEQ ID NO: 3173447 - RNA, 19 nt, Artificial Sequence
  Description of Artificial Sequence: Synthetic oligonucleotide
acucauaaaugucauuggu

SEQ ID NO: 3173448 - RNA, 19 nt, Artificial Sequence
  Description of Artificial Sequence: Synthetic oligonucleotide
aagcauaaagguccuggca

SEQ ID NO: 3173449 - RNA, 19 nt, Artificial Sequence
  Description of Artificial Sequence: Synthetic oligonucleotide
aaagcagccucucugcuuu

SEQ ID NO: 3173450 - RNA, 19 nt, Artificial Sequence
  Description of Artificial Sequence: Synthetic oligonucleotide
auacauccagaacuugggg

SEQ ID NO: 3173451 - RNA, 19 nt, Artificial Sequence
  Description of Artificial Sequence: Synthetic oligonucleotide
uauagcaaggccuccgagu

SEQ ID NO: 3173452 - RNA, 19 nt, Artificial Sequence
  Description of Artificial Sequence: Synthetic oligonucleotide
aacaggggaaugcugggga

SEQ ID NO: 3173453 - RNA, 19 nt, Artificial Sequence
  Description of Artificial Sequence: Synthetic oligonucleotide
ucucugcuuucuuugaaug

SEQ ID NO: 3173454 - RNA, 19 nt, Artificial Sequence
  Description of Artificial Sequence: Synthetic oligonucleotide
uccuugugagaaauaggag

SEQ ID NO: 3173455 - RNA, 19 nt, Artificial Sequence
  Description of Artificial Sequence: Synthetic oligonucleotide
acuagaacacacccgaaau

SEQ ID NO: 3173456 - RNA, 19 nt, Artificial Sequence
  Description of Artificial Sequence: Synthetic oligonucleotide
gauauaucaucaggagggg

SEQ ID NO: 3173457 - RNA, 19 nt, Artificial Sequence
  Description of Artificial Sequence: Synthetic oligonucleotide
uuuaugucuuucuaugauu

SEQ ID NO: 3173458 - RNA, 19 nt, Artificial Sequence
  Description of Artificial Sequence: Synthetic oligonucleotide
ucgucauuccacuggaaca

SEQ ID NO: 3173459 - RNA, 19 nt, Artificial Sequence
  Description of Artificial Sequence: Synthetic oligonucleotide
uccagaaaucaccaucaga

SEQ ID NO: 3173460 - RNA, 19 nt, Artificial Sequence
  Description of Artificial Sequence: Synthetic oligonucleotide
uggcugaugguacaucacc

SEQ ID NO: 3173461 - RNA, 19 nt, Artificial Sequence
  Description of Artificial Sequence: Synthetic oligonucleotide
uauggcagccccuaggcaa

SEQ ID NO: 3173462 - RNA, 19 nt, Artificial Sequence
  Description of Artificial Sequence: Synthetic oligonucleotide
cuuucuaugauugcacgug

SEQ ID NO: 3173463 - RNA, 19 nt, Artificial Sequence
  Description of Artificial Sequence: Synthetic oligonucleotide
uuucuucuggaaguacugg

SEQ ID NO: 3173464 - RNA, 19 nt, Artificial Sequence
  Description of Artificial Sequence: Synthetic oligonucleotide
cugaugguacaucaccacg

SEQ ID NO: 3173465 - RNA, 19 nt, Artificial Sequence
  Description of Artificial Sequence: Synthetic oligonucleotide
uguugcuccuuugugguag

SEQ ID NO: 3173466 - RNA, 19 nt, Artificial Sequence
  Description of Artificial Sequence: Synthetic oligonucleotide
auaugucuuaguaauauau

SEQ ID NO: 3173467 - RNA, 19 nt, Artificial Sequence
  Description of Artificial Sequence: Synthetic oligonucleotide
ucuuucuaugauugcacgu

SEQ ID NO: 3173468 - RNA, 19 nt, Artificial Sequence
  Description of Artificial Sequence: Synthetic oligonucleotide
acaguuaucgagggucugc

SEQ ID NO: 3173469 - RNA, 19 nt, Artificial Sequence
  Description of Artificial Sequence: Synthetic oligonucleotide
uucugugcucaccuuaaga

SEQ ID NO: 3173470 - RNA, 19 nt, Artificial Sequence
  Description of Artificial Sequence: Synthetic oligonucleotide
uuauagcaaggccuccgag

SEQ ID NO: 3173471 - RNA, 19 nt, Artificial Sequence
  Description of Artificial Sequence: Synthetic oligonucleotide
uaccaguuccuaaauugug

SEQ ID NO: 3173472 - RNA, 19 nt, Artificial Sequence
  Description of Artificial Sequence: Synthetic oligonucleotide
gauggcugaugguacauca

SEQ ID NO: 3173473 - RNA, 19 nt, Artificial Sequence
  Description of Artificial Sequence: Synthetic oligonucleotide
uguuuucugaugacauugu

SEQ ID NO: 3173474 - RNA, 19 nt, Artificial Sequence
  Description of Artificial Sequence: Synthetic oligonucleotide
cuaugauugcacgugcugc

SEQ ID NO: 3173475 - RNA, 19 nt, Artificial Sequence
  Description of Artificial Sequence: Synthetic oligonucleotide
uuaaaucagcuucgcuuug

SEQ ID NO: 3173476 - RNA, 19 nt, Artificial Sequence
  Description of Artificial Sequence: Synthetic oligonucleotide
cagucuuugaaaagcauca

SEQ ID NO: 3173477 - RNA, 19 nt, Artificial Sequence
  Description of Artificial Sequence: Synthetic oligonucleotide
cuuuauagcaaggccuccg

SEQ ID NO: 3173478 - RNA, 19 nt, Artificial Sequence
  Description of Artificial Sequence: Synthetic oligonucleotide
uuuuccacccauccacucu

SEQ ID NO: 3173479 - RNA, 19 nt, Artificial Sequence
  Description of Artificial Sequence: Synthetic oligonucleotide
cuuugugguaggaucuggc

SEQ ID NO: 3173480 - RNA, 19 nt, Artificial Sequence
  Description of Artificial Sequence: Synthetic oligonucleotide
caagcauaaagguccuggc

SEQ ID NO: 3173481 - RNA, 19 nt, Artificial Sequence
  Description of Artificial Sequence: Synthetic oligonucleotide
gucacaagauauaucauca

SEQ ID NO: 3173482 - RNA, 19 nt, Artificial Sequence
  Description of Artificial Sequence: Synthetic oligonucleotide
uucuucuggaaguacuggu

SEQ ID NO: 3173483 - RNA, 19 nt, Artificial Sequence
  Description of Artificial Sequence: Synthetic oligonucleotide
acccaguaggaacuugugg

SEQ ID NO: 3173484 - RNA, 19 nt, Artificial Sequence
  Description of Artificial Sequence: Synthetic oligonucleotide
aauaauaagaguugaaugg

SEQ ID NO: 3173485 - RNA, 19 nt, Artificial Sequence
  Description of Artificial Sequence: Synthetic oligonucleotide
acaauuauaaaauuucucc

SEQ ID NO: 3173486 - RNA, 19 nt, Artificial Sequence
  Description of Artificial Sequence: Synthetic oligonucleotide
acucauuacacuuauaagg

SEQ ID NO: 3173487 - RNA, 19 nt, Artificial Sequence
  Description of Artificial Sequence: Synthetic oligonucleotide
aaacuuuacauuugcaugg

SEQ ID NO: 3173488 - RNA, 19 nt, Artificial Sequence
  Description of Artificial Sequence: Synthetic oligonucleotide
aaaaugaagagucuugugu

SEQ ID NO: 3173489 - RNA, 19 nt, Artificial Sequence
  Description of Artificial Sequence: Synthetic oligonucleotide
aaaaguauucuuauccugc

SEQ ID NO: 3173490 - RNA, 19 nt, Artificial Sequence
  Description of Artificial Sequence: Synthetic oligonucleotide
ucucucaugaauaauaaga

SEQ ID NO: 3173491 - RNA, 19 nt, Artificial Sequence
  Description of Artificial Sequence: Synthetic oligonucleotide
uucauuacaauuauaaaau

SEQ ID NO: 3173492 - RNA, 19 nt, Artificial Sequence
  Description of Artificial Sequence: Synthetic oligonucleotide
gaauaauaagaguugaaug

SEQ ID NO: 3173493 - RNA, 19 nt, Artificial Sequence
  Description of Artificial Sequence: Synthetic oligonucleotide
auuacaauuauaaaauuuc

SEQ ID NO: 3173494 - RNA, 19 nt, Artificial Sequence
  Description of Artificial Sequence: Synthetic oligonucleotide
ucugacuucaaguucaaag

SEQ ID NO: 3173495 - RNA, 19 nt, Artificial Sequence
  Description of Artificial Sequence: Synthetic oligonucleotide
aaaauuucuccccagugug

SEQ ID NO: 3173496 - RNA, 19 nt, Artificial Sequence
  Description of Artificial Sequence: Synthetic oligonucleotide
auucauuacaauuauaaaa

SEQ ID NO: 3173497 - RNA, 19 nt, Artificial Sequence
  Description of Artificial Sequence: Synthetic oligonucleotide
ugacaugucacauuccugg

SEQ ID NO: 3173498 - RNA, 19 nt, Artificial Sequence
  Description of Artificial Sequence: Synthetic oligonucleotide
uugaaugggaacuuaaggc

SEQ ID NO: 3173499 - RNA, 19 nt, Artificial Sequence
  Description of Artificial Sequence: Synthetic oligonucleotide
gucaaaaguauucuuaucc

SEQ ID NO: 3173500 - RNA, 19 nt, Artificial Sequence
  Description of Artificial Sequence: Synthetic oligonucleotide
ugagggaugaguuacaccu

SEQ ID NO: 3173501 - RNA, 19 nt, Artificial Sequence
  Description of Artificial Sequence: Synthetic oligonucleotide
auuugcaugguuucucucc

SEQ ID NO: 3173502 - RNA, 19 nt, Artificial Sequence
  Description of Artificial Sequence: Synthetic oligonucleotide
ugaacuuuggccaaaugac

SEQ ID NO: 3173503 - RNA, 19 nt, Artificial Sequence
  Description of Artificial Sequence: Synthetic oligonucleotide
uuuucugacuucaaguuca

SEQ ID NO: 3173504 - RNA, 19 nt, Artificial Sequence
  Description of Artificial Sequence: Synthetic oligonucleotide
aaagguucauuucuuuuag

SEQ ID NO: 3173505 - RNA, 19 nt, Artificial Sequence
  Description of Artificial Sequence: Synthetic oligonucleotide
auucuuauccugcuuuucc

SEQ ID NO: 3173506 - RNA, 19 nt, Artificial Sequence
  Description of Artificial Sequence: Synthetic oligonucleotide
cuuauaagggucuuucucc

SEQ ID NO: 3173507 - RNA, 19 nt, Artificial Sequence
  Description of Artificial Sequence: Synthetic oligonucleotide
aaugacaugucacauuccu

SEQ ID NO: 3173508 - RNA, 19 nt, Artificial Sequence
  Description of Artificial Sequence: Synthetic oligonucleotide
ucuuucuauagucaaaagu

SEQ ID NO: 3173509 - RNA, 19 nt, Artificial Sequence
  Description of Artificial Sequence: Synthetic oligonucleotide
ucuauagucaaaaguauuc

SEQ ID NO: 3173510 - RNA, 19 nt, Artificial Sequence
  Description of Artificial Sequence: Synthetic oligonucleotide
gaugaguuacaccugaaug

SEQ ID NO: 3173511 - RNA, 19 nt, Artificial Sequence
  Description of Artificial Sequence: Synthetic oligonucleotide
ucaugaauaauaagaguug

SEQ ID NO: 3173512 - RNA, 19 nt, Artificial Sequence
  Description of Artificial Sequence: Synthetic oligonucleotide
aagagcugaacuuuggcca

SEQ ID NO: 3173513 - RNA, 19 nt, Artificial Sequence
  Description of Artificial Sequence: Synthetic oligonucleotide
guugaaugggaacuuaagg

SEQ ID NO: 3173514 - RNA, 19 nt, Artificial Sequence
  Description of Artificial Sequence: Synthetic oligonucleotide
uccaguaugaauucgcuga

SEQ ID NO: 3173515 - RNA, 19 nt, Artificial Sequence
  Description of Artificial Sequence: Synthetic oligonucleotide
acuuauaagggucuuucuc

SEQ ID NO: 3173516 - RNA, 19 nt, Artificial Sequence
  Description of Artificial Sequence: Synthetic oligonucleotide
uucucuaugugacuuuggg

SEQ ID NO: 3173517 - RNA, 19 nt, Artificial Sequence
  Description of Artificial Sequence: Synthetic oligonucleotide
uuacaauuauaaaauuucu

SEQ ID NO: 3173518 - RNA, 19 nt, Artificial Sequence
  Description of Artificial Sequence: Synthetic oligonucleotide
auaauaagaguugaauggg

SEQ ID NO: 3173519 - RNA, 19 nt, Artificial Sequence
  Description of Artificial Sequence: Synthetic oligonucleotide
auaagagcugaacuuuggc

SEQ ID NO: 3173520 - RNA, 19 nt, Artificial Sequence
  Description of Artificial Sequence: Synthetic oligonucleotide
caaacuuuacauuugcaug

SEQ ID NO: 3173521 - RNA, 19 nt, Artificial Sequence
  Description of Artificial Sequence: Synthetic oligonucleotide
auaagaguugaaugggaac

SEQ ID NO: 3173522 - RNA, 19 nt, Artificial Sequence
  Description of Artificial Sequence: Synthetic oligonucleotide
aguaugaauccugcgaugc

SEQ ID NO: 3173523 - RNA, 19 nt, Artificial Sequence
  Description of Artificial Sequence: Synthetic oligonucleotide
uaaaauuucuccccagugu

SEQ ID NO: 3173524 - RNA, 19 nt, Artificial Sequence
  Description of Artificial Sequence: Synthetic oligonucleotide
ugaaugggaacuuaaggcu

SEQ ID NO: 3173525 - RNA, 19 nt, Artificial Sequence
  Description of Artificial Sequence: Synthetic oligonucleotide
aguucaaagguucauuucu

SEQ ID NO: 3173526 - RNA, 19 nt, Artificial Sequence
  Description of Artificial Sequence: Synthetic oligonucleotide
gaacuuaaggcuuugccac

SEQ ID NO: 3173527 - RNA, 19 nt, Artificial Sequence
  Description of Artificial Sequence: Synthetic oligonucleotide
uuccugaaaaugaagaguc

SEQ ID NO: 3173528 - RNA, 19 nt, Artificial Sequence
  Description of Artificial Sequence: Synthetic oligonucleotide
cucucaugaauaauaagag

SEQ ID NO: 3173529 - RNA, 19 nt, Artificial Sequence
  Description of Artificial Sequence: Synthetic oligonucleotide
aaguucaaagguucauuuc

SEQ ID NO: 3173530 - RNA, 19 nt, Artificial Sequence
  Description of Artificial Sequence: Synthetic oligonucleotide
uacaauuauaaaauuucuc

SEQ ID NO: 3173531 - RNA, 19 nt, Artificial Sequence
  Description of Artificial Sequence: Synthetic oligonucleotide
aaaugaagagucuuguguu

SEQ ID NO: 3173532 - RNA, 19 nt, Artificial Sequence
  Description of Artificial Sequence: Synthetic oligonucleotide
agguucauuucuuuuagag

SEQ ID NO: 3173533 - RNA, 19 nt, Artificial Sequence
  Description of Artificial Sequence: Synthetic oligonucleotide
uuucacauucugaugaccu

SEQ ID NO: 3173534 - RNA, 19 nt, Artificial Sequence
  Description of Artificial Sequence: Synthetic oligonucleotide
gugacuuugggcuaaauuc

SEQ ID NO: 3173535 - RNA, 19 nt, Artificial Sequence
  Description of Artificial Sequence: Synthetic oligonucleotide
cuuucuauagucaaaagua

SEQ ID NO: 3173536 - RNA, 19 nt, Artificial Sequence
  Description of Artificial Sequence: Synthetic oligonucleotide
uaagagcugaacuuuggcc

SEQ ID NO: 3173537 - RNA, 19 nt, Artificial Sequence
  Description of Artificial Sequence: Synthetic oligonucleotide
augaguuacaccugaaugu

SEQ ID NO: 3173538 - RNA, 19 nt, Artificial Sequence
  Description of Artificial Sequence: Synthetic oligonucleotide
ucaaaaguauucuuauccu

SEQ ID NO: 3173539 - RNA, 19 nt, Artificial Sequence
  Description of Artificial Sequence: Synthetic oligonucleotide
uaugcauucucugauguug

SEQ ID NO: 3173540 - RNA, 19 nt, Artificial Sequence
  Description of Artificial Sequence: Synthetic oligonucleotide
ugcuuuuccucuaacuugc

SEQ ID NO: 3173541 - RNA, 19 nt, Artificial Sequence
  Description of Artificial Sequence: Synthetic oligonucleotide
aauccugcgaugcugaaua

SEQ ID NO: 3173542 - RNA, 19 nt, Artificial Sequence
  Description of Artificial Sequence: Synthetic oligonucleotide
aaaguauucuuauccugcu

SEQ ID NO: 3173543 - RNA, 19 nt, Artificial Sequence
  Description of Artificial Sequence: Synthetic oligonucleotide
ugaauaauaagaguugaau

SEQ ID NO: 3173544 - RNA, 19 nt, Artificial Sequence
  Description of Artificial Sequence: Synthetic oligonucleotide
caaaugacaugucacauuc

SEQ ID NO: 3173545 - RNA, 19 nt, Artificial Sequence
  Description of Artificial Sequence: Synthetic oligonucleotide
uuuacauuugcaugguuuc

SEQ ID NO: 3173546 - RNA, 19 nt, Artificial Sequence
  Description of Artificial Sequence: Synthetic oligonucleotide
ugacuuugggcuaaauuca

SEQ ID NO: 3173547 - RNA, 19 nt, Artificial Sequence
  Description of Artificial Sequence: Synthetic oligonucleotide
acaaacuuuacauuugcau

SEQ ID NO: 3173548 - RNA, 19 nt, Artificial Sequence
  Description of Artificial Sequence: Synthetic oligonucleotide
cuuugggcuaaauucauug

SEQ ID NO: 3173549 - RNA, 19 nt, Artificial Sequence
  Description of Artificial Sequence: Synthetic oligonucleotide
uucuucuccaguaugaauu

SEQ ID NO: 3173550 - RNA, 19 nt, Artificial Sequence
  Description of Artificial Sequence: Synthetic oligonucleotide
aguuccugaaaaugaagag

SEQ ID NO: 3173551 - RNA, 19 nt, Artificial Sequence
  Description of Artificial Sequence: Synthetic oligonucleotide
uuauaaaauuucuccccag

SEQ ID NO: 3173552 - RNA, 19 nt, Artificial Sequence
  Description of Artificial Sequence: Synthetic oligonucleotide
uaagaguugaaugggaacu

SEQ ID NO: 3173553 - RNA, 19 nt, Artificial Sequence
  Description of Artificial Sequence: Synthetic oligonucleotide
uaauaagaguugaauggga

SEQ ID NO: 3173554 - RNA, 19 nt, Artificial Sequence
  Description of Artificial Sequence: Synthetic oligonucleotide
uguuuucccacacucauua

SEQ ID NO: 3173555 - RNA, 19 nt, Artificial Sequence
  Description of Artificial Sequence: Synthetic oligonucleotide
aauaagagcugaacuuugg

SEQ ID NO: 3173556 - RNA, 19 nt, Artificial Sequence
  Description of Artificial Sequence: Synthetic oligonucleotide
acacucauuacacuuauaa

SEQ ID NO: 3173557 - RNA, 19 nt, Artificial Sequence
  Description of Artificial Sequence: Synthetic oligonucleotide
uucacaaucaguuccugaa

SEQ ID NO: 3173558 - RNA, 19 nt, Artificial Sequence
  Description of Artificial Sequence: Synthetic oligonucleotide
cauuacacuuauaaggguc

SEQ ID NO: 3173559 - RNA, 19 nt, Artificial Sequence
  Description of Artificial Sequence: Synthetic oligonucleotide
ugaacuuugucugaaggcu

SEQ ID NO: 3173560 - RNA, 19 nt, Artificial Sequence
  Description of Artificial Sequence: Synthetic oligonucleotide
uuucuauagucaaaaguau

SEQ ID NO: 3173561 - RNA, 19 nt, Artificial Sequence
  Description of Artificial Sequence: Synthetic oligonucleotide
uuugucugaaggcuuuccc

SEQ ID NO: 3173562 - RNA, 19 nt, Artificial Sequence
  Description of Artificial Sequence: Synthetic oligonucleotide
ucaguuccugaaaaugaag

SEQ ID NO: 3173563 - RNA, 19 nt, Artificial Sequence
  Description of Artificial Sequence: Synthetic oligonucleotide
aaucaguuccugaaaauga

SEQ ID NO: 3173564 - RNA, 19 nt, Artificial Sequence
  Description of Artificial Sequence: Synthetic oligonucleotide
ugacuucaaguucaaaggu

SEQ ID NO: 3173565 - RNA, 19 nt, Artificial Sequence
  Description of Artificial Sequence: Synthetic oligonucleotide
acuucaaguucaaagguuc

SEQ ID NO: 3173566 - RNA, 19 nt, Artificial Sequence
  Description of Artificial Sequence: Synthetic oligonucleotide
uccagugugaauucucuca

SEQ ID NO: 3173567 - RNA, 19 nt, Artificial Sequence
  Description of Artificial Sequence: Synthetic oligonucleotide
aauucucucaugaauaaua

SEQ ID NO: 3173568 - RNA, 19 nt, Artificial Sequence
  Description of Artificial Sequence: Synthetic oligonucleotide
aucgguaugguuucuucuc

SEQ ID NO: 3173569 - RNA, 19 nt, Artificial Sequence
  Description of Artificial Sequence: Synthetic oligonucleotide
ucucaugaauaauaagagu

SEQ ID NO: 3173570 - RNA, 19 nt, Artificial Sequence
  Description of Artificial Sequence: Synthetic oligonucleotide
agucaaaaguauucuuauc

SEQ ID NO: 3173571 - RNA, 19 nt, Artificial Sequence
  Description of Artificial Sequence: Synthetic oligonucleotide
uuauaagggucuuucucca

SEQ ID NO: 3173572 - RNA, 19 nt, Artificial Sequence
  Description of Artificial Sequence: Synthetic oligonucleotide
ugcgaugcugaauaagagc

SEQ ID NO: 3173573 - RNA, 19 nt, Artificial Sequence
  Description of Artificial Sequence: Synthetic oligonucleotide
ugaaaaugaagagucuugu

SEQ ID NO: 3173574 - RNA, 19 nt, Artificial Sequence
  Description of Artificial Sequence: Synthetic oligonucleotide
cugaaaaugaagagucuug

SEQ ID NO: 3173575 - RNA, 19 nt, Artificial Sequence
  Description of Artificial Sequence: Synthetic oligonucleotide
cugaacuuugucugaaggc

SEQ ID NO: 3173576 - RNA, 19 nt, Artificial Sequence
  Description of Artificial Sequence: Synthetic oligonucleotide
ucugauguuggaucagagc

SEQ ID NO: 3173577 - RNA, 19 nt, Artificial Sequence
  Description of Artificial Sequence: Synthetic oligonucleotide
uuggccaaaugacauguca

SEQ ID NO: 3173578 - RNA, 19 nt, Artificial Sequence
  Description of Artificial Sequence: Synthetic oligonucleotide
aguaugcauucucugaugu

SEQ ID NO: 3173579 - RNA, 19 nt, Artificial Sequence
  Description of Artificial Sequence: Synthetic oligonucleotide
aacuugccuucauauauga

SEQ ID NO: 3173580 - RNA, 19 nt, Artificial Sequence
  Description of Artificial Sequence: Synthetic oligonucleotide
aguauucuuauccugcuuu

SEQ ID NO: 3173581 - RNA, 19 nt, Artificial Sequence
  Description of Artificial Sequence: Synthetic oligonucleotide
uacaccugaauguuuuccc

SEQ ID NO: 3173582 - RNA, 19 nt, Artificial Sequence
  Description of Artificial Sequence: Synthetic oligonucleotide
accaguaugaauccugcga

SEQ ID NO: 3173583 - RNA, 19 nt, Artificial Sequence
  Description of Artificial Sequence: Synthetic oligonucleotide
uuugcaugguuucucucca

SEQ ID NO: 3173584 - RNA, 19 nt, Artificial Sequence
  Description of Artificial Sequence: Synthetic oligonucleotide
aacgcugcaacuccagggc

SEQ ID NO: 3173585 - RNA, 19 nt, Artificial Sequence
  Description of Artificial Sequence: Synthetic oligonucleotide
uauuuguucagaacuccgg

SEQ ID NO: 3173586 - RNA, 19 nt, Artificial Sequence
  Description of Artificial Sequence: Synthetic oligonucleotide
  modified_base (11)..(11): a, c, u, g, unknown or other
acuugcuuuanccuugcgg

SEQ ID NO: 3173587 - RNA, 19 nt, Artificial Sequence
  Description of Artificial Sequence: Synthetic oligonucleotide
auuuguucagaacuccggg

SEQ ID NO: 3173588 - RNA, 19 nt, Artificial Sequence
  Description of Artificial Sequence: Synthetic oligonucleotide
cuagaagcuccucagaggc

SEQ ID NO: 3173589 - RNA, 19 nt, Artificial Sequence
  Description of Artificial Sequence: Synthetic oligonucleotide
  modified_base (4)..(4): a, c, u, g, unknown or other
uuanccuugcgguucugcg

SEQ ID NO: 3173590 - RNA, 19 nt, Artificial Sequence
  Description of Artificial Sequence: Synthetic oligonucleotide
gauuucugcuuccaggagc

SEQ ID NO: 3173591 - RNA, 19 nt, Artificial Sequence
  Description of Artificial Sequence: Synthetic oligonucleotide
acuagaagcuccucagagg

SEQ ID NO: 3173592 - RNA, 19 nt, Artificial Sequence
  Description of Artificial Sequence: Synthetic oligonucleotide
gaacgcugcaacuccaggg

SEQ ID NO: 3173593 - RNA, 19 nt, Artificial Sequence
  Description of Artificial Sequence: Synthetic oligonucleotide
auuucugcuuccaggagcc

SEQ ID NO: 3173594 - RNA, 19 nt, Artificial Sequence
  Description of Artificial Sequence: Synthetic oligonucleotide
cuggauuucugcuuccagg

SEQ ID NO: 3173595 - RNA, 19 nt, Artificial Sequence
  Description of Artificial Sequence: Synthetic oligonucleotide
uggauuucugcuuccagga

SEQ ID NO: 3173596 - RNA, 19 nt, Artificial Sequence
  Description of Artificial Sequence: Synthetic oligonucleotide
  modified_base (10)..(10): a, c, u, g, unknown or other
cuugcuuuanccuugcggu

SEQ ID NO: 3173597 - RNA, 19 nt, Artificial Sequence
  Description of Artificial Sequence: Synthetic oligonucleotide
uguucagaacuccgggucc

SEQ ID NO: 3173598 - RNA, 19 nt, Artificial Sequence
  Description of Artificial Sequence: Synthetic oligonucleotide
accacuagaagcuccucag

SEQ ID NO: 3173599 - RNA, 19 nt, Artificial Sequence
  Description of Artificial Sequence: Synthetic oligonucleotide
ucggcuuccaccacuagaa

SEQ ID NO: 3173600 - RNA, 19 nt, Artificial Sequence
  Description of Artificial Sequence: Synthetic oligonucleotide
uuguucagaacuccggguc

SEQ ID NO: 3173601 - RNA, 19 nt, Artificial Sequence
  Description of Artificial Sequence: Synthetic oligonucleotide
guaggccucacguagggcc

SEQ ID NO: 3173602 - RNA, 19 nt, Artificial Sequence
  Description of Artificial Sequence: Synthetic oligonucleotide
uuuguucagaacuccgggu

SEQ ID NO: 3173603 - RNA, 19 nt, Artificial Sequence
  Description of Artificial Sequence: Synthetic oligonucleotide
aggccuuuauucugcaagg

SEQ ID NO: 3173604 - RNA, 19 nt, Artificial Sequence
  Description of Artificial Sequence: Synthetic oligonucleotide
agaacuccgggucccggcc

SEQ ID NO: 3173605 - RNA, 19 nt, Artificial Sequence
  Description of Artificial Sequence: Synthetic oligonucleotide
cacuagaagcuccucagag

SEQ ID NO: 3173606 - RNA, 19 nt, Artificial Sequence
  Description of Artificial Sequence: Synthetic oligonucleotide
cuuuauucugcaaggccug

SEQ ID NO: 3173607 - RNA, 19 nt, Artificial Sequence
  Description of Artificial Sequence: Synthetic oligonucleotide
caggccuuuauucugcaag

SEQ ID NO: 3173608 - RNA, 19 nt, Artificial Sequence
  Description of Artificial Sequence: Synthetic oligonucleotide
guauuuguucagaacuccg

SEQ ID NO: 3173609 - RNA, 19 nt, Artificial Sequence
  Description of Artificial Sequence: Synthetic oligonucleotide
  modified_base (2)..(2): a, c, u, g, unknown or other
anccuugcgguucugcgaa

SEQ ID NO: 3173610 - RNA, 19 nt, Artificial Sequence
  Description of Artificial Sequence: Synthetic oligonucleotide
cagacucaggccuuuauuc

SEQ ID NO: 3173611 - RNA, 19 nt, Artificial Sequence
  Description of Artificial Sequence: Synthetic oligonucleotide
guagcugccguauuuguuc

SEQ ID NO: 3173612 - RNA, 19 nt, Artificial Sequence
  Description of Artificial Sequence: Synthetic oligonucleotide
agggccuggacucucugcg

SEQ ID NO: 3173613 - RNA, 19 nt, Artificial Sequence
  Description of Artificial Sequence: Synthetic oligonucleotide
ugaagccuccgcuuguagc

SEQ ID NO: 3173614 - RNA, 19 nt, Artificial Sequence
  Description of Artificial Sequence: Synthetic oligonucleotide
agaagcuccucagaggcag

SEQ ID NO: 3173615 - RNA, 19 nt, Artificial Sequence
  Description of Artificial Sequence: Synthetic oligonucleotide
uucugcaaggccuggauuu

SEQ ID NO: 3173616 - RNA, 19 nt, Artificial Sequence
  Description of Artificial Sequence: Synthetic oligonucleotide
uuuauucugcaaggccugg

SEQ ID NO: 3173617 - RNA, 19 nt, Artificial Sequence
  Description of Artificial Sequence: Synthetic oligonucleotide
aacuccagggcugaagccu

SEQ ID NO: 3173618 - RNA, 19 nt, Artificial Sequence
  Description of Artificial Sequence: Synthetic oligonucleotide
uucggcuuccaccacuaga

SEQ ID NO: 3173619 - RNA, 19 nt, Artificial Sequence
  Description of Artificial Sequence: Synthetic oligonucleotide
gacucaggccuuuauucug

SEQ ID NO: 3173620 - RNA, 19 nt, Artificial Sequence
  Description of Artificial Sequence: Synthetic oligonucleotide
ucacguagggccuggacuc

SEQ ID NO: 3173621 - RNA, 19 nt, Artificial Sequence
  Description of Artificial Sequence: Synthetic oligonucleotide
cagggcuccagacucaggc

SEQ ID NO: 3173622 - RNA, 19 nt, Artificial Sequence
  Description of Artificial Sequence: Synthetic oligonucleotide
ugcgguucugcgaacgcug

SEQ ID NO: 3173623 - RNA, 19 nt, Artificial Sequence
  Description of Artificial Sequence: Synthetic oligonucleotide
  modified_base (5)..(5): a, c, u, g, unknown or other
uuuanccuugcgguucugc

SEQ ID NO: 3173624 - RNA, 19 nt, Artificial Sequence
  Description of Artificial Sequence: Synthetic oligonucleotide
uauucugcaaggccuggau

SEQ ID NO: 3173625 - RNA, 19 nt, Artificial Sequence
  Description of Artificial Sequence: Synthetic oligonucleotide
  modified_base (3)..(3): a, c, u, g, unknown or other
uanccuugcgguucugcga

SEQ ID NO: 3173626 - RNA, 19 nt, Artificial Sequence
  Description of Artificial Sequence: Synthetic oligonucleotide
agacucaggccuuuauucu

SEQ ID NO: 3173627 - RNA, 19 nt, Artificial Sequence
  Description of Artificial Sequence: Synthetic oligonucleotide
acucaggccuuuauucugc

SEQ ID NO: 3173628 - RNA, 19 nt, Artificial Sequence
  Description of Artificial Sequence: Synthetic oligonucleotide
uucugcuuccaggagccgg

SEQ ID NO: 3173629 - RNA, 19 nt, Artificial Sequence
  Description of Artificial Sequence: Synthetic oligonucleotide
agggcuccagacucaggcc

SEQ ID NO: 3173630 - RNA, 19 nt, Artificial Sequence
  Description of Artificial Sequence: Synthetic oligonucleotide
  modified_base (14)..(14): a, c, u, g, unknown or other
agcacuugcuuuanccuug

SEQ ID NO: 3173631 - RNA, 19 nt, Artificial Sequence
  Description of Artificial Sequence: Synthetic oligonucleotide
uccaggagccgguuuucgg

SEQ ID NO: 3173632 - RNA, 19 nt, Artificial Sequence
  Description of Artificial Sequence: Synthetic oligonucleotide
aggccuggauuucugcuuc

SEQ ID NO: 3173633 - RNA, 19 nt, Artificial Sequence
  Description of Artificial Sequence: Synthetic oligonucleotide
  modified_base (17)..(17): a, c, u, g, unknown or other
ggcagcacuugcuuuancc

SEQ ID NO: 3173634 - RNA, 19 nt, Artificial Sequence
  Description of Artificial Sequence: Synthetic oligonucleotide
ucugcuuccaggagccggu

SEQ ID NO: 3173635 - RNA, 19 nt, Artificial Sequence
  Description of Artificial Sequence: Synthetic oligonucleotide
uuccaccacuagaagcucc

SEQ ID NO: 3173636 - RNA, 19 nt, Artificial Sequence
  Description of Artificial Sequence: Synthetic oligonucleotide
ucugcgaacgcugcaacuc

SEQ ID NO: 3173637 - RNA, 19 nt, Artificial Sequence
  Description of Artificial Sequence: Synthetic oligonucleotide
uccaccacuagaagcuccu

SEQ ID NO: 3173638 - RNA, 19 nt, Artificial Sequence
  Description of Artificial Sequence: Synthetic oligonucleotide
  modified_base (8)..(8): a, c, u, g, unknown or other
ugcuuuanccuugcgguuc

SEQ ID NO: 3173639 - RNA, 19 nt, Artificial Sequence
  Description of Artificial Sequence: Synthetic oligonucleotide
aaggccuggauuucugcuu

SEQ ID NO: 3173640 - RNA, 19 nt, Artificial Sequence
  Description of Artificial Sequence: Synthetic oligonucleotide
ucagaggcagcacuugcuu

SEQ ID NO: 3173641 - RNA, 19 nt, Artificial Sequence
  Description of Artificial Sequence: Synthetic oligonucleotide
acguaggccucacguaggg

SEQ ID NO: 3173642 - RNA, 19 nt, Artificial Sequence
  Description of Artificial Sequence: Synthetic oligonucleotide
uuuucggcuuccaccacua

SEQ ID NO: 3173643 - RNA, 19 nt, Artificial Sequence
  Description of Artificial Sequence: Synthetic oligonucleotide
cuuguagcugccguauuug

SEQ ID NO: 3173644 - RNA, 19 nt, Artificial Sequence
  Description of Artificial Sequence: Synthetic oligonucleotide
ugcaaggccuggauuucug

SEQ ID NO: 3173645 - RNA, 19 nt, Artificial Sequence
  Description of Artificial Sequence: Synthetic oligonucleotide
uguagcugccguauuuguu

SEQ ID NO: 3173646 - RNA, 19 nt, Artificial Sequence
  Description of Artificial Sequence: Synthetic oligonucleotide
gaagccuccgcuuguagcu

SEQ ID NO: 3173647 - RNA, 19 nt, Artificial Sequence
  Description of Artificial Sequence: Synthetic oligonucleotide
uccccagggcuccagacuc

SEQ ID NO: 3173648 - RNA, 19 nt, Artificial Sequence
  Description of Artificial Sequence: Synthetic oligonucleotide
ugccguauuuguucagaac

SEQ ID NO: 3173649 - RNA, 19 nt, Artificial Sequence
  Description of Artificial Sequence: Synthetic oligonucleotide
uuguagcugccguauuugu

SEQ ID NO: 3173650 - RNA, 19 nt, Artificial Sequence
  Description of Artificial Sequence: Synthetic oligonucleotide
aacuccgggucccggccuc

SEQ ID NO: 3173651 - RNA, 19 nt, Artificial Sequence
  Description of Artificial Sequence: Synthetic oligonucleotide
ugcaacuccagggcugaag

SEQ ID NO: 3173652 - RNA, 19 nt, Artificial Sequence
  Description of Artificial Sequence: Synthetic oligonucleotide
agccuccgcuuguagcugc

SEQ ID NO: 3173653 - RNA, 19 nt, Artificial Sequence
  Description of Artificial Sequence: Synthetic oligonucleotide
agaggcagcacuugcuuua

SEQ ID NO: 3173654 - RNA, 19 nt, Artificial Sequence
  Description of Artificial Sequence: Synthetic oligonucleotide
gcaacuccagggcugaagc

SEQ ID NO: 3173655 - RNA, 19 nt, Artificial Sequence
  Description of Artificial Sequence: Synthetic oligonucleotide
ggcuuccaccacuagaagc

SEQ ID NO: 3173656 - RNA, 19 nt, Artificial Sequence
  Description of Artificial Sequence: Synthetic oligonucleotide
cacguaggccucacguagg

SEQ ID NO: 3173657 - RNA, 19 nt, Artificial Sequence
  Description of Artificial Sequence: Synthetic oligonucleotide
gccuuuauucugcaaggcc

SEQ ID NO: 3173658 - RNA, 19 nt, Artificial Sequence
  Description of Artificial Sequence: Synthetic oligonucleotide
uagaagcuccucagaggca

SEQ ID NO: 3173659 - RNA, 19 nt, Artificial Sequence
  Description of Artificial Sequence: Synthetic oligonucleotide
uuauucugcaaggccugga

SEQ ID NO: 3173660 - RNA, 19 nt, Artificial Sequence
  Description of Artificial Sequence: Synthetic oligonucleotide
uggacucucugcgggaagc

SEQ ID NO: 3173661 - RNA, 19 nt, Artificial Sequence
  Description of Artificial Sequence: Synthetic oligonucleotide
gcacguaggccucacguag

SEQ ID NO: 3173662 - RNA, 19 nt, Artificial Sequence
  Description of Artificial Sequence: Synthetic oligonucleotide
cugcgaacgcugcaacucc

SEQ ID NO: 3173663 - RNA, 19 nt, Artificial Sequence
  Description of Artificial Sequence: Synthetic oligonucleotide
uagcugccguauuuguuca

SEQ ID NO: 3173664 - RNA, 19 nt, Artificial Sequence
  Description of Artificial Sequence: Synthetic oligonucleotide
uucugcgaacgcugcaacu

SEQ ID NO: 3173665 - RNA, 19 nt, Artificial Sequence
  Description of Artificial Sequence: Synthetic oligonucleotide
ugcgaacgcugcaacucca

SEQ ID NO: 3173666 - RNA, 19 nt, Artificial Sequence
  Description of Artificial Sequence: Synthetic oligonucleotide
cuugcgguucugcgaacgc

SEQ ID NO: 3173667 - RNA, 19 nt, Artificial Sequence
  Description of Artificial Sequence: Synthetic oligonucleotide
caacuccagggcugaagcc

SEQ ID NO: 3173668 - RNA, 19 nt, Artificial Sequence
  Description of Artificial Sequence: Synthetic oligonucleotide
gccguauuuguucagaacu

SEQ ID NO: 3173669 - RNA, 19 nt, Artificial Sequence
  Description of Artificial Sequence: Synthetic oligonucleotide
ucagaacuccgggucccgg

SEQ ID NO: 3173670 - RNA, 19 nt, Artificial Sequence
  Description of Artificial Sequence: Synthetic oligonucleotide
uaggccucacguagggccu

SEQ ID NO: 3173671 - RNA, 19 nt, Artificial Sequence
  Description of Artificial Sequence: Synthetic oligonucleotide
uuccaggagccgguuuucg

SEQ ID NO: 3173672 - RNA, 19 nt, Artificial Sequence
  Description of Artificial Sequence: Synthetic oligonucleotide
uucagaacuccgggucccg

SEQ ID NO: 3173673 - RNA, 19 nt, Artificial Sequence
  Description of Artificial Sequence: Synthetic oligonucleotide
ccgguuuucggcuuccacc

SEQ ID NO: 3173674 - RNA, 19 nt, Artificial Sequence
  Description of Artificial Sequence: Synthetic oligonucleotide
uuucggcuuccaccacuag

SEQ ID NO: 3173675 - RNA, 19 nt, Artificial Sequence
  Description of Artificial Sequence: Synthetic oligonucleotide
cagaacuccgggucccggc

SEQ ID NO: 3173676 - RNA, 19 nt, Artificial Sequence
  Description of Artificial Sequence: Synthetic oligonucleotide
uccagacucaggccuuuau

SEQ ID NO: 3173677 - RNA, 19 nt, Artificial Sequence
  Description of Artificial Sequence: Synthetic oligonucleotide
  modified_base (9)..(9): a, c, u, g, unknown or other
uugcuuuanccuugcgguu

SEQ ID NO: 3173678 - RNA, 19 nt, Artificial Sequence
  Description of Artificial Sequence: Synthetic oligonucleotide
guucagaacuccggguccc

SEQ ID NO: 3173679 - RNA, 19 nt, Artificial Sequence
  Description of Artificial Sequence: Synthetic oligonucleotide
uagggccuggacucucugc

SEQ ID NO: 3173680 - RNA, 19 nt, Artificial Sequence
  Description of Artificial Sequence: Synthetic oligonucleotide
auucugcaaggccuggauu

SEQ ID NO: 3173681 - RNA, 19 nt, Artificial Sequence
  Description of Artificial Sequence: Synthetic oligonucleotide
ggauuucugcuuccaggag

SEQ ID NO: 3173682 - RNA, 19 nt, Artificial Sequence
  Description of Artificial Sequence: Synthetic oligonucleotide
ucccuggguccccagggcu

SEQ ID NO: 3173683 - RNA, 19 nt, Artificial Sequence
  Description of Artificial Sequence: Synthetic oligonucleotide
uccaccgcgcacguaggcc

SEQ ID NO: 3173684 - RNA, 19 nt, Artificial Sequence
  Description of Artificial Sequence: Synthetic oligonucleotide
aauacuucccgugaaacac

SEQ ID NO: 3173685 - RNA, 19 nt, Artificial Sequence
  Description of Artificial Sequence: Synthetic oligonucleotide
uuuccauucagucauguug

SEQ ID NO: 3173686 - RNA, 19 nt, Artificial Sequence
  Description of Artificial Sequence: Synthetic oligonucleotide
ugaaacacaaucagcauug

SEQ ID NO: 3173687 - RNA, 19 nt, Artificial Sequence
  Description of Artificial Sequence: Synthetic oligonucleotide
aacacaaucagcauuggag

SEQ ID NO: 3173688 - RNA, 19 nt, Artificial Sequence
  Description of Artificial Sequence: Synthetic oligonucleotide
ucgguuguugucuugagcg

SEQ ID NO: 3173689 - RNA, 19 nt, Artificial Sequence
  Description of Artificial Sequence: Synthetic oligonucleotide
ucugcaguccuacaagucg

SEQ ID NO: 3173690 - RNA, 19 nt, Artificial Sequence
  Description of Artificial Sequence: Synthetic oligonucleotide
uuccauucagucauguugg

SEQ ID NO: 3173691 - RNA, 19 nt, Artificial Sequence
  Description of Artificial Sequence: Synthetic oligonucleotide
ugcugcauggcccagagcc

SEQ ID NO: 3173692 - RNA, 19 nt, Artificial Sequence
  Description of Artificial Sequence: Synthetic oligonucleotide
aaugagcaggugcuggggc

SEQ ID NO: 3173693 - RNA, 19 nt, Artificial Sequence
  Description of Artificial Sequence: Synthetic oligonucleotide
aauaucuugcgucaggguu

SEQ ID NO: 3173694 - RNA, 19 nt, Artificial Sequence
  Description of Artificial Sequence: Synthetic oligonucleotide
aaaaggcugcugcauggcc

SEQ ID NO: 3173695 - RNA, 19 nt, Artificial Sequence
  Description of Artificial Sequence: Synthetic oligonucleotide
augccaagguccuugaugg

SEQ ID NO: 3173696 - RNA, 19 nt, Artificial Sequence
  Description of Artificial Sequence: Synthetic oligonucleotide
ugccuuaugugccacagag

SEQ ID NO: 3173697 - RNA, 19 nt, Artificial Sequence
  Description of Artificial Sequence: Synthetic oligonucleotide
gaugguggaauacuucccg

SEQ ID NO: 3173698 - RNA, 19 nt, Artificial Sequence
  Description of Artificial Sequence: Synthetic oligonucleotide
uugaugguggaauacuucc

SEQ ID NO: 3173699 - RNA, 19 nt, Artificial Sequence
  Description of Artificial Sequence: Synthetic oligonucleotide
cuuccgguaguccagauag

SEQ ID NO: 3173700 - RNA, 19 nt, Artificial Sequence
  Description of Artificial Sequence: Synthetic oligonucleotide
aucacagucauccgaaaag

SEQ ID NO: 3173701 - RNA, 19 nt, Artificial Sequence
  Description of Artificial Sequence: Synthetic oligonucleotide
uuuucuuccacauucuuuu

SEQ ID NO: 3173702 - RNA, 19 nt, Artificial Sequence
  Description of Artificial Sequence: Synthetic oligonucleotide
uccacauucuuuugcaucc

SEQ ID NO: 3173703 - RNA, 19 nt, Artificial Sequence
  Description of Artificial Sequence: Synthetic oligonucleotide
uuuuccagcugcuugguga

SEQ ID NO: 3173704 - RNA, 19 nt, Artificial Sequence
  Description of Artificial Sequence: Synthetic oligonucleotide
ugccacagaggguugaugg

SEQ ID NO: 3173705 - RNA, 19 nt, Artificial Sequence
  Description of Artificial Sequence: Synthetic oligonucleotide
uguucugcaguccuacaag

SEQ ID NO: 3173706 - RNA, 19 nt, Artificial Sequence
  Description of Artificial Sequence: Synthetic oligonucleotide
aagugcuccgaauaucuug

SEQ ID NO: 3173707 - RNA, 19 nt, Artificial Sequence
  Description of Artificial Sequence: Synthetic oligonucleotide
uccuugauggucuucuucc

SEQ ID NO: 3173708 - RNA, 19 nt, Artificial Sequence
  Description of Artificial Sequence: Synthetic oligonucleotide
gguggugucauacaguucc

SEQ ID NO: 3173709 - RNA, 19 nt, Artificial Sequence
  Description of Artificial Sequence: Synthetic oligonucleotide
uggcccagagccaaggugg

SEQ ID NO: 3173710 - RNA, 19 nt, Artificial Sequence
  Description of Artificial Sequence: Synthetic oligonucleotide
aggguuccagcccaggugc

SEQ ID NO: 3173711 - RNA, 19 nt, Artificial Sequence
  Description of Artificial Sequence: Synthetic oligonucleotide
aaaggcugcugcauggccc

SEQ ID NO: 3173712 - RNA, 19 nt, Artificial Sequence
  Description of Artificial Sequence: Synthetic oligonucleotide
gaugccaagguccuugaug

SEQ ID NO: 3173713 - RNA, 19 nt, Artificial Sequence
  Description of Artificial Sequence: Synthetic oligonucleotide
auguauguguucugcaguc

SEQ ID NO: 3173714 - RNA, 19 nt, Artificial Sequence
  Description of Artificial Sequence: Synthetic oligonucleotide
gacaaucacaccaggauug

SEQ ID NO: 3173715 - RNA, 19 nt, Artificial Sequence
  Description of Artificial Sequence: Synthetic oligonucleotide
aucacaccaggauugaaug

SEQ ID NO: 3173716 - RNA, 19 nt, Artificial Sequence
  Description of Artificial Sequence: Synthetic oligonucleotide
ucacagucauccgaaaagg

SEQ ID NO: 3173717 - RNA, 19 nt, Artificial Sequence
  Description of Artificial Sequence: Synthetic oligonucleotide
ugaaugagcaggugcuggg

SEQ ID NO: 3173718 - RNA, 19 nt, Artificial Sequence
  Description of Artificial Sequence: Synthetic oligonucleotide
uguugucuugagcggaggg

SEQ ID NO: 3173719 - RNA, 19 nt, Artificial Sequence
  Description of Artificial Sequence: Synthetic oligonucleotide
agugcuccgaauaucuugc

SEQ ID NO: 3173720 - RNA, 19 nt, Artificial Sequence
  Description of Artificial Sequence: Synthetic oligonucleotide
acacaaucagcauuggaga

SEQ ID NO: 3173721 - RNA, 19 nt, Artificial Sequence
  Description of Artificial Sequence: Synthetic oligonucleotide
uccagauagcccauguaug

SEQ ID NO: 3173722 - RNA, 19 nt, Artificial Sequence
  Description of Artificial Sequence: Synthetic oligonucleotide
ccuuaugugccacagaggg

SEQ ID NO: 3173723 - RNA, 19 nt, Artificial Sequence
  Description of Artificial Sequence: Synthetic oligonucleotide
agucauguuggcgacaauc

SEQ ID NO: 3173724 - RNA, 19 nt, Artificial Sequence
  Description of Artificial Sequence: Synthetic oligonucleotide
ucuuccacauucuuuugca

SEQ ID NO: 3173725 - RNA, 19 nt, Artificial Sequence
  Description of Artificial Sequence: Synthetic oligonucleotide
ucccgugaaacacaaucag

SEQ ID NO: 3173726 - RNA, 19 nt, Artificial Sequence
  Description of Artificial Sequence: Synthetic oligonucleotide
aagguggugucauacaguu

SEQ ID NO: 3173727 - RNA, 19 nt, Artificial Sequence
  Description of Artificial Sequence: Synthetic oligonucleotide
guuggcgacaaucacacca

SEQ ID NO: 3173728 - RNA, 19 nt, Artificial Sequence
  Description of Artificial Sequence: Synthetic oligonucleotide
cagguuuucuuccacauuc

SEQ ID NO: 3173729 - RNA, 19 nt, Artificial Sequence
  Description of Artificial Sequence: Synthetic oligonucleotide
aucagcauuggagagguag

SEQ ID NO: 3173730 - RNA, 19 nt, Artificial Sequence
  Description of Artificial Sequence: Synthetic oligonucleotide
cuucccgugaaacacaauc

SEQ ID NO: 3173731 - RNA, 19 nt, Artificial Sequence
  Description of Artificial Sequence: Synthetic oligonucleotide
uucuuccacauucuuuugc

SEQ ID NO: 3173732 - RNA, 19 nt, Artificial Sequence
  Description of Artificial Sequence: Synthetic oligonucleotide
aaucacagucauccgaaaa

SEQ ID NO: 3173733 - RNA, 19 nt, Artificial Sequence
  Description of Artificial Sequence: Synthetic oligonucleotide
cauucagucauguuggcga

SEQ ID NO: 3173734 - RNA, 19 nt, Artificial Sequence
  Description of Artificial Sequence: Synthetic oligonucleotide
auguuggcgacaaucacac

SEQ ID NO: 3173735 - RNA, 19 nt, Artificial Sequence
  Description of Artificial Sequence: Synthetic oligonucleotide
uugaaugagcaggugcugg

SEQ ID NO: 3173736 - RNA, 19 nt, Artificial Sequence
  Description of Artificial Sequence: Synthetic oligonucleotide
ucuucuuccgguaguccag

SEQ ID NO: 3173737 - RNA, 19 nt, Artificial Sequence
  Description of Artificial Sequence: Synthetic oligonucleotide
uuggcgacaaucacaccag

SEQ ID NO: 3173738 - RNA, 19 nt, Artificial Sequence
  Description of Artificial Sequence: Synthetic oligonucleotide
aaacacaaucagcauugga

SEQ ID NO: 3173739 - RNA, 19 nt, Artificial Sequence
  Description of Artificial Sequence: Synthetic oligonucleotide
cauccgaaaaggcugcugc

SEQ ID NO: 3173740 - RNA, 19 nt, Artificial Sequence
  Description of Artificial Sequence: Synthetic oligonucleotide
aguccuacaagucgguugu

SEQ ID NO: 3173741 - RNA, 19 nt, Artificial Sequence
  Description of Artificial Sequence: Synthetic oligonucleotide
ucagcauuggagagguagc

SEQ ID NO: 3173742 - RNA, 19 nt, Artificial Sequence
  Description of Artificial Sequence: Synthetic oligonucleotide
cagucauccgaaaaggcug

SEQ ID NO: 3173743 - RNA, 19 nt, Artificial Sequence
  Description of Artificial Sequence: Synthetic oligonucleotide
uucccgugaaacacaauca

SEQ ID NO: 3173744 - RNA, 19 nt, Artificial Sequence
  Description of Artificial Sequence: Synthetic oligonucleotide
uugagcggagggcaaauca

SEQ ID NO: 3173745 - RNA, 19 nt, Artificial Sequence
  Description of Artificial Sequence: Synthetic oligonucleotide
ugaugguggaauacuuccc

SEQ ID NO: 3173746 - RNA, 19 nt, Artificial Sequence
  Description of Artificial Sequence: Synthetic oligonucleotide
auucagucauguuggcgac

SEQ ID NO: 3173747 - RNA, 19 nt, Artificial Sequence
  Description of Artificial Sequence: Synthetic oligonucleotide
uuaugugccacagaggguu

SEQ ID NO: 3173748 - RNA, 19 nt, Artificial Sequence
  Description of Artificial Sequence: Synthetic oligonucleotide
ugcuguacagguuuucuuc

SEQ ID NO: 3173749 - RNA, 19 nt, Artificial Sequence
  Description of Artificial Sequence: Synthetic oligonucleotide
acaaucagcauuggagagg

SEQ ID NO: 3173750 - RNA, 19 nt, Artificial Sequence
  Description of Artificial Sequence: Synthetic oligonucleotide
agauagcccauguaugugu

SEQ ID NO: 3173751 - RNA, 19 nt, Artificial Sequence
  Description of Artificial Sequence: Synthetic oligonucleotide
auaucuugcgucaggguuc

SEQ ID NO: 3173752 - RNA, 19 nt, Artificial Sequence
  Description of Artificial Sequence: Synthetic oligonucleotide
cacaaucagcauuggagag

SEQ ID NO: 3173753 - RNA, 19 nt, Artificial Sequence
  Description of Artificial Sequence: Synthetic oligonucleotide
ggauugaaugagcaggugc

SEQ ID NO: 3173754 - RNA, 19 nt, Artificial Sequence
  Description of Artificial Sequence: Synthetic oligonucleotide
gaauacuucccgugaaaca

SEQ ID NO: 3173755 - RNA, 19 nt, Artificial Sequence
  Description of Artificial Sequence: Synthetic oligonucleotide
uguacagguuuucuuccac

SEQ ID NO: 3173756 - RNA, 19 nt, Artificial Sequence
  Description of Artificial Sequence: Synthetic oligonucleotide
gauggucuucuuccgguag

SEQ ID NO: 3173757 - RNA, 19 nt, Artificial Sequence
  Description of Artificial Sequence: Synthetic oligonucleotide
cuugauggucuucuuccgg

SEQ ID NO: 3173758 - RNA, 19 nt, Artificial Sequence
  Description of Artificial Sequence: Synthetic oligonucleotide
ugguguuuccauucaguca

SEQ ID NO: 3173759 - RNA, 19 nt, Artificial Sequence
  Description of Artificial Sequence: Synthetic oligonucleotide
gggcaaaucacagucaucc

SEQ ID NO: 3173760 - RNA, 19 nt, Artificial Sequence
  Description of Artificial Sequence: Synthetic oligonucleotide
agaaagugcuccgaauauc

SEQ ID NO: 3173761 - RNA, 19 nt, Artificial Sequence
  Description of Artificial Sequence: Synthetic oligonucleotide
cugcaguccuacaagucgg

SEQ ID NO: 3173762 - RNA, 19 nt, Artificial Sequence
  Description of Artificial Sequence: Synthetic oligonucleotide
cacagaggguugauggugg

SEQ ID NO: 3173763 - RNA, 19 nt, Artificial Sequence
  Description of Artificial Sequence: Synthetic oligonucleotide
aaucacaccaggauugaau

SEQ ID NO: 3173764 - RNA, 19 nt, Artificial Sequence
  Description of Artificial Sequence: Synthetic oligonucleotide
uacaagucgguuguugucu

SEQ ID NO: 3173765 - RNA, 19 nt, Artificial Sequence
  Description of Artificial Sequence: Synthetic oligonucleotide
uuccacauucuuuugcauc

SEQ ID NO: 3173766 - RNA, 19 nt, Artificial Sequence
  Description of Artificial Sequence: Synthetic oligonucleotide
uugauggucuucuuccggu

SEQ ID NO: 3173767 - RNA, 19 nt, Artificial Sequence
  Description of Artificial Sequence: Synthetic oligonucleotide
ucauguuggcgacaaucac

SEQ ID NO: 3173768 - RNA, 19 nt, Artificial Sequence
  Description of Artificial Sequence: Synthetic oligonucleotide
ugagcggagggcaaaucac

SEQ ID NO: 3173769 - RNA, 19 nt, Artificial Sequence
  Description of Artificial Sequence: Synthetic oligonucleotide
cacaccaggauugaaugag

SEQ ID NO: 3173770 - RNA, 19 nt, Artificial Sequence
  Description of Artificial Sequence: Synthetic oligonucleotide
uccgguaguccagauagcc

SEQ ID NO: 3173771 - RNA, 19 nt, Artificial Sequence
  Description of Artificial Sequence: Synthetic oligonucleotide
agucauccgaaaaggcugc

SEQ ID NO: 3173772 - RNA, 19 nt, Artificial Sequence
  Description of Artificial Sequence: Synthetic oligonucleotide
accaggauugaaugagcag

SEQ ID NO: 3173773 - RNA, 19 nt, Artificial Sequence
  Description of Artificial Sequence: Synthetic oligonucleotide
uggagagguagccacuccu

SEQ ID NO: 3173774 - RNA, 19 nt, Artificial Sequence
  Description of Artificial Sequence: Synthetic oligonucleotide
uugucuugagcggagggca

SEQ ID NO: 3173775 - RNA, 19 nt, Artificial Sequence
  Description of Artificial Sequence: Synthetic oligonucleotide
gagagguagccacuccucc

SEQ ID NO: 3173776 - RNA, 19 nt, Artificial Sequence
  Description of Artificial Sequence: Synthetic oligonucleotide
ugguggaauacuucccgug

SEQ ID NO: 3173777 - RNA, 19 nt, Artificial Sequence
  Description of Artificial Sequence: Synthetic oligonucleotide
cugguguuuccauucaguc

SEQ ID NO: 3173778 - RNA, 19 nt, Artificial Sequence
  Description of Artificial Sequence: Synthetic oligonucleotide
cacagucauccgaaaaggc

SEQ ID NO: 3173779 - RNA, 19 nt, Artificial Sequence
  Description of Artificial Sequence: Synthetic oligonucleotide
ccaggauugaaugagcagg

SEQ ID NO: 3173780 - RNA, 19 nt, Artificial Sequence
  Description of Artificial Sequence: Synthetic oligonucleotide
auuggagagguagccacuc

SEQ ID NO: 3173781 - RNA, 19 nt, Artificial Sequence
  Description of Artificial Sequence: Synthetic oligonucleotide
cuugcgucaggguuccagc

SEQ ID NO: 3173782 - RNA, 19 nt, Artificial Sequence
  Description of Artificial Sequence: Synthetic oligonucleotide
cauguuggcgacaaucaca

SEQ ID NO: 3173783 - RNA, 19 nt, Artificial Sequence
  Description of Artificial Sequence: Synthetic oligonucleotide
uacagguuuucuuccacau

SEQ ID NO: 3173784 - RNA, 19 nt, Artificial Sequence
  Description of Artificial Sequence: Synthetic oligonucleotide
uaaacuuuaucuuauauac

SEQ ID NO: 3173785 - RNA, 19 nt, Artificial Sequence
  Description of Artificial Sequence: Synthetic oligonucleotide
uguacuuugccccaguugg

SEQ ID NO: 3173786 - RNA, 19 nt, Artificial Sequence
  Description of Artificial Sequence: Synthetic oligonucleotide
uguacagucaccaucauac

SEQ ID NO: 3173787 - RNA, 19 nt, Artificial Sequence
  Description of Artificial Sequence: Synthetic oligonucleotide
uuuucauugaaauucccgg

SEQ ID NO: 3173788 - RNA, 19 nt, Artificial Sequence
  Description of Artificial Sequence: Synthetic oligonucleotide
uguagugacaguuuuauug

SEQ ID NO: 3173789 - RNA, 19 nt, Artificial Sequence
  Description of Artificial Sequence: Synthetic oligonucleotide
uauuggugaacuuacagag

SEQ ID NO: 3173790 - RNA, 19 nt, Artificial Sequence
  Description of Artificial Sequence: Synthetic oligonucleotide
uuggugaacuuacagaggg

SEQ ID NO: 3173791 - RNA, 19 nt, Artificial Sequence
  Description of Artificial Sequence: Synthetic oligonucleotide
uagagcuuuagucugaggc

SEQ ID NO: 3173792 - RNA, 19 nt, Artificial Sequence
  Description of Artificial Sequence: Synthetic oligonucleotide
aaauauaaacuuuaucuua

SEQ ID NO: 3173793 - RNA, 19 nt, Artificial Sequence
  Description of Artificial Sequence: Synthetic oligonucleotide
aacuuuaucuuauauacuu

SEQ ID NO: 3173794 - RNA, 19 nt, Artificial Sequence
  Description of Artificial Sequence: Synthetic oligonucleotide
uguauaugaucccaucagg

SEQ ID NO: 3173795 - RNA, 19 nt, Artificial Sequence
  Description of Artificial Sequence: Synthetic oligonucleotide
uuggcauuaacacagcaug

SEQ ID NO: 3173796 - RNA, 19 nt, Artificial Sequence
  Description of Artificial Sequence: Synthetic oligonucleotide
aauguguaaguccccaguc

SEQ ID NO: 3173797 - RNA, 19 nt, Artificial Sequence
  Description of Artificial Sequence: Synthetic oligonucleotide
gucaccaucauacuugucg

SEQ ID NO: 3173798 - RNA, 19 nt, Artificial Sequence
  Description of Artificial Sequence: Synthetic oligonucleotide
uuaucuuauauacuucuga

SEQ ID NO: 3173799 - RNA, 19 nt, Artificial Sequence
  Description of Artificial Sequence: Synthetic oligonucleotide
agagcuuuagucugaggcc

SEQ ID NO: 3173800 - RNA, 19 nt, Artificial Sequence
  Description of Artificial Sequence: Synthetic oligonucleotide
uccaaagccauucaucuug

SEQ ID NO: 3173801 - RNA, 19 nt, Artificial Sequence
  Description of Artificial Sequence: Synthetic oligonucleotide
aaacauguuguucuuaaau

SEQ ID NO: 3173802 - RNA, 19 nt, Artificial Sequence
  Description of Artificial Sequence: Synthetic oligonucleotide
ucuuguacagucaccauca

SEQ ID NO: 3173803 - RNA, 19 nt, Artificial Sequence
  Description of Artificial Sequence: Synthetic oligonucleotide
guagugacaguuuuauugg

SEQ ID NO: 3173804 - RNA, 19 nt, Artificial Sequence
  Description of Artificial Sequence: Synthetic oligonucleotide
uuuggaaauauaaacuuua

SEQ ID NO: 3173805 - RNA, 19 nt, Artificial Sequence
  Description of Artificial Sequence: Synthetic oligonucleotide
aaagccauucaucuuguca

SEQ ID NO: 3173806 - RNA, 19 nt, Artificial Sequence
  Description of Artificial Sequence: Synthetic oligonucleotide
uauaugaucccaucaggag

SEQ ID NO: 3173807 - RNA, 19 nt, Artificial Sequence
  Description of Artificial Sequence: Synthetic oligonucleotide
uugggaauguguaaguccc

SEQ ID NO: 3173808 - RNA, 19 nt, Artificial Sequence
  Description of Artificial Sequence: Synthetic oligonucleotide
uaugaucccaucaggagug

SEQ ID NO: 3173809 - RNA, 19 nt, Artificial Sequence
  Description of Artificial Sequence: Synthetic oligonucleotide
cacacuuuggcauuaacac

SEQ ID NO: 3173810 - RNA, 19 nt, Artificial Sequence
  Description of Artificial Sequence: Synthetic oligonucleotide
cacuuuggcauuaacacag

SEQ ID NO: 3173811 - RNA, 19 nt, Artificial Sequence
  Description of Artificial Sequence: Synthetic oligonucleotide
aaggguuaguugcuuugcc

SEQ ID NO: 3173812 - RNA, 19 nt, Artificial Sequence
  Description of Artificial Sequence: Synthetic oligonucleotide
aagucuuccaaagccauuc

SEQ ID NO: 3173813 - RNA, 19 nt, Artificial Sequence
  Description of Artificial Sequence: Synthetic oligonucleotide
uacauguagagcuuuaguc

SEQ ID NO: 3173814 - RNA, 19 nt, Artificial Sequence
  Description of Artificial Sequence: Synthetic oligonucleotide
uguguauaugaucccauca

SEQ ID NO: 3173815 - RNA, 19 nt, Artificial Sequence
  Description of Artificial Sequence: Synthetic oligonucleotide
uguuguucuuaaauugucc

SEQ ID NO: 3173816 - RNA, 19 nt, Artificial Sequence
  Description of Artificial Sequence: Synthetic oligonucleotide
uuagucugaggccaggagc

SEQ ID NO: 3173817 - RNA, 19 nt, Artificial Sequence
  Description of Artificial Sequence: Synthetic oligonucleotide
cuauuuucauugaaauucc

SEQ ID NO: 3173818 - RNA, 19 nt, Artificial Sequence
  Description of Artificial Sequence: Synthetic oligonucleotide
aacauguuguucuuaaauu

SEQ ID NO: 3173819 - RNA, 19 nt, Artificial Sequence
  Description of Artificial Sequence: Synthetic oligonucleotide
aauauaaacuuuaucuuau

SEQ ID NO: 3173820 - RNA, 19 nt, Artificial Sequence
  Description of Artificial Sequence: Synthetic oligonucleotide
uucauugaaauucccggug

SEQ ID NO: 3173821 - RNA, 19 nt, Artificial Sequence
  Description of Artificial Sequence: Synthetic oligonucleotide
cucccuguguauaugaucc

SEQ ID NO: 3173822 - RNA, 19 nt, Artificial Sequence
  Description of Artificial Sequence: Synthetic oligonucleotide
uuuaucuuauauacuucug

SEQ ID NO: 3173823 - RNA, 19 nt, Artificial Sequence
  Description of Artificial Sequence: Synthetic oligonucleotide
aagccauucaucuugucau

SEQ ID NO: 3173824 - RNA, 19 nt, Artificial Sequence
  Description of Artificial Sequence: Synthetic oligonucleotide
acauguagagcuuuagucu

SEQ ID NO: 3173825 - RNA, 19 nt, Artificial Sequence
  Description of Artificial Sequence: Synthetic oligonucleotide
caguugaaggguuaguugc

SEQ ID NO: 3173826 - RNA, 19 nt, Artificial Sequence
  Description of Artificial Sequence: Synthetic oligonucleotide
uuggauaucaguguacucu

SEQ ID NO: 3173827 - RNA, 19 nt, Artificial Sequence
  Description of Artificial Sequence: Synthetic oligonucleotide
auguguaaguccccagucc

SEQ ID NO: 3173828 - RNA, 19 nt, Artificial Sequence
  Description of Artificial Sequence: Synthetic oligonucleotide
aucuugucaucuuuccagc

SEQ ID NO: 3173829 - RNA, 19 nt, Artificial Sequence
  Description of Artificial Sequence: Synthetic oligonucleotide
auaaacuuuaucuuauaua

SEQ ID NO: 3173830 - RNA, 19 nt, Artificial Sequence
  Description of Artificial Sequence: Synthetic oligonucleotide
uugucaucuuuccagcucc

SEQ ID NO: 3173831 - RNA, 19 nt, Artificial Sequence
  Description of Artificial Sequence: Synthetic oligonucleotide
uguguaaguccccagucca

SEQ ID NO: 3173832 - RNA, 19 nt, Artificial Sequence
  Description of Artificial Sequence: Synthetic oligonucleotide
auuuucauugaaauucccg

SEQ ID NO: 3173833 - RNA, 19 nt, Artificial Sequence
  Description of Artificial Sequence: Synthetic oligonucleotide
ugucccguuucucucauag

SEQ ID NO: 3173834 - RNA, 19 nt, Artificial Sequence
  Description of Artificial Sequence: Synthetic oligonucleotide
uucuacccuauuuucauug

SEQ ID NO: 3173835 - RNA, 19 nt, Artificial Sequence
  Description of Artificial Sequence: Synthetic oligonucleotide
ucuuaaauuguccuucaua

SEQ ID NO: 3173836 - RNA, 19 nt, Artificial Sequence
  Description of Artificial Sequence: Synthetic oligonucleotide
aguugcuuugccugcaggg

SEQ ID NO: 3173837 - RNA, 19 nt, Artificial Sequence
  Description of Artificial Sequence: Synthetic oligonucleotide
auaugaucccaucaggagu

SEQ ID NO: 3173838 - RNA, 19 nt, Artificial Sequence
  Description of Artificial Sequence: Synthetic oligonucleotide
uggaaauauaaacuuuauc

SEQ ID NO: 3173839 - RNA, 19 nt, Artificial Sequence
  Description of Artificial Sequence: Synthetic oligonucleotide
aaaugcucaagucuuccaa

SEQ ID NO: 3173840 - RNA, 19 nt, Artificial Sequence
  Description of Artificial Sequence: Synthetic oligonucleotide
cuuacagagggaugcaggc

SEQ ID NO: 3173841 - RNA, 19 nt, Artificial Sequence
  Description of Artificial Sequence: Synthetic oligonucleotide
guguauaugaucccaucag

SEQ ID NO: 3173842 - RNA, 19 nt, Artificial Sequence
  Description of Artificial Sequence: Synthetic oligonucleotide
ucaguugaaggguuaguug

SEQ ID NO: 3173843 - RNA, 19 nt, Artificial Sequence
  Description of Artificial Sequence: Synthetic oligonucleotide
cauacuugucgccauuugg

SEQ ID NO: 3173844 - RNA, 19 nt, Artificial Sequence
  Description of Artificial Sequence: Synthetic oligonucleotide
uacagagggaugcaggcca

SEQ ID NO: 3173845 - RNA, 19 nt, Artificial Sequence
  Description of Artificial Sequence: Synthetic oligonucleotide
agcaugucuacauguagag

SEQ ID NO: 3173846 - RNA, 19 nt, Artificial Sequence
  Description of Artificial Sequence: Synthetic oligonucleotide
uuuagucugaggccaggag

SEQ ID NO: 3173847 - RNA, 19 nt, Artificial Sequence
  Description of Artificial Sequence: Synthetic oligonucleotide
ucaggagugguguggaugc

SEQ ID NO: 3173848 - RNA, 19 nt, Artificial Sequence
  Description of Artificial Sequence: Synthetic oligonucleotide
guugggaauguguaagucc

SEQ ID NO: 3173849 - RNA, 19 nt, Artificial Sequence
  Description of Artificial Sequence: Synthetic oligonucleotide
uauuuucauugaaauuccc

SEQ ID NO: 3173850 - RNA, 19 nt, Artificial Sequence
  Description of Artificial Sequence: Synthetic oligonucleotide
aacacagcaugucuacaug

SEQ ID NO: 3173851 - RNA, 19 nt, Artificial Sequence
  Description of Artificial Sequence: Synthetic oligonucleotide
uuaaauuguccuucauaca

SEQ ID NO: 3173852 - RNA, 19 nt, Artificial Sequence
  Description of Artificial Sequence: Synthetic oligonucleotide
cauguagagcuuuagucug

SEQ ID NO: 3173853 - RNA, 19 nt, Artificial Sequence
  Description of Artificial Sequence: Synthetic oligonucleotide
uuucauugaaauucccggu

SEQ ID NO: 3173854 - RNA, 19 nt, Artificial Sequence
  Description of Artificial Sequence: Synthetic oligonucleotide
aggccauuucaguugaagg

SEQ ID NO: 3173855 - RNA, 19 nt, Artificial Sequence
  Description of Artificial Sequence: Synthetic oligonucleotide
uguucuuaaauuguccuuc

SEQ ID NO: 3173856 - RNA, 19 nt, Artificial Sequence
  Description of Artificial Sequence: Synthetic oligonucleotide
aaaaugcucaagucuucca

SEQ ID NO: 3173857 - RNA, 19 nt, Artificial Sequence
  Description of Artificial Sequence: Synthetic oligonucleotide
ucuuccaaagccauucauc

SEQ ID NO: 3173858 - RNA, 19 nt, Artificial Sequence
  Description of Artificial Sequence: Synthetic oligonucleotide
ccuauuuucauugaaauuc

SEQ ID NO: 3173859 - RNA, 19 nt, Artificial Sequence
  Description of Artificial Sequence: Synthetic oligonucleotide
uucaucuugucaucuuucc

SEQ ID NO: 3173860 - RNA, 19 nt, Artificial Sequence
  Description of Artificial Sequence: Synthetic oligonucleotide
uagucugaggccaggagca

SEQ ID NO: 3173861 - RNA, 19 nt, Artificial Sequence
  Description of Artificial Sequence: Synthetic oligonucleotide
uuuggcauuaacacagcau

SEQ ID NO: 3173862 - RNA, 19 nt, Artificial Sequence
  Description of Artificial Sequence: Synthetic oligonucleotide
aaauucccgguguacuuug

SEQ ID NO: 3173863 - RNA, 19 nt, Artificial Sequence
  Description of Artificial Sequence: Synthetic oligonucleotide
uucuuguacagucaccauc

SEQ ID NO: 3173864 - RNA, 19 nt, Artificial Sequence
  Description of Artificial Sequence: Synthetic oligonucleotide
ucaccaucauacuugucgc

SEQ ID NO: 3173865 - RNA, 19 nt, Artificial Sequence
  Description of Artificial Sequence: Synthetic oligonucleotide
ucgccauuuggaaauauaa

SEQ ID NO: 3173866 - RNA, 19 nt, Artificial Sequence
  Description of Artificial Sequence: Synthetic oligonucleotide
auugaaauucccgguguac

SEQ ID NO: 3173867 - RNA, 19 nt, Artificial Sequence
  Description of Artificial Sequence: Synthetic oligonucleotide
gaaauauaaacuuuaucuu

SEQ ID NO: 3173868 - RNA, 19 nt, Artificial Sequence
  Description of Artificial Sequence: Synthetic oligonucleotide
gccauuuggaaauauaaac

SEQ ID NO: 3173869 - RNA, 19 nt, Artificial Sequence
  Description of Artificial Sequence: Synthetic oligonucleotide
aaugcucaagucuuccaaa

SEQ ID NO: 3173870 - RNA, 19 nt, Artificial Sequence
  Description of Artificial Sequence: Synthetic oligonucleotide
uguacucucccucaccuuc

SEQ ID NO: 3173871 - RNA, 19 nt, Artificial Sequence
  Description of Artificial Sequence: Synthetic oligonucleotide
ggccauuucaguugaaggg

SEQ ID NO: 3173872 - RNA, 19 nt, Artificial Sequence
  Description of Artificial Sequence: Synthetic oligonucleotide
ugaaggguuaguugcuuug

SEQ ID NO: 3173873 - RNA, 19 nt, Artificial Sequence
  Description of Artificial Sequence: Synthetic oligonucleotide
ucaucuuuccagcucccug

SEQ ID NO: 3173874 - RNA, 19 nt, Artificial Sequence
  Description of Artificial Sequence: Synthetic oligonucleotide
acaguuuuauuggugaacu

SEQ ID NO: 3173875 - RNA, 19 nt, Artificial Sequence
  Description of Artificial Sequence: Synthetic oligonucleotide
caugucuacauguagagcu

SEQ ID NO: 3173876 - RNA, 19 nt, Artificial Sequence
  Description of Artificial Sequence: Synthetic oligonucleotide
caggccuuggauaucagug

SEQ ID NO: 3173877 - RNA, 19 nt, Artificial Sequence
  Description of Artificial Sequence: Synthetic oligonucleotide
guuuuauuggugaacuuac

SEQ ID NO: 3173878 - RNA, 19 nt, Artificial Sequence
  Description of Artificial Sequence: Synthetic oligonucleotide
uuggaaauauaaacuuuau

SEQ ID NO: 3173879 - RNA, 19 nt, Artificial Sequence
  Description of Artificial Sequence: Synthetic oligonucleotide
ucauacacagcuccugaaa

SEQ ID NO: 3173880 - RNA, 19 nt, Artificial Sequence
  Description of Artificial Sequence: Synthetic oligonucleotide
aguguacucucccucaccu

SEQ ID NO: 3173881 - RNA, 19 nt, Artificial Sequence
  Description of Artificial Sequence: Synthetic oligonucleotide
uacccuauuuucauugaaa

SEQ ID NO: 3173882 - RNA, 19 nt, Artificial Sequence
  Description of Artificial Sequence: Synthetic oligonucleotide
acagucaccaucauacuug

SEQ ID NO: 3173883 - RNA, 19 nt, Artificial Sequence
  Description of Artificial Sequence: Synthetic oligonucleotide
auuguagugacaguuuuau

SEQ ID NO: 3173884 - RNA, 19 nt, Artificial Sequence
  Description of Artificial Sequence: Synthetic oligonucleotide
aauauaugaacacaaggac

SEQ ID NO: 3173885 - RNA, 19 nt, Artificial Sequence
  Description of Artificial Sequence: Synthetic oligonucleotide
uauaugaacacaaggacag

SEQ ID NO: 3173886 - RNA, 19 nt, Artificial Sequence
  Description of Artificial Sequence: Synthetic oligonucleotide
auaagugacauccuuaggg

SEQ ID NO: 3173887 - RNA, 19 nt, Artificial Sequence
  Description of Artificial Sequence: Synthetic oligonucleotide
auccauuagccuuugaugc

SEQ ID NO: 3173888 - RNA, 19 nt, Artificial Sequence
  Description of Artificial Sequence: Synthetic oligonucleotide
augguauauugauugaucc

SEQ ID NO: 3173889 - RNA, 19 nt, Artificial Sequence
  Description of Artificial Sequence: Synthetic oligonucleotide
acaagaaaacacuagacug

SEQ ID NO: 3173890 - RNA, 19 nt, Artificial Sequence
  Description of Artificial Sequence: Synthetic oligonucleotide
uuuuaguucccuauaagug

SEQ ID NO: 3173891 - RNA, 19 nt, Artificial Sequence
  Description of Artificial Sequence: Synthetic oligonucleotide
aacaagaaaacacuagacu

SEQ ID NO: 3173892 - RNA, 19 nt, Artificial Sequence
  Description of Artificial Sequence: Synthetic oligonucleotide
uccaaugguauauugauug

SEQ ID NO: 3173893 - RNA, 19 nt, Artificial Sequence
  Description of Artificial Sequence: Synthetic oligonucleotide
aauccauuagccuuugaug

SEQ ID NO: 3173894 - RNA, 19 nt, Artificial Sequence
  Description of Artificial Sequence: Synthetic oligonucleotide
aacucaauuuucuuguuug

SEQ ID NO: 3173895 - RNA, 19 nt, Artificial Sequence
  Description of Artificial Sequence: Synthetic oligonucleotide
ucuaacaucaauuaacaua

SEQ ID NO: 3173896 - RNA, 19 nt, Artificial Sequence
  Description of Artificial Sequence: Synthetic oligonucleotide
acuucaaaccuccaagagc

SEQ ID NO: 3173897 - RNA, 19 nt, Artificial Sequence
  Description of Artificial Sequence: Synthetic oligonucleotide
aacacaaggacagagucuc

SEQ ID NO: 3173898 - RNA, 19 nt, Artificial Sequence
  Description of Artificial Sequence: Synthetic oligonucleotide
uucucuaacaucaauuaac

SEQ ID NO: 3173899 - RNA, 19 nt, Artificial Sequence
  Description of Artificial Sequence: Synthetic oligonucleotide
aaacaagaaaacacuagac

SEQ ID NO: 3173900 - RNA, 19 nt, Artificial Sequence
  Description of Artificial Sequence: Synthetic oligonucleotide
ucaauuaacauaauauuuu

SEQ ID NO: 3173901 - RNA, 19 nt, Artificial Sequence
  Description of Artificial Sequence: Synthetic oligonucleotide
uuuaguucccuauaaguga

SEQ ID NO: 3173902 - RNA, 19 nt, Artificial Sequence
  Description of Artificial Sequence: Synthetic oligonucleotide
uugacuucaaaccuccaag

SEQ ID NO: 3173903 - RNA, 19 nt, Artificial Sequence
  Description of Artificial Sequence: Synthetic oligonucleotide
cuaacaucaauuaacauaa

SEQ ID NO: 3173904 - RNA, 19 nt, Artificial Sequence
  Description of Artificial Sequence: Synthetic oligonucleotide
uuuuccaugcucaagaauu

SEQ ID NO: 3173905 - RNA, 19 nt, Artificial Sequence
  Description of Artificial Sequence: Synthetic oligonucleotide
aaaauguuggcugcuuccc

SEQ ID NO: 3173906 - RNA, 19 nt, Artificial Sequence
  Description of Artificial Sequence: Synthetic oligonucleotide
uagagcuucacuuaccuca

SEQ ID NO: 3173907 - RNA, 19 nt, Artificial Sequence
  Description of Artificial Sequence: Synthetic oligonucleotide
auuccuuccagccuccagc

SEQ ID NO: 3173908 - RNA, 19 nt, Artificial Sequence
  Description of Artificial Sequence: Synthetic oligonucleotide
ucucuaacaucaauuaaca

SEQ ID NO: 3173909 - RNA, 19 nt, Artificial Sequence
  Description of Artificial Sequence: Synthetic oligonucleotide
uauuccaaaacucaauuuu

SEQ ID NO: 3173910 - RNA, 19 nt, Artificial Sequence
  Description of Artificial Sequence: Synthetic oligonucleotide
aaugguauauugauugauc

SEQ ID NO: 3173911 - RNA, 19 nt, Artificial Sequence
  Description of Artificial Sequence: Synthetic oligonucleotide
aaauguuggcugcuucccc

SEQ ID NO: 3173912 - RNA, 19 nt, Artificial Sequence
  Description of Artificial Sequence: Synthetic oligonucleotide
gacugucagauuuggaugg

SEQ ID NO: 3173913 - RNA, 19 nt, Artificial Sequence
  Description of Artificial Sequence: Synthetic oligonucleotide
caaaacaagaaaacacuag

SEQ ID NO: 3173914 - RNA, 19 nt, Artificial Sequence
  Description of Artificial Sequence: Synthetic oligonucleotide
ucucuuauuccaaaacuca

SEQ ID NO: 3173915 - RNA, 19 nt, Artificial Sequence
  Description of Artificial Sequence: Synthetic oligonucleotide
uccagcauagugcugagca

SEQ ID NO: 3173916 - RNA, 19 nt, Artificial Sequence
  Description of Artificial Sequence: Synthetic oligonucleotide
uuugaugccaagacuggag

SEQ ID NO: 3173917 - RNA, 19 nt, Artificial Sequence
  Description of Artificial Sequence: Synthetic oligonucleotide
uuuugcuucauccacuguc

SEQ ID NO: 3173918 - RNA, 19 nt, Artificial Sequence
  Description of Artificial Sequence: Synthetic oligonucleotide
cuauaagugacauccuuag

SEQ ID NO: 3173919 - RNA, 19 nt, Artificial Sequence
  Description of Artificial Sequence: Synthetic oligonucleotide
auuuggauggcuucacuuc

SEQ ID NO: 3173920 - RNA, 19 nt, Artificial Sequence
  Description of Artificial Sequence: Synthetic oligonucleotide
ucugacauuucauagguua

SEQ ID NO: 3173921 - RNA, 19 nt, Artificial Sequence
  Description of Artificial Sequence: Synthetic oligonucleotide
ugguacuucucuuugaagu

SEQ ID NO: 3173922 - RNA, 19 nt, Artificial Sequence
  Description of Artificial Sequence: Synthetic oligonucleotide
uguccuugaauauaugaac

SEQ ID NO: 3173923 - RNA, 19 nt, Artificial Sequence
  Description of Artificial Sequence: Synthetic oligonucleotide
cuucaaaccuccaagagca

SEQ ID NO: 3173924 - RNA, 19 nt, Artificial Sequence
  Description of Artificial Sequence: Synthetic oligonucleotide
aacaucaauuaacauaaua

SEQ ID NO: 3173925 - RNA, 19 nt, Artificial Sequence
  Description of Artificial Sequence: Synthetic oligonucleotide
uuugcuucauccacugucc

SEQ ID NO: 3173926 - RNA, 19 nt, Artificial Sequence
  Description of Artificial Sequence: Synthetic oligonucleotide
auagguuacccauuccuuc

SEQ ID NO: 3173927 - RNA, 19 nt, Artificial Sequence
  Description of Artificial Sequence: Synthetic oligonucleotide
acuguuaaagcccagugau

SEQ ID NO: 3173928 - RNA, 19 nt, Artificial Sequence
  Description of Artificial Sequence: Synthetic oligonucleotide
ugaacacaaggacagaguc

SEQ ID NO: 3173929 - RNA, 19 nt, Artificial Sequence
  Description of Artificial Sequence: Synthetic oligonucleotide
cuuggguucaucuguagag

SEQ ID NO: 3173930 - RNA, 19 nt, Artificial Sequence
  Description of Artificial Sequence: Synthetic oligonucleotide
ucucuuugaagucccuugg

SEQ ID NO: 3173931 - RNA, 19 nt, Artificial Sequence
  Description of Artificial Sequence: Synthetic oligonucleotide
auauugacuucaaaccucc

SEQ ID NO: 3173932 - RNA, 19 nt, Artificial Sequence
  Description of Artificial Sequence: Synthetic oligonucleotide
ucucugacauuucauaggu

SEQ ID NO: 3173933 - RNA, 19 nt, Artificial Sequence
  Description of Artificial Sequence: Synthetic oligonucleotide
uaugaacacaaggacagag

SEQ ID NO: 3173934 - RNA, 19 nt, Artificial Sequence
  Description of Artificial Sequence: Synthetic oligonucleotide
cagcaaaacaagaaaacac

SEQ ID NO: 3173935 - RNA, 19 nt, Artificial Sequence
  Description of Artificial Sequence: Synthetic oligonucleotide
uuaaagcccagugauaaug

SEQ ID NO: 3173936 - RNA, 19 nt, Artificial Sequence
  Description of Artificial Sequence: Synthetic oligonucleotide
uauaagugacauccuuagg

SEQ ID NO: 3173937 - RNA, 19 nt, Artificial Sequence
  Description of Artificial Sequence: Synthetic oligonucleotide
uguuucucuaacaucaauu

SEQ ID NO: 3173938 - RNA, 19 nt, Artificial Sequence
  Description of Artificial Sequence: Synthetic oligonucleotide
uccaagagcagccucuacc

SEQ ID NO: 3173939 - RNA, 19 nt, Artificial Sequence
  Description of Artificial Sequence: Synthetic oligonucleotide
uaagugacauccuuaggga

SEQ ID NO: 3173940 - RNA, 19 nt, Artificial Sequence
  Description of Artificial Sequence: Synthetic oligonucleotide
uagacugucagauuuggau

SEQ ID NO: 3173941 - RNA, 19 nt, Artificial Sequence
  Description of Artificial Sequence: Synthetic oligonucleotide
aaugcuguguucauggccu

SEQ ID NO: 3173942 - RNA, 19 nt, Artificial Sequence
  Description of Artificial Sequence: Synthetic oligonucleotide
uguagagcuucacuuaccu

SEQ ID NO: 3173943 - RNA, 19 nt, Artificial Sequence
  Description of Artificial Sequence: Synthetic oligonucleotide
aagugacauccuuagggag

SEQ ID NO: 3173944 - RNA, 19 nt, Artificial Sequence
  Description of Artificial Sequence: Synthetic oligonucleotide
ucauccaaugguauauuga

SEQ ID NO: 3173945 - RNA, 19 nt, Artificial Sequence
  Description of Artificial Sequence: Synthetic oligonucleotide
uuaguucccuauaagugac

SEQ ID NO: 3173946 - RNA, 19 nt, Artificial Sequence
  Description of Artificial Sequence: Synthetic oligonucleotide
uauauugauugauccaggu

SEQ ID NO: 3173947 - RNA, 19 nt, Artificial Sequence
  Description of Artificial Sequence: Synthetic oligonucleotide
uaaagcccagugauaaugc

SEQ ID NO: 3173948 - RNA, 19 nt, Artificial Sequence
  Description of Artificial Sequence: Synthetic oligonucleotide
uuuggauggcuucacuuca

SEQ ID NO: 3173949 - RNA, 19 nt, Artificial Sequence
  Description of Artificial Sequence: Synthetic oligonucleotide
agucucuuauuccaaaacu

SEQ ID NO: 3173950 - RNA, 19 nt, Artificial Sequence
  Description of Artificial Sequence: Synthetic oligonucleotide
uuacccauuccuuccagcc

SEQ ID NO: 3173951 - RNA, 19 nt, Artificial Sequence
  Description of Artificial Sequence: Synthetic oligonucleotide
ucacuuaccucauccaaug

SEQ ID NO: 3173952 - RNA, 19 nt, Artificial Sequence
  Description of Artificial Sequence: Synthetic oligonucleotide
uuccaaaacucaauuuucu

SEQ ID NO: 3173953 - RNA, 19 nt, Artificial Sequence
  Description of Artificial Sequence: Synthetic oligonucleotide
gguauauugauugauccag

SEQ ID NO: 3173954 - RNA, 19 nt, Artificial Sequence
  Description of Artificial Sequence: Synthetic oligonucleotide
aauguuggcugcuucccca

SEQ ID NO: 3173955 - RNA, 19 nt, Artificial Sequence
  Description of Artificial Sequence: Synthetic oligonucleotide
uuugaagucccuuggguuc

SEQ ID NO: 3173956 - RNA, 19 nt, Artificial Sequence
  Description of Artificial Sequence: Synthetic oligonucleotide
ucuuauuccaaaacucaau

SEQ ID NO: 3173957 - RNA, 19 nt, Artificial Sequence
  Description of Artificial Sequence: Synthetic oligonucleotide
ucuuugaagucccuugggu

SEQ ID NO: 3173958 - RNA, 19 nt, Artificial Sequence
  Description of Artificial Sequence: Synthetic oligonucleotide
ucuguagagcuucacuuac

SEQ ID NO: 3173959 - RNA, 19 nt, Artificial Sequence
  Description of Artificial Sequence: Synthetic oligonucleotide
uucucuuugaagucccuug

SEQ ID NO: 3173960 - RNA, 19 nt, Artificial Sequence
  Description of Artificial Sequence: Synthetic oligonucleotide
cauauugacuucaaaccuc

SEQ ID NO: 3173961 - RNA, 19 nt, Artificial Sequence
  Description of Artificial Sequence: Synthetic oligonucleotide
agacugucagauuuggaug

SEQ ID NO: 3173962 - RNA, 19 nt, Artificial Sequence
  Description of Artificial Sequence: Synthetic oligonucleotide
acuguccuugaauauauga

SEQ ID NO: 3173963 - RNA, 19 nt, Artificial Sequence
  Description of Artificial Sequence: Synthetic oligonucleotide
auuccaaaacucaauuuuc

SEQ ID NO: 3173964 - RNA, 19 nt, Artificial Sequence
  Description of Artificial Sequence: Synthetic oligonucleotide
auauaugaacacaaggaca

SEQ ID NO: 3173965 - RNA, 19 nt, Artificial Sequence
  Description of Artificial Sequence: Synthetic oligonucleotide
aagacuggaguuuucuuuu

SEQ ID NO: 3173966 - RNA, 19 nt, Artificial Sequence
  Description of Artificial Sequence: Synthetic oligonucleotide
uucacuucaugguacuucu

SEQ ID NO: 3173967 - RNA, 19 nt, Artificial Sequence
  Description of Artificial Sequence: Synthetic oligonucleotide
uggaguuuucuuuugcuuc

SEQ ID NO: 3173968 - RNA, 19 nt, Artificial Sequence
  Description of Artificial Sequence: Synthetic oligonucleotide
agcaaaacaagaaaacacu

SEQ ID NO: 3173969 - RNA, 19 nt, Artificial Sequence
  Description of Artificial Sequence: Synthetic oligonucleotide
ucaucuguagagcuucacu

SEQ ID NO: 3173970 - RNA, 19 nt, Artificial Sequence
  Description of Artificial Sequence: Synthetic oligonucleotide
uacuccagcaaaacaagaa

SEQ ID NO: 3173971 - RNA, 19 nt, Artificial Sequence
  Description of Artificial Sequence: Synthetic oligonucleotide
ugagcacuguuaaagccca

SEQ ID NO: 3173972 - RNA, 19 nt, Artificial Sequence
  Description of Artificial Sequence: Synthetic oligonucleotide
cccauauugacuucaaacc

SEQ ID NO: 3173973 - RNA, 19 nt, Artificial Sequence
  Description of Artificial Sequence: Synthetic oligonucleotide
uccuugaauauaugaacac

SEQ ID NO: 3173974 - RNA, 19 nt, Artificial Sequence
  Description of Artificial Sequence: Synthetic oligonucleotide
uucuuacuccagcaaaaca

SEQ ID NO: 3173975 - RNA, 19 nt, Artificial Sequence
  Description of Artificial Sequence: Synthetic oligonucleotide
aucacugugggcucuccgg

SEQ ID NO: 3173976 - RNA, 19 nt, Artificial Sequence
  Description of Artificial Sequence: Synthetic oligonucleotide
gacauuucauagguuaccc

SEQ ID NO: 3173977 - RNA, 19 nt, Artificial Sequence
  Description of Artificial Sequence: Synthetic oligonucleotide
ugguauauugauugaucca

SEQ ID NO: 3173978 - RNA, 19 nt, Artificial Sequence
  Description of Artificial Sequence: Synthetic oligonucleotide
uagguuacccauuccuucc

SEQ ID NO: 3173979 - RNA, 19 nt, Artificial Sequence
  Description of Artificial Sequence: Synthetic oligonucleotide
aaacucaauuuucuuguuu

SEQ ID NO: 3173980 - RNA, 19 nt, Artificial Sequence
  Description of Artificial Sequence: Synthetic oligonucleotide
uacuucuuacuccagcaaa

SEQ ID NO: 3173981 - RNA, 19 nt, Artificial Sequence
  Description of Artificial Sequence: Synthetic oligonucleotide
ugcucaagaauuucccaug

SEQ ID NO: 3173982 - RNA, 19 nt, Artificial Sequence
  Description of Artificial Sequence: Synthetic oligonucleotide
agaauuucccauguuucuc

SEQ ID NO: 3173983 - RNA, 19 nt, Artificial Sequence
  Description of Artificial Sequence: Synthetic oligonucleotide
ucuaccgauccuagugccg

SEQ ID NO: 3173984 - RNA, 19 nt, Artificial Sequence
  Description of Artificial Sequence: Synthetic oligonucleotide
aaauacuuugaccagucgg

SEQ ID NO: 3173985 - RNA, 19 nt, Artificial Sequence
  Description of Artificial Sequence: Synthetic oligonucleotide
ucgaucaccaacaaaaucc

SEQ ID NO: 3173986 - RNA, 19 nt, Artificial Sequence
  Description of Artificial Sequence: Synthetic oligonucleotide
aaugucgccauucacuuuc

SEQ ID NO: 3173987 - RNA, 19 nt, Artificial Sequence
  Description of Artificial Sequence: Synthetic oligonucleotide
ucaucgaucaccaacaaaa

SEQ ID NO: 3173988 - RNA, 19 nt, Artificial Sequence
  Description of Artificial Sequence: Synthetic oligonucleotide
aauccggggucucugaacc

SEQ ID NO: 3173989 - RNA, 19 nt, Artificial Sequence
  Description of Artificial Sequence: Synthetic oligonucleotide
gcuacugucagauagacgc

SEQ ID NO: 3173990 - RNA, 19 nt, Artificial Sequence
  Description of Artificial Sequence: Synthetic oligonucleotide
aagagaaggaggcagccag

SEQ ID NO: 3173991 - RNA, 19 nt, Artificial Sequence
  Description of Artificial Sequence: Synthetic oligonucleotide
agcugaacaggcuggaucc

SEQ ID NO: 3173992 - RNA, 19 nt, Artificial Sequence
  Description of Artificial Sequence: Synthetic oligonucleotide
uguuucauggcacuggaga

SEQ ID NO: 3173993 - RNA, 19 nt, Artificial Sequence
  Description of Artificial Sequence: Synthetic oligonucleotide
cauggaaauacuuugacca

SEQ ID NO: 3173994 - RNA, 19 nt, Artificial Sequence
  Description of Artificial Sequence: Synthetic oligonucleotide
caaagcuacugucagauag

SEQ ID NO: 3173995 - RNA, 19 nt, Artificial Sequence
  Description of Artificial Sequence: Synthetic oligonucleotide
ucaccaacaaaauccgggg

SEQ ID NO: 3173996 - RNA, 19 nt, Artificial Sequence
  Description of Artificial Sequence: Synthetic oligonucleotide
ugaaccacgggugugacag

SEQ ID NO: 3173997 - RNA, 19 nt, Artificial Sequence
  Description of Artificial Sequence: Synthetic oligonucleotide
gauccuggagaagagaagg

SEQ ID NO: 3173998 - RNA, 19 nt, Artificial Sequence
  Description of Artificial Sequence: Synthetic oligonucleotide
aauacuuugaccagucggu

SEQ ID NO: 3173999 - RNA, 19 nt, Artificial Sequence
  Description of Artificial Sequence: Synthetic oligonucleotide
ucgccauucacuuucuucc

SEQ ID NO: 3174000 - RNA, 19 nt, Artificial Sequence
  Description of Artificial Sequence: Synthetic oligonucleotide
uacuggagcucucuggacg

SEQ ID NO: 3174001 - RNA, 19 nt, Artificial Sequence
  Description of Artificial Sequence: Synthetic oligonucleotide
accaacaaaauccgggguc

SEQ ID NO: 3174002 - RNA, 19 nt, Artificial Sequence
  Description of Artificial Sequence: Synthetic oligonucleotide
gaaggaggcagccaggggc

SEQ ID NO: 3174003 - RNA, 19 nt, Artificial Sequence
  Description of Artificial Sequence: Synthetic oligonucleotide
aaauccggggucucugaac

SEQ ID NO: 3174004 - RNA, 19 nt, Artificial Sequence
  Description of Artificial Sequence: Synthetic oligonucleotide
ugugggcucuguuucaugg

SEQ ID NO: 3174005 - RNA, 19 nt, Artificial Sequence
  Description of Artificial Sequence: Synthetic oligonucleotide
auucacuuucuucccaugg

SEQ ID NO: 3174006 - RNA, 19 nt, Artificial Sequence
  Description of Artificial Sequence: Synthetic oligonucleotide
uggagaaggagcugaacag

SEQ ID NO: 3174007 - RNA, 19 nt, Artificial Sequence
  Description of Artificial Sequence: Synthetic oligonucleotide
cuggagaagagaaggaggc

SEQ ID NO: 3174008 - RNA, 19 nt, Artificial Sequence
  Description of Artificial Sequence: Synthetic oligonucleotide
agguuggucacaaagcuac

SEQ ID NO: 3174009 - RNA, 19 nt, Artificial Sequence
  Description of Artificial Sequence: Synthetic oligonucleotide
ugugacaggaguugguggc

SEQ ID NO: 3174010 - RNA, 19 nt, Artificial Sequence
  Description of Artificial Sequence: Synthetic oligonucleotide
uucccauggaaauacuuug

SEQ ID NO: 3174011 - RNA, 19 nt, Artificial Sequence
  Description of Artificial Sequence: Synthetic oligonucleotide
aucaccaacaaaauccggg

SEQ ID NO: 3174012 - RNA, 19 nt, Artificial Sequence
  Description of Artificial Sequence: Synthetic oligonucleotide
aucgaucaccaacaaaauc

SEQ ID NO: 3174013 - RNA, 19 nt, Artificial Sequence
  Description of Artificial Sequence: Synthetic oligonucleotide
agauagacgccuccggagg

SEQ ID NO: 3174014 - RNA, 19 nt, Artificial Sequence
  Description of Artificial Sequence: Synthetic oligonucleotide
acuggagcucucuggacgc

SEQ ID NO: 3174015 - RNA, 19 nt, Artificial Sequence
  Description of Artificial Sequence: Synthetic oligonucleotide
gaaggagcugaacaggcug

SEQ ID NO: 3174016 - RNA, 19 nt, Artificial Sequence
  Description of Artificial Sequence: Synthetic oligonucleotide
uucauggcacuggagaagg

SEQ ID NO: 3174017 - RNA, 19 nt, Artificial Sequence
  Description of Artificial Sequence: Synthetic oligonucleotide
ugaacaggcuggauccugg

SEQ ID NO: 3174018 - RNA, 19 nt, Artificial Sequence
  Description of Artificial Sequence: Synthetic oligonucleotide
gaaauacuuugaccagucg

SEQ ID NO: 3174019 - RNA, 19 nt, Artificial Sequence
  Description of Artificial Sequence: Synthetic oligonucleotide
gaugcuggggagcuacugg

SEQ ID NO: 3174020 - RNA, 19 nt, Artificial Sequence
  Description of Artificial Sequence: Synthetic oligonucleotide
gucacaaagcuacugucag

SEQ ID NO: 3174021 - RNA, 19 nt, Artificial Sequence
  Description of Artificial Sequence: Synthetic oligonucleotide
guagccauugggcagguug

SEQ ID NO: 3174022 - RNA, 19 nt, Artificial Sequence
  Description of Artificial Sequence: Synthetic oligonucleotide
gcuccauuaaccccgaggg

SEQ ID NO: 3174023 - RNA, 19 nt, Artificial Sequence
  Description of Artificial Sequence: Synthetic oligonucleotide
aagcuacugucagauagac

SEQ ID NO: 3174024 - RNA, 19 nt, Artificial Sequence
  Description of Artificial Sequence: Synthetic oligonucleotide
gucggugugggcaucaucg

SEQ ID NO: 3174025 - RNA, 19 nt, Artificial Sequence
  Description of Artificial Sequence: Synthetic oligonucleotide
uuggucacaaagcuacugu

SEQ ID NO: 3174026 - RNA, 19 nt, Artificial Sequence
  Description of Artificial Sequence: Synthetic oligonucleotide
uagccauugggcagguugg

SEQ ID NO: 3174027 - RNA, 19 nt, Artificial Sequence
  Description of Artificial Sequence: Synthetic oligonucleotide
agaagagaaggaggcagcc

SEQ ID NO: 3174028 - RNA, 19 nt, Artificial Sequence
  Description of Artificial Sequence: Synthetic oligonucleotide
acuuugaccagucggugug

SEQ ID NO: 3174029 - RNA, 19 nt, Artificial Sequence
  Description of Artificial Sequence: Synthetic oligonucleotide
uucacuuucuucccaugga

SEQ ID NO: 3174030 - RNA, 19 nt, Artificial Sequence
  Description of Artificial Sequence: Synthetic oligonucleotide
ucagauagacgccuccgga

SEQ ID NO: 3174031 - RNA, 19 nt, Artificial Sequence
  Description of Artificial Sequence: Synthetic oligonucleotide
auggaaauacuuugaccag

SEQ ID NO: 3174032 - RNA, 19 nt, Artificial Sequence
  Description of Artificial Sequence: Synthetic oligonucleotide
ucuguuucauggcacugga

SEQ ID NO: 3174033 - RNA, 19 nt, Artificial Sequence
  Description of Artificial Sequence: Synthetic oligonucleotide
acucggaucucaaugucgc

SEQ ID NO: 3174034 - RNA, 19 nt, Artificial Sequence
  Description of Artificial Sequence: Synthetic oligonucleotide
uuucuucccauggaaauac

SEQ ID NO: 3174035 - RNA, 19 nt, Artificial Sequence
  Description of Artificial Sequence: Synthetic oligonucleotide
ugcagguccggcauguagc

SEQ ID NO: 3174036 - RNA, 19 nt, Artificial Sequence
  Description of Artificial Sequence: Synthetic oligonucleotide
aguugguggcuccauuaac

SEQ ID NO: 3174037 - RNA, 19 nt, Artificial Sequence
  Description of Artificial Sequence: Synthetic oligonucleotide
uggauccuggagaagagaa

SEQ ID NO: 3174038 - RNA, 19 nt, Artificial Sequence
  Description of Artificial Sequence: Synthetic oligonucleotide
ucaaugucgccauucacuu

SEQ ID NO: 3174039 - RNA, 19 nt, Artificial Sequence
  Description of Artificial Sequence: Synthetic oligonucleotide
acuuucuucccauggaaau

SEQ ID NO: 3174040 - RNA, 19 nt, Artificial Sequence
  Description of Artificial Sequence: Synthetic oligonucleotide
uugguggcuccauuaaccc

SEQ ID NO: 3174041 - RNA, 19 nt, Artificial Sequence
  Description of Artificial Sequence: Synthetic oligonucleotide
ugggcaucaucgaucacca

SEQ ID NO: 3174042 - RNA, 19 nt, Artificial Sequence
  Description of Artificial Sequence: Synthetic oligonucleotide
agcuacuggagcucucugg

SEQ ID NO: 3174043 - RNA, 19 nt, Artificial Sequence
  Description of Artificial Sequence: Synthetic oligonucleotide
ucacuuucuucccauggaa

SEQ ID NO: 3174044 - RNA, 19 nt, Artificial Sequence
  Description of Artificial Sequence: Synthetic oligonucleotide
ugucagauagacgccuccg

SEQ ID NO: 3174045 - RNA, 19 nt, Artificial Sequence
  Description of Artificial Sequence: Synthetic oligonucleotide
uccacucggaucucaaugu

SEQ ID NO: 3174046 - RNA, 19 nt, Artificial Sequence
  Description of Artificial Sequence: Synthetic oligonucleotide
acaggcuggauccuggaga

SEQ ID NO: 3174047 - RNA, 19 nt, Artificial Sequence
  Description of Artificial Sequence: Synthetic oligonucleotide
guugguggcuccauuaacc

SEQ ID NO: 3174048 - RNA, 19 nt, Artificial Sequence
  Description of Artificial Sequence: Synthetic oligonucleotide
uuucauggcacuggagaag

SEQ ID NO: 3174049 - RNA, 19 nt, Artificial Sequence
  Description of Artificial Sequence: Synthetic oligonucleotide
aacaggcuggauccuggag

SEQ ID NO: 3174050 - RNA, 19 nt, Artificial Sequence
  Description of Artificial Sequence: Synthetic oligonucleotide
aaggagcugaacaggcugg

SEQ ID NO: 3174051 - RNA, 19 nt, Artificial Sequence
  Description of Artificial Sequence: Synthetic oligonucleotide
cacucggaucucaaugucg

SEQ ID NO: 3174052 - RNA, 19 nt, Artificial Sequence
  Description of Artificial Sequence: Synthetic oligonucleotide
uccuggagaagagaaggag

SEQ ID NO: 3174053 - RNA, 19 nt, Artificial Sequence
  Description of Artificial Sequence: Synthetic oligonucleotide
auggcacuggagaaggagc

SEQ ID NO: 3174054 - RNA, 19 nt, Artificial Sequence
  Description of Artificial Sequence: Synthetic oligonucleotide
gagaaggagcugaacaggc

SEQ ID NO: 3174055 - RNA, 19 nt, Artificial Sequence
  Description of Artificial Sequence: Synthetic oligonucleotide
ucccauggaaauacuuuga

SEQ ID NO: 3174056 - RNA, 19 nt, Artificial Sequence
  Description of Artificial Sequence: Synthetic oligonucleotide
gagaaggaggcagccaggg

SEQ ID NO: 3174057 - RNA, 19 nt, Artificial Sequence
  Description of Artificial Sequence: Synthetic oligonucleotide
cauguagccauugggcagg

SEQ ID NO: 3174058 - RNA, 19 nt, Artificial Sequence
  Description of Artificial Sequence: Synthetic oligonucleotide
gucagauagacgccuccgg

SEQ ID NO: 3174059 - RNA, 19 nt, Artificial Sequence
  Description of Artificial Sequence: Synthetic oligonucleotide
ugggcucuguuucauggca

SEQ ID NO: 3174060 - RNA, 19 nt, Artificial Sequence
  Description of Artificial Sequence: Synthetic oligonucleotide
aaagcuacugucagauaga

SEQ ID NO: 3174061 - RNA, 19 nt, Artificial Sequence
  Description of Artificial Sequence: Synthetic oligonucleotide
gugugacaggaguuggugg

SEQ ID NO: 3174062 - RNA, 19 nt, Artificial Sequence
  Description of Artificial Sequence: Synthetic oligonucleotide
uggaaauacuuugaccagu

SEQ ID NO: 3174063 - RNA, 19 nt, Artificial Sequence
  Description of Artificial Sequence: Synthetic oligonucleotide
ugaccagucggugugggca

SEQ ID NO: 3174064 - RNA, 19 nt, Artificial Sequence
  Description of Artificial Sequence: Synthetic oligonucleotide
cagauagacgccuccggag

SEQ ID NO: 3174065 - RNA, 19 nt, Artificial Sequence
  Description of Artificial Sequence: Synthetic oligonucleotide
gugggcaucaucgaucacc

SEQ ID NO: 3174066 - RNA, 19 nt, Artificial Sequence
  Description of Artificial Sequence: Synthetic oligonucleotide
gguggcuccauuaaccccg

SEQ ID NO: 3174067 - RNA, 19 nt, Artificial Sequence
  Description of Artificial Sequence: Synthetic oligonucleotide
cucuggacgcugcaggucc

SEQ ID NO: 3174068 - RNA, 19 nt, Artificial Sequence
  Description of Artificial Sequence: Synthetic oligonucleotide
aaaauccggggucucugaa

SEQ ID NO: 3174069 - RNA, 19 nt, Artificial Sequence
  Description of Artificial Sequence: Synthetic oligonucleotide
uccggcauguagccauugg

SEQ ID NO: 3174070 - RNA, 19 nt, Artificial Sequence
  Description of Artificial Sequence: Synthetic oligonucleotide
ucucaaugucgccauucac

SEQ ID NO: 3174071 - RNA, 19 nt, Artificial Sequence
  Description of Artificial Sequence: Synthetic oligonucleotide
cuggagaaggagcugaaca

SEQ ID NO: 3174072 - RNA, 19 nt, Artificial Sequence
  Description of Artificial Sequence: Synthetic oligonucleotide
uggcacuggagaaggagcu

SEQ ID NO: 3174073 - RNA, 19 nt, Artificial Sequence
  Description of Artificial Sequence: Synthetic oligonucleotide
ggagaagagaaggaggcag

SEQ ID NO: 3174074 - RNA, 19 nt, Artificial Sequence
  Description of Artificial Sequence: Synthetic oligonucleotide
ggcaucaucgaucaccaac

SEQ ID NO: 3174075 - RNA, 19 nt, Artificial Sequence
  Description of Artificial Sequence: Synthetic oligonucleotide
uacuuugaccagucggugu

SEQ ID NO: 3174076 - RNA, 19 nt, Artificial Sequence
  Description of Artificial Sequence: Synthetic oligonucleotide
ucggaucucaaugucgcca

SEQ ID NO: 3174077 - RNA, 19 nt, Artificial Sequence
  Description of Artificial Sequence: Synthetic oligonucleotide
gagcugaacaggcuggauc

SEQ ID NO: 3174078 - RNA, 19 nt, Artificial Sequence
  Description of Artificial Sequence: Synthetic oligonucleotide
aacaaaauccggggucucu

SEQ ID NO: 3174079 - RNA, 19 nt, Artificial Sequence
  Description of Artificial Sequence: Synthetic oligonucleotide
uggucacaaagcuacuguc

SEQ ID NO: 3174080 - RNA, 19 nt, Artificial Sequence
  Description of Artificial Sequence: Synthetic oligonucleotide
ccuggagaagagaaggagg

SEQ ID NO: 3174081 - RNA, 19 nt, Artificial Sequence
  Description of Artificial Sequence: Synthetic oligonucleotide
uuugaccagucgguguggg

SEQ ID NO: 3174082 - RNA, 19 nt, Artificial Sequence
  Description of Artificial Sequence: Synthetic oligonucleotide
gaucaccaacaaaauccgg

SEQ ID NO: 3174083 - RNA, 19 nt, Artificial Sequence
  Description of Artificial Sequence: Synthetic oligonucleotide
gagaagagaaggaggcagc

SEQ ID NO: 3174084 - RNA, 19 nt, Artificial Sequence
  Description of Artificial Sequence: Synthetic oligonucleotide
aggaacacuggucacaggc

SEQ ID NO: 3174085 - RNA, 19 nt, Artificial Sequence
  Description of Artificial Sequence: Synthetic oligonucleotide
ugagguugcucaaagagcu

SEQ ID NO: 3174086 - RNA, 19 nt, Artificial Sequence
  Description of Artificial Sequence: Synthetic oligonucleotide
uugcucaaagagcugaggg

SEQ ID NO: 3174087 - RNA, 19 nt, Artificial Sequence
  Description of Artificial Sequence: Synthetic oligonucleotide
ugucuguugagcuugcugc

SEQ ID NO: 3174088 - RNA, 19 nt, Artificial Sequence
  Description of Artificial Sequence: Synthetic oligonucleotide
cuugagguugcucaaagag

SEQ ID NO: 3174089 - RNA, 19 nt, Artificial Sequence
  Description of Artificial Sequence: Synthetic oligonucleotide
agugugugaacgcaugugg

SEQ ID NO: 3174090 - RNA, 19 nt, Artificial Sequence
  Description of Artificial Sequence: Synthetic oligonucleotide
uugcacaccgugcaggugg

SEQ ID NO: 3174091 - RNA, 19 nt, Artificial Sequence
  Description of Artificial Sequence: Synthetic oligonucleotide
acuggucacaggcauaggg

SEQ ID NO: 3174092 - RNA, 19 nt, Artificial Sequence
  Description of Artificial Sequence: Synthetic oligonucleotide
ucuucuugcacaccgugca

SEQ ID NO: 3174093 - RNA, 19 nt, Artificial Sequence
  Description of Artificial Sequence: Synthetic oligonucleotide
gagcuugcugcuuugggcg

SEQ ID NO: 3174094 - RNA, 19 nt, Artificial Sequence
  Description of Artificial Sequence: Synthetic oligonucleotide
uugagguugcucaaagagc

SEQ ID NO: 3174095 - RNA, 19 nt, Artificial Sequence
  Description of Artificial Sequence: Synthetic oligonucleotide
uggaccuugagguugcuca

SEQ ID NO: 3174096 - RNA, 19 nt, Artificial Sequence
  Description of Artificial Sequence: Synthetic oligonucleotide
agggucuucuugcacaccg

SEQ ID NO: 3174097 - RNA, 19 nt, Artificial Sequence
  Description of Artificial Sequence: Synthetic oligonucleotide
ugagcuugcugcuuugggc

SEQ ID NO: 3174098 - RNA, 19 nt, Artificial Sequence
  Description of Artificial Sequence: Synthetic oligonucleotide
uugagcuugcugcuuuggg

SEQ ID NO: 3174099 - RNA, 19 nt, Artificial Sequence
  Description of Artificial Sequence: Synthetic oligonucleotide
acgcauguggaccuugagg

SEQ ID NO: 3174100 - RNA, 19 nt, Artificial Sequence
  Description of Artificial Sequence: Synthetic oligonucleotide
agagcugagggucuucuug

SEQ ID NO: 3174101 - RNA, 19 nt, Artificial Sequence
  Description of Artificial Sequence: Synthetic oligonucleotide
uggucacaggcauagggcc

SEQ ID NO: 3174102 - RNA, 19 nt, Artificial Sequence
  Description of Artificial Sequence: Synthetic oligonucleotide
acaggcauagggccgcucg

SEQ ID NO: 3174103 - RNA, 19 nt, Artificial Sequence
  Description of Artificial Sequence: Synthetic oligonucleotide
ucuucuugugucuguugag

SEQ ID NO: 3174104 - RNA, 19 nt, Artificial Sequence
  Description of Artificial Sequence: Synthetic oligonucleotide
uuugggcgcaggcauagga

SEQ ID NO: 3174105 - RNA, 19 nt, Artificial Sequence
  Description of Artificial Sequence: Synthetic oligonucleotide
ugugugaacgcauguggac

SEQ ID NO: 3174106 - RNA, 19 nt, Artificial Sequence
  Description of Artificial Sequence: Synthetic oligonucleotide
cuggucacaggcauagggc

SEQ ID NO: 3174107 - RNA, 19 nt, Artificial Sequence
  Description of Artificial Sequence: Synthetic oligonucleotide
ugugaacgcauguggaccu

SEQ ID NO: 3174108 - RNA, 19 nt, Artificial Sequence
  Description of Artificial Sequence: Synthetic oligonucleotide
ugcucaaagagcugagggu

SEQ ID NO: 3174109 - RNA, 19 nt, Artificial Sequence
  Description of Artificial Sequence: Synthetic oligonucleotide
uucuugugucuguugagcu

SEQ ID NO: 3174110 - RNA, 19 nt, Artificial Sequence
  Description of Artificial Sequence: Synthetic oligonucleotide
uucuugcacaccgugcagg

SEQ ID NO: 3174111 - RNA, 19 nt, Artificial Sequence
  Description of Artificial Sequence: Synthetic oligonucleotide
auaggaacacuggucacag

SEQ ID NO: 3174112 - RNA, 19 nt, Artificial Sequence
  Description of Artificial Sequence: Synthetic oligonucleotide
acucccaggggucggcugc

SEQ ID NO: 3174113 - RNA, 19 nt, Artificial Sequence
  Description of Artificial Sequence: Synthetic oligonucleotide
cuugugucuguugagcuug

SEQ ID NO: 3174114 - RNA, 19 nt, Artificial Sequence
  Description of Artificial Sequence: Synthetic oligonucleotide
cuucuugugucuguugagc

SEQ ID NO: 3174115 - RNA, 19 nt, Artificial Sequence
  Description of Artificial Sequence: Synthetic oligonucleotide
gagcugagggucuucuugc

SEQ ID NO: 3174116 - RNA, 19 nt, Artificial Sequence
  Description of Artificial Sequence: Synthetic oligonucleotide
aacgcauguggaccuugag

SEQ ID NO: 3174117 - RNA, 19 nt, Artificial Sequence
  Description of Artificial Sequence: Synthetic oligonucleotide
uggcgggcagcacugcucg

SEQ ID NO: 3174118 - RNA, 19 nt, Artificial Sequence
  Description of Artificial Sequence: Synthetic oligonucleotide
accuugagguugcucaaag

SEQ ID NO: 3174119 - RNA, 19 nt, Artificial Sequence
  Description of Artificial Sequence: Synthetic oligonucleotide
aaagagcugagggucuucu

SEQ ID NO: 3174120 - RNA, 19 nt, Artificial Sequence
  Description of Artificial Sequence: Synthetic oligonucleotide
ugcagguggggcucuggcg

SEQ ID NO: 3174121 - RNA, 19 nt, Artificial Sequence
  Description of Artificial Sequence: Synthetic oligonucleotide
cauguggaccuugagguug

SEQ ID NO: 3174122 - RNA, 19 nt, Artificial Sequence
  Description of Artificial Sequence: Synthetic oligonucleotide
ggcauaggaacacugguca

SEQ ID NO: 3174123 - RNA, 19 nt, Artificial Sequence
  Description of Artificial Sequence: Synthetic oligonucleotide
acacuggucacaggcauag

SEQ ID NO: 3174124 - RNA, 19 nt, Artificial Sequence
  Description of Artificial Sequence: Synthetic oligonucleotide
agcuugcugcuuugggcgc

SEQ ID NO: 3174125 - RNA, 19 nt, Artificial Sequence
  Description of Artificial Sequence: Synthetic oligonucleotide
ucuugcacaccgugcaggu

SEQ ID NO: 3174126 - RNA, 19 nt, Artificial Sequence
  Description of Artificial Sequence: Synthetic oligonucleotide
gucuucuugugucuguuga

SEQ ID NO: 3174127 - RNA, 19 nt, Artificial Sequence
  Description of Artificial Sequence: Synthetic oligonucleotide
ugagggucuucuugcacac

SEQ ID NO: 3174128 - RNA, 19 nt, Artificial Sequence
  Description of Artificial Sequence: Synthetic oligonucleotide
guugcucaaagagcugagg

SEQ ID NO: 3174129 - RNA, 19 nt, Artificial Sequence
  Description of Artificial Sequence: Synthetic oligonucleotide
aggcauaggaacacugguc

SEQ ID NO: 3174130 - RNA, 19 nt, Artificial Sequence
  Description of Artificial Sequence: Synthetic oligonucleotide
gugugaacgcauguggacc

SEQ ID NO: 3174131 - RNA, 19 nt, Artificial Sequence
  Description of Artificial Sequence: Synthetic oligonucleotide
gugucuguugagcuugcug

SEQ ID NO: 3174132 - RNA, 19 nt, Artificial Sequence
  Description of Artificial Sequence: Synthetic oligonucleotide
ugcacaccgugcagguggg

SEQ ID NO: 3174133 - RNA, 19 nt, Artificial Sequence
  Description of Artificial Sequence: Synthetic oligonucleotide
ugggcgcaggcauaggaac

SEQ ID NO: 3174134 - RNA, 19 nt, Artificial Sequence
  Description of Artificial Sequence: Synthetic oligonucleotide
uguugagcuugcugcuuug

SEQ ID NO: 3174135 - RNA, 19 nt, Artificial Sequence
  Description of Artificial Sequence: Synthetic oligonucleotide
gcagguggggcucuggcgg

SEQ ID NO: 3174136 - RNA, 19 nt, Artificial Sequence
  Description of Artificial Sequence: Synthetic oligonucleotide
ggcggcaggacucccaggg

SEQ ID NO: 3174137 - RNA, 19 nt, Artificial Sequence
  Description of Artificial Sequence: Synthetic oligonucleotide
cugagggucuucuugcaca

SEQ ID NO: 3174138 - RNA, 19 nt, Artificial Sequence
  Description of Artificial Sequence: Synthetic oligonucleotide
ugcugcuuugggcgcaggc

SEQ ID NO: 3174139 - RNA, 19 nt, Artificial Sequence
  Description of Artificial Sequence: Synthetic oligonucleotide
agguugcucaaagagcuga

SEQ ID NO: 3174140 - RNA, 19 nt, Artificial Sequence
  Description of Artificial Sequence: Synthetic oligonucleotide
ucuugugucuguugagcuu

SEQ ID NO: 3174141 - RNA, 19 nt, Artificial Sequence
  Description of Artificial Sequence: Synthetic oligonucleotide
uugggcgcaggcauaggaa

SEQ ID NO: 3174142 - RNA, 19 nt, Artificial Sequence
  Description of Artificial Sequence: Synthetic oligonucleotide
auguggaccuugagguugc

SEQ ID NO: 3174143 - RNA, 19 nt, Artificial Sequence
  Description of Artificial Sequence: Synthetic oligonucleotide
cucgccagugugugaacgc

SEQ ID NO: 3174144 - RNA, 19 nt, Artificial Sequence
  Description of Artificial Sequence: Synthetic oligonucleotide
ggggcuuguccucaacugg

SEQ ID NO: 3174145 - RNA, 19 nt, Artificial Sequence
  Description of Artificial Sequence: Synthetic oligonucleotide
aggcauagggccgcucgcc

SEQ ID NO: 3174146 - RNA, 19 nt, Artificial Sequence
  Description of Artificial Sequence: Synthetic oligonucleotide
guugagcuugcugcuuugg

SEQ ID NO: 3174147 - RNA, 19 nt, Artificial Sequence
  Description of Artificial Sequence: Synthetic oligonucleotide
uaggaacacuggucacagg

SEQ ID NO: 3174148 - RNA, 19 nt, Artificial Sequence
  Description of Artificial Sequence: Synthetic oligonucleotide
cuucuugcacaccgugcag

SEQ ID NO: 3174149 - RNA, 19 nt, Artificial Sequence
  Description of Artificial Sequence: Synthetic oligonucleotide
cauaggaacacuggucaca

SEQ ID NO: 3174150 - RNA, 19 nt, Artificial Sequence
  Description of Artificial Sequence: Synthetic oligonucleotide
cugcuuggggagauucccc

SEQ ID NO: 3174151 - RNA, 19 nt, Artificial Sequence
  Description of Artificial Sequence: Synthetic oligonucleotide
uugugucuguugagcuugc

SEQ ID NO: 3174152 - RNA, 19 nt, Artificial Sequence
  Description of Artificial Sequence: Synthetic oligonucleotide
ugaacgcauguggaccuug

SEQ ID NO: 3174153 - RNA, 19 nt, Artificial Sequence
  Description of Artificial Sequence: Synthetic oligonucleotide
gucuucuugcacaccgugc

SEQ ID NO: 3174154 - RNA, 19 nt, Artificial Sequence
  Description of Artificial Sequence: Synthetic oligonucleotide
ucuggcgggcagcacugcu

SEQ ID NO: 3174155 - RNA, 19 nt, Artificial Sequence
  Description of Artificial Sequence: Synthetic oligonucleotide
gcucaaagagcugaggguc

SEQ ID NO: 3174156 - RNA, 19 nt, Artificial Sequence
  Description of Artificial Sequence: Synthetic oligonucleotide
acaccgugcagguggggcu

SEQ ID NO: 3174157 - RNA, 19 nt, Artificial Sequence
  Description of Artificial Sequence: Synthetic oligonucleotide
ugccggugggucuucuugu

SEQ ID NO: 3174158 - RNA, 19 nt, Artificial Sequence
  Description of Artificial Sequence: Synthetic oligonucleotide
ggucuucuugcacaccgug

SEQ ID NO: 3174159 - RNA, 19 nt, Artificial Sequence
  Description of Artificial Sequence: Synthetic oligonucleotide
gcaggcauaggaacacugg

SEQ ID NO: 3174160 - RNA, 19 nt, Artificial Sequence
  Description of Artificial Sequence: Synthetic oligonucleotide
cacaccgugcagguggggc

SEQ ID NO: 3174161 - RNA, 19 nt, Artificial Sequence
  Description of Artificial Sequence: Synthetic oligonucleotide
cagugugugaacgcaugug

SEQ ID NO: 3174162 - RNA, 19 nt, Artificial Sequence
  Description of Artificial Sequence: Synthetic oligonucleotide
gaacacuggucacaggcau

SEQ ID NO: 3174163 - RNA, 19 nt, Artificial Sequence
  Description of Artificial Sequence: Synthetic oligonucleotide
gucacaggcauagggccgc

SEQ ID NO: 3174164 - RNA, 19 nt, Artificial Sequence
  Description of Artificial Sequence: Synthetic oligonucleotide
ugggucuucuugugucugu

SEQ ID NO: 3174165 - RNA, 19 nt, Artificial Sequence
  Description of Artificial Sequence: Synthetic oligonucleotide
cugccggugggucuucuug

SEQ ID NO: 3174166 - RNA, 19 nt, Artificial Sequence
  Description of Artificial Sequence: Synthetic oligonucleotide
aagagcugagggucuucuu

SEQ ID NO: 3174167 - RNA, 19 nt, Artificial Sequence
  Description of Artificial Sequence: Synthetic oligonucleotide
ucgccagugugugaacgca

SEQ ID NO: 3174168 - RNA, 19 nt, Artificial Sequence
  Description of Artificial Sequence: Synthetic oligonucleotide
agggccgcucgccagugug

SEQ ID NO: 3174169 - RNA, 19 nt, Artificial Sequence
  Description of Artificial Sequence: Synthetic oligonucleotide
agcugagggucuucuugca

SEQ ID NO: 3174170 - RNA, 19 nt, Artificial Sequence
  Description of Artificial Sequence: Synthetic oligonucleotide
ggucacaggcauagggccg

SEQ ID NO: 3174171 - RNA, 19 nt, Artificial Sequence
  Description of Artificial Sequence: Synthetic oligonucleotide
ggaggggcugcuuggggag

SEQ ID NO: 3174172 - RNA, 19 nt, Artificial Sequence
  Description of Artificial Sequence: Synthetic oligonucleotide
ggcagcacugcucgcuggg

SEQ ID NO: 3174173 - RNA, 19 nt, Artificial Sequence
  Description of Artificial Sequence: Synthetic oligonucleotide
caggcauagggccgcucgc

SEQ ID NO: 3174174 - RNA, 19 nt, Artificial Sequence
  Description of Artificial Sequence: Synthetic oligonucleotide
aggacucccaggggucggc

SEQ ID NO: 3174175 - RNA, 19 nt, Artificial Sequence
  Description of Artificial Sequence: Synthetic oligonucleotide
gugugugaacgcaugugga

SEQ ID NO: 3174176 - RNA, 19 nt, Artificial Sequence
  Description of Artificial Sequence: Synthetic oligonucleotide
ucaaagagcugagggucuu

SEQ ID NO: 3174177 - RNA, 19 nt, Artificial Sequence
  Description of Artificial Sequence: Synthetic oligonucleotide
gcugcuuggggagauuccc

SEQ ID NO: 3174178 - RNA, 19 nt, Artificial Sequence
  Description of Artificial Sequence: Synthetic oligonucleotide
gagguugcucaaagagcug

SEQ ID NO: 3174179 - RNA, 19 nt, Artificial Sequence
  Description of Artificial Sequence: Synthetic oligonucleotide
gugcagguggggcucuggc

SEQ ID NO: 3174180 - RNA, 19 nt, Artificial Sequence
  Description of Artificial Sequence: Synthetic oligonucleotide
ucuguugagcuugcugcuu

SEQ ID NO: 3174181 - RNA, 19 nt, Artificial Sequence
  Description of Artificial Sequence: Synthetic oligonucleotide
gacucccaggggucggcug

SEQ ID NO: 3174182 - RNA, 19 nt, Artificial Sequence
  Description of Artificial Sequence: Synthetic oligonucleotide
cagguggggcucuggcggg

SEQ ID NO: 3174183 - RNA, 19 nt, Artificial Sequence
  Description of Artificial Sequence: Synthetic oligonucleotide
ggucuucuugugucuguug

SEQ ID NO: 3174184 - RNA, 19 nt, Artificial Sequence
  Description of Artificial Sequence: Synthetic oligonucleotide
auugcagauauuuuggccc

SEQ ID NO: 3174185 - RNA, 19 nt, Artificial Sequence
  Description of Artificial Sequence: Synthetic oligonucleotide
uauauugcagauauuuugg

SEQ ID NO: 3174186 - RNA, 19 nt, Artificial Sequence
  Description of Artificial Sequence: Synthetic oligonucleotide
aaauguauuauuaaggcug

SEQ ID NO: 3174187 - RNA, 19 nt, Artificial Sequence
  Description of Artificial Sequence: Synthetic oligonucleotide
aaguugaugaaacauugug

SEQ ID NO: 3174188 - RNA, 19 nt, Artificial Sequence
  Description of Artificial Sequence: Synthetic oligonucleotide
aaaauguauuauuaaggcu

SEQ ID NO: 3174189 - RNA, 19 nt, Artificial Sequence
  Description of Artificial Sequence: Synthetic oligonucleotide
aaggcuguuacuauauugc

SEQ ID NO: 3174190 - RNA, 19 nt, Artificial Sequence
  Description of Artificial Sequence: Synthetic oligonucleotide
aaacucuuucuccuuuugc

SEQ ID NO: 3174191 - RNA, 19 nt, Artificial Sequence
  Description of Artificial Sequence: Synthetic oligonucleotide
ucuccuuuugcuuuaaagc

SEQ ID NO: 3174192 - RNA, 19 nt, Artificial Sequence
  Description of Artificial Sequence: Synthetic oligonucleotide
ugaaacauuguggacauag

SEQ ID NO: 3174193 - RNA, 19 nt, Artificial Sequence
  Description of Artificial Sequence: Synthetic oligonucleotide
aaacauuguggacauagcu

SEQ ID NO: 3174194 - RNA, 19 nt, Artificial Sequence
  Description of Artificial Sequence: Synthetic oligonucleotide
cuauauugcagauauuuug

SEQ ID NO: 3174195 - RNA, 19 nt, Artificial Sequence
  Description of Artificial Sequence: Synthetic oligonucleotide
aaaccuaaggguuuucuga

SEQ ID NO: 3174196 - RNA, 19 nt, Artificial Sequence
  Description of Artificial Sequence: Synthetic oligonucleotide
uuuuaaaacucuuucuccu

SEQ ID NO: 3174197 - RNA, 19 nt, Artificial Sequence
  Description of Artificial Sequence: Synthetic oligonucleotide
agagcuaucuucuuuggag

SEQ ID NO: 3174198 - RNA, 19 nt, Artificial Sequence
  Description of Artificial Sequence: Synthetic oligonucleotide
uuuccugaaaguucaauug

SEQ ID NO: 3174199 - RNA, 19 nt, Artificial Sequence
  Description of Artificial Sequence: Synthetic oligonucleotide
augucuguuccauaucucc

SEQ ID NO: 3174200 - RNA, 19 nt, Artificial Sequence
  Description of Artificial Sequence: Synthetic oligonucleotide
ucuuuggagacaaagcugu

SEQ ID NO: 3174201 - RNA, 19 nt, Artificial Sequence
  Description of Artificial Sequence: Synthetic oligonucleotide
auauugcagauauuuuggc

SEQ ID NO: 3174202 - RNA, 19 nt, Artificial Sequence
  Description of Artificial Sequence: Synthetic oligonucleotide
cuuguuuguuggaaaaugg

SEQ ID NO: 3174203 - RNA, 19 nt, Artificial Sequence
  Description of Artificial Sequence: Synthetic oligonucleotide
uguuuguuggaaaauggcu

SEQ ID NO: 3174204 - RNA, 19 nt, Artificial Sequence
  Description of Artificial Sequence: Synthetic oligonucleotide
ucuucuuuggagacaaagc

SEQ ID NO: 3174205 - RNA, 19 nt, Artificial Sequence
  Description of Artificial Sequence: Synthetic oligonucleotide
aaaauggcugucccaacag

SEQ ID NO: 3174206 - RNA, 19 nt, Artificial Sequence
  Description of Artificial Sequence: Synthetic oligonucleotide
ugaugaaacauuguggaca

SEQ ID NO: 3174207 - RNA, 19 nt, Artificial Sequence
  Description of Artificial Sequence: Synthetic oligonucleotide
aacucuuucuccuuuugcu

SEQ ID NO: 3174208 - RNA, 19 nt, Artificial Sequence
  Description of Artificial Sequence: Synthetic oligonucleotide
aaaaccuaaggguuuucug

SEQ ID NO: 3174209 - RNA, 19 nt, Artificial Sequence
  Description of Artificial Sequence: Synthetic oligonucleotide
guugaugaaacauugugga

SEQ ID NO: 3174210 - RNA, 19 nt, Artificial Sequence
  Description of Artificial Sequence: Synthetic oligonucleotide
aguccugcaugucuguucc

SEQ ID NO: 3174211 - RNA, 19 nt, Artificial Sequence
  Description of Artificial Sequence: Synthetic oligonucleotide
guauuauuaaggcuguuac

SEQ ID NO: 3174212 - RNA, 19 nt, Artificial Sequence
  Description of Artificial Sequence: Synthetic oligonucleotide
uauuuuggccccuuguuug

SEQ ID NO: 3174213 - RNA, 19 nt, Artificial Sequence
  Description of Artificial Sequence: Synthetic oligonucleotide
ucuuuuguuacucucucuc

SEQ ID NO: 3174214 - RNA, 19 nt, Artificial Sequence
  Description of Artificial Sequence: Synthetic oligonucleotide
uauugcagauauuuuggcc

SEQ ID NO: 3174215 - RNA, 19 nt, Artificial Sequence
  Description of Artificial Sequence: Synthetic oligonucleotide
agaacagcuguagaaaacg

SEQ ID NO: 3174216 - RNA, 19 nt, Artificial Sequence
  Description of Artificial Sequence: Synthetic oligonucleotide
uuccauaucucccaccuga

SEQ ID NO: 3174217 - RNA, 19 nt, Artificial Sequence
  Description of Artificial Sequence: Synthetic oligonucleotide
acauuguggacauagcuga

SEQ ID NO: 3174218 - RNA, 19 nt, Artificial Sequence
  Description of Artificial Sequence: Synthetic oligonucleotide
uuguuuguuggaaaauggc

SEQ ID NO: 3174219 - RNA, 19 nt, Artificial Sequence
  Description of Artificial Sequence: Synthetic oligonucleotide
aguugaugaaacauugugg

SEQ ID NO: 3174220 - RNA, 19 nt, Artificial Sequence
  Description of Artificial Sequence: Synthetic oligonucleotide
uaaggcuguuacuauauug

SEQ ID NO: 3174221 - RNA, 19 nt, Artificial Sequence
  Description of Artificial Sequence: Synthetic oligonucleotide
auccauaguggucacagag

SEQ ID NO: 3174222 - RNA, 19 nt, Artificial Sequence
  Description of Artificial Sequence: Synthetic oligonucleotide
uucuccuuuugcuuuaaag

SEQ ID NO: 3174223 - RNA, 19 nt, Artificial Sequence
  Description of Artificial Sequence: Synthetic oligonucleotide
gagacaaagcuguuuuggg

SEQ ID NO: 3174224 - RNA, 19 nt, Artificial Sequence
  Description of Artificial Sequence: Synthetic oligonucleotide
aacauuguggacauagcug

SEQ ID NO: 3174225 - RNA, 19 nt, Artificial Sequence
  Description of Artificial Sequence: Synthetic oligonucleotide
aaaacggagugcaggagac

SEQ ID NO: 3174226 - RNA, 19 nt, Artificial Sequence
  Description of Artificial Sequence: Synthetic oligonucleotide
uucuuuggagacaaagcug

SEQ ID NO: 3174227 - RNA, 19 nt, Artificial Sequence
  Description of Artificial Sequence: Synthetic oligonucleotide
uguuccauaucucccaccu

SEQ ID NO: 3174228 - RNA, 19 nt, Artificial Sequence
  Description of Artificial Sequence: Synthetic oligonucleotide
uuuguuggaaaauggcugu

SEQ ID NO: 3174229 - RNA, 19 nt, Artificial Sequence
  Description of Artificial Sequence: Synthetic oligonucleotide
ugaaaguucaauuguggau

SEQ ID NO: 3174230 - RNA, 19 nt, Artificial Sequence
  Description of Artificial Sequence: Synthetic oligonucleotide
auuauuaaggcuguuacua

SEQ ID NO: 3174231 - RNA, 19 nt, Artificial Sequence
  Description of Artificial Sequence: Synthetic oligonucleotide
uacuauauugcagauauuu

SEQ ID NO: 3174232 - RNA, 19 nt, Artificial Sequence
  Description of Artificial Sequence: Synthetic oligonucleotide
guuacuauauugcagauau

SEQ ID NO: 3174233 - RNA, 19 nt, Artificial Sequence
  Description of Artificial Sequence: Synthetic oligonucleotide
ucuagaguccugcaugucu

SEQ ID NO: 3174234 - RNA, 19 nt, Artificial Sequence
  Description of Artificial Sequence: Synthetic oligonucleotide
cuucacacuuuccugaaag

SEQ ID NO: 3174235 - RNA, 19 nt, Artificial Sequence
  Description of Artificial Sequence: Synthetic oligonucleotide
aaaacucuuucuccuuuug

SEQ ID NO: 3174236 - RNA, 19 nt, Artificial Sequence
  Description of Artificial Sequence: Synthetic oligonucleotide
ugauuugcucuuuuguuac

SEQ ID NO: 3174237 - RNA, 19 nt, Artificial Sequence
  Description of Artificial Sequence: Synthetic oligonucleotide
aauggcugucccaacaguc

SEQ ID NO: 3174238 - RNA, 19 nt, Artificial Sequence
  Description of Artificial Sequence: Synthetic oligonucleotide
ugucccaacagucuagagu

SEQ ID NO: 3174239 - RNA, 19 nt, Artificial Sequence
  Description of Artificial Sequence: Synthetic oligonucleotide
gacaaagcuguuuuggguc

SEQ ID NO: 3174240 - RNA, 19 nt, Artificial Sequence
  Description of Artificial Sequence: Synthetic oligonucleotide
caggagacuauccauagug

SEQ ID NO: 3174241 - RNA, 19 nt, Artificial Sequence
  Description of Artificial Sequence: Synthetic oligonucleotide
uucugauuugcucuuuugu

SEQ ID NO: 3174242 - RNA, 19 nt, Artificial Sequence
  Description of Artificial Sequence: Synthetic oligonucleotide
aggguuuucugauuugcuc

SEQ ID NO: 3174243 - RNA, 19 nt, Artificial Sequence
  Description of Artificial Sequence: Synthetic oligonucleotide
uauuauuaaggcuguuacu

SEQ ID NO: 3174244 - RNA, 19 nt, Artificial Sequence
  Description of Artificial Sequence: Synthetic oligonucleotide
uccugaaaguucaauugug

SEQ ID NO: 3174245 - RNA, 19 nt, Artificial Sequence
  Description of Artificial Sequence: Synthetic oligonucleotide
uuuuguuacucucucucuc

SEQ ID NO: 3174246 - RNA, 19 nt, Artificial Sequence
  Description of Artificial Sequence: Synthetic oligonucleotide
guuuguuggaaaauggcug

SEQ ID NO: 3174247 - RNA, 19 nt, Artificial Sequence
  Description of Artificial Sequence: Synthetic oligonucleotide
uuccugaaaguucaauugu

SEQ ID NO: 3174248 - RNA, 19 nt, Artificial Sequence
  Description of Artificial Sequence: Synthetic oligonucleotide
gucccaacagucuagaguc

SEQ ID NO: 3174249 - RNA, 19 nt, Artificial Sequence
  Description of Artificial Sequence: Synthetic oligonucleotide
agcuaucuucuuuggagac

SEQ ID NO: 3174250 - RNA, 19 nt, Artificial Sequence
  Description of Artificial Sequence: Synthetic oligonucleotide
cuguuuugggucuucacac

SEQ ID NO: 3174251 - RNA, 19 nt, Artificial Sequence
  Description of Artificial Sequence: Synthetic oligonucleotide
ugucuguuccauaucuccc

SEQ ID NO: 3174252 - RNA, 19 nt, Artificial Sequence
  Description of Artificial Sequence: Synthetic oligonucleotide
aauguauuauuaaggcugu

SEQ ID NO: 3174253 - RNA, 19 nt, Artificial Sequence
  Description of Artificial Sequence: Synthetic oligonucleotide
uuuguuacucucucucucu

SEQ ID NO: 3174254 - RNA, 19 nt, Artificial Sequence
  Description of Artificial Sequence: Synthetic oligonucleotide
uccauaguggucacagagc

SEQ ID NO: 3174255 - RNA, 19 nt, Artificial Sequence
  Description of Artificial Sequence: Synthetic oligonucleotide
ugggucuucacacuuuccu

SEQ ID NO: 3174256 - RNA, 19 nt, Artificial Sequence
  Description of Artificial Sequence: Synthetic oligonucleotide
guggacauagcugagaaca

SEQ ID NO: 3174257 - RNA, 19 nt, Artificial Sequence
  Description of Artificial Sequence: Synthetic oligonucleotide
cuauccauaguggucacag

SEQ ID NO: 3174258 - RNA, 19 nt, Artificial Sequence
  Description of Artificial Sequence: Synthetic oligonucleotide
ugcaggagacuauccauag

SEQ ID NO: 3174259 - RNA, 19 nt, Artificial Sequence
  Description of Artificial Sequence: Synthetic oligonucleotide
uuggagacaaagcuguuuu

SEQ ID NO: 3174260 - RNA, 19 nt, Artificial Sequence
  Description of Artificial Sequence: Synthetic oligonucleotide
ugagaacagcuguagaaaa

SEQ ID NO: 3174261 - RNA, 19 nt, Artificial Sequence
  Description of Artificial Sequence: Synthetic oligonucleotide
ucugauuugcucuuuuguu

SEQ ID NO: 3174262 - RNA, 19 nt, Artificial Sequence
  Description of Artificial Sequence: Synthetic oligonucleotide
aaccuaaggguuuucugau

SEQ ID NO: 3174263 - RNA, 19 nt, Artificial Sequence
  Description of Artificial Sequence: Synthetic oligonucleotide
uauggaaguugaugaaaca

SEQ ID NO: 3174264 - RNA, 19 nt, Artificial Sequence
  Description of Artificial Sequence: Synthetic oligonucleotide
uuaaaacucuuucuccuuu

SEQ ID NO: 3174265 - RNA, 19 nt, Artificial Sequence
  Description of Artificial Sequence: Synthetic oligonucleotide
gaaaauggcugucccaaca

SEQ ID NO: 3174266 - RNA, 19 nt, Artificial Sequence
  Description of Artificial Sequence: Synthetic oligonucleotide
cuuucugucucucucuuuc

SEQ ID NO: 3174267 - RNA, 19 nt, Artificial Sequence
  Description of Artificial Sequence: Synthetic oligonucleotide
uguauuauuaaggcuguua

SEQ ID NO: 3174268 - RNA, 19 nt, Artificial Sequence
  Description of Artificial Sequence: Synthetic oligonucleotide
cacacuuuccugaaaguuc

SEQ ID NO: 3174269 - RNA, 19 nt, Artificial Sequence
  Description of Artificial Sequence: Synthetic oligonucleotide
uggaaguugaugaaacauu

SEQ ID NO: 3174270 - RNA, 19 nt, Artificial Sequence
  Description of Artificial Sequence: Synthetic oligonucleotide
cuccuuuugcuuuaaagca

SEQ ID NO: 3174271 - RNA, 19 nt, Artificial Sequence
  Description of Artificial Sequence: Synthetic oligonucleotide
guuggaaaauggcuguccc

SEQ ID NO: 3174272 - RNA, 19 nt, Artificial Sequence
  Description of Artificial Sequence: Synthetic oligonucleotide
uaaggguuuucugauuugc

SEQ ID NO: 3174273 - RNA, 19 nt, Artificial Sequence
  Description of Artificial Sequence: Synthetic oligonucleotide
aucuucuuuggagacaaag

SEQ ID NO: 3174274 - RNA, 19 nt, Artificial Sequence
  Description of Artificial Sequence: Synthetic oligonucleotide
uuguggacauagcugagaa

SEQ ID NO: 3174275 - RNA, 19 nt, Artificial Sequence
  Description of Artificial Sequence: Synthetic oligonucleotide
cacagagcuaucuucuuug

SEQ ID NO: 3174276 - RNA, 19 nt, Artificial Sequence
  Description of Artificial Sequence: Synthetic oligonucleotide
uccuuuugcuuuaaagcaa

SEQ ID NO: 3174277 - RNA, 19 nt, Artificial Sequence
  Description of Artificial Sequence: Synthetic oligonucleotide
agacuauccauagugguca

SEQ ID NO: 3174278 - RNA, 19 nt, Artificial Sequence
  Description of Artificial Sequence: Synthetic oligonucleotide
uuucugauuugcucuuuug

SEQ ID NO: 3174279 - RNA, 19 nt, Artificial Sequence
  Description of Artificial Sequence: Synthetic oligonucleotide
aaaguucaauuguggauuu

SEQ ID NO: 3174280 - RNA, 19 nt, Artificial Sequence
  Description of Artificial Sequence: Synthetic oligonucleotide
auaguggucacagagcuau

SEQ ID NO: 3174281 - RNA, 19 nt, Artificial Sequence
  Description of Artificial Sequence: Synthetic oligonucleotide
agacaaagcuguuuugggu

SEQ ID NO: 3174282 - RNA, 19 nt, Artificial Sequence
  Description of Artificial Sequence: Synthetic oligonucleotide
ugcucuuuuguuacucucu

SEQ ID NO: 3174283 - RNA, 19 nt, Artificial Sequence
  Description of Artificial Sequence: Synthetic oligonucleotide
auuugcucuuuuguuacuc

SEQ ID NO: 3174284 - RNA, 19 nt, Artificial Sequence
  Description of Artificial Sequence: Synthetic oligonucleotide
aauuguaccaaugucaugc

SEQ ID NO: 3174285 - RNA, 19 nt, Artificial Sequence
  Description of Artificial Sequence: Synthetic oligonucleotide
aguauaaaaggacucaaag

SEQ ID NO: 3174286 - RNA, 19 nt, Artificial Sequence
  Description of Artificial Sequence: Synthetic oligonucleotide
uuauuucucauaaauguug

SEQ ID NO: 3174287 - RNA, 19 nt, Artificial Sequence
  Description of Artificial Sequence: Synthetic oligonucleotide
ugaauaaagaacugaaaca

SEQ ID NO: 3174288 - RNA, 19 nt, Artificial Sequence
  Description of Artificial Sequence: Synthetic oligonucleotide
aaaauucuuuauuaaucag

SEQ ID NO: 3174289 - RNA, 19 nt, Artificial Sequence
  Description of Artificial Sequence: Synthetic oligonucleotide
auuuucuucugauucaagg

SEQ ID NO: 3174290 - RNA, 19 nt, Artificial Sequence
  Description of Artificial Sequence: Synthetic oligonucleotide
aaucuaaaguguuaaguca

SEQ ID NO: 3174291 - RNA, 19 nt, Artificial Sequence
  Description of Artificial Sequence: Synthetic oligonucleotide
cuugcuuauaaccaguucc

SEQ ID NO: 3174292 - RNA, 19 nt, Artificial Sequence
  Description of Artificial Sequence: Synthetic oligonucleotide
aaccuuuuaucugucaacc

SEQ ID NO: 3174293 - RNA, 19 nt, Artificial Sequence
  Description of Artificial Sequence: Synthetic oligonucleotide
ucguaauccauauuggucc

SEQ ID NO: 3174294 - RNA, 19 nt, Artificial Sequence
  Description of Artificial Sequence: Synthetic oligonucleotide
auaaagaacugaaacaaac

SEQ ID NO: 3174295 - RNA, 19 nt, Artificial Sequence
  Description of Artificial Sequence: Synthetic oligonucleotide
aaucgcuggacguuuugcc

SEQ ID NO: 3174296 - RNA, 19 nt, Artificial Sequence
  Description of Artificial Sequence: Synthetic oligonucleotide
aggaauguugaacauauug

SEQ ID NO: 3174297 - RNA, 19 nt, Artificial Sequence
  Description of Artificial Sequence: Synthetic oligonucleotide
uaaucuaaaguguuaaguc

SEQ ID NO: 3174298 - RNA, 19 nt, Artificial Sequence
  Description of Artificial Sequence: Synthetic oligonucleotide
uaguguuuugugaagguag

SEQ ID NO: 3174299 - RNA, 19 nt, Artificial Sequence
  Description of Artificial Sequence: Synthetic oligonucleotide
uucuaacuugcuuauaacc

SEQ ID NO: 3174300 - RNA, 19 nt, Artificial Sequence
  Description of Artificial Sequence: Synthetic oligonucleotide
ucggaagacaauccaagcg

SEQ ID NO: 3174301 - RNA, 19 nt, Artificial Sequence
  Description of Artificial Sequence: Synthetic oligonucleotide
uuaaguagcuuucuaaaau

SEQ ID NO: 3174302 - RNA, 19 nt, Artificial Sequence
  Description of Artificial Sequence: Synthetic oligonucleotide
aacaggggagcgcaugucc

SEQ ID NO: 3174303 - RNA, 19 nt, Artificial Sequence
  Description of Artificial Sequence: Synthetic oligonucleotide
uuauccuugagcucuacug

SEQ ID NO: 3174304 - RNA, 19 nt, Artificial Sequence
  Description of Artificial Sequence: Synthetic oligonucleotide
aguaauaagacagauagua

SEQ ID NO: 3174305 - RNA, 19 nt, Artificial Sequence
  Description of Artificial Sequence: Synthetic oligonucleotide
uuaagcugcuauuuuauga

SEQ ID NO: 3174306 - RNA, 19 nt, Artificial Sequence
  Description of Artificial Sequence: Synthetic oligonucleotide
uaaagaacugaaacaaacu

SEQ ID NO: 3174307 - RNA, 19 nt, Artificial Sequence
  Description of Artificial Sequence: Synthetic oligonucleotide
uauugguccagcgaguugg

SEQ ID NO: 3174308 - RNA, 19 nt, Artificial Sequence
  Description of Artificial Sequence: Synthetic oligonucleotide
aucucugucagguacugac

SEQ ID NO: 3174309 - RNA, 19 nt, Artificial Sequence
  Description of Artificial Sequence: Synthetic oligonucleotide
augaggguugaagagaugc

SEQ ID NO: 3174310 - RNA, 19 nt, Artificial Sequence
  Description of Artificial Sequence: Synthetic oligonucleotide
aacugaaacaaacuggauu

SEQ ID NO: 3174311 - RNA, 19 nt, Artificial Sequence
  Description of Artificial Sequence: Synthetic oligonucleotide
uuucuaaaauucuuuauua

SEQ ID NO: 3174312 - RNA, 19 nt, Artificial Sequence
  Description of Artificial Sequence: Synthetic oligonucleotide
acugaaacaaacuggauua

SEQ ID NO: 3174313 - RNA, 19 nt, Artificial Sequence
  Description of Artificial Sequence: Synthetic oligonucleotide
augaccacagaauccagac

SEQ ID NO: 3174314 - RNA, 19 nt, Artificial Sequence
  Description of Artificial Sequence: Synthetic oligonucleotide
cauuucagugucuuggagg

SEQ ID NO: 3174315 - RNA, 19 nt, Artificial Sequence
  Description of Artificial Sequence: Synthetic oligonucleotide
uguaccaaugucaugcgcu

SEQ ID NO: 3174316 - RNA, 19 nt, Artificial Sequence
  Description of Artificial Sequence: Synthetic oligonucleotide
uaucguuucuccaagacuu

SEQ ID NO: 3174317 - RNA, 19 nt, Artificial Sequence
  Description of Artificial Sequence: Synthetic oligonucleotide
uacuucaaauauaggaacc

SEQ ID NO: 3174318 - RNA, 19 nt, Artificial Sequence
  Description of Artificial Sequence: Synthetic oligonucleotide
aaguguuaagucaaaguag

SEQ ID NO: 3174319 - RNA, 19 nt, Artificial Sequence
  Description of Artificial Sequence: Synthetic oligonucleotide
aauccagacuugcuguuuc

SEQ ID NO: 3174320 - RNA, 19 nt, Artificial Sequence
  Description of Artificial Sequence: Synthetic oligonucleotide
uuggaggaaaagcaaagca

SEQ ID NO: 3174321 - RNA, 19 nt, Artificial Sequence
  Description of Artificial Sequence: Synthetic oligonucleotide
aauccauauugguccagcg

SEQ ID NO: 3174322 - RNA, 19 nt, Artificial Sequence
  Description of Artificial Sequence: Synthetic oligonucleotide
cucauaaauguugugaaag

SEQ ID NO: 3174323 - RNA, 19 nt, Artificial Sequence
  Description of Artificial Sequence: Synthetic oligonucleotide
auaaggaagcugucaagac

SEQ ID NO: 3174324 - RNA, 19 nt, Artificial Sequence
  Description of Artificial Sequence: Synthetic oligonucleotide
gauuacuuaguguuuugug

SEQ ID NO: 3174325 - RNA, 19 nt, Artificial Sequence
  Description of Artificial Sequence: Synthetic oligonucleotide
uaacauuuuaagcugcuau

SEQ ID NO: 3174326 - RNA, 19 nt, Artificial Sequence
  Description of Artificial Sequence: Synthetic oligonucleotide
uugaguaucugauauuuuc

SEQ ID NO: 3174327 - RNA, 19 nt, Artificial Sequence
  Description of Artificial Sequence: Synthetic oligonucleotide
uauuucucauaaauguugu

SEQ ID NO: 3174328 - RNA, 19 nt, Artificial Sequence
  Description of Artificial Sequence: Synthetic oligonucleotide
gaagcaguacuucugugcc

SEQ ID NO: 3174329 - RNA, 19 nt, Artificial Sequence
  Description of Artificial Sequence: Synthetic oligonucleotide
uuaaucagcuauuagcuuu

SEQ ID NO: 3174330 - RNA, 19 nt, Artificial Sequence
  Description of Artificial Sequence: Synthetic oligonucleotide
cuaucucucucuauuacag

SEQ ID NO: 3174331 - RNA, 19 nt, Artificial Sequence
  Description of Artificial Sequence: Synthetic oligonucleotide
uggaguaaaacucgggcac

SEQ ID NO: 3174332 - RNA, 19 nt, Artificial Sequence
  Description of Artificial Sequence: Synthetic oligonucleotide
ucuauuacagaagaauuuc

SEQ ID NO: 3174333 - RNA, 19 nt, Artificial Sequence
  Description of Artificial Sequence: Synthetic oligonucleotide
uccugaauagcuaugcuau

SEQ ID NO: 3174334 - RNA, 19 nt, Artificial Sequence
  Description of Artificial Sequence: Synthetic oligonucleotide
ugcuauuuuaugacaauaa

SEQ ID NO: 3174335 - RNA, 19 nt, Artificial Sequence
  Description of Artificial Sequence: Synthetic oligonucleotide
uuuaaguagcuuucuaaaa

SEQ ID NO: 3174336 - RNA, 19 nt, Artificial Sequence
  Description of Artificial Sequence: Synthetic oligonucleotide
ucauaaauguugugaaaga

SEQ ID NO: 3174337 - RNA, 19 nt, Artificial Sequence
  Description of Artificial Sequence: Synthetic oligonucleotide
gacuuuucgucccuugagg

SEQ ID NO: 3174338 - RNA, 19 nt, Artificial Sequence
  Description of Artificial Sequence: Synthetic oligonucleotide
aagcaaagcaacaaacuug

SEQ ID NO: 3174339 - RNA, 19 nt, Artificial Sequence
  Description of Artificial Sequence: Synthetic oligonucleotide
uuuuaagcugcuauuuuau

SEQ ID NO: 3174340 - RNA, 19 nt, Artificial Sequence
  Description of Artificial Sequence: Synthetic oligonucleotide
acagaauccagacuugcug

SEQ ID NO: 3174341 - RNA, 19 nt, Artificial Sequence
  Description of Artificial Sequence: Synthetic oligonucleotide
uccgaaauuguaccaaugu

SEQ ID NO: 3174342 - RNA, 19 nt, Artificial Sequence
  Description of Artificial Sequence: Synthetic oligonucleotide
aagacagauaguacaacag

SEQ ID NO: 3174343 - RNA, 19 nt, Artificial Sequence
  Description of Artificial Sequence: Synthetic oligonucleotide
gucaaaguaguuuacuuca

SEQ ID NO: 3174344 - RNA, 19 nt, Artificial Sequence
  Description of Artificial Sequence: Synthetic oligonucleotide
guauaaaaggacucaaaga

SEQ ID NO: 3174345 - RNA, 19 nt, Artificial Sequence
  Description of Artificial Sequence: Synthetic oligonucleotide
ucuuggaguaaaacucggg

SEQ ID NO: 3174346 - RNA, 19 nt, Artificial Sequence
  Description of Artificial Sequence: Synthetic oligonucleotide
aacauuuuaagcugcuauu

SEQ ID NO: 3174347 - RNA, 19 nt, Artificial Sequence
  Description of Artificial Sequence: Synthetic oligonucleotide
ucuuuccaguaccacaugc

SEQ ID NO: 3174348 - RNA, 19 nt, Artificial Sequence
  Description of Artificial Sequence: Synthetic oligonucleotide
auugacauuuucuccaagu

SEQ ID NO: 3174349 - RNA, 19 nt, Artificial Sequence
  Description of Artificial Sequence: Synthetic oligonucleotide
aagacuuucagugacuuuu

SEQ ID NO: 3174350 - RNA, 19 nt, Artificial Sequence
  Description of Artificial Sequence: Synthetic oligonucleotide
guugucaugaccaagucca

SEQ ID NO: 3174351 - RNA, 19 nt, Artificial Sequence
  Description of Artificial Sequence: Synthetic oligonucleotide
ggaauguugaacauauugg

SEQ ID NO: 3174352 - RNA, 19 nt, Artificial Sequence
  Description of Artificial Sequence: Synthetic oligonucleotide
uuggaguaaaacucgggca

SEQ ID NO: 3174353 - RNA, 19 nt, Artificial Sequence
  Description of Artificial Sequence: Synthetic oligonucleotide
uuuaacauuuuaagcugcu

SEQ ID NO: 3174354 - RNA, 19 nt, Artificial Sequence
  Description of Artificial Sequence: Synthetic oligonucleotide
ugcauguacagaaaguaua

SEQ ID NO: 3174355 - RNA, 19 nt, Artificial Sequence
  Description of Artificial Sequence: Synthetic oligonucleotide
uugcuuauaaccaguucca

SEQ ID NO: 3174356 - RNA, 19 nt, Artificial Sequence
  Description of Artificial Sequence: Synthetic oligonucleotide
cagauaguacaacagugcc

SEQ ID NO: 3174357 - RNA, 19 nt, Artificial Sequence
  Description of Artificial Sequence: Synthetic oligonucleotide
aaggaagcaguacuucugu

SEQ ID NO: 3174358 - RNA, 19 nt, Artificial Sequence
  Description of Artificial Sequence: Synthetic oligonucleotide
aaaacaggggagcgcaugu

SEQ ID NO: 3174359 - RNA, 19 nt, Artificial Sequence
  Description of Artificial Sequence: Synthetic oligonucleotide
uuaagucaaaguaguuuac

SEQ ID NO: 3174360 - RNA, 19 nt, Artificial Sequence
  Description of Artificial Sequence: Synthetic oligonucleotide
acuuaguguuuugugaagg

SEQ ID NO: 3174361 - RNA, 19 nt, Artificial Sequence
  Description of Artificial Sequence: Synthetic oligonucleotide
uguuuugugaagguagugu

SEQ ID NO: 3174362 - RNA, 19 nt, Artificial Sequence
  Description of Artificial Sequence: Synthetic oligonucleotide
uagacaaaacaggggagcg

SEQ ID NO: 3174363 - RNA, 19 nt, Artificial Sequence
  Description of Artificial Sequence: Synthetic oligonucleotide
ucauccagcgugauauugc

SEQ ID NO: 3174364 - RNA, 19 nt, Artificial Sequence
  Description of Artificial Sequence: Synthetic oligonucleotide
gcuauuagcuuuuaaaaga

SEQ ID NO: 3174365 - RNA, 19 nt, Artificial Sequence
  Description of Artificial Sequence: Synthetic oligonucleotide
aaacuggauuacuuagugu

SEQ ID NO: 3174366 - RNA, 19 nt, Artificial Sequence
  Description of Artificial Sequence: Synthetic oligonucleotide
ugguccagcgaguuggagg

SEQ ID NO: 3174367 - RNA, 19 nt, Artificial Sequence
  Description of Artificial Sequence: Synthetic oligonucleotide
agacagauaguacaacagu

SEQ ID NO: 3174368 - RNA, 19 nt, Artificial Sequence
  Description of Artificial Sequence: Synthetic oligonucleotide
aggaaccugaauaaagaac

SEQ ID NO: 3174369 - RNA, 19 nt, Artificial Sequence
  Description of Artificial Sequence: Synthetic oligonucleotide
auuuuaagcugcuauuuua

SEQ ID NO: 3174370 - RNA, 19 nt, Artificial Sequence
  Description of Artificial Sequence: Synthetic oligonucleotide
aucguaauccauauugguc

SEQ ID NO: 3174371 - RNA, 19 nt, Artificial Sequence
  Description of Artificial Sequence: Synthetic oligonucleotide
aguacaacagugccauaag

SEQ ID NO: 3174372 - RNA, 19 nt, Artificial Sequence
  Description of Artificial Sequence: Synthetic oligonucleotide
aguguuaagucaaaguagu

SEQ ID NO: 3174373 - RNA, 19 nt, Artificial Sequence
  Description of Artificial Sequence: Synthetic oligonucleotide
uuauccgccaugcccacgc

SEQ ID NO: 3174374 - RNA, 19 nt, Artificial Sequence
  Description of Artificial Sequence: Synthetic oligonucleotide
gucaugaccaaguccagug

SEQ ID NO: 3174375 - RNA, 19 nt, Artificial Sequence
  Description of Artificial Sequence: Synthetic oligonucleotide
auuguaccaaugucaugcg

SEQ ID NO: 3174376 - RNA, 19 nt, Artificial Sequence
  Description of Artificial Sequence: Synthetic oligonucleotide
ucaagacucuuauuucuca

SEQ ID NO: 3174377 - RNA, 19 nt, Artificial Sequence
  Description of Artificial Sequence: Synthetic oligonucleotide
agugccauaaggaagcugu

SEQ ID NO: 3174378 - RNA, 19 nt, Artificial Sequence
  Description of Artificial Sequence: Synthetic oligonucleotide
guacaacagugccauaagg

SEQ ID NO: 3174379 - RNA, 19 nt, Artificial Sequence
  Description of Artificial Sequence: Synthetic oligonucleotide
auaagacagauaguacaac

SEQ ID NO: 3174380 - RNA, 19 nt, Artificial Sequence
  Description of Artificial Sequence: Synthetic oligonucleotide
auaucguuucuccaagacu

SEQ ID NO: 3174381 - RNA, 19 nt, Artificial Sequence
  Description of Artificial Sequence: Synthetic oligonucleotide
gagggaaaccuuuuaucug

SEQ ID NO: 3174382 - RNA, 19 nt, Artificial Sequence
  Description of Artificial Sequence: Synthetic oligonucleotide
ugugaagguaguguuguca

SEQ ID NO: 3174383 - RNA, 19 nt, Artificial Sequence
  Description of Artificial Sequence: Synthetic oligonucleotide
agacucuuauuucucauaa

SEQ ID NO: 3174384 - RNA, 19 nt, Artificial Sequence
  Description of Artificial Sequence: Synthetic oligonucleotide
uuuacauaaauacaggccg

SEQ ID NO: 3174385 - RNA, 19 nt, Artificial Sequence
  Description of Artificial Sequence: Synthetic oligonucleotide
uguaguuguccacacaacg

SEQ ID NO: 3174386 - RNA, 19 nt, Artificial Sequence
  Description of Artificial Sequence: Synthetic oligonucleotide
auuuacauaaauacaggcc

SEQ ID NO: 3174387 - RNA, 19 nt, Artificial Sequence
  Description of Artificial Sequence: Synthetic oligonucleotide
cauuuacauaaauacaggc

SEQ ID NO: 3174388 - RNA, 19 nt, Artificial Sequence
  Description of Artificial Sequence: Synthetic oligonucleotide
uuacauaaauacaggccgg

SEQ ID NO: 3174389 - RNA, 19 nt, Artificial Sequence
  Description of Artificial Sequence: Synthetic oligonucleotide
ugaagcuacccauaaauac

SEQ ID NO: 3174390 - RNA, 19 nt, Artificial Sequence
  Description of Artificial Sequence: Synthetic oligonucleotide
uaaacgguggccuggagcc

SEQ ID NO: 3174391 - RNA, 19 nt, Artificial Sequence
  Description of Artificial Sequence: Synthetic oligonucleotide
uaaacauucggcuggcugc

SEQ ID NO: 3174392 - RNA, 19 nt, Artificial Sequence
  Description of Artificial Sequence: Synthetic oligonucleotide
aaaggcagagacugacggc

SEQ ID NO: 3174393 - RNA, 19 nt, Artificial Sequence
  Description of Artificial Sequence: Synthetic oligonucleotide
uuuccagguaaacauucgg

SEQ ID NO: 3174394 - RNA, 19 nt, Artificial Sequence
  Description of Artificial Sequence: Synthetic oligonucleotide
aaggcagagacugacggcg

SEQ ID NO: 3174395 - RNA, 19 nt, Artificial Sequence
  Description of Artificial Sequence: Synthetic oligonucleotide
uguguaguuguccacacaa

SEQ ID NO: 3174396 - RNA, 19 nt, Artificial Sequence
  Description of Artificial Sequence: Synthetic oligonucleotide
uucuccauggccacaaggc

SEQ ID NO: 3174397 - RNA, 19 nt, Artificial Sequence
  Description of Artificial Sequence: Synthetic oligonucleotide
uaagcuucugggauggggc

SEQ ID NO: 3174398 - RNA, 19 nt, Artificial Sequence
  Description of Artificial Sequence: Synthetic oligonucleotide
uaguuguccacacaacggc

SEQ ID NO: 3174399 - RNA, 19 nt, Artificial Sequence
  Description of Artificial Sequence: Synthetic oligonucleotide
auagcugugcgucuauccg

SEQ ID NO: 3174400 - RNA, 19 nt, Artificial Sequence
  Description of Artificial Sequence: Synthetic oligonucleotide
uacccauaaauacauuuac

SEQ ID NO: 3174401 - RNA, 19 nt, Artificial Sequence
  Description of Artificial Sequence: Synthetic oligonucleotide
uacguuuccagguaaacau

SEQ ID NO: 3174402 - RNA, 19 nt, Artificial Sequence
  Description of Artificial Sequence: Synthetic oligonucleotide
auaaauacaggccggacua

SEQ ID NO: 3174403 - RNA, 19 nt, Artificial Sequence
  Description of Artificial Sequence: Synthetic oligonucleotide
ucgguaccaacccaggucc

SEQ ID NO: 3174404 - RNA, 19 nt, Artificial Sequence
  Description of Artificial Sequence: Synthetic oligonucleotide
agacccuuucuccauggcc

SEQ ID NO: 3174405 - RNA, 19 nt, Artificial Sequence
  Description of Artificial Sequence: Synthetic oligonucleotide
uuccagguaaacauucggc

SEQ ID NO: 3174406 - RNA, 19 nt, Artificial Sequence
  Description of Artificial Sequence: Synthetic oligonucleotide
gauggagucgcagucagcc

SEQ ID NO: 3174407 - RNA, 19 nt, Artificial Sequence
  Description of Artificial Sequence: Synthetic oligonucleotide
ugggcaaaggcagagacug

SEQ ID NO: 3174408 - RNA, 19 nt, Artificial Sequence
  Description of Artificial Sequence: Synthetic oligonucleotide
cagguaaacauucggcugg

SEQ ID NO: 3174409 - RNA, 19 nt, Artificial Sequence
  Description of Artificial Sequence: Synthetic oligonucleotide
cuuguguccacuugagacc

SEQ ID NO: 3174410 - RNA, 19 nt, Artificial Sequence
  Description of Artificial Sequence: Synthetic oligonucleotide
aaauacaggccggacuacg

SEQ ID NO: 3174411 - RNA, 19 nt, Artificial Sequence
  Description of Artificial Sequence: Synthetic oligonucleotide
agaaggaccugacaggcug

SEQ ID NO: 3174412 - RNA, 19 nt, Artificial Sequence
  Description of Artificial Sequence: Synthetic oligonucleotide
acggccuagcaccagaagg

SEQ ID NO: 3174413 - RNA, 19 nt, Artificial Sequence
  Description of Artificial Sequence: Synthetic oligonucleotide
gauagcugugcgucuaucc

SEQ ID NO: 3174414 - RNA, 19 nt, Artificial Sequence
  Description of Artificial Sequence: Synthetic oligonucleotide
uccagguaaacauucggcu

SEQ ID NO: 3174415 - RNA, 19 nt, Artificial Sequence
  Description of Artificial Sequence: Synthetic oligonucleotide
ugugcgucuauccgcagcc

SEQ ID NO: 3174416 - RNA, 19 nt, Artificial Sequence
  Description of Artificial Sequence: Synthetic oligonucleotide
agagguguggauccacugg

SEQ ID NO: 3174417 - RNA, 19 nt, Artificial Sequence
  Description of Artificial Sequence: Synthetic oligonucleotide
cuugcuuacuccugccucg

SEQ ID NO: 3174418 - RNA, 19 nt, Artificial Sequence
  Description of Artificial Sequence: Synthetic oligonucleotide
accagaaggaccugacagg

SEQ ID NO: 3174419 - RNA, 19 nt, Artificial Sequence
  Description of Artificial Sequence: Synthetic oligonucleotide
guaaacauucggcuggcug

SEQ ID NO: 3174420 - RNA, 19 nt, Artificial Sequence
  Description of Artificial Sequence: Synthetic oligonucleotide
aauggcaagugaagcuacc

SEQ ID NO: 3174421 - RNA, 19 nt, Artificial Sequence
  Description of Artificial Sequence: Synthetic oligonucleotide
guaguuguccacacaacgg

SEQ ID NO: 3174422 - RNA, 19 nt, Artificial Sequence
  Description of Artificial Sequence: Synthetic oligonucleotide
ucugggauggggcagcuuc

SEQ ID NO: 3174423 - RNA, 19 nt, Artificial Sequence
  Description of Artificial Sequence: Synthetic oligonucleotide
caccagaaggaccugacag

SEQ ID NO: 3174424 - RNA, 19 nt, Artificial Sequence
  Description of Artificial Sequence: Synthetic oligonucleotide
uccgcagacagccauggcu

SEQ ID NO: 3174425 - RNA, 19 nt, Artificial Sequence
  Description of Artificial Sequence: Synthetic oligonucleotide
uggagucgcagucagcccc

SEQ ID NO: 3174426 - RNA, 19 nt, Artificial Sequence
  Description of Artificial Sequence: Synthetic oligonucleotide
ugcaggauccccauguaaa

SEQ ID NO: 3174427 - RNA, 19 nt, Artificial Sequence
  Description of Artificial Sequence: Synthetic oligonucleotide
gaagcuacccauaaauaca

SEQ ID NO: 3174428 - RNA, 19 nt, Artificial Sequence
  Description of Artificial Sequence: Synthetic oligonucleotide
cuuccagcugaccagggcc

SEQ ID NO: 3174429 - RNA, 19 nt, Artificial Sequence
  Description of Artificial Sequence: Synthetic oligonucleotide
ucuccauggccacaaggcc

SEQ ID NO: 3174430 - RNA, 19 nt, Artificial Sequence
  Description of Artificial Sequence: Synthetic oligonucleotide
gagguguggauccacuggc

SEQ ID NO: 3174431 - RNA, 19 nt, Artificial Sequence
  Description of Artificial Sequence: Synthetic oligonucleotide
cacagugcagggcacagcc

SEQ ID NO: 3174432 - RNA, 19 nt, Artificial Sequence
  Description of Artificial Sequence: Synthetic oligonucleotide
ucugcaauccaggucacac

SEQ ID NO: 3174433 - RNA, 19 nt, Artificial Sequence
  Description of Artificial Sequence: Synthetic oligonucleotide
aaggccuugguggauagcu

SEQ ID NO: 3174434 - RNA, 19 nt, Artificial Sequence
  Description of Artificial Sequence: Synthetic oligonucleotide
uccccacuaagcuucuggg

SEQ ID NO: 3174435 - RNA, 19 nt, Artificial Sequence
  Description of Artificial Sequence: Synthetic oligonucleotide
uguguggccacuucccggc

SEQ ID NO: 3174436 - RNA, 19 nt, Artificial Sequence
  Description of Artificial Sequence: Synthetic oligonucleotide
auggcaagugaagcuaccc

SEQ ID NO: 3174437 - RNA, 19 nt, Artificial Sequence
  Description of Artificial Sequence: Synthetic oligonucleotide
cuuacuccugccucgguac

SEQ ID NO: 3174438 - RNA, 19 nt, Artificial Sequence
  Description of Artificial Sequence: Synthetic oligonucleotide
cauggcuuugcagaagagg

SEQ ID NO: 3174439 - RNA, 19 nt, Artificial Sequence
  Description of Artificial Sequence: Synthetic oligonucleotide
ucacacguggcuccugugc

SEQ ID NO: 3174440 - RNA, 19 nt, Artificial Sequence
  Description of Artificial Sequence: Synthetic oligonucleotide
cuugguggauagcugugcg

SEQ ID NO: 3174441 - RNA, 19 nt, Artificial Sequence
  Description of Artificial Sequence: Synthetic oligonucleotide
acuugcuccccacuaagcu

SEQ ID NO: 3174442 - RNA, 19 nt, Artificial Sequence
  Description of Artificial Sequence: Synthetic oligonucleotide
cacuugagacccuuucucc

SEQ ID NO: 3174443 - RNA, 19 nt, Artificial Sequence
  Description of Artificial Sequence: Synthetic oligonucleotide
acuacguuuccagguaaac

SEQ ID NO: 3174444 - RNA, 19 nt, Artificial Sequence
  Description of Artificial Sequence: Synthetic oligonucleotide
acauucggcuggcugcagc

SEQ ID NO: 3174445 - RNA, 19 nt, Artificial Sequence
  Description of Artificial Sequence: Synthetic oligonucleotide
acauaaauacaggccggac

SEQ ID NO: 3174446 - RNA, 19 nt, Artificial Sequence
  Description of Artificial Sequence: Synthetic oligonucleotide
gucgcagucagccccaccc

SEQ ID NO: 3174447 - RNA, 19 nt, Artificial Sequence
  Description of Artificial Sequence: Synthetic oligonucleotide
cuaagcuucugggaugggg

SEQ ID NO: 3174448 - RNA, 19 nt, Artificial Sequence
  Description of Artificial Sequence: Synthetic oligonucleotide
cugaagagggccaggguug

SEQ ID NO: 3174449 - RNA, 19 nt, Artificial Sequence
  Description of Artificial Sequence: Synthetic oligonucleotide
uggcaagugaagcuaccca

SEQ ID NO: 3174450 - RNA, 19 nt, Artificial Sequence
  Description of Artificial Sequence: Synthetic oligonucleotide
acuugagacccuuucucca

SEQ ID NO: 3174451 - RNA, 19 nt, Artificial Sequence
  Description of Artificial Sequence: Synthetic oligonucleotide
ggauccacuggccugcugg

SEQ ID NO: 3174452 - RNA, 19 nt, Artificial Sequence
  Description of Artificial Sequence: Synthetic oligonucleotide
gaccugacaggcugguggg

SEQ ID NO: 3174453 - RNA, 19 nt, Artificial Sequence
  Description of Artificial Sequence: Synthetic oligonucleotide
ccuuguguccacuugagac

SEQ ID NO: 3174454 - RNA, 19 nt, Artificial Sequence
  Description of Artificial Sequence: Synthetic oligonucleotide
uacauaaauacaggccgga

SEQ ID NO: 3174455 - RNA, 19 nt, Artificial Sequence
  Description of Artificial Sequence: Synthetic oligonucleotide
uggggcagcuuccagcuga

SEQ ID NO: 3174456 - RNA, 19 nt, Artificial Sequence
  Description of Artificial Sequence: Synthetic oligonucleotide
cauguaaacgguggccugg

SEQ ID NO: 3174457 - RNA, 19 nt, Artificial Sequence
  Description of Artificial Sequence: Synthetic oligonucleotide
cuuugcagaagaggugugg

SEQ ID NO: 3174458 - RNA, 19 nt, Artificial Sequence
  Description of Artificial Sequence: Synthetic oligonucleotide
uguggauccacuggccugc

SEQ ID NO: 3174459 - RNA, 19 nt, Artificial Sequence
  Description of Artificial Sequence: Synthetic oligonucleotide
uggucuacuucccuggguu

SEQ ID NO: 3174460 - RNA, 19 nt, Artificial Sequence
  Description of Artificial Sequence: Synthetic oligonucleotide
auggagucgcagucagccc

SEQ ID NO: 3174461 - RNA, 19 nt, Artificial Sequence
  Description of Artificial Sequence: Synthetic oligonucleotide
gagacugacggcggcacgg

SEQ ID NO: 3174462 - RNA, 19 nt, Artificial Sequence
  Description of Artificial Sequence: Synthetic oligonucleotide
cuccugugcgcccuggugg

SEQ ID NO: 3174463 - RNA, 19 nt, Artificial Sequence
  Description of Artificial Sequence: Synthetic oligonucleotide
ugccucgguaccaacccag

SEQ ID NO: 3174464 - RNA, 19 nt, Artificial Sequence
  Description of Artificial Sequence: Synthetic oligonucleotide
aagcuacccauaaauacau

SEQ ID NO: 3174465 - RNA, 19 nt, Artificial Sequence
  Description of Artificial Sequence: Synthetic oligonucleotide
uuguccacacaacggcacc

SEQ ID NO: 3174466 - RNA, 19 nt, Artificial Sequence
  Description of Artificial Sequence: Synthetic oligonucleotide
uagcugugcgucuauccgc

SEQ ID NO: 3174467 - RNA, 19 nt, Artificial Sequence
  Description of Artificial Sequence: Synthetic oligonucleotide
cacacguggcuccugugcg

SEQ ID NO: 3174468 - RNA, 19 nt, Artificial Sequence
  Description of Artificial Sequence: Synthetic oligonucleotide
cugcaauccaggucacacg

SEQ ID NO: 3174469 - RNA, 19 nt, Artificial Sequence
  Description of Artificial Sequence: Synthetic oligonucleotide
aagcuucugggauggggca

SEQ ID NO: 3174470 - RNA, 19 nt, Artificial Sequence
  Description of Artificial Sequence: Synthetic oligonucleotide
aaacauucggcuggcugca

SEQ ID NO: 3174471 - RNA, 19 nt, Artificial Sequence
  Description of Artificial Sequence: Synthetic oligonucleotide
uggcuuugcagaagaggug

SEQ ID NO: 3174472 - RNA, 19 nt, Artificial Sequence
  Description of Artificial Sequence: Synthetic oligonucleotide
caauggcaagugaagcuac

SEQ ID NO: 3174473 - RNA, 19 nt, Artificial Sequence
  Description of Artificial Sequence: Synthetic oligonucleotide
gcagaagagguguggaucc

SEQ ID NO: 3174474 - RNA, 19 nt, Artificial Sequence
  Description of Artificial Sequence: Synthetic oligonucleotide
acacguggcuccugugcgc

SEQ ID NO: 3174475 - RNA, 19 nt, Artificial Sequence
  Description of Artificial Sequence: Synthetic oligonucleotide
aaagcggccccuucugcaa

SEQ ID NO: 3174476 - RNA, 19 nt, Artificial Sequence
  Description of Artificial Sequence: Synthetic oligonucleotide
uccugugcgcccugguggg

SEQ ID NO: 3174477 - RNA, 19 nt, Artificial Sequence
  Description of Artificial Sequence: Synthetic oligonucleotide
gacccuuucuccauggcca

SEQ ID NO: 3174478 - RNA, 19 nt, Artificial Sequence
  Description of Artificial Sequence: Synthetic oligonucleotide
aauacaggccggacuacgu

SEQ ID NO: 3174479 - RNA, 19 nt, Artificial Sequence
  Description of Artificial Sequence: Synthetic oligonucleotide
auccccauguaaacggugg

SEQ ID NO: 3174480 - RNA, 19 nt, Artificial Sequence
  Description of Artificial Sequence: Synthetic oligonucleotide
agguaaacauucggcuggc

SEQ ID NO: 3174481 - RNA, 19 nt, Artificial Sequence
  Description of Artificial Sequence: Synthetic oligonucleotide
cucgguaccaacccagguc

SEQ ID NO: 3174482 - RNA, 19 nt, Artificial Sequence
  Description of Artificial Sequence: Synthetic oligonucleotide
uuccagcugaccagggcca

SEQ ID NO: 3174483 - RNA, 19 nt, Artificial Sequence
  Description of Artificial Sequence: Synthetic oligonucleotide
guuccuuguguccacuuga

SEQ ID NO: 3174484 - RNA, 19 nt, Artificial Sequence
  Description of Artificial Sequence: Synthetic oligonucleotide
acuacuauaaaauccaucc

SEQ ID NO: 3174485 - RNA, 19 nt, Artificial Sequence
  Description of Artificial Sequence: Synthetic oligonucleotide
uuaauuuacauuuacagau

SEQ ID NO: 3174486 - RNA, 19 nt, Artificial Sequence
  Description of Artificial Sequence: Synthetic oligonucleotide
aauuuacauuuacagauac

SEQ ID NO: 3174487 - RNA, 19 nt, Artificial Sequence
  Description of Artificial Sequence: Synthetic oligonucleotide
uuuucuagcaugcaaaacc

SEQ ID NO: 3174488 - RNA, 19 nt, Artificial Sequence
  Description of Artificial Sequence: Synthetic oligonucleotide
ugaauagcaagauauauug

SEQ ID NO: 3174489 - RNA, 19 nt, Artificial Sequence
  Description of Artificial Sequence: Synthetic oligonucleotide
auuuucagcaacuugugcg

SEQ ID NO: 3174490 - RNA, 19 nt, Artificial Sequence
  Description of Artificial Sequence: Synthetic oligonucleotide
uguucuuuuauucacaaaa

SEQ ID NO: 3174491 - RNA, 19 nt, Artificial Sequence
  Description of Artificial Sequence: Synthetic oligonucleotide
uacauuuacagauacaaac

SEQ ID NO: 3174492 - RNA, 19 nt, Artificial Sequence
  Description of Artificial Sequence: Synthetic oligonucleotide
uuuuguuuggcucucagca

SEQ ID NO: 3174493 - RNA, 19 nt, Artificial Sequence
  Description of Artificial Sequence: Synthetic oligonucleotide
caaaaucuaaacuugacug

SEQ ID NO: 3174494 - RNA, 19 nt, Artificial Sequence
  Description of Artificial Sequence: Synthetic oligonucleotide
uauacuuucaaaugauucc

SEQ ID NO: 3174495 - RNA, 19 nt, Artificial Sequence
  Description of Artificial Sequence: Synthetic oligonucleotide
uuauacaagaauuacuacu

SEQ ID NO: 3174496 - RNA, 19 nt, Artificial Sequence
  Description of Artificial Sequence: Synthetic oligonucleotide
ucaaguaucauguugcaga

SEQ ID NO: 3174497 - RNA, 19 nt, Artificial Sequence
  Description of Artificial Sequence: Synthetic oligonucleotide
aagaaaacaucuuuaauuu

SEQ ID NO: 3174498 - RNA, 19 nt, Artificial Sequence
  Description of Artificial Sequence: Synthetic oligonucleotide
guuuguuuguuucuaagcg

SEQ ID NO: 3174499 - RNA, 19 nt, Artificial Sequence
  Description of Artificial Sequence: Synthetic oligonucleotide
aaugagacuagguugauuu

SEQ ID NO: 3174500 - RNA, 19 nt, Artificial Sequence
  Description of Artificial Sequence: Synthetic oligonucleotide
aguuuguuuguuucuaagc

SEQ ID NO: 3174501 - RNA, 19 nt, Artificial Sequence
  Description of Artificial Sequence: Synthetic oligonucleotide
uuucuagcaugcaaaaccg

SEQ ID NO: 3174502 - RNA, 19 nt, Artificial Sequence
  Description of Artificial Sequence: Synthetic oligonucleotide
caagauauauuguacggcg

SEQ ID NO: 3174503 - RNA, 19 nt, Artificial Sequence
  Description of Artificial Sequence: Synthetic oligonucleotide
aauagcaagauauauugua

SEQ ID NO: 3174504 - RNA, 19 nt, Artificial Sequence
  Description of Artificial Sequence: Synthetic oligonucleotide
ucuucaaaaucuaaacuug

SEQ ID NO: 3174505 - RNA, 19 nt, Artificial Sequence
  Description of Artificial Sequence: Synthetic oligonucleotide
cuuuauacauucaagaaca

SEQ ID NO: 3174506 - RNA, 19 nt, Artificial Sequence
  Description of Artificial Sequence: Synthetic oligonucleotide
aaacaucuuagcaacauuc

SEQ ID NO: 3174507 - RNA, 19 nt, Artificial Sequence
  Description of Artificial Sequence: Synthetic oligonucleotide
aacuugacugaauagcaag

SEQ ID NO: 3174508 - RNA, 19 nt, Artificial Sequence
  Description of Artificial Sequence: Synthetic oligonucleotide
aaaaucuaaacuugacuga

SEQ ID NO: 3174509 - RNA, 19 nt, Artificial Sequence
  Description of Artificial Sequence: Synthetic oligonucleotide
uccauuuucagcaacuugu

SEQ ID NO: 3174510 - RNA, 19 nt, Artificial Sequence
  Description of Artificial Sequence: Synthetic oligonucleotide
aaugauuccauguaucuuu

SEQ ID NO: 3174511 - RNA, 19 nt, Artificial Sequence
  Description of Artificial Sequence: Synthetic oligonucleotide
ucaaaaucuaaacuugacu

SEQ ID NO: 3174512 - RNA, 19 nt, Artificial Sequence
  Description of Artificial Sequence: Synthetic oligonucleotide
uauuguacggcgaaaugag

SEQ ID NO: 3174513 - RNA, 19 nt, Artificial Sequence
  Description of Artificial Sequence: Synthetic oligonucleotide
caaucaaguaucauguugc

SEQ ID NO: 3174514 - RNA, 19 nt, Artificial Sequence
  Description of Artificial Sequence: Synthetic oligonucleotide
uuuguugagacccuuuucu

SEQ ID NO: 3174515 - RNA, 19 nt, Artificial Sequence
  Description of Artificial Sequence: Synthetic oligonucleotide
uaaacuugacugaauagca

SEQ ID NO: 3174516 - RNA, 19 nt, Artificial Sequence
  Description of Artificial Sequence: Synthetic oligonucleotide
ucaagaacacuccaugaag

SEQ ID NO: 3174517 - RNA, 19 nt, Artificial Sequence
  Description of Artificial Sequence: Synthetic oligonucleotide
uauacaagaauuacuacua

SEQ ID NO: 3174518 - RNA, 19 nt, Artificial Sequence
  Description of Artificial Sequence: Synthetic oligonucleotide
guuucuaagcgauggaugg

SEQ ID NO: 3174519 - RNA, 19 nt, Artificial Sequence
  Description of Artificial Sequence: Synthetic oligonucleotide
ugacugaauagcaagauau

SEQ ID NO: 3174520 - RNA, 19 nt, Artificial Sequence
  Description of Artificial Sequence: Synthetic oligonucleotide
agcauuuguucuuuuauuc

SEQ ID NO: 3174521 - RNA, 19 nt, Artificial Sequence
  Description of Artificial Sequence: Synthetic oligonucleotide
aagaacacuccaugaaggg

SEQ ID NO: 3174522 - RNA, 19 nt, Artificial Sequence
  Description of Artificial Sequence: Synthetic oligonucleotide
aucuuuaauuuacauuuac

SEQ ID NO: 3174523 - RNA, 19 nt, Artificial Sequence
  Description of Artificial Sequence: Synthetic oligonucleotide
acagcaaucaaguaucaug

SEQ ID NO: 3174524 - RNA, 19 nt, Artificial Sequence
  Description of Artificial Sequence: Synthetic oligonucleotide
uaaaaggugagcaaacauc

SEQ ID NO: 3174525 - RNA, 19 nt, Artificial Sequence
  Description of Artificial Sequence: Synthetic oligonucleotide
ugagcuuuauacauucaag

SEQ ID NO: 3174526 - RNA, 19 nt, Artificial Sequence
  Description of Artificial Sequence: Synthetic oligonucleotide
agcaagauauauuguacgg

SEQ ID NO: 3174527 - RNA, 19 nt, Artificial Sequence
  Description of Artificial Sequence: Synthetic oligonucleotide
ucuaauugagcauuuguuc

SEQ ID NO: 3174528 - RNA, 19 nt, Artificial Sequence
  Description of Artificial Sequence: Synthetic oligonucleotide
ucuucacugagcuuuauac

SEQ ID NO: 3174529 - RNA, 19 nt, Artificial Sequence
  Description of Artificial Sequence: Synthetic oligonucleotide
aacaucuuagcaacauucc

SEQ ID NO: 3174530 - RNA, 19 nt, Artificial Sequence
  Description of Artificial Sequence: Synthetic oligonucleotide
ucuuuaauuuacauuuaca

SEQ ID NO: 3174531 - RNA, 19 nt, Artificial Sequence
  Description of Artificial Sequence: Synthetic oligonucleotide
uagcaagauauauuguacg

SEQ ID NO: 3174532 - RNA, 19 nt, Artificial Sequence
  Description of Artificial Sequence: Synthetic oligonucleotide
uacuauaaaauccauccau

SEQ ID NO: 3174533 - RNA, 19 nt, Artificial Sequence
  Description of Artificial Sequence: Synthetic oligonucleotide
  modified_base (12)..(12): a, c, u, g, unknown or other
ggaaucagugunuaaaagg

SEQ ID NO: 3174534 - RNA, 19 nt, Artificial Sequence
  Description of Artificial Sequence: Synthetic oligonucleotide
cuaaacuugacugaauagc

SEQ ID NO: 3174535 - RNA, 19 nt, Artificial Sequence
  Description of Artificial Sequence: Synthetic oligonucleotide
aaaaggugagcaaacaucu

SEQ ID NO: 3174536 - RNA, 19 nt, Artificial Sequence
  Description of Artificial Sequence: Synthetic oligonucleotide
auauacuuucaaaugauuc

SEQ ID NO: 3174537 - RNA, 19 nt, Artificial Sequence
  Description of Artificial Sequence: Synthetic oligonucleotide
uuucauagguccuuuguug

SEQ ID NO: 3174538 - RNA, 19 nt, Artificial Sequence
  Description of Artificial Sequence: Synthetic oligonucleotide
ugcaaaaccgcccagcuaa

SEQ ID NO: 3174539 - RNA, 19 nt, Artificial Sequence
  Description of Artificial Sequence: Synthetic oligonucleotide
uucauagguccuuuguugg

SEQ ID NO: 3174540 - RNA, 19 nt, Artificial Sequence
  Description of Artificial Sequence: Synthetic oligonucleotide
ucuaaacuugacugaauag

SEQ ID NO: 3174541 - RNA, 19 nt, Artificial Sequence
  Description of Artificial Sequence: Synthetic oligonucleotide
uccaugaagggaaucagug

SEQ ID NO: 3174542 - RNA, 19 nt, Artificial Sequence
  Description of Artificial Sequence: Synthetic oligonucleotide
gaugguaucauacuguucu

SEQ ID NO: 3174543 - RNA, 19 nt, Artificial Sequence
  Description of Artificial Sequence: Synthetic oligonucleotide
caagaacacuccaugaagg

SEQ ID NO: 3174544 - RNA, 19 nt, Artificial Sequence
  Description of Artificial Sequence: Synthetic oligonucleotide
ucagcaaacuccauuuuca

SEQ ID NO: 3174545 - RNA, 19 nt, Artificial Sequence
  Description of Artificial Sequence: Synthetic oligonucleotide
uuucuaauugagcauuugu

SEQ ID NO: 3174546 - RNA, 19 nt, Artificial Sequence
  Description of Artificial Sequence: Synthetic oligonucleotide
uucuguuuugucaugaaua

SEQ ID NO: 3174547 - RNA, 19 nt, Artificial Sequence
  Description of Artificial Sequence: Synthetic oligonucleotide
gauggaugguaucauacug

SEQ ID NO: 3174548 - RNA, 19 nt, Artificial Sequence
  Description of Artificial Sequence: Synthetic oligonucleotide
uguuucuaagcgauggaug

SEQ ID NO: 3174549 - RNA, 19 nt, Artificial Sequence
  Description of Artificial Sequence: Synthetic oligonucleotide
  modified_base (4)..(4): a, c, u, g, unknown or other
ugunuaaaaggugagcaaa

SEQ ID NO: 3174550 - RNA, 19 nt, Artificial Sequence
  Description of Artificial Sequence: Synthetic oligonucleotide
agcaacauuccucaguuug

SEQ ID NO: 3174551 - RNA, 19 nt, Artificial Sequence
  Description of Artificial Sequence: Synthetic oligonucleotide
auuacuacuauaaaaucca

SEQ ID NO: 3174552 - RNA, 19 nt, Artificial Sequence
  Description of Artificial Sequence: Synthetic oligonucleotide
cuuuauacaagaauuacua

SEQ ID NO: 3174553 - RNA, 19 nt, Artificial Sequence
  Description of Artificial Sequence: Synthetic oligonucleotide
uuuucagcaacuugugcgc

SEQ ID NO: 3174554 - RNA, 19 nt, Artificial Sequence
  Description of Artificial Sequence: Synthetic oligonucleotide
uuuauacaagaauuacuac

SEQ ID NO: 3174555 - RNA, 19 nt, Artificial Sequence
  Description of Artificial Sequence: Synthetic oligonucleotide
aguaucauguugcagaguu

SEQ ID NO: 3174556 - RNA, 19 nt, Artificial Sequence
  Description of Artificial Sequence: Synthetic oligonucleotide
  modified_base (6)..(6): a, c, u, g, unknown or other
agugunuaaaaggugagca

SEQ ID NO: 3174557 - RNA, 19 nt, Artificial Sequence
  Description of Artificial Sequence: Synthetic oligonucleotide
uuggcucucagcaaacucc

SEQ ID NO: 3174558 - RNA, 19 nt, Artificial Sequence
  Description of Artificial Sequence: Synthetic oligonucleotide
guuuguuucuaagcgaugg

SEQ ID NO: 3174559 - RNA, 19 nt, Artificial Sequence
  Description of Artificial Sequence: Synthetic oligonucleotide
uuuguuuguuucuaagcga

SEQ ID NO: 3174560 - RNA, 19 nt, Artificial Sequence
  Description of Artificial Sequence: Synthetic oligonucleotide
agcaaacuccauuuucagc

SEQ ID NO: 3174561 - RNA, 19 nt, Artificial Sequence
  Description of Artificial Sequence: Synthetic oligonucleotide
guugauuucuguuuuguca

SEQ ID NO: 3174562 - RNA, 19 nt, Artificial Sequence
  Description of Artificial Sequence: Synthetic oligonucleotide
auagcaagauauauuguac

SEQ ID NO: 3174563 - RNA, 19 nt, Artificial Sequence
  Description of Artificial Sequence: Synthetic oligonucleotide
  modified_base (8)..(8): a, c, u, g, unknown or other
ucagugunuaaaaggugag

SEQ ID NO: 3174564 - RNA, 19 nt, Artificial Sequence
  Description of Artificial Sequence: Synthetic oligonucleotide
uucaaaaucuaaacuugac

SEQ ID NO: 3174565 - RNA, 19 nt, Artificial Sequence
  Description of Artificial Sequence: Synthetic oligonucleotide
uacccuuuuguugagaccc

SEQ ID NO: 3174566 - RNA, 19 nt, Artificial Sequence
  Description of Artificial Sequence: Synthetic oligonucleotide
uauauuguacggcgaaaug

SEQ ID NO: 3174567 - RNA, 19 nt, Artificial Sequence
  Description of Artificial Sequence: Synthetic oligonucleotide
aaacuccauuuucagcaac

SEQ ID NO: 3174568 - RNA, 19 nt, Artificial Sequence
  Description of Artificial Sequence: Synthetic oligonucleotide
uucacugagcuuuauacau

SEQ ID NO: 3174569 - RNA, 19 nt, Artificial Sequence
  Description of Artificial Sequence: Synthetic oligonucleotide
uuucaaaugauuccaugua

SEQ ID NO: 3174570 - RNA, 19 nt, Artificial Sequence
  Description of Artificial Sequence: Synthetic oligonucleotide
uuagcaacauuccucaguu

SEQ ID NO: 3174571 - RNA, 19 nt, Artificial Sequence
  Description of Artificial Sequence: Synthetic oligonucleotide
ucuuugaauauacuuucaa

SEQ ID NO: 3174572 - RNA, 19 nt, Artificial Sequence
  Description of Artificial Sequence: Synthetic oligonucleotide
acauuccucaguuuguuug

SEQ ID NO: 3174573 - RNA, 19 nt, Artificial Sequence
  Description of Artificial Sequence: Synthetic oligonucleotide
  modified_base (10)..(10): a, c, u, g, unknown or other
aaucagugunuaaaaggug

SEQ ID NO: 3174574 - RNA, 19 nt, Artificial Sequence
  Description of Artificial Sequence: Synthetic oligonucleotide
cauuuguucuuuuauucac

SEQ ID NO: 3174575 - RNA, 19 nt, Artificial Sequence
  Description of Artificial Sequence: Synthetic oligonucleotide
gagcuuuauacauucaaga

SEQ ID NO: 3174576 - RNA, 19 nt, Artificial Sequence
  Description of Artificial Sequence: Synthetic oligonucleotide
uuguacggcgaaaugagac

SEQ ID NO: 3174577 - RNA, 19 nt, Artificial Sequence
  Description of Artificial Sequence: Synthetic oligonucleotide
uaucauacuguucuuugaa

SEQ ID NO: 3174578 - RNA, 19 nt, Artificial Sequence
  Description of Artificial Sequence: Synthetic oligonucleotide
gagcaaacaucuuagcaac

SEQ ID NO: 3174579 - RNA, 19 nt, Artificial Sequence
  Description of Artificial Sequence: Synthetic oligonucleotide
uucuaauugagcauuuguu

SEQ ID NO: 3174580 - RNA, 19 nt, Artificial Sequence
  Description of Artificial Sequence: Synthetic oligonucleotide
uacuguucuuugaauauac

SEQ ID NO: 3174581 - RNA, 19 nt, Artificial Sequence
  Description of Artificial Sequence: Synthetic oligonucleotide
uucaagaacacuccaugaa

SEQ ID NO: 3174582 - RNA, 19 nt, Artificial Sequence
  Description of Artificial Sequence: Synthetic oligonucleotide
aguucuuuuguuuggcucu

SEQ ID NO: 3174583 - RNA, 19 nt, Artificial Sequence
  Description of Artificial Sequence: Synthetic oligonucleotide
acucuucaaaaucuaaacu

SEQ ID NO: 3174584 - RNA, 19 nt, Artificial Sequence
  Description of Artificial Sequence: Synthetic oligonucleotide
aaccacagccuccagaccc

SEQ ID NO: 3174585 - RNA, 19 nt, Artificial Sequence
  Description of Artificial Sequence: Synthetic oligonucleotide
ugcuacagcauccagagcu

SEQ ID NO: 3174586 - RNA, 19 nt, Artificial Sequence
  Description of Artificial Sequence: Synthetic oligonucleotide
ucaggcagcagccacaccc

SEQ ID NO: 3174587 - RNA, 19 nt, Artificial Sequence
  Description of Artificial Sequence: Synthetic oligonucleotide
uuuggugucuggcacuugg

SEQ ID NO: 3174588 - RNA, 19 nt, Artificial Sequence
  Description of Artificial Sequence: Synthetic oligonucleotide
acugcuacagcauccagag

SEQ ID NO: 3174589 - RNA, 19 nt, Artificial Sequence
  Description of Artificial Sequence: Synthetic oligonucleotide
uuggaggacacuuuggugu

SEQ ID NO: 3174590 - RNA, 19 nt, Artificial Sequence
  Description of Artificial Sequence: Synthetic oligonucleotide
uccagagcugugacgaugg

SEQ ID NO: 3174591 - RNA, 19 nt, Artificial Sequence
  Description of Artificial Sequence: Synthetic oligonucleotide
ugcagcagccuccagagcu

SEQ ID NO: 3174592 - RNA, 19 nt, Artificial Sequence
  Description of Artificial Sequence: Synthetic oligonucleotide
gacgaagagaucugcgggg

SEQ ID NO: 3174593 - RNA, 19 nt, Artificial Sequence
  Description of Artificial Sequence: Synthetic oligonucleotide
cagagcuggaaccacagcc

SEQ ID NO: 3174594 - RNA, 19 nt, Artificial Sequence
  Description of Artificial Sequence: Synthetic oligonucleotide
acacuuuggugucuggcac

SEQ ID NO: 3174595 - RNA, 19 nt, Artificial Sequence
  Description of Artificial Sequence: Synthetic oligonucleotide
ugggagggcacuuuggugu

SEQ ID NO: 3174596 - RNA, 19 nt, Artificial Sequence
  Description of Artificial Sequence: Synthetic oligonucleotide
uuuggaggacacuuuggug

SEQ ID NO: 3174597 - RNA, 19 nt, Artificial Sequence
  Description of Artificial Sequence: Synthetic oligonucleotide
ugcagcacgaugacacagg

SEQ ID NO: 3174598 - RNA, 19 nt, Artificial Sequence
  Description of Artificial Sequence: Synthetic oligonucleotide
uguuggcaggacauccugg

SEQ ID NO: 3174599 - RNA, 19 nt, Artificial Sequence
  Description of Artificial Sequence: Synthetic oligonucleotide
gugucuggcacuugggagg

SEQ ID NO: 3174600 - RNA, 19 nt, Artificial Sequence
  Description of Artificial Sequence: Synthetic oligonucleotide
ugggagggcacuugggagg

SEQ ID NO: 3174601 - RNA, 19 nt, Artificial Sequence
  Description of Artificial Sequence: Synthetic oligonucleotide
uuccacagcagccacugcu

SEQ ID NO: 3174602 - RNA, 19 nt, Artificial Sequence
  Description of Artificial Sequence: Synthetic oligonucleotide
uuuucugccacagcugcug

SEQ ID NO: 3174603 - RNA, 19 nt, Artificial Sequence
  Description of Artificial Sequence: Synthetic oligonucleotide
agccuccagagcuggaacc

SEQ ID NO: 3174604 - RNA, 19 nt, Artificial Sequence
  Description of Artificial Sequence: Synthetic oligonucleotide
uccagagcuggaaccacag

SEQ ID NO: 3174605 - RNA, 19 nt, Artificial Sequence
  Description of Artificial Sequence: Synthetic oligonucleotide
uugggagggcacuugggag

SEQ ID NO: 3174606 - RNA, 19 nt, Artificial Sequence
  Description of Artificial Sequence: Synthetic oligonucleotide
agcugcugccaccaccugc

SEQ ID NO: 3174607 - RNA, 19 nt, Artificial Sequence
  Description of Artificial Sequence: Synthetic oligonucleotide
agagcugugacgauggcga

SEQ ID NO: 3174608 - RNA, 19 nt, Artificial Sequence
  Description of Artificial Sequence: Synthetic oligonucleotide
gacacuuuggugucuggca

SEQ ID NO: 3174609 - RNA, 19 nt, Artificial Sequence
  Description of Artificial Sequence: Synthetic oligonucleotide
uggcaggacauccuggccu

SEQ ID NO: 3174610 - RNA, 19 nt, Artificial Sequence
  Description of Artificial Sequence: Synthetic oligonucleotide
guuggcaggacauccuggc

SEQ ID NO: 3174611 - RNA, 19 nt, Artificial Sequence
  Description of Artificial Sequence: Synthetic oligonucleotide
ugugacgauggcgacgaag

SEQ ID NO: 3174612 - RNA, 19 nt, Artificial Sequence
  Description of Artificial Sequence: Synthetic oligonucleotide
acgaagagaucugcggggc

SEQ ID NO: 3174613 - RNA, 19 nt, Artificial Sequence
  Description of Artificial Sequence: Synthetic oligonucleotide
uccacagcagccacugcug

SEQ ID NO: 3174614 - RNA, 19 nt, Artificial Sequence
  Description of Artificial Sequence: Synthetic oligonucleotide
agaucugcggggccugugg

SEQ ID NO: 3174615 - RNA, 19 nt, Artificial Sequence
  Description of Artificial Sequence: Synthetic oligonucleotide
acagccuccagaccccagg

SEQ ID NO: 3174616 - RNA, 19 nt, Artificial Sequence
  Description of Artificial Sequence: Synthetic oligonucleotide
uuggugucuggcacuuggg

SEQ ID NO: 3174617 - RNA, 19 nt, Artificial Sequence
  Description of Artificial Sequence: Synthetic oligonucleotide
ucugcggggccuguggugg

SEQ ID NO: 3174618 - RNA, 19 nt, Artificial Sequence
  Description of Artificial Sequence: Synthetic oligonucleotide
ggaaccacagccuccagac

SEQ ID NO: 3174619 - RNA, 19 nt, Artificial Sequence
  Description of Artificial Sequence: Synthetic oligonucleotide
agcauccagagcugugacg

SEQ ID NO: 3174620 - RNA, 19 nt, Artificial Sequence
  Description of Artificial Sequence: Synthetic oligonucleotide
ucuguuggcaggacauccu

SEQ ID NO: 3174621 - RNA, 19 nt, Artificial Sequence
  Description of Artificial Sequence: Synthetic oligonucleotide
cagagcuggaaccacagca

SEQ ID NO: 3174622 - RNA, 19 nt, Artificial Sequence
  Description of Artificial Sequence: Synthetic oligonucleotide
acugcugcuggcucuguug

SEQ ID NO: 3174623 - RNA, 19 nt, Artificial Sequence
  Description of Artificial Sequence: Synthetic oligonucleotide
uggaaccacagccuccaga

SEQ ID NO: 3174624 - RNA, 19 nt, Artificial Sequence
  Description of Artificial Sequence: Synthetic oligonucleotide
gauggcgacgaagagaucu

SEQ ID NO: 3174625 - RNA, 19 nt, Artificial Sequence
  Description of Artificial Sequence: Synthetic oligonucleotide
uggugucuggcacuuggga

SEQ ID NO: 3174626 - RNA, 19 nt, Artificial Sequence
  Description of Artificial Sequence: Synthetic oligonucleotide
ugguggcucaggcagcagc

SEQ ID NO: 3174627 - RNA, 19 nt, Artificial Sequence
  Description of Artificial Sequence: Synthetic oligonucleotide
agcuggaaccacagcagcc

SEQ ID NO: 3174628 - RNA, 19 nt, Artificial Sequence
  Description of Artificial Sequence: Synthetic oligonucleotide
ugucuggcacuugggaggg

SEQ ID NO: 3174629 - RNA, 19 nt, Artificial Sequence
  Description of Artificial Sequence: Synthetic oligonucleotide
cacuuuggaggacacuuug

SEQ ID NO: 3174630 - RNA, 19 nt, Artificial Sequence
  Description of Artificial Sequence: Synthetic oligonucleotide
gaccccaggcugcagcacg

SEQ ID NO: 3174631 - RNA, 19 nt, Artificial Sequence
  Description of Artificial Sequence: Synthetic oligonucleotide
cacugcuuccacagcagcc

SEQ ID NO: 3174632 - RNA, 19 nt, Artificial Sequence
  Description of Artificial Sequence: Synthetic oligonucleotide
ugacgauggcgacgaagag

SEQ ID NO: 3174633 - RNA, 19 nt, Artificial Sequence
  Description of Artificial Sequence: Synthetic oligonucleotide
ggugucuggcacuugggag

SEQ ID NO: 3174634 - RNA, 19 nt, Artificial Sequence
  Description of Artificial Sequence: Synthetic oligonucleotide
agagcuggaaccacagcag

SEQ ID NO: 3174635 - RNA, 19 nt, Artificial Sequence
  Description of Artificial Sequence: Synthetic oligonucleotide
uacagcauccagagcugug

SEQ ID NO: 3174636 - RNA, 19 nt, Artificial Sequence
  Description of Artificial Sequence: Synthetic oligonucleotide
uugggagggcacuuuggug

SEQ ID NO: 3174637 - RNA, 19 nt, Artificial Sequence
  Description of Artificial Sequence: Synthetic oligonucleotide
cucuguuggcaggacaucc

SEQ ID NO: 3174638 - RNA, 19 nt, Artificial Sequence
  Description of Artificial Sequence: Synthetic oligonucleotide
gagcuggaaccacagcagc

SEQ ID NO: 3174639 - RNA, 19 nt, Artificial Sequence
  Description of Artificial Sequence: Synthetic oligonucleotide
acgauggcgacgaagagau

SEQ ID NO: 3174640 - RNA, 19 nt, Artificial Sequence
  Description of Artificial Sequence: Synthetic oligonucleotide
acuuuggaggacacuuugg

SEQ ID NO: 3174641 - RNA, 19 nt, Artificial Sequence
  Description of Artificial Sequence: Synthetic oligonucleotide
uuucugccacagcugcugc

SEQ ID NO: 3174642 - RNA, 19 nt, Artificial Sequence
  Description of Artificial Sequence: Synthetic oligonucleotide
cugcugcuggcucuguugg

SEQ ID NO: 3174643 - RNA, 19 nt, Artificial Sequence
  Description of Artificial Sequence: Synthetic oligonucleotide
uuggcaggacauccuggcc

SEQ ID NO: 3174644 - RNA, 19 nt, Artificial Sequence
  Description of Artificial Sequence: Synthetic oligonucleotide
gcgacgaagagaucugcgg

SEQ ID NO: 3174645 - RNA, 19 nt, Artificial Sequence
  Description of Artificial Sequence: Synthetic oligonucleotide
acugcuuccacagcagcca

SEQ ID NO: 3174646 - RNA, 19 nt, Artificial Sequence
  Description of Artificial Sequence: Synthetic oligonucleotide
ucugccacagcugcugcca

SEQ ID NO: 3174647 - RNA, 19 nt, Artificial Sequence
  Description of Artificial Sequence: Synthetic oligonucleotide
ugccaccacugcuacagca

SEQ ID NO: 3174648 - RNA, 19 nt, Artificial Sequence
  Description of Artificial Sequence: Synthetic oligonucleotide
gcugcagcagccuccagag

SEQ ID NO: 3174649 - RNA, 19 nt, Artificial Sequence
  Description of Artificial Sequence: Synthetic oligonucleotide
ccugugguggcucaggcag

SEQ ID NO: 3174650 - RNA, 19 nt, Artificial Sequence
  Description of Artificial Sequence: Synthetic oligonucleotide
agcugcagcagccuccaga

SEQ ID NO: 3174651 - RNA, 19 nt, Artificial Sequence
  Description of Artificial Sequence: Synthetic oligonucleotide
ucuggcacuugggagggca

SEQ ID NO: 3174652 - RNA, 19 nt, Artificial Sequence
  Description of Artificial Sequence: Synthetic oligonucleotide
gugacgauggcgacgaaga

SEQ ID NO: 3174653 - RNA, 19 nt, Artificial Sequence
  Description of Artificial Sequence: Synthetic oligonucleotide
cagagcugcagcagccucc

SEQ ID NO: 3174654 - RNA, 19 nt, Artificial Sequence
  Description of Artificial Sequence: Synthetic oligonucleotide
  modified_base (16)..(16): a, c, u, g, unknown or other
accugcugcugcugcncgg

SEQ ID NO: 3174655 - RNA, 19 nt, Artificial Sequence
  Description of Artificial Sequence: Synthetic oligonucleotide
cagagcugugacgauggcg

SEQ ID NO: 3174656 - RNA, 19 nt, Artificial Sequence
  Description of Artificial Sequence: Synthetic oligonucleotide
caccacugcuacagcaucc

SEQ ID NO: 3174657 - RNA, 19 nt, Artificial Sequence
  Description of Artificial Sequence: Synthetic oligonucleotide
cacuugggagggcacuugg

SEQ ID NO: 3174658 - RNA, 19 nt, Artificial Sequence
  Description of Artificial Sequence: Synthetic oligonucleotide
uggaggacacuuugguguc

SEQ ID NO: 3174659 - RNA, 19 nt, Artificial Sequence
  Description of Artificial Sequence: Synthetic oligonucleotide
acagcauccagagcuguga

SEQ ID NO: 3174660 - RNA, 19 nt, Artificial Sequence
  Description of Artificial Sequence: Synthetic oligonucleotide
gacgauggcgacgaagaga

SEQ ID NO: 3174661 - RNA, 19 nt, Artificial Sequence
  Description of Artificial Sequence: Synthetic oligonucleotide
ggacauccuggccuguugg

SEQ ID NO: 3174662 - RNA, 19 nt, Artificial Sequence
  Description of Artificial Sequence: Synthetic oligonucleotide
cacagcugcugccaccacc

SEQ ID NO: 3174663 - RNA, 19 nt, Artificial Sequence
  Description of Artificial Sequence: Synthetic oligonucleotide
gcugccaccacugcuacag

SEQ ID NO: 3174664 - RNA, 19 nt, Artificial Sequence
  Description of Artificial Sequence: Synthetic oligonucleotide
ugcugccaccaccugcugc

SEQ ID NO: 3174665 - RNA, 19 nt, Artificial Sequence
  Description of Artificial Sequence: Synthetic oligonucleotide
cuugggagggcacuuggga

SEQ ID NO: 3174666 - RNA, 19 nt, Artificial Sequence
  Description of Artificial Sequence: Synthetic oligonucleotide
agagcuggaaccacagccu

SEQ ID NO: 3174667 - RNA, 19 nt, Artificial Sequence
  Description of Artificial Sequence: Synthetic oligonucleotide
agcuggaaccacagccucc

SEQ ID NO: 3174668 - RNA, 19 nt, Artificial Sequence
  Description of Artificial Sequence: Synthetic oligonucleotide
aggacauccuggccuguug

SEQ ID NO: 3174669 - RNA, 19 nt, Artificial Sequence
  Description of Artificial Sequence: Synthetic oligonucleotide
ugcuggcucuguuggcagg

SEQ ID NO: 3174670 - RNA, 19 nt, Artificial Sequence
  Description of Artificial Sequence: Synthetic oligonucleotide
gcagcacgaugacacaggg

SEQ ID NO: 3174671 - RNA, 19 nt, Artificial Sequence
  Description of Artificial Sequence: Synthetic oligonucleotide
cuguuggcaggacauccug

SEQ ID NO: 3174672 - RNA, 19 nt, Artificial Sequence
  Description of Artificial Sequence: Synthetic oligonucleotide
cacugcuacagcauccaga

SEQ ID NO: 3174673 - RNA, 19 nt, Artificial Sequence
  Description of Artificial Sequence: Synthetic oligonucleotide
  modified_base (13)..(13): a, c, u, g, unknown or other
ugcugcugcugcncggcca

SEQ ID NO: 3174674 - RNA, 19 nt, Artificial Sequence
  Description of Artificial Sequence: Synthetic oligonucleotide
gaaccacagccuccagacc

SEQ ID NO: 3174675 - RNA, 19 nt, Artificial Sequence
  Description of Artificial Sequence: Synthetic oligonucleotide
  modified_base (4)..(4): a, c, u, g, unknown or other
ugcncggccacugcuucca

SEQ ID NO: 3174676 - RNA, 19 nt, Artificial Sequence
  Description of Artificial Sequence: Synthetic oligonucleotide
aagagaucugcggggccug

SEQ ID NO: 3174677 - RNA, 19 nt, Artificial Sequence
  Description of Artificial Sequence: Synthetic oligonucleotide
uucugccacagcugcugcc

SEQ ID NO: 3174678 - RNA, 19 nt, Artificial Sequence
  Description of Artificial Sequence: Synthetic oligonucleotide
acuugggagggcacuuugg

SEQ ID NO: 3174679 - RNA, 19 nt, Artificial Sequence
  Description of Artificial Sequence: Synthetic oligonucleotide
ugugguggcucaggcagca

SEQ ID NO: 3174680 - RNA, 19 nt, Artificial Sequence
  Description of Artificial Sequence: Synthetic oligonucleotide
cuggaaccacagcagcccc

SEQ ID NO: 3174681 - RNA, 19 nt, Artificial Sequence
  Description of Artificial Sequence: Synthetic oligonucleotide
acagcagccacugcugcca

SEQ ID NO: 3174682 - RNA, 19 nt, Artificial Sequence
  Description of Artificial Sequence: Synthetic oligonucleotide
caggcagcagccacacccc

SEQ ID NO: 3174683 - RNA, 19 nt, Artificial Sequence
  Description of Artificial Sequence: Synthetic oligonucleotide
agcugugacgauggcgacg

SEQ ID NO: 3174684 - RNA, 19 nt, Artificial Sequence
  Description of Artificial Sequence: Synthetic oligonucleotide
agauguugaacauauuucc

SEQ ID NO: 3174685 - RNA, 19 nt, Artificial Sequence
  Description of Artificial Sequence: Synthetic oligonucleotide
gaugagauuaaagugacgg

SEQ ID NO: 3174686 - RNA, 19 nt, Artificial Sequence
  Description of Artificial Sequence: Synthetic oligonucleotide
uucuccaucaauaauaggu

SEQ ID NO: 3174687 - RNA, 19 nt, Artificial Sequence
  Description of Artificial Sequence: Synthetic oligonucleotide
aaguccaaggcuuggaugg

SEQ ID NO: 3174688 - RNA, 19 nt, Artificial Sequence
  Description of Artificial Sequence: Synthetic oligonucleotide
auaaauugccaggagaugc

SEQ ID NO: 3174689 - RNA, 19 nt, Artificial Sequence
  Description of Artificial Sequence: Synthetic oligonucleotide
aaggcaaagugacaguaac

SEQ ID NO: 3174690 - RNA, 19 nt, Artificial Sequence
  Description of Artificial Sequence: Synthetic oligonucleotide
cugacuaagauaaauugcc

SEQ ID NO: 3174691 - RNA, 19 nt, Artificial Sequence
  Description of Artificial Sequence: Synthetic oligonucleotide
uguauguuuugccagaacu

SEQ ID NO: 3174692 - RNA, 19 nt, Artificial Sequence
  Description of Artificial Sequence: Synthetic oligonucleotide
aaccaugagauguugaaca

SEQ ID NO: 3174693 - RNA, 19 nt, Artificial Sequence
  Description of Artificial Sequence: Synthetic oligonucleotide
uguugaacauauuuccugg

SEQ ID NO: 3174694 - RNA, 19 nt, Artificial Sequence
  Description of Artificial Sequence: Synthetic oligonucleotide
ucuuccguaacacugagaa

SEQ ID NO: 3174695 - RNA, 19 nt, Artificial Sequence
  Description of Artificial Sequence: Synthetic oligonucleotide
uaugaaggcaaagugacag

SEQ ID NO: 3174696 - RNA, 19 nt, Artificial Sequence
  Description of Artificial Sequence: Synthetic oligonucleotide
aaguguaucuugucccucc

SEQ ID NO: 3174697 - RNA, 19 nt, Artificial Sequence
  Description of Artificial Sequence: Synthetic oligonucleotide
aagauaaauugccaggaga

SEQ ID NO: 3174698 - RNA, 19 nt, Artificial Sequence
  Description of Artificial Sequence: Synthetic oligonucleotide
uuugccagaacucccaagc

SEQ ID NO: 3174699 - RNA, 19 nt, Artificial Sequence
  Description of Artificial Sequence: Synthetic oligonucleotide
aacauauuuccugguaggc

SEQ ID NO: 3174700 - RNA, 19 nt, Artificial Sequence
  Description of Artificial Sequence: Synthetic oligonucleotide
uaaagugacggacucucgg

SEQ ID NO: 3174701 - RNA, 19 nt, Artificial Sequence
  Description of Artificial Sequence: Synthetic oligonucleotide
gacuaagauaaauugccag

SEQ ID NO: 3174702 - RNA, 19 nt, Artificial Sequence
  Description of Artificial Sequence: Synthetic oligonucleotide
ccaaacacaaacuucagcg

SEQ ID NO: 3174703 - RNA, 19 nt, Artificial Sequence
  Description of Artificial Sequence: Synthetic oligonucleotide
gaacauauuuccugguagg

SEQ ID NO: 3174704 - RNA, 19 nt, Artificial Sequence
  Description of Artificial Sequence: Synthetic oligonucleotide
ucuucuccaucaauaauag

SEQ ID NO: 3174705 - RNA, 19 nt, Artificial Sequence
  Description of Artificial Sequence: Synthetic oligonucleotide
ugagauguugaacauauuu

SEQ ID NO: 3174706 - RNA, 19 nt, Artificial Sequence
  Description of Artificial Sequence: Synthetic oligonucleotide
ucaacuaaguccaaggcuu

SEQ ID NO: 3174707 - RNA, 19 nt, Artificial Sequence
  Description of Artificial Sequence: Synthetic oligonucleotide
cauaaccugacuaagauaa

SEQ ID NO: 3174708 - RNA, 19 nt, Artificial Sequence
  Description of Artificial Sequence: Synthetic oligonucleotide
acaguaacaaguccggaag

SEQ ID NO: 3174709 - RNA, 19 nt, Artificial Sequence
  Description of Artificial Sequence: Synthetic oligonucleotide
auuaaagugacggacucuc

SEQ ID NO: 3174710 - RNA, 19 nt, Artificial Sequence
  Description of Artificial Sequence: Synthetic oligonucleotide
ugggugaugagauuaaagu

SEQ ID NO: 3174711 - RNA, 19 nt, Artificial Sequence
  Description of Artificial Sequence: Synthetic oligonucleotide
aagucauacauguguaugu

SEQ ID NO: 3174712 - RNA, 19 nt, Artificial Sequence
  Description of Artificial Sequence: Synthetic oligonucleotide
aaagcuguuccaccugcac

SEQ ID NO: 3174713 - RNA, 19 nt, Artificial Sequence
  Description of Artificial Sequence: Synthetic oligonucleotide
agauuaaagugacggacuc

SEQ ID NO: 3174714 - RNA, 19 nt, Artificial Sequence
  Description of Artificial Sequence: Synthetic oligonucleotide
ucucggucaacuaagucca

SEQ ID NO: 3174715 - RNA, 19 nt, Artificial Sequence
  Description of Artificial Sequence: Synthetic oligonucleotide
ugagauuaaagugacggac

SEQ ID NO: 3174716 - RNA, 19 nt, Artificial Sequence
  Description of Artificial Sequence: Synthetic oligonucleotide
uaagauaaauugccaggag

SEQ ID NO: 3174717 - RNA, 19 nt, Artificial Sequence
  Description of Artificial Sequence: Synthetic oligonucleotide
ugagagauguucaucggga

SEQ ID NO: 3174718 - RNA, 19 nt, Artificial Sequence
  Description of Artificial Sequence: Synthetic oligonucleotide
agaacucccaagcaccugg

SEQ ID NO: 3174719 - RNA, 19 nt, Artificial Sequence
  Description of Artificial Sequence: Synthetic oligonucleotide
accugacuaagauaaauug

SEQ ID NO: 3174720 - RNA, 19 nt, Artificial Sequence
  Description of Artificial Sequence: Synthetic oligonucleotide
ucuugugucuucuccauca

SEQ ID NO: 3174721 - RNA, 19 nt, Artificial Sequence
  Description of Artificial Sequence: Synthetic oligonucleotide
auacauguguauguuuugc

SEQ ID NO: 3174722 - RNA, 19 nt, Artificial Sequence
  Description of Artificial Sequence: Synthetic oligonucleotide
ugacacacugagcugcugg

SEQ ID NO: 3174723 - RNA, 19 nt, Artificial Sequence
  Description of Artificial Sequence: Synthetic oligonucleotide
ucaguugcuugucugacac

SEQ ID NO: 3174724 - RNA, 19 nt, Artificial Sequence
  Description of Artificial Sequence: Synthetic oligonucleotide
aguugcuugucugacacac

SEQ ID NO: 3174725 - RNA, 19 nt, Artificial Sequence
  Description of Artificial Sequence: Synthetic oligonucleotide
auugccaggagaugcuuac

SEQ ID NO: 3174726 - RNA, 19 nt, Artificial Sequence
  Description of Artificial Sequence: Synthetic oligonucleotide
uccaucaauaauaggucug

SEQ ID NO: 3174727 - RNA, 19 nt, Artificial Sequence
  Description of Artificial Sequence: Synthetic oligonucleotide
augagagauguucaucggg

SEQ ID NO: 3174728 - RNA, 19 nt, Artificial Sequence
  Description of Artificial Sequence: Synthetic oligonucleotide
ucauacauguguauguuuu

SEQ ID NO: 3174729 - RNA, 19 nt, Artificial Sequence
  Description of Artificial Sequence: Synthetic oligonucleotide
ugagaaggcaaaugcuggg

SEQ ID NO: 3174730 - RNA, 19 nt, Artificial Sequence
  Description of Artificial Sequence: Synthetic oligonucleotide
ugugucuucuccaucaaua

SEQ ID NO: 3174731 - RNA, 19 nt, Artificial Sequence
  Description of Artificial Sequence: Synthetic oligonucleotide
uggcugacgacccaaacac

SEQ ID NO: 3174732 - RNA, 19 nt, Artificial Sequence
  Description of Artificial Sequence: Synthetic oligonucleotide
uucaucgggaauucucgcg

SEQ ID NO: 3174733 - RNA, 19 nt, Artificial Sequence
  Description of Artificial Sequence: Synthetic oligonucleotide
aacuucagcgaugagagau

SEQ ID NO: 3174734 - RNA, 19 nt, Artificial Sequence
  Description of Artificial Sequence: Synthetic oligonucleotide
aagcaccugguaaacacgc

SEQ ID NO: 3174735 - RNA, 19 nt, Artificial Sequence
  Description of Artificial Sequence: Synthetic oligonucleotide
cauguguauguuuugccag

SEQ ID NO: 3174736 - RNA, 19 nt, Artificial Sequence
  Description of Artificial Sequence: Synthetic oligonucleotide
augacaggaagucauacau

SEQ ID NO: 3174737 - RNA, 19 nt, Artificial Sequence
  Description of Artificial Sequence: Synthetic oligonucleotide
guaaacacgccuuccacug

SEQ ID NO: 3174738 - RNA, 19 nt, Artificial Sequence
  Description of Artificial Sequence: Synthetic oligonucleotide
gaugagagauguucaucgg

SEQ ID NO: 3174739 - RNA, 19 nt, Artificial Sequence
  Description of Artificial Sequence: Synthetic oligonucleotide
uuucucauaaccugacuaa

SEQ ID NO: 3174740 - RNA, 19 nt, Artificial Sequence
  Description of Artificial Sequence: Synthetic oligonucleotide
cuggcaguuucucauaacc

SEQ ID NO: 3174741 - RNA, 19 nt, Artificial Sequence
  Description of Artificial Sequence: Synthetic oligonucleotide
aagugacggacucucgguc

SEQ ID NO: 3174742 - RNA, 19 nt, Artificial Sequence
  Description of Artificial Sequence: Synthetic oligonucleotide
aaagugacggacucucggu

SEQ ID NO: 3174743 - RNA, 19 nt, Artificial Sequence
  Description of Artificial Sequence: Synthetic oligonucleotide
ucaucgggaauucucgcgc

SEQ ID NO: 3174744 - RNA, 19 nt, Artificial Sequence
  Description of Artificial Sequence: Synthetic oligonucleotide
ugaaagcuguuccaccugc

SEQ ID NO: 3174745 - RNA, 19 nt, Artificial Sequence
  Description of Artificial Sequence: Synthetic oligonucleotide
uuaaagugacggacucucg

SEQ ID NO: 3174746 - RNA, 19 nt, Artificial Sequence
  Description of Artificial Sequence: Synthetic oligonucleotide
cugucuugaaagcuguucc

SEQ ID NO: 3174747 - RNA, 19 nt, Artificial Sequence
  Description of Artificial Sequence: Synthetic oligonucleotide
ugacuaagauaaauugcca

SEQ ID NO: 3174748 - RNA, 19 nt, Artificial Sequence
  Description of Artificial Sequence: Synthetic oligonucleotide
acaaacuucagcgaugaga

SEQ ID NO: 3174749 - RNA, 19 nt, Artificial Sequence
  Description of Artificial Sequence: Synthetic oligonucleotide
gaagucauacauguguaug

SEQ ID NO: 3174750 - RNA, 19 nt, Artificial Sequence
  Description of Artificial Sequence: Synthetic oligonucleotide
uguuuugccagaacuccca

SEQ ID NO: 3174751 - RNA, 19 nt, Artificial Sequence
  Description of Artificial Sequence: Synthetic oligonucleotide
uacauguguauguuuugcc

SEQ ID NO: 3174752 - RNA, 19 nt, Artificial Sequence
  Description of Artificial Sequence: Synthetic oligonucleotide
aacacugagaaggcaaaug

SEQ ID NO: 3174753 - RNA, 19 nt, Artificial Sequence
  Description of Artificial Sequence: Synthetic oligonucleotide
ucuugaaagcuguuccacc

SEQ ID NO: 3174754 - RNA, 19 nt, Artificial Sequence
  Description of Artificial Sequence: Synthetic oligonucleotide
uccaccugcaccuuuuaug

SEQ ID NO: 3174755 - RNA, 19 nt, Artificial Sequence
  Description of Artificial Sequence: Synthetic oligonucleotide
ugaaccaugagauguugaa

SEQ ID NO: 3174756 - RNA, 19 nt, Artificial Sequence
  Description of Artificial Sequence: Synthetic oligonucleotide
aaaugcugggcaugagcag

SEQ ID NO: 3174757 - RNA, 19 nt, Artificial Sequence
  Description of Artificial Sequence: Synthetic oligonucleotide
ugacgacccaaacacaaac

SEQ ID NO: 3174758 - RNA, 19 nt, Artificial Sequence
  Description of Artificial Sequence: Synthetic oligonucleotide
uguaucuugucccuccauc

SEQ ID NO: 3174759 - RNA, 19 nt, Artificial Sequence
  Description of Artificial Sequence: Synthetic oligonucleotide
ucagcgaugagagauguuc

SEQ ID NO: 3174760 - RNA, 19 nt, Artificial Sequence
  Description of Artificial Sequence: Synthetic oligonucleotide
caaagugacaguaacaagu

SEQ ID NO: 3174761 - RNA, 19 nt, Artificial Sequence
  Description of Artificial Sequence: Synthetic oligonucleotide
aauucucgcgccgucccgc

SEQ ID NO: 3174762 - RNA, 19 nt, Artificial Sequence
  Description of Artificial Sequence: Synthetic oligonucleotide
uaaauugccaggagaugcu

SEQ ID NO: 3174763 - RNA, 19 nt, Artificial Sequence
  Description of Artificial Sequence: Synthetic oligonucleotide
gagauguugaacauauuuc

SEQ ID NO: 3174764 - RNA, 19 nt, Artificial Sequence
  Description of Artificial Sequence: Synthetic oligonucleotide
acauguguauguuuugcca

SEQ ID NO: 3174765 - RNA, 19 nt, Artificial Sequence
  Description of Artificial Sequence: Synthetic oligonucleotide
ugcuucuugugucuucucc

SEQ ID NO: 3174766 - RNA, 19 nt, Artificial Sequence
  Description of Artificial Sequence: Synthetic oligonucleotide
ugaugagauuaaagugacg

SEQ ID NO: 3174767 - RNA, 19 nt, Artificial Sequence
  Description of Artificial Sequence: Synthetic oligonucleotide
guaucuugucccuccaucc

SEQ ID NO: 3174768 - RNA, 19 nt, Artificial Sequence
  Description of Artificial Sequence: Synthetic oligonucleotide
acugucacucuuccguaac

SEQ ID NO: 3174769 - RNA, 19 nt, Artificial Sequence
  Description of Artificial Sequence: Synthetic oligonucleotide
agccuaugaaggcaaagug

SEQ ID NO: 3174770 - RNA, 19 nt, Artificial Sequence
  Description of Artificial Sequence: Synthetic oligonucleotide
aguaaugacaggaagucau

SEQ ID NO: 3174771 - RNA, 19 nt, Artificial Sequence
  Description of Artificial Sequence: Synthetic oligonucleotide
aggagaugcuuacacagca

SEQ ID NO: 3174772 - RNA, 19 nt, Artificial Sequence
  Description of Artificial Sequence: Synthetic oligonucleotide
gacccaaacacaaacuuca

SEQ ID NO: 3174773 - RNA, 19 nt, Artificial Sequence
  Description of Artificial Sequence: Synthetic oligonucleotide
uucucauaaccugacuaag

SEQ ID NO: 3174774 - RNA, 19 nt, Artificial Sequence
  Description of Artificial Sequence: Synthetic oligonucleotide
ugacaggaagucauacaug

SEQ ID NO: 3174775 - RNA, 19 nt, Artificial Sequence
  Description of Artificial Sequence: Synthetic oligonucleotide
augagcaguaaugacagga

SEQ ID NO: 3174776 - RNA, 19 nt, Artificial Sequence
  Description of Artificial Sequence: Synthetic oligonucleotide
agauaaauugccaggagau

SEQ ID NO: 3174777 - RNA, 19 nt, Artificial Sequence
  Description of Artificial Sequence: Synthetic oligonucleotide
ugagcaguaaugacaggaa

SEQ ID NO: 3174778 - RNA, 19 nt, Artificial Sequence
  Description of Artificial Sequence: Synthetic oligonucleotide
gauaaauugccaggagaug

SEQ ID NO: 3174779 - RNA, 19 nt, Artificial Sequence
  Description of Artificial Sequence: Synthetic oligonucleotide
cugggugaugagauuaaag

SEQ ID NO: 3174780 - RNA, 19 nt, Artificial Sequence
  Description of Artificial Sequence: Synthetic oligonucleotide
caagcaccugguaaacacg

SEQ ID NO: 3174781 - RNA, 19 nt, Artificial Sequence
  Description of Artificial Sequence: Synthetic oligonucleotide
aacuaaguccaaggcuugg

SEQ ID NO: 3174782 - RNA, 19 nt, Artificial Sequence
  Description of Artificial Sequence: Synthetic oligonucleotide
cauccugugaaccaugaga

SEQ ID NO: 3174783 - RNA, 19 nt, Artificial Sequence
  Description of Artificial Sequence: Synthetic oligonucleotide
cuuggauggcugacgaccc

SEQ ID NO: 3174784 - RNA, 19 nt, Artificial Sequence
  Description of Artificial Sequence: Synthetic oligonucleotide
guagauuucaucuccaugg

SEQ ID NO: 3174785 - RNA, 19 nt, Artificial Sequence
  Description of Artificial Sequence: Synthetic oligonucleotide
uucucagucagaaauaggc

SEQ ID NO: 3174786 - RNA, 19 nt, Artificial Sequence
  Description of Artificial Sequence: Synthetic oligonucleotide
aacagcaacuuucucaguc

SEQ ID NO: 3174787 - RNA, 19 nt, Artificial Sequence
  Description of Artificial Sequence: Synthetic oligonucleotide
ugaaacucauacauguagg

SEQ ID NO: 3174788 - RNA, 19 nt, Artificial Sequence
  Description of Artificial Sequence: Synthetic oligonucleotide
aacuuucucagucagaaau

SEQ ID NO: 3174789 - RNA, 19 nt, Artificial Sequence
  Description of Artificial Sequence: Synthetic oligonucleotide
uguggaaagagguucuugg

SEQ ID NO: 3174790 - RNA, 19 nt, Artificial Sequence
  Description of Artificial Sequence: Synthetic oligonucleotide
uagguugaugcauaggagg

SEQ ID NO: 3174791 - RNA, 19 nt, Artificial Sequence
  Description of Artificial Sequence: Synthetic oligonucleotide
cauugcguagcaaaguugg

SEQ ID NO: 3174792 - RNA, 19 nt, Artificial Sequence
  Description of Artificial Sequence: Synthetic oligonucleotide
ugcauaggaggauaggagg

SEQ ID NO: 3174793 - RNA, 19 nt, Artificial Sequence
  Description of Artificial Sequence: Synthetic oligonucleotide
uacugaaacucauacaugu

SEQ ID NO: 3174794 - RNA, 19 nt, Artificial Sequence
  Description of Artificial Sequence: Synthetic oligonucleotide
uacugaguagauuucaucu

SEQ ID NO: 3174795 - RNA, 19 nt, Artificial Sequence
  Description of Artificial Sequence: Synthetic oligonucleotide
uccaucuuucaaaaugggg

SEQ ID NO: 3174796 - RNA, 19 nt, Artificial Sequence
  Description of Artificial Sequence: Synthetic oligonucleotide
uccauuaggguucccauug

SEQ ID NO: 3174797 - RNA, 19 nt, Artificial Sequence
  Description of Artificial Sequence: Synthetic oligonucleotide
uuuggucauacucuggcca

SEQ ID NO: 3174798 - RNA, 19 nt, Artificial Sequence
  Description of Artificial Sequence: Synthetic oligonucleotide
cucagucagaaauaggccc

SEQ ID NO: 3174799 - RNA, 19 nt, Artificial Sequence
  Description of Artificial Sequence: Synthetic oligonucleotide
ucugcaaucaaguccacuc

SEQ ID NO: 3174800 - RNA, 19 nt, Artificial Sequence
  Description of Artificial Sequence: Synthetic oligonucleotide
cugaaacucauacauguag

SEQ ID NO: 3174801 - RNA, 19 nt, Artificial Sequence
  Description of Artificial Sequence: Synthetic oligonucleotide
uggaaagagguucuuggcc

SEQ ID NO: 3174802 - RNA, 19 nt, Artificial Sequence
  Description of Artificial Sequence: Synthetic oligonucleotide
aucaaguccacucuuacau

SEQ ID NO: 3174803 - RNA, 19 nt, Artificial Sequence
  Description of Artificial Sequence: Synthetic oligonucleotide
ucagucagaaauaggcccc

SEQ ID NO: 3174804 - RNA, 19 nt, Artificial Sequence
  Description of Artificial Sequence: Synthetic oligonucleotide
cagucuguggguuugcugg

SEQ ID NO: 3174805 - RNA, 19 nt, Artificial Sequence
  Description of Artificial Sequence: Synthetic oligonucleotide
agaaauaggccccugugga

SEQ ID NO: 3174806 - RNA, 19 nt, Artificial Sequence
  Description of Artificial Sequence: Synthetic oligonucleotide
cuuuuggucauacucuggc

SEQ ID NO: 3174807 - RNA, 19 nt, Artificial Sequence
  Description of Artificial Sequence: Synthetic oligonucleotide
acugaguagauuucaucuc

SEQ ID NO: 3174808 - RNA, 19 nt, Artificial Sequence
  Description of Artificial Sequence: Synthetic oligonucleotide
uuuugggucucaugugucg

SEQ ID NO: 3174809 - RNA, 19 nt, Artificial Sequence
  Description of Artificial Sequence: Synthetic oligonucleotide
ucagaaauaggccccugug

SEQ ID NO: 3174810 - RNA, 19 nt, Artificial Sequence
  Description of Artificial Sequence: Synthetic oligonucleotide
caguccuucuccauuaggg

SEQ ID NO: 3174811 - RNA, 19 nt, Artificial Sequence
  Description of Artificial Sequence: Synthetic oligonucleotide
ucucagucagaaauaggcc

SEQ ID NO: 3174812 - RNA, 19 nt, Artificial Sequence
  Description of Artificial Sequence: Synthetic oligonucleotide
auacugaguagauuucauc

SEQ ID NO: 3174813 - RNA, 19 nt, Artificial Sequence
  Description of Artificial Sequence: Synthetic oligonucleotide
uccacucuuacauacuucu

SEQ ID NO: 3174814 - RNA, 19 nt, Artificial Sequence
  Description of Artificial Sequence: Synthetic oligonucleotide
ugcguagcaaaguuggccc

SEQ ID NO: 3174815 - RNA, 19 nt, Artificial Sequence
  Description of Artificial Sequence: Synthetic oligonucleotide
cugaguagauuucaucucc

SEQ ID NO: 3174816 - RNA, 19 nt, Artificial Sequence
  Description of Artificial Sequence: Synthetic oligonucleotide
aguggggcaguccuucucc

SEQ ID NO: 3174817 - RNA, 19 nt, Artificial Sequence
  Description of Artificial Sequence: Synthetic oligonucleotide
uuccuuuuggucauacucu

SEQ ID NO: 3174818 - RNA, 19 nt, Artificial Sequence
  Description of Artificial Sequence: Synthetic oligonucleotide
cuuccuuuuggucauacuc

SEQ ID NO: 3174819 - RNA, 19 nt, Artificial Sequence
  Description of Artificial Sequence: Synthetic oligonucleotide
uuucucagucagaaauagg

SEQ ID NO: 3174820 - RNA, 19 nt, Artificial Sequence
  Description of Artificial Sequence: Synthetic oligonucleotide
ugugucgaugcgaagcuug

SEQ ID NO: 3174821 - RNA, 19 nt, Artificial Sequence
  Description of Artificial Sequence: Synthetic oligonucleotide
cauagguugaugcauagga

SEQ ID NO: 3174822 - RNA, 19 nt, Artificial Sequence
  Description of Artificial Sequence: Synthetic oligonucleotide
uggguuguggccccgaucu

SEQ ID NO: 3174823 - RNA, 19 nt, Artificial Sequence
  Description of Artificial Sequence: Synthetic oligonucleotide
ucaugugucgaugcgaagc

SEQ ID NO: 3174824 - RNA, 19 nt, Artificial Sequence
  Description of Artificial Sequence: Synthetic oligonucleotide
aguagauuucaucuccaug

SEQ ID NO: 3174825 - RNA, 19 nt, Artificial Sequence
  Description of Artificial Sequence: Synthetic oligonucleotide
aaucaaguccacucuuaca

SEQ ID NO: 3174826 - RNA, 19 nt, Artificial Sequence
  Description of Artificial Sequence: Synthetic oligonucleotide
aauaggccccuguggaaag

SEQ ID NO: 3174827 - RNA, 19 nt, Artificial Sequence
  Description of Artificial Sequence: Synthetic oligonucleotide
uugaugcauaggaggauag

SEQ ID NO: 3174828 - RNA, 19 nt, Artificial Sequence
  Description of Artificial Sequence: Synthetic oligonucleotide
cauguagccuuccuuuugg

SEQ ID NO: 3174829 - RNA, 19 nt, Artificial Sequence
  Description of Artificial Sequence: Synthetic oligonucleotide
cugguacugaaacucauac

SEQ ID NO: 3174830 - RNA, 19 nt, Artificial Sequence
  Description of Artificial Sequence: Synthetic oligonucleotide
caaguccacucuuacauac

SEQ ID NO: 3174831 - RNA, 19 nt, Artificial Sequence
  Description of Artificial Sequence: Synthetic oligonucleotide
guagccuuccuuuugguca

SEQ ID NO: 3174832 - RNA, 19 nt, Artificial Sequence
  Description of Artificial Sequence: Synthetic oligonucleotide
cagaaauaggccccugugg

SEQ ID NO: 3174833 - RNA, 19 nt, Artificial Sequence
  Description of Artificial Sequence: Synthetic oligonucleotide
auuucaucuccauggucuc

SEQ ID NO: 3174834 - RNA, 19 nt, Artificial Sequence
  Description of Artificial Sequence: Synthetic oligonucleotide
uuggucuccucuucugugg

SEQ ID NO: 3174835 - RNA, 19 nt, Artificial Sequence
  Description of Artificial Sequence: Synthetic oligonucleotide
agauuucaucuccaugguc

SEQ ID NO: 3174836 - RNA, 19 nt, Artificial Sequence
  Description of Artificial Sequence: Synthetic oligonucleotide
uuuuggucauacucuggcc

SEQ ID NO: 3174837 - RNA, 19 nt, Artificial Sequence
  Description of Artificial Sequence: Synthetic oligonucleotide
uguggcuccaucuuucaaa

SEQ ID NO: 3174838 - RNA, 19 nt, Artificial Sequence
  Description of Artificial Sequence: Synthetic oligonucleotide
ugaguagauuucaucucca

SEQ ID NO: 3174839 - RNA, 19 nt, Artificial Sequence
  Description of Artificial Sequence: Synthetic oligonucleotide
ucauguagccuuccuuuug

SEQ ID NO: 3174840 - RNA, 19 nt, Artificial Sequence
  Description of Artificial Sequence: Synthetic oligonucleotide
cuuucucagucagaaauag

SEQ ID NO: 3174841 - RNA, 19 nt, Artificial Sequence
  Description of Artificial Sequence: Synthetic oligonucleotide
uccuuuuggucauacucug

SEQ ID NO: 3174842 - RNA, 19 nt, Artificial Sequence
  Description of Artificial Sequence: Synthetic oligonucleotide
uucccauugcguagcaaag

SEQ ID NO: 3174843 - RNA, 19 nt, Artificial Sequence
  Description of Artificial Sequence: Synthetic oligonucleotide
gaugcauaggaggauagga

SEQ ID NO: 3174844 - RNA, 19 nt, Artificial Sequence
  Description of Artificial Sequence: Synthetic oligonucleotide
gauuucaucuccauggucu

SEQ ID NO: 3174845 - RNA, 19 nt, Artificial Sequence
  Description of Artificial Sequence: Synthetic oligonucleotide
ucucaugugucgaugcgaa

SEQ ID NO: 3174846 - RNA, 19 nt, Artificial Sequence
  Description of Artificial Sequence: Synthetic oligonucleotide
aucauagguugaugcauag

SEQ ID NO: 3174847 - RNA, 19 nt, Artificial Sequence
  Description of Artificial Sequence: Synthetic oligonucleotide
uccuucuccauuaggguuc

SEQ ID NO: 3174848 - RNA, 19 nt, Artificial Sequence
  Description of Artificial Sequence: Synthetic oligonucleotide
uagauuucaucuccauggu

SEQ ID NO: 3174849 - RNA, 19 nt, Artificial Sequence
  Description of Artificial Sequence: Synthetic oligonucleotide
cauuaggguucccauugcg

SEQ ID NO: 3174850 - RNA, 19 nt, Artificial Sequence
  Description of Artificial Sequence: Synthetic oligonucleotide
uuaggguucccauugcgua

SEQ ID NO: 3174851 - RNA, 19 nt, Artificial Sequence
  Description of Artificial Sequence: Synthetic oligonucleotide
auaggaggauaggaggugg

SEQ ID NO: 3174852 - RNA, 19 nt, Artificial Sequence
  Description of Artificial Sequence: Synthetic oligonucleotide
uugcguagcaaaguuggcc

SEQ ID NO: 3174853 - RNA, 19 nt, Artificial Sequence
  Description of Artificial Sequence: Synthetic oligonucleotide
ggcuccaucuuucaaaaug

SEQ ID NO: 3174854 - RNA, 19 nt, Artificial Sequence
  Description of Artificial Sequence: Synthetic oligonucleotide
uccauggucuccuauuauc

SEQ ID NO: 3174855 - RNA, 19 nt, Artificial Sequence
  Description of Artificial Sequence: Synthetic oligonucleotide
uuggcugguacugaaacuc

SEQ ID NO: 3174856 - RNA, 19 nt, Artificial Sequence
  Description of Artificial Sequence: Synthetic oligonucleotide
ucgaugcgaagcuuggcug

SEQ ID NO: 3174857 - RNA, 19 nt, Artificial Sequence
  Description of Artificial Sequence: Synthetic oligonucleotide
acagcaacuuucucaguca

SEQ ID NO: 3174858 - RNA, 19 nt, Artificial Sequence
  Description of Artificial Sequence: Synthetic oligonucleotide
ucauagguugaugcauagg

SEQ ID NO: 3174859 - RNA, 19 nt, Artificial Sequence
  Description of Artificial Sequence: Synthetic oligonucleotide
gguacugaaacucauacau

SEQ ID NO: 3174860 - RNA, 19 nt, Artificial Sequence
  Description of Artificial Sequence: Synthetic oligonucleotide
aaauaggccccuguggaaa

SEQ ID NO: 3174861 - RNA, 19 nt, Artificial Sequence
  Description of Artificial Sequence: Synthetic oligonucleotide
aauacugaguagauuucau

SEQ ID NO: 3174862 - RNA, 19 nt, Artificial Sequence
  Description of Artificial Sequence: Synthetic oligonucleotide
cuccaucuuucaaaauggg

SEQ ID NO: 3174863 - RNA, 19 nt, Artificial Sequence
  Description of Artificial Sequence: Synthetic oligonucleotide
gaauacugaguagauuuca

SEQ ID NO: 3174864 - RNA, 19 nt, Artificial Sequence
  Description of Artificial Sequence: Synthetic oligonucleotide
ugaugcauaggaggauagg

SEQ ID NO: 3174865 - RNA, 19 nt, Artificial Sequence
  Description of Artificial Sequence: Synthetic oligonucleotide
ugucuuucagucugugggu

SEQ ID NO: 3174866 - RNA, 19 nt, Artificial Sequence
  Description of Artificial Sequence: Synthetic oligonucleotide
ugguacugaaacucauaca

SEQ ID NO: 3174867 - RNA, 19 nt, Artificial Sequence
  Description of Artificial Sequence: Synthetic oligonucleotide
uaggguucccauugcguag

SEQ ID NO: 3174868 - RNA, 19 nt, Artificial Sequence
  Description of Artificial Sequence: Synthetic oligonucleotide
ucuucauguagccuuccuu

SEQ ID NO: 3174869 - RNA, 19 nt, Artificial Sequence
  Description of Artificial Sequence: Synthetic oligonucleotide
cacucuuacauacuucuca

SEQ ID NO: 3174870 - RNA, 19 nt, Artificial Sequence
  Description of Artificial Sequence: Synthetic oligonucleotide
caaucaaguccacucuuac

SEQ ID NO: 3174871 - RNA, 19 nt, Artificial Sequence
  Description of Artificial Sequence: Synthetic oligonucleotide
aguccuucuccauuagggu

SEQ ID NO: 3174872 - RNA, 19 nt, Artificial Sequence
  Description of Artificial Sequence: Synthetic oligonucleotide
auagguugaugcauaggag

SEQ ID NO: 3174873 - RNA, 19 nt, Artificial Sequence
  Description of Artificial Sequence: Synthetic oligonucleotide
guggaaagagguucuuggc

SEQ ID NO: 3174874 - RNA, 19 nt, Artificial Sequence
  Description of Artificial Sequence: Synthetic oligonucleotide
ggaaagagguucuuggcca

SEQ ID NO: 3174875 - RNA, 19 nt, Artificial Sequence
  Description of Artificial Sequence: Synthetic oligonucleotide
gcuccaucuuucaaaaugg

SEQ ID NO: 3174876 - RNA, 19 nt, Artificial Sequence
  Description of Artificial Sequence: Synthetic oligonucleotide
ucuucuguggcuccaucuu

SEQ ID NO: 3174877 - RNA, 19 nt, Artificial Sequence
  Description of Artificial Sequence: Synthetic oligonucleotide
augcauaggaggauaggag

SEQ ID NO: 3174878 - RNA, 19 nt, Artificial Sequence
  Description of Artificial Sequence: Synthetic oligonucleotide
ucagucuguggguuugcug

SEQ ID NO: 3174879 - RNA, 19 nt, Artificial Sequence
  Description of Artificial Sequence: Synthetic oligonucleotide
uucuguggcuccaucuuuc

SEQ ID NO: 3174880 - RNA, 19 nt, Artificial Sequence
  Description of Artificial Sequence: Synthetic oligonucleotide
guuggucuccucuucugug

SEQ ID NO: 3174881 - RNA, 19 nt, Artificial Sequence
  Description of Artificial Sequence: Synthetic oligonucleotide
ggcuccagcaucucugugg

SEQ ID NO: 3174882 - RNA, 19 nt, Artificial Sequence
  Description of Artificial Sequence: Synthetic oligonucleotide
uuugcuggguuguggcccc

SEQ ID NO: 3174883 - RNA, 19 nt, Artificial Sequence
  Description of Artificial Sequence: Synthetic oligonucleotide
ucuccauggucuccuauua

SEQ ID NO: 3174884 - RNA, 19 nt, Artificial Sequence
  Description of Artificial Sequence: Synthetic oligonucleotide
aaccaaauaauauucacag

SEQ ID NO: 3174885 - RNA, 19 nt, Artificial Sequence
  Description of Artificial Sequence: Synthetic oligonucleotide
aacauuguagguuccaagc

SEQ ID NO: 3174886 - RNA, 19 nt, Artificial Sequence
  Description of Artificial Sequence: Synthetic oligonucleotide
uugaccuucaucaagaagc

SEQ ID NO: 3174887 - RNA, 19 nt, Artificial Sequence
  Description of Artificial Sequence: Synthetic oligonucleotide
aagacggaucuccaaagcc

SEQ ID NO: 3174888 - RNA, 19 nt, Artificial Sequence
  Description of Artificial Sequence: Synthetic oligonucleotide
gaagagucgaaguuguucg

SEQ ID NO: 3174889 - RNA, 19 nt, Artificial Sequence
  Description of Artificial Sequence: Synthetic oligonucleotide
aacaagauagccaggacac

SEQ ID NO: 3174890 - RNA, 19 nt, Artificial Sequence
  Description of Artificial Sequence: Synthetic oligonucleotide
uguagcauccucaagaaaa

SEQ ID NO: 3174891 - RNA, 19 nt, Artificial Sequence
  Description of Artificial Sequence: Synthetic oligonucleotide
uucgugaggaggcagaagg

SEQ ID NO: 3174892 - RNA, 19 nt, Artificial Sequence
  Description of Artificial Sequence: Synthetic oligonucleotide
aauaggcccacacuucagc

SEQ ID NO: 3174893 - RNA, 19 nt, Artificial Sequence
  Description of Artificial Sequence: Synthetic oligonucleotide
uucaucaagaagcgaaugg

SEQ ID NO: 3174894 - RNA, 19 nt, Artificial Sequence
  Description of Artificial Sequence: Synthetic oligonucleotide
auuguaguuauucagugca

SEQ ID NO: 3174895 - RNA, 19 nt, Artificial Sequence
  Description of Artificial Sequence: Synthetic oligonucleotide
aacugcaccgcauugaccu

SEQ ID NO: 3174896 - RNA, 19 nt, Artificial Sequence
  Description of Artificial Sequence: Synthetic oligonucleotide
gaauacuccuacuuguccg

SEQ ID NO: 3174897 - RNA, 19 nt, Artificial Sequence
  Description of Artificial Sequence: Synthetic oligonucleotide
augugauucucauucaggg

SEQ ID NO: 3174898 - RNA, 19 nt, Artificial Sequence
  Description of Artificial Sequence: Synthetic oligonucleotide
auacuuguaggccugcucg

SEQ ID NO: 3174899 - RNA, 19 nt, Artificial Sequence
  Description of Artificial Sequence: Synthetic oligonucleotide
aauaauauucacagcuggg

SEQ ID NO: 3174900 - RNA, 19 nt, Artificial Sequence
  Description of Artificial Sequence: Synthetic oligonucleotide
uuagugaugucuuucguga

SEQ ID NO: 3174901 - RNA, 19 nt, Artificial Sequence
  Description of Artificial Sequence: Synthetic oligonucleotide
guucagauaguccaucugg

SEQ ID NO: 3174902 - RNA, 19 nt, Artificial Sequence
  Description of Artificial Sequence: Synthetic oligonucleotide
uaacgguucguucauagca

SEQ ID NO: 3174903 - RNA, 19 nt, Artificial Sequence
  Description of Artificial Sequence: Synthetic oligonucleotide
ucucuuacagacuugcaug

SEQ ID NO: 3174904 - RNA, 19 nt, Artificial Sequence
  Description of Artificial Sequence: Synthetic oligonucleotide
ucaguuucagcuuuagugu

SEQ ID NO: 3174905 - RNA, 19 nt, Artificial Sequence
  Description of Artificial Sequence: Synthetic oligonucleotide
uucagauaguccaucuggg

SEQ ID NO: 3174906 - RNA, 19 nt, Artificial Sequence
  Description of Artificial Sequence: Synthetic oligonucleotide
aaaguccuucuugagaagg

SEQ ID NO: 3174907 - RNA, 19 nt, Artificial Sequence
  Description of Artificial Sequence: Synthetic oligonucleotide
uccucaagaaaauuucugc

SEQ ID NO: 3174908 - RNA, 19 nt, Artificial Sequence
  Description of Artificial Sequence: Synthetic oligonucleotide
aacaggcaauuccuagucc

SEQ ID NO: 3174909 - RNA, 19 nt, Artificial Sequence
  Description of Artificial Sequence: Synthetic oligonucleotide
uuuagugaugucuuucgug

SEQ ID NO: 3174910 - RNA, 19 nt, Artificial Sequence
  Description of Artificial Sequence: Synthetic oligonucleotide
uuccacucaggaaauagag

SEQ ID NO: 3174911 - RNA, 19 nt, Artificial Sequence
  Description of Artificial Sequence: Synthetic oligonucleotide
aaugugauucucauucagg

SEQ ID NO: 3174912 - RNA, 19 nt, Artificial Sequence
  Description of Artificial Sequence: Synthetic oligonucleotide
guagguuccaagcauguag

SEQ ID NO: 3174913 - RNA, 19 nt, Artificial Sequence
  Description of Artificial Sequence: Synthetic oligonucleotide
acuguugauuucugcaagc

SEQ ID NO: 3174914 - RNA, 19 nt, Artificial Sequence
  Description of Artificial Sequence: Synthetic oligonucleotide
ugaagugcaucucggaagc

SEQ ID NO: 3174915 - RNA, 19 nt, Artificial Sequence
  Description of Artificial Sequence: Synthetic oligonucleotide
ugacuucugccucaaaugc

SEQ ID NO: 3174916 - RNA, 19 nt, Artificial Sequence
  Description of Artificial Sequence: Synthetic oligonucleotide
auaauccagccagugaucc

SEQ ID NO: 3174917 - RNA, 19 nt, Artificial Sequence
  Description of Artificial Sequence: Synthetic oligonucleotide
caagcugugaaugugauuc

SEQ ID NO: 3174918 - RNA, 19 nt, Artificial Sequence
  Description of Artificial Sequence: Synthetic oligonucleotide
uugucguccaaccuucagg

SEQ ID NO: 3174919 - RNA, 19 nt, Artificial Sequence
  Description of Artificial Sequence: Synthetic oligonucleotide
uacucuguguacaaacugc

SEQ ID NO: 3174920 - RNA, 19 nt, Artificial Sequence
  Description of Artificial Sequence: Synthetic oligonucleotide
cagacuugcauguagguug

SEQ ID NO: 3174921 - RNA, 19 nt, Artificial Sequence
  Description of Artificial Sequence: Synthetic oligonucleotide
ucaggcaugaaggugaucu

SEQ ID NO: 3174922 - RNA, 19 nt, Artificial Sequence
  Description of Artificial Sequence: Synthetic oligonucleotide
ucuccaugaagauuguggc

SEQ ID NO: 3174923 - RNA, 19 nt, Artificial Sequence
  Description of Artificial Sequence: Synthetic oligonucleotide
ugaccuucaucaagaagcg

SEQ ID NO: 3174924 - RNA, 19 nt, Artificial Sequence
  Description of Artificial Sequence: Synthetic oligonucleotide
ugaauacuccuacuugucc

SEQ ID NO: 3174925 - RNA, 19 nt, Artificial Sequence
  Description of Artificial Sequence: Synthetic oligonucleotide
aagagucgaaguuguucgc

SEQ ID NO: 3174926 - RNA, 19 nt, Artificial Sequence
  Description of Artificial Sequence: Synthetic oligonucleotide
aagcgaauggucuccauga

SEQ ID NO: 3174927 - RNA, 19 nt, Artificial Sequence
  Description of Artificial Sequence: Synthetic oligonucleotide
ucagcuuuaguguauacuu

SEQ ID NO: 3174928 - RNA, 19 nt, Artificial Sequence
  Description of Artificial Sequence: Synthetic oligonucleotide
aaugcgaagagucgaaguu

SEQ ID NO: 3174929 - RNA, 19 nt, Artificial Sequence
  Description of Artificial Sequence: Synthetic oligonucleotide
ugucuuugccuuuucauac

SEQ ID NO: 3174930 - RNA, 19 nt, Artificial Sequence
  Description of Artificial Sequence: Synthetic oligonucleotide
acuccuacuuguccgaacg

SEQ ID NO: 3174931 - RNA, 19 nt, Artificial Sequence
  Description of Artificial Sequence: Synthetic oligonucleotide
gaagcaucaacuacaaaac

SEQ ID NO: 3174932 - RNA, 19 nt, Artificial Sequence
  Description of Artificial Sequence: Synthetic oligonucleotide
ucaggaaauagagauggcc

SEQ ID NO: 3174933 - RNA, 19 nt, Artificial Sequence
  Description of Artificial Sequence: Synthetic oligonucleotide
gaaugugauucucauucag

SEQ ID NO: 3174934 - RNA, 19 nt, Artificial Sequence
  Description of Artificial Sequence: Synthetic oligonucleotide
ugucguccaaccuucaggc

SEQ ID NO: 3174935 - RNA, 19 nt, Artificial Sequence
  Description of Artificial Sequence: Synthetic oligonucleotide
agugauccaaguucugggg

SEQ ID NO: 3174936 - RNA, 19 nt, Artificial Sequence
  Description of Artificial Sequence: Synthetic oligonucleotide
ucucuucauaauauacugc

SEQ ID NO: 3174937 - RNA, 19 nt, Artificial Sequence
  Description of Artificial Sequence: Synthetic oligonucleotide
agugaugucuuucgugagg

SEQ ID NO: 3174938 - RNA, 19 nt, Artificial Sequence
  Description of Artificial Sequence: Synthetic oligonucleotide
aacuacaaaacuaacgguu

SEQ ID NO: 3174939 - RNA, 19 nt, Artificial Sequence
  Description of Artificial Sequence: Synthetic oligonucleotide
uaacauuguagguuccaag

SEQ ID NO: 3174940 - RNA, 19 nt, Artificial Sequence
  Description of Artificial Sequence: Synthetic oligonucleotide
acuaacgguucguucauag

SEQ ID NO: 3174941 - RNA, 19 nt, Artificial Sequence
  Description of Artificial Sequence: Synthetic oligonucleotide
uucauagcaugccuuggcc

SEQ ID NO: 3174942 - RNA, 19 nt, Artificial Sequence
  Description of Artificial Sequence: Synthetic oligonucleotide
ggcaccauaauccagccag

SEQ ID NO: 3174943 - RNA, 19 nt, Artificial Sequence
  Description of Artificial Sequence: Synthetic oligonucleotide
ccgaacgucagaaagacgg

SEQ ID NO: 3174944 - RNA, 19 nt, Artificial Sequence
  Description of Artificial Sequence: Synthetic oligonucleotide
ucuucauaauauacugcug

SEQ ID NO: 3174945 - RNA, 19 nt, Artificial Sequence
  Description of Artificial Sequence: Synthetic oligonucleotide
augucuuucgugaggaggc

SEQ ID NO: 3174946 - RNA, 19 nt, Artificial Sequence
  Description of Artificial Sequence: Synthetic oligonucleotide
acuacaaaacuaacgguuc

SEQ ID NO: 3174947 - RNA, 19 nt, Artificial Sequence
  Description of Artificial Sequence: Synthetic oligonucleotide
uagguuccaagcauguagc

SEQ ID NO: 3174948 - RNA, 19 nt, Artificial Sequence
  Description of Artificial Sequence: Synthetic oligonucleotide
gucuccaugaagauugugg

SEQ ID NO: 3174949 - RNA, 19 nt, Artificial Sequence
  Description of Artificial Sequence: Synthetic oligonucleotide
cagauaguccaucugggcc

SEQ ID NO: 3174950 - RNA, 19 nt, Artificial Sequence
  Description of Artificial Sequence: Synthetic oligonucleotide
cuacaaaacuaacgguucg

SEQ ID NO: 3174951 - RNA, 19 nt, Artificial Sequence
  Description of Artificial Sequence: Synthetic oligonucleotide
uuucguaguucucauugac

SEQ ID NO: 3174952 - RNA, 19 nt, Artificial Sequence
  Description of Artificial Sequence: Synthetic oligonucleotide
agucgaaguuguucgcugc

SEQ ID NO: 3174953 - RNA, 19 nt, Artificial Sequence
  Description of Artificial Sequence: Synthetic oligonucleotide
auugacuucugccucaaau

SEQ ID NO: 3174954 - RNA, 19 nt, Artificial Sequence
  Description of Artificial Sequence: Synthetic oligonucleotide
ugugccaguacucugugua

SEQ ID NO: 3174955 - RNA, 19 nt, Artificial Sequence
  Description of Artificial Sequence: Synthetic oligonucleotide
ugaucucuuacagacuugc

SEQ ID NO: 3174956 - RNA, 19 nt, Artificial Sequence
  Description of Artificial Sequence: Synthetic oligonucleotide
ucugccucaaaugcgaaga

SEQ ID NO: 3174957 - RNA, 19 nt, Artificial Sequence
  Description of Artificial Sequence: Synthetic oligonucleotide
ucacaccccagacauuagg

SEQ ID NO: 3174958 - RNA, 19 nt, Artificial Sequence
  Description of Artificial Sequence: Synthetic oligonucleotide
ucaucaagaagcgaauggu

SEQ ID NO: 3174959 - RNA, 19 nt, Artificial Sequence
  Description of Artificial Sequence: Synthetic oligonucleotide
uaacaggcaauuccuaguc

SEQ ID NO: 3174960 - RNA, 19 nt, Artificial Sequence
  Description of Artificial Sequence: Synthetic oligonucleotide
auugaccuucaucaagaag

SEQ ID NO: 3174961 - RNA, 19 nt, Artificial Sequence
  Description of Artificial Sequence: Synthetic oligonucleotide
guuccaagcauguagcauc

SEQ ID NO: 3174962 - RNA, 19 nt, Artificial Sequence
  Description of Artificial Sequence: Synthetic oligonucleotide
ucagauaguccaucugggc

SEQ ID NO: 3174963 - RNA, 19 nt, Artificial Sequence
  Description of Artificial Sequence: Synthetic oligonucleotide
cagugauccaaguucuggg

SEQ ID NO: 3174964 - RNA, 19 nt, Artificial Sequence
  Description of Artificial Sequence: Synthetic oligonucleotide
ucguaguucucauugacuu

SEQ ID NO: 3174965 - RNA, 19 nt, Artificial Sequence
  Description of Artificial Sequence: Synthetic oligonucleotide
gguagauuugucccagucg

SEQ ID NO: 3174966 - RNA, 19 nt, Artificial Sequence
  Description of Artificial Sequence: Synthetic oligonucleotide
agugagcuccuccagccgg

SEQ ID NO: 3174967 - RNA, 19 nt, Artificial Sequence
  Description of Artificial Sequence: Synthetic oligonucleotide
ucaugugccaguacucugu

SEQ ID NO: 3174968 - RNA, 19 nt, Artificial Sequence
  Description of Artificial Sequence: Synthetic oligonucleotide
uccaacaagauagccagga

SEQ ID NO: 3174969 - RNA, 19 nt, Artificial Sequence
  Description of Artificial Sequence: Synthetic oligonucleotide
uccuucuugagaaggugug

SEQ ID NO: 3174970 - RNA, 19 nt, Artificial Sequence
  Description of Artificial Sequence: Synthetic oligonucleotide
gaagcgaauggucuccaug

SEQ ID NO: 3174971 - RNA, 19 nt, Artificial Sequence
  Description of Artificial Sequence: Synthetic oligonucleotide
cagugcauuugcuucagag

SEQ ID NO: 3174972 - RNA, 19 nt, Artificial Sequence
  Description of Artificial Sequence: Synthetic oligonucleotide
uguagguugucuuugccuu

SEQ ID NO: 3174973 - RNA, 19 nt, Artificial Sequence
  Description of Artificial Sequence: Synthetic oligonucleotide
gucagaaagacggaucucc

SEQ ID NO: 3174974 - RNA, 19 nt, Artificial Sequence
  Description of Artificial Sequence: Synthetic oligonucleotide
aggaaauagagauggcccu

SEQ ID NO: 3174975 - RNA, 19 nt, Artificial Sequence
  Description of Artificial Sequence: Synthetic oligonucleotide
cucguuuucaguuucagcu

SEQ ID NO: 3174976 - RNA, 19 nt, Artificial Sequence
  Description of Artificial Sequence: Synthetic oligonucleotide
uucguaguucucauugacu

SEQ ID NO: 3174977 - RNA, 19 nt, Artificial Sequence
  Description of Artificial Sequence: Synthetic oligonucleotide
agucguaggaagaugaagu

SEQ ID NO: 3174978 - RNA, 19 nt, Artificial Sequence
  Description of Artificial Sequence: Synthetic oligonucleotide
aucucuuacagacuugcau

SEQ ID NO: 3174979 - RNA, 19 nt, Artificial Sequence
  Description of Artificial Sequence: Synthetic oligonucleotide
ugcgaagagucgaaguugu

SEQ ID NO: 3174980 - RNA, 19 nt, Artificial Sequence
  Description of Artificial Sequence: Synthetic oligonucleotide
agauuugucccagucguag

SEQ ID NO: 3174981 - RNA, 19 nt, Artificial Sequence
  Description of Artificial Sequence: Synthetic oligonucleotide
uguacaaacugcaccgcau

SEQ ID NO: 3174982 - RNA, 19 nt, Artificial Sequence
  Description of Artificial Sequence: Synthetic oligonucleotide
acgucagaaagacggaucu

SEQ ID NO: 3174983 - RNA, 19 nt, Artificial Sequence
  Description of Artificial Sequence: Synthetic oligonucleotide
uuccaagcauguagcaucc

SEQ ID NO: 3174984 - RNA, 19 nt, Artificial Sequence
  Description of Artificial Sequence: Synthetic oligonucleotide
aaaucagacacucuucugc

SEQ ID NO: 3174985 - RNA, 19 nt, Artificial Sequence
  Description of Artificial Sequence: Synthetic oligonucleotide
auugucaaagacaaaaucc

SEQ ID NO: 3174986 - RNA, 19 nt, Artificial Sequence
  Description of Artificial Sequence: Synthetic oligonucleotide
uuucacaccauauaacugg

SEQ ID NO: 3174987 - RNA, 19 nt, Artificial Sequence
  Description of Artificial Sequence: Synthetic oligonucleotide
agugaauugucuuuagggc

SEQ ID NO: 3174988 - RNA, 19 nt, Artificial Sequence
  Description of Artificial Sequence: Synthetic oligonucleotide
uuuauuauauggcucaaca

SEQ ID NO: 3174989 - RNA, 19 nt, Artificial Sequence
  Description of Artificial Sequence: Synthetic oligonucleotide
uguauagagaacaaggaac

SEQ ID NO: 3174990 - RNA, 19 nt, Artificial Sequence
  Description of Artificial Sequence: Synthetic oligonucleotide
uugaacauaagcuuccagg

SEQ ID NO: 3174991 - RNA, 19 nt, Artificial Sequence
  Description of Artificial Sequence: Synthetic oligonucleotide
gagauagggauuuugagag

SEQ ID NO: 3174992 - RNA, 19 nt, Artificial Sequence
  Description of Artificial Sequence: Synthetic oligonucleotide
agaacaaggaacaucaggc

SEQ ID NO: 3174993 - RNA, 19 nt, Artificial Sequence
  Description of Artificial Sequence: Synthetic oligonucleotide
uuauccaacugacugaucc

SEQ ID NO: 3174994 - RNA, 19 nt, Artificial Sequence
  Description of Artificial Sequence: Synthetic oligonucleotide
uuugacacagcuaauguga

SEQ ID NO: 3174995 - RNA, 19 nt, Artificial Sequence
  Description of Artificial Sequence: Synthetic oligonucleotide
guagacauagcucugaagc

SEQ ID NO: 3174996 - RNA, 19 nt, Artificial Sequence
  Description of Artificial Sequence: Synthetic oligonucleotide
uagagaacaaggaacauca

SEQ ID NO: 3174997 - RNA, 19 nt, Artificial Sequence
  Description of Artificial Sequence: Synthetic oligonucleotide
aaagauucaaucccaguug

SEQ ID NO: 3174998 - RNA, 19 nt, Artificial Sequence
  Description of Artificial Sequence: Synthetic oligonucleotide
aguucaauagcucuucggg

SEQ ID NO: 3174999 - RNA, 19 nt, Artificial Sequence
  Description of Artificial Sequence: Synthetic oligonucleotide
aagacguaauaguuuaggg

SEQ ID NO: 3175000 - RNA, 19 nt, Artificial Sequence
  Description of Artificial Sequence: Synthetic oligonucleotide
uauuauauggcucaacaau

SEQ ID NO: 3175001 - RNA, 19 nt, Artificial Sequence
  Description of Artificial Sequence: Synthetic oligonucleotide
acuuucccaaaucagacac

SEQ ID NO: 3175002 - RNA, 19 nt, Artificial Sequence
  Description of Artificial Sequence: Synthetic oligonucleotide
uucaguauugucaaagaca

SEQ ID NO: 3175003 - RNA, 19 nt, Artificial Sequence
  Description of Artificial Sequence: Synthetic oligonucleotide
ucaguauugucaaagacaa

SEQ ID NO: 3175004 - RNA, 19 nt, Artificial Sequence
  Description of Artificial Sequence: Synthetic oligonucleotide
accauaaugggauacacug

SEQ ID NO: 3175005 - RNA, 19 nt, Artificial Sequence
  Description of Artificial Sequence: Synthetic oligonucleotide
uagauugagaaguauaaac

SEQ ID NO: 3175006 - RNA, 19 nt, Artificial Sequence
  Description of Artificial Sequence: Synthetic oligonucleotide
uugaguacagagaagcugc

SEQ ID NO: 3175007 - RNA, 19 nt, Artificial Sequence
  Description of Artificial Sequence: Synthetic oligonucleotide
aaagacguaauaguuuagg

SEQ ID NO: 3175008 - RNA, 19 nt, Artificial Sequence
  Description of Artificial Sequence: Synthetic oligonucleotide
aaaaugccuguuucaaaac

SEQ ID NO: 3175009 - RNA, 19 nt, Artificial Sequence
  Description of Artificial Sequence: Synthetic oligonucleotide
ucacugauugaacauaagc

SEQ ID NO: 3175010 - RNA, 19 nt, Artificial Sequence
  Description of Artificial Sequence: Synthetic oligonucleotide
auaacucuggcaaugaaac

SEQ ID NO: 3175011 - RNA, 19 nt, Artificial Sequence
  Description of Artificial Sequence: Synthetic oligonucleotide
uuguguaucaucuuccaug

SEQ ID NO: 3175012 - RNA, 19 nt, Artificial Sequence
  Description of Artificial Sequence: Synthetic oligonucleotide
uagucauucauaacucugg

SEQ ID NO: 3175013 - RNA, 19 nt, Artificial Sequence
  Description of Artificial Sequence: Synthetic oligonucleotide
gagaacaaggaacaucagg

SEQ ID NO: 3175014 - RNA, 19 nt, Artificial Sequence
  Description of Artificial Sequence: Synthetic oligonucleotide
uuuguauuucauccuauca

SEQ ID NO: 3175015 - RNA, 19 nt, Artificial Sequence
  Description of Artificial Sequence: Synthetic oligonucleotide
uguauuucauccuaucaac

SEQ ID NO: 3175016 - RNA, 19 nt, Artificial Sequence
  Description of Artificial Sequence: Synthetic oligonucleotide
aaaauccguagcaagucgc

SEQ ID NO: 3175017 - RNA, 19 nt, Artificial Sequence
  Description of Artificial Sequence: Synthetic oligonucleotide
gaucgaagagucgagauag

SEQ ID NO: 3175018 - RNA, 19 nt, Artificial Sequence
  Description of Artificial Sequence: Synthetic oligonucleotide
aaguucaauagcucuucgg

SEQ ID NO: 3175019 - RNA, 19 nt, Artificial Sequence
  Description of Artificial Sequence: Synthetic oligonucleotide
cugagcuggacaaugaccc

SEQ ID NO: 3175020 - RNA, 19 nt, Artificial Sequence
  Description of Artificial Sequence: Synthetic oligonucleotide
aauagauugagaaguauaa

SEQ ID NO: 3175021 - RNA, 19 nt, Artificial Sequence
  Description of Artificial Sequence: Synthetic oligonucleotide
uuguauuucauccuaucaa

SEQ ID NO: 3175022 - RNA, 19 nt, Artificial Sequence
  Description of Artificial Sequence: Synthetic oligonucleotide
auaggguuguagugaaucc

SEQ ID NO: 3175023 - RNA, 19 nt, Artificial Sequence
  Description of Artificial Sequence: Synthetic oligonucleotide
ucacuugucuggaagagca

SEQ ID NO: 3175024 - RNA, 19 nt, Artificial Sequence
  Description of Artificial Sequence: Synthetic oligonucleotide
ugauugaacauaagcuucc

SEQ ID NO: 3175025 - RNA, 19 nt, Artificial Sequence
  Description of Artificial Sequence: Synthetic oligonucleotide
uucagauggaugaucgucc

SEQ ID NO: 3175026 - RNA, 19 nt, Artificial Sequence
  Description of Artificial Sequence: Synthetic oligonucleotide
uauaacuggauggucuucg

SEQ ID NO: 3175027 - RNA, 19 nt, Artificial Sequence
  Description of Artificial Sequence: Synthetic oligonucleotide
agcucucucauguauagag

SEQ ID NO: 3175028 - RNA, 19 nt, Artificial Sequence
  Description of Artificial Sequence: Synthetic oligonucleotide
auaacuucaguauugucaa

SEQ ID NO: 3175029 - RNA, 19 nt, Artificial Sequence
  Description of Artificial Sequence: Synthetic oligonucleotide
aaaugccuguuucaaaacu

SEQ ID NO: 3175030 - RNA, 19 nt, Artificial Sequence
  Description of Artificial Sequence: Synthetic oligonucleotide
uuacaagacuggcauuucg

SEQ ID NO: 3175031 - RNA, 19 nt, Artificial Sequence
  Description of Artificial Sequence: Synthetic oligonucleotide
ucuucgggcaauaacuuca

SEQ ID NO: 3175032 - RNA, 19 nt, Artificial Sequence
  Description of Artificial Sequence: Synthetic oligonucleotide
aacucuggcaaugaaaccu

SEQ ID NO: 3175033 - RNA, 19 nt, Artificial Sequence
  Description of Artificial Sequence: Synthetic oligonucleotide
uagguguaguucuuuaucc

SEQ ID NO: 3175034 - RNA, 19 nt, Artificial Sequence
  Description of Artificial Sequence: Synthetic oligonucleotide
uuuagggcugaugugacag

SEQ ID NO: 3175035 - RNA, 19 nt, Artificial Sequence
  Description of Artificial Sequence: Synthetic oligonucleotide
gacguaauaguuuagggua

SEQ ID NO: 3175036 - RNA, 19 nt, Artificial Sequence
  Description of Artificial Sequence: Synthetic oligonucleotide
uggcaaugaaaccuuguag

SEQ ID NO: 3175037 - RNA, 19 nt, Artificial Sequence
  Description of Artificial Sequence: Synthetic oligonucleotide
gaagaguagacauagcucu

SEQ ID NO: 3175038 - RNA, 19 nt, Artificial Sequence
  Description of Artificial Sequence: Synthetic oligonucleotide
gauacacuggugcaaauuc

SEQ ID NO: 3175039 - RNA, 19 nt, Artificial Sequence
  Description of Artificial Sequence: Synthetic oligonucleotide
acugaagucaguaagggcu

SEQ ID NO: 3175040 - RNA, 19 nt, Artificial Sequence
  Description of Artificial Sequence: Synthetic oligonucleotide
acagucguccugcaggagc

SEQ ID NO: 3175041 - RNA, 19 nt, Artificial Sequence
  Description of Artificial Sequence: Synthetic oligonucleotide
aaugggauacacuggugca

SEQ ID NO: 3175042 - RNA, 19 nt, Artificial Sequence
  Description of Artificial Sequence: Synthetic oligonucleotide
aacuuaaacagggaauuca

SEQ ID NO: 3175043 - RNA, 19 nt, Artificial Sequence
  Description of Artificial Sequence: Synthetic oligonucleotide
uguguaucaucuuccaugu

SEQ ID NO: 3175044 - RNA, 19 nt, Artificial Sequence
  Description of Artificial Sequence: Synthetic oligonucleotide
auccaaacauucaaagugc

SEQ ID NO: 3175045 - RNA, 19 nt, Artificial Sequence
  Description of Artificial Sequence: Synthetic oligonucleotide
uucgauaggacuuucccaa

SEQ ID NO: 3175046 - RNA, 19 nt, Artificial Sequence
  Description of Artificial Sequence: Synthetic oligonucleotide
aggaacugaaugaugacac

SEQ ID NO: 3175047 - RNA, 19 nt, Artificial Sequence
  Description of Artificial Sequence: Synthetic oligonucleotide
aaguuuugcuaguugcuca

SEQ ID NO: 3175048 - RNA, 19 nt, Artificial Sequence
  Description of Artificial Sequence: Synthetic oligonucleotide
uacaacuuaaacagggaau

SEQ ID NO: 3175049 - RNA, 19 nt, Artificial Sequence
  Description of Artificial Sequence: Synthetic oligonucleotide
agacguaauaguuuagggu

SEQ ID NO: 3175050 - RNA, 19 nt, Artificial Sequence
  Description of Artificial Sequence: Synthetic oligonucleotide
auagagaacaaggaacauc

SEQ ID NO: 3175051 - RNA, 19 nt, Artificial Sequence
  Description of Artificial Sequence: Synthetic oligonucleotide
ggcaaugaaaccuuguagc

SEQ ID NO: 3175052 - RNA, 19 nt, Artificial Sequence
  Description of Artificial Sequence: Synthetic oligonucleotide
gaggauuacgccaccaggg

SEQ ID NO: 3175053 - RNA, 19 nt, Artificial Sequence
  Description of Artificial Sequence: Synthetic oligonucleotide
ucaucugaagaacaccuuc

SEQ ID NO: 3175054 - RNA, 19 nt, Artificial Sequence
  Description of Artificial Sequence: Synthetic oligonucleotide
uuauuauauggcucaacaa

SEQ ID NO: 3175055 - RNA, 19 nt, Artificial Sequence
  Description of Artificial Sequence: Synthetic oligonucleotide
aaccuguagguguaguucu

SEQ ID NO: 3175056 - RNA, 19 nt, Artificial Sequence
  Description of Artificial Sequence: Synthetic oligonucleotide
aacugacugaucccuuggg

SEQ ID NO: 3175057 - RNA, 19 nt, Artificial Sequence
  Description of Artificial Sequence: Synthetic oligonucleotide
cugauugaacauaagcuuc

SEQ ID NO: 3175058 - RNA, 19 nt, Artificial Sequence
  Description of Artificial Sequence: Synthetic oligonucleotide
gagguuugcaucaacagca

SEQ ID NO: 3175059 - RNA, 19 nt, Artificial Sequence
  Description of Artificial Sequence: Synthetic oligonucleotide
uggaucauaauccggcccu

SEQ ID NO: 3175060 - RNA, 19 nt, Artificial Sequence
  Description of Artificial Sequence: Synthetic oligonucleotide
ucgagauagggauuuugag

SEQ ID NO: 3175061 - RNA, 19 nt, Artificial Sequence
  Description of Artificial Sequence: Synthetic oligonucleotide
aacaaggaacaucaggcuu

SEQ ID NO: 3175062 - RNA, 19 nt, Artificial Sequence
  Description of Artificial Sequence: Synthetic oligonucleotide
gaugugacaguuugcucag

SEQ ID NO: 3175063 - RNA, 19 nt, Artificial Sequence
  Description of Artificial Sequence: Synthetic oligonucleotide
aucugugcaaaauccguag

SEQ ID NO: 3175064 - RNA, 19 nt, Artificial Sequence
  Description of Artificial Sequence: Synthetic oligonucleotide
auuucagcucagccggugc

SEQ ID NO: 3175065 - RNA, 19 nt, Artificial Sequence
  Description of Artificial Sequence: Synthetic oligonucleotide
uguauggcauuccccauga

SEQ ID NO: 3175066 - RNA, 19 nt, Artificial Sequence
  Description of Artificial Sequence: Synthetic oligonucleotide
gaacugaaugaugacacug

SEQ ID NO: 3175067 - RNA, 19 nt, Artificial Sequence
  Description of Artificial Sequence: Synthetic oligonucleotide
auguauagagaacaaggaa

SEQ ID NO: 3175068 - RNA, 19 nt, Artificial Sequence
  Description of Artificial Sequence: Synthetic oligonucleotide
uagcaagucgcauuuuccc

SEQ ID NO: 3175069 - RNA, 19 nt, Artificial Sequence
  Description of Artificial Sequence: Synthetic oligonucleotide
aguuuuaaugaugccauca

SEQ ID NO: 3175070 - RNA, 19 nt, Artificial Sequence
  Description of Artificial Sequence: Synthetic oligonucleotide
ucgaagagucgagauaggg

SEQ ID NO: 3175071 - RNA, 19 nt, Artificial Sequence
  Description of Artificial Sequence: Synthetic oligonucleotide
uugacacagcuaaugugag

SEQ ID NO: 3175072 - RNA, 19 nt, Artificial Sequence
  Description of Artificial Sequence: Synthetic oligonucleotide
ugaagacgcuuccauaagu

SEQ ID NO: 3175073 - RNA, 19 nt, Artificial Sequence
  Description of Artificial Sequence: Synthetic oligonucleotide
ugcaucaucugaagaacac

SEQ ID NO: 3175074 - RNA, 19 nt, Artificial Sequence
  Description of Artificial Sequence: Synthetic oligonucleotide
cauguauagagaacaagga

SEQ ID NO: 3175075 - RNA, 19 nt, Artificial Sequence
  Description of Artificial Sequence: Synthetic oligonucleotide
aauuacagcuugaugaaua

SEQ ID NO: 3175076 - RNA, 19 nt, Artificial Sequence
  Description of Artificial Sequence: Synthetic oligonucleotide
uagacauagcucugaagca

SEQ ID NO: 3175077 - RNA, 19 nt, Artificial Sequence
  Description of Artificial Sequence: Synthetic oligonucleotide
ugaccucagcauucgauag

SEQ ID NO: 3175078 - RNA, 19 nt, Artificial Sequence
  Description of Artificial Sequence: Synthetic oligonucleotide
uaguugcucagcaauuaca

SEQ ID NO: 3175079 - RNA, 19 nt, Artificial Sequence
  Description of Artificial Sequence: Synthetic oligonucleotide
uugaguucacuugcuauag

SEQ ID NO: 3175080 - RNA, 19 nt, Artificial Sequence
  Description of Artificial Sequence: Synthetic oligonucleotide
gcuauaguuuuaaugaugc

SEQ ID NO: 3175081 - RNA, 19 nt, Artificial Sequence
  Description of Artificial Sequence: Synthetic oligonucleotide
ucugugcaaaauccguagc

SEQ ID NO: 3175082 - RNA, 19 nt, Artificial Sequence
  Description of Artificial Sequence: Synthetic oligonucleotide
uggacucucugccacgugc

SEQ ID NO: 3175083 - RNA, 19 nt, Artificial Sequence
  Description of Artificial Sequence: Synthetic oligonucleotide
caaaaugccuguuucaaaa

SEQ ID NO: 3175084 - RNA, 19 nt, Artificial Sequence
  Description of Artificial Sequence: Synthetic oligonucleotide
aacaucaaagcucaggugg

SEQ ID NO: 3175085 - RNA, 19 nt, Artificial Sequence
  Description of Artificial Sequence: Synthetic oligonucleotide
aaauacuuaauucccagag

SEQ ID NO: 3175086 - RNA, 19 nt, Artificial Sequence
  Description of Artificial Sequence: Synthetic oligonucleotide
aauauaguguuccccaggg

SEQ ID NO: 3175087 - RNA, 19 nt, Artificial Sequence
  Description of Artificial Sequence: Synthetic oligonucleotide
auugagaaauacuuaauuc

SEQ ID NO: 3175088 - RNA, 19 nt, Artificial Sequence
  Description of Artificial Sequence: Synthetic oligonucleotide
uugagaaauacuuaauucc

SEQ ID NO: 3175089 - RNA, 19 nt, Artificial Sequence
  Description of Artificial Sequence: Synthetic oligonucleotide
ucuucugugauguagagac

SEQ ID NO: 3175090 - RNA, 19 nt, Artificial Sequence
  Description of Artificial Sequence: Synthetic oligonucleotide
uuuuauaauauaguguucc

SEQ ID NO: 3175091 - RNA, 19 nt, Artificial Sequence
  Description of Artificial Sequence: Synthetic oligonucleotide
ugagaaauacuuaauuccc

SEQ ID NO: 3175092 - RNA, 19 nt, Artificial Sequence
  Description of Artificial Sequence: Synthetic oligonucleotide
uccaaguccaucaacauca

SEQ ID NO: 3175093 - RNA, 19 nt, Artificial Sequence
  Description of Artificial Sequence: Synthetic oligonucleotide
uauaauauaguguucccca

SEQ ID NO: 3175094 - RNA, 19 nt, Artificial Sequence
  Description of Artificial Sequence: Synthetic oligonucleotide
auauccuuggcagauaugc

SEQ ID NO: 3175095 - RNA, 19 nt, Artificial Sequence
  Description of Artificial Sequence: Synthetic oligonucleotide
aguccaucaacaucaaagc

SEQ ID NO: 3175096 - RNA, 19 nt, Artificial Sequence
  Description of Artificial Sequence: Synthetic oligonucleotide
aaguccaucaacaucaaag

SEQ ID NO: 3175097 - RNA, 19 nt, Artificial Sequence
  Description of Artificial Sequence: Synthetic oligonucleotide
uuuuaguuccuucaggaga

SEQ ID NO: 3175098 - RNA, 19 nt, Artificial Sequence
  Description of Artificial Sequence: Synthetic oligonucleotide
gaucuuuccuuuuaguucc

SEQ ID NO: 3175099 - RNA, 19 nt, Artificial Sequence
  Description of Artificial Sequence: Synthetic oligonucleotide
uucucuauaggauaggccu

SEQ ID NO: 3175100 - RNA, 19 nt, Artificial Sequence
  Description of Artificial Sequence: Synthetic oligonucleotide
ucaacaucaaagcucaggu

SEQ ID NO: 3175101 - RNA, 19 nt, Artificial Sequence
  Description of Artificial Sequence: Synthetic oligonucleotide
cuuucugccuaguagauag

SEQ ID NO: 3175102 - RNA, 19 nt, Artificial Sequence
  Description of Artificial Sequence: Synthetic oligonucleotide
uacacgauauccuuggcag

SEQ ID NO: 3175103 - RNA, 19 nt, Artificial Sequence
  Description of Artificial Sequence: Synthetic oligonucleotide
uauaggauaggccucccag

SEQ ID NO: 3175104 - RNA, 19 nt, Artificial Sequence
  Description of Artificial Sequence: Synthetic oligonucleotide
acuuccaugaugucaaguc

SEQ ID NO: 3175105 - RNA, 19 nt, Artificial Sequence
  Description of Artificial Sequence: Synthetic oligonucleotide
ucaaagcucagguggaugg

SEQ ID NO: 3175106 - RNA, 19 nt, Artificial Sequence
  Description of Artificial Sequence: Synthetic oligonucleotide
aauuucuucugugauguag

SEQ ID NO: 3175107 - RNA, 19 nt, Artificial Sequence
  Description of Artificial Sequence: Synthetic oligonucleotide
ugucuuguaaauuucuucu

SEQ ID NO: 3175108 - RNA, 19 nt, Artificial Sequence
  Description of Artificial Sequence: Synthetic oligonucleotide
uaaauuucuucugugaugu

SEQ ID NO: 3175109 - RNA, 19 nt, Artificial Sequence
  Description of Artificial Sequence: Synthetic oligonucleotide
auagcugaacgucucuucc

SEQ ID NO: 3175110 - RNA, 19 nt, Artificial Sequence
  Description of Artificial Sequence: Synthetic oligonucleotide
ucuuccaucaccuugccaa

SEQ ID NO: 3175111 - RNA, 19 nt, Artificial Sequence
  Description of Artificial Sequence: Synthetic oligonucleotide
agaaauacuuaauucccag

SEQ ID NO: 3175112 - RNA, 19 nt, Artificial Sequence
  Description of Artificial Sequence: Synthetic oligonucleotide
uaauauaguguuccccagg

SEQ ID NO: 3175113 - RNA, 19 nt, Artificial Sequence
  Description of Artificial Sequence: Synthetic oligonucleotide
gaugucaaguccuggacag

SEQ ID NO: 3175114 - RNA, 19 nt, Artificial Sequence
  Description of Artificial Sequence: Synthetic oligonucleotide
uuucuuucugccuaguaga

SEQ ID NO: 3175115 - RNA, 19 nt, Artificial Sequence
  Description of Artificial Sequence: Synthetic oligonucleotide
aauacuuaauucccagagu

SEQ ID NO: 3175116 - RNA, 19 nt, Artificial Sequence
  Description of Artificial Sequence: Synthetic oligonucleotide
uuuauaauauaguguuccc

SEQ ID NO: 3175117 - RNA, 19 nt, Artificial Sequence
  Description of Artificial Sequence: Synthetic oligonucleotide
uccaucaacaucaaagcuc

SEQ ID NO: 3175118 - RNA, 19 nt, Artificial Sequence
  Description of Artificial Sequence: Synthetic oligonucleotide
uauaguguuccccaggguc

SEQ ID NO: 3175119 - RNA, 19 nt, Artificial Sequence
  Description of Artificial Sequence: Synthetic oligonucleotide
uguaaauuucuucugugau

SEQ ID NO: 3175120 - RNA, 19 nt, Artificial Sequence
  Description of Artificial Sequence: Synthetic oligonucleotide
uaugcagggagucacccag

SEQ ID NO: 3175121 - RNA, 19 nt, Artificial Sequence
  Description of Artificial Sequence: Synthetic oligonucleotide
uuuaguuccuucaggagaa

SEQ ID NO: 3175122 - RNA, 19 nt, Artificial Sequence
  Description of Artificial Sequence: Synthetic oligonucleotide
aguuuauccacuucaguca

SEQ ID NO: 3175123 - RNA, 19 nt, Artificial Sequence
  Description of Artificial Sequence: Synthetic oligonucleotide
ucuuguaaauuucuucugu

SEQ ID NO: 3175124 - RNA, 19 nt, Artificial Sequence
  Description of Artificial Sequence: Synthetic oligonucleotide
uuggcagauaugcagggag

SEQ ID NO: 3175125 - RNA, 19 nt, Artificial Sequence
  Description of Artificial Sequence: Synthetic oligonucleotide
uuauaauauaguguucccc

SEQ ID NO: 3175126 - RNA, 19 nt, Artificial Sequence
  Description of Artificial Sequence: Synthetic oligonucleotide
cuuucuuucugccuaguag

SEQ ID NO: 3175127 - RNA, 19 nt, Artificial Sequence
  Description of Artificial Sequence: Synthetic oligonucleotide
auguacacgauauccuugg

SEQ ID NO: 3175128 - RNA, 19 nt, Artificial Sequence
  Description of Artificial Sequence: Synthetic oligonucleotide
uuuccuuuuaguuccuuca

SEQ ID NO: 3175129 - RNA, 19 nt, Artificial Sequence
  Description of Artificial Sequence: Synthetic oligonucleotide
acuucagucauugagaaau

SEQ ID NO: 3175130 - RNA, 19 nt, Artificial Sequence
  Description of Artificial Sequence: Synthetic oligonucleotide
ucacccaggagaauccugg

SEQ ID NO: 3175131 - RNA, 19 nt, Artificial Sequence
  Description of Artificial Sequence: Synthetic oligonucleotide
aaguccuggacaguagccc

SEQ ID NO: 3175132 - RNA, 19 nt, Artificial Sequence
  Description of Artificial Sequence: Synthetic oligonucleotide
ugauguagagaccuucucu

SEQ ID NO: 3175133 - RNA, 19 nt, Artificial Sequence
  Description of Artificial Sequence: Synthetic oligonucleotide
auacuuaauucccagaguu

SEQ ID NO: 3175134 - RNA, 19 nt, Artificial Sequence
  Description of Artificial Sequence: Synthetic oligonucleotide
uccuuuuaguuccuucagg

SEQ ID NO: 3175135 - RNA, 19 nt, Artificial Sequence
  Description of Artificial Sequence: Synthetic oligonucleotide
guagagaccuucucuauag

SEQ ID NO: 3175136 - RNA, 19 nt, Artificial Sequence
  Description of Artificial Sequence: Synthetic oligonucleotide
ucuacaucucgcaagccga

SEQ ID NO: 3175137 - RNA, 19 nt, Artificial Sequence
  Description of Artificial Sequence: Synthetic oligonucleotide
uccacuucagucauugaga

SEQ ID NO: 3175138 - RNA, 19 nt, Artificial Sequence
  Description of Artificial Sequence: Synthetic oligonucleotide
auccacuucagucauugag

SEQ ID NO: 3175139 - RNA, 19 nt, Artificial Sequence
  Description of Artificial Sequence: Synthetic oligonucleotide
uccuuggcagauaugcagg

SEQ ID NO: 3175140 - RNA, 19 nt, Artificial Sequence
  Description of Artificial Sequence: Synthetic oligonucleotide
caguuuauccacuucaguc

SEQ ID NO: 3175141 - RNA, 19 nt, Artificial Sequence
  Description of Artificial Sequence: Synthetic oligonucleotide
uuguaaauuucuucuguga

SEQ ID NO: 3175142 - RNA, 19 nt, Artificial Sequence
  Description of Artificial Sequence: Synthetic oligonucleotide
aaagcucagguggaugggc

SEQ ID NO: 3175143 - RNA, 19 nt, Artificial Sequence
  Description of Artificial Sequence: Synthetic oligonucleotide
guaaauuucuucugugaug

SEQ ID NO: 3175144 - RNA, 19 nt, Artificial Sequence
  Description of Artificial Sequence: Synthetic oligonucleotide
augaugucaaguccuggac

SEQ ID NO: 3175145 - RNA, 19 nt, Artificial Sequence
  Description of Artificial Sequence: Synthetic oligonucleotide
ucagucauugagaaauacu

SEQ ID NO: 3175146 - RNA, 19 nt, Artificial Sequence
  Description of Artificial Sequence: Synthetic oligonucleotide
agaauccugguacaucagg

SEQ ID NO: 3175147 - RNA, 19 nt, Artificial Sequence
  Description of Artificial Sequence: Synthetic oligonucleotide
gaauccugguacaucaggg

SEQ ID NO: 3175148 - RNA, 19 nt, Artificial Sequence
  Description of Artificial Sequence: Synthetic oligonucleotide
auaauauaguguuccccag

SEQ ID NO: 3175149 - RNA, 19 nt, Artificial Sequence
  Description of Artificial Sequence: Synthetic oligonucleotide
cuuguaaauuucuucugug

SEQ ID NO: 3175150 - RNA, 19 nt, Artificial Sequence
  Description of Artificial Sequence: Synthetic oligonucleotide
gucuacaucucgcaagccg

SEQ ID NO: 3175151 - RNA, 19 nt, Artificial Sequence
  Description of Artificial Sequence: Synthetic oligonucleotide
uuauccacuucagucauug

SEQ ID NO: 3175152 - RNA, 19 nt, Artificial Sequence
  Description of Artificial Sequence: Synthetic oligonucleotide
aucaacaucaaagcucagg

SEQ ID NO: 3175153 - RNA, 19 nt, Artificial Sequence
  Description of Artificial Sequence: Synthetic oligonucleotide
ucccaguuuauccacuuca

SEQ ID NO: 3175154 - RNA, 19 nt, Artificial Sequence
  Description of Artificial Sequence: Synthetic oligonucleotide
auaggauaggccucccagg

SEQ ID NO: 3175155 - RNA, 19 nt, Artificial Sequence
  Description of Artificial Sequence: Synthetic oligonucleotide
auccuuggcagauaugcag

SEQ ID NO: 3175156 - RNA, 19 nt, Artificial Sequence
  Description of Artificial Sequence: Synthetic oligonucleotide
ugaugucaaguccuggaca

SEQ ID NO: 3175157 - RNA, 19 nt, Artificial Sequence
  Description of Artificial Sequence: Synthetic oligonucleotide
aauccugguacaucaggga

SEQ ID NO: 3175158 - RNA, 19 nt, Artificial Sequence
  Description of Artificial Sequence: Synthetic oligonucleotide
uuccccagggucuacaucu

SEQ ID NO: 3175159 - RNA, 19 nt, Artificial Sequence
  Description of Artificial Sequence: Synthetic oligonucleotide
uuccaugaugucaaguccu

SEQ ID NO: 3175160 - RNA, 19 nt, Artificial Sequence
  Description of Artificial Sequence: Synthetic oligonucleotide
ucaaguccuggacaguagc

SEQ ID NO: 3175161 - RNA, 19 nt, Artificial Sequence
  Description of Artificial Sequence: Synthetic oligonucleotide
uuccuuuuaguuccuucag

SEQ ID NO: 3175162 - RNA, 19 nt, Artificial Sequence
  Description of Artificial Sequence: Synthetic oligonucleotide
uacaucagggaucuuuccu

SEQ ID NO: 3175163 - RNA, 19 nt, Artificial Sequence
  Description of Artificial Sequence: Synthetic oligonucleotide
gucauugagaaauacuuaa

SEQ ID NO: 3175164 - RNA, 19 nt, Artificial Sequence
  Description of Artificial Sequence: Synthetic oligonucleotide
ugugauguagagaccuucu

SEQ ID NO: 3175165 - RNA, 19 nt, Artificial Sequence
  Description of Artificial Sequence: Synthetic oligonucleotide
cuuccaugaugucaagucc

SEQ ID NO: 3175166 - RNA, 19 nt, Artificial Sequence
  Description of Artificial Sequence: Synthetic oligonucleotide
cuuuuaguuccuucaggag

SEQ ID NO: 3175167 - RNA, 19 nt, Artificial Sequence
  Description of Artificial Sequence: Synthetic oligonucleotide
cuucucuauaggauaggcc

SEQ ID NO: 3175168 - RNA, 19 nt, Artificial Sequence
  Description of Artificial Sequence: Synthetic oligonucleotide
uucugugauguagagaccu

SEQ ID NO: 3175169 - RNA, 19 nt, Artificial Sequence
  Description of Artificial Sequence: Synthetic oligonucleotide
uaggauaggccucccagga

SEQ ID NO: 3175170 - RNA, 19 nt, Artificial Sequence
  Description of Artificial Sequence: Synthetic oligonucleotide
uuucuucugugauguagag

SEQ ID NO: 3175171 - RNA, 19 nt, Artificial Sequence
  Description of Artificial Sequence: Synthetic oligonucleotide
gaaauacuuaauucccaga

SEQ ID NO: 3175172 - RNA, 19 nt, Artificial Sequence
  Description of Artificial Sequence: Synthetic oligonucleotide
ucauugagaaauacuuaau

SEQ ID NO: 3175173 - RNA, 19 nt, Artificial Sequence
  Description of Artificial Sequence: Synthetic oligonucleotide
ccuaguagauagcugaacg

SEQ ID NO: 3175174 - RNA, 19 nt, Artificial Sequence
  Description of Artificial Sequence: Synthetic oligonucleotide
gauguagagaccuucucua

SEQ ID NO: 3175175 - RNA, 19 nt, Artificial Sequence
  Description of Artificial Sequence: Synthetic oligonucleotide
agggucuacaucucgcaag

SEQ ID NO: 3175176 - RNA, 19 nt, Artificial Sequence
  Description of Artificial Sequence: Synthetic oligonucleotide
gaacgcuggguccaagucc

SEQ ID NO: 3175177 - RNA, 19 nt, Artificial Sequence
  Description of Artificial Sequence: Synthetic oligonucleotide
agagaccuucucuauagga

SEQ ID NO: 3175178 - RNA, 19 nt, Artificial Sequence
  Description of Artificial Sequence: Synthetic oligonucleotide
cugucuuguaaauuucuuc

SEQ ID NO: 3175179 - RNA, 19 nt, Artificial Sequence
  Description of Artificial Sequence: Synthetic oligonucleotide
ucugccuaguagauagcug

SEQ ID NO: 3175180 - RNA, 19 nt, Artificial Sequence
  Description of Artificial Sequence: Synthetic oligonucleotide
uagagaccuucucuauagg

SEQ ID NO: 3175181 - RNA, 19 nt, Artificial Sequence
  Description of Artificial Sequence: Synthetic oligonucleotide
ugugccaguagccggugug

SEQ ID NO: 3175182 - RNA, 19 nt, Artificial Sequence
  Description of Artificial Sequence: Synthetic oligonucleotide
aagcucagguggaugggcc

SEQ ID NO: 3175183 - RNA, 19 nt, Artificial Sequence
  Description of Artificial Sequence: Synthetic oligonucleotide
uaguagauagcugaacguc

SEQ ID NO: 3175184 - RNA, 19 nt, Artificial Sequence
  Description of Artificial Sequence: Synthetic oligonucleotide
aauauggacauuuaggaag

SEQ ID NO: 3175185 - RNA, 19 nt, Artificial Sequence
  Description of Artificial Sequence: Synthetic oligonucleotide
aauaccaugagccacaggu

SEQ ID NO: 3175186 - RNA, 19 nt, Artificial Sequence
  Description of Artificial Sequence: Synthetic oligonucleotide
gaagauuuggaucagaaug

SEQ ID NO: 3175187 - RNA, 19 nt, Artificial Sequence
  Description of Artificial Sequence: Synthetic oligonucleotide
cuaagaaacaagaugcucc

SEQ ID NO: 3175188 - RNA, 19 nt, Artificial Sequence
  Description of Artificial Sequence: Synthetic oligonucleotide
gaaauauggacauuuagga

SEQ ID NO: 3175189 - RNA, 19 nt, Artificial Sequence
  Description of Artificial Sequence: Synthetic oligonucleotide
ugagguagauuucacagag

SEQ ID NO: 3175190 - RNA, 19 nt, Artificial Sequence
  Description of Artificial Sequence: Synthetic oligonucleotide
ucugagguagauuucacag

SEQ ID NO: 3175191 - RNA, 19 nt, Artificial Sequence
  Description of Artificial Sequence: Synthetic oligonucleotide
agguagauuucacagaggg

SEQ ID NO: 3175192 - RNA, 19 nt, Artificial Sequence
  Description of Artificial Sequence: Synthetic oligonucleotide
uuucacagagggaauauag

SEQ ID NO: 3175193 - RNA, 19 nt, Artificial Sequence
  Description of Artificial Sequence: Synthetic oligonucleotide
uuccccaauaccaugagcc

SEQ ID NO: 3175194 - RNA, 19 nt, Artificial Sequence
  Description of Artificial Sequence: Synthetic oligonucleotide
aagaacauugcccaggaaa

SEQ ID NO: 3175195 - RNA, 19 nt, Artificial Sequence
  Description of Artificial Sequence: Synthetic oligonucleotide
aagauuuggaucagaaugg

SEQ ID NO: 3175196 - RNA, 19 nt, Artificial Sequence
  Description of Artificial Sequence: Synthetic oligonucleotide
auuuggaucagaauggcac

SEQ ID NO: 3175197 - RNA, 19 nt, Artificial Sequence
  Description of Artificial Sequence: Synthetic oligonucleotide
acaagacaacccuagggcc

SEQ ID NO: 3175198 - RNA, 19 nt, Artificial Sequence
  Description of Artificial Sequence: Synthetic oligonucleotide
accacuaagaaacaagaug

SEQ ID NO: 3175199 - RNA, 19 nt, Artificial Sequence
  Description of Artificial Sequence: Synthetic oligonucleotide
agaauggcacauucgaugg

SEQ ID NO: 3175200 - RNA, 19 nt, Artificial Sequence
  Description of Artificial Sequence: Synthetic oligonucleotide
gagggguggauucauagcg

SEQ ID NO: 3175201 - RNA, 19 nt, Artificial Sequence
  Description of Artificial Sequence: Synthetic oligonucleotide
uaugagaaggggauuagcu

SEQ ID NO: 3175202 - RNA, 19 nt, Artificial Sequence
  Description of Artificial Sequence: Synthetic oligonucleotide
uccccugucuuucugaggg

SEQ ID NO: 3175203 - RNA, 19 nt, Artificial Sequence
  Description of Artificial Sequence: Synthetic oligonucleotide
uuucacugccaccagcugg

SEQ ID NO: 3175204 - RNA, 19 nt, Artificial Sequence
  Description of Artificial Sequence: Synthetic oligonucleotide
uucacagagggaauauagg

SEQ ID NO: 3175205 - RNA, 19 nt, Artificial Sequence
  Description of Artificial Sequence: Synthetic oligonucleotide
auucauagcgggcagcagg

SEQ ID NO: 3175206 - RNA, 19 nt, Artificial Sequence
  Description of Artificial Sequence: Synthetic oligonucleotide
ugaaguuuaucuccacaag

SEQ ID NO: 3175207 - RNA, 19 nt, Artificial Sequence
  Description of Artificial Sequence: Synthetic oligonucleotide
ugagaaggggauuagcucu

SEQ ID NO: 3175208 - RNA, 19 nt, Artificial Sequence
  Description of Artificial Sequence: Synthetic oligonucleotide
aaauauggacauuuaggaa

SEQ ID NO: 3175209 - RNA, 19 nt, Artificial Sequence
  Description of Artificial Sequence: Synthetic oligonucleotide
aacccuagggcccauucuc

SEQ ID NO: 3175210 - RNA, 19 nt, Artificial Sequence
  Description of Artificial Sequence: Synthetic oligonucleotide
ccacuaagaaacaagaugc

SEQ ID NO: 3175211 - RNA, 19 nt, Artificial Sequence
  Description of Artificial Sequence: Synthetic oligonucleotide
ggaaauauggacauuuagg

SEQ ID NO: 3175212 - RNA, 19 nt, Artificial Sequence
  Description of Artificial Sequence: Synthetic oligonucleotide
ucagguucuggccuggucc

SEQ ID NO: 3175213 - RNA, 19 nt, Artificial Sequence
  Description of Artificial Sequence: Synthetic oligonucleotide
agagcuggccugcagagac

SEQ ID NO: 3175214 - RNA, 19 nt, Artificial Sequence
  Description of Artificial Sequence: Synthetic oligonucleotide
uuugaaguuuaucuccaca

SEQ ID NO: 3175215 - RNA, 19 nt, Artificial Sequence
  Description of Artificial Sequence: Synthetic oligonucleotide
acucccagagcucuugacc

SEQ ID NO: 3175216 - RNA, 19 nt, Artificial Sequence
  Description of Artificial Sequence: Synthetic oligonucleotide
cacaagacaacccuagggc

SEQ ID NO: 3175217 - RNA, 19 nt, Artificial Sequence
  Description of Artificial Sequence: Synthetic oligonucleotide
aggaaauauggacauuuag

SEQ ID NO: 3175218 - RNA, 19 nt, Artificial Sequence
  Description of Artificial Sequence: Synthetic oligonucleotide
gaaguuuaucuccacaaga

SEQ ID NO: 3175219 - RNA, 19 nt, Artificial Sequence
  Description of Artificial Sequence: Synthetic oligonucleotide
uugaaguuuaucuccacaa

SEQ ID NO: 3175220 - RNA, 19 nt, Artificial Sequence
  Description of Artificial Sequence: Synthetic oligonucleotide
aagaggucuucccuggaag

SEQ ID NO: 3175221 - RNA, 19 nt, Artificial Sequence
  Description of Artificial Sequence: Synthetic oligonucleotide
aucagaauggcacauucga

SEQ ID NO: 3175222 - RNA, 19 nt, Artificial Sequence
  Description of Artificial Sequence: Synthetic oligonucleotide
agagggagaacagagcugg

SEQ ID NO: 3175223 - RNA, 19 nt, Artificial Sequence
  Description of Artificial Sequence: Synthetic oligonucleotide
agagagggagaacagagcu

SEQ ID NO: 3175224 - RNA, 19 nt, Artificial Sequence
  Description of Artificial Sequence: Synthetic oligonucleotide
aaggggauuagcucuuuug

SEQ ID NO: 3175225 - RNA, 19 nt, Artificial Sequence
  Description of Artificial Sequence: Synthetic oligonucleotide
uaagaaacaagaugcuccu

SEQ ID NO: 3175226 - RNA, 19 nt, Artificial Sequence
  Description of Artificial Sequence: Synthetic oligonucleotide
ugagccacagguuggcugg

SEQ ID NO: 3175227 - RNA, 19 nt, Artificial Sequence
  Description of Artificial Sequence: Synthetic oligonucleotide
uuaggaaggggacucccag

SEQ ID NO: 3175228 - RNA, 19 nt, Artificial Sequence
  Description of Artificial Sequence: Synthetic oligonucleotide
uauaggguugggugggugg

SEQ ID NO: 3175229 - RNA, 19 nt, Artificial Sequence
  Description of Artificial Sequence: Synthetic oligonucleotide
gaauauaggguuggguggg

SEQ ID NO: 3175230 - RNA, 19 nt, Artificial Sequence
  Description of Artificial Sequence: Synthetic oligonucleotide
acuaagaaacaagaugcuc

SEQ ID NO: 3175231 - RNA, 19 nt, Artificial Sequence
  Description of Artificial Sequence: Synthetic oligonucleotide
ggaauauaggguugggugg

SEQ ID NO: 3175232 - RNA, 19 nt, Artificial Sequence
  Description of Artificial Sequence: Synthetic oligonucleotide
agugguuuucacugccacc

SEQ ID NO: 3175233 - RNA, 19 nt, Artificial Sequence
  Description of Artificial Sequence: Synthetic oligonucleotide
cuucccuggaagaacauug

SEQ ID NO: 3175234 - RNA, 19 nt, Artificial Sequence
  Description of Artificial Sequence: Synthetic oligonucleotide
cagaauggcacauucgaug

SEQ ID NO: 3175235 - RNA, 19 nt, Artificial Sequence
  Description of Artificial Sequence: Synthetic oligonucleotide
guagauuucacagagggaa

SEQ ID NO: 3175236 - RNA, 19 nt, Artificial Sequence
  Description of Artificial Sequence: Synthetic oligonucleotide
agauuuggaucagaauggc

SEQ ID NO: 3175237 - RNA, 19 nt, Artificial Sequence
  Description of Artificial Sequence: Synthetic oligonucleotide
auauggacauuuaggaagg

SEQ ID NO: 3175238 - RNA, 19 nt, Artificial Sequence
  Description of Artificial Sequence: Synthetic oligonucleotide
acauuuaggaaggggacuc

SEQ ID NO: 3175239 - RNA, 19 nt, Artificial Sequence
  Description of Artificial Sequence: Synthetic oligonucleotide
uuuggaucagaauggcaca

SEQ ID NO: 3175240 - RNA, 19 nt, Artificial Sequence
  Description of Artificial Sequence: Synthetic oligonucleotide
ugcccaggaaauauggaca

SEQ ID NO: 3175241 - RNA, 19 nt, Artificial Sequence
  Description of Artificial Sequence: Synthetic oligonucleotide
gcagagaccacuaagaaac

SEQ ID NO: 3175242 - RNA, 19 nt, Artificial Sequence
  Description of Artificial Sequence: Synthetic oligonucleotide
gggaauauaggguugggug

SEQ ID NO: 3175243 - RNA, 19 nt, Artificial Sequence
  Description of Artificial Sequence: Synthetic oligonucleotide
uggaagauuuggaucagaa

SEQ ID NO: 3175244 - RNA, 19 nt, Artificial Sequence
  Description of Artificial Sequence: Synthetic oligonucleotide
acgacucugagguagauuu

SEQ ID NO: 3175245 - RNA, 19 nt, Artificial Sequence
  Description of Artificial Sequence: Synthetic oligonucleotide
agggcaggcucugagaccc

SEQ ID NO: 3175246 - RNA, 19 nt, Artificial Sequence
  Description of Artificial Sequence: Synthetic oligonucleotide
gagaccacuaagaaacaag

SEQ ID NO: 3175247 - RNA, 19 nt, Artificial Sequence
  Description of Artificial Sequence: Synthetic oligonucleotide
uucccuguucccuagggca

SEQ ID NO: 3175248 - RNA, 19 nt, Artificial Sequence
  Description of Artificial Sequence: Synthetic oligonucleotide
uguucccuagggcaggcag

SEQ ID NO: 3175249 - RNA, 19 nt, Artificial Sequence
  Description of Artificial Sequence: Synthetic oligonucleotide
auuuaggaaggggacuccc

SEQ ID NO: 3175250 - RNA, 19 nt, Artificial Sequence
  Description of Artificial Sequence: Synthetic oligonucleotide
uuaucuccacaagacaacc

SEQ ID NO: 3175251 - RNA, 19 nt, Artificial Sequence
  Description of Artificial Sequence: Synthetic oligonucleotide
caagacaacccuagggccc

SEQ ID NO: 3175252 - RNA, 19 nt, Artificial Sequence
  Description of Artificial Sequence: Synthetic oligonucleotide
acagagggaauauaggguu

SEQ ID NO: 3175253 - RNA, 19 nt, Artificial Sequence
  Description of Artificial Sequence: Synthetic oligonucleotide
uccacaagacaacccuagg

SEQ ID NO: 3175254 - RNA, 19 nt, Artificial Sequence
  Description of Artificial Sequence: Synthetic oligonucleotide
  modified_base (16)..(16): a, c, u, g, unknown or other
ugcugacacaccccunacc

SEQ ID NO: 3175255 - RNA, 19 nt, Artificial Sequence
  Description of Artificial Sequence: Synthetic oligonucleotide
ugagacccucucaagaggu

SEQ ID NO: 3175256 - RNA, 19 nt, Artificial Sequence
  Description of Artificial Sequence: Synthetic oligonucleotide
uuggcugggcuugagacag

SEQ ID NO: 3175257 - RNA, 19 nt, Artificial Sequence
  Description of Artificial Sequence: Synthetic oligonucleotide
aacauugcccaggaaauau

SEQ ID NO: 3175258 - RNA, 19 nt, Artificial Sequence
  Description of Artificial Sequence: Synthetic oligonucleotide
cucccagagcucuugaccc

SEQ ID NO: 3175259 - RNA, 19 nt, Artificial Sequence
  Description of Artificial Sequence: Synthetic oligonucleotide
gaucagaauggcacauucg

SEQ ID NO: 3175260 - RNA, 19 nt, Artificial Sequence
  Description of Artificial Sequence: Synthetic oligonucleotide
uggccaaggccccagggag

SEQ ID NO: 3175261 - RNA, 19 nt, Artificial Sequence
  Description of Artificial Sequence: Synthetic oligonucleotide
uaucuccacaagacaaccc

SEQ ID NO: 3175262 - RNA, 19 nt, Artificial Sequence
  Description of Artificial Sequence: Synthetic oligonucleotide
ugaggggacgacucugagg

SEQ ID NO: 3175263 - RNA, 19 nt, Artificial Sequence
  Description of Artificial Sequence: Synthetic oligonucleotide
agcaggcucccucaggagg

SEQ ID NO: 3175264 - RNA, 19 nt, Artificial Sequence
  Description of Artificial Sequence: Synthetic oligonucleotide
uuuaggaaggggacuccca

SEQ ID NO: 3175265 - RNA, 19 nt, Artificial Sequence
  Description of Artificial Sequence: Synthetic oligonucleotide
gacagugguuuucacugcc

SEQ ID NO: 3175266 - RNA, 19 nt, Artificial Sequence
  Description of Artificial Sequence: Synthetic oligonucleotide
aggggauuagcucuuuuga

SEQ ID NO: 3175267 - RNA, 19 nt, Artificial Sequence
  Description of Artificial Sequence: Synthetic oligonucleotide
uuagcucuuuugaaguuua

SEQ ID NO: 3175268 - RNA, 19 nt, Artificial Sequence
  Description of Artificial Sequence: Synthetic oligonucleotide
cuuucugaggggacgacuc

SEQ ID NO: 3175269 - RNA, 19 nt, Artificial Sequence
  Description of Artificial Sequence: Synthetic oligonucleotide
agagggaauauaggguugg

SEQ ID NO: 3175270 - RNA, 19 nt, Artificial Sequence
  Description of Artificial Sequence: Synthetic oligonucleotide
gaggggacgacucugaggu

SEQ ID NO: 3175271 - RNA, 19 nt, Artificial Sequence
  Description of Artificial Sequence: Synthetic oligonucleotide
uggcacauucgauggacag

SEQ ID NO: 3175272 - RNA, 19 nt, Artificial Sequence
  Description of Artificial Sequence: Synthetic oligonucleotide
acaagaugcuccuucccca

SEQ ID NO: 3175273 - RNA, 19 nt, Artificial Sequence
  Description of Artificial Sequence: Synthetic oligonucleotide
guggguggguaugagaagg

SEQ ID NO: 3175274 - RNA, 19 nt, Artificial Sequence
  Description of Artificial Sequence: Synthetic oligonucleotide
ugcagagaccacuaagaaa

SEQ ID NO: 3175275 - RNA, 19 nt, Artificial Sequence
  Description of Artificial Sequence: Synthetic oligonucleotide
cuuuugaaguuuaucucca

SEQ ID NO: 3175276 - RNA, 19 nt, Artificial Sequence
  Description of Artificial Sequence: Synthetic oligonucleotide
uccuuccccaauaccauga

SEQ ID NO: 3175277 - RNA, 19 nt, Artificial Sequence
  Description of Artificial Sequence: Synthetic oligonucleotide
gugagggguggauucauag

SEQ ID NO: 3175278 - RNA, 19 nt, Artificial Sequence
  Description of Artificial Sequence: Synthetic oligonucleotide
cuccacaagacaacccuag

SEQ ID NO: 3175279 - RNA, 19 nt, Artificial Sequence
  Description of Artificial Sequence: Synthetic oligonucleotide
acauucgauggacaguggu

SEQ ID NO: 3175280 - RNA, 19 nt, Artificial Sequence
  Description of Artificial Sequence: Synthetic oligonucleotide
ugagacagagggcuggcau

SEQ ID NO: 3175281 - RNA, 19 nt, Artificial Sequence
  Description of Artificial Sequence: Synthetic oligonucleotide
cuagggcaggcagagaggg

SEQ ID NO: 3175282 - RNA, 19 nt, Artificial Sequence
  Description of Artificial Sequence: Synthetic oligonucleotide
uuuugaaguuuaucuccac

SEQ ID NO: 3175283 - RNA, 19 nt, Artificial Sequence
  Description of Artificial Sequence: Synthetic oligonucleotide
ugagggguggauucauagc

SEQ ID NO: 3175284 - RNA, 19 nt, Artificial Sequence
  Description of Artificial Sequence: Synthetic oligonucleotide
uuuggugucacucaguugg

SEQ ID NO: 3175285 - RNA, 19 nt, Artificial Sequence
  Description of Artificial Sequence: Synthetic oligonucleotide
augaaguugguucaguggc

SEQ ID NO: 3175286 - RNA, 19 nt, Artificial Sequence
  Description of Artificial Sequence: Synthetic oligonucleotide
acgagcauagcauucagcc

SEQ ID NO: 3175287 - RNA, 19 nt, Artificial Sequence
  Description of Artificial Sequence: Synthetic oligonucleotide
aaagggaauucccaggaag

SEQ ID NO: 3175288 - RNA, 19 nt, Artificial Sequence
  Description of Artificial Sequence: Synthetic oligonucleotide
uuugcagacaaauggcugg

SEQ ID NO: 3175289 - RNA, 19 nt, Artificial Sequence
  Description of Artificial Sequence: Synthetic oligonucleotide
uaugaaguugguucagugg

SEQ ID NO: 3175290 - RNA, 19 nt, Artificial Sequence
  Description of Artificial Sequence: Synthetic oligonucleotide
gagcauagcauucagccag

SEQ ID NO: 3175291 - RNA, 19 nt, Artificial Sequence
  Description of Artificial Sequence: Synthetic oligonucleotide
auagcauucagccagcuau

SEQ ID NO: 3175292 - RNA, 19 nt, Artificial Sequence
  Description of Artificial Sequence: Synthetic oligonucleotide
cauucagccagcuaugaag

SEQ ID NO: 3175293 - RNA, 19 nt, Artificial Sequence
  Description of Artificial Sequence: Synthetic oligonucleotide
aagggaauucccaggaagc

SEQ ID NO: 3175294 - RNA, 19 nt, Artificial Sequence
  Description of Artificial Sequence: Synthetic oligonucleotide
cucugaugaauccugaccc

SEQ ID NO: 3175295 - RNA, 19 nt, Artificial Sequence
  Description of Artificial Sequence: Synthetic oligonucleotide
guguguguguuccugaugg

SEQ ID NO: 3175296 - RNA, 19 nt, Artificial Sequence
  Description of Artificial Sequence: Synthetic oligonucleotide
aguuggaugaggcugccuc

SEQ ID NO: 3175297 - RNA, 19 nt, Artificial Sequence
  Description of Artificial Sequence: Synthetic oligonucleotide
uuuugcagacaaauggcug

SEQ ID NO: 3175298 - RNA, 19 nt, Artificial Sequence
  Description of Artificial Sequence: Synthetic oligonucleotide
uucaguggcaugaucagcu

SEQ ID NO: 3175299 - RNA, 19 nt, Artificial Sequence
  Description of Artificial Sequence: Synthetic oligonucleotide
ugaauccugacccugcaca

SEQ ID NO: 3175300 - RNA, 19 nt, Artificial Sequence
  Description of Artificial Sequence: Synthetic oligonucleotide
ugguucaguggcaugauca

SEQ ID NO: 3175301 - RNA, 19 nt, Artificial Sequence
  Description of Artificial Sequence: Synthetic oligonucleotide
aauggcuggauacgagguc

SEQ ID NO: 3175302 - RNA, 19 nt, Artificial Sequence
  Description of Artificial Sequence: Synthetic oligonucleotide
uguguguuccugauggggc

SEQ ID NO: 3175303 - RNA, 19 nt, Artificial Sequence
  Description of Artificial Sequence: Synthetic oligonucleotide
cacuccaugguucaggggc

SEQ ID NO: 3175304 - RNA, 19 nt, Artificial Sequence
  Description of Artificial Sequence: Synthetic oligonucleotide
caaauggcuggauacgagg

SEQ ID NO: 3175305 - RNA, 19 nt, Artificial Sequence
  Description of Artificial Sequence: Synthetic oligonucleotide
uggacaccaacuuuggugu

SEQ ID NO: 3175306 - RNA, 19 nt, Artificial Sequence
  Description of Artificial Sequence: Synthetic oligonucleotide
cagacaaauggcuggauac

SEQ ID NO: 3175307 - RNA, 19 nt, Artificial Sequence
  Description of Artificial Sequence: Synthetic oligonucleotide
cuucaggaggugcaaagcg

SEQ ID NO: 3175308 - RNA, 19 nt, Artificial Sequence
  Description of Artificial Sequence: Synthetic oligonucleotide
gaagcaggaguccaacgag

SEQ ID NO: 3175309 - RNA, 19 nt, Artificial Sequence
  Description of Artificial Sequence: Synthetic oligonucleotide
guggacaccaacuuuggug

SEQ ID NO: 3175310 - RNA, 19 nt, Artificial Sequence
  Description of Artificial Sequence: Synthetic oligonucleotide
cuuggcaaagggaauuccc

SEQ ID NO: 3175311 - RNA, 19 nt, Artificial Sequence
  Description of Artificial Sequence: Synthetic oligonucleotide
uuggcaaagggaauuccca

SEQ ID NO: 3175312 - RNA, 19 nt, Artificial Sequence
  Description of Artificial Sequence: Synthetic oligonucleotide
auccugacccugcacaugg

SEQ ID NO: 3175313 - RNA, 19 nt, Artificial Sequence
  Description of Artificial Sequence: Synthetic oligonucleotide
auggcuggauacgaggucc

SEQ ID NO: 3175314 - RNA, 19 nt, Artificial Sequence
  Description of Artificial Sequence: Synthetic oligonucleotide
uucaggaggugcaaagcgc

SEQ ID NO: 3175315 - RNA, 19 nt, Artificial Sequence
  Description of Artificial Sequence: Synthetic oligonucleotide
agaagcaggaguccaacga

SEQ ID NO: 3175316 - RNA, 19 nt, Artificial Sequence
  Description of Artificial Sequence: Synthetic oligonucleotide
ucaggaggugcaaagcgca

SEQ ID NO: 3175317 - RNA, 19 nt, Artificial Sequence
  Description of Artificial Sequence: Synthetic oligonucleotide
ucacucaguuggaugaggc

SEQ ID NO: 3175318 - RNA, 19 nt, Artificial Sequence
  Description of Artificial Sequence: Synthetic oligonucleotide
gaugaggcugccucggacc

SEQ ID NO: 3175319 - RNA, 19 nt, Artificial Sequence
  Description of Artificial Sequence: Synthetic oligonucleotide
aagcaggaguccaacgagc

SEQ ID NO: 3175320 - RNA, 19 nt, Artificial Sequence
  Description of Artificial Sequence: Synthetic oligonucleotide
aacgagcauagcauucagc

SEQ ID NO: 3175321 - RNA, 19 nt, Artificial Sequence
  Description of Artificial Sequence: Synthetic oligonucleotide
gaguccaacgagcauagca

SEQ ID NO: 3175322 - RNA, 19 nt, Artificial Sequence
  Description of Artificial Sequence: Synthetic oligonucleotide
ugaugaauccugacccugc

SEQ ID NO: 3175323 - RNA, 19 nt, Artificial Sequence
  Description of Artificial Sequence: Synthetic oligonucleotide
ugacccugcacauggagga

SEQ ID NO: 3175324 - RNA, 19 nt, Artificial Sequence
  Description of Artificial Sequence: Synthetic oligonucleotide
ugguucaggggcuucagga

SEQ ID NO: 3175325 - RNA, 19 nt, Artificial Sequence
  Description of Artificial Sequence: Synthetic oligonucleotide
accaacuuuggugucacuc

SEQ ID NO: 3175326 - RNA, 19 nt, Artificial Sequence
  Description of Artificial Sequence: Synthetic oligonucleotide
cuaugaaguugguucagug

SEQ ID NO: 3175327 - RNA, 19 nt, Artificial Sequence
  Description of Artificial Sequence: Synthetic oligonucleotide
ucucacaccacuccauggu

SEQ ID NO: 3175328 - RNA, 19 nt, Artificial Sequence
  Description of Artificial Sequence: Synthetic oligonucleotide
cagccagcuaugaaguugg

SEQ ID NO: 3175329 - RNA, 19 nt, Artificial Sequence
  Description of Artificial Sequence: Synthetic oligonucleotide
ccagcuaugaaguugguuc

SEQ ID NO: 3175330 - RNA, 19 nt, Artificial Sequence
  Description of Artificial Sequence: Synthetic oligonucleotide
aagcgcagugguccgacag

SEQ ID NO: 3175331 - RNA, 19 nt, Artificial Sequence
  Description of Artificial Sequence: Synthetic oligonucleotide
guucaggggcuucaggagg

SEQ ID NO: 3175332 - RNA, 19 nt, Artificial Sequence
  Description of Artificial Sequence: Synthetic oligonucleotide
ugcacauggaggaggagaa

SEQ ID NO: 3175333 - RNA, 19 nt, Artificial Sequence
  Description of Artificial Sequence: Synthetic oligonucleotide
gagaagcaggaguccaacg

SEQ ID NO: 3175334 - RNA, 19 nt, Artificial Sequence
  Description of Artificial Sequence: Synthetic oligonucleotide
uggcaaagggaauucccag

SEQ ID NO: 3175335 - RNA, 19 nt, Artificial Sequence
  Description of Artificial Sequence: Synthetic oligonucleotide
uggaggaggagaagcagga

SEQ ID NO: 3175336 - RNA, 19 nt, Artificial Sequence
  Description of Artificial Sequence: Synthetic oligonucleotide
ugaaguugguucaguggca

SEQ ID NO: 3175337 - RNA, 19 nt, Artificial Sequence
  Description of Artificial Sequence: Synthetic oligonucleotide
cucaguuggaugaggcugc

SEQ ID NO: 3175338 - RNA, 19 nt, Artificial Sequence
  Description of Artificial Sequence: Synthetic oligonucleotide
auucccaggaagcugugga

SEQ ID NO: 3175339 - RNA, 19 nt, Artificial Sequence
  Description of Artificial Sequence: Synthetic oligonucleotide
agacaaauggcuggauacg

SEQ ID NO: 3175340 - RNA, 19 nt, Artificial Sequence
  Description of Artificial Sequence: Synthetic oligonucleotide
accacuccaugguucaggg

SEQ ID NO: 3175341 - RNA, 19 nt, Artificial Sequence
  Description of Artificial Sequence: Synthetic oligonucleotide
ucagccagcuaugaaguug

SEQ ID NO: 3175342 - RNA, 19 nt, Artificial Sequence
  Description of Artificial Sequence: Synthetic oligonucleotide
acucaguuggaugaggcug

SEQ ID NO: 3175343 - RNA, 19 nt, Artificial Sequence
  Description of Artificial Sequence: Synthetic oligonucleotide
uggggcuggccucugauga

SEQ ID NO: 3175344 - RNA, 19 nt, Artificial Sequence
  Description of Artificial Sequence: Synthetic oligonucleotide
ucucucacaccacuccaug

SEQ ID NO: 3175345 - RNA, 19 nt, Artificial Sequence
  Description of Artificial Sequence: Synthetic oligonucleotide
aaauggcuggauacgaggu

SEQ ID NO: 3175346 - RNA, 19 nt, Artificial Sequence
  Description of Artificial Sequence: Synthetic oligonucleotide
guuggaugaggcugccucg

SEQ ID NO: 3175347 - RNA, 19 nt, Artificial Sequence
  Description of Artificial Sequence: Synthetic oligonucleotide
cacauggaggaggagaagc

SEQ ID NO: 3175348 - RNA, 19 nt, Artificial Sequence
  Description of Artificial Sequence: Synthetic oligonucleotide
uuccugauggggcuggccu

SEQ ID NO: 3175349 - RNA, 19 nt, Artificial Sequence
  Description of Artificial Sequence: Synthetic oligonucleotide
aggaggagaagcaggaguc

SEQ ID NO: 3175350 - RNA, 19 nt, Artificial Sequence
  Description of Artificial Sequence: Synthetic oligonucleotide
cugacccugcacauggagg

SEQ ID NO: 3175351 - RNA, 19 nt, Artificial Sequence
  Description of Artificial Sequence: Synthetic oligonucleotide
ugcaaagcgcagugguccg

SEQ ID NO: 3175352 - RNA, 19 nt, Artificial Sequence
  Description of Artificial Sequence: Synthetic oligonucleotide
aauucccaggaagcugugg

SEQ ID NO: 3175353 - RNA, 19 nt, Artificial Sequence
  Description of Artificial Sequence: Synthetic oligonucleotide
augaauccugacccugcac

SEQ ID NO: 3175354 - RNA, 19 nt, Artificial Sequence
  Description of Artificial Sequence: Synthetic oligonucleotide
uguguguguguuccugaug

SEQ ID NO: 3175355 - RNA, 19 nt, Artificial Sequence
  Description of Artificial Sequence: Synthetic oligonucleotide
auuuugcagacaaauggcu

SEQ ID NO: 3175356 - RNA, 19 nt, Artificial Sequence
  Description of Artificial Sequence: Synthetic oligonucleotide
ucugaugaauccugacccu

SEQ ID NO: 3175357 - RNA, 19 nt, Artificial Sequence
  Description of Artificial Sequence: Synthetic oligonucleotide
gugucacucaguuggauga

SEQ ID NO: 3175358 - RNA, 19 nt, Artificial Sequence
  Description of Artificial Sequence: Synthetic oligonucleotide
uguguguguuccugauggg

SEQ ID NO: 3175359 - RNA, 19 nt, Artificial Sequence
  Description of Artificial Sequence: Synthetic oligonucleotide
gauacgaggucccaucucu

SEQ ID NO: 3175360 - RNA, 19 nt, Artificial Sequence
  Description of Artificial Sequence: Synthetic oligonucleotide
acuuuggugucacucaguu

SEQ ID NO: 3175361 - RNA, 19 nt, Artificial Sequence
  Description of Artificial Sequence: Synthetic oligonucleotide
aguugguucaguggcauga

SEQ ID NO: 3175362 - RNA, 19 nt, Artificial Sequence
  Description of Artificial Sequence: Synthetic oligonucleotide
acgaggucccaucucucac

SEQ ID NO: 3175363 - RNA, 19 nt, Artificial Sequence
  Description of Artificial Sequence: Synthetic oligonucleotide
aguggcaugaucagcucuc

SEQ ID NO: 3175364 - RNA, 19 nt, Artificial Sequence
  Description of Artificial Sequence: Synthetic oligonucleotide
cucucacaccacuccaugg

SEQ ID NO: 3175365 - RNA, 19 nt, Artificial Sequence
  Description of Artificial Sequence: Synthetic oligonucleotide
uccaacgagcauagcauuc

SEQ ID NO: 3175366 - RNA, 19 nt, Artificial Sequence
  Description of Artificial Sequence: Synthetic oligonucleotide
caacuuuggugucacucag

SEQ ID NO: 3175367 - RNA, 19 nt, Artificial Sequence
  Description of Artificial Sequence: Synthetic oligonucleotide
aggugcaaagcgcaguggu

SEQ ID NO: 3175368 - RNA, 19 nt, Artificial Sequence
  Description of Artificial Sequence: Synthetic oligonucleotide
ggcaaagggaauucccagg

SEQ ID NO: 3175369 - RNA, 19 nt, Artificial Sequence
  Description of Artificial Sequence: Synthetic oligonucleotide
uagcauucagccagcuaug

SEQ ID NO: 3175370 - RNA, 19 nt, Artificial Sequence
  Description of Artificial Sequence: Synthetic oligonucleotide
gcagugguccgacaggugg

SEQ ID NO: 3175371 - RNA, 19 nt, Artificial Sequence
  Description of Artificial Sequence: Synthetic oligonucleotide
uggccucugaugaauccug

SEQ ID NO: 3175372 - RNA, 19 nt, Artificial Sequence
  Description of Artificial Sequence: Synthetic oligonucleotide
uuggaugaggcugccucgg

SEQ ID NO: 3175373 - RNA, 19 nt, Artificial Sequence
  Description of Artificial Sequence: Synthetic oligonucleotide
uucaggggcuucaggaggu

SEQ ID NO: 3175374 - RNA, 19 nt, Artificial Sequence
  Description of Artificial Sequence: Synthetic oligonucleotide
uggauacgaggucccaucu

SEQ ID NO: 3175375 - RNA, 19 nt, Artificial Sequence
  Description of Artificial Sequence: Synthetic oligonucleotide
guguguguuccugaugggg

SEQ ID NO: 3175376 - RNA, 19 nt, Artificial Sequence
  Description of Artificial Sequence: Synthetic oligonucleotide
gugcaaagcgcaguggucc

SEQ ID NO: 3175377 - RNA, 19 nt, Artificial Sequence
  Description of Artificial Sequence: Synthetic oligonucleotide
ggucccaucucucacacca

SEQ ID NO: 3175378 - RNA, 19 nt, Artificial Sequence
  Description of Artificial Sequence: Synthetic oligonucleotide
auggaggaggagaagcagg

SEQ ID NO: 3175379 - RNA, 19 nt, Artificial Sequence
  Description of Artificial Sequence: Synthetic oligonucleotide
cuguggacaccaacuuugg

SEQ ID NO: 3175380 - RNA, 19 nt, Artificial Sequence
  Description of Artificial Sequence: Synthetic oligonucleotide
auucagccagcuaugaagu

SEQ ID NO: 3175381 - RNA, 19 nt, Artificial Sequence
  Description of Artificial Sequence: Synthetic oligonucleotide
ucacaccacuccaugguuc

SEQ ID NO: 3175382 - RNA, 19 nt, Artificial Sequence
  Description of Artificial Sequence: Synthetic oligonucleotide
aaguugguucaguggcaug

SEQ ID NO: 3175383 - RNA, 19 nt, Artificial Sequence
  Description of Artificial Sequence: Synthetic oligonucleotide
aagcuguggacaccaacuu

SEQ ID NO: 3175384 - RNA, 19 nt, Artificial Sequence
  Description of Artificial Sequence: Synthetic oligonucleotide
aauccuagcacuuggaggc

SEQ ID NO: 3175385 - RNA, 19 nt, Artificial Sequence
  Description of Artificial Sequence: Synthetic oligonucleotide
aaacccugucucuaaaagc

SEQ ID NO: 3175386 - RNA, 19 nt, Artificial Sequence
  Description of Artificial Sequence: Synthetic oligonucleotide
agcacuuggaggcagagac

SEQ ID NO: 3175387 - RNA, 19 nt, Artificial Sequence
  Description of Artificial Sequence: Synthetic oligonucleotide
gauaaagcgggcauggugg

SEQ ID NO: 3175388 - RNA, 19 nt, Artificial Sequence
  Description of Artificial Sequence: Synthetic oligonucleotide
aaagauaaagcgggcaugg

SEQ ID NO: 3175389 - RNA, 19 nt, Artificial Sequence
  Description of Artificial Sequence: Synthetic oligonucleotide
uaauccuagcacuuggagg

SEQ ID NO: 3175390 - RNA, 19 nt, Artificial Sequence
  Description of Artificial Sequence: Synthetic oligonucleotide
augccuuuaauccuagcac

SEQ ID NO: 3175391 - RNA, 19 nt, Artificial Sequence
  Description of Artificial Sequence: Synthetic oligonucleotide
aaagcgggcaugguggugc

SEQ ID NO: 3175392 - RNA, 19 nt, Artificial Sequence
  Description of Artificial Sequence: Synthetic oligonucleotide
uuaauccuagcacuuggag

SEQ ID NO: 3175393 - RNA, 19 nt, Artificial Sequence
  Description of Artificial Sequence: Synthetic oligonucleotide
uggugcaugccuuuaaucc

SEQ ID NO: 3175394 - RNA, 19 nt, Artificial Sequence
  Description of Artificial Sequence: Synthetic oligonucleotide
uucgaggccagucuggucc

SEQ ID NO: 3175395 - RNA, 19 nt, Artificial Sequence
  Description of Artificial Sequence: Synthetic oligonucleotide
uuccaggacagccagaacu

SEQ ID NO: 3175396 - RNA, 19 nt, Artificial Sequence
  Description of Artificial Sequence: Synthetic oligonucleotide
gacagccagaacuacacag

SEQ ID NO: 3175397 - RNA, 19 nt, Artificial Sequence
  Description of Artificial Sequence: Synthetic oligonucleotide
gaaacccugucucuaaaag

SEQ ID NO: 3175398 - RNA, 19 nt, Artificial Sequence
  Description of Artificial Sequence: Synthetic oligonucleotide
cagaacuacacagagaaac

SEQ ID NO: 3175399 - RNA, 19 nt, Artificial Sequence
  Description of Artificial Sequence: Synthetic oligonucleotide
cuuuaauccuagcacuugg

SEQ ID NO: 3175400 - RNA, 19 nt, Artificial Sequence
  Description of Artificial Sequence: Synthetic oligonucleotide
uggaggcagagacaggugg

SEQ ID NO: 3175401 - RNA, 19 nt, Artificial Sequence
  Description of Artificial Sequence: Synthetic oligonucleotide
aaaagauaaagcgggcaug

SEQ ID NO: 3175402 - RNA, 19 nt, Artificial Sequence
  Description of Artificial Sequence: Synthetic oligonucleotide
agaacuacacagagaaacc

SEQ ID NO: 3175403 - RNA, 19 nt, Artificial Sequence
  Description of Artificial Sequence: Synthetic oligonucleotide
agcaaguuccaggacagcc

SEQ ID NO: 3175404 - RNA, 19 nt, Artificial Sequence
  Description of Artificial Sequence: Synthetic oligonucleotide
agauaaagcgggcauggug

SEQ ID NO: 3175405 - RNA, 19 nt, Artificial Sequence
  Description of Artificial Sequence: Synthetic oligonucleotide
uuuaauccuagcacuugga

SEQ ID NO: 3175406 - RNA, 19 nt, Artificial Sequence
  Description of Artificial Sequence: Synthetic oligonucleotide
aacccugucucuaaaagca

SEQ ID NO: 3175407 - RNA, 19 nt, Artificial Sequence
  Description of Artificial Sequence: Synthetic oligonucleotide
gaacuacacagagaaaccc

SEQ ID NO: 3175408 - RNA, 19 nt, Artificial Sequence
  Description of Artificial Sequence: Synthetic oligonucleotide
ugccuuuaauccuagcacu

SEQ ID NO: 3175409 - RNA, 19 nt, Artificial Sequence
  Description of Artificial Sequence: Synthetic oligonucleotide
agguggaucccugaguucg

SEQ ID NO: 3175410 - RNA, 19 nt, Artificial Sequence
  Description of Artificial Sequence: Synthetic oligonucleotide
ugaguucgaggccagucug

SEQ ID NO: 3175411 - RNA, 19 nt, Artificial Sequence
  Description of Artificial Sequence: Synthetic oligonucleotide
aggacagccagaacuacac

SEQ ID NO: 3175412 - RNA, 19 nt, Artificial Sequence
  Description of Artificial Sequence: Synthetic oligonucleotide
cacagagaaacccugucuc

SEQ ID NO: 3175413 - RNA, 19 nt, Artificial Sequence
  Description of Artificial Sequence: Synthetic oligonucleotide
aacuacacagagaaacccu

SEQ ID NO: 3175414 - RNA, 19 nt, Artificial Sequence
  Description of Artificial Sequence: Synthetic oligonucleotide
caugccuuuaauccuagca

SEQ ID NO: 3175415 - RNA, 19 nt, Artificial Sequence
  Description of Artificial Sequence: Synthetic oligonucleotide
uacacagagaaacccuguc

SEQ ID NO: 3175416 - RNA, 19 nt, Artificial Sequence
  Description of Artificial Sequence: Synthetic oligonucleotide
acacagagaaacccugucu

SEQ ID NO: 3175417 - RNA, 19 nt, Artificial Sequence
  Description of Artificial Sequence: Synthetic oligonucleotide
caaguuccaggacagccag

SEQ ID NO: 3175418 - RNA, 19 nt, Artificial Sequence
  Description of Artificial Sequence: Synthetic oligonucleotide
cacuuggaggcagagacag

SEQ ID NO: 3175419 - RNA, 19 nt, Artificial Sequence
  Description of Artificial Sequence: Synthetic oligonucleotide
gccagaacuacacagagaa

SEQ ID NO: 3175420 - RNA, 19 nt, Artificial Sequence
  Description of Artificial Sequence: Synthetic oligonucleotide
ggaucccugaguucgaggc

SEQ ID NO: 3175421 - RNA, 19 nt, Artificial Sequence
  Description of Artificial Sequence: Synthetic oligonucleotide
ggcagagacagguggaucc

SEQ ID NO: 3175422 - RNA, 19 nt, Artificial Sequence
  Description of Artificial Sequence: Synthetic oligonucleotide
ugguccacggagcaaguuc

SEQ ID NO: 3175423 - RNA, 19 nt, Artificial Sequence
  Description of Artificial Sequence: Synthetic oligonucleotide
acagagaaacccugucucu

SEQ ID NO: 3175424 - RNA, 19 nt, Artificial Sequence
  Description of Artificial Sequence: Synthetic oligonucleotide
acagguggaucccugaguu

SEQ ID NO: 3175425 - RNA, 19 nt, Artificial Sequence
  Description of Artificial Sequence: Synthetic oligonucleotide
acuacacagagaaacccug

SEQ ID NO: 3175426 - RNA, 19 nt, Artificial Sequence
  Description of Artificial Sequence: Synthetic oligonucleotide
cagccagaacuacacagag

SEQ ID NO: 3175427 - RNA, 19 nt, Artificial Sequence
  Description of Artificial Sequence: Synthetic oligonucleotide
uccaggacagccagaacua

SEQ ID NO: 3175428 - RNA, 19 nt, Artificial Sequence
  Description of Artificial Sequence: Synthetic oligonucleotide
uggaucccugaguucgagg

SEQ ID NO: 3175429 - RNA, 19 nt, Artificial Sequence
  Description of Artificial Sequence: Synthetic oligonucleotide
ugcaugccuuuaauccuag

SEQ ID NO: 3175430 - RNA, 19 nt, Artificial Sequence
  Description of Artificial Sequence: Synthetic oligonucleotide
agacagguggaucccugag

SEQ ID NO: 3175431 - RNA, 19 nt, Artificial Sequence
  Description of Artificial Sequence: Synthetic oligonucleotide
gaucccugaguucgaggcc

SEQ ID NO: 3175432 - RNA, 19 nt, Artificial Sequence
  Description of Artificial Sequence: Synthetic oligonucleotide
agaaacccugucucuaaaa

SEQ ID NO: 3175433 - RNA, 19 nt, Artificial Sequence
  Description of Artificial Sequence: Synthetic oligonucleotide
agagaaacccugucucuaa

SEQ ID NO: 3175434 - RNA, 19 nt, Artificial Sequence
  Description of Artificial Sequence: Synthetic oligonucleotide
auaaagcgggcaugguggu

SEQ ID NO: 3175435 - RNA, 19 nt, Artificial Sequence
  Description of Artificial Sequence: Synthetic oligonucleotide
uuggaggcagagacaggug

SEQ ID NO: 3175436 - RNA, 19 nt, Artificial Sequence
  Description of Artificial Sequence: Synthetic oligonucleotide
gucugguccacggagcaag

SEQ ID NO: 3175437 - RNA, 19 nt, Artificial Sequence
  Description of Artificial Sequence: Synthetic oligonucleotide
aguuccaggacagccagaa

SEQ ID NO: 3175438 - RNA, 19 nt, Artificial Sequence
  Description of Artificial Sequence: Synthetic oligonucleotide
aggccagucugguccacgg

SEQ ID NO: 3175439 - RNA, 19 nt, Artificial Sequence
  Description of Artificial Sequence: Synthetic oligonucleotide
gaguucgaggccagucugg

SEQ ID NO: 3175440 - RNA, 19 nt, Artificial Sequence
  Description of Artificial Sequence: Synthetic oligonucleotide
cacggagcaaguuccagga

SEQ ID NO: 3175441 - RNA, 19 nt, Artificial Sequence
  Description of Artificial Sequence: Synthetic oligonucleotide
aagauaaagcgggcauggu

SEQ ID NO: 3175442 - RNA, 19 nt, Artificial Sequence
  Description of Artificial Sequence: Synthetic oligonucleotide
acggagcaaguuccaggac

SEQ ID NO: 3175443 - RNA, 19 nt, Artificial Sequence
  Description of Artificial Sequence: Synthetic oligonucleotide
ggagcaaguuccaggacag

SEQ ID NO: 3175444 - RNA, 19 nt, Artificial Sequence
  Description of Artificial Sequence: Synthetic oligonucleotide
acagccagaacuacacaga

SEQ ID NO: 3175445 - RNA, 19 nt, Artificial Sequence
  Description of Artificial Sequence: Synthetic oligonucleotide
guggugcaugccuuuaauc

SEQ ID NO: 3175446 - RNA, 19 nt, Artificial Sequence
  Description of Artificial Sequence: Synthetic oligonucleotide
aucccugaguucgaggcca

SEQ ID NO: 3175447 - RNA, 19 nt, Artificial Sequence
  Description of Artificial Sequence: Synthetic oligonucleotide
uccacggagcaaguuccag

SEQ ID NO: 3175448 - RNA, 19 nt, Artificial Sequence
  Description of Artificial Sequence: Synthetic oligonucleotide
uccuagcacuuggaggcag

SEQ ID NO: 3175449 - RNA, 19 nt, Artificial Sequence
  Description of Artificial Sequence: Synthetic oligonucleotide
gagacagguggaucccuga

SEQ ID NO: 3175450 - RNA, 19 nt, Artificial Sequence
  Description of Artificial Sequence: Synthetic oligonucleotide
gccagucugguccacggag

SEQ ID NO: 3175451 - RNA, 19 nt, Artificial Sequence
  Description of Artificial Sequence: Synthetic oligonucleotide
gguccacggagcaaguucc

SEQ ID NO: 3175452 - RNA, 19 nt, Artificial Sequence
  Description of Artificial Sequence: Synthetic oligonucleotide
cuagcacuuggaggcagag

SEQ ID NO: 3175453 - RNA, 19 nt, Artificial Sequence
  Description of Artificial Sequence: Synthetic oligonucleotide
gagaaacccugucucuaaa

SEQ ID NO: 3175454 - RNA, 19 nt, Artificial Sequence
  Description of Artificial Sequence: Synthetic oligonucleotide
ucugguccacggagcaagu

SEQ ID NO: 3175455 - RNA, 19 nt, Artificial Sequence
  Description of Artificial Sequence: Synthetic oligonucleotide
ugguggugcaugccuuuaa

SEQ ID NO: 3175456 - RNA, 19 nt, Artificial Sequence
  Description of Artificial Sequence: Synthetic oligonucleotide
aguucgaggccagucuggu

SEQ ID NO: 3175457 - RNA, 19 nt, Artificial Sequence
  Description of Artificial Sequence: Synthetic oligonucleotide
cuuggaggcagagacaggu

SEQ ID NO: 3175458 - RNA, 19 nt, Artificial Sequence
  Description of Artificial Sequence: Synthetic oligonucleotide
aggcagagacagguggauc

SEQ ID NO: 3175459 - RNA, 19 nt, Artificial Sequence
  Description of Artificial Sequence: Synthetic oligonucleotide
ccacggagcaaguuccagg

SEQ ID NO: 3175460 - RNA, 19 nt, Artificial Sequence
  Description of Artificial Sequence: Synthetic oligonucleotide
uaaagcgggcaugguggug

SEQ ID NO: 3175461 - RNA, 19 nt, Artificial Sequence
  Description of Artificial Sequence: Synthetic oligonucleotide
ucccugaguucgaggccag

SEQ ID NO: 3175462 - RNA, 19 nt, Artificial Sequence
  Description of Artificial Sequence: Synthetic oligonucleotide
agagacagguggaucccug

SEQ ID NO: 3175463 - RNA, 19 nt, Artificial Sequence
  Description of Artificial Sequence: Synthetic oligonucleotide
gaggccagucugguccacg

SEQ ID NO: 3175464 - RNA, 19 nt, Artificial Sequence
  Description of Artificial Sequence: Synthetic oligonucleotide
caggacagccagaacuaca

SEQ ID NO: 3175465 - RNA, 19 nt, Artificial Sequence
  Description of Artificial Sequence: Synthetic oligonucleotide
ucgaggccagucuggucca

SEQ ID NO: 3175466 - RNA, 19 nt, Artificial Sequence
  Description of Artificial Sequence: Synthetic oligonucleotide
gacagguggaucccugagu

SEQ ID NO: 3175467 - RNA, 19 nt, Artificial Sequence
  Description of Artificial Sequence: Synthetic oligonucleotide
ggugcaugccuuuaauccu

SEQ ID NO: 3175468 - RNA, 19 nt, Artificial Sequence
  Description of Artificial Sequence: Synthetic oligonucleotide
aagcgggcaugguggugca

SEQ ID NO: 3175469 - RNA, 19 nt, Artificial Sequence
  Description of Artificial Sequence: Synthetic oligonucleotide
uagcacuuggaggcagaga

SEQ ID NO: 3175470 - RNA, 19 nt, Artificial Sequence
  Description of Artificial Sequence: Synthetic oligonucleotide
acuuggaggcagagacagg

SEQ ID NO: 3175471 - RNA, 19 nt, Artificial Sequence
  Description of Artificial Sequence: Synthetic oligonucleotide
ccagucugguccacggagc

SEQ ID NO: 3175472 - RNA, 19 nt, Artificial Sequence
  Description of Artificial Sequence: Synthetic oligonucleotide
ccuuuaauccuagcacuug

SEQ ID NO: 3175473 - RNA, 19 nt, Artificial Sequence
  Description of Artificial Sequence: Synthetic oligonucleotide
guggaucccugaguucgag

SEQ ID NO: 3175474 - RNA, 19 nt, Artificial Sequence
  Description of Artificial Sequence: Synthetic oligonucleotide
cagucugguccacggagca

SEQ ID NO: 3175475 - RNA, 19 nt, Artificial Sequence
  Description of Artificial Sequence: Synthetic oligonucleotide
cuacacagagaaacccugu

SEQ ID NO: 3175476 - RNA, 19 nt, Artificial Sequence
  Description of Artificial Sequence: Synthetic oligonucleotide
cagguggaucccugaguuc

SEQ ID NO: 3175477 - RNA, 19 nt, Artificial Sequence
  Description of Artificial Sequence: Synthetic oligonucleotide
cugaguucgaggccagucu

SEQ ID NO: 3175478 - RNA, 19 nt, Artificial Sequence
  Description of Artificial Sequence: Synthetic oligonucleotide
agccagaacuacacagaga

SEQ ID NO: 3175479 - RNA, 19 nt, Artificial Sequence
  Description of Artificial Sequence: Synthetic oligonucleotide
gagcaaguuccaggacagc

SEQ ID NO: 3175480 - RNA, 19 nt, Artificial Sequence
  Description of Artificial Sequence: Synthetic oligonucleotide
guuccaggacagccagaac

SEQ ID NO: 3175481 - RNA, 19 nt, Artificial Sequence
  Description of Artificial Sequence: Synthetic oligonucleotide
gcaaguuccaggacagcca

SEQ ID NO: 3175482 - RNA, 19 nt, Artificial Sequence
  Description of Artificial Sequence: Synthetic oligonucleotide
aaguuccaggacagccaga

SEQ ID NO: 3175483 - RNA, 19 nt, Artificial Sequence
  Description of Artificial Sequence: Synthetic oligonucleotide
ccugucucuaaaagcaaaa

SEQ ID NO: 3175484 - RNA, 19 nt, Artificial Sequence
  Description of Artificial Sequence: Synthetic oligonucleotide
aacaacgcuuaacauaucc

SEQ ID NO: 3175485 - RNA, 19 nt, Artificial Sequence
  Description of Artificial Sequence: Synthetic oligonucleotide
aaaccaugauaguaaaggc

SEQ ID NO: 3175486 - RNA, 19 nt, Artificial Sequence
  Description of Artificial Sequence: Synthetic oligonucleotide
uaacauaucccauaaacca

SEQ ID NO: 3175487 - RNA, 19 nt, Artificial Sequence
  Description of Artificial Sequence: Synthetic oligonucleotide
uuaacauaucccauaaacc

SEQ ID NO: 3175488 - RNA, 19 nt, Artificial Sequence
  Description of Artificial Sequence: Synthetic oligonucleotide
cuuaacauaucccauaaac

SEQ ID NO: 3175489 - RNA, 19 nt, Artificial Sequence
  Description of Artificial Sequence: Synthetic oligonucleotide
agcagauuuggcuaaaggg

SEQ ID NO: 3175490 - RNA, 19 nt, Artificial Sequence
  Description of Artificial Sequence: Synthetic oligonucleotide
acuacagaaucgcugaugg

SEQ ID NO: 3175491 - RNA, 19 nt, Artificial Sequence
  Description of Artificial Sequence: Synthetic oligonucleotide
guuugcauacauuacagag

SEQ ID NO: 3175492 - RNA, 19 nt, Artificial Sequence
  Description of Artificial Sequence: Synthetic oligonucleotide
acggguaugggcuucaccc

SEQ ID NO: 3175493 - RNA, 19 nt, Artificial Sequence
  Description of Artificial Sequence: Synthetic oligonucleotide
ucuucugucagugugaggc

SEQ ID NO: 3175494 - RNA, 19 nt, Artificial Sequence
  Description of Artificial Sequence: Synthetic oligonucleotide
aaaggcacuacagaaucgc

SEQ ID NO: 3175495 - RNA, 19 nt, Artificial Sequence
  Description of Artificial Sequence: Synthetic oligonucleotide
aaggugucaagcuguaaac

SEQ ID NO: 3175496 - RNA, 19 nt, Artificial Sequence
  Description of Artificial Sequence: Synthetic oligonucleotide
gaugcucaaagccagacug

SEQ ID NO: 3175497 - RNA, 19 nt, Artificial Sequence
  Description of Artificial Sequence: Synthetic oligonucleotide
uuauaagugugcuagggga

SEQ ID NO: 3175498 - RNA, 19 nt, Artificial Sequence
  Description of Artificial Sequence: Synthetic oligonucleotide
caacccaucauucagauuc

SEQ ID NO: 3175499 - RNA, 19 nt, Artificial Sequence
  Description of Artificial Sequence: Synthetic oligonucleotide
gcaguuaacauuuuaacag

SEQ ID NO: 3175500 - RNA, 19 nt, Artificial Sequence
  Description of Artificial Sequence: Synthetic oligonucleotide
auucacaaaggugucaagc

SEQ ID NO: 3175501 - RNA, 19 nt, Artificial Sequence
  Description of Artificial Sequence: Synthetic oligonucleotide
aaaggugucaagcuguaaa

SEQ ID NO: 3175502 - RNA, 19 nt, Artificial Sequence
  Description of Artificial Sequence: Synthetic oligonucleotide
aacaacaacgcuuaacaua

SEQ ID NO: 3175503 - RNA, 19 nt, Artificial Sequence
  Description of Artificial Sequence: Synthetic oligonucleotide
uagcaggucauccaugagg

SEQ ID NO: 3175504 - RNA, 19 nt, Artificial Sequence
  Description of Artificial Sequence: Synthetic oligonucleotide
cauuacagaguucuguucc

SEQ ID NO: 3175505 - RNA, 19 nt, Artificial Sequence
  Description of Artificial Sequence: Synthetic oligonucleotide
uuugcauacauuacagagu

SEQ ID NO: 3175506 - RNA, 19 nt, Artificial Sequence
  Description of Artificial Sequence: Synthetic oligonucleotide
accaugauaguaaaggcac

SEQ ID NO: 3175507 - RNA, 19 nt, Artificial Sequence
  Description of Artificial Sequence: Synthetic oligonucleotide
uaucccauaaaccaugaua

SEQ ID NO: 3175508 - RNA, 19 nt, Artificial Sequence
  Description of Artificial Sequence: Synthetic oligonucleotide
aucccauaaaccaugauag

SEQ ID NO: 3175509 - RNA, 19 nt, Artificial Sequence
  Description of Artificial Sequence: Synthetic oligonucleotide
acggcuugcuuacagaggg

SEQ ID NO: 3175510 - RNA, 19 nt, Artificial Sequence
  Description of Artificial Sequence: Synthetic oligonucleotide
acucagagaguuugcauac

SEQ ID NO: 3175511 - RNA, 19 nt, Artificial Sequence
  Description of Artificial Sequence: Synthetic oligonucleotide
uguuccacggguaugggcu

SEQ ID NO: 3175512 - RNA, 19 nt, Artificial Sequence
  Description of Artificial Sequence: Synthetic oligonucleotide
uuuuccuuccgcuuauaag

SEQ ID NO: 3175513 - RNA, 19 nt, Artificial Sequence
  Description of Artificial Sequence: Synthetic oligonucleotide
ugauaguaaaggcacuaca

SEQ ID NO: 3175514 - RNA, 19 nt, Artificial Sequence
  Description of Artificial Sequence: Synthetic oligonucleotide
aauggcgugggauucacaa

SEQ ID NO: 3175515 - RNA, 19 nt, Artificial Sequence
  Description of Artificial Sequence: Synthetic oligonucleotide
agaguuugcauacauuaca

SEQ ID NO: 3175516 - RNA, 19 nt, Artificial Sequence
  Description of Artificial Sequence: Synthetic oligonucleotide
acagaguucuguuccacgg

SEQ ID NO: 3175517 - RNA, 19 nt, Artificial Sequence
  Description of Artificial Sequence: Synthetic oligonucleotide
agagcugcuauacagcaug

SEQ ID NO: 3175518 - RNA, 19 nt, Artificial Sequence
  Description of Artificial Sequence: Synthetic oligonucleotide
uaaacggugucacugucca

SEQ ID NO: 3175519 - RNA, 19 nt, Artificial Sequence
  Description of Artificial Sequence: Synthetic oligonucleotide
ugugcucugaaggagagug

SEQ ID NO: 3175520 - RNA, 19 nt, Artificial Sequence
  Description of Artificial Sequence: Synthetic oligonucleotide
aacccaagagggucaaagg

SEQ ID NO: 3175521 - RNA, 19 nt, Artificial Sequence
  Description of Artificial Sequence: Synthetic oligonucleotide
uugcauacauuacagaguu

SEQ ID NO: 3175522 - RNA, 19 nt, Artificial Sequence
  Description of Artificial Sequence: Synthetic oligonucleotide
uaaaggcacuacagaaucg

SEQ ID NO: 3175523 - RNA, 19 nt, Artificial Sequence
  Description of Artificial Sequence: Synthetic oligonucleotide
aaguuacuguaguagaaaa

SEQ ID NO: 3175524 - RNA, 19 nt, Artificial Sequence
  Description of Artificial Sequence: Synthetic oligonucleotide
uucacaaaggugucaagcu

SEQ ID NO: 3175525 - RNA, 19 nt, Artificial Sequence
  Description of Artificial Sequence: Synthetic oligonucleotide
ugaggcacgguacuguuga

SEQ ID NO: 3175526 - RNA, 19 nt, Artificial Sequence
  Description of Artificial Sequence: Synthetic oligonucleotide
agcuccgcugcauaaggcc

SEQ ID NO: 3175527 - RNA, 19 nt, Artificial Sequence
  Description of Artificial Sequence: Synthetic oligonucleotide
ucacaaaggugucaagcug

SEQ ID NO: 3175528 - RNA, 19 nt, Artificial Sequence
  Description of Artificial Sequence: Synthetic oligonucleotide
ugcaaguuacuguaguaga

SEQ ID NO: 3175529 - RNA, 19 nt, Artificial Sequence
  Description of Artificial Sequence: Synthetic oligonucleotide
uugggaugcucaaagccag

SEQ ID NO: 3175530 - RNA, 19 nt, Artificial Sequence
  Description of Artificial Sequence: Synthetic oligonucleotide
acacacacacaacaacaac

SEQ ID NO: 3175531 - RNA, 19 nt, Artificial Sequence
  Description of Artificial Sequence: Synthetic oligonucleotide
uuaucuagcaggucaucca

SEQ ID NO: 3175532 - RNA, 19 nt, Artificial Sequence
  Description of Artificial Sequence: Synthetic oligonucleotide
acauuacagaguucuguuc

SEQ ID NO: 3175533 - RNA, 19 nt, Artificial Sequence
  Description of Artificial Sequence: Synthetic oligonucleotide
guagucuucugucagugug

SEQ ID NO: 3175534 - RNA, 19 nt, Artificial Sequence
  Description of Artificial Sequence: Synthetic oligonucleotide
ggugucaagcuguaaacgg

SEQ ID NO: 3175535 - RNA, 19 nt, Artificial Sequence
  Description of Artificial Sequence: Synthetic oligonucleotide
gaguuugcauacauuacag

SEQ ID NO: 3175536 - RNA, 19 nt, Artificial Sequence
  Description of Artificial Sequence: Synthetic oligonucleotide
uucuguuccacggguaugg

SEQ ID NO: 3175537 - RNA, 19 nt, Artificial Sequence
  Description of Artificial Sequence: Synthetic oligonucleotide
gagcagauuuggcuaaagg

SEQ ID NO: 3175538 - RNA, 19 nt, Artificial Sequence
  Description of Artificial Sequence: Synthetic oligonucleotide
aaccaugauaguaaaggca

SEQ ID NO: 3175539 - RNA, 19 nt, Artificial Sequence
  Description of Artificial Sequence: Synthetic oligonucleotide
acaacaacgcuuaacauau

SEQ ID NO: 3175540 - RNA, 19 nt, Artificial Sequence
  Description of Artificial Sequence: Synthetic oligonucleotide
ucccggugugcucugaagg

SEQ ID NO: 3175541 - RNA, 19 nt, Artificial Sequence
  Description of Artificial Sequence: Synthetic oligonucleotide
uauaagugugcuaggggaa

SEQ ID NO: 3175542 - RNA, 19 nt, Artificial Sequence
  Description of Artificial Sequence: Synthetic oligonucleotide
acaacgcuuaacauauccc

SEQ ID NO: 3175543 - RNA, 19 nt, Artificial Sequence
  Description of Artificial Sequence: Synthetic oligonucleotide
cuugcuaggagcagauuug

SEQ ID NO: 3175544 - RNA, 19 nt, Artificial Sequence
  Description of Artificial Sequence: Synthetic oligonucleotide
uggguuaggaaauggcgug

SEQ ID NO: 3175545 - RNA, 19 nt, Artificial Sequence
  Description of Artificial Sequence: Synthetic oligonucleotide
ucauccaacucugugcuug

SEQ ID NO: 3175546 - RNA, 19 nt, Artificial Sequence
  Description of Artificial Sequence: Synthetic oligonucleotide
cuguccacuugcuaggagc

SEQ ID NO: 3175547 - RNA, 19 nt, Artificial Sequence
  Description of Artificial Sequence: Synthetic oligonucleotide
acuugcuaggagcagauuu

SEQ ID NO: 3175548 - RNA, 19 nt, Artificial Sequence
  Description of Artificial Sequence: Synthetic oligonucleotide
ucuuggagguguaugggaa

SEQ ID NO: 3175549 - RNA, 19 nt, Artificial Sequence
  Description of Artificial Sequence: Synthetic oligonucleotide
augauaguaaaggcacuac

SEQ ID NO: 3175550 - RNA, 19 nt, Artificial Sequence
  Description of Artificial Sequence: Synthetic oligonucleotide
gcugcuauacagcaugggg

SEQ ID NO: 3175551 - RNA, 19 nt, Artificial Sequence
  Description of Artificial Sequence: Synthetic oligonucleotide
acagcacuuuuccuuccgc

SEQ ID NO: 3175552 - RNA, 19 nt, Artificial Sequence
  Description of Artificial Sequence: Synthetic oligonucleotide
uguccacuugcuaggagca

SEQ ID NO: 3175553 - RNA, 19 nt, Artificial Sequence
  Description of Artificial Sequence: Synthetic oligonucleotide
ugucagucaacccaucauu

SEQ ID NO: 3175554 - RNA, 19 nt, Artificial Sequence
  Description of Artificial Sequence: Synthetic oligonucleotide
acacggcuugcuuacagag

SEQ ID NO: 3175555 - RNA, 19 nt, Artificial Sequence
  Description of Artificial Sequence: Synthetic oligonucleotide
guuaucuagcaggucaucc

SEQ ID NO: 3175556 - RNA, 19 nt, Artificial Sequence
  Description of Artificial Sequence: Synthetic oligonucleotide
aucauucagauucauggua

SEQ ID NO: 3175557 - RNA, 19 nt, Artificial Sequence
  Description of Artificial Sequence: Synthetic oligonucleotide
ugucagucagccgugggag

SEQ ID NO: 3175558 - RNA, 19 nt, Artificial Sequence
  Description of Artificial Sequence: Synthetic oligonucleotide
gaaggagcugguuggggag

SEQ ID NO: 3175559 - RNA, 19 nt, Artificial Sequence
  Description of Artificial Sequence: Synthetic oligonucleotide
uacugcaaguuacuguagu

SEQ ID NO: 3175560 - RNA, 19 nt, Artificial Sequence
  Description of Artificial Sequence: Synthetic oligonucleotide
aacugguacagcacuuuuc

SEQ ID NO: 3175561 - RNA, 19 nt, Artificial Sequence
  Description of Artificial Sequence: Synthetic oligonucleotide
auccaugagguugucaguc

SEQ ID NO: 3175562 - RNA, 19 nt, Artificial Sequence
  Description of Artificial Sequence: Synthetic oligonucleotide
ucagucaacccaucauuca

SEQ ID NO: 3175563 - RNA, 19 nt, Artificial Sequence
  Description of Artificial Sequence: Synthetic oligonucleotide
agcuugggaugcucaaagc

SEQ ID NO: 3175564 - RNA, 19 nt, Artificial Sequence
  Description of Artificial Sequence: Synthetic oligonucleotide
uaugggaagcuggagcucc

SEQ ID NO: 3175565 - RNA, 19 nt, Artificial Sequence
  Description of Artificial Sequence: Synthetic oligonucleotide
gacgucauccaacucugug

SEQ ID NO: 3175566 - RNA, 19 nt, Artificial Sequence
  Description of Artificial Sequence: Synthetic oligonucleotide
agcgugauguuaucuagca

SEQ ID NO: 3175567 - RNA, 19 nt, Artificial Sequence
  Description of Artificial Sequence: Synthetic oligonucleotide
uaucuagcaggucauccau

SEQ ID NO: 3175568 - RNA, 19 nt, Artificial Sequence
  Description of Artificial Sequence: Synthetic oligonucleotide
aacauaucccauaaaccau

SEQ ID NO: 3175569 - RNA, 19 nt, Artificial Sequence
  Description of Artificial Sequence: Synthetic oligonucleotide
cuggcguuggauuggugcg

SEQ ID NO: 3175570 - RNA, 19 nt, Artificial Sequence
  Description of Artificial Sequence: Synthetic oligonucleotide
ucagugugaggcacgguac

SEQ ID NO: 3175571 - RNA, 19 nt, Artificial Sequence
  Description of Artificial Sequence: Synthetic oligonucleotide
cagucaacccaucauucag

SEQ ID NO: 3175572 - RNA, 19 nt, Artificial Sequence
  Description of Artificial Sequence: Synthetic oligonucleotide
caacgcuuaacauauccca

SEQ ID NO: 3175573 - RNA, 19 nt, Artificial Sequence
  Description of Artificial Sequence: Synthetic oligonucleotide
uuaggaaauggcgugggau

SEQ ID NO: 3175574 - RNA, 19 nt, Artificial Sequence
  Description of Artificial Sequence: Synthetic oligonucleotide
cuugggaugcucaaagcca

SEQ ID NO: 3175575 - RNA, 19 nt, Artificial Sequence
  Description of Artificial Sequence: Synthetic oligonucleotide
aagugugcuaggggaaggg

SEQ ID NO: 3175576 - RNA, 19 nt, Artificial Sequence
  Description of Artificial Sequence: Synthetic oligonucleotide
auuacagaguucuguucca

SEQ ID NO: 3175577 - RNA, 19 nt, Artificial Sequence
  Description of Artificial Sequence: Synthetic oligonucleotide
aaggagcugguuggggagc

SEQ ID NO: 3175578 - RNA, 19 nt, Artificial Sequence
  Description of Artificial Sequence: Synthetic oligonucleotide
cugcaaguuacuguaguag

SEQ ID NO: 3175579 - RNA, 19 nt, Artificial Sequence
  Description of Artificial Sequence: Synthetic oligonucleotide
agaguucuguuccacgggu

SEQ ID NO: 3175580 - RNA, 19 nt, Artificial Sequence
  Description of Artificial Sequence: Synthetic oligonucleotide
uaaaggguuucuguguagu

SEQ ID NO: 3175581 - RNA, 19 nt, Artificial Sequence
  Description of Artificial Sequence: Synthetic oligonucleotide
ugguacagcacuuuuccuu

SEQ ID NO: 3175582 - RNA, 19 nt, Artificial Sequence
  Description of Artificial Sequence: Synthetic oligonucleotide
aggugucaagcuguaaacg

SEQ ID NO: 3175583 - RNA, 19 nt, Artificial Sequence
  Description of Artificial Sequence: Synthetic oligonucleotide
auucaugguaccugccaug

SEQ ID NO: 3175584 - RNA, 19 nt, Artificial Sequence
  Description of Artificial Sequence: Synthetic oligonucleotide
ugaaacaucugguagacgg

SEQ ID NO: 3175585 - RNA, 19 nt, Artificial Sequence
  Description of Artificial Sequence: Synthetic oligonucleotide
augagguugaacuuggucc

SEQ ID NO: 3175586 - RNA, 19 nt, Artificial Sequence
  Description of Artificial Sequence: Synthetic oligonucleotide
aauacaacacuggugaugg

SEQ ID NO: 3175587 - RNA, 19 nt, Artificial Sequence
  Description of Artificial Sequence: Synthetic oligonucleotide
aauccuguaauuucgaagu

SEQ ID NO: 3175588 - RNA, 19 nt, Artificial Sequence
  Description of Artificial Sequence: Synthetic oligonucleotide
uugaagggcagcuugaggg

SEQ ID NO: 3175589 - RNA, 19 nt, Artificial Sequence
  Description of Artificial Sequence: Synthetic oligonucleotide
auaguuagccaccugcacc

SEQ ID NO: 3175590 - RNA, 19 nt, Artificial Sequence
  Description of Artificial Sequence: Synthetic oligonucleotide
ugcaaggucacggagaugg

SEQ ID NO: 3175591 - RNA, 19 nt, Artificial Sequence
  Description of Artificial Sequence: Synthetic oligonucleotide
uuuggguuggggaagaagc

SEQ ID NO: 3175592 - RNA, 19 nt, Artificial Sequence
  Description of Artificial Sequence: Synthetic oligonucleotide
aacaagucaccacugaugu

SEQ ID NO: 3175593 - RNA, 19 nt, Artificial Sequence
  Description of Artificial Sequence: Synthetic oligonucleotide
uguaagacaucgaugaagu

SEQ ID NO: 3175594 - RNA, 19 nt, Artificial Sequence
  Description of Artificial Sequence: Synthetic oligonucleotide
auuuccagacuucugcugc

SEQ ID NO: 3175595 - RNA, 19 nt, Artificial Sequence
  Description of Artificial Sequence: Synthetic oligonucleotide
uggacuucaauucuaaagu

SEQ ID NO: 3175596 - RNA, 19 nt, Artificial Sequence
  Description of Artificial Sequence: Synthetic oligonucleotide
ugugacuccagacugaagu

SEQ ID NO: 3175597 - RNA, 19 nt, Artificial Sequence
  Description of Artificial Sequence: Synthetic oligonucleotide
ucaggcaucaggaugaggu

SEQ ID NO: 3175598 - RNA, 19 nt, Artificial Sequence
  Description of Artificial Sequence: Synthetic oligonucleotide
aacuacaguuuccagcagg

SEQ ID NO: 3175599 - RNA, 19 nt, Artificial Sequence
  Description of Artificial Sequence: Synthetic oligonucleotide
uggacucaaaggcaaagcg

SEQ ID NO: 3175600 - RNA, 19 nt, Artificial Sequence
  Description of Artificial Sequence: Synthetic oligonucleotide
ucuaaaguucuccagcaca

SEQ ID NO: 3175601 - RNA, 19 nt, Artificial Sequence
  Description of Artificial Sequence: Synthetic oligonucleotide
uggugauggacucaaaggc

SEQ ID NO: 3175602 - RNA, 19 nt, Artificial Sequence
  Description of Artificial Sequence: Synthetic oligonucleotide
aauccgccggcccagacac

SEQ ID NO: 3175603 - RNA, 19 nt, Artificial Sequence
  Description of Artificial Sequence: Synthetic oligonucleotide
aaauguccccauuagguca

SEQ ID NO: 3175604 - RNA, 19 nt, Artificial Sequence
  Description of Artificial Sequence: Synthetic oligonucleotide
uguaauuucgaaguaccag

SEQ ID NO: 3175605 - RNA, 19 nt, Artificial Sequence
  Description of Artificial Sequence: Synthetic oligonucleotide
uuuccagccaccgaguugg

SEQ ID NO: 3175606 - RNA, 19 nt, Artificial Sequence
  Description of Artificial Sequence: Synthetic oligonucleotide
aauaccccagccaaagccc

SEQ ID NO: 3175607 - RNA, 19 nt, Artificial Sequence
  Description of Artificial Sequence: Synthetic oligonucleotide
uguaccuccaaguugugug

SEQ ID NO: 3175608 - RNA, 19 nt, Artificial Sequence
  Description of Artificial Sequence: Synthetic oligonucleotide
gaauccuguaauuucgaag

SEQ ID NO: 3175609 - RNA, 19 nt, Artificial Sequence
  Description of Artificial Sequence: Synthetic oligonucleotide
caugguugugccaaggucc

SEQ ID NO: 3175610 - RNA, 19 nt, Artificial Sequence
  Description of Artificial Sequence: Synthetic oligonucleotide
auuucgaaguaccagguca

SEQ ID NO: 3175611 - RNA, 19 nt, Artificial Sequence
  Description of Artificial Sequence: Synthetic oligonucleotide
aucugcaagauaucucugc

SEQ ID NO: 3175612 - RNA, 19 nt, Artificial Sequence
  Description of Artificial Sequence: Synthetic oligonucleotide
uccaacauuccccaggcgc

SEQ ID NO: 3175613 - RNA, 19 nt, Artificial Sequence
  Description of Artificial Sequence: Synthetic oligonucleotide
gaauaccccagccaaagcc

SEQ ID NO: 3175614 - RNA, 19 nt, Artificial Sequence
  Description of Artificial Sequence: Synthetic oligonucleotide
aagauaucucugcaagguc

SEQ ID NO: 3175615 - RNA, 19 nt, Artificial Sequence
  Description of Artificial Sequence: Synthetic oligonucleotide
ucuugguguaaucaugagc

SEQ ID NO: 3175616 - RNA, 19 nt, Artificial Sequence
  Description of Artificial Sequence: Synthetic oligonucleotide
uucaauucuaaaguucucc

SEQ ID NO: 3175617 - RNA, 19 nt, Artificial Sequence
  Description of Artificial Sequence: Synthetic oligonucleotide
ucauaaagguuccacugca

SEQ ID NO: 3175618 - RNA, 19 nt, Artificial Sequence
  Description of Artificial Sequence: Synthetic oligonucleotide
caagucaccacugaugucc

SEQ ID NO: 3175619 - RNA, 19 nt, Artificial Sequence
  Description of Artificial Sequence: Synthetic oligonucleotide
aaauacaacacuggugaug

SEQ ID NO: 3175620 - RNA, 19 nt, Artificial Sequence
  Description of Artificial Sequence: Synthetic oligonucleotide
ggcacgaaguucuugaugg

SEQ ID NO: 3175621 - RNA, 19 nt, Artificial Sequence
  Description of Artificial Sequence: Synthetic oligonucleotide
aucucuguaauguuggccu

SEQ ID NO: 3175622 - RNA, 19 nt, Artificial Sequence
  Description of Artificial Sequence: Synthetic oligonucleotide
aguucagacagugccaccc

SEQ ID NO: 3175623 - RNA, 19 nt, Artificial Sequence
  Description of Artificial Sequence: Synthetic oligonucleotide
cuugcuucugccuuaaguc

SEQ ID NO: 3175624 - RNA, 19 nt, Artificial Sequence
  Description of Artificial Sequence: Synthetic oligonucleotide
aauuuccagacuucugcug

SEQ ID NO: 3175625 - RNA, 19 nt, Artificial Sequence
  Description of Artificial Sequence: Synthetic oligonucleotide
uccuguaccuccaaguugu

SEQ ID NO: 3175626 - RNA, 19 nt, Artificial Sequence
  Description of Artificial Sequence: Synthetic oligonucleotide
accgcugggacucaggguc

SEQ ID NO: 3175627 - RNA, 19 nt, Artificial Sequence
  Description of Artificial Sequence: Synthetic oligonucleotide
uagacggcaucgaugaacc

SEQ ID NO: 3175628 - RNA, 19 nt, Artificial Sequence
  Description of Artificial Sequence: Synthetic oligonucleotide
caggaauccuguaauuucg

SEQ ID NO: 3175629 - RNA, 19 nt, Artificial Sequence
  Description of Artificial Sequence: Synthetic oligonucleotide
aacuuguuuggguugggga

SEQ ID NO: 3175630 - RNA, 19 nt, Artificial Sequence
  Description of Artificial Sequence: Synthetic oligonucleotide
ucuugcuucugccuuaagu

SEQ ID NO: 3175631 - RNA, 19 nt, Artificial Sequence
  Description of Artificial Sequence: Synthetic oligonucleotide
uccccaaauacaacacugg

SEQ ID NO: 3175632 - RNA, 19 nt, Artificial Sequence
  Description of Artificial Sequence: Synthetic oligonucleotide
ucugcaagauaucucugca

SEQ ID NO: 3175633 - RNA, 19 nt, Artificial Sequence
  Description of Artificial Sequence: Synthetic oligonucleotide
ugccaucucauaaagguuc

SEQ ID NO: 3175634 - RNA, 19 nt, Artificial Sequence
  Description of Artificial Sequence: Synthetic oligonucleotide
uuagucugaagaaucgaaa

SEQ ID NO: 3175635 - RNA, 19 nt, Artificial Sequence
  Description of Artificial Sequence: Synthetic oligonucleotide
uccccauuaggucaucucc

SEQ ID NO: 3175636 - RNA, 19 nt, Artificial Sequence
  Description of Artificial Sequence: Synthetic oligonucleotide
uaauuucgaaguaccaggu

SEQ ID NO: 3175637 - RNA, 19 nt, Artificial Sequence
  Description of Artificial Sequence: Synthetic oligonucleotide
aucgaugaaccgcugggac

SEQ ID NO: 3175638 - RNA, 19 nt, Artificial Sequence
  Description of Artificial Sequence: Synthetic oligonucleotide
cacaucauggaaacucugg

SEQ ID NO: 3175639 - RNA, 19 nt, Artificial Sequence
  Description of Artificial Sequence: Synthetic oligonucleotide
guucuugauggcuucaggc

SEQ ID NO: 3175640 - RNA, 19 nt, Artificial Sequence
  Description of Artificial Sequence: Synthetic oligonucleotide
cuugguccccacaucaugg

SEQ ID NO: 3175641 - RNA, 19 nt, Artificial Sequence
  Description of Artificial Sequence: Synthetic oligonucleotide
aauguuggccuggauguuc

SEQ ID NO: 3175642 - RNA, 19 nt, Artificial Sequence
  Description of Artificial Sequence: Synthetic oligonucleotide
uaucucugcaaggucacgg

SEQ ID NO: 3175643 - RNA, 19 nt, Artificial Sequence
  Description of Artificial Sequence: Synthetic oligonucleotide
ugccuuaagucccaguaga

SEQ ID NO: 3175644 - RNA, 19 nt, Artificial Sequence
  Description of Artificial Sequence: Synthetic oligonucleotide
ucccaguagaaguucuugg

SEQ ID NO: 3175645 - RNA, 19 nt, Artificial Sequence
  Description of Artificial Sequence: Synthetic oligonucleotide
uguccccugagaaauuucc

SEQ ID NO: 3175646 - RNA, 19 nt, Artificial Sequence
  Description of Artificial Sequence: Synthetic oligonucleotide
ucugccuuaagucccagua

SEQ ID NO: 3175647 - RNA, 19 nt, Artificial Sequence
  Description of Artificial Sequence: Synthetic oligonucleotide
aucgaugaagucccgaacu

SEQ ID NO: 3175648 - RNA, 19 nt, Artificial Sequence
  Description of Artificial Sequence: Synthetic oligonucleotide
aagcggaacaagucaccac

SEQ ID NO: 3175649 - RNA, 19 nt, Artificial Sequence
  Description of Artificial Sequence: Synthetic oligonucleotide
uaguuagccaccugcacca

SEQ ID NO: 3175650 - RNA, 19 nt, Artificial Sequence
  Description of Artificial Sequence: Synthetic oligonucleotide
agugggaccaacugcacca

SEQ ID NO: 3175651 - RNA, 19 nt, Artificial Sequence
  Description of Artificial Sequence: Synthetic oligonucleotide
cucauaaagguuccacugc

SEQ ID NO: 3175652 - RNA, 19 nt, Artificial Sequence
  Description of Artificial Sequence: Synthetic oligonucleotide
ucacaucccaggcagcugc

SEQ ID NO: 3175653 - RNA, 19 nt, Artificial Sequence
  Description of Artificial Sequence: Synthetic oligonucleotide
caauucuaaaguucuccag

SEQ ID NO: 3175654 - RNA, 19 nt, Artificial Sequence
  Description of Artificial Sequence: Synthetic oligonucleotide
uugggucaaacuuguuugg

SEQ ID NO: 3175655 - RNA, 19 nt, Artificial Sequence
  Description of Artificial Sequence: Synthetic oligonucleotide
aaguucuugguguaaucau

SEQ ID NO: 3175656 - RNA, 19 nt, Artificial Sequence
  Description of Artificial Sequence: Synthetic oligonucleotide
agcggaacaagucaccacu

SEQ ID NO: 3175657 - RNA, 19 nt, Artificial Sequence
  Description of Artificial Sequence: Synthetic oligonucleotide
agucccgaacuacaguuuc

SEQ ID NO: 3175658 - RNA, 19 nt, Artificial Sequence
  Description of Artificial Sequence: Synthetic oligonucleotide
gaacaagucaccacugaug

SEQ ID NO: 3175659 - RNA, 19 nt, Artificial Sequence
  Description of Artificial Sequence: Synthetic oligonucleotide
ugagaaauuuccagacuuc

SEQ ID NO: 3175660 - RNA, 19 nt, Artificial Sequence
  Description of Artificial Sequence: Synthetic oligonucleotide
acaucauggaaacucugga

SEQ ID NO: 3175661 - RNA, 19 nt, Artificial Sequence
  Description of Artificial Sequence: Synthetic oligonucleotide
aaacuuguuuggguugggg

SEQ ID NO: 3175662 - RNA, 19 nt, Artificial Sequence
  Description of Artificial Sequence: Synthetic oligonucleotide
uucuugagaggauggaagu

SEQ ID NO: 3175663 - RNA, 19 nt, Artificial Sequence
  Description of Artificial Sequence: Synthetic oligonucleotide
gagaggauggaaguugaag

SEQ ID NO: 3175664 - RNA, 19 nt, Artificial Sequence
  Description of Artificial Sequence: Synthetic oligonucleotide
aucucauaaagguuccacu

SEQ ID NO: 3175665 - RNA, 19 nt, Artificial Sequence
  Description of Artificial Sequence: Synthetic oligonucleotide
gccuggauguucuugaagg

SEQ ID NO: 3175666 - RNA, 19 nt, Artificial Sequence
  Description of Artificial Sequence: Synthetic oligonucleotide
auggacucaaaggcaaagc

SEQ ID NO: 3175667 - RNA, 19 nt, Artificial Sequence
  Description of Artificial Sequence: Synthetic oligonucleotide
guguaagacaucgaugaag

SEQ ID NO: 3175668 - RNA, 19 nt, Artificial Sequence
  Description of Artificial Sequence: Synthetic oligonucleotide
auggaggccguguccaccc

SEQ ID NO: 3175669 - RNA, 19 nt, Artificial Sequence
  Description of Artificial Sequence: Synthetic oligonucleotide
agcauggggacacuggugu

SEQ ID NO: 3175670 - RNA, 19 nt, Artificial Sequence
  Description of Artificial Sequence: Synthetic oligonucleotide
uuaagucccaguagaaguu

SEQ ID NO: 3175671 - RNA, 19 nt, Artificial Sequence
  Description of Artificial Sequence: Synthetic oligonucleotide
gacucaaaggcaaagcgga

SEQ ID NO: 3175672 - RNA, 19 nt, Artificial Sequence
  Description of Artificial Sequence: Synthetic oligonucleotide
agcucugcaauccgccggc

SEQ ID NO: 3175673 - RNA, 19 nt, Artificial Sequence
  Description of Artificial Sequence: Synthetic oligonucleotide
uuccacugcagggucaugg

SEQ ID NO: 3175674 - RNA, 19 nt, Artificial Sequence
  Description of Artificial Sequence: Synthetic oligonucleotide
aaacaucugguagacggca

SEQ ID NO: 3175675 - RNA, 19 nt, Artificial Sequence
  Description of Artificial Sequence: Synthetic oligonucleotide
augggguggagucucagug

SEQ ID NO: 3175676 - RNA, 19 nt, Artificial Sequence
  Description of Artificial Sequence: Synthetic oligonucleotide
acuacaguuuccagcaggg

SEQ ID NO: 3175677 - RNA, 19 nt, Artificial Sequence
  Description of Artificial Sequence: Synthetic oligonucleotide
aguugggucaaacuuguuu

SEQ ID NO: 3175678 - RNA, 19 nt, Artificial Sequence
  Description of Artificial Sequence: Synthetic oligonucleotide
uuggcaggaauccuguaau

SEQ ID NO: 3175679 - RNA, 19 nt, Artificial Sequence
  Description of Artificial Sequence: Synthetic oligonucleotide
agauacagagacacccacc

SEQ ID NO: 3175680 - RNA, 19 nt, Artificial Sequence
  Description of Artificial Sequence: Synthetic oligonucleotide
cagacacugccgaauaccc

SEQ ID NO: 3175681 - RNA, 19 nt, Artificial Sequence
  Description of Artificial Sequence: Synthetic oligonucleotide
aaggcaaagcggaacaagu

SEQ ID NO: 3175682 - RNA, 19 nt, Artificial Sequence
  Description of Artificial Sequence: Synthetic oligonucleotide
agugccacccuaucugauc

SEQ ID NO: 3175683 - RNA, 19 nt, Artificial Sequence
  Description of Artificial Sequence: Synthetic oligonucleotide
caaauguccccauuagguc

SEQ ID NO: 3175684 - RNA, 19 nt, Artificial Sequence
  Description of Artificial Sequence: Synthetic oligonucleotide
aaauauucaaucccuauag

SEQ ID NO: 3175685 - RNA, 19 nt, Artificial Sequence
  Description of Artificial Sequence: Synthetic oligonucleotide
aaacauacagccaaggacg

SEQ ID NO: 3175686 - RNA, 19 nt, Artificial Sequence
  Description of Artificial Sequence: Synthetic oligonucleotide
aauauucaaucccuauagc

SEQ ID NO: 3175687 - RNA, 19 nt, Artificial Sequence
  Description of Artificial Sequence: Synthetic oligonucleotide
cuuucaaggacaaacauac

SEQ ID NO: 3175688 - RNA, 19 nt, Artificial Sequence
  Description of Artificial Sequence: Synthetic oligonucleotide
uucaaggacaaacauacag

SEQ ID NO: 3175689 - RNA, 19 nt, Artificial Sequence
  Description of Artificial Sequence: Synthetic oligonucleotide
auucaaucccuauagcugc

SEQ ID NO: 3175690 - RNA, 19 nt, Artificial Sequence
  Description of Artificial Sequence: Synthetic oligonucleotide
uuuguaaucuggaaguacc

SEQ ID NO: 3175691 - RNA, 19 nt, Artificial Sequence
  Description of Artificial Sequence: Synthetic oligonucleotide
uuuaugagaaagaagucac

SEQ ID NO: 3175692 - RNA, 19 nt, Artificial Sequence
  Description of Artificial Sequence: Synthetic oligonucleotide
gaagucaccagauaauucc

SEQ ID NO: 3175693 - RNA, 19 nt, Artificial Sequence
  Description of Artificial Sequence: Synthetic oligonucleotide
uauucaaucccuauagcug

SEQ ID NO: 3175694 - RNA, 19 nt, Artificial Sequence
  Description of Artificial Sequence: Synthetic oligonucleotide
ucaggaaauauucaauccc

SEQ ID NO: 3175695 - RNA, 19 nt, Artificial Sequence
  Description of Artificial Sequence: Synthetic oligonucleotide
accagauaauuccaggugc

SEQ ID NO: 3175696 - RNA, 19 nt, Artificial Sequence
  Description of Artificial Sequence: Synthetic oligonucleotide
auugcgagcccauggaucc

SEQ ID NO: 3175697 - RNA, 19 nt, Artificial Sequence
  Description of Artificial Sequence: Synthetic oligonucleotide
aagccacccauauaucucc

SEQ ID NO: 3175698 - RNA, 19 nt, Artificial Sequence
  Description of Artificial Sequence: Synthetic oligonucleotide
ucaaggacaaacauacagc

SEQ ID NO: 3175699 - RNA, 19 nt, Artificial Sequence
  Description of Artificial Sequence: Synthetic oligonucleotide
uuuuaugagaaagaaguca

SEQ ID NO: 3175700 - RNA, 19 nt, Artificial Sequence
  Description of Artificial Sequence: Synthetic oligonucleotide
agucaggaaauauucaauc

SEQ ID NO: 3175701 - RNA, 19 nt, Artificial Sequence
  Description of Artificial Sequence: Synthetic oligonucleotide
ugcaaagccacccauauau

SEQ ID NO: 3175702 - RNA, 19 nt, Artificial Sequence
  Description of Artificial Sequence: Synthetic oligonucleotide
acuguuuguaaucuggaag

SEQ ID NO: 3175703 - RNA, 19 nt, Artificial Sequence
  Description of Artificial Sequence: Synthetic oligonucleotide
ugagaaagaagucaccaga

SEQ ID NO: 3175704 - RNA, 19 nt, Artificial Sequence
  Description of Artificial Sequence: Synthetic oligonucleotide
ucagugauucuucuuauca

SEQ ID NO: 3175705 - RNA, 19 nt, Artificial Sequence
  Description of Artificial Sequence: Synthetic oligonucleotide
acccauauaucuccaagcc

SEQ ID NO: 3175706 - RNA, 19 nt, Artificial Sequence
  Description of Artificial Sequence: Synthetic oligonucleotide
ugauauucucugcaaagcc

SEQ ID NO: 3175707 - RNA, 19 nt, Artificial Sequence
  Description of Artificial Sequence: Synthetic oligonucleotide
uccacuguuuguaaucugg

SEQ ID NO: 3175708 - RNA, 19 nt, Artificial Sequence
  Description of Artificial Sequence: Synthetic oligonucleotide
auauucaaucccuauagcu

SEQ ID NO: 3175709 - RNA, 19 nt, Artificial Sequence
  Description of Artificial Sequence: Synthetic oligonucleotide
caaggacaaacauacagcc

SEQ ID NO: 3175710 - RNA, 19 nt, Artificial Sequence
  Description of Artificial Sequence: Synthetic oligonucleotide
uucuauuuuccacuguuug

SEQ ID NO: 3175711 - RNA, 19 nt, Artificial Sequence
  Description of Artificial Sequence: Synthetic oligonucleotide
caaacauacagccaaggac

SEQ ID NO: 3175712 - RNA, 19 nt, Artificial Sequence
  Description of Artificial Sequence: Synthetic oligonucleotide
ucuggacuguuucuaacgg

SEQ ID NO: 3175713 - RNA, 19 nt, Artificial Sequence
  Description of Artificial Sequence: Synthetic oligonucleotide
uaucauucugggaagucag

SEQ ID NO: 3175714 - RNA, 19 nt, Artificial Sequence
  Description of Artificial Sequence: Synthetic oligonucleotide
acaaaugcagcagaucccc

SEQ ID NO: 3175715 - RNA, 19 nt, Artificial Sequence
  Description of Artificial Sequence: Synthetic oligonucleotide
gaaagaagucaccagauaa

SEQ ID NO: 3175716 - RNA, 19 nt, Artificial Sequence
  Description of Artificial Sequence: Synthetic oligonucleotide
auaucuccaagccucauug

SEQ ID NO: 3175717 - RNA, 19 nt, Artificial Sequence
  Description of Artificial Sequence: Synthetic oligonucleotide
uucuucuuaucauucuggg

SEQ ID NO: 3175718 - RNA, 19 nt, Artificial Sequence
  Description of Artificial Sequence: Synthetic oligonucleotide
gaaguaccaauuuaucaug

SEQ ID NO: 3175719 - RNA, 19 nt, Artificial Sequence
  Description of Artificial Sequence: Synthetic oligonucleotide
uggaaguaccaauuuauca

SEQ ID NO: 3175720 - RNA, 19 nt, Artificial Sequence
  Description of Artificial Sequence: Synthetic oligonucleotide
uaugagaaagaagucacca

SEQ ID NO: 3175721 - RNA, 19 nt, Artificial Sequence
  Description of Artificial Sequence: Synthetic oligonucleotide
uucuggacuguuucuaacg

SEQ ID NO: 3175722 - RNA, 19 nt, Artificial Sequence
  Description of Artificial Sequence: Synthetic oligonucleotide
ucuggaaguaccaauuuau

SEQ ID NO: 3175723 - RNA, 19 nt, Artificial Sequence
  Description of Artificial Sequence: Synthetic oligonucleotide
aacccuuucagcaacacgu

SEQ ID NO: 3175724 - RNA, 19 nt, Artificial Sequence
  Description of Artificial Sequence: Synthetic oligonucleotide
ucuucagugauucuucuua

SEQ ID NO: 3175725 - RNA, 19 nt, Artificial Sequence
  Description of Artificial Sequence: Synthetic oligonucleotide
uggacuguuucuaacggug

SEQ ID NO: 3175726 - RNA, 19 nt, Artificial Sequence
  Description of Artificial Sequence: Synthetic oligonucleotide
gauucuucuuaucauucug

SEQ ID NO: 3175727 - RNA, 19 nt, Artificial Sequence
  Description of Artificial Sequence: Synthetic oligonucleotide
aggacaaacauacagccaa

SEQ ID NO: 3175728 - RNA, 19 nt, Artificial Sequence
  Description of Artificial Sequence: Synthetic oligonucleotide
augaaggugauauucucug

SEQ ID NO: 3175729 - RNA, 19 nt, Artificial Sequence
  Description of Artificial Sequence: Synthetic oligonucleotide
uucagcaacacgugcauga

SEQ ID NO: 3175730 - RNA, 19 nt, Artificial Sequence
  Description of Artificial Sequence: Synthetic oligonucleotide
cuucuuaucauucugggaa

SEQ ID NO: 3175731 - RNA, 19 nt, Artificial Sequence
  Description of Artificial Sequence: Synthetic oligonucleotide
aucuccaagccucauugcg

SEQ ID NO: 3175732 - RNA, 19 nt, Artificial Sequence
  Description of Artificial Sequence: Synthetic oligonucleotide
aauuccaggugcugucuuc

SEQ ID NO: 3175733 - RNA, 19 nt, Artificial Sequence
  Description of Artificial Sequence: Synthetic oligonucleotide
agcagauccccauuugaac

SEQ ID NO: 3175734 - RNA, 19 nt, Artificial Sequence
  Description of Artificial Sequence: Synthetic oligonucleotide
auagcugccacaaaugcag

SEQ ID NO: 3175735 - RNA, 19 nt, Artificial Sequence
  Description of Artificial Sequence: Synthetic oligonucleotide
uuaugagaaagaagucacc

SEQ ID NO: 3175736 - RNA, 19 nt, Artificial Sequence
  Description of Artificial Sequence: Synthetic oligonucleotide
agcaacacgugcaugaagg

SEQ ID NO: 3175737 - RNA, 19 nt, Artificial Sequence
  Description of Artificial Sequence: Synthetic oligonucleotide
uauagcugccacaaaugca

SEQ ID NO: 3175738 - RNA, 19 nt, Artificial Sequence
  Description of Artificial Sequence: Synthetic oligonucleotide
ucuauuuuccacuguuugu

SEQ ID NO: 3175739 - RNA, 19 nt, Artificial Sequence
  Description of Artificial Sequence: Synthetic oligonucleotide
gucaggaaauauucaaucc

SEQ ID NO: 3175740 - RNA, 19 nt, Artificial Sequence
  Description of Artificial Sequence: Synthetic oligonucleotide
acuguuucuaacggugucc

SEQ ID NO: 3175741 - RNA, 19 nt, Artificial Sequence
  Description of Artificial Sequence: Synthetic oligonucleotide
cuauagcugccacaaaugc

SEQ ID NO: 3175742 - RNA, 19 nt, Artificial Sequence
  Description of Artificial Sequence: Synthetic oligonucleotide
auauucucugcaaagccac

SEQ ID NO: 3175743 - RNA, 19 nt, Artificial Sequence
  Description of Artificial Sequence: Synthetic oligonucleotide
aacauacagccaaggacgc

SEQ ID NO: 3175744 - RNA, 19 nt, Artificial Sequence
  Description of Artificial Sequence: Synthetic oligonucleotide
uuugaacccuuucagcaac

SEQ ID NO: 3175745 - RNA, 19 nt, Artificial Sequence
  Description of Artificial Sequence: Synthetic oligonucleotide
aaagccacccauauaucuc

SEQ ID NO: 3175746 - RNA, 19 nt, Artificial Sequence
  Description of Artificial Sequence: Synthetic oligonucleotide
ucuuucaaggacaaacaua

SEQ ID NO: 3175747 - RNA, 19 nt, Artificial Sequence
  Description of Artificial Sequence: Synthetic oligonucleotide
aacacgugcaugaagguga

SEQ ID NO: 3175748 - RNA, 19 nt, Artificial Sequence
  Description of Artificial Sequence: Synthetic oligonucleotide
gaagucaggaaauauucaa

SEQ ID NO: 3175749 - RNA, 19 nt, Artificial Sequence
  Description of Artificial Sequence: Synthetic oligonucleotide
agugaggaaaucuuguuuu

SEQ ID NO: 3175750 - RNA, 19 nt, Artificial Sequence
  Description of Artificial Sequence: Synthetic oligonucleotide
cauuugaacccuuucagca

SEQ ID NO: 3175751 - RNA, 19 nt, Artificial Sequence
  Description of Artificial Sequence: Synthetic oligonucleotide
uuuuccacuguuuguaauc

SEQ ID NO: 3175752 - RNA, 19 nt, Artificial Sequence
  Description of Artificial Sequence: Synthetic oligonucleotide
uucuuaucauucugggaag

SEQ ID NO: 3175753 - RNA, 19 nt, Artificial Sequence
  Description of Artificial Sequence: Synthetic oligonucleotide
augagaaagaagucaccag

SEQ ID NO: 3175754 - RNA, 19 nt, Artificial Sequence
  Description of Artificial Sequence: Synthetic oligonucleotide
uagagugaggaaaucuugu

SEQ ID NO: 3175755 - RNA, 19 nt, Artificial Sequence
  Description of Artificial Sequence: Synthetic oligonucleotide
gaaauauucaaucccuaua

SEQ ID NO: 3175756 - RNA, 19 nt, Artificial Sequence
  Description of Artificial Sequence: Synthetic oligonucleotide
uaaucuggaaguaccaauu

SEQ ID NO: 3175757 - RNA, 19 nt, Artificial Sequence
  Description of Artificial Sequence: Synthetic oligonucleotide
auucucugcaaagccaccc

SEQ ID NO: 3175758 - RNA, 19 nt, Artificial Sequence
  Description of Artificial Sequence: Synthetic oligonucleotide
gauaauuccaggugcuguc

SEQ ID NO: 3175759 - RNA, 19 nt, Artificial Sequence
  Description of Artificial Sequence: Synthetic oligonucleotide
ucagcccucgcacagcaag

SEQ ID NO: 3175760 - RNA, 19 nt, Artificial Sequence
  Description of Artificial Sequence: Synthetic oligonucleotide
agcccauggauccuucagc

SEQ ID NO: 3175761 - RNA, 19 nt, Artificial Sequence
  Description of Artificial Sequence: Synthetic oligonucleotide
ugcaugaaggugauauucu

SEQ ID NO: 3175762 - RNA, 19 nt, Artificial Sequence
  Description of Artificial Sequence: Synthetic oligonucleotide
gaaggugauauucucugca

SEQ ID NO: 3175763 - RNA, 19 nt, Artificial Sequence
  Description of Artificial Sequence: Synthetic oligonucleotide
uuaucauucugggaaguca

SEQ ID NO: 3175764 - RNA, 19 nt, Artificial Sequence
  Description of Artificial Sequence: Synthetic oligonucleotide
acaaacauacagccaagga

SEQ ID NO: 3175765 - RNA, 19 nt, Artificial Sequence
  Description of Artificial Sequence: Synthetic oligonucleotide
auucuucuuaucauucugg

SEQ ID NO: 3175766 - RNA, 19 nt, Artificial Sequence
  Description of Artificial Sequence: Synthetic oligonucleotide
cuagagugaggaaaucuug

SEQ ID NO: 3175767 - RNA, 19 nt, Artificial Sequence
  Description of Artificial Sequence: Synthetic oligonucleotide
ucaccagauaauuccaggu

SEQ ID NO: 3175768 - RNA, 19 nt, Artificial Sequence
  Description of Artificial Sequence: Synthetic oligonucleotide
ucugcaaagccacccauau

SEQ ID NO: 3175769 - RNA, 19 nt, Artificial Sequence
  Description of Artificial Sequence: Synthetic oligonucleotide
ggugauauucucugcaaag

SEQ ID NO: 3175770 - RNA, 19 nt, Artificial Sequence
  Description of Artificial Sequence: Synthetic oligonucleotide
aacggugucccuucuauuu

SEQ ID NO: 3175771 - RNA, 19 nt, Artificial Sequence
  Description of Artificial Sequence: Synthetic oligonucleotide
uuguaaucuggaaguacca

SEQ ID NO: 3175772 - RNA, 19 nt, Artificial Sequence
  Description of Artificial Sequence: Synthetic oligonucleotide
aaggacgcuagagugagga

SEQ ID NO: 3175773 - RNA, 19 nt, Artificial Sequence
  Description of Artificial Sequence: Synthetic oligonucleotide
gacaaacauacagccaagg

SEQ ID NO: 3175774 - RNA, 19 nt, Artificial Sequence
  Description of Artificial Sequence: Synthetic oligonucleotide
gucaccagauaauuccagg

SEQ ID NO: 3175775 - RNA, 19 nt, Artificial Sequence
  Description of Artificial Sequence: Synthetic oligonucleotide
uucuuucaaggacaaacau

SEQ ID NO: 3175776 - RNA, 19 nt, Artificial Sequence
  Description of Artificial Sequence: Synthetic oligonucleotide
gauccuucagcccucgcac

SEQ ID NO: 3175777 - RNA, 19 nt, Artificial Sequence
  Description of Artificial Sequence: Synthetic oligonucleotide
ucuucuuaucauucuggga

SEQ ID NO: 3175778 - RNA, 19 nt, Artificial Sequence
  Description of Artificial Sequence: Synthetic oligonucleotide
aaaugcagcagauccccau

SEQ ID NO: 3175779 - RNA, 19 nt, Artificial Sequence
  Description of Artificial Sequence: Synthetic oligonucleotide
gaacccuuucagcaacacg

SEQ ID NO: 3175780 - RNA, 19 nt, Artificial Sequence
  Description of Artificial Sequence: Synthetic oligonucleotide
cacccauauaucuccaagc

SEQ ID NO: 3175781 - RNA, 19 nt, Artificial Sequence
  Description of Artificial Sequence: Synthetic oligonucleotide
aaagaagucaccagauaau

SEQ ID NO: 3175782 - RNA, 19 nt, Artificial Sequence
  Description of Artificial Sequence: Synthetic oligonucleotide
ugauucuucuuaucauucu

SEQ ID NO: 3175783 - RNA, 19 nt, Artificial Sequence
  Description of Artificial Sequence: Synthetic oligonucleotide
auucugggaagucaggaaa

SEQ ID NO: 3175784 - RNA, 19 nt, Artificial Sequence
  Description of Artificial Sequence: Synthetic oligonucleotide
acugauuacauucauaggg

SEQ ID NO: 3175785 - RNA, 19 nt, Artificial Sequence
  Description of Artificial Sequence: Synthetic oligonucleotide
acugauuacauucauacgg

SEQ ID NO: 3175786 - RNA, 19 nt, Artificial Sequence
  Description of Artificial Sequence: Synthetic oligonucleotide
ucuuuuaugcauuugaaga

SEQ ID NO: 3175787 - RNA, 19 nt, Artificial Sequence
  Description of Artificial Sequence: Synthetic oligonucleotide
acugacuacauucauaggg

SEQ ID NO: 3175788 - RNA, 19 nt, Artificial Sequence
  Description of Artificial Sequence: Synthetic oligonucleotide
aaagcuuuaccacacugac

SEQ ID NO: 3175789 - RNA, 19 nt, Artificial Sequence
  Description of Artificial Sequence: Synthetic oligonucleotide
auuugaagaguacuguucc

SEQ ID NO: 3175790 - RNA, 19 nt, Artificial Sequence
  Description of Artificial Sequence: Synthetic oligonucleotide
aacuauuuugugaaaaggc

SEQ ID NO: 3175791 - RNA, 19 nt, Artificial Sequence
  Description of Artificial Sequence: Synthetic oligonucleotide
uauuugaagauuacugugg

SEQ ID NO: 3175792 - RNA, 19 nt, Artificial Sequence
  Description of Artificial Sequence: Synthetic oligonucleotide
acacugauuacauucauac

SEQ ID NO: 3175793 - RNA, 19 nt, Artificial Sequence
  Description of Artificial Sequence: Synthetic oligonucleotide
uguucuuucauguacucgg

SEQ ID NO: 3175794 - RNA, 19 nt, Artificial Sequence
  Description of Artificial Sequence: Synthetic oligonucleotide
acacugauuacauucauag

SEQ ID NO: 3175795 - RNA, 19 nt, Artificial Sequence
  Description of Artificial Sequence: Synthetic oligonucleotide
uuuaucuccauuauguguc

SEQ ID NO: 3175796 - RNA, 19 nt, Artificial Sequence
  Description of Artificial Sequence: Synthetic oligonucleotide
auucauaggguuucuuucc

SEQ ID NO: 3175797 - RNA, 19 nt, Artificial Sequence
  Description of Artificial Sequence: Synthetic oligonucleotide
auucauaggguuucucucc

SEQ ID NO: 3175798 - RNA, 19 nt, Artificial Sequence
  Description of Artificial Sequence: Synthetic oligonucleotide
aagaguacugugcugagca

SEQ ID NO: 3175799 - RNA, 19 nt, Artificial Sequence
  Description of Artificial Sequence: Synthetic oligonucleotide
uguauuugaagauuacugu

SEQ ID NO: 3175800 - RNA, 19 nt, Artificial Sequence
  Description of Artificial Sequence: Synthetic oligonucleotide
uuuaugcaaacuaagguua

SEQ ID NO: 3175801 - RNA, 19 nt, Artificial Sequence
  Description of Artificial Sequence: Synthetic oligonucleotide
acacugacuacauucauag

SEQ ID NO: 3175802 - RNA, 19 nt, Artificial Sequence
  Description of Artificial Sequence: Synthetic oligonucleotide
ucuuucauguacucggagg

SEQ ID NO: 3175803 - RNA, 19 nt, Artificial Sequence
  Description of Artificial Sequence: Synthetic oligonucleotide
aagguuacugugcugagca

SEQ ID NO: 3175804 - RNA, 19 nt, Artificial Sequence
  Description of Artificial Sequence: Synthetic oligonucleotide
ugcuuuuccacacugauua

SEQ ID NO: 3175805 - RNA, 19 nt, Artificial Sequence
  Description of Artificial Sequence: Synthetic oligonucleotide
uuuuaugcaaacuaagguu

SEQ ID NO: 3175806 - RNA, 19 nt, Artificial Sequence
  Description of Artificial Sequence: Synthetic oligonucleotide
uugaagauuacugugguga

SEQ ID NO: 3175807 - RNA, 19 nt, Artificial Sequence
  Description of Artificial Sequence: Synthetic oligonucleotide
cuuuuaugcauuugaagag

SEQ ID NO: 3175808 - RNA, 19 nt, Artificial Sequence
  Description of Artificial Sequence: Synthetic oligonucleotide
uuuauguauuugaagauua

SEQ ID NO: 3175809 - RNA, 19 nt, Artificial Sequence
  Description of Artificial Sequence: Synthetic oligonucleotide
uugugaaaaggcuuuaucu

SEQ ID NO: 3175810 - RNA, 19 nt, Artificial Sequence
  Description of Artificial Sequence: Synthetic oligonucleotide
caaacuaagguuacugugc

SEQ ID NO: 3175811 - RNA, 19 nt, Artificial Sequence
  Description of Artificial Sequence: Synthetic oligonucleotide
uauguguucuuucauguac

SEQ ID NO: 3175812 - RNA, 19 nt, Artificial Sequence
  Description of Artificial Sequence: Synthetic oligonucleotide
uuucuuuccaguauguguc

SEQ ID NO: 3175813 - RNA, 19 nt, Artificial Sequence
  Description of Artificial Sequence: Synthetic oligonucleotide
uaacuauuuugugaaaagg

SEQ ID NO: 3175814 - RNA, 19 nt, Artificial Sequence
  Description of Artificial Sequence: Synthetic oligonucleotide
uucuuuuaugcauuugaag

SEQ ID NO: 3175815 - RNA, 19 nt, Artificial Sequence
  Description of Artificial Sequence: Synthetic oligonucleotide
cuuuuauguauuugaagag

SEQ ID NO: 3175816 - RNA, 19 nt, Artificial Sequence
  Description of Artificial Sequence: Synthetic oligonucleotide
uuuauguauuugaagagua

SEQ ID NO: 3175817 - RNA, 19 nt, Artificial Sequence
  Description of Artificial Sequence: Synthetic oligonucleotide
auuacauucauaggguuuc

SEQ ID NO: 3175818 - RNA, 19 nt, Artificial Sequence
  Description of Artificial Sequence: Synthetic oligonucleotide
uguccuuuuauguauuuga

SEQ ID NO: 3175819 - RNA, 19 nt, Artificial Sequence
  Description of Artificial Sequence: Synthetic oligonucleotide
uacuguuccgaguaaaggc

SEQ ID NO: 3175820 - RNA, 19 nt, Artificial Sequence
  Description of Artificial Sequence: Synthetic oligonucleotide
cauuugaagaguacugugc

SEQ ID NO: 3175821 - RNA, 19 nt, Artificial Sequence
  Description of Artificial Sequence: Synthetic oligonucleotide
auuauguguccuuuuaugu

SEQ ID NO: 3175822 - RNA, 19 nt, Artificial Sequence
  Description of Artificial Sequence: Synthetic oligonucleotide
aagauuacuguggugagca

SEQ ID NO: 3175823 - RNA, 19 nt, Artificial Sequence
  Description of Artificial Sequence: Synthetic oligonucleotide
aaaggcuuuaucuccauua

SEQ ID NO: 3175824 - RNA, 19 nt, Artificial Sequence
  Description of Artificial Sequence: Synthetic oligonucleotide
guauuugaagauuacugug

SEQ ID NO: 3175825 - RNA, 19 nt, Artificial Sequence
  Description of Artificial Sequence: Synthetic oligonucleotide
ugugaaaaggcuuuaucuc

SEQ ID NO: 3175826 - RNA, 19 nt, Artificial Sequence
  Description of Artificial Sequence: Synthetic oligonucleotide
uauuugaagaguacuguuc

SEQ ID NO: 3175827 - RNA, 19 nt, Artificial Sequence
  Description of Artificial Sequence: Synthetic oligonucleotide
guaacuauuuugugaaaag

SEQ ID NO: 3175828 - RNA, 19 nt, Artificial Sequence
  Description of Artificial Sequence: Synthetic oligonucleotide
aaacuaagguuacugugcu

SEQ ID NO: 3175829 - RNA, 19 nt, Artificial Sequence
  Description of Artificial Sequence: Synthetic oligonucleotide
aaugcuuuuccacacugau

SEQ ID NO: 3175830 - RNA, 19 nt, Artificial Sequence
  Description of Artificial Sequence: Synthetic oligonucleotide
agcaaaugcuuuuccacac

SEQ ID NO: 3175831 - RNA, 19 nt, Artificial Sequence
  Description of Artificial Sequence: Synthetic oligonucleotide
agcuuuaccacacugacua

SEQ ID NO: 3175832 - RNA, 19 nt, Artificial Sequence
  Description of Artificial Sequence: Synthetic oligonucleotide
uuucucuccaguaugucgu

SEQ ID NO: 3175833 - RNA, 19 nt, Artificial Sequence
  Description of Artificial Sequence: Synthetic oligonucleotide
aguauguguucuuucaugu

SEQ ID NO: 3175834 - RNA, 19 nt, Artificial Sequence
  Description of Artificial Sequence: Synthetic oligonucleotide
uccuuuuauguauuugaag

SEQ ID NO: 3175835 - RNA, 19 nt, Artificial Sequence
  Description of Artificial Sequence: Synthetic oligonucleotide
auuugaagaguacugugcu

SEQ ID NO: 3175836 - RNA, 19 nt, Artificial Sequence
  Description of Artificial Sequence: Synthetic oligonucleotide
gugaaaaggcuuuaucucc

SEQ ID NO: 3175837 - RNA, 19 nt, Artificial Sequence
  Description of Artificial Sequence: Synthetic oligonucleotide
uuuuauguauuugaagagu

SEQ ID NO: 3175838 - RNA, 19 nt, Artificial Sequence
  Description of Artificial Sequence: Synthetic oligonucleotide
ugagcaaaggcuuuaccac

SEQ ID NO: 3175839 - RNA, 19 nt, Artificial Sequence
  Description of Artificial Sequence: Synthetic oligonucleotide
aguauguguccuuuuaugu

SEQ ID NO: 3175840 - RNA, 19 nt, Artificial Sequence
  Description of Artificial Sequence: Synthetic oligonucleotide
uauguauuugaagaguacu

SEQ ID NO: 3175841 - RNA, 19 nt, Artificial Sequence
  Description of Artificial Sequence: Synthetic oligonucleotide
aagaguacuguuccgagua

SEQ ID NO: 3175842 - RNA, 19 nt, Artificial Sequence
  Description of Artificial Sequence: Synthetic oligonucleotide
acuacauucauaggguuuc

SEQ ID NO: 3175843 - RNA, 19 nt, Artificial Sequence
  Description of Artificial Sequence: Synthetic oligonucleotide
uuuaccacacugauuacau

SEQ ID NO: 3175844 - RNA, 19 nt, Artificial Sequence
  Description of Artificial Sequence: Synthetic oligonucleotide
uauuuugugaaaaggcuuu

SEQ ID NO: 3175845 - RNA, 19 nt, Artificial Sequence
  Description of Artificial Sequence: Synthetic oligonucleotide
uacugugcugagcaaaugc

SEQ ID NO: 3175846 - RNA, 19 nt, Artificial Sequence
  Description of Artificial Sequence: Synthetic oligonucleotide
guuucucuccaguaugucg

SEQ ID NO: 3175847 - RNA, 19 nt, Artificial Sequence
  Description of Artificial Sequence: Synthetic oligonucleotide
auguauuugaagauuacug

SEQ ID NO: 3175848 - RNA, 19 nt, Artificial Sequence
  Description of Artificial Sequence: Synthetic oligonucleotide
uuugaagaguacuguuccg

SEQ ID NO: 3175849 - RNA, 19 nt, Artificial Sequence
  Description of Artificial Sequence: Synthetic oligonucleotide
auuacauucauacgguuuu

SEQ ID NO: 3175850 - RNA, 19 nt, Artificial Sequence
  Description of Artificial Sequence: Synthetic oligonucleotide
ugagcaaaugcuuuuccac

SEQ ID NO: 3175851 - RNA, 19 nt, Artificial Sequence
  Description of Artificial Sequence: Synthetic oligonucleotide
uuccacacugauuacauuc

SEQ ID NO: 3175852 - RNA, 19 nt, Artificial Sequence
  Description of Artificial Sequence: Synthetic oligonucleotide
uuugugaaaaggcuuuauc

SEQ ID NO: 3175853 - RNA, 19 nt, Artificial Sequence
  Description of Artificial Sequence: Synthetic oligonucleotide
cauuauguguccuuuuaug

SEQ ID NO: 3175854 - RNA, 19 nt, Artificial Sequence
  Description of Artificial Sequence: Synthetic oligonucleotide
uaaaggcuuuaccacacug

SEQ ID NO: 3175855 - RNA, 19 nt, Artificial Sequence
  Description of Artificial Sequence: Synthetic oligonucleotide
ugaaaaggcuuuaucucca

SEQ ID NO: 3175856 - RNA, 19 nt, Artificial Sequence
  Description of Artificial Sequence: Synthetic oligonucleotide
ucggagguaacuauuuugu

SEQ ID NO: 3175857 - RNA, 19 nt, Artificial Sequence
  Description of Artificial Sequence: Synthetic oligonucleotide
uaugcauuugaagaguacu

SEQ ID NO: 3175858 - RNA, 19 nt, Artificial Sequence
  Description of Artificial Sequence: Synthetic oligonucleotide
uaccacacugauuacauuc

SEQ ID NO: 3175859 - RNA, 19 nt, Artificial Sequence
  Description of Artificial Sequence: Synthetic oligonucleotide
uguauuugaagaguacugu

SEQ ID NO: 3175860 - RNA, 19 nt, Artificial Sequence
  Description of Artificial Sequence: Synthetic oligonucleotide
uuauguauuugaagaguac

SEQ ID NO: 3175861 - RNA, 19 nt, Artificial Sequence
  Description of Artificial Sequence: Synthetic oligonucleotide
ugcaaaagcuuuaccacac

SEQ ID NO: 3175862 - RNA, 19 nt, Artificial Sequence
  Description of Artificial Sequence: Synthetic oligonucleotide
uauguguccuuuuauguau

SEQ ID NO: 3175863 - RNA, 19 nt, Artificial Sequence
  Description of Artificial Sequence: Synthetic oligonucleotide
uugaagaguacugugcuga

SEQ ID NO: 3175864 - RNA, 19 nt, Artificial Sequence
  Description of Artificial Sequence: Synthetic oligonucleotide
gagguaacuauuuugugaa

SEQ ID NO: 3175865 - RNA, 19 nt, Artificial Sequence
  Description of Artificial Sequence: Synthetic oligonucleotide
uacugugcugagcaaaggc

SEQ ID NO: 3175866 - RNA, 19 nt, Artificial Sequence
  Description of Artificial Sequence: Synthetic oligonucleotide
auuugaagauuacuguggu

SEQ ID NO: 3175867 - RNA, 19 nt, Artificial Sequence
  Description of Artificial Sequence: Synthetic oligonucleotide
ugaagaguacuguuccgag

SEQ ID NO: 3175868 - RNA, 19 nt, Artificial Sequence
  Description of Artificial Sequence: Synthetic oligonucleotide
uauguauuugaagauuacu

SEQ ID NO: 3175869 - RNA, 19 nt, Artificial Sequence
  Description of Artificial Sequence: Synthetic oligonucleotide
uaccacacugacuacauuc

SEQ ID NO: 3175870 - RNA, 19 nt, Artificial Sequence
  Description of Artificial Sequence: Synthetic oligonucleotide
uuuuccacacugauuacau

SEQ ID NO: 3175871 - RNA, 19 nt, Artificial Sequence
  Description of Artificial Sequence: Synthetic oligonucleotide
ugaagauuacuguggugag

SEQ ID NO: 3175872 - RNA, 19 nt, Artificial Sequence
  Description of Artificial Sequence: Synthetic oligonucleotide
aguaugucguucuuuuaug

SEQ ID NO: 3175873 - RNA, 19 nt, Artificial Sequence
  Description of Artificial Sequence: Synthetic oligonucleotide
aaggcuuuaccacacugau

SEQ ID NO: 3175874 - RNA, 19 nt, Artificial Sequence
  Description of Artificial Sequence: Synthetic oligonucleotide
uuauguauuugaagauuac

SEQ ID NO: 3175875 - RNA, 19 nt, Artificial Sequence
  Description of Artificial Sequence: Synthetic oligonucleotide
uuuuaugcauuugaagagu

SEQ ID NO: 3175876 - RNA, 19 nt, Artificial Sequence
  Description of Artificial Sequence: Synthetic oligonucleotide
aaaagcuuuaccacacuga

SEQ ID NO: 3175877 - RNA, 19 nt, Artificial Sequence
  Description of Artificial Sequence: Synthetic oligonucleotide
acuaagguuacugugcuga

SEQ ID NO: 3175878 - RNA, 19 nt, Artificial Sequence
  Description of Artificial Sequence: Synthetic oligonucleotide
acauucauaggguuucucu

SEQ ID NO: 3175879 - RNA, 19 nt, Artificial Sequence
  Description of Artificial Sequence: Synthetic oligonucleotide
cauucauaggguuucuuuc

SEQ ID NO: 3175880 - RNA, 19 nt, Artificial Sequence
  Description of Artificial Sequence: Synthetic oligonucleotide
acuauuuugugaaaaggcu

SEQ ID NO: 3175881 - RNA, 19 nt, Artificial Sequence
  Description of Artificial Sequence: Synthetic oligonucleotide
uccaguauguguucuuuca

SEQ ID NO: 3175882 - RNA, 19 nt, Artificial Sequence
  Description of Artificial Sequence: Synthetic oligonucleotide
uacuguggugagcaaaggc

SEQ ID NO: 3175883 - RNA, 19 nt, Artificial Sequence
  Description of Artificial Sequence: Synthetic oligonucleotide
uuucucuccaguauguguu

SEQ ID NO: 3175884 - RNA, 19 nt, Artificial Sequence
  Description of Artificial Sequence: Synthetic oligonucleotide
aaagauucaagcuucauug

SEQ ID NO: 3175885 - RNA, 19 nt, Artificial Sequence
  Description of Artificial Sequence: Synthetic oligonucleotide
aauaaaaucgcuguuucac

SEQ ID NO: 3175886 - RNA, 19 nt, Artificial Sequence
  Description of Artificial Sequence: Synthetic oligonucleotide
aaaucgcuguuucacaacc

SEQ ID NO: 3175887 - RNA, 19 nt, Artificial Sequence
  Description of Artificial Sequence: Synthetic oligonucleotide
aauguuucaucaaagcccc

SEQ ID NO: 3175888 - RNA, 19 nt, Artificial Sequence
  Description of Artificial Sequence: Synthetic oligonucleotide
acuuaagaaacauacugcg

SEQ ID NO: 3175889 - RNA, 19 nt, Artificial Sequence
  Description of Artificial Sequence: Synthetic oligonucleotide
uuaagaaacauacugcgcu

SEQ ID NO: 3175890 - RNA, 19 nt, Artificial Sequence
  Description of Artificial Sequence: Synthetic oligonucleotide
aaacauacugcgcuccucc

SEQ ID NO: 3175891 - RNA, 19 nt, Artificial Sequence
  Description of Artificial Sequence: Synthetic oligonucleotide
uuuuguuuaagacaucugu

SEQ ID NO: 3175892 - RNA, 19 nt, Artificial Sequence
  Description of Artificial Sequence: Synthetic oligonucleotide
aaaugcaaguacuaaaaga

SEQ ID NO: 3175893 - RNA, 19 nt, Artificial Sequence
  Description of Artificial Sequence: Synthetic oligonucleotide
uuguuuaagacaucugugg

SEQ ID NO: 3175894 - RNA, 19 nt, Artificial Sequence
  Description of Artificial Sequence: Synthetic oligonucleotide
uccccauuuacccacaagg

SEQ ID NO: 3175895 - RNA, 19 nt, Artificial Sequence
  Description of Artificial Sequence: Synthetic oligonucleotide
uuagacuuucccaacaggc

SEQ ID NO: 3175896 - RNA, 19 nt, Artificial Sequence
  Description of Artificial Sequence: Synthetic oligonucleotide
aaaguuauuacgcaccgaa

SEQ ID NO: 3175897 - RNA, 19 nt, Artificial Sequence
  Description of Artificial Sequence: Synthetic oligonucleotide
aacuccaaguaccacagag

SEQ ID NO: 3175898 - RNA, 19 nt, Artificial Sequence
  Description of Artificial Sequence: Synthetic oligonucleotide
aaccauucuuuucuuggcc

SEQ ID NO: 3175899 - RNA, 19 nt, Artificial Sequence
  Description of Artificial Sequence: Synthetic oligonucleotide
aaucuguaggauuccgccc

SEQ ID NO: 3175900 - RNA, 19 nt, Artificial Sequence
  Description of Artificial Sequence: Synthetic oligonucleotide
aaaacgcuaauguuucauc

SEQ ID NO: 3175901 - RNA, 19 nt, Artificial Sequence
  Description of Artificial Sequence: Synthetic oligonucleotide
uuuguuuaagacaucugug

SEQ ID NO: 3175902 - RNA, 19 nt, Artificial Sequence
  Description of Artificial Sequence: Synthetic oligonucleotide
aaugcaaguacuaaaagau

SEQ ID NO: 3175903 - RNA, 19 nt, Artificial Sequence
  Description of Artificial Sequence: Synthetic oligonucleotide
aguuucacaacacuuaaga

SEQ ID NO: 3175904 - RNA, 19 nt, Artificial Sequence
  Description of Artificial Sequence: Synthetic oligonucleotide
uucuuggccaaucuguagg

SEQ ID NO: 3175905 - RNA, 19 nt, Artificial Sequence
  Description of Artificial Sequence: Synthetic oligonucleotide
uuuggcuucaaguagaguu

SEQ ID NO: 3175906 - RNA, 19 nt, Artificial Sequence
  Description of Artificial Sequence: Synthetic oligonucleotide
ugcaaguacuaaaagauuc

SEQ ID NO: 3175907 - RNA, 19 nt, Artificial Sequence
  Description of Artificial Sequence: Synthetic oligonucleotide
aacacgaucccagauauug

SEQ ID NO: 3175908 - RNA, 19 nt, Artificial Sequence
  Description of Artificial Sequence: Synthetic oligonucleotide
aaaaucgcuguuucacaac

SEQ ID NO: 3175909 - RNA, 19 nt, Artificial Sequence
  Description of Artificial Sequence: Synthetic oligonucleotide
uguuuaagacaucuguggc

SEQ ID NO: 3175910 - RNA, 19 nt, Artificial Sequence
  Description of Artificial Sequence: Synthetic oligonucleotide
uggucuuacaggaugcacg

SEQ ID NO: 3175911 - RNA, 19 nt, Artificial Sequence
  Description of Artificial Sequence: Synthetic oligonucleotide
gaugguuuuguuuaagaca

SEQ ID NO: 3175912 - RNA, 19 nt, Artificial Sequence
  Description of Artificial Sequence: Synthetic oligonucleotide
acuaaaagauucaagcuuc

SEQ ID NO: 3175913 - RNA, 19 nt, Artificial Sequence
  Description of Artificial Sequence: Synthetic oligonucleotide
uuuagacuuucccaacagg

SEQ ID NO: 3175914 - RNA, 19 nt, Artificial Sequence
  Description of Artificial Sequence: Synthetic oligonucleotide
aaacgcuaauguuucauca

SEQ ID NO: 3175915 - RNA, 19 nt, Artificial Sequence
  Description of Artificial Sequence: Synthetic oligonucleotide
ugaacuccaaguaccacag

SEQ ID NO: 3175916 - RNA, 19 nt, Artificial Sequence
  Description of Artificial Sequence: Synthetic oligonucleotide
caggcauauauuuaaagug

SEQ ID NO: 3175917 - RNA, 19 nt, Artificial Sequence
  Description of Artificial Sequence: Synthetic oligonucleotide
auauugaagcccgugauuc

SEQ ID NO: 3175918 - RNA, 19 nt, Artificial Sequence
  Description of Artificial Sequence: Synthetic oligonucleotide
uuuuagacuuucccaacag

SEQ ID NO: 3175919 - RNA, 19 nt, Artificial Sequence
  Description of Artificial Sequence: Synthetic oligonucleotide
aguuauuacgcaccgaagu

SEQ ID NO: 3175920 - RNA, 19 nt, Artificial Sequence
  Description of Artificial Sequence: Synthetic oligonucleotide
cucgcugagaacacgaucc

SEQ ID NO: 3175921 - RNA, 19 nt, Artificial Sequence
  Description of Artificial Sequence: Synthetic oligonucleotide
uacuaaaagauucaagcuu

SEQ ID NO: 3175922 - RNA, 19 nt, Artificial Sequence
  Description of Artificial Sequence: Synthetic oligonucleotide
cacuuaagaaacauacugc

SEQ ID NO: 3175923 - RNA, 19 nt, Artificial Sequence
  Description of Artificial Sequence: Synthetic oligonucleotide
gaaaccacaaugucugcag

SEQ ID NO: 3175924 - RNA, 19 nt, Artificial Sequence
  Description of Artificial Sequence: Synthetic oligonucleotide
uaggauuccgcccucagga

SEQ ID NO: 3175925 - RNA, 19 nt, Artificial Sequence
  Description of Artificial Sequence: Synthetic oligonucleotide
uaaagugugagucuccuuu

SEQ ID NO: 3175926 - RNA, 19 nt, Artificial Sequence
  Description of Artificial Sequence: Synthetic oligonucleotide
agcuuauucuccuuuccac

SEQ ID NO: 3175927 - RNA, 19 nt, Artificial Sequence
  Description of Artificial Sequence: Synthetic oligonucleotide
ugaauuucuguuacucccc

SEQ ID NO: 3175928 - RNA, 19 nt, Artificial Sequence
  Description of Artificial Sequence: Synthetic oligonucleotide
uacaacuggaucucauagg

SEQ ID NO: 3175929 - RNA, 19 nt, Artificial Sequence
  Description of Artificial Sequence: Synthetic oligonucleotide
cuuaagaaacauacugcgc

SEQ ID NO: 3175930 - RNA, 19 nt, Artificial Sequence
  Description of Artificial Sequence: Synthetic oligonucleotide
ucccagauauugaagcccg

SEQ ID NO: 3175931 - RNA, 19 nt, Artificial Sequence
  Description of Artificial Sequence: Synthetic oligonucleotide
uguuucacaaccugcgggc

SEQ ID NO: 3175932 - RNA, 19 nt, Artificial Sequence
  Description of Artificial Sequence: Synthetic oligonucleotide
ugcaguuagcuuauucucc

SEQ ID NO: 3175933 - RNA, 19 nt, Artificial Sequence
  Description of Artificial Sequence: Synthetic oligonucleotide
aauuucuguuacuccccac

SEQ ID NO: 3175934 - RNA, 19 nt, Artificial Sequence
  Description of Artificial Sequence: Synthetic oligonucleotide
uuagcuuauucuccuuucc

SEQ ID NO: 3175935 - RNA, 19 nt, Artificial Sequence
  Description of Artificial Sequence: Synthetic oligonucleotide
uguggcaagacucgacucc

SEQ ID NO: 3175936 - RNA, 19 nt, Artificial Sequence
  Description of Artificial Sequence: Synthetic oligonucleotide
guacaacuggaucucauag

SEQ ID NO: 3175937 - RNA, 19 nt, Artificial Sequence
  Description of Artificial Sequence: Synthetic oligonucleotide
ucgggaauaaaaucgcugu

SEQ ID NO: 3175938 - RNA, 19 nt, Artificial Sequence
  Description of Artificial Sequence: Synthetic oligonucleotide
auauuuaaagugugagucu

SEQ ID NO: 3175939 - RNA, 19 nt, Artificial Sequence
  Description of Artificial Sequence: Synthetic oligonucleotide
aaagugugagucuccuuug

SEQ ID NO: 3175940 - RNA, 19 nt, Artificial Sequence
  Description of Artificial Sequence: Synthetic oligonucleotide
cuuuccacccaccacaaac

SEQ ID NO: 3175941 - RNA, 19 nt, Artificial Sequence
  Description of Artificial Sequence: Synthetic oligonucleotide
agugugagucuccuuuggc

SEQ ID NO: 3175942 - RNA, 19 nt, Artificial Sequence
  Description of Artificial Sequence: Synthetic oligonucleotide
agugguagccacccucucc

SEQ ID NO: 3175943 - RNA, 19 nt, Artificial Sequence
  Description of Artificial Sequence: Synthetic oligonucleotide
auucaagcuucauuggucu

SEQ ID NO: 3175944 - RNA, 19 nt, Artificial Sequence
  Description of Artificial Sequence: Synthetic oligonucleotide
uccacucucccuuaucucc

SEQ ID NO: 3175945 - RNA, 19 nt, Artificial Sequence
  Description of Artificial Sequence: Synthetic oligonucleotide
uaaaaucgcuguuucacaa

SEQ ID NO: 3175946 - RNA, 19 nt, Artificial Sequence
  Description of Artificial Sequence: Synthetic oligonucleotide
uauuuaaagugugagucuc

SEQ ID NO: 3175947 - RNA, 19 nt, Artificial Sequence
  Description of Artificial Sequence: Synthetic oligonucleotide
uguggcuuugacccaaaug

SEQ ID NO: 3175948 - RNA, 19 nt, Artificial Sequence
  Description of Artificial Sequence: Synthetic oligonucleotide
acgauguuuccccugaugu

SEQ ID NO: 3175949 - RNA, 19 nt, Artificial Sequence
  Description of Artificial Sequence: Synthetic oligonucleotide
ccaaguaccacagaggugg

SEQ ID NO: 3175950 - RNA, 19 nt, Artificial Sequence
  Description of Artificial Sequence: Synthetic oligonucleotide
auaaaaucgcuguuucaca

SEQ ID NO: 3175951 - RNA, 19 nt, Artificial Sequence
  Description of Artificial Sequence: Synthetic oligonucleotide
uugugccauaagaaaacag

SEQ ID NO: 3175952 - RNA, 19 nt, Artificial Sequence
  Description of Artificial Sequence: Synthetic oligonucleotide
cagaaaacgcuaauguuuc

SEQ ID NO: 3175953 - RNA, 19 nt, Artificial Sequence
  Description of Artificial Sequence: Synthetic oligonucleotide
uguuacuccccacccgacg

SEQ ID NO: 3175954 - RNA, 19 nt, Artificial Sequence
  Description of Artificial Sequence: Synthetic oligonucleotide
uagacuuucccaacaggca

SEQ ID NO: 3175955 - RNA, 19 nt, Artificial Sequence
  Description of Artificial Sequence: Synthetic oligonucleotide
uuuccacccaccacaaaca

SEQ ID NO: 3175956 - RNA, 19 nt, Artificial Sequence
  Description of Artificial Sequence: Synthetic oligonucleotide
uacacagcaaccauucuuu

SEQ ID NO: 3175957 - RNA, 19 nt, Artificial Sequence
  Description of Artificial Sequence: Synthetic oligonucleotide
caaaugcaaguacuaaaag

SEQ ID NO: 3175958 - RNA, 19 nt, Artificial Sequence
  Description of Artificial Sequence: Synthetic oligonucleotide
aguagaguuucacaacacu

SEQ ID NO: 3175959 - RNA, 19 nt, Artificial Sequence
  Description of Artificial Sequence: Synthetic oligonucleotide
aaaaucuucuuggaccgca

SEQ ID NO: 3175960 - RNA, 19 nt, Artificial Sequence
  Description of Artificial Sequence: Synthetic oligonucleotide
aacauacugcgcuccuccg

SEQ ID NO: 3175961 - RNA, 19 nt, Artificial Sequence
  Description of Artificial Sequence: Synthetic oligonucleotide
agaacacgaucccagauau

SEQ ID NO: 3175962 - RNA, 19 nt, Artificial Sequence
  Description of Artificial Sequence: Synthetic oligonucleotide
cuguuucacaaccugcggg

SEQ ID NO: 3175963 - RNA, 19 nt, Artificial Sequence
  Description of Artificial Sequence: Synthetic oligonucleotide
agauucaagcuucauuggu

SEQ ID NO: 3175964 - RNA, 19 nt, Artificial Sequence
  Description of Artificial Sequence: Synthetic oligonucleotide
uccgcccucaggaacagag

SEQ ID NO: 3175965 - RNA, 19 nt, Artificial Sequence
  Description of Artificial Sequence: Synthetic oligonucleotide
uucuguuacuccccacccg

SEQ ID NO: 3175966 - RNA, 19 nt, Artificial Sequence
  Description of Artificial Sequence: Synthetic oligonucleotide
gacaucuguggcuuugacc

SEQ ID NO: 3175967 - RNA, 19 nt, Artificial Sequence
  Description of Artificial Sequence: Synthetic oligonucleotide
uuuaagacaucuguggcuu

SEQ ID NO: 3175968 - RNA, 19 nt, Artificial Sequence
  Description of Artificial Sequence: Synthetic oligonucleotide
gcaaccauucuuuucuugg

SEQ ID NO: 3175969 - RNA, 19 nt, Artificial Sequence
  Description of Artificial Sequence: Synthetic oligonucleotide
augguuuuguuuaagacau

SEQ ID NO: 3175970 - RNA, 19 nt, Artificial Sequence
  Description of Artificial Sequence: Synthetic oligonucleotide
cauuggucuuacaggaugc

SEQ ID NO: 3175971 - RNA, 19 nt, Artificial Sequence
  Description of Artificial Sequence: Synthetic oligonucleotide
ugcucugaacuccaaguac

SEQ ID NO: 3175972 - RNA, 19 nt, Artificial Sequence
  Description of Artificial Sequence: Synthetic oligonucleotide
aacgcuaauguuucaucaa

SEQ ID NO: 3175973 - RNA, 19 nt, Artificial Sequence
  Description of Artificial Sequence: Synthetic oligonucleotide
agggaaaccacaaugucug

SEQ ID NO: 3175974 - RNA, 19 nt, Artificial Sequence
  Description of Artificial Sequence: Synthetic oligonucleotide
aaacaggaugguuuuguuu

SEQ ID NO: 3175975 - RNA, 19 nt, Artificial Sequence
  Description of Artificial Sequence: Synthetic oligonucleotide
gugauucuuccagaaaacg

SEQ ID NO: 3175976 - RNA, 19 nt, Artificial Sequence
  Description of Artificial Sequence: Synthetic oligonucleotide
gcuaauguuucaucaaagc

SEQ ID NO: 3175977 - RNA, 19 nt, Artificial Sequence
  Description of Artificial Sequence: Synthetic oligonucleotide
agauauugaagcccgugau

SEQ ID NO: 3175978 - RNA, 19 nt, Artificial Sequence
  Description of Artificial Sequence: Synthetic oligonucleotide
uaagaaacauacugcgcuc

SEQ ID NO: 3175979 - RNA, 19 nt, Artificial Sequence
  Description of Artificial Sequence: Synthetic oligonucleotide
caccacaaacacuagggac

SEQ ID NO: 3175980 - RNA, 19 nt, Artificial Sequence
  Description of Artificial Sequence: Synthetic oligonucleotide
ugccauaagaaaacaggau

SEQ ID NO: 3175981 - RNA, 19 nt, Artificial Sequence
  Description of Artificial Sequence: Synthetic oligonucleotide
aucuguaggauuccgcccu

SEQ ID NO: 3175982 - RNA, 19 nt, Artificial Sequence
  Description of Artificial Sequence: Synthetic oligonucleotide
aacacuuaagaaacauacu

SEQ ID NO: 3175983 - RNA, 19 nt, Artificial Sequence
  Description of Artificial Sequence: Synthetic oligonucleotide
gaauaaaaucgcuguuuca

SEQ ID NO: 3175984 - RNA, 19 nt, Artificial Sequence
  Description of Artificial Sequence: Synthetic oligonucleotide
agaacuaucacacccacac

SEQ ID NO: 3175985 - RNA, 19 nt, Artificial Sequence
  Description of Artificial Sequence: Synthetic oligonucleotide
aacuaaaaccucucaaggc

SEQ ID NO: 3175986 - RNA, 19 nt, Artificial Sequence
  Description of Artificial Sequence: Synthetic oligonucleotide
guuauaaccaauuagaaaa

SEQ ID NO: 3175987 - RNA, 19 nt, Artificial Sequence
  Description of Artificial Sequence: Synthetic oligonucleotide
gugagaacaaaucaaaacg

SEQ ID NO: 3175988 - RNA, 19 nt, Artificial Sequence
  Description of Artificial Sequence: Synthetic oligonucleotide
uuuuaaauuccaaagugca

SEQ ID NO: 3175989 - RNA, 19 nt, Artificial Sequence
  Description of Artificial Sequence: Synthetic oligonucleotide
aauccuaaaauuuuguaau

SEQ ID NO: 3175990 - RNA, 19 nt, Artificial Sequence
  Description of Artificial Sequence: Synthetic oligonucleotide
aauuccaaagugcauagug

SEQ ID NO: 3175991 - RNA, 19 nt, Artificial Sequence
  Description of Artificial Sequence: Synthetic oligonucleotide
aaacagauggaacagaaaa

SEQ ID NO: 3175992 - RNA, 19 nt, Artificial Sequence
  Description of Artificial Sequence: Synthetic oligonucleotide
uuaaacagugaccucacag

SEQ ID NO: 3175993 - RNA, 19 nt, Artificial Sequence
  Description of Artificial Sequence: Synthetic oligonucleotide
acacuaaugucuuaggagg

SEQ ID NO: 3175994 - RNA, 19 nt, Artificial Sequence
  Description of Artificial Sequence: Synthetic oligonucleotide
agaaaucaaagcuguaggc

SEQ ID NO: 3175995 - RNA, 19 nt, Artificial Sequence
  Description of Artificial Sequence: Synthetic oligonucleotide
ucuagaacauuacaaagga

SEQ ID NO: 3175996 - RNA, 19 nt, Artificial Sequence
  Description of Artificial Sequence: Synthetic oligonucleotide
aauaguuuucagcagauuu

SEQ ID NO: 3175997 - RNA, 19 nt, Artificial Sequence
  Description of Artificial Sequence: Synthetic oligonucleotide
uuuacagugauauccuuag

SEQ ID NO: 3175998 - RNA, 19 nt, Artificial Sequence
  Description of Artificial Sequence: Synthetic oligonucleotide
uccaucaugauucauaaau

SEQ ID NO: 3175999 - RNA, 19 nt, Artificial Sequence
  Description of Artificial Sequence: Synthetic oligonucleotide
  modified_base (6)..(6): a, c, u, g, unknown or other
aagagnuuaaacagugacc

SEQ ID NO: 3176000 - RNA, 19 nt, Artificial Sequence
  Description of Artificial Sequence: Synthetic oligonucleotide
ucaugauucauaaauacua

SEQ ID NO: 3176001 - RNA, 19 nt, Artificial Sequence
  Description of Artificial Sequence: Synthetic oligonucleotide
gaaauaauucccaugauga

SEQ ID NO: 3176002 - RNA, 19 nt, Artificial Sequence
  Description of Artificial Sequence: Synthetic oligonucleotide
acuaccaaagcuuuccuuc

SEQ ID NO: 3176003 - RNA, 19 nt, Artificial Sequence
  Description of Artificial Sequence: Synthetic oligonucleotide
gauaucggcggccagaaag

SEQ ID NO: 3176004 - RNA, 19 nt, Artificial Sequence
  Description of Artificial Sequence: Synthetic oligonucleotide
ugaguaacaagauuaggga

SEQ ID NO: 3176005 - RNA, 19 nt, Artificial Sequence
  Description of Artificial Sequence: Synthetic oligonucleotide
uucagagugacccauuuga

SEQ ID NO: 3176006 - RNA, 19 nt, Artificial Sequence
  Description of Artificial Sequence: Synthetic oligonucleotide
uaaaauuuuguaaucuuau

SEQ ID NO: 3176007 - RNA, 19 nt, Artificial Sequence
  Description of Artificial Sequence: Synthetic oligonucleotide
uagguccuggcuuagagcg

SEQ ID NO: 3176008 - RNA, 19 nt, Artificial Sequence
  Description of Artificial Sequence: Synthetic oligonucleotide
ugagaacaaaucaaaacgu

SEQ ID NO: 3176009 - RNA, 19 nt, Artificial Sequence
  Description of Artificial Sequence: Synthetic oligonucleotide
caaacuaaaaccucucaag

SEQ ID NO: 3176010 - RNA, 19 nt, Artificial Sequence
  Description of Artificial Sequence: Synthetic oligonucleotide
uuagcaacaaguuuugauc

SEQ ID NO: 3176011 - RNA, 19 nt, Artificial Sequence
  Description of Artificial Sequence: Synthetic oligonucleotide
uuuaguucaauauuguauu

SEQ ID NO: 3176012 - RNA, 19 nt, Artificial Sequence
  Description of Artificial Sequence: Synthetic oligonucleotide
ugaaucauuagacauuaaa

SEQ ID NO: 3176013 - RNA, 19 nt, Artificial Sequence
  Description of Artificial Sequence: Synthetic oligonucleotide
cuugagaaacuauuuacag

SEQ ID NO: 3176014 - RNA, 19 nt, Artificial Sequence
  Description of Artificial Sequence: Synthetic oligonucleotide
uuauacagucauauuaaca

SEQ ID NO: 3176015 - RNA, 19 nt, Artificial Sequence
  Description of Artificial Sequence: Synthetic oligonucleotide
uucuuaauaaaguugggau

SEQ ID NO: 3176016 - RNA, 19 nt, Artificial Sequence
  Description of Artificial Sequence: Synthetic oligonucleotide
  modified_base (5)..(5): a, c, u, g, unknown or other
agagnuuaaacagugaccu

SEQ ID NO: 3176017 - RNA, 19 nt, Artificial Sequence
  Description of Artificial Sequence: Synthetic oligonucleotide
acuaaaaccucucaaggca

SEQ ID NO: 3176018 - RNA, 19 nt, Artificial Sequence
  Description of Artificial Sequence: Synthetic oligonucleotide
uaugauuccugcuauaaau

SEQ ID NO: 3176019 - RNA, 19 nt, Artificial Sequence
  Description of Artificial Sequence: Synthetic oligonucleotide
ugguauaaugccaacuacc

SEQ ID NO: 3176020 - RNA, 19 nt, Artificial Sequence
  Description of Artificial Sequence: Synthetic oligonucleotide
gacaauuuaaugguuuggg

SEQ ID NO: 3176021 - RNA, 19 nt, Artificial Sequence
  Description of Artificial Sequence: Synthetic oligonucleotide
aaaguucuuggucauguca

SEQ ID NO: 3176022 - RNA, 19 nt, Artificial Sequence
  Description of Artificial Sequence: Synthetic oligonucleotide
gguaauucuacacagacca

SEQ ID NO: 3176023 - RNA, 19 nt, Artificial Sequence
  Description of Artificial Sequence: Synthetic oligonucleotide
gagauuuaguucaauauug

SEQ ID NO: 3176024 - RNA, 19 nt, Artificial Sequence
  Description of Artificial Sequence: Synthetic oligonucleotide
uucagcagauuuuacagug

SEQ ID NO: 3176025 - RNA, 19 nt, Artificial Sequence
  Description of Artificial Sequence: Synthetic oligonucleotide
acugaaacaggugaguaac

SEQ ID NO: 3176026 - RNA, 19 nt, Artificial Sequence
  Description of Artificial Sequence: Synthetic oligonucleotide
cagucaaggaaauaauucc

SEQ ID NO: 3176027 - RNA, 19 nt, Artificial Sequence
  Description of Artificial Sequence: Synthetic oligonucleotide
aacuaaaaucucugaguag

SEQ ID NO: 3176028 - RNA, 19 nt, Artificial Sequence
  Description of Artificial Sequence: Synthetic oligonucleotide
gaguaacaagauuagggag

SEQ ID NO: 3176029 - RNA, 19 nt, Artificial Sequence
  Description of Artificial Sequence: Synthetic oligonucleotide
acuacagggucucacacag

SEQ ID NO: 3176030 - RNA, 19 nt, Artificial Sequence
  Description of Artificial Sequence: Synthetic oligonucleotide
ucaucuagaacauuacaaa

SEQ ID NO: 3176031 - RNA, 19 nt, Artificial Sequence
  Description of Artificial Sequence: Synthetic oligonucleotide
aaccagaguaacuggugac

SEQ ID NO: 3176032 - RNA, 19 nt, Artificial Sequence
  Description of Artificial Sequence: Synthetic oligonucleotide
gaaauuaaagacaauuuaa

SEQ ID NO: 3176033 - RNA, 19 nt, Artificial Sequence
  Description of Artificial Sequence: Synthetic oligonucleotide
uaucuuuacagauguuuag

SEQ ID NO: 3176034 - RNA, 19 nt, Artificial Sequence
  Description of Artificial Sequence: Synthetic oligonucleotide
aggcuuguucaauaggagc

SEQ ID NO: 3176035 - RNA, 19 nt, Artificial Sequence
  Description of Artificial Sequence: Synthetic oligonucleotide
uauacagaccuuaacccac

SEQ ID NO: 3176036 - RNA, 19 nt, Artificial Sequence
  Description of Artificial Sequence: Synthetic oligonucleotide
caugauucauaaauacuag

SEQ ID NO: 3176037 - RNA, 19 nt, Artificial Sequence
  Description of Artificial Sequence: Synthetic oligonucleotide
aagacaaugaugaaauuaa

SEQ ID NO: 3176038 - RNA, 19 nt, Artificial Sequence
  Description of Artificial Sequence: Synthetic oligonucleotide
augucuuaggaggugaggc

SEQ ID NO: 3176039 - RNA, 19 nt, Artificial Sequence
  Description of Artificial Sequence: Synthetic oligonucleotide
ggucaugucaguuaguuug

SEQ ID NO: 3176040 - RNA, 19 nt, Artificial Sequence
  Description of Artificial Sequence: Synthetic oligonucleotide
aaauaggucugugagagau

SEQ ID NO: 3176041 - RNA, 19 nt, Artificial Sequence
  Description of Artificial Sequence: Synthetic oligonucleotide
uuauccaucgccccgcccc

SEQ ID NO: 3176042 - RNA, 19 nt, Artificial Sequence
  Description of Artificial Sequence: Synthetic oligonucleotide
uaaacagcggggaaauuca

SEQ ID NO: 3176043 - RNA, 19 nt, Artificial Sequence
  Description of Artificial Sequence: Synthetic oligonucleotide
uugacaaaugauugcacca

SEQ ID NO: 3176044 - RNA, 19 nt, Artificial Sequence
  Description of Artificial Sequence: Synthetic oligonucleotide
uacacucuaagaacaaugu

SEQ ID NO: 3176045 - RNA, 19 nt, Artificial Sequence
  Description of Artificial Sequence: Synthetic oligonucleotide
auggcgaagauaucggcgg

SEQ ID NO: 3176046 - RNA, 19 nt, Artificial Sequence
  Description of Artificial Sequence: Synthetic oligonucleotide
agucauauuaacaauuugu

SEQ ID NO: 3176047 - RNA, 19 nt, Artificial Sequence
  Description of Artificial Sequence: Synthetic oligonucleotide
auuagggaguuuuagaauu

SEQ ID NO: 3176048 - RNA, 19 nt, Artificial Sequence
  Description of Artificial Sequence: Synthetic oligonucleotide
  modified_base (3)..(3): a, c, u, g, unknown or other
agnuuaaacagugaccuca

SEQ ID NO: 3176049 - RNA, 19 nt, Artificial Sequence
  Description of Artificial Sequence: Synthetic oligonucleotide
ucuauuggcuucucggugc

SEQ ID NO: 3176050 - RNA, 19 nt, Artificial Sequence
  Description of Artificial Sequence: Synthetic oligonucleotide
uuaucuuuacagauguuua

SEQ ID NO: 3176051 - RNA, 19 nt, Artificial Sequence
  Description of Artificial Sequence: Synthetic oligonucleotide
aaaaguucuuggucauguc

SEQ ID NO: 3176052 - RNA, 19 nt, Artificial Sequence
  Description of Artificial Sequence: Synthetic oligonucleotide
agaugaguccacuuuaaca

SEQ ID NO: 3176053 - RNA, 19 nt, Artificial Sequence
  Description of Artificial Sequence: Synthetic oligonucleotide
cuccccaugcucaugaucc

SEQ ID NO: 3176054 - RNA, 19 nt, Artificial Sequence
  Description of Artificial Sequence: Synthetic oligonucleotide
guuuuauauacauuuuaca

SEQ ID NO: 3176055 - RNA, 19 nt, Artificial Sequence
  Description of Artificial Sequence: Synthetic oligonucleotide
aacaugucuagugguggcc

SEQ ID NO: 3176056 - RNA, 19 nt, Artificial Sequence
  Description of Artificial Sequence: Synthetic oligonucleotide
uuaggcaugagaagaacau

SEQ ID NO: 3176057 - RNA, 19 nt, Artificial Sequence
  Description of Artificial Sequence: Synthetic oligonucleotide
uuuauacagucauauuaac

SEQ ID NO: 3176058 - RNA, 19 nt, Artificial Sequence
  Description of Artificial Sequence: Synthetic oligonucleotide
gaagaacauacacucuaag

SEQ ID NO: 3176059 - RNA, 19 nt, Artificial Sequence
  Description of Artificial Sequence: Synthetic oligonucleotide
ugauuccugcuauaaauga

SEQ ID NO: 3176060 - RNA, 19 nt, Artificial Sequence
  Description of Artificial Sequence: Synthetic oligonucleotide
uuuacaagauaugauuccu

SEQ ID NO: 3176061 - RNA, 19 nt, Artificial Sequence
  Description of Artificial Sequence: Synthetic oligonucleotide
gaaucauuagacauuaaaa

SEQ ID NO: 3176062 - RNA, 19 nt, Artificial Sequence
  Description of Artificial Sequence: Synthetic oligonucleotide
aaccgauguguuuugguca

SEQ ID NO: 3176063 - RNA, 19 nt, Artificial Sequence
  Description of Artificial Sequence: Synthetic oligonucleotide
aaagacgggacuucacaca

SEQ ID NO: 3176064 - RNA, 19 nt, Artificial Sequence
  Description of Artificial Sequence: Synthetic oligonucleotide
gauacaaauaaauccuaaa

SEQ ID NO: 3176065 - RNA, 19 nt, Artificial Sequence
  Description of Artificial Sequence: Synthetic oligonucleotide
aaauaauucccaugaugau

SEQ ID NO: 3176066 - RNA, 19 nt, Artificial Sequence
  Description of Artificial Sequence: Synthetic oligonucleotide
uuacaagauaugauuccug

SEQ ID NO: 3176067 - RNA, 19 nt, Artificial Sequence
  Description of Artificial Sequence: Synthetic oligonucleotide
guugagagaaguaaacagc

SEQ ID NO: 3176068 - RNA, 19 nt, Artificial Sequence
  Description of Artificial Sequence: Synthetic oligonucleotide
cacagaacaugucuagugg

SEQ ID NO: 3176069 - RNA, 19 nt, Artificial Sequence
  Description of Artificial Sequence: Synthetic oligonucleotide
uacagucauauuaacaauu

SEQ ID NO: 3176070 - RNA, 19 nt, Artificial Sequence
  Description of Artificial Sequence: Synthetic oligonucleotide
uaaaagcgaguuaagccgu

SEQ ID NO: 3176071 - RNA, 19 nt, Artificial Sequence
  Description of Artificial Sequence: Synthetic oligonucleotide
uaguuugaacuacacuuug

SEQ ID NO: 3176072 - RNA, 19 nt, Artificial Sequence
  Description of Artificial Sequence: Synthetic oligonucleotide
uaaaauccaucuuuugaaa

SEQ ID NO: 3176073 - RNA, 19 nt, Artificial Sequence
  Description of Artificial Sequence: Synthetic oligonucleotide
aggagauuuaguucaauau

SEQ ID NO: 3176074 - RNA, 19 nt, Artificial Sequence
  Description of Artificial Sequence: Synthetic oligonucleotide
gauggcgaagauaucggcg

SEQ ID NO: 3176075 - RNA, 19 nt, Artificial Sequence
  Description of Artificial Sequence: Synthetic oligonucleotide
ucauauuaacaauuuguuu

SEQ ID NO: 3176076 - RNA, 19 nt, Artificial Sequence
  Description of Artificial Sequence: Synthetic oligonucleotide
cuuuauacagucauauuaa

SEQ ID NO: 3176077 - RNA, 19 nt, Artificial Sequence
  Description of Artificial Sequence: Synthetic oligonucleotide
auuaauacuugcugggaaa

SEQ ID NO: 3176078 - RNA, 19 nt, Artificial Sequence
  Description of Artificial Sequence: Synthetic oligonucleotide
uauccuuaggcaugagaag

SEQ ID NO: 3176079 - RNA, 19 nt, Artificial Sequence
  Description of Artificial Sequence: Synthetic oligonucleotide
uaugagcccaaacacugga

SEQ ID NO: 3176080 - RNA, 19 nt, Artificial Sequence
  Description of Artificial Sequence: Synthetic oligonucleotide
gagaaguuccagugaaugc

SEQ ID NO: 3176081 - RNA, 19 nt, Artificial Sequence
  Description of Artificial Sequence: Synthetic oligonucleotide
uacuauaaccagaguaacu

SEQ ID NO: 3176082 - RNA, 19 nt, Artificial Sequence
  Description of Artificial Sequence: Synthetic oligonucleotide
aacggcaauccauuguggu

SEQ ID NO: 3176083 - RNA, 19 nt, Artificial Sequence
  Description of Artificial Sequence: Synthetic oligonucleotide
aaagaaguugagaacacua

SEQ ID NO: 3176084 - RNA, 19 nt, Artificial Sequence
  Description of Artificial Sequence: Synthetic oligonucleotide
aaugauauuauuuauuuac

SEQ ID NO: 3176085 - RNA, 19 nt, Artificial Sequence
  Description of Artificial Sequence: Synthetic oligonucleotide
gauauuauuuauuuacucc

SEQ ID NO: 3176086 - RNA, 19 nt, Artificial Sequence
  Description of Artificial Sequence: Synthetic oligonucleotide
ucuuaagugguaaaguucc

SEQ ID NO: 3176087 - RNA, 19 nt, Artificial Sequence
  Description of Artificial Sequence: Synthetic oligonucleotide
ugcaguaagguucauuugg

SEQ ID NO: 3176088 - RNA, 19 nt, Artificial Sequence
  Description of Artificial Sequence: Synthetic oligonucleotide
acauguugaacuuagaagu

SEQ ID NO: 3176089 - RNA, 19 nt, Artificial Sequence
  Description of Artificial Sequence: Synthetic oligonucleotide
  modified_base (5)..(5): a, c, u, g, unknown or other
uuuunuuuagaaguaauga

SEQ ID NO: 3176090 - RNA, 19 nt, Artificial Sequence
  Description of Artificial Sequence: Synthetic oligonucleotide
aagucuaugcuucagaaau

SEQ ID NO: 3176091 - RNA, 19 nt, Artificial Sequence
  Description of Artificial Sequence: Synthetic oligonucleotide
  modified_base (2)..(2): a, c, u, g, unknown or other
unuuuagaaguaaugauau

SEQ ID NO: 3176092 - RNA, 19 nt, Artificial Sequence
  Description of Artificial Sequence: Synthetic oligonucleotide
uauugcuaaaugaacaucu

SEQ ID NO: 3176093 - RNA, 19 nt, Artificial Sequence
  Description of Artificial Sequence: Synthetic oligonucleotide
aauguauugcuaaaugaac

SEQ ID NO: 3176094 - RNA, 19 nt, Artificial Sequence
  Description of Artificial Sequence: Synthetic oligonucleotide
uacauguugaacuuagaag

SEQ ID NO: 3176095 - RNA, 19 nt, Artificial Sequence
  Description of Artificial Sequence: Synthetic oligonucleotide
  modified_base (3)..(3): a, c, u, g, unknown or other
uunuuuagaaguaaugaua

SEQ ID NO: 3176096 - RNA, 19 nt, Artificial Sequence
  Description of Artificial Sequence: Synthetic oligonucleotide
auauuauuuauuuacuccu

SEQ ID NO: 3176097 - RNA, 19 nt, Artificial Sequence
  Description of Artificial Sequence: Synthetic oligonucleotide
  modified_base (4)..(4): a, c, u, g, unknown or other
uuunuuuagaaguaaugau

SEQ ID NO: 3176098 - RNA, 19 nt, Artificial Sequence
  Description of Artificial Sequence: Synthetic oligonucleotide
auuauuuauuuacuccugg

SEQ ID NO: 3176099 - RNA, 19 nt, Artificial Sequence
  Description of Artificial Sequence: Synthetic oligonucleotide
acugcagaaaucuuaagug

SEQ ID NO: 3176100 - RNA, 19 nt, Artificial Sequence
  Description of Artificial Sequence: Synthetic oligonucleotide
aacugcagaaaucuuaagu

SEQ ID NO: 3176101 - RNA, 19 nt, Artificial Sequence
  Description of Artificial Sequence: Synthetic oligonucleotide
agaaguugcaguaagguuc

SEQ ID NO: 3176102 - RNA, 19 nt, Artificial Sequence
  Description of Artificial Sequence: Synthetic oligonucleotide
ugaacuuagaaguugcagu

SEQ ID NO: 3176103 - RNA, 19 nt, Artificial Sequence
  Description of Artificial Sequence: Synthetic oligonucleotide
uuuagaaguaaugauauua

SEQ ID NO: 3176104 - RNA, 19 nt, Artificial Sequence
  Description of Artificial Sequence: Synthetic oligonucleotide
agaaauguauugcuaaaug

SEQ ID NO: 3176105 - RNA, 19 nt, Artificial Sequence
  Description of Artificial Sequence: Synthetic oligonucleotide
auuuggcugaagucuaugc

SEQ ID NO: 3176106 - RNA, 19 nt, Artificial Sequence
  Description of Artificial Sequence: Synthetic oligonucleotide
aacagaacugcagaaaucu

SEQ ID NO: 3176107 - RNA, 19 nt, Artificial Sequence
  Description of Artificial Sequence: Synthetic oligonucleotide
auuuauuuacuccugguaa

SEQ ID NO: 3176108 - RNA, 19 nt, Artificial Sequence
  Description of Artificial Sequence: Synthetic oligonucleotide
gaaauguauugcuaaauga

SEQ ID NO: 3176109 - RNA, 19 nt, Artificial Sequence
  Description of Artificial Sequence: Synthetic oligonucleotide
uguugaacuuagaaguugc

SEQ ID NO: 3176110 - RNA, 19 nt, Artificial Sequence
  Description of Artificial Sequence: Synthetic oligonucleotide
aaucuuaagugguaaaguu

SEQ ID NO: 3176111 - RNA, 19 nt, Artificial Sequence
  Description of Artificial Sequence: Synthetic oligonucleotide
uauuauuuauuuacuccug

SEQ ID NO: 3176112 - RNA, 19 nt, Artificial Sequence
  Description of Artificial Sequence: Synthetic oligonucleotide
gaaguaaugauauuauuua

SEQ ID NO: 3176113 - RNA, 19 nt, Artificial Sequence
  Description of Artificial Sequence: Synthetic oligonucleotide
uuagaaguaaugauauuau

SEQ ID NO: 3176114 - RNA, 19 nt, Artificial Sequence
  Description of Artificial Sequence: Synthetic oligonucleotide
gaaaucuuaagugguaaag

SEQ ID NO: 3176115 - RNA, 19 nt, Artificial Sequence
  Description of Artificial Sequence: Synthetic oligonucleotide
aaguuccugaguguggacc

SEQ ID NO: 3176116 - RNA, 19 nt, Artificial Sequence
  Description of Artificial Sequence: Synthetic oligonucleotide
ugauauuauuuauuuacuc

SEQ ID NO: 3176117 - RNA, 19 nt, Artificial Sequence
  Description of Artificial Sequence: Synthetic oligonucleotide
uuuacuccugguaacagaa

SEQ ID NO: 3176118 - RNA, 19 nt, Artificial Sequence
  Description of Artificial Sequence: Synthetic oligonucleotide
uuuauuuacuccugguaac

SEQ ID NO: 3176119 - RNA, 19 nt, Artificial Sequence
  Description of Artificial Sequence: Synthetic oligonucleotide
aaauguauugcuaaaugaa

SEQ ID NO: 3176120 - RNA, 19 nt, Artificial Sequence
  Description of Artificial Sequence: Synthetic oligonucleotide
aguaagguucauuuggcug

SEQ ID NO: 3176121 - RNA, 19 nt, Artificial Sequence
  Description of Artificial Sequence: Synthetic oligonucleotide
uucacugucauaaggcugu

SEQ ID NO: 3176122 - RNA, 19 nt, Artificial Sequence
  Description of Artificial Sequence: Synthetic oligonucleotide
ucuccugugaauugccugg

SEQ ID NO: 3176123 - RNA, 19 nt, Artificial Sequence
  Description of Artificial Sequence: Synthetic oligonucleotide
aaaucuuaagugguaaagu

SEQ ID NO: 3176124 - RNA, 19 nt, Artificial Sequence
  Description of Artificial Sequence: Synthetic oligonucleotide
aguuccugaguguggaccc

SEQ ID NO: 3176125 - RNA, 19 nt, Artificial Sequence
  Description of Artificial Sequence: Synthetic oligonucleotide
uucagaaauguauugcuaa

SEQ ID NO: 3176126 - RNA, 19 nt, Artificial Sequence
  Description of Artificial Sequence: Synthetic oligonucleotide
aaguaaugauauuauuuau

SEQ ID NO: 3176127 - RNA, 19 nt, Artificial Sequence
  Description of Artificial Sequence: Synthetic oligonucleotide
uauuuauuuacuccuggua

SEQ ID NO: 3176128 - RNA, 19 nt, Artificial Sequence
  Description of Artificial Sequence: Synthetic oligonucleotide
uaagugguaaaguuccuga

SEQ ID NO: 3176129 - RNA, 19 nt, Artificial Sequence
  Description of Artificial Sequence: Synthetic oligonucleotide
cugcagaaaucuuaagugg

SEQ ID NO: 3176130 - RNA, 19 nt, Artificial Sequence
  Description of Artificial Sequence: Synthetic oligonucleotide
acuuagaaguugcaguaag

SEQ ID NO: 3176131 - RNA, 19 nt, Artificial Sequence
  Description of Artificial Sequence: Synthetic oligonucleotide
ugcagaaaucuuaaguggu

SEQ ID NO: 3176132 - RNA, 19 nt, Artificial Sequence
  Description of Artificial Sequence: Synthetic oligonucleotide
ggaucuuccaccuucacug

SEQ ID NO: 3176133 - RNA, 19 nt, Artificial Sequence
  Description of Artificial Sequence: Synthetic oligonucleotide
ugaguguggacccugcucu

SEQ ID NO: 3176134 - RNA, 19 nt, Artificial Sequence
  Description of Artificial Sequence: Synthetic oligonucleotide
cuuagaaguugcaguaagg

SEQ ID NO: 3176135 - RNA, 19 nt, Artificial Sequence
  Description of Artificial Sequence: Synthetic oligonucleotide
ucguacauguugaacuuag

SEQ ID NO: 3176136 - RNA, 19 nt, Artificial Sequence
  Description of Artificial Sequence: Synthetic oligonucleotide
uguauugcuaaaugaacau

SEQ ID NO: 3176137 - RNA, 19 nt, Artificial Sequence
  Description of Artificial Sequence: Synthetic oligonucleotide
cauaaggcugucuucauuc

SEQ ID NO: 3176138 - RNA, 19 nt, Artificial Sequence
  Description of Artificial Sequence: Synthetic oligonucleotide
caaagcuucguacauguug

SEQ ID NO: 3176139 - RNA, 19 nt, Artificial Sequence
  Description of Artificial Sequence: Synthetic oligonucleotide
aagugguaaaguuccugag

SEQ ID NO: 3176140 - RNA, 19 nt, Artificial Sequence
  Description of Artificial Sequence: Synthetic oligonucleotide
uuagaaguugcaguaaggu

SEQ ID NO: 3176141 - RNA, 19 nt, Artificial Sequence
  Description of Artificial Sequence: Synthetic oligonucleotide
gugguaaaguuccugagug

SEQ ID NO: 3176142 - RNA, 19 nt, Artificial Sequence
  Description of Artificial Sequence: Synthetic oligonucleotide
uaugcuucagaaauguauu

SEQ ID NO: 3176143 - RNA, 19 nt, Artificial Sequence
  Description of Artificial Sequence: Synthetic oligonucleotide
uuauuuauuuacuccuggu

SEQ ID NO: 3176144 - RNA, 19 nt, Artificial Sequence
  Description of Artificial Sequence: Synthetic oligonucleotide
aaagcuucguacauguuga

SEQ ID NO: 3176145 - RNA, 19 nt, Artificial Sequence
  Description of Artificial Sequence: Synthetic oligonucleotide
uuuggcugaagucuaugcu

SEQ ID NO: 3176146 - RNA, 19 nt, Artificial Sequence
  Description of Artificial Sequence: Synthetic oligonucleotide
uugaacuuagaaguugcag

SEQ ID NO: 3176147 - RNA, 19 nt, Artificial Sequence
  Description of Artificial Sequence: Synthetic oligonucleotide
uccaccuucacugucauaa

SEQ ID NO: 3176148 - RNA, 19 nt, Artificial Sequence
  Description of Artificial Sequence: Synthetic oligonucleotide
uacuccugguaacagaacu

SEQ ID NO: 3176149 - RNA, 19 nt, Artificial Sequence
  Description of Artificial Sequence: Synthetic oligonucleotide
accuucacugucauaaggc

SEQ ID NO: 3176150 - RNA, 19 nt, Artificial Sequence
  Description of Artificial Sequence: Synthetic oligonucleotide
auucucaggaguggaaccc

SEQ ID NO: 3176151 - RNA, 19 nt, Artificial Sequence
  Description of Artificial Sequence: Synthetic oligonucleotide
ugucauaaggcugucuuca

SEQ ID NO: 3176152 - RNA, 19 nt, Artificial Sequence
  Description of Artificial Sequence: Synthetic oligonucleotide
ugaagucuaugcuucagaa

SEQ ID NO: 3176153 - RNA, 19 nt, Artificial Sequence
  Description of Artificial Sequence: Synthetic oligonucleotide
aaaguuccugaguguggac

SEQ ID NO: 3176154 - RNA, 19 nt, Artificial Sequence
  Description of Artificial Sequence: Synthetic oligonucleotide
guaagguucauuuggcuga

SEQ ID NO: 3176155 - RNA, 19 nt, Artificial Sequence
  Description of Artificial Sequence: Synthetic oligonucleotide
agaaguaaugauauuauuu

SEQ ID NO: 3176156 - RNA, 19 nt, Artificial Sequence
  Description of Artificial Sequence: Synthetic oligonucleotide
aucuuaagugguaaaguuc

SEQ ID NO: 3176157 - RNA, 19 nt, Artificial Sequence
  Description of Artificial Sequence: Synthetic oligonucleotide
aguggaacccggcaaagcu

SEQ ID NO: 3176158 - RNA, 19 nt, Artificial Sequence
  Description of Artificial Sequence: Synthetic oligonucleotide
ucuucauucucaggagugg

SEQ ID NO: 3176159 - RNA, 19 nt, Artificial Sequence
  Description of Artificial Sequence: Synthetic oligonucleotide
uuauuuacuccugguaaca

SEQ ID NO: 3176160 - RNA, 19 nt, Artificial Sequence
  Description of Artificial Sequence: Synthetic oligonucleotide
uuaagugguaaaguuccug

SEQ ID NO: 3176161 - RNA, 19 nt, Artificial Sequence
  Description of Artificial Sequence: Synthetic oligonucleotide
ucuuccaccuucacuguca

SEQ ID NO: 3176162 - RNA, 19 nt, Artificial Sequence
  Description of Artificial Sequence: Synthetic oligonucleotide
agugguaaaguuccugagu

SEQ ID NO: 3176163 - RNA, 19 nt, Artificial Sequence
  Description of Artificial Sequence: Synthetic oligonucleotide
ugcuucagaaauguauugc

SEQ ID NO: 3176164 - RNA, 19 nt, Artificial Sequence
  Description of Artificial Sequence: Synthetic oligonucleotide
cugugaauugccuggcugc

SEQ ID NO: 3176165 - RNA, 19 nt, Artificial Sequence
  Description of Artificial Sequence: Synthetic oligonucleotide
uaaaguuccugagugugga

SEQ ID NO: 3176166 - RNA, 19 nt, Artificial Sequence
  Description of Artificial Sequence: Synthetic oligonucleotide
uaaugauauuauuuauuua

SEQ ID NO: 3176167 - RNA, 19 nt, Artificial Sequence
  Description of Artificial Sequence: Synthetic oligonucleotide
ugaauugccuggcugcuuc

SEQ ID NO: 3176168 - RNA, 19 nt, Artificial Sequence
  Description of Artificial Sequence: Synthetic oligonucleotide
ucagaaauguauugcuaaa

SEQ ID NO: 3176169 - RNA, 19 nt, Artificial Sequence
  Description of Artificial Sequence: Synthetic oligonucleotide
gaacuuagaaguugcagua

SEQ ID NO: 3176170 - RNA, 19 nt, Artificial Sequence
  Description of Artificial Sequence: Synthetic oligonucleotide
auguauugcuaaaugaaca

SEQ ID NO: 3176171 - RNA, 19 nt, Artificial Sequence
  Description of Artificial Sequence: Synthetic oligonucleotide
cauucucaggaguggaacc

SEQ ID NO: 3176172 - RNA, 19 nt, Artificial Sequence
  Description of Artificial Sequence: Synthetic oligonucleotide
guaaugauauuauuuauuu

SEQ ID NO: 3176173 - RNA, 19 nt, Artificial Sequence
  Description of Artificial Sequence: Synthetic oligonucleotide
uauuuacuccugguaacag

SEQ ID NO: 3176174 - RNA, 19 nt, Artificial Sequence
  Description of Artificial Sequence: Synthetic oligonucleotide
acugucauaaggcugucuu

SEQ ID NO: 3176175 - RNA, 19 nt, Artificial Sequence
  Description of Artificial Sequence: Synthetic oligonucleotide
ugucuucauucucaggagu

SEQ ID NO: 3176176 - RNA, 19 nt, Artificial Sequence
  Description of Artificial Sequence: Synthetic oligonucleotide
auuuacuccugguaacaga

SEQ ID NO: 3176177 - RNA, 19 nt, Artificial Sequence
  Description of Artificial Sequence: Synthetic oligonucleotide
uucauuuggcugaagucua

SEQ ID NO: 3176178 - RNA, 19 nt, Artificial Sequence
  Description of Artificial Sequence: Synthetic oligonucleotide
cuucacugucauaaggcug

SEQ ID NO: 3176179 - RNA, 19 nt, Artificial Sequence
  Description of Artificial Sequence: Synthetic oligonucleotide
agguucauuuggcugaagu

SEQ ID NO: 3176180 - RNA, 19 nt, Artificial Sequence
  Description of Artificial Sequence: Synthetic oligonucleotide
uaacagaacugcagaaauc

SEQ ID NO: 3176181 - RNA, 19 nt, Artificial Sequence
  Description of Artificial Sequence: Synthetic oligonucleotide
guacauguugaacuuagaa

SEQ ID NO: 3176182 - RNA, 19 nt, Artificial Sequence
  Description of Artificial Sequence: Synthetic oligonucleotide
aguaaugauauuauuuauu

SEQ ID NO: 3176183 - RNA, 19 nt, Artificial Sequence
  Description of Artificial Sequence: Synthetic oligonucleotide
ucucaggaguggaacccgg

SEQ ID NO: 3176184 - RNA, 19 nt, Artificial Sequence
  Description of Artificial Sequence: Synthetic oligonucleotide
aauagcuauuccuugaagc

SEQ ID NO: 3176185 - RNA, 19 nt, Artificial Sequence
  Description of Artificial Sequence: Synthetic oligonucleotide
uuaaaagauauuuauaaag

SEQ ID NO: 3176186 - RNA, 19 nt, Artificial Sequence
  Description of Artificial Sequence: Synthetic oligonucleotide
guaguuuagagauagaagg

SEQ ID NO: 3176187 - RNA, 19 nt, Artificial Sequence
  Description of Artificial Sequence: Synthetic oligonucleotide
agaggaaugaaacucaaac

SEQ ID NO: 3176188 - RNA, 19 nt, Artificial Sequence
  Description of Artificial Sequence: Synthetic oligonucleotide
acaaagaucaaaauaauac

SEQ ID NO: 3176189 - RNA, 19 nt, Artificial Sequence
  Description of Artificial Sequence: Synthetic oligonucleotide
aaaaugauguccugaacuc

SEQ ID NO: 3176190 - RNA, 19 nt, Artificial Sequence
  Description of Artificial Sequence: Synthetic oligonucleotide
uuuacaagaggaaugaaac

SEQ ID NO: 3176191 - RNA, 19 nt, Artificial Sequence
  Description of Artificial Sequence: Synthetic oligonucleotide
uuaaauagugucuuuguag

SEQ ID NO: 3176192 - RNA, 19 nt, Artificial Sequence
  Description of Artificial Sequence: Synthetic oligonucleotide
uaaaagauauuuauaaagu

SEQ ID NO: 3176193 - RNA, 19 nt, Artificial Sequence
  Description of Artificial Sequence: Synthetic oligonucleotide
uucacuauauuuaagugug

SEQ ID NO: 3176194 - RNA, 19 nt, Artificial Sequence
  Description of Artificial Sequence: Synthetic oligonucleotide
auuuccaaaguccacuugc

SEQ ID NO: 3176195 - RNA, 19 nt, Artificial Sequence
  Description of Artificial Sequence: Synthetic oligonucleotide
acacauuacagccaaaagg

SEQ ID NO: 3176196 - RNA, 19 nt, Artificial Sequence
  Description of Artificial Sequence: Synthetic oligonucleotide
uuaaauagugucuuucuag

SEQ ID NO: 3176197 - RNA, 19 nt, Artificial Sequence
  Description of Artificial Sequence: Synthetic oligonucleotide
uucaauaugaaacagcuuu

SEQ ID NO: 3176198 - RNA, 19 nt, Artificial Sequence
  Description of Artificial Sequence: Synthetic oligonucleotide
aaauaauugagucaacaau

SEQ ID NO: 3176199 - RNA, 19 nt, Artificial Sequence
  Description of Artificial Sequence: Synthetic oligonucleotide
cacauuacagccaaaaggc

SEQ ID NO: 3176200 - RNA, 19 nt, Artificial Sequence
  Description of Artificial Sequence: Synthetic oligonucleotide
aaaagaacuauagggaauc

SEQ ID NO: 3176201 - RNA, 19 nt, Artificial Sequence
  Description of Artificial Sequence: Synthetic oligonucleotide
uuuauguccaaccacagau

SEQ ID NO: 3176202 - RNA, 19 nt, Artificial Sequence
  Description of Artificial Sequence: Synthetic oligonucleotide
aauugagucaacaauaagu

SEQ ID NO: 3176203 - RNA, 19 nt, Artificial Sequence
  Description of Artificial Sequence: Synthetic oligonucleotide
aauauuccaacuuucaaua

SEQ ID NO: 3176204 - RNA, 19 nt, Artificial Sequence
  Description of Artificial Sequence: Synthetic oligonucleotide
auuggcuuaaagcuuuucc

SEQ ID NO: 3176205 - RNA, 19 nt, Artificial Sequence
  Description of Artificial Sequence: Synthetic oligonucleotide
uacaguucccauuagaagc

SEQ ID NO: 3176206 - RNA, 19 nt, Artificial Sequence
  Description of Artificial Sequence: Synthetic oligonucleotide
uuaaaauaggcacaucugu

SEQ ID NO: 3176207 - RNA, 19 nt, Artificial Sequence
  Description of Artificial Sequence: Synthetic oligonucleotide
ucaaauagcacuacaguac

SEQ ID NO: 3176208 - RNA, 19 nt, Artificial Sequence
  Description of Artificial Sequence: Synthetic oligonucleotide
uauuccuugaagcaugugc

SEQ ID NO: 3176209 - RNA, 19 nt, Artificial Sequence
  Description of Artificial Sequence: Synthetic oligonucleotide
uaugaauuaaauagugucu

SEQ ID NO: 3176210 - RNA, 19 nt, Artificial Sequence
  Description of Artificial Sequence: Synthetic oligonucleotide
aauuaaauagugucuuucu

SEQ ID NO: 3176211 - RNA, 19 nt, Artificial Sequence
  Description of Artificial Sequence: Synthetic oligonucleotide
uuuugucaaaucauggcag

SEQ ID NO: 3176212 - RNA, 19 nt, Artificial Sequence
  Description of Artificial Sequence: Synthetic oligonucleotide
aauaugaguuaguuuaugu

SEQ ID NO: 3176213 - RNA, 19 nt, Artificial Sequence
  Description of Artificial Sequence: Synthetic oligonucleotide
acuuaaaauaggcacaucu

SEQ ID NO: 3176214 - RNA, 19 nt, Artificial Sequence
  Description of Artificial Sequence: Synthetic oligonucleotide
aauuaaauagugucuuugu

SEQ ID NO: 3176215 - RNA, 19 nt, Artificial Sequence
  Description of Artificial Sequence: Synthetic oligonucleotide
aaaauaauugagucaacaa

SEQ ID NO: 3176216 - RNA, 19 nt, Artificial Sequence
  Description of Artificial Sequence: Synthetic oligonucleotide
aaaagauauuuauaaaguu

SEQ ID NO: 3176217 - RNA, 19 nt, Artificial Sequence
  Description of Artificial Sequence: Synthetic oligonucleotide
uuuaagugugcuaaacacc

SEQ ID NO: 3176218 - RNA, 19 nt, Artificial Sequence
  Description of Artificial Sequence: Synthetic oligonucleotide
ugcaaugauaguaagguaa

SEQ ID NO: 3176219 - RNA, 19 nt, Artificial Sequence
  Description of Artificial Sequence: Synthetic oligonucleotide
uuuuguuacagguacuuca

SEQ ID NO: 3176220 - RNA, 19 nt, Artificial Sequence
  Description of Artificial Sequence: Synthetic oligonucleotide
acuaagauacuucucucac

SEQ ID NO: 3176221 - RNA, 19 nt, Artificial Sequence
  Description of Artificial Sequence: Synthetic oligonucleotide
ugagcugacugucugaaag

SEQ ID NO: 3176222 - RNA, 19 nt, Artificial Sequence
  Description of Artificial Sequence: Synthetic oligonucleotide
auuuacaacaaacacugca

SEQ ID NO: 3176223 - RNA, 19 nt, Artificial Sequence
  Description of Artificial Sequence: Synthetic oligonucleotide
aacuauagggaaucuuuuc

SEQ ID NO: 3176224 - RNA, 19 nt, Artificial Sequence
  Description of Artificial Sequence: Synthetic oligonucleotide
uguguuacacaacugaauc

SEQ ID NO: 3176225 - RNA, 19 nt, Artificial Sequence
  Description of Artificial Sequence: Synthetic oligonucleotide
aaagugagugagcugaugu

SEQ ID NO: 3176226 - RNA, 19 nt, Artificial Sequence
  Description of Artificial Sequence: Synthetic oligonucleotide
uagaagcuugcaaugauag

SEQ ID NO: 3176227 - RNA, 19 nt, Artificial Sequence
  Description of Artificial Sequence: Synthetic oligonucleotide
agaucggaaauuuacaaca

SEQ ID NO: 3176228 - RNA, 19 nt, Artificial Sequence
  Description of Artificial Sequence: Synthetic oligonucleotide
uuuagagauagaaggaaac

SEQ ID NO: 3176229 - RNA, 19 nt, Artificial Sequence
  Description of Artificial Sequence: Synthetic oligonucleotide
ugaaucuagaacaacuuuc

SEQ ID NO: 3176230 - RNA, 19 nt, Artificial Sequence
  Description of Artificial Sequence: Synthetic oligonucleotide
acugccaccaaugugaagg

SEQ ID NO: 3176231 - RNA, 19 nt, Artificial Sequence
  Description of Artificial Sequence: Synthetic oligonucleotide
uuucacuauauuuaagugu

SEQ ID NO: 3176232 - RNA, 19 nt, Artificial Sequence
  Description of Artificial Sequence: Synthetic oligonucleotide
uggguauuuauuuacucag

SEQ ID NO: 3176233 - RNA, 19 nt, Artificial Sequence
  Description of Artificial Sequence: Synthetic oligonucleotide
aauagcacuacaguacauc

SEQ ID NO: 3176234 - RNA, 19 nt, Artificial Sequence
  Description of Artificial Sequence: Synthetic oligonucleotide
aaacuacauagcuauuguc

SEQ ID NO: 3176235 - RNA, 19 nt, Artificial Sequence
  Description of Artificial Sequence: Synthetic oligonucleotide
ucuuauuccuauacagggg

SEQ ID NO: 3176236 - RNA, 19 nt, Artificial Sequence
  Description of Artificial Sequence: Synthetic oligonucleotide
ccaacuuucaauaugaaac

SEQ ID NO: 3176237 - RNA, 19 nt, Artificial Sequence
  Description of Artificial Sequence: Synthetic oligonucleotide
ucggaaauuuacaacaaac

SEQ ID NO: 3176238 - RNA, 19 nt, Artificial Sequence
  Description of Artificial Sequence: Synthetic oligonucleotide
aguauaguuaaucuuugca

SEQ ID NO: 3176239 - RNA, 19 nt, Artificial Sequence
  Description of Artificial Sequence: Synthetic oligonucleotide
aaaggcacuguugggaagc

SEQ ID NO: 3176240 - RNA, 19 nt, Artificial Sequence
  Description of Artificial Sequence: Synthetic oligonucleotide
ucucuuaaaagauauuuau

SEQ ID NO: 3176241 - RNA, 19 nt, Artificial Sequence
  Description of Artificial Sequence: Synthetic oligonucleotide
aauagugucuuucuaguuu

SEQ ID NO: 3176242 - RNA, 19 nt, Artificial Sequence
  Description of Artificial Sequence: Synthetic oligonucleotide
aguuuuguguuacacaacu

SEQ ID NO: 3176243 - RNA, 19 nt, Artificial Sequence
  Description of Artificial Sequence: Synthetic oligonucleotide
uggacgaaugaaaaguuug

SEQ ID NO: 3176244 - RNA, 19 nt, Artificial Sequence
  Description of Artificial Sequence: Synthetic oligonucleotide
auuaguaguuuuguguuac

SEQ ID NO: 3176245 - RNA, 19 nt, Artificial Sequence
  Description of Artificial Sequence: Synthetic oligonucleotide
cuuucuuauucgcugaacc

SEQ ID NO: 3176246 - RNA, 19 nt, Artificial Sequence
  Description of Artificial Sequence: Synthetic oligonucleotide
auuauagcuaacaucauca

SEQ ID NO: 3176247 - RNA, 19 nt, Artificial Sequence
  Description of Artificial Sequence: Synthetic oligonucleotide
aaacuuacacuuauuccac

SEQ ID NO: 3176248 - RNA, 19 nt, Artificial Sequence
  Description of Artificial Sequence: Synthetic oligonucleotide
uuggcuuaaagcuuuuccc

SEQ ID NO: 3176249 - RNA, 19 nt, Artificial Sequence
  Description of Artificial Sequence: Synthetic oligonucleotide
uauuagugucuuuacaaga

SEQ ID NO: 3176250 - RNA, 19 nt, Artificial Sequence
  Description of Artificial Sequence: Synthetic oligonucleotide
uguuagaugaacaucucua

SEQ ID NO: 3176251 - RNA, 19 nt, Artificial Sequence
  Description of Artificial Sequence: Synthetic oligonucleotide
acucaaacuacauagcuau

SEQ ID NO: 3176252 - RNA, 19 nt, Artificial Sequence
  Description of Artificial Sequence: Synthetic oligonucleotide
auaguuaaucuuugcauug

SEQ ID NO: 3176253 - RNA, 19 nt, Artificial Sequence
  Description of Artificial Sequence: Synthetic oligonucleotide
aaagauauuuauaaaguuu

SEQ ID NO: 3176254 - RNA, 19 nt, Artificial Sequence
  Description of Artificial Sequence: Synthetic oligonucleotide
aacuacauagcuauuguca

SEQ ID NO: 3176255 - RNA, 19 nt, Artificial Sequence
  Description of Artificial Sequence: Synthetic oligonucleotide
aagauauuuauaaaguuua

SEQ ID NO: 3176256 - RNA, 19 nt, Artificial Sequence
  Description of Artificial Sequence: Synthetic oligonucleotide
guaauauccuuacuaacug

SEQ ID NO: 3176257 - RNA, 19 nt, Artificial Sequence
  Description of Artificial Sequence: Synthetic oligonucleotide
cuuaaaauaggcacaucug

SEQ ID NO: 3176258 - RNA, 19 nt, Artificial Sequence
  Description of Artificial Sequence: Synthetic oligonucleotide
acaacuuucucuugugguc

SEQ ID NO: 3176259 - RNA, 19 nt, Artificial Sequence
  Description of Artificial Sequence: Synthetic oligonucleotide
auaguuaauaugcuuccug

SEQ ID NO: 3176260 - RNA, 19 nt, Artificial Sequence
  Description of Artificial Sequence: Synthetic oligonucleotide
aauaucugugacuaagaua

SEQ ID NO: 3176261 - RNA, 19 nt, Artificial Sequence
  Description of Artificial Sequence: Synthetic oligonucleotide
uuuuacaauauuccaacuu

SEQ ID NO: 3176262 - RNA, 19 nt, Artificial Sequence
  Description of Artificial Sequence: Synthetic oligonucleotide
uacaguucuagcaugcaac

SEQ ID NO: 3176263 - RNA, 19 nt, Artificial Sequence
  Description of Artificial Sequence: Synthetic oligonucleotide
ucaaacuacauagcuauug

SEQ ID NO: 3176264 - RNA, 19 nt, Artificial Sequence
  Description of Artificial Sequence: Synthetic oligonucleotide
gaauuaaauagugucuuug

SEQ ID NO: 3176265 - RNA, 19 nt, Artificial Sequence
  Description of Artificial Sequence: Synthetic oligonucleotide
cuuuguaguuuagagauag

SEQ ID NO: 3176266 - RNA, 19 nt, Artificial Sequence
  Description of Artificial Sequence: Synthetic oligonucleotide
acacaacugaaucuagaac

SEQ ID NO: 3176267 - RNA, 19 nt, Artificial Sequence
  Description of Artificial Sequence: Synthetic oligonucleotide
uacaauauuccaacuuuca

SEQ ID NO: 3176268 - RNA, 19 nt, Artificial Sequence
  Description of Artificial Sequence: Synthetic oligonucleotide
ucgaaacuuacacuuauuc

SEQ ID NO: 3176269 - RNA, 19 nt, Artificial Sequence
  Description of Artificial Sequence: Synthetic oligonucleotide
acuauagggaaucuuuuca

SEQ ID NO: 3176270 - RNA, 19 nt, Artificial Sequence
  Description of Artificial Sequence: Synthetic oligonucleotide
aaaucauggcaguaacucu

SEQ ID NO: 3176271 - RNA, 19 nt, Artificial Sequence
  Description of Artificial Sequence: Synthetic oligonucleotide
ugucauuucauuaguaguu

SEQ ID NO: 3176272 - RNA, 19 nt, Artificial Sequence
  Description of Artificial Sequence: Synthetic oligonucleotide
auaaguacaguucuagcau

SEQ ID NO: 3176273 - RNA, 19 nt, Artificial Sequence
  Description of Artificial Sequence: Synthetic oligonucleotide
cuaaacaccagccuauuuc

SEQ ID NO: 3176274 - RNA, 19 nt, Artificial Sequence
  Description of Artificial Sequence: Synthetic oligonucleotide
ccauccauaguuaauaugc

SEQ ID NO: 3176275 - RNA, 19 nt, Artificial Sequence
  Description of Artificial Sequence: Synthetic oligonucleotide
aaugaaaaguuuguucaca

SEQ ID NO: 3176276 - RNA, 19 nt, Artificial Sequence
  Description of Artificial Sequence: Synthetic oligonucleotide
uauagcuaacaucaucacu

SEQ ID NO: 3176277 - RNA, 19 nt, Artificial Sequence
  Description of Artificial Sequence: Synthetic oligonucleotide
uucuguuuggaacucuggc

SEQ ID NO: 3176278 - RNA, 19 nt, Artificial Sequence
  Description of Artificial Sequence: Synthetic oligonucleotide
uaguuuagagauagaagga

SEQ ID NO: 3176279 - RNA, 19 nt, Artificial Sequence
  Description of Artificial Sequence: Synthetic oligonucleotide
uguuagucaaugauuuaac

SEQ ID NO: 3176280 - RNA, 19 nt, Artificial Sequence
  Description of Artificial Sequence: Synthetic oligonucleotide
agcacuacaguacaucucu

SEQ ID NO: 3176281 - RNA, 19 nt, Artificial Sequence
  Description of Artificial Sequence: Synthetic oligonucleotide
aaguacaguucuagcaugc

SEQ ID NO: 3176282 - RNA, 19 nt, Artificial Sequence
  Description of Artificial Sequence: Synthetic oligonucleotide
uuagaugaacaucucuacu

SEQ ID NO: 3176283 - RNA, 19 nt, Artificial Sequence
  Description of Artificial Sequence: Synthetic oligonucleotide
uuucuuauucgcugaacca

SEQ ID NO: 3176284 - RNA, 19 nt, Artificial Sequence
  Description of Artificial Sequence: Synthetic oligonucleotide
aaauaaagcaaauaaaagg

SEQ ID NO: 3176285 - RNA, 19 nt, Artificial Sequence
  Description of Artificial Sequence: Synthetic oligonucleotide
uuuacaaucauauagaaua

SEQ ID NO: 3176286 - RNA, 19 nt, Artificial Sequence
  Description of Artificial Sequence: Synthetic oligonucleotide
  modified_base (10)..(10): a, c, u, g, unknown or other
ucauauaagnuuuaaaaca

SEQ ID NO: 3176287 - RNA, 19 nt, Artificial Sequence
  Description of Artificial Sequence: Synthetic oligonucleotide
aaggccauuacucugauuc

SEQ ID NO: 3176288 - RNA, 19 nt, Artificial Sequence
  Description of Artificial Sequence: Synthetic oligonucleotide
  modified_base (7)..(7): a, c, u, g, unknown or other
uauaagnuuuaaaacauca

SEQ ID NO: 3176289 - RNA, 19 nt, Artificial Sequence
  Description of Artificial Sequence: Synthetic oligonucleotide
uaaauaaagcaaauaaaag

SEQ ID NO: 3176290 - RNA, 19 nt, Artificial Sequence
  Description of Artificial Sequence: Synthetic oligonucleotide
auaguuacauuuuaauagc

SEQ ID NO: 3176291 - RNA, 19 nt, Artificial Sequence
  Description of Artificial Sequence: Synthetic oligonucleotide
aguauaauuacacuagcuc

SEQ ID NO: 3176292 - RNA, 19 nt, Artificial Sequence
  Description of Artificial Sequence: Synthetic oligonucleotide
uaugauuuccuuaacacca

SEQ ID NO: 3176293 - RNA, 19 nt, Artificial Sequence
  Description of Artificial Sequence: Synthetic oligonucleotide
auauguuuuaaaugaaugg

SEQ ID NO: 3176294 - RNA, 19 nt, Artificial Sequence
  Description of Artificial Sequence: Synthetic oligonucleotide
ugaacaaaguugaagauga

SEQ ID NO: 3176295 - RNA, 19 nt, Artificial Sequence
  Description of Artificial Sequence: Synthetic oligonucleotide
uuaucaaagauguaauuug

SEQ ID NO: 3176296 - RNA, 19 nt, Artificial Sequence
  Description of Artificial Sequence: Synthetic oligonucleotide
auaugauuuccuuaacacc

SEQ ID NO: 3176297 - RNA, 19 nt, Artificial Sequence
  Description of Artificial Sequence: Synthetic oligonucleotide
aauauaguuacauuuuaau

SEQ ID NO: 3176298 - RNA, 19 nt, Artificial Sequence
  Description of Artificial Sequence: Synthetic oligonucleotide
aaaacugauaaauauguuu

SEQ ID NO: 3176299 - RNA, 19 nt, Artificial Sequence
  Description of Artificial Sequence: Synthetic oligonucleotide
aauaaaaggugucuuggug

SEQ ID NO: 3176300 - RNA, 19 nt, Artificial Sequence
  Description of Artificial Sequence: Synthetic oligonucleotide
aaucucaaauaguuuuggc

SEQ ID NO: 3176301 - RNA, 19 nt, Artificial Sequence
  Description of Artificial Sequence: Synthetic oligonucleotide
uuuaugaaggccauuacuc

SEQ ID NO: 3176302 - RNA, 19 nt, Artificial Sequence
  Description of Artificial Sequence: Synthetic oligonucleotide
aagauguaauuuguaaacc

SEQ ID NO: 3176303 - RNA, 19 nt, Artificial Sequence
  Description of Artificial Sequence: Synthetic oligonucleotide
uauaugauuuccuuaacac

SEQ ID NO: 3176304 - RNA, 19 nt, Artificial Sequence
  Description of Artificial Sequence: Synthetic oligonucleotide
caagauacacuaaauaaag

SEQ ID NO: 3176305 - RNA, 19 nt, Artificial Sequence
  Description of Artificial Sequence: Synthetic oligonucleotide
cacuuuaugaaguacagac

SEQ ID NO: 3176306 - RNA, 19 nt, Artificial Sequence
  Description of Artificial Sequence: Synthetic oligonucleotide
guacauuaaaacuacuuag

SEQ ID NO: 3176307 - RNA, 19 nt, Artificial Sequence
  Description of Artificial Sequence: Synthetic oligonucleotide
cuaaauaaagcaaauaaaa

SEQ ID NO: 3176308 - RNA, 19 nt, Artificial Sequence
  Description of Artificial Sequence: Synthetic oligonucleotide
guuagguuugacaagauag

SEQ ID NO: 3176309 - RNA, 19 nt, Artificial Sequence
  Description of Artificial Sequence: Synthetic oligonucleotide
acuucaauuaaacaaauuu

SEQ ID NO: 3176310 - RNA, 19 nt, Artificial Sequence
  Description of Artificial Sequence: Synthetic oligonucleotide
acuauuacauuuuacugug

SEQ ID NO: 3176311 - RNA, 19 nt, Artificial Sequence
  Description of Artificial Sequence: Synthetic oligonucleotide
uauguguuagguuugacaa

SEQ ID NO: 3176312 - RNA, 19 nt, Artificial Sequence
  Description of Artificial Sequence: Synthetic oligonucleotide
uauguuuuaaaugaaugga

SEQ ID NO: 3176313 - RNA, 19 nt, Artificial Sequence
  Description of Artificial Sequence: Synthetic oligonucleotide
  modified_base (3)..(3): a, c, u, g, unknown or other
agnuuuaaaacaucaggug

SEQ ID NO: 3176314 - RNA, 19 nt, Artificial Sequence
  Description of Artificial Sequence: Synthetic oligonucleotide
aagaaaauuuguuucacuu

SEQ ID NO: 3176315 - RNA, 19 nt, Artificial Sequence
  Description of Artificial Sequence: Synthetic oligonucleotide
uagaggaaaauaaacuuga

SEQ ID NO: 3176316 - RNA, 19 nt, Artificial Sequence
  Description of Artificial Sequence: Synthetic oligonucleotide
ugaaguacagaccuuauuu

SEQ ID NO: 3176317 - RNA, 19 nt, Artificial Sequence
  Description of Artificial Sequence: Synthetic oligonucleotide
gaaaccauuucccuuauca

SEQ ID NO: 3176318 - RNA, 19 nt, Artificial Sequence
  Description of Artificial Sequence: Synthetic oligonucleotide
uacauuuuaauagcaauug

SEQ ID NO: 3176319 - RNA, 19 nt, Artificial Sequence
  Description of Artificial Sequence: Synthetic oligonucleotide
ucaagaaggacuggcaugg

SEQ ID NO: 3176320 - RNA, 19 nt, Artificial Sequence
  Description of Artificial Sequence: Synthetic oligonucleotide
aaaucucaaauaguuuugg

SEQ ID NO: 3176321 - RNA, 19 nt, Artificial Sequence
  Description of Artificial Sequence: Synthetic oligonucleotide
aagauacacuaaauaaagc

SEQ ID NO: 3176322 - RNA, 19 nt, Artificial Sequence
  Description of Artificial Sequence: Synthetic oligonucleotide
aaaacagcuacuacuaucu

SEQ ID NO: 3176323 - RNA, 19 nt, Artificial Sequence
  Description of Artificial Sequence: Synthetic oligonucleotide
auaugaguauaugauuucc

SEQ ID NO: 3176324 - RNA, 19 nt, Artificial Sequence
  Description of Artificial Sequence: Synthetic oligonucleotide
ucaaugaaguccaucuuug

SEQ ID NO: 3176325 - RNA, 19 nt, Artificial Sequence
  Description of Artificial Sequence: Synthetic oligonucleotide
aaguuggacauggagagag

SEQ ID NO: 3176326 - RNA, 19 nt, Artificial Sequence
  Description of Artificial Sequence: Synthetic oligonucleotide
acauuaaaacuacuuagca

SEQ ID NO: 3176327 - RNA, 19 nt, Artificial Sequence
  Description of Artificial Sequence: Synthetic oligonucleotide
aaauaaaaggugucuuggu

SEQ ID NO: 3176328 - RNA, 19 nt, Artificial Sequence
  Description of Artificial Sequence: Synthetic oligonucleotide
augccucugauuuaguccg

SEQ ID NO: 3176329 - RNA, 19 nt, Artificial Sequence
  Description of Artificial Sequence: Synthetic oligonucleotide
aaaacaucaggugaauaca

SEQ ID NO: 3176330 - RNA, 19 nt, Artificial Sequence
  Description of Artificial Sequence: Synthetic oligonucleotide
agauguaauuuguaaaccu

SEQ ID NO: 3176331 - RNA, 19 nt, Artificial Sequence
  Description of Artificial Sequence: Synthetic oligonucleotide
uuagguuugacaagauaga

SEQ ID NO: 3176332 - RNA, 19 nt, Artificial Sequence
  Description of Artificial Sequence: Synthetic oligonucleotide
uuuccgguacauuaaaacu

SEQ ID NO: 3176333 - RNA, 19 nt, Artificial Sequence
  Description of Artificial Sequence: Synthetic oligonucleotide
uuugguguggagcaagcug

SEQ ID NO: 3176334 - RNA, 19 nt, Artificial Sequence
  Description of Artificial Sequence: Synthetic oligonucleotide
uauacaucucaugaaacca

SEQ ID NO: 3176335 - RNA, 19 nt, Artificial Sequence
  Description of Artificial Sequence: Synthetic oligonucleotide
ucuaaagugcuuaguuucc

SEQ ID NO: 3176336 - RNA, 19 nt, Artificial Sequence
  Description of Artificial Sequence: Synthetic oligonucleotide
aaauuuaugaaggccauua

SEQ ID NO: 3176337 - RNA, 19 nt, Artificial Sequence
  Description of Artificial Sequence: Synthetic oligonucleotide
ugauuuaguccgcuucugg

SEQ ID NO: 3176338 - RNA, 19 nt, Artificial Sequence
  Description of Artificial Sequence: Synthetic oligonucleotide
auuuaugaaggccauuacu

SEQ ID NO: 3176339 - RNA, 19 nt, Artificial Sequence
  Description of Artificial Sequence: Synthetic oligonucleotide
uguguaucuguccuguuac

SEQ ID NO: 3176340 - RNA, 19 nt, Artificial Sequence
  Description of Artificial Sequence: Synthetic oligonucleotide
uuggugauuuccaagcucu

SEQ ID NO: 3176341 - RNA, 19 nt, Artificial Sequence
  Description of Artificial Sequence: Synthetic oligonucleotide
uccuguuaccaguagauga

SEQ ID NO: 3176342 - RNA, 19 nt, Artificial Sequence
  Description of Artificial Sequence: Synthetic oligonucleotide
  modified_base (19)..(19): a, c, u, g, unknown or other
uacucugauucauauaagn

SEQ ID NO: 3176343 - RNA, 19 nt, Artificial Sequence
  Description of Artificial Sequence: Synthetic oligonucleotide
aaacuugacuuuaucuugg

SEQ ID NO: 3176344 - RNA, 19 nt, Artificial Sequence
  Description of Artificial Sequence: Synthetic oligonucleotide
ucugucucagaguagguga

SEQ ID NO: 3176345 - RNA, 19 nt, Artificial Sequence
  Description of Artificial Sequence: Synthetic oligonucleotide
uuacauuuuaauagcaauu

SEQ ID NO: 3176346 - RNA, 19 nt, Artificial Sequence
  Description of Artificial Sequence: Synthetic oligonucleotide
uccuugaguauaauuacac

SEQ ID NO: 3176347 - RNA, 19 nt, Artificial Sequence
  Description of Artificial Sequence: Synthetic oligonucleotide
aaacccugcucuuugccag

SEQ ID NO: 3176348 - RNA, 19 nt, Artificial Sequence
  Description of Artificial Sequence: Synthetic oligonucleotide
gaagaugagaaagugucug

SEQ ID NO: 3176349 - RNA, 19 nt, Artificial Sequence
  Description of Artificial Sequence: Synthetic oligonucleotide
uguguuagguuugacaaga

SEQ ID NO: 3176350 - RNA, 19 nt, Artificial Sequence
  Description of Artificial Sequence: Synthetic oligonucleotide
gcuacuacuaucucuaaag

SEQ ID NO: 3176351 - RNA, 19 nt, Artificial Sequence
  Description of Artificial Sequence: Synthetic oligonucleotide
cuucucaucugguagcagg

SEQ ID NO: 3176352 - RNA, 19 nt, Artificial Sequence
  Description of Artificial Sequence: Synthetic oligonucleotide
uacuuagcaagaacaguag

SEQ ID NO: 3176353 - RNA, 19 nt, Artificial Sequence
  Description of Artificial Sequence: Synthetic oligonucleotide
uucucaucugguagcaggg

SEQ ID NO: 3176354 - RNA, 19 nt, Artificial Sequence
  Description of Artificial Sequence: Synthetic oligonucleotide
auaguuguguaucuguccu

SEQ ID NO: 3176355 - RNA, 19 nt, Artificial Sequence
  Description of Artificial Sequence: Synthetic oligonucleotide
aucaccaacaggaaggcgg

SEQ ID NO: 3176356 - RNA, 19 nt, Artificial Sequence
  Description of Artificial Sequence: Synthetic oligonucleotide
ugguaaagaagguggcugg

SEQ ID NO: 3176357 - RNA, 19 nt, Artificial Sequence
  Description of Artificial Sequence: Synthetic oligonucleotide
acuaaugaaccuucccuag

SEQ ID NO: 3176358 - RNA, 19 nt, Artificial Sequence
  Description of Artificial Sequence: Synthetic oligonucleotide
acuuuaugaaguacagacc

SEQ ID NO: 3176359 - RNA, 19 nt, Artificial Sequence
  Description of Artificial Sequence: Synthetic oligonucleotide
uaaagugcuuaguuuccgg

SEQ ID NO: 3176360 - RNA, 19 nt, Artificial Sequence
  Description of Artificial Sequence: Synthetic oligonucleotide
uuguuucacuuuaugaagu

SEQ ID NO: 3176361 - RNA, 19 nt, Artificial Sequence
  Description of Artificial Sequence: Synthetic oligonucleotide
caacucacaagaaaauuug

SEQ ID NO: 3176362 - RNA, 19 nt, Artificial Sequence
  Description of Artificial Sequence: Synthetic oligonucleotide
gguggaagugaucagagcc

SEQ ID NO: 3176363 - RNA, 19 nt, Artificial Sequence
  Description of Artificial Sequence: Synthetic oligonucleotide
uaugaaggccauuacucug

SEQ ID NO: 3176364 - RNA, 19 nt, Artificial Sequence
  Description of Artificial Sequence: Synthetic oligonucleotide
aacuugacuuuaucuuggg

SEQ ID NO: 3176365 - RNA, 19 nt, Artificial Sequence
  Description of Artificial Sequence: Synthetic oligonucleotide
ugaucagagccaaaucuca

SEQ ID NO: 3176366 - RNA, 19 nt, Artificial Sequence
  Description of Artificial Sequence: Synthetic oligonucleotide
ucugauuuaguccgcuucu

SEQ ID NO: 3176367 - RNA, 19 nt, Artificial Sequence
  Description of Artificial Sequence: Synthetic oligonucleotide
gaguauaugauuuccuuaa

SEQ ID NO: 3176368 - RNA, 19 nt, Artificial Sequence
  Description of Artificial Sequence: Synthetic oligonucleotide
auauuaccuauuauuuccc

SEQ ID NO: 3176369 - RNA, 19 nt, Artificial Sequence
  Description of Artificial Sequence: Synthetic oligonucleotide
uuaugaaggccauuacucu

SEQ ID NO: 3176370 - RNA, 19 nt, Artificial Sequence
  Description of Artificial Sequence: Synthetic oligonucleotide
uuuaugugcgucuuccuuc

SEQ ID NO: 3176371 - RNA, 19 nt, Artificial Sequence
  Description of Artificial Sequence: Synthetic oligonucleotide
uuucccuacuuaaaucccc

SEQ ID NO: 3176372 - RNA, 19 nt, Artificial Sequence
  Description of Artificial Sequence: Synthetic oligonucleotide
aagcaagauacacuaaaua

SEQ ID NO: 3176373 - RNA, 19 nt, Artificial Sequence
  Description of Artificial Sequence: Synthetic oligonucleotide
uugauaauucugcaucggu

SEQ ID NO: 3176374 - RNA, 19 nt, Artificial Sequence
  Description of Artificial Sequence: Synthetic oligonucleotide
ucuuugccagacaucaaug

SEQ ID NO: 3176375 - RNA, 19 nt, Artificial Sequence
  Description of Artificial Sequence: Synthetic oligonucleotide
uacuuaaauccccuccuug

SEQ ID NO: 3176376 - RNA, 19 nt, Artificial Sequence
  Description of Artificial Sequence: Synthetic oligonucleotide
guagaggaaaauaaacuug

SEQ ID NO: 3176377 - RNA, 19 nt, Artificial Sequence
  Description of Artificial Sequence: Synthetic oligonucleotide
uccucuuccucaauuguug

SEQ ID NO: 3176378 - RNA, 19 nt, Artificial Sequence
  Description of Artificial Sequence: Synthetic oligonucleotide
guuuccgguacauuaaaac

SEQ ID NO: 3176379 - RNA, 19 nt, Artificial Sequence
  Description of Artificial Sequence: Synthetic oligonucleotide
auuguuggaaucagggacg

SEQ ID NO: 3176380 - RNA, 19 nt, Artificial Sequence
  Description of Artificial Sequence: Synthetic oligonucleotide
caaaucucaaauaguuuug

SEQ ID NO: 3176381 - RNA, 19 nt, Artificial Sequence
  Description of Artificial Sequence: Synthetic oligonucleotide
uuacauuuuacuguggauu

SEQ ID NO: 3176382 - RNA, 19 nt, Artificial Sequence
  Description of Artificial Sequence: Synthetic oligonucleotide
acuuaaauccccuccuuga

SEQ ID NO: 3176383 - RNA, 19 nt, Artificial Sequence
  Description of Artificial Sequence: Synthetic oligonucleotide
ucaccaacaggaaggcggg

SEQ ID NO: 3176384 - RNA, 19 nt, Artificial Sequence
  Description of Artificial Sequence: Synthetic oligonucleotide
aaagaaacaacaugaaaag

SEQ ID NO: 3176385 - RNA, 19 nt, Artificial Sequence
  Description of Artificial Sequence: Synthetic oligonucleotide
aaaagaaacaacaugaaaa

SEQ ID NO: 3176386 - RNA, 19 nt, Artificial Sequence
  Description of Artificial Sequence: Synthetic oligonucleotide
aucucugugaguucaaggc

SEQ ID NO: 3176387 - RNA, 19 nt, Artificial Sequence
  Description of Artificial Sequence: Synthetic oligonucleotide
aaucccagcacuugggagg

SEQ ID NO: 3176388 - RNA, 19 nt, Artificial Sequence
  Description of Artificial Sequence: Synthetic oligonucleotide
gucuacaagagcuaguucc

SEQ ID NO: 3176389 - RNA, 19 nt, Artificial Sequence
  Description of Artificial Sequence: Synthetic oligonucleotide
uuuaaucccagcacuuggg

SEQ ID NO: 3176390 - RNA, 19 nt, Artificial Sequence
  Description of Artificial Sequence: Synthetic oligonucleotide
aagaaacaacaugaaaagg

SEQ ID NO: 3176391 - RNA, 19 nt, Artificial Sequence
  Description of Artificial Sequence: Synthetic oligonucleotide
agaaacaacaugaaaagga

SEQ ID NO: 3176392 - RNA, 19 nt, Artificial Sequence
  Description of Artificial Sequence: Synthetic oligonucleotide
aacaacaugaaaaggaaaa

SEQ ID NO: 3176393 - RNA, 19 nt, Artificial Sequence
  Description of Artificial Sequence: Synthetic oligonucleotide
uucaaggccagccuggucu

SEQ ID NO: 3176394 - RNA, 19 nt, Artificial Sequence
  Description of Artificial Sequence: Synthetic oligonucleotide
acaccuuuaaucccagcac

SEQ ID NO: 3176395 - RNA, 19 nt, Artificial Sequence
  Description of Artificial Sequence: Synthetic oligonucleotide
aagagcuaguuccaggaca

SEQ ID NO: 3176396 - RNA, 19 nt, Artificial Sequence
  Description of Artificial Sequence: Synthetic oligonucleotide
gaucucugugaguucaagg

SEQ ID NO: 3176397 - RNA, 19 nt, Artificial Sequence
  Description of Artificial Sequence: Synthetic oligonucleotide
uacagagaaacccugucuc

SEQ ID NO: 3176398 - RNA, 19 nt, Artificial Sequence
  Description of Artificial Sequence: Synthetic oligonucleotide
uggcacacaccuuuaaucc

SEQ ID NO: 3176399 - RNA, 19 nt, Artificial Sequence
  Description of Artificial Sequence: Synthetic oligonucleotide
cuuuaaucccagcacuugg

SEQ ID NO: 3176400 - RNA, 19 nt, Artificial Sequence
  Description of Artificial Sequence: Synthetic oligonucleotide
ucuacaagagcuaguucca

SEQ ID NO: 3176401 - RNA, 19 nt, Artificial Sequence
  Description of Artificial Sequence: Synthetic oligonucleotide
uacaagagcuaguuccagg

SEQ ID NO: 3176402 - RNA, 19 nt, Artificial Sequence
  Description of Artificial Sequence: Synthetic oligonucleotide
ucucugugaguucaaggcc

SEQ ID NO: 3176403 - RNA, 19 nt, Artificial Sequence
  Description of Artificial Sequence: Synthetic oligonucleotide
ugaguucaaggccagccug

SEQ ID NO: 3176404 - RNA, 19 nt, Artificial Sequence
  Description of Artificial Sequence: Synthetic oligonucleotide
acagagaaacccugucucg

SEQ ID NO: 3176405 - RNA, 19 nt, Artificial Sequence
  Description of Artificial Sequence: Synthetic oligonucleotide
acaagagcuaguuccagga

SEQ ID NO: 3176406 - RNA, 19 nt, Artificial Sequence
  Description of Artificial Sequence: Synthetic oligonucleotide
agcuaguuccaggacagcc

SEQ ID NO: 3176407 - RNA, 19 nt, Artificial Sequence
  Description of Artificial Sequence: Synthetic oligonucleotide
agaaacccugucucgaaag

SEQ ID NO: 3176408 - RNA, 19 nt, Artificial Sequence
  Description of Artificial Sequence: Synthetic oligonucleotide
ugugaguucaaggccagcc

SEQ ID NO: 3176409 - RNA, 19 nt, Artificial Sequence
  Description of Artificial Sequence: Synthetic oligonucleotide
uuaaucccagcacuuggga

SEQ ID NO: 3176410 - RNA, 19 nt, Artificial Sequence
  Description of Artificial Sequence: Synthetic oligonucleotide
uuccaggacagccugcgcc

SEQ ID NO: 3176411 - RNA, 19 nt, Artificial Sequence
  Description of Artificial Sequence: Synthetic oligonucleotide
uaaucccagcacuugggag

SEQ ID NO: 3176412 - RNA, 19 nt, Artificial Sequence
  Description of Artificial Sequence: Synthetic oligonucleotide
gaaacaacaugaaaaggaa

SEQ ID NO: 3176413 - RNA, 19 nt, Artificial Sequence
  Description of Artificial Sequence: Synthetic oligonucleotide
uccaggacagccugcgccg

SEQ ID NO: 3176414 - RNA, 19 nt, Artificial Sequence
  Description of Artificial Sequence: Synthetic oligonucleotide
ucugugaguucaaggccag

SEQ ID NO: 3176415 - RNA, 19 nt, Artificial Sequence
  Description of Artificial Sequence: Synthetic oligonucleotide
aaaugagccgggugguggu

SEQ ID NO: 3176416 - RNA, 19 nt, Artificial Sequence
  Description of Artificial Sequence: Synthetic oligonucleotide
ugcgccgcuacagagaaac

SEQ ID NO: 3176417 - RNA, 19 nt, Artificial Sequence
  Description of Artificial Sequence: Synthetic oligonucleotide
guggcacacaccuuuaauc

SEQ ID NO: 3176418 - RNA, 19 nt, Artificial Sequence
  Description of Artificial Sequence: Synthetic oligonucleotide
agagcuaguuccaggacag

SEQ ID NO: 3176419 - RNA, 19 nt, Artificial Sequence
  Description of Artificial Sequence: Synthetic oligonucleotide
aaacaacaugaaaaggaaa

SEQ ID NO: 3176420 - RNA, 19 nt, Artificial Sequence
  Description of Artificial Sequence: Synthetic oligonucleotide
cuaguuccaggacagccug

SEQ ID NO: 3176421 - RNA, 19 nt, Artificial Sequence
  Description of Artificial Sequence: Synthetic oligonucleotide
aguuccaggacagccugcg

SEQ ID NO: 3176422 - RNA, 19 nt, Artificial Sequence
  Description of Artificial Sequence: Synthetic oligonucleotide
gaguucaaggccagccugg

SEQ ID NO: 3176423 - RNA, 19 nt, Artificial Sequence
  Description of Artificial Sequence: Synthetic oligonucleotide
cacaccuuuaaucccagca

SEQ ID NO: 3176424 - RNA, 19 nt, Artificial Sequence
  Description of Artificial Sequence: Synthetic oligonucleotide
acuugggaggcagaggcag

SEQ ID NO: 3176425 - RNA, 19 nt, Artificial Sequence
  Description of Artificial Sequence: Synthetic oligonucleotide
cucugugaguucaaggcca

SEQ ID NO: 3176426 - RNA, 19 nt, Artificial Sequence
  Description of Artificial Sequence: Synthetic oligonucleotide
gcacuugggaggcagaggc

SEQ ID NO: 3176427 - RNA, 19 nt, Artificial Sequence
  Description of Artificial Sequence: Synthetic oligonucleotide
gaaacccugucucgaaaga

SEQ ID NO: 3176428 - RNA, 19 nt, Artificial Sequence
  Description of Artificial Sequence: Synthetic oligonucleotide
aucccagcacuugggaggc

SEQ ID NO: 3176429 - RNA, 19 nt, Artificial Sequence
  Description of Artificial Sequence: Synthetic oligonucleotide
aaacccugucucgaaagaa

SEQ ID NO: 3176430 - RNA, 19 nt, Artificial Sequence
  Description of Artificial Sequence: Synthetic oligonucleotide
uggucuacaagagcuaguu

SEQ ID NO: 3176431 - RNA, 19 nt, Artificial Sequence
  Description of Artificial Sequence: Synthetic oligonucleotide
acacaccuuuaaucccagc

SEQ ID NO: 3176432 - RNA, 19 nt, Artificial Sequence
  Description of Artificial Sequence: Synthetic oligonucleotide
agccuggucuacaagagcu

SEQ ID NO: 3176433 - RNA, 19 nt, Artificial Sequence
  Description of Artificial Sequence: Synthetic oligonucleotide
cuugggaggcagaggcagg

SEQ ID NO: 3176434 - RNA, 19 nt, Artificial Sequence
  Description of Artificial Sequence: Synthetic oligonucleotide
agagaaacccugucucgaa

SEQ ID NO: 3176435 - RNA, 19 nt, Artificial Sequence
  Description of Artificial Sequence: Synthetic oligonucleotide
aacccugucucgaaagaaa

SEQ ID NO: 3176436 - RNA, 19 nt, Artificial Sequence
  Description of Artificial Sequence: Synthetic oligonucleotide
aggcagaucucugugaguu

SEQ ID NO: 3176437 - RNA, 19 nt, Artificial Sequence
  Description of Artificial Sequence: Synthetic oligonucleotide
caagagcuaguuccaggac

SEQ ID NO: 3176438 - RNA, 19 nt, Artificial Sequence
  Description of Artificial Sequence: Synthetic oligonucleotide
gcaggcagaucucugugag

SEQ ID NO: 3176439 - RNA, 19 nt, Artificial Sequence
  Description of Artificial Sequence: Synthetic oligonucleotide
agaucucugugaguucaag

SEQ ID NO: 3176440 - RNA, 19 nt, Artificial Sequence
  Description of Artificial Sequence: Synthetic oligonucleotide
uugggaggcagaggcaggc

SEQ ID NO: 3176441 - RNA, 19 nt, Artificial Sequence
  Description of Artificial Sequence: Synthetic oligonucleotide
aggcaggcagaucucugug

SEQ ID NO: 3176442 - RNA, 19 nt, Artificial Sequence
  Description of Artificial Sequence: Synthetic oligonucleotide
ggcacacaccuuuaauccc

SEQ ID NO: 3176443 - RNA, 19 nt, Artificial Sequence
  Description of Artificial Sequence: Synthetic oligonucleotide
cacacaccuuuaaucccag

SEQ ID NO: 3176444 - RNA, 19 nt, Artificial Sequence
  Description of Artificial Sequence: Synthetic oligonucleotide
acagccugcgccgcuacag

SEQ ID NO: 3176445 - RNA, 19 nt, Artificial Sequence
  Description of Artificial Sequence: Synthetic oligonucleotide
cuacaagagcuaguuccag

SEQ ID NO: 3176446 - RNA, 19 nt, Artificial Sequence
  Description of Artificial Sequence: Synthetic oligonucleotide
agcacuugggaggcagagg

SEQ ID NO: 3176447 - RNA, 19 nt, Artificial Sequence
  Description of Artificial Sequence: Synthetic oligonucleotide
uaguuccaggacagccugc

SEQ ID NO: 3176448 - RNA, 19 nt, Artificial Sequence
  Description of Artificial Sequence: Synthetic oligonucleotide
guggugguggcacacaccu

SEQ ID NO: 3176449 - RNA, 19 nt, Artificial Sequence
  Description of Artificial Sequence: Synthetic oligonucleotide
gagaaacccugucucgaaa

SEQ ID NO: 3176450 - RNA, 19 nt, Artificial Sequence
  Description of Artificial Sequence: Synthetic oligonucleotide
agccugcgccgcuacagag

SEQ ID NO: 3176451 - RNA, 19 nt, Artificial Sequence
  Description of Artificial Sequence: Synthetic oligonucleotide
aaugagccgggugguggug

SEQ ID NO: 3176452 - RNA, 19 nt, Artificial Sequence
  Description of Artificial Sequence: Synthetic oligonucleotide
ggcagaggcaggcagaucu

SEQ ID NO: 3176453 - RNA, 19 nt, Artificial Sequence
  Description of Artificial Sequence: Synthetic oligonucleotide
cagccuggucuacaagagc

SEQ ID NO: 3176454 - RNA, 19 nt, Artificial Sequence
  Description of Artificial Sequence: Synthetic oligonucleotide
gcuacagagaaacccuguc

SEQ ID NO: 3176455 - RNA, 19 nt, Artificial Sequence
  Description of Artificial Sequence: Synthetic oligonucleotide
augagccgggugguggugg

SEQ ID NO: 3176456 - RNA, 19 nt, Artificial Sequence
  Description of Artificial Sequence: Synthetic oligonucleotide
cuacagagaaacccugucu

SEQ ID NO: 3176457 - RNA, 19 nt, Artificial Sequence
  Description of Artificial Sequence: Synthetic oligonucleotide
ugguggcacacaccuuuaa

SEQ ID NO: 3176458 - RNA, 19 nt, Artificial Sequence
  Description of Artificial Sequence: Synthetic oligonucleotide
aaggccagccuggucuaca

SEQ ID NO: 3176459 - RNA, 19 nt, Artificial Sequence
  Description of Artificial Sequence: Synthetic oligonucleotide
ucaaggccagccuggucua

SEQ ID NO: 3176460 - RNA, 19 nt, Artificial Sequence
  Description of Artificial Sequence: Synthetic oligonucleotide
agccggguggugguggcac

SEQ ID NO: 3176461 - RNA, 19 nt, Artificial Sequence
  Description of Artificial Sequence: Synthetic oligonucleotide
gggaggcagaggcaggcag

SEQ ID NO: 3176462 - RNA, 19 nt, Artificial Sequence
  Description of Artificial Sequence: Synthetic oligonucleotide
ugagccggguggugguggc

SEQ ID NO: 3176463 - RNA, 19 nt, Artificial Sequence
  Description of Artificial Sequence: Synthetic oligonucleotide
aguucaaggccagccuggu

SEQ ID NO: 3176464 - RNA, 19 nt, Artificial Sequence
  Description of Artificial Sequence: Synthetic oligonucleotide
ccagccuggucuacaagag

SEQ ID NO: 3176465 - RNA, 19 nt, Artificial Sequence
  Description of Artificial Sequence: Synthetic oligonucleotide
cagagaaacccugucucga

SEQ ID NO: 3176466 - RNA, 19 nt, Artificial Sequence
  Description of Artificial Sequence: Synthetic oligonucleotide
gccagccuggucuacaaga

SEQ ID NO: 3176467 - RNA, 19 nt, Artificial Sequence
  Description of Artificial Sequence: Synthetic oligonucleotide
caccuuuaaucccagcacu

SEQ ID NO: 3176468 - RNA, 19 nt, Artificial Sequence
  Description of Artificial Sequence: Synthetic oligonucleotide
cagcacuugggaggcagag

SEQ ID NO: 3176469 - RNA, 19 nt, Artificial Sequence
  Description of Artificial Sequence: Synthetic oligonucleotide
gaggcaggcagaucucugu

SEQ ID NO: 3176470 - RNA, 19 nt, Artificial Sequence
  Description of Artificial Sequence: Synthetic oligonucleotide
gcagaucucugugaguuca

SEQ ID NO: 3176471 - RNA, 19 nt, Artificial Sequence
  Description of Artificial Sequence: Synthetic oligonucleotide
acccugucucgaaagaaaa

SEQ ID NO: 3176472 - RNA, 19 nt, Artificial Sequence
  Description of Artificial Sequence: Synthetic oligonucleotide
agaggcaggcagaucucug

SEQ ID NO: 3176473 - RNA, 19 nt, Artificial Sequence
  Description of Artificial Sequence: Synthetic oligonucleotide
accuuuaaucccagcacuu

SEQ ID NO: 3176474 - RNA, 19 nt, Artificial Sequence
  Description of Artificial Sequence: Synthetic oligonucleotide
gugaguucaaggccagccu

SEQ ID NO: 3176475 - RNA, 19 nt, Artificial Sequence
  Description of Artificial Sequence: Synthetic oligonucleotide
guuccaggacagccugcgc

SEQ ID NO: 3176476 - RNA, 19 nt, Artificial Sequence
  Description of Artificial Sequence: Synthetic oligonucleotide
ccuggucuacaagagcuag

SEQ ID NO: 3176477 - RNA, 19 nt, Artificial Sequence
  Description of Artificial Sequence: Synthetic oligonucleotide
ccuuuaaucccagcacuug

SEQ ID NO: 3176478 - RNA, 19 nt, Artificial Sequence
  Description of Artificial Sequence: Synthetic oligonucleotide
ggucuacaagagcuaguuc

SEQ ID NO: 3176479 - RNA, 19 nt, Artificial Sequence
  Description of Artificial Sequence: Synthetic oligonucleotide
gcacacaccuuuaauccca

SEQ ID NO: 3176480 - RNA, 19 nt, Artificial Sequence
  Description of Artificial Sequence: Synthetic oligonucleotide
guucaaggccagccugguc

SEQ ID NO: 3176481 - RNA, 19 nt, Artificial Sequence
  Description of Artificial Sequence: Synthetic oligonucleotide
gagcuaguuccaggacagc

SEQ ID NO: 3176482 - RNA, 19 nt, Artificial Sequence
  Description of Artificial Sequence: Synthetic oligonucleotide
ggugguggcacacaccuuu

SEQ ID NO: 3176483 - RNA, 19 nt, Artificial Sequence
  Description of Artificial Sequence: Synthetic oligonucleotide
aggccagccuggucuacaa

SEQ ID NO: 3176484 - RNA, 19 nt, Artificial Sequence
  Description of Artificial Sequence: Synthetic oligonucleotide
gauuucaccaaauucaaag

SEQ ID NO: 3176485 - RNA, 19 nt, Artificial Sequence
  Description of Artificial Sequence: Synthetic oligonucleotide
aaggagaugguccaaggcc

SEQ ID NO: 3176486 - RNA, 19 nt, Artificial Sequence
  Description of Artificial Sequence: Synthetic oligonucleotide
aaaacccaaugauucaucc

SEQ ID NO: 3176487 - RNA, 19 nt, Artificial Sequence
  Description of Artificial Sequence: Synthetic oligonucleotide
aaugacaucaacugcagcu

SEQ ID NO: 3176488 - RNA, 19 nt, Artificial Sequence
  Description of Artificial Sequence: Synthetic oligonucleotide
gaaacuaccucugagacag

SEQ ID NO: 3176489 - RNA, 19 nt, Artificial Sequence
  Description of Artificial Sequence: Synthetic oligonucleotide
gauucauccguucagguag

SEQ ID NO: 3176490 - RNA, 19 nt, Artificial Sequence
  Description of Artificial Sequence: Synthetic oligonucleotide
aauuucuaaaacccaauga

SEQ ID NO: 3176491 - RNA, 19 nt, Artificial Sequence
  Description of Artificial Sequence: Synthetic oligonucleotide
aauuacacguaagaaaguc

SEQ ID NO: 3176492 - RNA, 19 nt, Artificial Sequence
  Description of Artificial Sequence: Synthetic oligonucleotide
auuucaccaaauucaaagc

SEQ ID NO: 3176493 - RNA, 19 nt, Artificial Sequence
  Description of Artificial Sequence: Synthetic oligonucleotide
uucuuguucaguuauuucc

SEQ ID NO: 3176494 - RNA, 19 nt, Artificial Sequence
  Description of Artificial Sequence: Synthetic oligonucleotide
aacacuagaucuugugugg

SEQ ID NO: 3176495 - RNA, 19 nt, Artificial Sequence
  Description of Artificial Sequence: Synthetic oligonucleotide
uucuaaaacccaaugauuc

SEQ ID NO: 3176496 - RNA, 19 nt, Artificial Sequence
  Description of Artificial Sequence: Synthetic oligonucleotide
acauucacaauuucuagag

SEQ ID NO: 3176497 - RNA, 19 nt, Artificial Sequence
  Description of Artificial Sequence: Synthetic oligonucleotide
auuucuaaaacccaaugau

SEQ ID NO: 3176498 - RNA, 19 nt, Artificial Sequence
  Description of Artificial Sequence: Synthetic oligonucleotide
agucaugaacacuagaucu

SEQ ID NO: 3176499 - RNA, 19 nt, Artificial Sequence
  Description of Artificial Sequence: Synthetic oligonucleotide
ucaccuggcucacagagcg

SEQ ID NO: 3176500 - RNA, 19 nt, Artificial Sequence
  Description of Artificial Sequence: Synthetic oligonucleotide
aacccaaugauucauccgu

SEQ ID NO: 3176501 - RNA, 19 nt, Artificial Sequence
  Description of Artificial Sequence: Synthetic oligonucleotide
uuucaccaaauucaaagca

SEQ ID NO: 3176502 - RNA, 19 nt, Artificial Sequence
  Description of Artificial Sequence: Synthetic oligonucleotide
auucacaauuucuagaggu

SEQ ID NO: 3176503 - RNA, 19 nt, Artificial Sequence
  Description of Artificial Sequence: Synthetic oligonucleotide
aaauucaaagcacugucau

SEQ ID NO: 3176504 - RNA, 19 nt, Artificial Sequence
  Description of Artificial Sequence: Synthetic oligonucleotide
uguucaguuauuuccuggg

SEQ ID NO: 3176505 - RNA, 19 nt, Artificial Sequence
  Description of Artificial Sequence: Synthetic oligonucleotide
uuuacuuccucagacaaca

SEQ ID NO: 3176506 - RNA, 19 nt, Artificial Sequence
  Description of Artificial Sequence: Synthetic oligonucleotide
uuacacguaagaaagucac

SEQ ID NO: 3176507 - RNA, 19 nt, Artificial Sequence
  Description of Artificial Sequence: Synthetic oligonucleotide
aaugauucauccguucagg

SEQ ID NO: 3176508 - RNA, 19 nt, Artificial Sequence
  Description of Artificial Sequence: Synthetic oligonucleotide
gaacacuagaucuugugug

SEQ ID NO: 3176509 - RNA, 19 nt, Artificial Sequence
  Description of Artificial Sequence: Synthetic oligonucleotide
auucaaagcacugucauug

SEQ ID NO: 3176510 - RNA, 19 nt, Artificial Sequence
  Description of Artificial Sequence: Synthetic oligonucleotide
acguaagaaagucaccugg

SEQ ID NO: 3176511 - RNA, 19 nt, Artificial Sequence
  Description of Artificial Sequence: Synthetic oligonucleotide
aaacccaaugauucauccg

SEQ ID NO: 3176512 - RNA, 19 nt, Artificial Sequence
  Description of Artificial Sequence: Synthetic oligonucleotide
uacccaaggaauuacacgu

SEQ ID NO: 3176513 - RNA, 19 nt, Artificial Sequence
  Description of Artificial Sequence: Synthetic oligonucleotide
ggaauuacacguaagaaag

SEQ ID NO: 3176514 - RNA, 19 nt, Artificial Sequence
  Description of Artificial Sequence: Synthetic oligonucleotide
ucuuguguggucuggaaug

SEQ ID NO: 3176515 - RNA, 19 nt, Artificial Sequence
  Description of Artificial Sequence: Synthetic oligonucleotide
ucagacaacauuccuccag

SEQ ID NO: 3176516 - RNA, 19 nt, Artificial Sequence
  Description of Artificial Sequence: Synthetic oligonucleotide
uugagaaacuaccucugag

SEQ ID NO: 3176517 - RNA, 19 nt, Artificial Sequence
  Description of Artificial Sequence: Synthetic oligonucleotide
cauauugccuccaaccacc

SEQ ID NO: 3176518 - RNA, 19 nt, Artificial Sequence
  Description of Artificial Sequence: Synthetic oligonucleotide
ucacaauuucuagaggugg

SEQ ID NO: 3176519 - RNA, 19 nt, Artificial Sequence
  Description of Artificial Sequence: Synthetic oligonucleotide
ugaguaaaucuucugguaa

SEQ ID NO: 3176520 - RNA, 19 nt, Artificial Sequence
  Description of Artificial Sequence: Synthetic oligonucleotide
auacccaaggaauuacacg

SEQ ID NO: 3176521 - RNA, 19 nt, Artificial Sequence
  Description of Artificial Sequence: Synthetic oligonucleotide
cuaccucugagacagauac

SEQ ID NO: 3176522 - RNA, 19 nt, Artificial Sequence
  Description of Artificial Sequence: Synthetic oligonucleotide
ugagaaacuaccucugaga

SEQ ID NO: 3176523 - RNA, 19 nt, Artificial Sequence
  Description of Artificial Sequence: Synthetic oligonucleotide
uucaccaaauucaaagcac

SEQ ID NO: 3176524 - RNA, 19 nt, Artificial Sequence
  Description of Artificial Sequence: Synthetic oligonucleotide
auacauucacaauuucuag

SEQ ID NO: 3176525 - RNA, 19 nt, Artificial Sequence
  Description of Artificial Sequence: Synthetic oligonucleotide
ucuuguucaguuauuuccu

SEQ ID NO: 3176526 - RNA, 19 nt, Artificial Sequence
  Description of Artificial Sequence: Synthetic oligonucleotide
ugaacacuagaucuugugu

SEQ ID NO: 3176527 - RNA, 19 nt, Artificial Sequence
  Description of Artificial Sequence: Synthetic oligonucleotide
uggagauuucaccaaauuc

SEQ ID NO: 3176528 - RNA, 19 nt, Artificial Sequence
  Description of Artificial Sequence: Synthetic oligonucleotide
gagaaacuaccucugagac

SEQ ID NO: 3176529 - RNA, 19 nt, Artificial Sequence
  Description of Artificial Sequence: Synthetic oligonucleotide
cucugagacagauacauuc

SEQ ID NO: 3176530 - RNA, 19 nt, Artificial Sequence
  Description of Artificial Sequence: Synthetic oligonucleotide
aggaauuacacguaagaaa

SEQ ID NO: 3176531 - RNA, 19 nt, Artificial Sequence
  Description of Artificial Sequence: Synthetic oligonucleotide
uaaaucuucugguaacugu

SEQ ID NO: 3176532 - RNA, 19 nt, Artificial Sequence
  Description of Artificial Sequence: Synthetic oligonucleotide
acuuccucagacaacauuc

SEQ ID NO: 3176533 - RNA, 19 nt, Artificial Sequence
  Description of Artificial Sequence: Synthetic oligonucleotide
aaaucuucugguaacugug

SEQ ID NO: 3176534 - RNA, 19 nt, Artificial Sequence
  Description of Artificial Sequence: Synthetic oligonucleotide
uccaauuucuaaaacccaa

SEQ ID NO: 3176535 - RNA, 19 nt, Artificial Sequence
  Description of Artificial Sequence: Synthetic oligonucleotide
ucuaaaacccaaugauuca

SEQ ID NO: 3176536 - RNA, 19 nt, Artificial Sequence
  Description of Artificial Sequence: Synthetic oligonucleotide
uacauucacaauuucuaga

SEQ ID NO: 3176537 - RNA, 19 nt, Artificial Sequence
  Description of Artificial Sequence: Synthetic oligonucleotide
ugcuugagaaacuaccucu

SEQ ID NO: 3176538 - RNA, 19 nt, Artificial Sequence
  Description of Artificial Sequence: Synthetic oligonucleotide
agguggugaucccauaccc

SEQ ID NO: 3176539 - RNA, 19 nt, Artificial Sequence
  Description of Artificial Sequence: Synthetic oligonucleotide
ucugagacagauacauuca

SEQ ID NO: 3176540 - RNA, 19 nt, Artificial Sequence
  Description of Artificial Sequence: Synthetic oligonucleotide
uuguucaguuauuuccugg

SEQ ID NO: 3176541 - RNA, 19 nt, Artificial Sequence
  Description of Artificial Sequence: Synthetic oligonucleotide
cauuccuccagccaacagg

SEQ ID NO: 3176542 - RNA, 19 nt, Artificial Sequence
  Description of Artificial Sequence: Synthetic oligonucleotide
auugucuucacuugcuuga

SEQ ID NO: 3176543 - RNA, 19 nt, Artificial Sequence
  Description of Artificial Sequence: Synthetic oligonucleotide
uuucuagagguggugaucc

SEQ ID NO: 3176544 - RNA, 19 nt, Artificial Sequence
  Description of Artificial Sequence: Synthetic oligonucleotide
ucaccaaauucaaagcacu

SEQ ID NO: 3176545 - RNA, 19 nt, Artificial Sequence
  Description of Artificial Sequence: Synthetic oligonucleotide
auugccuccaaccaccuga

SEQ ID NO: 3176546 - RNA, 19 nt, Artificial Sequence
  Description of Artificial Sequence: Synthetic oligonucleotide
gacaaagucaacaaggucu

SEQ ID NO: 3176547 - RNA, 19 nt, Artificial Sequence
  Description of Artificial Sequence: Synthetic oligonucleotide
uccauauugccuccaacca

SEQ ID NO: 3176548 - RNA, 19 nt, Artificial Sequence
  Description of Artificial Sequence: Synthetic oligonucleotide
cuggaaggcaaggagaugg

SEQ ID NO: 3176549 - RNA, 19 nt, Artificial Sequence
  Description of Artificial Sequence: Synthetic oligonucleotide
uuucuaaaacccaaugauu

SEQ ID NO: 3176550 - RNA, 19 nt, Artificial Sequence
  Description of Artificial Sequence: Synthetic oligonucleotide
ugucauugucuucacuugc

SEQ ID NO: 3176551 - RNA, 19 nt, Artificial Sequence
  Description of Artificial Sequence: Synthetic oligonucleotide
gagacagauacauucacaa

SEQ ID NO: 3176552 - RNA, 19 nt, Artificial Sequence
  Description of Artificial Sequence: Synthetic oligonucleotide
ugguccaaggccugaaggg

SEQ ID NO: 3176553 - RNA, 19 nt, Artificial Sequence
  Description of Artificial Sequence: Synthetic oligonucleotide
acugucguggacuccacuc

SEQ ID NO: 3176554 - RNA, 19 nt, Artificial Sequence
  Description of Artificial Sequence: Synthetic oligonucleotide
auguccgugugacaaaguc

SEQ ID NO: 3176555 - RNA, 19 nt, Artificial Sequence
  Description of Artificial Sequence: Synthetic oligonucleotide
guccauauugccuccaacc

SEQ ID NO: 3176556 - RNA, 19 nt, Artificial Sequence
  Description of Artificial Sequence: Synthetic oligonucleotide
uucccuuuuacuuccucag

SEQ ID NO: 3176557 - RNA, 19 nt, Artificial Sequence
  Description of Artificial Sequence: Synthetic oligonucleotide
gaaggcaaggagauggucc

SEQ ID NO: 3176558 - RNA, 19 nt, Artificial Sequence
  Description of Artificial Sequence: Synthetic oligonucleotide
aauuucuagagguggugau

SEQ ID NO: 3176559 - RNA, 19 nt, Artificial Sequence
  Description of Artificial Sequence: Synthetic oligonucleotide
aucaacugcagcuucuugu

SEQ ID NO: 3176560 - RNA, 19 nt, Artificial Sequence
  Description of Artificial Sequence: Synthetic oligonucleotide
aaagucaacaaggucugga

SEQ ID NO: 3176561 - RNA, 19 nt, Artificial Sequence
  Description of Artificial Sequence: Synthetic oligonucleotide
acaacauuccuccagccaa

SEQ ID NO: 3176562 - RNA, 19 nt, Artificial Sequence
  Description of Artificial Sequence: Synthetic oligonucleotide
caauuucuaaaacccaaug

SEQ ID NO: 3176563 - RNA, 19 nt, Artificial Sequence
  Description of Artificial Sequence: Synthetic oligonucleotide
uagucaugaacacuagauc

SEQ ID NO: 3176564 - RNA, 19 nt, Artificial Sequence
  Description of Artificial Sequence: Synthetic oligonucleotide
agacaacauuccuccagcc

SEQ ID NO: 3176565 - RNA, 19 nt, Artificial Sequence
  Description of Artificial Sequence: Synthetic oligonucleotide
gagguuggagauuucacca

SEQ ID NO: 3176566 - RNA, 19 nt, Artificial Sequence
  Description of Artificial Sequence: Synthetic oligonucleotide
cuucacuugcuugagaaac

SEQ ID NO: 3176567 - RNA, 19 nt, Artificial Sequence
  Description of Artificial Sequence: Synthetic oligonucleotide
aaggaauuacacguaagaa

SEQ ID NO: 3176568 - RNA, 19 nt, Artificial Sequence
  Description of Artificial Sequence: Synthetic oligonucleotide
uguagucaugaacacuaga

SEQ ID NO: 3176569 - RNA, 19 nt, Artificial Sequence
  Description of Artificial Sequence: Synthetic oligonucleotide
aucuucugguaacugugac

SEQ ID NO: 3176570 - RNA, 19 nt, Artificial Sequence
  Description of Artificial Sequence: Synthetic oligonucleotide
augguccaaggccugaagg

SEQ ID NO: 3176571 - RNA, 19 nt, Artificial Sequence
  Description of Artificial Sequence: Synthetic oligonucleotide
uccuccagccaacagguca

SEQ ID NO: 3176572 - RNA, 19 nt, Artificial Sequence
  Description of Artificial Sequence: Synthetic oligonucleotide
aagucaacaaggucuggaa

SEQ ID NO: 3176573 - RNA, 19 nt, Artificial Sequence
  Description of Artificial Sequence: Synthetic oligonucleotide
augaacacuagaucuugug

SEQ ID NO: 3176574 - RNA, 19 nt, Artificial Sequence
  Description of Artificial Sequence: Synthetic oligonucleotide
ucucuuuuggagcuccaga

SEQ ID NO: 3176575 - RNA, 19 nt, Artificial Sequence
  Description of Artificial Sequence: Synthetic oligonucleotide
agucaacaaggucuggaag

SEQ ID NO: 3176576 - RNA, 19 nt, Artificial Sequence
  Description of Artificial Sequence: Synthetic oligonucleotide
uguguggucuggaaugaca

SEQ ID NO: 3176577 - RNA, 19 nt, Artificial Sequence
  Description of Artificial Sequence: Synthetic oligonucleotide
ucacagagcggagagcacg

SEQ ID NO: 3176578 - RNA, 19 nt, Artificial Sequence
  Description of Artificial Sequence: Synthetic oligonucleotide
ggagauuucaccaaauuca

SEQ ID NO: 3176579 - RNA, 19 nt, Artificial Sequence
  Description of Artificial Sequence: Synthetic oligonucleotide
uguccgugugacaaaguca

SEQ ID NO: 3176580 - RNA, 19 nt, Artificial Sequence
  Description of Artificial Sequence: Synthetic oligonucleotide
acacguaagaaagucaccu

SEQ ID NO: 3176581 - RNA, 19 nt, Artificial Sequence
  Description of Artificial Sequence: Synthetic oligonucleotide
aaagcacugucauugucuu

SEQ ID NO: 3176582 - RNA, 19 nt, Artificial Sequence
  Description of Artificial Sequence: Synthetic oligonucleotide
cauacccaaggaauuacac

SEQ ID NO: 3176583 - RNA, 19 nt, Artificial Sequence
  Description of Artificial Sequence: Synthetic oligonucleotide
gacguucccuuuuacuucc

SEQ ID NO: 3176584 - RNA, 19 nt, Artificial Sequence
  Description of Artificial Sequence: Synthetic oligonucleotide
aauauaaacaauuuguauc

SEQ ID NO: 3176585 - RNA, 19 nt, Artificial Sequence
  Description of Artificial Sequence: Synthetic oligonucleotide
aucagaaugaccuucaugc

SEQ ID NO: 3176586 - RNA, 19 nt, Artificial Sequence
  Description of Artificial Sequence: Synthetic oligonucleotide
auauaaacaauuuguaucc

SEQ ID NO: 3176587 - RNA, 19 nt, Artificial Sequence
  Description of Artificial Sequence: Synthetic oligonucleotide
aauguuuucaucaaugacg

SEQ ID NO: 3176588 - RNA, 19 nt, Artificial Sequence
  Description of Artificial Sequence: Synthetic oligonucleotide
uuggguauaagacauaggc

SEQ ID NO: 3176589 - RNA, 19 nt, Artificial Sequence
  Description of Artificial Sequence: Synthetic oligonucleotide
aaacaauuuguauccacac

SEQ ID NO: 3176590 - RNA, 19 nt, Artificial Sequence
  Description of Artificial Sequence: Synthetic oligonucleotide
uugagaaagccaaagcugg

SEQ ID NO: 3176591 - RNA, 19 nt, Artificial Sequence
  Description of Artificial Sequence: Synthetic oligonucleotide
aggacaaucagucuucuac

SEQ ID NO: 3176592 - RNA, 19 nt, Artificial Sequence
  Description of Artificial Sequence: Synthetic oligonucleotide
aaauauaaacaauuuguau

SEQ ID NO: 3176593 - RNA, 19 nt, Artificial Sequence
  Description of Artificial Sequence: Synthetic oligonucleotide
uuuucaucaaugacguugg

SEQ ID NO: 3176594 - RNA, 19 nt, Artificial Sequence
  Description of Artificial Sequence: Synthetic oligonucleotide
ucaucaaugacguuggcca

SEQ ID NO: 3176595 - RNA, 19 nt, Artificial Sequence
  Description of Artificial Sequence: Synthetic oligonucleotide
acaauuuguauccacacug

SEQ ID NO: 3176596 - RNA, 19 nt, Artificial Sequence
  Description of Artificial Sequence: Synthetic oligonucleotide
aucccugccaaauauaaac

SEQ ID NO: 3176597 - RNA, 19 nt, Artificial Sequence
  Description of Artificial Sequence: Synthetic oligonucleotide
uuuguauccacacugcuuc

SEQ ID NO: 3176598 - RNA, 19 nt, Artificial Sequence
  Description of Artificial Sequence: Synthetic oligonucleotide
auaaacaauuuguauccac

SEQ ID NO: 3176599 - RNA, 19 nt, Artificial Sequence
  Description of Artificial Sequence: Synthetic oligonucleotide
aguucaaucagaaugaccu

SEQ ID NO: 3176600 - RNA, 19 nt, Artificial Sequence
  Description of Artificial Sequence: Synthetic oligonucleotide
uaagacauaggcaucguac

SEQ ID NO: 3176601 - RNA, 19 nt, Artificial Sequence
  Description of Artificial Sequence: Synthetic oligonucleotide
agcugggugauucuggugc

SEQ ID NO: 3176602 - RNA, 19 nt, Artificial Sequence
  Description of Artificial Sequence: Synthetic oligonucleotide
uaaacaauuuguauccaca

SEQ ID NO: 3176603 - RNA, 19 nt, Artificial Sequence
  Description of Artificial Sequence: Synthetic oligonucleotide
auaggcaucguacaucuuc

SEQ ID NO: 3176604 - RNA, 19 nt, Artificial Sequence
  Description of Artificial Sequence: Synthetic oligonucleotide
ucugacaugugcuugagaa

SEQ ID NO: 3176605 - RNA, 19 nt, Artificial Sequence
  Description of Artificial Sequence: Synthetic oligonucleotide
ucuucuacacaguuuaaug

SEQ ID NO: 3176606 - RNA, 19 nt, Artificial Sequence
  Description of Artificial Sequence: Synthetic oligonucleotide
caaucagucuucuacacag

SEQ ID NO: 3176607 - RNA, 19 nt, Artificial Sequence
  Description of Artificial Sequence: Synthetic oligonucleotide
ugauucuggugccacaagg

SEQ ID NO: 3176608 - RNA, 19 nt, Artificial Sequence
  Description of Artificial Sequence: Synthetic oligonucleotide
uuaauguuuucaucaauga

SEQ ID NO: 3176609 - RNA, 19 nt, Artificial Sequence
  Description of Artificial Sequence: Synthetic oligonucleotide
guuuucaucaaugacguug

SEQ ID NO: 3176610 - RNA, 19 nt, Artificial Sequence
  Description of Artificial Sequence: Synthetic oligonucleotide
caucguguccauaucaugg

SEQ ID NO: 3176611 - RNA, 19 nt, Artificial Sequence
  Description of Artificial Sequence: Synthetic oligonucleotide
ucaggcaggaucuucaaca

SEQ ID NO: 3176612 - RNA, 19 nt, Artificial Sequence
  Description of Artificial Sequence: Synthetic oligonucleotide
cuugagaaagccaaagcug

SEQ ID NO: 3176613 - RNA, 19 nt, Artificial Sequence
  Description of Artificial Sequence: Synthetic oligonucleotide
ugacaugugcuugagaaag

SEQ ID NO: 3176614 - RNA, 19 nt, Artificial Sequence
  Description of Artificial Sequence: Synthetic oligonucleotide
uccaguucaaucagaauga

SEQ ID NO: 3176615 - RNA, 19 nt, Artificial Sequence
  Description of Artificial Sequence: Synthetic oligonucleotide
uuguccagggaauucaucc

SEQ ID NO: 3176616 - RNA, 19 nt, Artificial Sequence
  Description of Artificial Sequence: Synthetic oligonucleotide
auaguccuugacuuucucc

SEQ ID NO: 3176617 - RNA, 19 nt, Artificial Sequence
  Description of Artificial Sequence: Synthetic oligonucleotide
aaucagaaugaccuucaug

SEQ ID NO: 3176618 - RNA, 19 nt, Artificial Sequence
  Description of Artificial Sequence: Synthetic oligonucleotide
uaauguuuucaucaaugac

SEQ ID NO: 3176619 - RNA, 19 nt, Artificial Sequence
  Description of Artificial Sequence: Synthetic oligonucleotide
acaguuuaauguuuucauc

SEQ ID NO: 3176620 - RNA, 19 nt, Artificial Sequence
  Description of Artificial Sequence: Synthetic oligonucleotide
aagacauaggcaucguaca

SEQ ID NO: 3176621 - RNA, 19 nt, Artificial Sequence
  Description of Artificial Sequence: Synthetic oligonucleotide
aacaauuuguauccacacu

SEQ ID NO: 3176622 - RNA, 19 nt, Artificial Sequence
  Description of Artificial Sequence: Synthetic oligonucleotide
ugaucuucugacaugugcu

SEQ ID NO: 3176623 - RNA, 19 nt, Artificial Sequence
  Description of Artificial Sequence: Synthetic oligonucleotide
uucucuugggcacuuuggg

SEQ ID NO: 3176624 - RNA, 19 nt, Artificial Sequence
  Description of Artificial Sequence: Synthetic oligonucleotide
acuuucuccaguucaauca

SEQ ID NO: 3176625 - RNA, 19 nt, Artificial Sequence
  Description of Artificial Sequence: Synthetic oligonucleotide
aacaccaucguguccauau

SEQ ID NO: 3176626 - RNA, 19 nt, Artificial Sequence
  Description of Artificial Sequence: Synthetic oligonucleotide
aauuuguauccacacugcu

SEQ ID NO: 3176627 - RNA, 19 nt, Artificial Sequence
  Description of Artificial Sequence: Synthetic oligonucleotide
agcgaucugaucuucugac

SEQ ID NO: 3176628 - RNA, 19 nt, Artificial Sequence
  Description of Artificial Sequence: Synthetic oligonucleotide
uguaaaguccccaucccac

SEQ ID NO: 3176629 - RNA, 19 nt, Artificial Sequence
  Description of Artificial Sequence: Synthetic oligonucleotide
aaugacguuggccaccgcu

SEQ ID NO: 3176630 - RNA, 19 nt, Artificial Sequence
  Description of Artificial Sequence: Synthetic oligonucleotide
aggaucuucaacaccaucg

SEQ ID NO: 3176631 - RNA, 19 nt, Artificial Sequence
  Description of Artificial Sequence: Synthetic oligonucleotide
guauaagacauaggcaucg

SEQ ID NO: 3176632 - RNA, 19 nt, Artificial Sequence
  Description of Artificial Sequence: Synthetic oligonucleotide
uuucucuugggcacuuugg

SEQ ID NO: 3176633 - RNA, 19 nt, Artificial Sequence
  Description of Artificial Sequence: Synthetic oligonucleotide
aaugaccuucaugccaucc

SEQ ID NO: 3176634 - RNA, 19 nt, Artificial Sequence
  Description of Artificial Sequence: Synthetic oligonucleotide
aucguguccauaucauggc

SEQ ID NO: 3176635 - RNA, 19 nt, Artificial Sequence
  Description of Artificial Sequence: Synthetic oligonucleotide
uaguccuugacuuucucca

SEQ ID NO: 3176636 - RNA, 19 nt, Artificial Sequence
  Description of Artificial Sequence: Synthetic oligonucleotide
uucaacaccaucgugucca

SEQ ID NO: 3176637 - RNA, 19 nt, Artificial Sequence
  Description of Artificial Sequence: Synthetic oligonucleotide
uuuggguauaagacauagg

SEQ ID NO: 3176638 - RNA, 19 nt, Artificial Sequence
  Description of Artificial Sequence: Synthetic oligonucleotide
uacugaauggacucgggca

SEQ ID NO: 3176639 - RNA, 19 nt, Artificial Sequence
  Description of Artificial Sequence: Synthetic oligonucleotide
gagggcauuguagacagcg

SEQ ID NO: 3176640 - RNA, 19 nt, Artificial Sequence
  Description of Artificial Sequence: Synthetic oligonucleotide
aaaguccccaucccacugg

SEQ ID NO: 3176641 - RNA, 19 nt, Artificial Sequence
  Description of Artificial Sequence: Synthetic oligonucleotide
auucuggugccacaaggac

SEQ ID NO: 3176642 - RNA, 19 nt, Artificial Sequence
  Description of Artificial Sequence: Synthetic oligonucleotide
ucuggugccacaaggacaa

SEQ ID NO: 3176643 - RNA, 19 nt, Artificial Sequence
  Description of Artificial Sequence: Synthetic oligonucleotide
caguuuaauguuuucauca

SEQ ID NO: 3176644 - RNA, 19 nt, Artificial Sequence
  Description of Artificial Sequence: Synthetic oligonucleotide
ucaaucagaaugaccuuca

SEQ ID NO: 3176645 - RNA, 19 nt, Artificial Sequence
  Description of Artificial Sequence: Synthetic oligonucleotide
ucuccagcaccucaggcag

SEQ ID NO: 3176646 - RNA, 19 nt, Artificial Sequence
  Description of Artificial Sequence: Synthetic oligonucleotide
cucuguaaaguccccaucc

SEQ ID NO: 3176647 - RNA, 19 nt, Artificial Sequence
  Description of Artificial Sequence: Synthetic oligonucleotide
acuauaguccuugacuuuc

SEQ ID NO: 3176648 - RNA, 19 nt, Artificial Sequence
  Description of Artificial Sequence: Synthetic oligonucleotide
uggguauaagacauaggca

SEQ ID NO: 3176649 - RNA, 19 nt, Artificial Sequence
  Description of Artificial Sequence: Synthetic oligonucleotide
augagggcauuguagacag

SEQ ID NO: 3176650 - RNA, 19 nt, Artificial Sequence
  Description of Artificial Sequence: Synthetic oligonucleotide
ugagaaagccaaagcuggg

SEQ ID NO: 3176651 - RNA, 19 nt, Artificial Sequence
  Description of Artificial Sequence: Synthetic oligonucleotide
ucuguaaaguccccauccc

SEQ ID NO: 3176652 - RNA, 19 nt, Artificial Sequence
  Description of Artificial Sequence: Synthetic oligonucleotide
acauaggcaucguacaucu

SEQ ID NO: 3176653 - RNA, 19 nt, Artificial Sequence
  Description of Artificial Sequence: Synthetic oligonucleotide
cugaucuucugacaugugc

SEQ ID NO: 3176654 - RNA, 19 nt, Artificial Sequence
  Description of Artificial Sequence: Synthetic oligonucleotide
uguacugaauggacucggg

SEQ ID NO: 3176655 - RNA, 19 nt, Artificial Sequence
  Description of Artificial Sequence: Synthetic oligonucleotide
caauuuguauccacacugc

SEQ ID NO: 3176656 - RNA, 19 nt, Artificial Sequence
  Description of Artificial Sequence: Synthetic oligonucleotide
uggaugagggcauuguaga

SEQ ID NO: 3176657 - RNA, 19 nt, Artificial Sequence
  Description of Artificial Sequence: Synthetic oligonucleotide
ugcuugagaaagccaaagc

SEQ ID NO: 3176658 - RNA, 19 nt, Artificial Sequence
  Description of Artificial Sequence: Synthetic oligonucleotide
aaagcugggugauucuggu

SEQ ID NO: 3176659 - RNA, 19 nt, Artificial Sequence
  Description of Artificial Sequence: Synthetic oligonucleotide
cuuuggguauaagacauag

SEQ ID NO: 3176660 - RNA, 19 nt, Artificial Sequence
  Description of Artificial Sequence: Synthetic oligonucleotide
uucaucaaugacguuggcc

SEQ ID NO: 3176661 - RNA, 19 nt, Artificial Sequence
  Description of Artificial Sequence: Synthetic oligonucleotide
cuggaugagggcauuguag

SEQ ID NO: 3176662 - RNA, 19 nt, Artificial Sequence
  Description of Artificial Sequence: Synthetic oligonucleotide
agaaagccaaagcugggug

SEQ ID NO: 3176663 - RNA, 19 nt, Artificial Sequence
  Description of Artificial Sequence: Synthetic oligonucleotide
aauggacucgggcaugcca

SEQ ID NO: 3176664 - RNA, 19 nt, Artificial Sequence
  Description of Artificial Sequence: Synthetic oligonucleotide
ucaucccugccaaauauaa

SEQ ID NO: 3176665 - RNA, 19 nt, Artificial Sequence
  Description of Artificial Sequence: Synthetic oligonucleotide
uucuacacaguuuaauguu

SEQ ID NO: 3176666 - RNA, 19 nt, Artificial Sequence
  Description of Artificial Sequence: Synthetic oligonucleotide
uccccaucccacuggaugg

SEQ ID NO: 3176667 - RNA, 19 nt, Artificial Sequence
  Description of Artificial Sequence: Synthetic oligonucleotide
gauguacugaauggacucg

SEQ ID NO: 3176668 - RNA, 19 nt, Artificial Sequence
  Description of Artificial Sequence: Synthetic oligonucleotide
guagacagcgaucugaucu

SEQ ID NO: 3176669 - RNA, 19 nt, Artificial Sequence
  Description of Artificial Sequence: Synthetic oligonucleotide
uggcggauguacugaaugg

SEQ ID NO: 3176670 - RNA, 19 nt, Artificial Sequence
  Description of Artificial Sequence: Synthetic oligonucleotide
caaagcugggugauucugg

SEQ ID NO: 3176671 - RNA, 19 nt, Artificial Sequence
  Description of Artificial Sequence: Synthetic oligonucleotide
ucagaaugaccuucaugcc

SEQ ID NO: 3176672 - RNA, 19 nt, Artificial Sequence
  Description of Artificial Sequence: Synthetic oligonucleotide
uucuggugccacaaggaca

SEQ ID NO: 3176673 - RNA, 19 nt, Artificial Sequence
  Description of Artificial Sequence: Synthetic oligonucleotide
ucuucugacaugugcuuga

SEQ ID NO: 3176674 - RNA, 19 nt, Artificial Sequence
  Description of Artificial Sequence: Synthetic oligonucleotide
uucuccagcaccucaggca

SEQ ID NO: 3176675 - RNA, 19 nt, Artificial Sequence
  Description of Artificial Sequence: Synthetic oligonucleotide
aguuuaauguuuucaucaa

SEQ ID NO: 3176676 - RNA, 19 nt, Artificial Sequence
  Description of Artificial Sequence: Synthetic oligonucleotide
uaaaguccccaucccacug

SEQ ID NO: 3176677 - RNA, 19 nt, Artificial Sequence
  Description of Artificial Sequence: Synthetic oligonucleotide
ugaccuucaugccauccug

SEQ ID NO: 3176678 - RNA, 19 nt, Artificial Sequence
  Description of Artificial Sequence: Synthetic oligonucleotide
ucaaugacguuggccaccg

SEQ ID NO: 3176679 - RNA, 19 nt, Artificial Sequence
  Description of Artificial Sequence: Synthetic oligonucleotide
gacaaucagucuucuacac

SEQ ID NO: 3176680 - RNA, 19 nt, Artificial Sequence
  Description of Artificial Sequence: Synthetic oligonucleotide
ucuacacaguuuaauguuu

SEQ ID NO: 3176681 - RNA, 19 nt, Artificial Sequence
  Description of Artificial Sequence: Synthetic oligonucleotide
uuggcuuucucuugggcac

SEQ ID NO: 3176682 - RNA, 19 nt, Artificial Sequence
  Description of Artificial Sequence: Synthetic oligonucleotide
uucuccaguucaaucagaa

SEQ ID NO: 3176683 - RNA, 19 nt, Artificial Sequence
  Description of Artificial Sequence: Synthetic oligonucleotide
auguuuucaucaaugacgu

SEQ ID NO: 3176684 - RNA, 19 nt, Artificial Sequence
  Description of Artificial Sequence: Synthetic oligonucleotide
uuuaauuccauuacggaca

SEQ ID NO: 3176685 - RNA, 19 nt, Artificial Sequence
  Description of Artificial Sequence: Synthetic oligonucleotide
uccauuacggacaacaucc

SEQ ID NO: 3176686 - RNA, 19 nt, Artificial Sequence
  Description of Artificial Sequence: Synthetic oligonucleotide
gaaaggacuaucuaucugg

SEQ ID NO: 3176687 - RNA, 19 nt, Artificial Sequence
  Description of Artificial Sequence: Synthetic oligonucleotide
uuuacagccucacagauca

SEQ ID NO: 3176688 - RNA, 19 nt, Artificial Sequence
  Description of Artificial Sequence: Synthetic oligonucleotide
aaugaaaagagccagggua

SEQ ID NO: 3176689 - RNA, 19 nt, Artificial Sequence
  Description of Artificial Sequence: Synthetic oligonucleotide
aggacuaucuaucuggccc

SEQ ID NO: 3176690 - RNA, 19 nt, Artificial Sequence
  Description of Artificial Sequence: Synthetic oligonucleotide
gaucauucugacaugagcg

SEQ ID NO: 3176691 - RNA, 19 nt, Artificial Sequence
  Description of Artificial Sequence: Synthetic oligonucleotide
aauguacagagacaccagg

SEQ ID NO: 3176692 - RNA, 19 nt, Artificial Sequence
  Description of Artificial Sequence: Synthetic oligonucleotide
agaucauucugacaugagc

SEQ ID NO: 3176693 - RNA, 19 nt, Artificial Sequence
  Description of Artificial Sequence: Synthetic oligonucleotide
ucacagaucauucugacau

SEQ ID NO: 3176694 - RNA, 19 nt, Artificial Sequence
  Description of Artificial Sequence: Synthetic oligonucleotide
aacaacugcagcaugacag

SEQ ID NO: 3176695 - RNA, 19 nt, Artificial Sequence
  Description of Artificial Sequence: Synthetic oligonucleotide
aauuccauuacggacaaca

SEQ ID NO: 3176696 - RNA, 19 nt, Artificial Sequence
  Description of Artificial Sequence: Synthetic oligonucleotide
uagaagaacugguagaagc

SEQ ID NO: 3176697 - RNA, 19 nt, Artificial Sequence
  Description of Artificial Sequence: Synthetic oligonucleotide
aaagagccaggguaaaggg

SEQ ID NO: 3176698 - RNA, 19 nt, Artificial Sequence
  Description of Artificial Sequence: Synthetic oligonucleotide
aaaggggagccucagguuc

SEQ ID NO: 3176699 - RNA, 19 nt, Artificial Sequence
  Description of Artificial Sequence: Synthetic oligonucleotide
uuaauguacagagacacca

SEQ ID NO: 3176700 - RNA, 19 nt, Artificial Sequence
  Description of Artificial Sequence: Synthetic oligonucleotide
cuuggcuucauucuuuucg

SEQ ID NO: 3176701 - RNA, 19 nt, Artificial Sequence
  Description of Artificial Sequence: Synthetic oligonucleotide
uucguucaggcaaucaagg

SEQ ID NO: 3176702 - RNA, 19 nt, Artificial Sequence
  Description of Artificial Sequence: Synthetic oligonucleotide
cuguacagccucaagaugc

SEQ ID NO: 3176703 - RNA, 19 nt, Artificial Sequence
  Description of Artificial Sequence: Synthetic oligonucleotide
gcugcuaggacauaguagg

SEQ ID NO: 3176704 - RNA, 19 nt, Artificial Sequence
  Description of Artificial Sequence: Synthetic oligonucleotide
auucuuuucguucaggcaa

SEQ ID NO: 3176705 - RNA, 19 nt, Artificial Sequence
  Description of Artificial Sequence: Synthetic oligonucleotide
aaggacuaucuaucuggcc

SEQ ID NO: 3176706 - RNA, 19 nt, Artificial Sequence
  Description of Artificial Sequence: Synthetic oligonucleotide
acagguacagaaccugggc

SEQ ID NO: 3176707 - RNA, 19 nt, Artificial Sequence
  Description of Artificial Sequence: Synthetic oligonucleotide
ugacuguacagccucaaga

SEQ ID NO: 3176708 - RNA, 19 nt, Artificial Sequence
  Description of Artificial Sequence: Synthetic oligonucleotide
ucauucuuuucguucaggc

SEQ ID NO: 3176709 - RNA, 19 nt, Artificial Sequence
  Description of Artificial Sequence: Synthetic oligonucleotide
aagaagcucgcuuggcuuc

SEQ ID NO: 3176710 - RNA, 19 nt, Artificial Sequence
  Description of Artificial Sequence: Synthetic oligonucleotide
gagaguaguaggcugcuag

SEQ ID NO: 3176711 - RNA, 19 nt, Artificial Sequence
  Description of Artificial Sequence: Synthetic oligonucleotide
aaaggacuaucuaucuggc

SEQ ID NO: 3176712 - RNA, 19 nt, Artificial Sequence
  Description of Artificial Sequence: Synthetic oligonucleotide
aagaugccacuuuucacag

SEQ ID NO: 3176713 - RNA, 19 nt, Artificial Sequence
  Description of Artificial Sequence: Synthetic oligonucleotide
uuacggacaacauccaaca

SEQ ID NO: 3176714 - RNA, 19 nt, Artificial Sequence
  Description of Artificial Sequence: Synthetic oligonucleotide
aguaguaggcugcuaggac

SEQ ID NO: 3176715 - RNA, 19 nt, Artificial Sequence
  Description of Artificial Sequence: Synthetic oligonucleotide
acauccaacagguacagaa

SEQ ID NO: 3176716 - RNA, 19 nt, Artificial Sequence
  Description of Artificial Sequence: Synthetic oligonucleotide
auuacggacaacauccaac

SEQ ID NO: 3176717 - RNA, 19 nt, Artificial Sequence
  Description of Artificial Sequence: Synthetic oligonucleotide
cuugcagagcacaacaaug

SEQ ID NO: 3176718 - RNA, 19 nt, Artificial Sequence
  Description of Artificial Sequence: Synthetic oligonucleotide
agguucggagcuuuaauuc

SEQ ID NO: 3176719 - RNA, 19 nt, Artificial Sequence
  Description of Artificial Sequence: Synthetic oligonucleotide
gagcuuuaauuccauuacg

SEQ ID NO: 3176720 - RNA, 19 nt, Artificial Sequence
  Description of Artificial Sequence: Synthetic oligonucleotide
guccuuaauguacagagac

SEQ ID NO: 3176721 - RNA, 19 nt, Artificial Sequence
  Description of Artificial Sequence: Synthetic oligonucleotide
gaacucgcaggccacaucc

SEQ ID NO: 3176722 - RNA, 19 nt, Artificial Sequence
  Description of Artificial Sequence: Synthetic oligonucleotide
agagcuguagaagaacugg

SEQ ID NO: 3176723 - RNA, 19 nt, Artificial Sequence
  Description of Artificial Sequence: Synthetic oligonucleotide
agcuuuaauuccauuacgg

SEQ ID NO: 3176724 - RNA, 19 nt, Artificial Sequence
  Description of Artificial Sequence: Synthetic oligonucleotide
agcaugacagugcugaacu

SEQ ID NO: 3176725 - RNA, 19 nt, Artificial Sequence
  Description of Artificial Sequence: Synthetic oligonucleotide
aauguccuccuccucacca

SEQ ID NO: 3176726 - RNA, 19 nt, Artificial Sequence
  Description of Artificial Sequence: Synthetic oligonucleotide
aguacaugugcuccucugg

SEQ ID NO: 3176727 - RNA, 19 nt, Artificial Sequence
  Description of Artificial Sequence: Synthetic oligonucleotide
aagccuggcaguuugucca

SEQ ID NO: 3176728 - RNA, 19 nt, Artificial Sequence
  Description of Artificial Sequence: Synthetic oligonucleotide
ugggccaccaacaacugca

SEQ ID NO: 3176729 - RNA, 19 nt, Artificial Sequence
  Description of Artificial Sequence: Synthetic oligonucleotide
uugcugaucuuccaguaca

SEQ ID NO: 3176730 - RNA, 19 nt, Artificial Sequence
  Description of Artificial Sequence: Synthetic oligonucleotide
cauaguaggcggcagcgcg

SEQ ID NO: 3176731 - RNA, 19 nt, Artificial Sequence
  Description of Artificial Sequence: Synthetic oligonucleotide
ucugguuucaagaucugua

SEQ ID NO: 3176732 - RNA, 19 nt, Artificial Sequence
  Description of Artificial Sequence: Synthetic oligonucleotide
ucagagcuguagaagaacu

SEQ ID NO: 3176733 - RNA, 19 nt, Artificial Sequence
  Description of Artificial Sequence: Synthetic oligonucleotide
uucaagaucuguagugcug

SEQ ID NO: 3176734 - RNA, 19 nt, Artificial Sequence
  Description of Artificial Sequence: Synthetic oligonucleotide
uguacagagacaccaggaa

SEQ ID NO: 3176735 - RNA, 19 nt, Artificial Sequence
  Description of Artificial Sequence: Synthetic oligonucleotide
uugcagagcacaacaaugu

SEQ ID NO: 3176736 - RNA, 19 nt, Artificial Sequence
  Description of Artificial Sequence: Synthetic oligonucleotide
agccagauguccuuaaugu

SEQ ID NO: 3176737 - RNA, 19 nt, Artificial Sequence
  Description of Artificial Sequence: Synthetic oligonucleotide
agaaccugggccuguuccc

SEQ ID NO: 3176738 - RNA, 19 nt, Artificial Sequence
  Description of Artificial Sequence: Synthetic oligonucleotide
cugguuucaagaucuguag

SEQ ID NO: 3176739 - RNA, 19 nt, Artificial Sequence
  Description of Artificial Sequence: Synthetic oligonucleotide
ucaagaucuguagugcugc

SEQ ID NO: 3176740 - RNA, 19 nt, Artificial Sequence
  Description of Artificial Sequence: Synthetic oligonucleotide
uuuguccauguucagguuc

SEQ ID NO: 3176741 - RNA, 19 nt, Artificial Sequence
  Description of Artificial Sequence: Synthetic oligonucleotide
aacuugcugaucuuccagu

SEQ ID NO: 3176742 - RNA, 19 nt, Artificial Sequence
  Description of Artificial Sequence: Synthetic oligonucleotide
caagaugccacuuuucaca

SEQ ID NO: 3176743 - RNA, 19 nt, Artificial Sequence
  Description of Artificial Sequence: Synthetic oligonucleotide
cauucugacaugagcgagg

SEQ ID NO: 3176744 - RNA, 19 nt, Artificial Sequence
  Description of Artificial Sequence: Synthetic oligonucleotide
agaguaguaggcugcuagg

SEQ ID NO: 3176745 - RNA, 19 nt, Artificial Sequence
  Description of Artificial Sequence: Synthetic oligonucleotide
ugcuaggacauaguaggcg

SEQ ID NO: 3176746 - RNA, 19 nt, Artificial Sequence
  Description of Artificial Sequence: Synthetic oligonucleotide
ugaagaagcucgcuuggcu

SEQ ID NO: 3176747 - RNA, 19 nt, Artificial Sequence
  Description of Artificial Sequence: Synthetic oligonucleotide
acuuuucacagcacugucc

SEQ ID NO: 3176748 - RNA, 19 nt, Artificial Sequence
  Description of Artificial Sequence: Synthetic oligonucleotide
cuuaauguacagagacacc

SEQ ID NO: 3176749 - RNA, 19 nt, Artificial Sequence
  Description of Artificial Sequence: Synthetic oligonucleotide
caugacagugcugaacucg

SEQ ID NO: 3176750 - RNA, 19 nt, Artificial Sequence
  Description of Artificial Sequence: Synthetic oligonucleotide
gacauaguaggcggcagcg

SEQ ID NO: 3176751 - RNA, 19 nt, Artificial Sequence
  Description of Artificial Sequence: Synthetic oligonucleotide
uuaauuccauuacggacaa

SEQ ID NO: 3176752 - RNA, 19 nt, Artificial Sequence
  Description of Artificial Sequence: Synthetic oligonucleotide
acagugcugaacucgcagg

SEQ ID NO: 3176753 - RNA, 19 nt, Artificial Sequence
  Description of Artificial Sequence: Synthetic oligonucleotide
ucgugagacagcaggaacu

SEQ ID NO: 3176754 - RNA, 19 nt, Artificial Sequence
  Description of Artificial Sequence: Synthetic oligonucleotide
aacagguacagaaccuggg

SEQ ID NO: 3176755 - RNA, 19 nt, Artificial Sequence
  Description of Artificial Sequence: Synthetic oligonucleotide
agggcugcgacagucagac

SEQ ID NO: 3176756 - RNA, 19 nt, Artificial Sequence
  Description of Artificial Sequence: Synthetic oligonucleotide
acaauguccuccuccucac

SEQ ID NO: 3176757 - RNA, 19 nt, Artificial Sequence
  Description of Artificial Sequence: Synthetic oligonucleotide
gacagugcugaacucgcag

SEQ ID NO: 3176758 - RNA, 19 nt, Artificial Sequence
  Description of Artificial Sequence: Synthetic oligonucleotide
uccuuaauguacagagaca

SEQ ID NO: 3176759 - RNA, 19 nt, Artificial Sequence
  Description of Artificial Sequence: Synthetic oligonucleotide
uuuugcuggaagucagagc

SEQ ID NO: 3176760 - RNA, 19 nt, Artificial Sequence
  Description of Artificial Sequence: Synthetic oligonucleotide
uguacagccucaagaugcc

SEQ ID NO: 3176761 - RNA, 19 nt, Artificial Sequence
  Description of Artificial Sequence: Synthetic oligonucleotide
uccauguucagguucucgu

SEQ ID NO: 3176762 - RNA, 19 nt, Artificial Sequence
  Description of Artificial Sequence: Synthetic oligonucleotide
ucaagaugccacuuuucac

SEQ ID NO: 3176763 - RNA, 19 nt, Artificial Sequence
  Description of Artificial Sequence: Synthetic oligonucleotide
uggaagucagagcuguaga

SEQ ID NO: 3176764 - RNA, 19 nt, Artificial Sequence
  Description of Artificial Sequence: Synthetic oligonucleotide
gcuaggacauaguaggcgg

SEQ ID NO: 3176765 - RNA, 19 nt, Artificial Sequence
  Description of Artificial Sequence: Synthetic oligonucleotide
gaucauagcugcugagggc

SEQ ID NO: 3176766 - RNA, 19 nt, Artificial Sequence
  Description of Artificial Sequence: Synthetic oligonucleotide
ucauucugacaugagcgag

SEQ ID NO: 3176767 - RNA, 19 nt, Artificial Sequence
  Description of Artificial Sequence: Synthetic oligonucleotide
uuccauuacggacaacauc

SEQ ID NO: 3176768 - RNA, 19 nt, Artificial Sequence
  Description of Artificial Sequence: Synthetic oligonucleotide
uuguccauguucagguucu

SEQ ID NO: 3176769 - RNA, 19 nt, Artificial Sequence
  Description of Artificial Sequence: Synthetic oligonucleotide
caacagguacagaaccugg

SEQ ID NO: 3176770 - RNA, 19 nt, Artificial Sequence
  Description of Artificial Sequence: Synthetic oligonucleotide
ggaaugcugaagaagcucg

SEQ ID NO: 3176771 - RNA, 19 nt, Artificial Sequence
  Description of Artificial Sequence: Synthetic oligonucleotide
agcucgcuuggcuucauuc

SEQ ID NO: 3176772 - RNA, 19 nt, Artificial Sequence
  Description of Artificial Sequence: Synthetic oligonucleotide
cuaucuaucuggcccuggg

SEQ ID NO: 3176773 - RNA, 19 nt, Artificial Sequence
  Description of Artificial Sequence: Synthetic oligonucleotide
guagaagccuggcaguuug

SEQ ID NO: 3176774 - RNA, 19 nt, Artificial Sequence
  Description of Artificial Sequence: Synthetic oligonucleotide
ugcaguggugacuguacag

SEQ ID NO: 3176775 - RNA, 19 nt, Artificial Sequence
  Description of Artificial Sequence: Synthetic oligonucleotide
augacagugcugaacucgc

SEQ ID NO: 3176776 - RNA, 19 nt, Artificial Sequence
  Description of Artificial Sequence: Synthetic oligonucleotide
agagacaccaggaaugcug

SEQ ID NO: 3176777 - RNA, 19 nt, Artificial Sequence
  Description of Artificial Sequence: Synthetic oligonucleotide
uccaacagguacagaaccu

SEQ ID NO: 3176778 - RNA, 19 nt, Artificial Sequence
  Description of Artificial Sequence: Synthetic oligonucleotide
guucaggcaaucaaggcac

SEQ ID NO: 3176779 - RNA, 19 nt, Artificial Sequence
  Description of Artificial Sequence: Synthetic oligonucleotide
ugguuucaagaucuguagu

SEQ ID NO: 3176780 - RNA, 19 nt, Artificial Sequence
  Description of Artificial Sequence: Synthetic oligonucleotide
aucauucugacaugagcga

SEQ ID NO: 3176781 - RNA, 19 nt, Artificial Sequence
  Description of Artificial Sequence: Synthetic oligonucleotide
uacagccucaagaugccac

SEQ ID NO: 3176782 - RNA, 19 nt, Artificial Sequence
  Description of Artificial Sequence: Synthetic oligonucleotide
uguccuccuccucaccacg

SEQ ID NO: 3176783 - RNA, 19 nt, Artificial Sequence
  Description of Artificial Sequence: Synthetic oligonucleotide
agguacagaaccugggccu

SEQ ID NO: 3176784 - RNA, 19 nt, Artificial Sequence
  Description of Artificial Sequence: Synthetic oligonucleotide
gaugauauagguuagaauc

SEQ ID NO: 3176785 - RNA, 19 nt, Artificial Sequence
  Description of Artificial Sequence: Synthetic oligonucleotide
guaaauuuauguuagaccc

SEQ ID NO: 3176786 - RNA, 19 nt, Artificial Sequence
  Description of Artificial Sequence: Synthetic oligonucleotide
aaggaaacucaauaaauac

SEQ ID NO: 3176787 - RNA, 19 nt, Artificial Sequence
  Description of Artificial Sequence: Synthetic oligonucleotide
uauugagaauaucugaggg

SEQ ID NO: 3176788 - RNA, 19 nt, Artificial Sequence
  Description of Artificial Sequence: Synthetic oligonucleotide
uguaaauuuauguuagacc

SEQ ID NO: 3176789 - RNA, 19 nt, Artificial Sequence
  Description of Artificial Sequence: Synthetic oligonucleotide
aacucaauaaauacucucc

SEQ ID NO: 3176790 - RNA, 19 nt, Artificial Sequence
  Description of Artificial Sequence: Synthetic oligonucleotide
gaugauaucaggaacuggg

SEQ ID NO: 3176791 - RNA, 19 nt, Artificial Sequence
  Description of Artificial Sequence: Synthetic oligonucleotide
gaaauaagaugauaucagg

SEQ ID NO: 3176792 - RNA, 19 nt, Artificial Sequence
  Description of Artificial Sequence: Synthetic oligonucleotide
aauauugagaauaucugag

SEQ ID NO: 3176793 - RNA, 19 nt, Artificial Sequence
  Description of Artificial Sequence: Synthetic oligonucleotide
uuuggaaauaagaugauau

SEQ ID NO: 3176794 - RNA, 19 nt, Artificial Sequence
  Description of Artificial Sequence: Synthetic oligonucleotide
auaagaugauaucaggaac

SEQ ID NO: 3176795 - RNA, 19 nt, Artificial Sequence
  Description of Artificial Sequence: Synthetic oligonucleotide
aacacuguuagguugugag

SEQ ID NO: 3176796 - RNA, 19 nt, Artificial Sequence
  Description of Artificial Sequence: Synthetic oligonucleotide
uuauguuagacccaugugu

SEQ ID NO: 3176797 - RNA, 19 nt, Artificial Sequence
  Description of Artificial Sequence: Synthetic oligonucleotide
ugugauauugccaacuggu

SEQ ID NO: 3176798 - RNA, 19 nt, Artificial Sequence
  Description of Artificial Sequence: Synthetic oligonucleotide
gauauugccaacugguuug

SEQ ID NO: 3176799 - RNA, 19 nt, Artificial Sequence
  Description of Artificial Sequence: Synthetic oligonucleotide
ugaaucuaucucuagaaac

SEQ ID NO: 3176800 - RNA, 19 nt, Artificial Sequence
  Description of Artificial Sequence: Synthetic oligonucleotide
ugguaucugacagagaagg

SEQ ID NO: 3176801 - RNA, 19 nt, Artificial Sequence
  Description of Artificial Sequence: Synthetic oligonucleotide
auauugagaauaucugagg

SEQ ID NO: 3176802 - RNA, 19 nt, Artificial Sequence
  Description of Artificial Sequence: Synthetic oligonucleotide
aacugggucugguuguucc

SEQ ID NO: 3176803 - RNA, 19 nt, Artificial Sequence
  Description of Artificial Sequence: Synthetic oligonucleotide
uugagaauaucugagggag

SEQ ID NO: 3176804 - RNA, 19 nt, Artificial Sequence
  Description of Artificial Sequence: Synthetic oligonucleotide
acuuuuggaaauaagauga

SEQ ID NO: 3176805 - RNA, 19 nt, Artificial Sequence
  Description of Artificial Sequence: Synthetic oligonucleotide
uggaaauaagaugauauca

SEQ ID NO: 3176806 - RNA, 19 nt, Artificial Sequence
  Description of Artificial Sequence: Synthetic oligonucleotide
auuuauguuagacccaugu

SEQ ID NO: 3176807 - RNA, 19 nt, Artificial Sequence
  Description of Artificial Sequence: Synthetic oligonucleotide
acugguuugacuauggcuc

SEQ ID NO: 3176808 - RNA, 19 nt, Artificial Sequence
  Description of Artificial Sequence: Synthetic oligonucleotide
gauggcuaaaugcagcugc

SEQ ID NO: 3176809 - RNA, 19 nt, Artificial Sequence
  Description of Artificial Sequence: Synthetic oligonucleotide
ucuuccuguaaauuuaugu

SEQ ID NO: 3176810 - RNA, 19 nt, Artificial Sequence
  Description of Artificial Sequence: Synthetic oligonucleotide
gaaucuaucucuagaaacc

SEQ ID NO: 3176811 - RNA, 19 nt, Artificial Sequence
  Description of Artificial Sequence: Synthetic oligonucleotide
aaauaagaugauaucagga

SEQ ID NO: 3176812 - RNA, 19 nt, Artificial Sequence
  Description of Artificial Sequence: Synthetic oligonucleotide
uuuauguuagacccaugug

SEQ ID NO: 3176813 - RNA, 19 nt, Artificial Sequence
  Description of Artificial Sequence: Synthetic oligonucleotide
ucacuuuuggaaauaagau

SEQ ID NO: 3176814 - RNA, 19 nt, Artificial Sequence
  Description of Artificial Sequence: Synthetic oligonucleotide
acagggaugauauagguua

SEQ ID NO: 3176815 - RNA, 19 nt, Artificial Sequence
  Description of Artificial Sequence: Synthetic oligonucleotide
aacugguuugacuauggcu

SEQ ID NO: 3176816 - RNA, 19 nt, Artificial Sequence
  Description of Artificial Sequence: Synthetic oligonucleotide
uaucucuagaaacccauga

SEQ ID NO: 3176817 - RNA, 19 nt, Artificial Sequence
  Description of Artificial Sequence: Synthetic oligonucleotide
uuugucuucaggagggaug

SEQ ID NO: 3176818 - RNA, 19 nt, Artificial Sequence
  Description of Artificial Sequence: Synthetic oligonucleotide
aguaguacugugaaggguc

SEQ ID NO: 3176819 - RNA, 19 nt, Artificial Sequence
  Description of Artificial Sequence: Synthetic oligonucleotide
gaugagaauauugagaaua

SEQ ID NO: 3176820 - RNA, 19 nt, Artificial Sequence
  Description of Artificial Sequence: Synthetic oligonucleotide
aagaggguuugccuggauc

SEQ ID NO: 3176821 - RNA, 19 nt, Artificial Sequence
  Description of Artificial Sequence: Synthetic oligonucleotide
uaaauacucuccuguuugg

SEQ ID NO: 3176822 - RNA, 19 nt, Artificial Sequence
  Description of Artificial Sequence: Synthetic oligonucleotide
uaagaacucagcaugugau

SEQ ID NO: 3176823 - RNA, 19 nt, Artificial Sequence
  Description of Artificial Sequence: Synthetic oligonucleotide
cacuuuuggaaauaagaug

SEQ ID NO: 3176824 - RNA, 19 nt, Artificial Sequence
  Description of Artificial Sequence: Synthetic oligonucleotide
caagaauuucucagcaugc

SEQ ID NO: 3176825 - RNA, 19 nt, Artificial Sequence
  Description of Artificial Sequence: Synthetic oligonucleotide
aaauuuauguuagacccau

SEQ ID NO: 3176826 - RNA, 19 nt, Artificial Sequence
  Description of Artificial Sequence: Synthetic oligonucleotide
ucuuuggugaaucuaucuc

SEQ ID NO: 3176827 - RNA, 19 nt, Artificial Sequence
  Description of Artificial Sequence: Synthetic oligonucleotide
cuaaaugcagcugccaggg

SEQ ID NO: 3176828 - RNA, 19 nt, Artificial Sequence
  Description of Artificial Sequence: Synthetic oligonucleotide
cucacuuuuggaaauaaga

SEQ ID NO: 3176829 - RNA, 19 nt, Artificial Sequence
  Description of Artificial Sequence: Synthetic oligonucleotide
uccagaaauaucucugucu

SEQ ID NO: 3176830 - RNA, 19 nt, Artificial Sequence
  Description of Artificial Sequence: Synthetic oligonucleotide
aacucagcaugugauauug

SEQ ID NO: 3176831 - RNA, 19 nt, Artificial Sequence
  Description of Artificial Sequence: Synthetic oligonucleotide
aaaugcagcugccagggau

SEQ ID NO: 3176832 - RNA, 19 nt, Artificial Sequence
  Description of Artificial Sequence: Synthetic oligonucleotide
uugacuauggcuccccacu

SEQ ID NO: 3176833 - RNA, 19 nt, Artificial Sequence
  Description of Artificial Sequence: Synthetic oligonucleotide
acccuaagaacucagcaug

SEQ ID NO: 3176834 - RNA, 19 nt, Artificial Sequence
  Description of Artificial Sequence: Synthetic oligonucleotide
uauguuagacccauguguu

SEQ ID NO: 3176835 - RNA, 19 nt, Artificial Sequence
  Description of Artificial Sequence: Synthetic oligonucleotide
ucuaucucuagaaacccau

SEQ ID NO: 3176836 - RNA, 19 nt, Artificial Sequence
  Description of Artificial Sequence: Synthetic oligonucleotide
agagaaggaaacucaauaa

SEQ ID NO: 3176837 - RNA, 19 nt, Artificial Sequence
  Description of Artificial Sequence: Synthetic oligonucleotide
auugagaauaucugaggga

SEQ ID NO: 3176838 - RNA, 19 nt, Artificial Sequence
  Description of Artificial Sequence: Synthetic oligonucleotide
gagaauauugagaauaucu

SEQ ID NO: 3176839 - RNA, 19 nt, Artificial Sequence
  Description of Artificial Sequence: Synthetic oligonucleotide
ugugagagggugaagcccu

SEQ ID NO: 3176840 - RNA, 19 nt, Artificial Sequence
  Description of Artificial Sequence: Synthetic oligonucleotide
acucaauaaauacucuccu

SEQ ID NO: 3176841 - RNA, 19 nt, Artificial Sequence
  Description of Artificial Sequence: Synthetic oligonucleotide
gacucagccagcaacacug

SEQ ID NO: 3176842 - RNA, 19 nt, Artificial Sequence
  Description of Artificial Sequence: Synthetic oligonucleotide
auagguuagaaucuucuuu

SEQ ID NO: 3176843 - RNA, 19 nt, Artificial Sequence
  Description of Artificial Sequence: Synthetic oligonucleotide
ugagacucagccagcaaca

SEQ ID NO: 3176844 - RNA, 19 nt, Artificial Sequence
  Description of Artificial Sequence: Synthetic oligonucleotide
gacccauguguucacagag

SEQ ID NO: 3176845 - RNA, 19 nt, Artificial Sequence
  Description of Artificial Sequence: Synthetic oligonucleotide
ucugagggagcaucaacag

SEQ ID NO: 3176846 - RNA, 19 nt, Artificial Sequence
  Description of Artificial Sequence: Synthetic oligonucleotide
ggaaauaagaugauaucag

SEQ ID NO: 3176847 - RNA, 19 nt, Artificial Sequence
  Description of Artificial Sequence: Synthetic oligonucleotide
ucugucuuccuguaaauuu

SEQ ID NO: 3176848 - RNA, 19 nt, Artificial Sequence
  Description of Artificial Sequence: Synthetic oligonucleotide
uuggugguaucugacagag

SEQ ID NO: 3176849 - RNA, 19 nt, Artificial Sequence
  Description of Artificial Sequence: Synthetic oligonucleotide
agaggguuugccuggauca

SEQ ID NO: 3176850 - RNA, 19 nt, Artificial Sequence
  Description of Artificial Sequence: Synthetic oligonucleotide
cauguguucacagagccac

SEQ ID NO: 3176851 - RNA, 19 nt, Artificial Sequence
  Description of Artificial Sequence: Synthetic oligonucleotide
augugauauugccaacugg

SEQ ID NO: 3176852 - RNA, 19 nt, Artificial Sequence
  Description of Artificial Sequence: Synthetic oligonucleotide
ugauauugccaacugguuu

SEQ ID NO: 3176853 - RNA, 19 nt, Artificial Sequence
  Description of Artificial Sequence: Synthetic oligonucleotide
uguuagacccauguguuca

SEQ ID NO: 3176854 - RNA, 19 nt, Artificial Sequence
  Description of Artificial Sequence: Synthetic oligonucleotide
aagaugauaucaggaacug

SEQ ID NO: 3176855 - RNA, 19 nt, Artificial Sequence
  Description of Artificial Sequence: Synthetic oligonucleotide
uggugaaucuaucucuaga

SEQ ID NO: 3176856 - RNA, 19 nt, Artificial Sequence
  Description of Artificial Sequence: Synthetic oligonucleotide
cuaaccuaggcccagagaa

SEQ ID NO: 3176857 - RNA, 19 nt, Artificial Sequence
  Description of Artificial Sequence: Synthetic oligonucleotide
agugagauggaugauggcu

SEQ ID NO: 3176858 - RNA, 19 nt, Artificial Sequence
  Description of Artificial Sequence: Synthetic oligonucleotide
gaugauggcuaaaugcagc

SEQ ID NO: 3176859 - RNA, 19 nt, Artificial Sequence
  Description of Artificial Sequence: Synthetic oligonucleotide
gccuggaucagcuuggugg

SEQ ID NO: 3176860 - RNA, 19 nt, Artificial Sequence
  Description of Artificial Sequence: Synthetic oligonucleotide
agagggugaagcccugagc

SEQ ID NO: 3176861 - RNA, 19 nt, Artificial Sequence
  Description of Artificial Sequence: Synthetic oligonucleotide
cuguaaauuuauguuagac

SEQ ID NO: 3176862 - RNA, 19 nt, Artificial Sequence
  Description of Artificial Sequence: Synthetic oligonucleotide
cacuguuagguugugagag

SEQ ID NO: 3176863 - RNA, 19 nt, Artificial Sequence
  Description of Artificial Sequence: Synthetic oligonucleotide
gagaaggaaacucaauaaa

SEQ ID NO: 3176864 - RNA, 19 nt, Artificial Sequence
  Description of Artificial Sequence: Synthetic oligonucleotide
guuguuccuaaccuaggcc

SEQ ID NO: 3176865 - RNA, 19 nt, Artificial Sequence
  Description of Artificial Sequence: Synthetic oligonucleotide
ugcccucaggccaagaaga

SEQ ID NO: 3176866 - RNA, 19 nt, Artificial Sequence
  Description of Artificial Sequence: Synthetic oligonucleotide
ggaaacucaauaaauacuc

SEQ ID NO: 3176867 - RNA, 19 nt, Artificial Sequence
  Description of Artificial Sequence: Synthetic oligonucleotide
ucuagaaacccaugaaguu

SEQ ID NO: 3176868 - RNA, 19 nt, Artificial Sequence
  Description of Artificial Sequence: Synthetic oligonucleotide
uugccaacugguuugacua

SEQ ID NO: 3176869 - RNA, 19 nt, Artificial Sequence
  Description of Artificial Sequence: Synthetic oligonucleotide
uucccuuugucuucaggag

SEQ ID NO: 3176870 - RNA, 19 nt, Artificial Sequence
  Description of Artificial Sequence: Synthetic oligonucleotide
uacacaacuugcccuuucc

SEQ ID NO: 3176871 - RNA, 19 nt, Artificial Sequence
  Description of Artificial Sequence: Synthetic oligonucleotide
acagagccacccuaagaac

SEQ ID NO: 3176872 - RNA, 19 nt, Artificial Sequence
  Description of Artificial Sequence: Synthetic oligonucleotide
agguuagaaucuucuuugg

SEQ ID NO: 3176873 - RNA, 19 nt, Artificial Sequence
  Description of Artificial Sequence: Synthetic oligonucleotide
ugugaaggguccuuacaca

SEQ ID NO: 3176874 - RNA, 19 nt, Artificial Sequence
  Description of Artificial Sequence: Synthetic oligonucleotide
acauuuauuuucccuuugu

SEQ ID NO: 3176875 - RNA, 19 nt, Artificial Sequence
  Description of Artificial Sequence: Synthetic oligonucleotide
acuguuagguugugagagg

SEQ ID NO: 3176876 - RNA, 19 nt, Artificial Sequence
  Description of Artificial Sequence: Synthetic oligonucleotide
uuuggugaaucuaucucua

SEQ ID NO: 3176877 - RNA, 19 nt, Artificial Sequence
  Description of Artificial Sequence: Synthetic oligonucleotide
uccuuacacaacuugcccu

SEQ ID NO: 3176878 - RNA, 19 nt, Artificial Sequence
  Description of Artificial Sequence: Synthetic oligonucleotide
auugccaacugguuugacu

SEQ ID NO: 3176879 - RNA, 19 nt, Artificial Sequence
  Description of Artificial Sequence: Synthetic oligonucleotide
agcaucaacagggauggag

SEQ ID NO: 3176880 - RNA, 19 nt, Artificial Sequence
  Description of Artificial Sequence: Synthetic oligonucleotide
aagaauuucucagcaugca

SEQ ID NO: 3176881 - RNA, 19 nt, Artificial Sequence
  Description of Artificial Sequence: Synthetic oligonucleotide
ugagaauaucugagggagc

SEQ ID NO: 3176882 - RNA, 19 nt, Artificial Sequence
  Description of Artificial Sequence: Synthetic oligonucleotide
acuauggcuccccacucuc

SEQ ID NO: 3176883 - RNA, 19 nt, Artificial Sequence
  Description of Artificial Sequence: Synthetic oligonucleotide
ggugguaucugacagagaa

SEQ ID NO: 3176884 - RNA, 19 nt, Artificial Sequence
  Description of Artificial Sequence: Synthetic oligonucleotide
auuuucaguggccacaucc

SEQ ID NO: 3176885 - RNA, 19 nt, Artificial Sequence
  Description of Artificial Sequence: Synthetic oligonucleotide
uguacuucucaucagcuag

SEQ ID NO: 3176886 - RNA, 19 nt, Artificial Sequence
  Description of Artificial Sequence: Synthetic oligonucleotide
aaggacaauaccucugaac

SEQ ID NO: 3176887 - RNA, 19 nt, Artificial Sequence
  Description of Artificial Sequence: Synthetic oligonucleotide
uaaaacucugcagaggucg

SEQ ID NO: 3176888 - RNA, 19 nt, Artificial Sequence
  Description of Artificial Sequence: Synthetic oligonucleotide
cuucucaucagcuagcaag

SEQ ID NO: 3176889 - RNA, 19 nt, Artificial Sequence
  Description of Artificial Sequence: Synthetic oligonucleotide
cuugguagcgcucugaccc

SEQ ID NO: 3176890 - RNA, 19 nt, Artificial Sequence
  Description of Artificial Sequence: Synthetic oligonucleotide
ucaacugcccguaacuugg

SEQ ID NO: 3176891 - RNA, 19 nt, Artificial Sequence
  Description of Artificial Sequence: Synthetic oligonucleotide
uuuuguacuucucaucagc

SEQ ID NO: 3176892 - RNA, 19 nt, Artificial Sequence
  Description of Artificial Sequence: Synthetic oligonucleotide
aggacaauaccucugaacu

SEQ ID NO: 3176893 - RNA, 19 nt, Artificial Sequence
  Description of Artificial Sequence: Synthetic oligonucleotide
aacuuggcaucauucuccc

SEQ ID NO: 3176894 - RNA, 19 nt, Artificial Sequence
  Description of Artificial Sequence: Synthetic oligonucleotide
agugugacuauuccagggc

SEQ ID NO: 3176895 - RNA, 19 nt, Artificial Sequence
  Description of Artificial Sequence: Synthetic oligonucleotide
agcaagugcagccugcagc

SEQ ID NO: 3176896 - RNA, 19 nt, Artificial Sequence
  Description of Artificial Sequence: Synthetic oligonucleotide
aucauucucccuuuuguac

SEQ ID NO: 3176897 - RNA, 19 nt, Artificial Sequence
  Description of Artificial Sequence: Synthetic oligonucleotide
aacuucuuaagugucuccg

SEQ ID NO: 3176898 - RNA, 19 nt, Artificial Sequence
  Description of Artificial Sequence: Synthetic oligonucleotide
uaacuuggcaucauucucc

SEQ ID NO: 3176899 - RNA, 19 nt, Artificial Sequence
  Description of Artificial Sequence: Synthetic oligonucleotide
ucaucagcuagcaagugca

SEQ ID NO: 3176900 - RNA, 19 nt, Artificial Sequence
  Description of Artificial Sequence: Synthetic oligonucleotide
uguuccagagguuuucagg

SEQ ID NO: 3176901 - RNA, 19 nt, Artificial Sequence
  Description of Artificial Sequence: Synthetic oligonucleotide
aauaccucugaacuccuca

SEQ ID NO: 3176902 - RNA, 19 nt, Artificial Sequence
  Description of Artificial Sequence: Synthetic oligonucleotide
uuuuccucccaucuugucc

SEQ ID NO: 3176903 - RNA, 19 nt, Artificial Sequence
  Description of Artificial Sequence: Synthetic oligonucleotide
ucagcuagcaagugcagcc

SEQ ID NO: 3176904 - RNA, 19 nt, Artificial Sequence
  Description of Artificial Sequence: Synthetic oligonucleotide
ucaaaaguccuuucccuag

SEQ ID NO: 3176905 - RNA, 19 nt, Artificial Sequence
  Description of Artificial Sequence: Synthetic oligonucleotide
gacaauaccucugaacucc

SEQ ID NO: 3176906 - RNA, 19 nt, Artificial Sequence
  Description of Artificial Sequence: Synthetic oligonucleotide
auccucaaaaguccuuucc

SEQ ID NO: 3176907 - RNA, 19 nt, Artificial Sequence
  Description of Artificial Sequence: Synthetic oligonucleotide
ugaacuccucauaggaagg

SEQ ID NO: 3176908 - RNA, 19 nt, Artificial Sequence
  Description of Artificial Sequence: Synthetic oligonucleotide
aguagugugacuauuccag

SEQ ID NO: 3176909 - RNA, 19 nt, Artificial Sequence
  Description of Artificial Sequence: Synthetic oligonucleotide
uauuccagggcacacuucu

SEQ ID NO: 3176910 - RNA, 19 nt, Artificial Sequence
  Description of Artificial Sequence: Synthetic oligonucleotide
aggaagggugauuuucucc

SEQ ID NO: 3176911 - RNA, 19 nt, Artificial Sequence
  Description of Artificial Sequence: Synthetic oligonucleotide
aagggugauuuucuccugg

SEQ ID NO: 3176912 - RNA, 19 nt, Artificial Sequence
  Description of Artificial Sequence: Synthetic oligonucleotide
cugaacuccucauaggaag

SEQ ID NO: 3176913 - RNA, 19 nt, Artificial Sequence
  Description of Artificial Sequence: Synthetic oligonucleotide
acuucuuaagugucuccgc

SEQ ID NO: 3176914 - RNA, 19 nt, Artificial Sequence
  Description of Artificial Sequence: Synthetic oligonucleotide
ucaggugugaugacaagga

SEQ ID NO: 3176915 - RNA, 19 nt, Artificial Sequence
  Description of Artificial Sequence: Synthetic oligonucleotide
ugacccaacuucuuaagug

SEQ ID NO: 3176916 - RNA, 19 nt, Artificial Sequence
  Description of Artificial Sequence: Synthetic oligonucleotide
aaguccuuucccuaguagu

SEQ ID NO: 3176917 - RNA, 19 nt, Artificial Sequence
  Description of Artificial Sequence: Synthetic oligonucleotide
aaaguccuuucccuaguag

SEQ ID NO: 3176918 - RNA, 19 nt, Artificial Sequence
  Description of Artificial Sequence: Synthetic oligonucleotide
uccucaaaaguccuuuccc

SEQ ID NO: 3176919 - RNA, 19 nt, Artificial Sequence
  Description of Artificial Sequence: Synthetic oligonucleotide
uagugugacuauuccaggg

SEQ ID NO: 3176920 - RNA, 19 nt, Artificial Sequence
  Description of Artificial Sequence: Synthetic oligonucleotide
uuuguacuucucaucagcu

SEQ ID NO: 3176921 - RNA, 19 nt, Artificial Sequence
  Description of Artificial Sequence: Synthetic oligonucleotide
uuuucaggugugaugacaa

SEQ ID NO: 3176922 - RNA, 19 nt, Artificial Sequence
  Description of Artificial Sequence: Synthetic oligonucleotide
uguucaacugcccguaacu

SEQ ID NO: 3176923 - RNA, 19 nt, Artificial Sequence
  Description of Artificial Sequence: Synthetic oligonucleotide
uucaggugugaugacaagg

SEQ ID NO: 3176924 - RNA, 19 nt, Artificial Sequence
  Description of Artificial Sequence: Synthetic oligonucleotide
caucuuguccuucuguucc

SEQ ID NO: 3176925 - RNA, 19 nt, Artificial Sequence
  Description of Artificial Sequence: Synthetic oligonucleotide
cacucuuuguucaacugcc

SEQ ID NO: 3176926 - RNA, 19 nt, Artificial Sequence
  Description of Artificial Sequence: Synthetic oligonucleotide
uugaagcagggcuugguag

SEQ ID NO: 3176927 - RNA, 19 nt, Artificial Sequence
  Description of Artificial Sequence: Synthetic oligonucleotide
aagugucuccgccaaucac

SEQ ID NO: 3176928 - RNA, 19 nt, Artificial Sequence
  Description of Artificial Sequence: Synthetic oligonucleotide
aaucacgguaaaacucugc

SEQ ID NO: 3176929 - RNA, 19 nt, Artificial Sequence
  Description of Artificial Sequence: Synthetic oligonucleotide
agcgcucugacccaacuuc

SEQ ID NO: 3176930 - RNA, 19 nt, Artificial Sequence
  Description of Artificial Sequence: Synthetic oligonucleotide
uguccuucuguuccagagg

SEQ ID NO: 3176931 - RNA, 19 nt, Artificial Sequence
  Description of Artificial Sequence: Synthetic oligonucleotide
accucugaacuccucauag

SEQ ID NO: 3176932 - RNA, 19 nt, Artificial Sequence
  Description of Artificial Sequence: Synthetic oligonucleotide
uuguccuucuguuccagag

SEQ ID NO: 3176933 - RNA, 19 nt, Artificial Sequence
  Description of Artificial Sequence: Synthetic oligonucleotide
uuuucaguggccacauccu

SEQ ID NO: 3176934 - RNA, 19 nt, Artificial Sequence
  Description of Artificial Sequence: Synthetic oligonucleotide
cuaguagugugacuauucc

SEQ ID NO: 3176935 - RNA, 19 nt, Artificial Sequence
  Description of Artificial Sequence: Synthetic oligonucleotide
uuuccucccaucuuguccu

SEQ ID NO: 3176936 - RNA, 19 nt, Artificial Sequence
  Description of Artificial Sequence: Synthetic oligonucleotide
ugugaugacaaggacaaua

SEQ ID NO: 3176937 - RNA, 19 nt, Artificial Sequence
  Description of Artificial Sequence: Synthetic oligonucleotide
ucauucucccuuuuguacu

SEQ ID NO: 3176938 - RNA, 19 nt, Artificial Sequence
  Description of Artificial Sequence: Synthetic oligonucleotide
augacaaggacaauaccuc

SEQ ID NO: 3176939 - RNA, 19 nt, Artificial Sequence
  Description of Artificial Sequence: Synthetic oligonucleotide
aucacgguaaaacucugca

SEQ ID NO: 3176940 - RNA, 19 nt, Artificial Sequence
  Description of Artificial Sequence: Synthetic oligonucleotide
uucucaucagcuagcaagu

SEQ ID NO: 3176941 - RNA, 19 nt, Artificial Sequence
  Description of Artificial Sequence: Synthetic oligonucleotide
cauaggaaggcacucuuug

SEQ ID NO: 3176942 - RNA, 19 nt, Artificial Sequence
  Description of Artificial Sequence: Synthetic oligonucleotide
cuucuuaagugucuccgcc

SEQ ID NO: 3176943 - RNA, 19 nt, Artificial Sequence
  Description of Artificial Sequence: Synthetic oligonucleotide
ugaagcagggcuugguagc

SEQ ID NO: 3176944 - RNA, 19 nt, Artificial Sequence
  Description of Artificial Sequence: Synthetic oligonucleotide
aggaaggcacucuuuguuc

SEQ ID NO: 3176945 - RNA, 19 nt, Artificial Sequence
  Description of Artificial Sequence: Synthetic oligonucleotide
aaaacucugcagaggucgc

SEQ ID NO: 3176946 - RNA, 19 nt, Artificial Sequence
  Description of Artificial Sequence: Synthetic oligonucleotide
gaugacaaggacaauaccu

SEQ ID NO: 3176947 - RNA, 19 nt, Artificial Sequence
  Description of Artificial Sequence: Synthetic oligonucleotide
ugaugacaaggacaauacc

SEQ ID NO: 3176948 - RNA, 19 nt, Artificial Sequence
  Description of Artificial Sequence: Synthetic oligonucleotide
cucuuuguucaacugcccg

SEQ ID NO: 3176949 - RNA, 19 nt, Artificial Sequence
  Description of Artificial Sequence: Synthetic oligonucleotide
uccugggguauuuucagug

SEQ ID NO: 3176950 - RNA, 19 nt, Artificial Sequence
  Description of Artificial Sequence: Synthetic oligonucleotide
ucuuuguucaacugcccgu

SEQ ID NO: 3176951 - RNA, 19 nt, Artificial Sequence
  Description of Artificial Sequence: Synthetic oligonucleotide
agugucuccgccaaucacg

SEQ ID NO: 3176952 - RNA, 19 nt, Artificial Sequence
  Description of Artificial Sequence: Synthetic oligonucleotide
uucaacugcccguaacuug

SEQ ID NO: 3176953 - RNA, 19 nt, Artificial Sequence
  Description of Artificial Sequence: Synthetic oligonucleotide
gagguuuucaggugugaug

SEQ ID NO: 3176954 - RNA, 19 nt, Artificial Sequence
  Description of Artificial Sequence: Synthetic oligonucleotide
ucacgguaaaacucugcag

SEQ ID NO: 3176955 - RNA, 19 nt, Artificial Sequence
  Description of Artificial Sequence: Synthetic oligonucleotide
acgguaaaacucugcagag

SEQ ID NO: 3176956 - RNA, 19 nt, Artificial Sequence
  Description of Artificial Sequence: Synthetic oligonucleotide
uccagagguuuucaggugu

SEQ ID NO: 3176957 - RNA, 19 nt, Artificial Sequence
  Description of Artificial Sequence: Synthetic oligonucleotide
acaaggacaauaccucuga

SEQ ID NO: 3176958 - RNA, 19 nt, Artificial Sequence
  Description of Artificial Sequence: Synthetic oligonucleotide
agguuuucaggugugauga

SEQ ID NO: 3176959 - RNA, 19 nt, Artificial Sequence
  Description of Artificial Sequence: Synthetic oligonucleotide
ucugacccaacuucuuaag

SEQ ID NO: 3176960 - RNA, 19 nt, Artificial Sequence
  Description of Artificial Sequence: Synthetic oligonucleotide
ucuuaagugucuccgccaa

SEQ ID NO: 3176961 - RNA, 19 nt, Artificial Sequence
  Description of Artificial Sequence: Synthetic oligonucleotide
ucuccugggguauuuucag

SEQ ID NO: 3176962 - RNA, 19 nt, Artificial Sequence
  Description of Artificial Sequence: Synthetic oligonucleotide
guagugugacuauuccagg

SEQ ID NO: 3176963 - RNA, 19 nt, Artificial Sequence
  Description of Artificial Sequence: Synthetic oligonucleotide
uucaguggccacauccuca

SEQ ID NO: 3176964 - RNA, 19 nt, Artificial Sequence
  Description of Artificial Sequence: Synthetic oligonucleotide
uucuccugggguauuuuca

SEQ ID NO: 3176965 - RNA, 19 nt, Artificial Sequence
  Description of Artificial Sequence: Synthetic oligonucleotide
uaguagugugacuauucca

SEQ ID NO: 3176966 - RNA, 19 nt, Artificial Sequence
  Description of Artificial Sequence: Synthetic oligonucleotide
cucaucagcuagcaagugc

SEQ ID NO: 3176967 - RNA, 19 nt, Artificial Sequence
  Description of Artificial Sequence: Synthetic oligonucleotide
aagugcagccugcagcucu

SEQ ID NO: 3176968 - RNA, 19 nt, Artificial Sequence
  Description of Artificial Sequence: Synthetic oligonucleotide
cacgguaaaacucugcaga

SEQ ID NO: 3176969 - RNA, 19 nt, Artificial Sequence
  Description of Artificial Sequence: Synthetic oligonucleotide
agaggucgcaggcaggaag

SEQ ID NO: 3176970 - RNA, 19 nt, Artificial Sequence
  Description of Artificial Sequence: Synthetic oligonucleotide
aucagcuagcaagugcagc

SEQ ID NO: 3176971 - RNA, 19 nt, Artificial Sequence
  Description of Artificial Sequence: Synthetic oligonucleotide
ucugaacuccucauaggaa

SEQ ID NO: 3176972 - RNA, 19 nt, Artificial Sequence
  Description of Artificial Sequence: Synthetic oligonucleotide
ugacaaggacaauaccucu

SEQ ID NO: 3176973 - RNA, 19 nt, Artificial Sequence
  Description of Artificial Sequence: Synthetic oligonucleotide
guaacuuggcaucauucuc

SEQ ID NO: 3176974 - RNA, 19 nt, Artificial Sequence
  Description of Artificial Sequence: Synthetic oligonucleotide
ugggguauuuucaguggcc

SEQ ID NO: 3176975 - RNA, 19 nt, Artificial Sequence
  Description of Artificial Sequence: Synthetic oligonucleotide
uucuuaagugucuccgcca

SEQ ID NO: 3176976 - RNA, 19 nt, Artificial Sequence
  Description of Artificial Sequence: Synthetic oligonucleotide
uuaagugucuccgccaauc

SEQ ID NO: 3176977 - RNA, 19 nt, Artificial Sequence
  Description of Artificial Sequence: Synthetic oligonucleotide
uaagugucuccgccaauca

SEQ ID NO: 3176978 - RNA, 19 nt, Artificial Sequence
  Description of Artificial Sequence: Synthetic oligonucleotide
cuuuuguacuucucaucag

SEQ ID NO: 3176979 - RNA, 19 nt, Artificial Sequence
  Description of Artificial Sequence: Synthetic oligonucleotide
ugugacuauuccagggcac

SEQ ID NO: 3176980 - RNA, 19 nt, Artificial Sequence
  Description of Artificial Sequence: Synthetic oligonucleotide
aaggcacucuuuguucaac

SEQ ID NO: 3176981 - RNA, 19 nt, Artificial Sequence
  Description of Artificial Sequence: Synthetic oligonucleotide
uucccuaguagugugacua

SEQ ID NO: 3176982 - RNA, 19 nt, Artificial Sequence
  Description of Artificial Sequence: Synthetic oligonucleotide
guggccacauccucaaaag

SEQ ID NO: 3176983 - RNA, 19 nt, Artificial Sequence
  Description of Artificial Sequence: Synthetic oligonucleotide
uaggaaggcacucuuuguu

SEQ ID NO: 3176984 - RNA, 19 nt, Artificial Sequence
  Description of Artificial Sequence: Synthetic oligonucleotide
aauuaagcaacuuuacauc

SEQ ID NO: 3176985 - RNA, 19 nt, Artificial Sequence
  Description of Artificial Sequence: Synthetic oligonucleotide
uucuaauuaacuaauuaag

SEQ ID NO: 3176986 - RNA, 19 nt, Artificial Sequence
  Description of Artificial Sequence: Synthetic oligonucleotide
aaacuuagcagauuguccu

SEQ ID NO: 3176987 - RNA, 19 nt, Artificial Sequence
  Description of Artificial Sequence: Synthetic oligonucleotide
uaauuaagcaacuuuacau

SEQ ID NO: 3176988 - RNA, 19 nt, Artificial Sequence
  Description of Artificial Sequence: Synthetic oligonucleotide
ugugcaauagcauguauug

SEQ ID NO: 3176989 - RNA, 19 nt, Artificial Sequence
  Description of Artificial Sequence: Synthetic oligonucleotide
aaaccagcaaacauagcgc

SEQ ID NO: 3176990 - RNA, 19 nt, Artificial Sequence
  Description of Artificial Sequence: Synthetic oligonucleotide
cuaauuaacuaauuaagca

SEQ ID NO: 3176991 - RNA, 19 nt, Artificial Sequence
  Description of Artificial Sequence: Synthetic oligonucleotide
uguauuguuucuaauuaac

SEQ ID NO: 3176992 - RNA, 19 nt, Artificial Sequence
  Description of Artificial Sequence: Synthetic oligonucleotide
acuuuacaucucuacaagc

SEQ ID NO: 3176993 - RNA, 19 nt, Artificial Sequence
  Description of Artificial Sequence: Synthetic oligonucleotide
aguaucaccgugcucacuc

SEQ ID NO: 3176994 - RNA, 19 nt, Artificial Sequence
  Description of Artificial Sequence: Synthetic oligonucleotide
uaacagaaccaucaaaacu

SEQ ID NO: 3176995 - RNA, 19 nt, Artificial Sequence
  Description of Artificial Sequence: Synthetic oligonucleotide
uguaguaacagucguccgc

SEQ ID NO: 3176996 - RNA, 19 nt, Artificial Sequence
  Description of Artificial Sequence: Synthetic oligonucleotide
uucauuuccucacuugacc

SEQ ID NO: 3176997 - RNA, 19 nt, Artificial Sequence
  Description of Artificial Sequence: Synthetic oligonucleotide
auuaagcaacuuuacaucu

SEQ ID NO: 3176998 - RNA, 19 nt, Artificial Sequence
  Description of Artificial Sequence: Synthetic oligonucleotide
caggcugagacauaagccg

SEQ ID NO: 3176999 - RNA, 19 nt, Artificial Sequence
  Description of Artificial Sequence: Synthetic oligonucleotide
uuagcagauuguccuaggg

SEQ ID NO: 3177000 - RNA, 19 nt, Artificial Sequence
  Description of Artificial Sequence: Synthetic oligonucleotide
caccauuucauacugugcc

SEQ ID NO: 3177001 - RNA, 19 nt, Artificial Sequence
  Description of Artificial Sequence: Synthetic oligonucleotide
uaagcaacuuuacaucucu

SEQ ID NO: 3177002 - RNA, 19 nt, Artificial Sequence
  Description of Artificial Sequence: Synthetic oligonucleotide
uucuugcugguauaguggg

SEQ ID NO: 3177003 - RNA, 19 nt, Artificial Sequence
  Description of Artificial Sequence: Synthetic oligonucleotide
aagcaugacaagcacacau

SEQ ID NO: 3177004 - RNA, 19 nt, Artificial Sequence
  Description of Artificial Sequence: Synthetic oligonucleotide
ugacccuucaaaaccagca

SEQ ID NO: 3177005 - RNA, 19 nt, Artificial Sequence
  Description of Artificial Sequence: Synthetic oligonucleotide
acagcuugggcacacugcg

SEQ ID NO: 3177006 - RNA, 19 nt, Artificial Sequence
  Description of Artificial Sequence: Synthetic oligonucleotide
uaacuaauuaagcaacuuu

SEQ ID NO: 3177007 - RNA, 19 nt, Artificial Sequence
  Description of Artificial Sequence: Synthetic oligonucleotide
auuguccuaggguucuugc

SEQ ID NO: 3177008 - RNA, 19 nt, Artificial Sequence
  Description of Artificial Sequence: Synthetic oligonucleotide
uucauacugugccuguucc

SEQ ID NO: 3177009 - RNA, 19 nt, Artificial Sequence
  Description of Artificial Sequence: Synthetic oligonucleotide
uguccuaggguucuugcug

SEQ ID NO: 3177010 - RNA, 19 nt, Artificial Sequence
  Description of Artificial Sequence: Synthetic oligonucleotide
aaccagcaaacauagcgcu

SEQ ID NO: 3177011 - RNA, 19 nt, Artificial Sequence
  Description of Artificial Sequence: Synthetic oligonucleotide
ugcgccauaaauguaggag

SEQ ID NO: 3177012 - RNA, 19 nt, Artificial Sequence
  Description of Artificial Sequence: Synthetic oligonucleotide
uacaguaugugaacaacuc

SEQ ID NO: 3177013 - RNA, 19 nt, Artificial Sequence
  Description of Artificial Sequence: Synthetic oligonucleotide
cacuugacccuucaaaacc

SEQ ID NO: 3177014 - RNA, 19 nt, Artificial Sequence
  Description of Artificial Sequence: Synthetic oligonucleotide
gguauagugggccucacag

SEQ ID NO: 3177015 - RNA, 19 nt, Artificial Sequence
  Description of Artificial Sequence: Synthetic oligonucleotide
ugucuuuugcaagugcggg

SEQ ID NO: 3177016 - RNA, 19 nt, Artificial Sequence
  Description of Artificial Sequence: Synthetic oligonucleotide
acaggcugagacauaagcc

SEQ ID NO: 3177017 - RNA, 19 nt, Artificial Sequence
  Description of Artificial Sequence: Synthetic oligonucleotide
caucuucccaagaaucucg

SEQ ID NO: 3177018 - RNA, 19 nt, Artificial Sequence
  Description of Artificial Sequence: Synthetic oligonucleotide
aucucuacaagcaugacaa

SEQ ID NO: 3177019 - RNA, 19 nt, Artificial Sequence
  Description of Artificial Sequence: Synthetic oligonucleotide
cuucuccucaccaucgucc

SEQ ID NO: 3177020 - RNA, 19 nt, Artificial Sequence
  Description of Artificial Sequence: Synthetic oligonucleotide
ucgaaggugaugcgcagcc

SEQ ID NO: 3177021 - RNA, 19 nt, Artificial Sequence
  Description of Artificial Sequence: Synthetic oligonucleotide
auagcucaggaaguaauuc

SEQ ID NO: 3177022 - RNA, 19 nt, Artificial Sequence
  Description of Artificial Sequence: Synthetic oligonucleotide
ugugcgccauaaauguagg

SEQ ID NO: 3177023 - RNA, 19 nt, Artificial Sequence
  Description of Artificial Sequence: Synthetic oligonucleotide
gucaccauuucauacugug

SEQ ID NO: 3177024 - RNA, 19 nt, Artificial Sequence
  Description of Artificial Sequence: Synthetic oligonucleotide
auagcgcuaccuuccuucc

SEQ ID NO: 3177025 - RNA, 19 nt, Artificial Sequence
  Description of Artificial Sequence: Synthetic oligonucleotide
ucaaaacuuagcagauugu

SEQ ID NO: 3177026 - RNA, 19 nt, Artificial Sequence
  Description of Artificial Sequence: Synthetic oligonucleotide
cacaggcugagacauaagc

SEQ ID NO: 3177027 - RNA, 19 nt, Artificial Sequence
  Description of Artificial Sequence: Synthetic oligonucleotide
uaagccgacuccaggaaga

SEQ ID NO: 3177028 - RNA, 19 nt, Artificial Sequence
  Description of Artificial Sequence: Synthetic oligonucleotide
cucaguaucaccgugcuca

SEQ ID NO: 3177029 - RNA, 19 nt, Artificial Sequence
  Description of Artificial Sequence: Synthetic oligonucleotide
aagcacacauagcucagga

SEQ ID NO: 3177030 - RNA, 19 nt, Artificial Sequence
  Description of Artificial Sequence: Synthetic oligonucleotide
gcacacauagcucaggaag

SEQ ID NO: 3177031 - RNA, 19 nt, Artificial Sequence
  Description of Artificial Sequence: Synthetic oligonucleotide
ugcgguuuauguaguaaca

SEQ ID NO: 3177032 - RNA, 19 nt, Artificial Sequence
  Description of Artificial Sequence: Synthetic oligonucleotide
aggaaguaauucuuaacaa

SEQ ID NO: 3177033 - RNA, 19 nt, Artificial Sequence
  Description of Artificial Sequence: Synthetic oligonucleotide
agcagauuguccuaggguu

SEQ ID NO: 3177034 - RNA, 19 nt, Artificial Sequence
  Description of Artificial Sequence: Synthetic oligonucleotide
ucaccauuucauacugugc

SEQ ID NO: 3177035 - RNA, 19 nt, Artificial Sequence
  Description of Artificial Sequence: Synthetic oligonucleotide
acaguaugugaacaacuca

SEQ ID NO: 3177036 - RNA, 19 nt, Artificial Sequence
  Description of Artificial Sequence: Synthetic oligonucleotide
ugucgcauggaccgccugg

SEQ ID NO: 3177037 - RNA, 19 nt, Artificial Sequence
  Description of Artificial Sequence: Synthetic oligonucleotide
uuaagcaacuuuacaucuc

SEQ ID NO: 3177038 - RNA, 19 nt, Artificial Sequence
  Description of Artificial Sequence: Synthetic oligonucleotide
ugugcuuaacagaaccauc

SEQ ID NO: 3177039 - RNA, 19 nt, Artificial Sequence
  Description of Artificial Sequence: Synthetic oligonucleotide
aagucagccugguauucug

SEQ ID NO: 3177040 - RNA, 19 nt, Artificial Sequence
  Description of Artificial Sequence: Synthetic oligonucleotide
cauagcgcuaccuuccuuc

SEQ ID NO: 3177041 - RNA, 19 nt, Artificial Sequence
  Description of Artificial Sequence: Synthetic oligonucleotide
caaaacuuagcagauuguc

SEQ ID NO: 3177042 - RNA, 19 nt, Artificial Sequence
  Description of Artificial Sequence: Synthetic oligonucleotide
ucacuugacccuucaaaac

SEQ ID NO: 3177043 - RNA, 19 nt, Artificial Sequence
  Description of Artificial Sequence: Synthetic oligonucleotide
ucucucauaaccccuccuc

SEQ ID NO: 3177044 - RNA, 19 nt, Artificial Sequence
  Description of Artificial Sequence: Synthetic oligonucleotide
uggguggugugucgcaugg

SEQ ID NO: 3177045 - RNA, 19 nt, Artificial Sequence
  Description of Artificial Sequence: Synthetic oligonucleotide
gaacaacucaaauacccaa

SEQ ID NO: 3177046 - RNA, 19 nt, Artificial Sequence
  Description of Artificial Sequence: Synthetic oligonucleotide
uagcagauuguccuagggu

SEQ ID NO: 3177047 - RNA, 19 nt, Artificial Sequence
  Description of Artificial Sequence: Synthetic oligonucleotide
auaagccgacuccaggaag

SEQ ID NO: 3177048 - RNA, 19 nt, Artificial Sequence
  Description of Artificial Sequence: Synthetic oligonucleotide
guauagugggccucacagg

SEQ ID NO: 3177049 - RNA, 19 nt, Artificial Sequence
  Description of Artificial Sequence: Synthetic oligonucleotide
auucauuuccucacuugac

SEQ ID NO: 3177050 - RNA, 19 nt, Artificial Sequence
  Description of Artificial Sequence: Synthetic oligonucleotide
uuaggagcgccgccgagug

SEQ ID NO: 3177051 - RNA, 19 nt, Artificial Sequence
  Description of Artificial Sequence: Synthetic oligonucleotide
caugacaagcacacauagc

SEQ ID NO: 3177052 - RNA, 19 nt, Artificial Sequence
  Description of Artificial Sequence: Synthetic oligonucleotide
cucaaauacccaagccugc

SEQ ID NO: 3177053 - RNA, 19 nt, Artificial Sequence
  Description of Artificial Sequence: Synthetic oligonucleotide
guaguaacagucguccgcc

SEQ ID NO: 3177054 - RNA, 19 nt, Artificial Sequence
  Description of Artificial Sequence: Synthetic oligonucleotide
auguaguaacagucguccg

SEQ ID NO: 3177055 - RNA, 19 nt, Artificial Sequence
  Description of Artificial Sequence: Synthetic oligonucleotide
agaaguggcgcacguagca

SEQ ID NO: 3177056 - RNA, 19 nt, Artificial Sequence
  Description of Artificial Sequence: Synthetic oligonucleotide
cuuagcagauuguccuagg

SEQ ID NO: 3177057 - RNA, 19 nt, Artificial Sequence
  Description of Artificial Sequence: Synthetic oligonucleotide
auuaacuaauuaagcaacu

SEQ ID NO: 3177058 - RNA, 19 nt, Artificial Sequence
  Description of Artificial Sequence: Synthetic oligonucleotide
uagugggccucacaggcug

SEQ ID NO: 3177059 - RNA, 19 nt, Artificial Sequence
  Description of Artificial Sequence: Synthetic oligonucleotide
aaguggcgcacguagcacu

SEQ ID NO: 3177060 - RNA, 19 nt, Artificial Sequence
  Description of Artificial Sequence: Synthetic oligonucleotide
uuugcaagugcgggaacag

SEQ ID NO: 3177061 - RNA, 19 nt, Artificial Sequence
  Description of Artificial Sequence: Synthetic oligonucleotide
agccucaccaaccgccgcc

SEQ ID NO: 3177062 - RNA, 19 nt, Artificial Sequence
  Description of Artificial Sequence: Synthetic oligonucleotide
caguaugugaacaacucaa

SEQ ID NO: 3177063 - RNA, 19 nt, Artificial Sequence
  Description of Artificial Sequence: Synthetic oligonucleotide
gcgccauaaauguaggagg

SEQ ID NO: 3177064 - RNA, 19 nt, Artificial Sequence
  Description of Artificial Sequence: Synthetic oligonucleotide
accaucguccuuaggagcg

SEQ ID NO: 3177065 - RNA, 19 nt, Artificial Sequence
  Description of Artificial Sequence: Synthetic oligonucleotide
cugcgguuuauguaguaac

SEQ ID NO: 3177066 - RNA, 19 nt, Artificial Sequence
  Description of Artificial Sequence: Synthetic oligonucleotide
guaacagucguccgccagc

SEQ ID NO: 3177067 - RNA, 19 nt, Artificial Sequence
  Description of Artificial Sequence: Synthetic oligonucleotide
ucccagugggcccaccuag

SEQ ID NO: 3177068 - RNA, 19 nt, Artificial Sequence
  Description of Artificial Sequence: Synthetic oligonucleotide
ucccaagaaucucgggaag

SEQ ID NO: 3177069 - RNA, 19 nt, Artificial Sequence
  Description of Artificial Sequence: Synthetic oligonucleotide
aagaaucucgggaaguuuu

SEQ ID NO: 3177070 - RNA, 19 nt, Artificial Sequence
  Description of Artificial Sequence: Synthetic oligonucleotide
aacaaucgcaguaaauguu

SEQ ID NO: 3177071 - RNA, 19 nt, Artificial Sequence
  Description of Artificial Sequence: Synthetic oligonucleotide
caauagcauguauuguuuc

SEQ ID NO: 3177072 - RNA, 19 nt, Artificial Sequence
  Description of Artificial Sequence: Synthetic oligonucleotide
acugcgcuuggccugaggu

SEQ ID NO: 3177073 - RNA, 19 nt, Artificial Sequence
  Description of Artificial Sequence: Synthetic oligonucleotide
aaccuacaguaugugaaca

SEQ ID NO: 3177074 - RNA, 19 nt, Artificial Sequence
  Description of Artificial Sequence: Synthetic oligonucleotide
aagggaagcgcguggucga

SEQ ID NO: 3177075 - RNA, 19 nt, Artificial Sequence
  Description of Artificial Sequence: Synthetic oligonucleotide
ucaccgugcucacucacgu

SEQ ID NO: 3177076 - RNA, 19 nt, Artificial Sequence
  Description of Artificial Sequence: Synthetic oligonucleotide
ucucauaaccccuccucuc

SEQ ID NO: 3177077 - RNA, 19 nt, Artificial Sequence
  Description of Artificial Sequence: Synthetic oligonucleotide
ugcucaguaucaccgugcu

SEQ ID NO: 3177078 - RNA, 19 nt, Artificial Sequence
  Description of Artificial Sequence: Synthetic oligonucleotide
acuuagcagauuguccuag

SEQ ID NO: 3177079 - RNA, 19 nt, Artificial Sequence
  Description of Artificial Sequence: Synthetic oligonucleotide
cucacuugacccuucaaaa

SEQ ID NO: 3177080 - RNA, 19 nt, Artificial Sequence
  Description of Artificial Sequence: Synthetic oligonucleotide
caaauacccaagccugccc

SEQ ID NO: 3177081 - RNA, 19 nt, Artificial Sequence
  Description of Artificial Sequence: Synthetic oligonucleotide
cagccugugcaauagcaug

SEQ ID NO: 3177082 - RNA, 19 nt, Artificial Sequence
  Description of Artificial Sequence: Synthetic oligonucleotide
ugcgcuuggccugagguga

SEQ ID NO: 3177083 - RNA, 19 nt, Artificial Sequence
  Description of Artificial Sequence: Synthetic oligonucleotide
acggcagccucaccaaccg

SEQ ID NO: 3177084 - RNA, 19 nt, Artificial Sequence
  Description of Artificial Sequence: Synthetic oligonucleotide
aauaaguuaacucaaauaa

SEQ ID NO: 3177085 - RNA, 19 nt, Artificial Sequence
  Description of Artificial Sequence: Synthetic oligonucleotide
aaaagaauaaguuaacuca

SEQ ID NO: 3177086 - RNA, 19 nt, Artificial Sequence
  Description of Artificial Sequence: Synthetic oligonucleotide
  modified_base (5)..(5): a, c, u, g, unknown or other
auaunaaauuuucaaaugc

SEQ ID NO: 3177087 - RNA, 19 nt, Artificial Sequence
  Description of Artificial Sequence: Synthetic oligonucleotide
ugaaugaugacuaaagucu

SEQ ID NO: 3177088 - RNA, 19 nt, Artificial Sequence
  Description of Artificial Sequence: Synthetic oligonucleotide
ugcuaugugaauuauauca

SEQ ID NO: 3177089 - RNA, 19 nt, Artificial Sequence
  Description of Artificial Sequence: Synthetic oligonucleotide
auugauaugguuucucacc

SEQ ID NO: 3177090 - RNA, 19 nt, Artificial Sequence
  Description of Artificial Sequence: Synthetic oligonucleotide
uuaauugugacccacgagu

SEQ ID NO: 3177091 - RNA, 19 nt, Artificial Sequence
  Description of Artificial Sequence: Synthetic oligonucleotide
aaaugcugaacuuugugag

SEQ ID NO: 3177092 - RNA, 19 nt, Artificial Sequence
  Description of Artificial Sequence: Synthetic oligonucleotide
uauauuuacauucguaaga

SEQ ID NO: 3177093 - RNA, 19 nt, Artificial Sequence
  Description of Artificial Sequence: Synthetic oligonucleotide
  modified_base (4)..(4): a, c, u, g, unknown or other
uaunaaauuuucaaaugcu

SEQ ID NO: 3177094 - RNA, 19 nt, Artificial Sequence
  Description of Artificial Sequence: Synthetic oligonucleotide
auucuuuacauugauaugg

SEQ ID NO: 3177095 - RNA, 19 nt, Artificial Sequence
  Description of Artificial Sequence: Synthetic oligonucleotide
uaaguaguaauccacgagc

SEQ ID NO: 3177096 - RNA, 19 nt, Artificial Sequence
  Description of Artificial Sequence: Synthetic oligonucleotide
aaaauugugaaugaugacu

SEQ ID NO: 3177097 - RNA, 19 nt, Artificial Sequence
  Description of Artificial Sequence: Synthetic oligonucleotide
  modified_base (2)..(2): a, c, u, g, unknown or other
unaaauuuucaaaugcuga

SEQ ID NO: 3177098 - RNA, 19 nt, Artificial Sequence
  Description of Artificial Sequence: Synthetic oligonucleotide
ucugauguugcauuaauug

SEQ ID NO: 3177099 - RNA, 19 nt, Artificial Sequence
  Description of Artificial Sequence: Synthetic oligonucleotide
ucugauguuguauaaguag

SEQ ID NO: 3177100 - RNA, 19 nt, Artificial Sequence
  Description of Artificial Sequence: Synthetic oligonucleotide
auuauaucagcauuucuag

SEQ ID NO: 3177101 - RNA, 19 nt, Artificial Sequence
  Description of Artificial Sequence: Synthetic oligonucleotide
ugagcugcgaauaaaagac

SEQ ID NO: 3177102 - RNA, 19 nt, Artificial Sequence
  Description of Artificial Sequence: Synthetic oligonucleotide
aagaugugagcucugagug

SEQ ID NO: 3177103 - RNA, 19 nt, Artificial Sequence
  Description of Artificial Sequence: Synthetic oligonucleotide
aaauuuucaaaugcugaac

SEQ ID NO: 3177104 - RNA, 19 nt, Artificial Sequence
  Description of Artificial Sequence: Synthetic oligonucleotide
aauggaaaagaauaaguua

SEQ ID NO: 3177105 - RNA, 19 nt, Artificial Sequence
  Description of Artificial Sequence: Synthetic oligonucleotide
uuugcuaugugaauuauau

SEQ ID NO: 3177106 - RNA, 19 nt, Artificial Sequence
  Description of Artificial Sequence: Synthetic oligonucleotide
gaaaagaauaaguuaacuc

SEQ ID NO: 3177107 - RNA, 19 nt, Artificial Sequence
  Description of Artificial Sequence: Synthetic oligonucleotide
uugauaugguuucucaccg

SEQ ID NO: 3177108 - RNA, 19 nt, Artificial Sequence
  Description of Artificial Sequence: Synthetic oligonucleotide
uauuccacauucuuuacag

SEQ ID NO: 3177109 - RNA, 19 nt, Artificial Sequence
  Description of Artificial Sequence: Synthetic oligonucleotide
guugcauuaauugugaccc

SEQ ID NO: 3177110 - RNA, 19 nt, Artificial Sequence
  Description of Artificial Sequence: Synthetic oligonucleotide
gaugacuaaagucuauucc

SEQ ID NO: 3177111 - RNA, 19 nt, Artificial Sequence
  Description of Artificial Sequence: Synthetic oligonucleotide
uuuacagucaacagauuug

SEQ ID NO: 3177112 - RNA, 19 nt, Artificial Sequence
  Description of Artificial Sequence: Synthetic oligonucleotide
aagaguucuucacugauga

SEQ ID NO: 3177113 - RNA, 19 nt, Artificial Sequence
  Description of Artificial Sequence: Synthetic oligonucleotide
uguuguauaaguaguaauc

SEQ ID NO: 3177114 - RNA, 19 nt, Artificial Sequence
  Description of Artificial Sequence: Synthetic oligonucleotide
ugauguugcauuaauugug

SEQ ID NO: 3177115 - RNA, 19 nt, Artificial Sequence
  Description of Artificial Sequence: Synthetic oligonucleotide
uaugugaauuauaucagca

SEQ ID NO: 3177116 - RNA, 19 nt, Artificial Sequence
  Description of Artificial Sequence: Synthetic oligonucleotide
ucugaugucgaguaaggag

SEQ ID NO: 3177117 - RNA, 19 nt, Artificial Sequence
  Description of Artificial Sequence: Synthetic oligonucleotide
uugugaaugaugacuaaag

SEQ ID NO: 3177118 - RNA, 19 nt, Artificial Sequence
  Description of Artificial Sequence: Synthetic oligonucleotide
uucuuuacagucaacagau

SEQ ID NO: 3177119 - RNA, 19 nt, Artificial Sequence
  Description of Artificial Sequence: Synthetic oligonucleotide
uauaucagcauuucuaguc

SEQ ID NO: 3177120 - RNA, 19 nt, Artificial Sequence
  Description of Artificial Sequence: Synthetic oligonucleotide
  modified_base (6)..(6): a, c, u, g, unknown or other
cauaunaaauuuucaaaug

SEQ ID NO: 3177121 - RNA, 19 nt, Artificial Sequence
  Description of Artificial Sequence: Synthetic oligonucleotide
  modified_base (18)..(18): a, c, u, g, unknown or other
uuucuagucucccauauna

SEQ ID NO: 3177122 - RNA, 19 nt, Artificial Sequence
  Description of Artificial Sequence: Synthetic oligonucleotide
ugugaaccacgaaugaagg

SEQ ID NO: 3177123 - RNA, 19 nt, Artificial Sequence
  Description of Artificial Sequence: Synthetic oligonucleotide
uuugauguugaguaagcug

SEQ ID NO: 3177124 - RNA, 19 nt, Artificial Sequence
  Description of Artificial Sequence: Synthetic oligonucleotide
aacuuugugaguccuauau

SEQ ID NO: 3177125 - RNA, 19 nt, Artificial Sequence
  Description of Artificial Sequence: Synthetic oligonucleotide
uuugucacugcuaugaauu

SEQ ID NO: 3177126 - RNA, 19 nt, Artificial Sequence
  Description of Artificial Sequence: Synthetic oligonucleotide
uucuacauucuuuacauuc

SEQ ID NO: 3177127 - RNA, 19 nt, Artificial Sequence
  Description of Artificial Sequence: Synthetic oligonucleotide
auucguaagaguucuucac

SEQ ID NO: 3177128 - RNA, 19 nt, Artificial Sequence
  Description of Artificial Sequence: Synthetic oligonucleotide
aauuauaucagcauuucua

SEQ ID NO: 3177129 - RNA, 19 nt, Artificial Sequence
  Description of Artificial Sequence: Synthetic oligonucleotide
ugaaccacgaaugaaggcc

SEQ ID NO: 3177130 - RNA, 19 nt, Artificial Sequence
  Description of Artificial Sequence: Synthetic oligonucleotide
aauaaaagacuugccgcac

SEQ ID NO: 3177131 - RNA, 19 nt, Artificial Sequence
  Description of Artificial Sequence: Synthetic oligonucleotide
uaaagucuauuccacauuc

SEQ ID NO: 3177132 - RNA, 19 nt, Artificial Sequence
  Description of Artificial Sequence: Synthetic oligonucleotide
augacuaaagucuauucca

SEQ ID NO: 3177133 - RNA, 19 nt, Artificial Sequence
  Description of Artificial Sequence: Synthetic oligonucleotide
ugacccacgaguaaaggcc

SEQ ID NO: 3177134 - RNA, 19 nt, Artificial Sequence
  Description of Artificial Sequence: Synthetic oligonucleotide
auauuuacauucguaagag

SEQ ID NO: 3177135 - RNA, 19 nt, Artificial Sequence
  Description of Artificial Sequence: Synthetic oligonucleotide
ugagugaaggccauucugc

SEQ ID NO: 3177136 - RNA, 19 nt, Artificial Sequence
  Description of Artificial Sequence: Synthetic oligonucleotide
ggaaaagcuaugcuaaugg

SEQ ID NO: 3177137 - RNA, 19 nt, Artificial Sequence
  Description of Artificial Sequence: Synthetic oligonucleotide
acagucaacagauuuguca

SEQ ID NO: 3177138 - RNA, 19 nt, Artificial Sequence
  Description of Artificial Sequence: Synthetic oligonucleotide
uaugcuaauggaaaagaau

SEQ ID NO: 3177139 - RNA, 19 nt, Artificial Sequence
  Description of Artificial Sequence: Synthetic oligonucleotide
auaaguaguaauccacgag

SEQ ID NO: 3177140 - RNA, 19 nt, Artificial Sequence
  Description of Artificial Sequence: Synthetic oligonucleotide
uguugcauuaauugugacc

SEQ ID NO: 3177141 - RNA, 19 nt, Artificial Sequence
  Description of Artificial Sequence: Synthetic oligonucleotide
uuuacauucguaagaguuc

SEQ ID NO: 3177142 - RNA, 19 nt, Artificial Sequence
  Description of Artificial Sequence: Synthetic oligonucleotide
auucuuuacagucaacaga

SEQ ID NO: 3177143 - RNA, 19 nt, Artificial Sequence
  Description of Artificial Sequence: Synthetic oligonucleotide
ucaaaugcugaacuuugug

SEQ ID NO: 3177144 - RNA, 19 nt, Artificial Sequence
  Description of Artificial Sequence: Synthetic oligonucleotide
ugagcugugaaccacgaau

SEQ ID NO: 3177145 - RNA, 19 nt, Artificial Sequence
  Description of Artificial Sequence: Synthetic oligonucleotide
ugugaauuauaucagcauu

SEQ ID NO: 3177146 - RNA, 19 nt, Artificial Sequence
  Description of Artificial Sequence: Synthetic oligonucleotide
uauaaguaguaauccacga

SEQ ID NO: 3177147 - RNA, 19 nt, Artificial Sequence
  Description of Artificial Sequence: Synthetic oligonucleotide
aaguaguaauccacgagcg

SEQ ID NO: 3177148 - RNA, 19 nt, Artificial Sequence
  Description of Artificial Sequence: Synthetic oligonucleotide
ucacugaugaccaggaaaa

SEQ ID NO: 3177149 - RNA, 19 nt, Artificial Sequence
  Description of Artificial Sequence: Synthetic oligonucleotide
gaauaaaagacuugccgca

SEQ ID NO: 3177150 - RNA, 19 nt, Artificial Sequence
  Description of Artificial Sequence: Synthetic oligonucleotide
acucccuacaccgauaugg

SEQ ID NO: 3177151 - RNA, 19 nt, Artificial Sequence
  Description of Artificial Sequence: Synthetic oligonucleotide
guuguauaaguaguaaucc

SEQ ID NO: 3177152 - RNA, 19 nt, Artificial Sequence
  Description of Artificial Sequence: Synthetic oligonucleotide
  modified_base (16)..(16): a, c, u, g, unknown or other
ucuagucucccauaunaaa

SEQ ID NO: 3177153 - RNA, 19 nt, Artificial Sequence
  Description of Artificial Sequence: Synthetic oligonucleotide
  modified_base (3)..(3): a, c, u, g, unknown or other
aunaaauuuucaaaugcug

SEQ ID NO: 3177154 - RNA, 19 nt, Artificial Sequence
  Description of Artificial Sequence: Synthetic oligonucleotide
ugugaaugaugacuaaagu

SEQ ID NO: 3177155 - RNA, 19 nt, Artificial Sequence
  Description of Artificial Sequence: Synthetic oligonucleotide
  modified_base (9)..(9): a, c, u, g, unknown or other
ucccauaunaaauuuucaa

SEQ ID NO: 3177156 - RNA, 19 nt, Artificial Sequence
  Description of Artificial Sequence: Synthetic oligonucleotide
acugaugaccaggaaaagc

SEQ ID NO: 3177157 - RNA, 19 nt, Artificial Sequence
  Description of Artificial Sequence: Synthetic oligonucleotide
uucugcauucuuuacauuc

SEQ ID NO: 3177158 - RNA, 19 nt, Artificial Sequence
  Description of Artificial Sequence: Synthetic oligonucleotide
uucacugaugaccaggaaa

SEQ ID NO: 3177159 - RNA, 19 nt, Artificial Sequence
  Description of Artificial Sequence: Synthetic oligonucleotide
aaagcuaugcuaauggaaa

SEQ ID NO: 3177160 - RNA, 19 nt, Artificial Sequence
  Description of Artificial Sequence: Synthetic oligonucleotide
cugugaaccacgaaugaag

SEQ ID NO: 3177161 - RNA, 19 nt, Artificial Sequence
  Description of Artificial Sequence: Synthetic oligonucleotide
cuaugugaauuauaucagc

SEQ ID NO: 3177162 - RNA, 19 nt, Artificial Sequence
  Description of Artificial Sequence: Synthetic oligonucleotide
gugaaugaugacuaaaguc

SEQ ID NO: 3177163 - RNA, 19 nt, Artificial Sequence
  Description of Artificial Sequence: Synthetic oligonucleotide
gaguucuucacugaugacc

SEQ ID NO: 3177164 - RNA, 19 nt, Artificial Sequence
  Description of Artificial Sequence: Synthetic oligonucleotide
ucuuugauguugaguaagc

SEQ ID NO: 3177165 - RNA, 19 nt, Artificial Sequence
  Description of Artificial Sequence: Synthetic oligonucleotide
aaagaauaaguuaacucaa

SEQ ID NO: 3177166 - RNA, 19 nt, Artificial Sequence
  Description of Artificial Sequence: Synthetic oligonucleotide
uguugaguaagcugugagc

SEQ ID NO: 3177167 - RNA, 19 nt, Artificial Sequence
  Description of Artificial Sequence: Synthetic oligonucleotide
uuggugccgagaaagaugu

SEQ ID NO: 3177168 - RNA, 19 nt, Artificial Sequence
  Description of Artificial Sequence: Synthetic oligonucleotide
gcgaauaaaagacuugccg

SEQ ID NO: 3177169 - RNA, 19 nt, Artificial Sequence
  Description of Artificial Sequence: Synthetic oligonucleotide
aaaagacuugccgcacucc

SEQ ID NO: 3177170 - RNA, 19 nt, Artificial Sequence
  Description of Artificial Sequence: Synthetic oligonucleotide
aaagacuugccgcacuccu

SEQ ID NO: 3177171 - RNA, 19 nt, Artificial Sequence
  Description of Artificial Sequence: Synthetic oligonucleotide
gaauaaguuaacucaaaua

SEQ ID NO: 3177172 - RNA, 19 nt, Artificial Sequence
  Description of Artificial Sequence: Synthetic oligonucleotide
auuaauugugacccacgag

SEQ ID NO: 3177173 - RNA, 19 nt, Artificial Sequence
  Description of Artificial Sequence: Synthetic oligonucleotide
ugugagcugcgaauaaaag

SEQ ID NO: 3177174 - RNA, 19 nt, Artificial Sequence
  Description of Artificial Sequence: Synthetic oligonucleotide
cauucuuuacagucaacag

SEQ ID NO: 3177175 - RNA, 19 nt, Artificial Sequence
  Description of Artificial Sequence: Synthetic oligonucleotide
ucugcauucuuuacauuca

SEQ ID NO: 3177176 - RNA, 19 nt, Artificial Sequence
  Description of Artificial Sequence: Synthetic oligonucleotide
  modified_base (11)..(11): a, c, u, g, unknown or other
ucucccauaunaaauuuuc

SEQ ID NO: 3177177 - RNA, 19 nt, Artificial Sequence
  Description of Artificial Sequence: Synthetic oligonucleotide
agaauaaguuaacucaaau

SEQ ID NO: 3177178 - RNA, 19 nt, Artificial Sequence
  Description of Artificial Sequence: Synthetic oligonucleotide
agauuugucacugcuauga

SEQ ID NO: 3177179 - RNA, 19 nt, Artificial Sequence
  Description of Artificial Sequence: Synthetic oligonucleotide
acuaaagucuauuccacau

SEQ ID NO: 3177180 - RNA, 19 nt, Artificial Sequence
  Description of Artificial Sequence: Synthetic oligonucleotide
uucuuugauguugaguaag

SEQ ID NO: 3177181 - RNA, 19 nt, Artificial Sequence
  Description of Artificial Sequence: Synthetic oligonucleotide
aaugcugaacuuugugagu

SEQ ID NO: 3177182 - RNA, 19 nt, Artificial Sequence
  Description of Artificial Sequence: Synthetic oligonucleotide
uaagaguucuucacugaug

SEQ ID NO: 3177183 - RNA, 19 nt, Artificial Sequence
  Description of Artificial Sequence: Synthetic oligonucleotide
ucguaagaguucuucacug

SEQ ID NO: 3177184 - RNA, 19 nt, Artificial Sequence
  Description of Artificial Sequence: Synthetic oligonucleotide
gaauccaagauccagaagc

SEQ ID NO: 3177185 - RNA, 19 nt, Artificial Sequence
  Description of Artificial Sequence: Synthetic oligonucleotide
aucauuucuuaauuaaucc

SEQ ID NO: 3177186 - RNA, 19 nt, Artificial Sequence
  Description of Artificial Sequence: Synthetic oligonucleotide
aacaaugacagauuuagga

SEQ ID NO: 3177187 - RNA, 19 nt, Artificial Sequence
  Description of Artificial Sequence: Synthetic oligonucleotide
ugcaauauaggcuagcaag

SEQ ID NO: 3177188 - RNA, 19 nt, Artificial Sequence
  Description of Artificial Sequence: Synthetic oligonucleotide
cuuaauuaauccaacaaug

SEQ ID NO: 3177189 - RNA, 19 nt, Artificial Sequence
  Description of Artificial Sequence: Synthetic oligonucleotide
aauauaggcuagcaagucg

SEQ ID NO: 3177190 - RNA, 19 nt, Artificial Sequence
  Description of Artificial Sequence: Synthetic oligonucleotide
aauagucccagugaaauuc

SEQ ID NO: 3177191 - RNA, 19 nt, Artificial Sequence
  Description of Artificial Sequence: Synthetic oligonucleotide
uauguuguauguauuaccc

SEQ ID NO: 3177192 - RNA, 19 nt, Artificial Sequence
  Description of Artificial Sequence: Synthetic oligonucleotide
aaauggguggagcaaaagg

SEQ ID NO: 3177193 - RNA, 19 nt, Artificial Sequence
  Description of Artificial Sequence: Synthetic oligonucleotide
aaaacguagguguccaugg

SEQ ID NO: 3177194 - RNA, 19 nt, Artificial Sequence
  Description of Artificial Sequence: Synthetic oligonucleotide
ucaagaagcaaaugggugg

SEQ ID NO: 3177195 - RNA, 19 nt, Artificial Sequence
  Description of Artificial Sequence: Synthetic oligonucleotide
gauggcaccgaauaaagag

SEQ ID NO: 3177196 - RNA, 19 nt, Artificial Sequence
  Description of Artificial Sequence: Synthetic oligonucleotide
aguauauucugccuuuggc

SEQ ID NO: 3177197 - RNA, 19 nt, Artificial Sequence
  Description of Artificial Sequence: Synthetic oligonucleotide
aggaaguuccucuugaaac

SEQ ID NO: 3177198 - RNA, 19 nt, Artificial Sequence
  Description of Artificial Sequence: Synthetic oligonucleotide
ucuuugaaaacguaggugu

SEQ ID NO: 3177199 - RNA, 19 nt, Artificial Sequence
  Description of Artificial Sequence: Synthetic oligonucleotide
uuaauuaauccaacaauga

SEQ ID NO: 3177200 - RNA, 19 nt, Artificial Sequence
  Description of Artificial Sequence: Synthetic oligonucleotide
aauuaauccaacaaugaca

SEQ ID NO: 3177201 - RNA, 19 nt, Artificial Sequence
  Description of Artificial Sequence: Synthetic oligonucleotide
acagauuuaggauggcucc

SEQ ID NO: 3177202 - RNA, 19 nt, Artificial Sequence
  Description of Artificial Sequence: Synthetic oligonucleotide
aagugugggaaauacaugu

SEQ ID NO: 3177203 - RNA, 19 nt, Artificial Sequence
  Description of Artificial Sequence: Synthetic oligonucleotide
agauagggcaaguauauuc

SEQ ID NO: 3177204 - RNA, 19 nt, Artificial Sequence
  Description of Artificial Sequence: Synthetic oligonucleotide
aauggguggagcaaaaggg

SEQ ID NO: 3177205 - RNA, 19 nt, Artificial Sequence
  Description of Artificial Sequence: Synthetic oligonucleotide
guauguauuacccugguac

SEQ ID NO: 3177206 - RNA, 19 nt, Artificial Sequence
  Description of Artificial Sequence: Synthetic oligonucleotide
auuaauccaacaaugacag

SEQ ID NO: 3177207 - RNA, 19 nt, Artificial Sequence
  Description of Artificial Sequence: Synthetic oligonucleotide
ucuuaauuaauccaacaau

SEQ ID NO: 3177208 - RNA, 19 nt, Artificial Sequence
  Description of Artificial Sequence: Synthetic oligonucleotide
aaugacagauuuaggaugg

SEQ ID NO: 3177209 - RNA, 19 nt, Artificial Sequence
  Description of Artificial Sequence: Synthetic oligonucleotide
uaauuaauccaacaaugac

SEQ ID NO: 3177210 - RNA, 19 nt, Artificial Sequence
  Description of Artificial Sequence: Synthetic oligonucleotide
uguuguauguauuacccug

SEQ ID NO: 3177211 - RNA, 19 nt, Artificial Sequence
  Description of Artificial Sequence: Synthetic oligonucleotide
uacauguucacauucuuca

SEQ ID NO: 3177212 - RNA, 19 nt, Artificial Sequence
  Description of Artificial Sequence: Synthetic oligonucleotide
uggaauaucugaagugugg

SEQ ID NO: 3177213 - RNA, 19 nt, Artificial Sequence
  Description of Artificial Sequence: Synthetic oligonucleotide
gagauuuccauguuugcag

SEQ ID NO: 3177214 - RNA, 19 nt, Artificial Sequence
  Description of Artificial Sequence: Synthetic oligonucleotide
aaaucccugaacuuguacu

SEQ ID NO: 3177215 - RNA, 19 nt, Artificial Sequence
  Description of Artificial Sequence: Synthetic oligonucleotide
uuccucuugaaacuuggcg

SEQ ID NO: 3177216 - RNA, 19 nt, Artificial Sequence
  Description of Artificial Sequence: Synthetic oligonucleotide
aauaaagaggaaguuccuc

SEQ ID NO: 3177217 - RNA, 19 nt, Artificial Sequence
  Description of Artificial Sequence: Synthetic oligonucleotide
ugaagugugggaaauacau

SEQ ID NO: 3177218 - RNA, 19 nt, Artificial Sequence
  Description of Artificial Sequence: Synthetic oligonucleotide
acaucacaggaauaguccc

SEQ ID NO: 3177219 - RNA, 19 nt, Artificial Sequence
  Description of Artificial Sequence: Synthetic oligonucleotide
uacaucacaggaauagucc

SEQ ID NO: 3177220 - RNA, 19 nt, Artificial Sequence
  Description of Artificial Sequence: Synthetic oligonucleotide
uucaagaagcaaaugggug

SEQ ID NO: 3177221 - RNA, 19 nt, Artificial Sequence
  Description of Artificial Sequence: Synthetic oligonucleotide
uucuuaauuaauccaacaa

SEQ ID NO: 3177222 - RNA, 19 nt, Artificial Sequence
  Description of Artificial Sequence: Synthetic oligonucleotide
uuugcaguuggcuucaaga

SEQ ID NO: 3177223 - RNA, 19 nt, Artificial Sequence
  Description of Artificial Sequence: Synthetic oligonucleotide
agggcaaguauauucugcc

SEQ ID NO: 3177224 - RNA, 19 nt, Artificial Sequence
  Description of Artificial Sequence: Synthetic oligonucleotide
ucuuccacagucaaauccc

SEQ ID NO: 3177225 - RNA, 19 nt, Artificial Sequence
  Description of Artificial Sequence: Synthetic oligonucleotide
gauggcuccaguuuuggag

SEQ ID NO: 3177226 - RNA, 19 nt, Artificial Sequence
  Description of Artificial Sequence: Synthetic oligonucleotide
ggaaguaucuuugaaaacg

SEQ ID NO: 3177227 - RNA, 19 nt, Artificial Sequence
  Description of Artificial Sequence: Synthetic oligonucleotide
uccaguuuuggagauaggg

SEQ ID NO: 3177228 - RNA, 19 nt, Artificial Sequence
  Description of Artificial Sequence: Synthetic oligonucleotide
ucauuucuuaauuaaucca

SEQ ID NO: 3177229 - RNA, 19 nt, Artificial Sequence
  Description of Artificial Sequence: Synthetic oligonucleotide
agugaaauucagcaggucu

SEQ ID NO: 3177230 - RNA, 19 nt, Artificial Sequence
  Description of Artificial Sequence: Synthetic oligonucleotide
auaaagaggaaguuccucu

SEQ ID NO: 3177231 - RNA, 19 nt, Artificial Sequence
  Description of Artificial Sequence: Synthetic oligonucleotide
aaguauauucugccuuugg

SEQ ID NO: 3177232 - RNA, 19 nt, Artificial Sequence
  Description of Artificial Sequence: Synthetic oligonucleotide
aaacuuggcgaucauuucu

SEQ ID NO: 3177233 - RNA, 19 nt, Artificial Sequence
  Description of Artificial Sequence: Synthetic oligonucleotide
guaucuuugaaaacguagg

SEQ ID NO: 3177234 - RNA, 19 nt, Artificial Sequence
  Description of Artificial Sequence: Synthetic oligonucleotide
uaauccaacaaugacagau

SEQ ID NO: 3177235 - RNA, 19 nt, Artificial Sequence
  Description of Artificial Sequence: Synthetic oligonucleotide
ugugggaaauacauguuca

SEQ ID NO: 3177236 - RNA, 19 nt, Artificial Sequence
  Description of Artificial Sequence: Synthetic oligonucleotide
acagucaaaucccugaacu

SEQ ID NO: 3177237 - RNA, 19 nt, Artificial Sequence
  Description of Artificial Sequence: Synthetic oligonucleotide
ugaaacuuggcgaucauuu

SEQ ID NO: 3177238 - RNA, 19 nt, Artificial Sequence
  Description of Artificial Sequence: Synthetic oligonucleotide
uuuccauguuugcaguugg

SEQ ID NO: 3177239 - RNA, 19 nt, Artificial Sequence
  Description of Artificial Sequence: Synthetic oligonucleotide
aaaagggugagaauccaag

SEQ ID NO: 3177240 - RNA, 19 nt, Artificial Sequence
  Description of Artificial Sequence: Synthetic oligonucleotide
uuucuuaauuaauccaaca

SEQ ID NO: 3177241 - RNA, 19 nt, Artificial Sequence
  Description of Artificial Sequence: Synthetic oligonucleotide
ugggaaguaucuuugaaaa

SEQ ID NO: 3177242 - RNA, 19 nt, Artificial Sequence
  Description of Artificial Sequence: Synthetic oligonucleotide
aauaucugaagugugggaa

SEQ ID NO: 3177243 - RNA, 19 nt, Artificial Sequence
  Description of Artificial Sequence: Synthetic oligonucleotide
uccucuugaaacuuggcga

SEQ ID NO: 3177244 - RNA, 19 nt, Artificial Sequence
  Description of Artificial Sequence: Synthetic oligonucleotide
ugagaauccaagauccaga

SEQ ID NO: 3177245 - RNA, 19 nt, Artificial Sequence
  Description of Artificial Sequence: Synthetic oligonucleotide
aagauccagaagcgaaugg

SEQ ID NO: 3177246 - RNA, 19 nt, Artificial Sequence
  Description of Artificial Sequence: Synthetic oligonucleotide
aguaucuuugaaaacguag

SEQ ID NO: 3177247 - RNA, 19 nt, Artificial Sequence
  Description of Artificial Sequence: Synthetic oligonucleotide
uaucuuugaaaacguaggu

SEQ ID NO: 3177248 - RNA, 19 nt, Artificial Sequence
  Description of Artificial Sequence: Synthetic oligonucleotide
caaugacagauuuaggaug

SEQ ID NO: 3177249 - RNA, 19 nt, Artificial Sequence
  Description of Artificial Sequence: Synthetic oligonucleotide
ggcuucaagaagcaaaugg

SEQ ID NO: 3177250 - RNA, 19 nt, Artificial Sequence
  Description of Artificial Sequence: Synthetic oligonucleotide
agggugagaauccaagauc

SEQ ID NO: 3177251 - RNA, 19 nt, Artificial Sequence
  Description of Artificial Sequence: Synthetic oligonucleotide
uccauggaauaucugaagu

SEQ ID NO: 3177252 - RNA, 19 nt, Artificial Sequence
  Description of Artificial Sequence: Synthetic oligonucleotide
uagcaagucgaccuguugc

SEQ ID NO: 3177253 - RNA, 19 nt, Artificial Sequence
  Description of Artificial Sequence: Synthetic oligonucleotide
gaagcgaauggguauguug

SEQ ID NO: 3177254 - RNA, 19 nt, Artificial Sequence
  Description of Artificial Sequence: Synthetic oligonucleotide
uauauucugccuuuggcau

SEQ ID NO: 3177255 - RNA, 19 nt, Artificial Sequence
  Description of Artificial Sequence: Synthetic oligonucleotide
uauguauuacccugguaca

SEQ ID NO: 3177256 - RNA, 19 nt, Artificial Sequence
  Description of Artificial Sequence: Synthetic oligonucleotide
ugguacaucacaggaauag

SEQ ID NO: 3177257 - RNA, 19 nt, Artificial Sequence
  Description of Artificial Sequence: Synthetic oligonucleotide
guauguuguauguauuacc

SEQ ID NO: 3177258 - RNA, 19 nt, Artificial Sequence
  Description of Artificial Sequence: Synthetic oligonucleotide
aaagaggaaguuccucuug

SEQ ID NO: 3177259 - RNA, 19 nt, Artificial Sequence
  Description of Artificial Sequence: Synthetic oligonucleotide
uguuuuccaacugagauuu

SEQ ID NO: 3177260 - RNA, 19 nt, Artificial Sequence
  Description of Artificial Sequence: Synthetic oligonucleotide
gaucauuucuuaauuaauc

SEQ ID NO: 3177261 - RNA, 19 nt, Artificial Sequence
  Description of Artificial Sequence: Synthetic oligonucleotide
cuucauuggaugauggcac

SEQ ID NO: 3177262 - RNA, 19 nt, Artificial Sequence
  Description of Artificial Sequence: Synthetic oligonucleotide
uaggcuagcaagucgaccu

SEQ ID NO: 3177263 - RNA, 19 nt, Artificial Sequence
  Description of Artificial Sequence: Synthetic oligonucleotide
ugcaguuggcuucaagaag

SEQ ID NO: 3177264 - RNA, 19 nt, Artificial Sequence
  Description of Artificial Sequence: Synthetic oligonucleotide
acaaugacagauuuaggau

SEQ ID NO: 3177265 - RNA, 19 nt, Artificial Sequence
  Description of Artificial Sequence: Synthetic oligonucleotide
aaagggugagaauccaaga

SEQ ID NO: 3177266 - RNA, 19 nt, Artificial Sequence
  Description of Artificial Sequence: Synthetic oligonucleotide
auuucuuaauuaauccaac

SEQ ID NO: 3177267 - RNA, 19 nt, Artificial Sequence
  Description of Artificial Sequence: Synthetic oligonucleotide
uuugaaaacguaggugucc

SEQ ID NO: 3177268 - RNA, 19 nt, Artificial Sequence
  Description of Artificial Sequence: Synthetic oligonucleotide
uuacccugguacaucacag

SEQ ID NO: 3177269 - RNA, 19 nt, Artificial Sequence
  Description of Artificial Sequence: Synthetic oligonucleotide
cucuuccacagucaaaucc

SEQ ID NO: 3177270 - RNA, 19 nt, Artificial Sequence
  Description of Artificial Sequence: Synthetic oligonucleotide
uuuggcauccacauguuuu

SEQ ID NO: 3177271 - RNA, 19 nt, Artificial Sequence
  Description of Artificial Sequence: Synthetic oligonucleotide
uuuuccaacugagauuucc

SEQ ID NO: 3177272 - RNA, 19 nt, Artificial Sequence
  Description of Artificial Sequence: Synthetic oligonucleotide
aagggugagaauccaagau

SEQ ID NO: 3177273 - RNA, 19 nt, Artificial Sequence
  Description of Artificial Sequence: Synthetic oligonucleotide
aauacauguucacauucuu

SEQ ID NO: 3177274 - RNA, 19 nt, Artificial Sequence
  Description of Artificial Sequence: Synthetic oligonucleotide
auguucacauucuucagcu

SEQ ID NO: 3177275 - RNA, 19 nt, Artificial Sequence
  Description of Artificial Sequence: Synthetic oligonucleotide
aagaggaaguuccucuuga

SEQ ID NO: 3177276 - RNA, 19 nt, Artificial Sequence
  Description of Artificial Sequence: Synthetic oligonucleotide
agcaagucgaccuguugcg

SEQ ID NO: 3177277 - RNA, 19 nt, Artificial Sequence
  Description of Artificial Sequence: Synthetic oligonucleotide
uuuaggauggcuccaguuu

SEQ ID NO: 3177278 - RNA, 19 nt, Artificial Sequence
  Description of Artificial Sequence: Synthetic oligonucleotide
agcaaaagggugagaaucc

SEQ ID NO: 3177279 - RNA, 19 nt, Artificial Sequence
  Description of Artificial Sequence: Synthetic oligonucleotide
uucuucagcucuuccacag

SEQ ID NO: 3177280 - RNA, 19 nt, Artificial Sequence
  Description of Artificial Sequence: Synthetic oligonucleotide
agaagcaaauggguggagc

SEQ ID NO: 3177281 - RNA, 19 nt, Artificial Sequence
  Description of Artificial Sequence: Synthetic oligonucleotide
guauauucugccuuuggca

SEQ ID NO: 3177282 - RNA, 19 nt, Artificial Sequence
  Description of Artificial Sequence: Synthetic oligonucleotide
uccaagauccagaagcgaa

SEQ ID NO: 3177283 - RNA, 19 nt, Artificial Sequence
  Description of Artificial Sequence: Synthetic oligonucleotide
agauccagaagcgaauggg

SEQ ID NO: 3177284 - RNA, 19 nt, Artificial Sequence
  Description of Artificial Sequence: Synthetic oligonucleotide
aacaacaacacacacacac

SEQ ID NO: 3177285 - RNA, 19 nt, Artificial Sequence
  Description of Artificial Sequence: Synthetic oligonucleotide
ucuauuauugaugucaugg

SEQ ID NO: 3177286 - RNA, 19 nt, Artificial Sequence
  Description of Artificial Sequence: Synthetic oligonucleotide
aacacacacacacacacac

SEQ ID NO: 3177287 - RNA, 19 nt, Artificial Sequence
  Description of Artificial Sequence: Synthetic oligonucleotide
cucauacucaguuagaagg

SEQ ID NO: 3177288 - RNA, 19 nt, Artificial Sequence
  Description of Artificial Sequence: Synthetic oligonucleotide
aaugagcagagccugcucc

SEQ ID NO: 3177289 - RNA, 19 nt, Artificial Sequence
  Description of Artificial Sequence: Synthetic oligonucleotide
ucagguacacaaaagacag

SEQ ID NO: 3177290 - RNA, 19 nt, Artificial Sequence
  Description of Artificial Sequence: Synthetic oligonucleotide
aaagguaguugccaaacuc

SEQ ID NO: 3177291 - RNA, 19 nt, Artificial Sequence
  Description of Artificial Sequence: Synthetic oligonucleotide
guuaaggaggacuagaagc

SEQ ID NO: 3177292 - RNA, 19 nt, Artificial Sequence
  Description of Artificial Sequence: Synthetic oligonucleotide
acuuuggcaucacagaagc

SEQ ID NO: 3177293 - RNA, 19 nt, Artificial Sequence
  Description of Artificial Sequence: Synthetic oligonucleotide
acaacacacacacacacac

SEQ ID NO: 3177294 - RNA, 19 nt, Artificial Sequence
  Description of Artificial Sequence: Synthetic oligonucleotide
ugaagcagcagcaaggccc

SEQ ID NO: 3177295 - RNA, 19 nt, Artificial Sequence
  Description of Artificial Sequence: Synthetic oligonucleotide
ucuucaguuucuauuauug

SEQ ID NO: 3177296 - RNA, 19 nt, Artificial Sequence
  Description of Artificial Sequence: Synthetic oligonucleotide
ucaguuucuauuauugaug

SEQ ID NO: 3177297 - RNA, 19 nt, Artificial Sequence
  Description of Artificial Sequence: Synthetic oligonucleotide
acagaagcgauucuggcgg

SEQ ID NO: 3177298 - RNA, 19 nt, Artificial Sequence
  Description of Artificial Sequence: Synthetic oligonucleotide
caaaagacagguuaaggag

SEQ ID NO: 3177299 - RNA, 19 nt, Artificial Sequence
  Description of Artificial Sequence: Synthetic oligonucleotide
aaaagacagguuaaggagg

SEQ ID NO: 3177300 - RNA, 19 nt, Artificial Sequence
  Description of Artificial Sequence: Synthetic oligonucleotide
aagguaguugccaaacucc

SEQ ID NO: 3177301 - RNA, 19 nt, Artificial Sequence
  Description of Artificial Sequence: Synthetic oligonucleotide
uucagguacacaaaagaca

SEQ ID NO: 3177302 - RNA, 19 nt, Artificial Sequence
  Description of Artificial Sequence: Synthetic oligonucleotide
acaaaagacagguuaagga

SEQ ID NO: 3177303 - RNA, 19 nt, Artificial Sequence
  Description of Artificial Sequence: Synthetic oligonucleotide
uuagaaggagacaagccug

SEQ ID NO: 3177304 - RNA, 19 nt, Artificial Sequence
  Description of Artificial Sequence: Synthetic oligonucleotide
uuaaggaggacuagaagcu

SEQ ID NO: 3177305 - RNA, 19 nt, Artificial Sequence
  Description of Artificial Sequence: Synthetic oligonucleotide
uuggucaaugagcagagcc

SEQ ID NO: 3177306 - RNA, 19 nt, Artificial Sequence
  Description of Artificial Sequence: Synthetic oligonucleotide
auuccuuuggucaaugagc

SEQ ID NO: 3177307 - RNA, 19 nt, Artificial Sequence
  Description of Artificial Sequence: Synthetic oligonucleotide
ucuagcuucagguacacaa

SEQ ID NO: 3177308 - RNA, 19 nt, Artificial Sequence
  Description of Artificial Sequence: Synthetic oligonucleotide
ucucacuagaaaaucccgg

SEQ ID NO: 3177309 - RNA, 19 nt, Artificial Sequence
  Description of Artificial Sequence: Synthetic oligonucleotide
aaggagacaagccugucca

SEQ ID NO: 3177310 - RNA, 19 nt, Artificial Sequence
  Description of Artificial Sequence: Synthetic oligonucleotide
ucucacuuuggcaucacag

SEQ ID NO: 3177311 - RNA, 19 nt, Artificial Sequence
  Description of Artificial Sequence: Synthetic oligonucleotide
uuauugaugucaugguugc

SEQ ID NO: 3177312 - RNA, 19 nt, Artificial Sequence
  Description of Artificial Sequence: Synthetic oligonucleotide
uuacagauugccaagcguc

SEQ ID NO: 3177313 - RNA, 19 nt, Artificial Sequence
  Description of Artificial Sequence: Synthetic oligonucleotide
guuucuauuauugauguca

SEQ ID NO: 3177314 - RNA, 19 nt, Artificial Sequence
  Description of Artificial Sequence: Synthetic oligonucleotide
uuuggcaucacagaagcga

SEQ ID NO: 3177315 - RNA, 19 nt, Artificial Sequence
  Description of Artificial Sequence: Synthetic oligonucleotide
cacacacacacacagauac

SEQ ID NO: 3177316 - RNA, 19 nt, Artificial Sequence
  Description of Artificial Sequence: Synthetic oligonucleotide
auuauugaugucaugguug

SEQ ID NO: 3177317 - RNA, 19 nt, Artificial Sequence
  Description of Artificial Sequence: Synthetic oligonucleotide
cucacuagaaaaucccggg

SEQ ID NO: 3177318 - RNA, 19 nt, Artificial Sequence
  Description of Artificial Sequence: Synthetic oligonucleotide
aagcucagcaggcuccacc

SEQ ID NO: 3177319 - RNA, 19 nt, Artificial Sequence
  Description of Artificial Sequence: Synthetic oligonucleotide
uacagauugccaagcgucg

SEQ ID NO: 3177320 - RNA, 19 nt, Artificial Sequence
  Description of Artificial Sequence: Synthetic oligonucleotide
uuccuuuggucaaugagca

SEQ ID NO: 3177321 - RNA, 19 nt, Artificial Sequence
  Description of Artificial Sequence: Synthetic oligonucleotide
ugcugcuccuuacagauug

SEQ ID NO: 3177322 - RNA, 19 nt, Artificial Sequence
  Description of Artificial Sequence: Synthetic oligonucleotide
uuguaucucacuuuggcau

SEQ ID NO: 3177323 - RNA, 19 nt, Artificial Sequence
  Description of Artificial Sequence: Synthetic oligonucleotide
uguccacaccugaagaggg

SEQ ID NO: 3177324 - RNA, 19 nt, Artificial Sequence
  Description of Artificial Sequence: Synthetic oligonucleotide
aguuagaaggagacaagcc

SEQ ID NO: 3177325 - RNA, 19 nt, Artificial Sequence
  Description of Artificial Sequence: Synthetic oligonucleotide
uacucaguuagaaggagac

SEQ ID NO: 3177326 - RNA, 19 nt, Artificial Sequence
  Description of Artificial Sequence: Synthetic oligonucleotide
uucaguuucuauuauugau

SEQ ID NO: 3177327 - RNA, 19 nt, Artificial Sequence
  Description of Artificial Sequence: Synthetic oligonucleotide
augguugcagggcugcucc

SEQ ID NO: 3177328 - RNA, 19 nt, Artificial Sequence
  Description of Artificial Sequence: Synthetic oligonucleotide
cuucagguacacaaaagac

SEQ ID NO: 3177329 - RNA, 19 nt, Artificial Sequence
  Description of Artificial Sequence: Synthetic oligonucleotide
ucauacucaguuagaagga

SEQ ID NO: 3177330 - RNA, 19 nt, Artificial Sequence
  Description of Artificial Sequence: Synthetic oligonucleotide
auugaugucaugguugcag

SEQ ID NO: 3177331 - RNA, 19 nt, Artificial Sequence
  Description of Artificial Sequence: Synthetic oligonucleotide
uuuuacagcuucuucaguu

SEQ ID NO: 3177332 - RNA, 19 nt, Artificial Sequence
  Description of Artificial Sequence: Synthetic oligonucleotide
uacacaaaagacagguuaa

SEQ ID NO: 3177333 - RNA, 19 nt, Artificial Sequence
  Description of Artificial Sequence: Synthetic oligonucleotide
uugaugucaugguugcagg

SEQ ID NO: 3177334 - RNA, 19 nt, Artificial Sequence
  Description of Artificial Sequence: Synthetic oligonucleotide
aggacuagaagcucagcag

SEQ ID NO: 3177335 - RNA, 19 nt, Artificial Sequence
  Description of Artificial Sequence: Synthetic oligonucleotide
uauuauugaugucaugguu

SEQ ID NO: 3177336 - RNA, 19 nt, Artificial Sequence
  Description of Artificial Sequence: Synthetic oligonucleotide
uugccaaacucccucuccg

SEQ ID NO: 3177337 - RNA, 19 nt, Artificial Sequence
  Description of Artificial Sequence: Synthetic oligonucleotide
cacacacacacacacacag

SEQ ID NO: 3177338 - RNA, 19 nt, Artificial Sequence
  Description of Artificial Sequence: Synthetic oligonucleotide
aaaagguaguugccaaacu

SEQ ID NO: 3177339 - RNA, 19 nt, Artificial Sequence
  Description of Artificial Sequence: Synthetic oligonucleotide
aaaaucccgggccugcuca

SEQ ID NO: 3177340 - RNA, 19 nt, Artificial Sequence
  Description of Artificial Sequence: Synthetic oligonucleotide
ucaguuagaaggagacaag

SEQ ID NO: 3177341 - RNA, 19 nt, Artificial Sequence
  Description of Artificial Sequence: Synthetic oligonucleotide
agcaggcuccaccaggugc

SEQ ID NO: 3177342 - RNA, 19 nt, Artificial Sequence
  Description of Artificial Sequence: Synthetic oligonucleotide
cuccccauaacgcagggcc

SEQ ID NO: 3177343 - RNA, 19 nt, Artificial Sequence
  Description of Artificial Sequence: Synthetic oligonucleotide
cacuagaaaaucccgggcc

SEQ ID NO: 3177344 - RNA, 19 nt, Artificial Sequence
  Description of Artificial Sequence: Synthetic oligonucleotide
ucacuagaaaaucccgggc

SEQ ID NO: 3177345 - RNA, 19 nt, Artificial Sequence
  Description of Artificial Sequence: Synthetic oligonucleotide
ucacuuuggcaucacagaa

SEQ ID NO: 3177346 - RNA, 19 nt, Artificial Sequence
  Description of Artificial Sequence: Synthetic oligonucleotide
cacagaagcgauucuggcg

SEQ ID NO: 3177347 - RNA, 19 nt, Artificial Sequence
  Description of Artificial Sequence: Synthetic oligonucleotide
uaacgcagggccauggcug

SEQ ID NO: 3177348 - RNA, 19 nt, Artificial Sequence
  Description of Artificial Sequence: Synthetic oligonucleotide
uggcggaaaagguaguugc

SEQ ID NO: 3177349 - RNA, 19 nt, Artificial Sequence
  Description of Artificial Sequence: Synthetic oligonucleotide
cauuccuuuggucaaugag

SEQ ID NO: 3177350 - RNA, 19 nt, Artificial Sequence
  Description of Artificial Sequence: Synthetic oligonucleotide
caacaacacacacacacac

SEQ ID NO: 3177351 - RNA, 19 nt, Artificial Sequence
  Description of Artificial Sequence: Synthetic oligonucleotide
gagccugcuccccauaacg

SEQ ID NO: 3177352 - RNA, 19 nt, Artificial Sequence
  Description of Artificial Sequence: Synthetic oligonucleotide
ugagcucucacuagaaaau

SEQ ID NO: 3177353 - RNA, 19 nt, Artificial Sequence
  Description of Artificial Sequence: Synthetic oligonucleotide
uuucuauuauugaugucau

SEQ ID NO: 3177354 - RNA, 19 nt, Artificial Sequence
  Description of Artificial Sequence: Synthetic oligonucleotide
cacacacacacacacacac

SEQ ID NO: 3177355 - RNA, 19 nt, Artificial Sequence
  Description of Artificial Sequence: Synthetic oligonucleotide
gaaggagacaagccugucc

SEQ ID NO: 3177356 - RNA, 19 nt, Artificial Sequence
  Description of Artificial Sequence: Synthetic oligonucleotide
cucucacuagaaaaucccg

SEQ ID NO: 3177357 - RNA, 19 nt, Artificial Sequence
  Description of Artificial Sequence: Synthetic oligonucleotide
cuuggcauuccuuugguca

SEQ ID NO: 3177358 - RNA, 19 nt, Artificial Sequence
  Description of Artificial Sequence: Synthetic oligonucleotide
gaaaagguaguugccaaac

SEQ ID NO: 3177359 - RNA, 19 nt, Artificial Sequence
  Description of Artificial Sequence: Synthetic oligonucleotide
cuuuggucaaugagcagag

SEQ ID NO: 3177360 - RNA, 19 nt, Artificial Sequence
  Description of Artificial Sequence: Synthetic oligonucleotide
ugaugucaugguugcaggg

SEQ ID NO: 3177361 - RNA, 19 nt, Artificial Sequence
  Description of Artificial Sequence: Synthetic oligonucleotide
uagaagcucagcaggcucc

SEQ ID NO: 3177362 - RNA, 19 nt, Artificial Sequence
  Description of Artificial Sequence: Synthetic oligonucleotide
agguacacaaaagacaggu

SEQ ID NO: 3177363 - RNA, 19 nt, Artificial Sequence
  Description of Artificial Sequence: Synthetic oligonucleotide
uggucaaugagcagagccu

SEQ ID NO: 3177364 - RNA, 19 nt, Artificial Sequence
  Description of Artificial Sequence: Synthetic oligonucleotide
augagcagagccugcuccc

SEQ ID NO: 3177365 - RNA, 19 nt, Artificial Sequence
  Description of Artificial Sequence: Synthetic oligonucleotide
acuagaaaaucccgggccu

SEQ ID NO: 3177366 - RNA, 19 nt, Artificial Sequence
  Description of Artificial Sequence: Synthetic oligonucleotide
aaagacagguuaaggagga

SEQ ID NO: 3177367 - RNA, 19 nt, Artificial Sequence
  Description of Artificial Sequence: Synthetic oligonucleotide
ucggucuagcuucagguac

SEQ ID NO: 3177368 - RNA, 19 nt, Artificial Sequence
  Description of Artificial Sequence: Synthetic oligonucleotide
guacacaaaagacagguua

SEQ ID NO: 3177369 - RNA, 19 nt, Artificial Sequence
  Description of Artificial Sequence: Synthetic oligonucleotide
gaggacuagaagcucagca

SEQ ID NO: 3177370 - RNA, 19 nt, Artificial Sequence
  Description of Artificial Sequence: Synthetic oligonucleotide
aacgcagggccauggcugg

SEQ ID NO: 3177371 - RNA, 19 nt, Artificial Sequence
  Description of Artificial Sequence: Synthetic oligonucleotide
cacaaaagacagguuaagg

SEQ ID NO: 3177372 - RNA, 19 nt, Artificial Sequence
  Description of Artificial Sequence: Synthetic oligonucleotide
agcucucacuagaaaaucc

SEQ ID NO: 3177373 - RNA, 19 nt, Artificial Sequence
  Description of Artificial Sequence: Synthetic oligonucleotide
ggacuagaagcucagcagg

SEQ ID NO: 3177374 - RNA, 19 nt, Artificial Sequence
  Description of Artificial Sequence: Synthetic oligonucleotide
acucccucuccguugcugc

SEQ ID NO: 3177375 - RNA, 19 nt, Artificial Sequence
  Description of Artificial Sequence: Synthetic oligonucleotide
caagcgucggugaagcagc

SEQ ID NO: 3177376 - RNA, 19 nt, Artificial Sequence
  Description of Artificial Sequence: Synthetic oligonucleotide
ucggugaagcagcagcaag

SEQ ID NO: 3177377 - RNA, 19 nt, Artificial Sequence
  Description of Artificial Sequence: Synthetic oligonucleotide
agcaaggcccgcuuguauc

SEQ ID NO: 3177378 - RNA, 19 nt, Artificial Sequence
  Description of Artificial Sequence: Synthetic oligonucleotide
gaugucaugguugcagggc

SEQ ID NO: 3177379 - RNA, 19 nt, Artificial Sequence
  Description of Artificial Sequence: Synthetic oligonucleotide
agguaguugccaaacuccc

SEQ ID NO: 3177380 - RNA, 19 nt, Artificial Sequence
  Description of Artificial Sequence: Synthetic oligonucleotide
auucuggcggaaaagguag

SEQ ID NO: 3177381 - RNA, 19 nt, Artificial Sequence
  Description of Artificial Sequence: Synthetic oligonucleotide
ucacagaagcgauucuggc

SEQ ID NO: 3177382 - RNA, 19 nt, Artificial Sequence
  Description of Artificial Sequence: Synthetic oligonucleotide
guuagaaggagacaagccu

SEQ ID NO: 3177383 - RNA, 19 nt, Artificial Sequence
  Description of Artificial Sequence: Synthetic oligonucleotide
aguuucuauuauugauguc

SEQ ID NO: 3177384 - RNA, 19 nt, Artificial Sequence
  Description of Artificial Sequence: Synthetic oligonucleotide
aaacagguaguccaggugg

SEQ ID NO: 3177385 - RNA, 19 nt, Artificial Sequence
  Description of Artificial Sequence: Synthetic oligonucleotide
aaauacauggcuaucagca

SEQ ID NO: 3177386 - RNA, 19 nt, Artificial Sequence
  Description of Artificial Sequence: Synthetic oligonucleotide
gugguguagaaauacaugg

SEQ ID NO: 3177387 - RNA, 19 nt, Artificial Sequence
  Description of Artificial Sequence: Synthetic oligonucleotide
aagauggcgaagccaaacc

SEQ ID NO: 3177388 - RNA, 19 nt, Artificial Sequence
  Description of Artificial Sequence: Synthetic oligonucleotide
aagccaaaccacgauaugc

SEQ ID NO: 3177389 - RNA, 19 nt, Artificial Sequence
  Description of Artificial Sequence: Synthetic oligonucleotide
ucauugauggggaugaagu

SEQ ID NO: 3177390 - RNA, 19 nt, Artificial Sequence
  Description of Artificial Sequence: Synthetic oligonucleotide
uugguaaacagguagucca

SEQ ID NO: 3177391 - RNA, 19 nt, Artificial Sequence
  Description of Artificial Sequence: Synthetic oligonucleotide
gauggcaugaccgaugugc

SEQ ID NO: 3177392 - RNA, 19 nt, Artificial Sequence
  Description of Artificial Sequence: Synthetic oligonucleotide
aguguccacaucaagaugg

SEQ ID NO: 3177393 - RNA, 19 nt, Artificial Sequence
  Description of Artificial Sequence: Synthetic oligonucleotide
agaggcaggagcuucuggc

SEQ ID NO: 3177394 - RNA, 19 nt, Artificial Sequence
  Description of Artificial Sequence: Synthetic oligonucleotide
uugauggggaugaaguucc

SEQ ID NO: 3177395 - RNA, 19 nt, Artificial Sequence
  Description of Artificial Sequence: Synthetic oligonucleotide
auggcuaucagcaucacag

SEQ ID NO: 3177396 - RNA, 19 nt, Artificial Sequence
  Description of Artificial Sequence: Synthetic oligonucleotide
cauguauagcugucgaugg

SEQ ID NO: 3177397 - RNA, 19 nt, Artificial Sequence
  Description of Artificial Sequence: Synthetic oligonucleotide
cuucccuucgucuucagag

SEQ ID NO: 3177398 - RNA, 19 nt, Artificial Sequence
  Description of Artificial Sequence: Synthetic oligonucleotide
uguagaaauacauggcuau

SEQ ID NO: 3177399 - RNA, 19 nt, Artificial Sequence
  Description of Artificial Sequence: Synthetic oligonucleotide
agaaauacauggcuaucag

SEQ ID NO: 3177400 - RNA, 19 nt, Artificial Sequence
  Description of Artificial Sequence: Synthetic oligonucleotide
auacauggcuaucagcauc

SEQ ID NO: 3177401 - RNA, 19 nt, Artificial Sequence
  Description of Artificial Sequence: Synthetic oligonucleotide
auugauggggaugaaguuc

SEQ ID NO: 3177402 - RNA, 19 nt, Artificial Sequence
  Description of Artificial Sequence: Synthetic oligonucleotide
aggggaauuccacuucugc

SEQ ID NO: 3177403 - RNA, 19 nt, Artificial Sequence
  Description of Artificial Sequence: Synthetic oligonucleotide
cagccuucuucauugaugg

SEQ ID NO: 3177404 - RNA, 19 nt, Artificial Sequence
  Description of Artificial Sequence: Synthetic oligonucleotide
gaaauacauggcuaucagc

SEQ ID NO: 3177405 - RNA, 19 nt, Artificial Sequence
  Description of Artificial Sequence: Synthetic oligonucleotide
ucuucauugauggggauga

SEQ ID NO: 3177406 - RNA, 19 nt, Artificial Sequence
  Description of Artificial Sequence: Synthetic oligonucleotide
auggggaugaaguucccgg

SEQ ID NO: 3177407 - RNA, 19 nt, Artificial Sequence
  Description of Artificial Sequence: Synthetic oligonucleotide
acaucaagauggcgaagcc

SEQ ID NO: 3177408 - RNA, 19 nt, Artificial Sequence
  Description of Artificial Sequence: Synthetic oligonucleotide
uaaacagguaguccaggug

SEQ ID NO: 3177409 - RNA, 19 nt, Artificial Sequence
  Description of Artificial Sequence: Synthetic oligonucleotide
aauuccacuucugcagugg

SEQ ID NO: 3177410 - RNA, 19 nt, Artificial Sequence
  Description of Artificial Sequence: Synthetic oligonucleotide
uacauggcuaucagcauca

SEQ ID NO: 3177411 - RNA, 19 nt, Artificial Sequence
  Description of Artificial Sequence: Synthetic oligonucleotide
uagaaauacauggcuauca

SEQ ID NO: 3177412 - RNA, 19 nt, Artificial Sequence
  Description of Artificial Sequence: Synthetic oligonucleotide
ugguguagaaauacauggc

SEQ ID NO: 3177413 - RNA, 19 nt, Artificial Sequence
  Description of Artificial Sequence: Synthetic oligonucleotide
cuaucagcaucacaggcag

SEQ ID NO: 3177414 - RNA, 19 nt, Artificial Sequence
  Description of Artificial Sequence: Synthetic oligonucleotide
ugaccgaugugcucgaagc

SEQ ID NO: 3177415 - RNA, 19 nt, Artificial Sequence
  Description of Artificial Sequence: Synthetic oligonucleotide
gacgacagcacagaggggc

SEQ ID NO: 3177416 - RNA, 19 nt, Artificial Sequence
  Description of Artificial Sequence: Synthetic oligonucleotide
auguauagcugucgauggc

SEQ ID NO: 3177417 - RNA, 19 nt, Artificial Sequence
  Description of Artificial Sequence: Synthetic oligonucleotide
acaggcaguguccacauca

SEQ ID NO: 3177418 - RNA, 19 nt, Artificial Sequence
  Description of Artificial Sequence: Synthetic oligonucleotide
auaugccccauguauagcu

SEQ ID NO: 3177419 - RNA, 19 nt, Artificial Sequence
  Description of Artificial Sequence: Synthetic oligonucleotide
aauacauggcuaucagcau

SEQ ID NO: 3177420 - RNA, 19 nt, Artificial Sequence
  Description of Artificial Sequence: Synthetic oligonucleotide
agccaaaccacgauaugcc

SEQ ID NO: 3177421 - RNA, 19 nt, Artificial Sequence
  Description of Artificial Sequence: Synthetic oligonucleotide
auuccacuucugcaguggc

SEQ ID NO: 3177422 - RNA, 19 nt, Artificial Sequence
  Description of Artificial Sequence: Synthetic oligonucleotide
uguauagcugucgauggca

SEQ ID NO: 3177423 - RNA, 19 nt, Artificial Sequence
  Description of Artificial Sequence: Synthetic oligonucleotide
ucuuccugcuucucuacag

SEQ ID NO: 3177424 - RNA, 19 nt, Artificial Sequence
  Description of Artificial Sequence: Synthetic oligonucleotide
uccgacgacagcacagagg

SEQ ID NO: 3177425 - RNA, 19 nt, Artificial Sequence
  Description of Artificial Sequence: Synthetic oligonucleotide
ucggcagccuucuucauug

SEQ ID NO: 3177426 - RNA, 19 nt, Artificial Sequence
  Description of Artificial Sequence: Synthetic oligonucleotide
ugaaguucccgguccgacg

SEQ ID NO: 3177427 - RNA, 19 nt, Artificial Sequence
  Description of Artificial Sequence: Synthetic oligonucleotide
aacagguaguccagguggc

SEQ ID NO: 3177428 - RNA, 19 nt, Artificial Sequence
  Description of Artificial Sequence: Synthetic oligonucleotide
uucgucuucagagaguggu

SEQ ID NO: 3177429 - RNA, 19 nt, Artificial Sequence
  Description of Artificial Sequence: Synthetic oligonucleotide
ugguaaacagguaguccag

SEQ ID NO: 3177430 - RNA, 19 nt, Artificial Sequence
  Description of Artificial Sequence: Synthetic oligonucleotide
gggaauuccacuucugcag

SEQ ID NO: 3177431 - RNA, 19 nt, Artificial Sequence
  Description of Artificial Sequence: Synthetic oligonucleotide
cacaucaagauggcgaagc

SEQ ID NO: 3177432 - RNA, 19 nt, Artificial Sequence
  Description of Artificial Sequence: Synthetic oligonucleotide
aggagcuucuggcagaggu

SEQ ID NO: 3177433 - RNA, 19 nt, Artificial Sequence
  Description of Artificial Sequence: Synthetic oligonucleotide
ucuucagagagugguguag

SEQ ID NO: 3177434 - RNA, 19 nt, Artificial Sequence
  Description of Artificial Sequence: Synthetic oligonucleotide
uucauugauggggaugaag

SEQ ID NO: 3177435 - RNA, 19 nt, Artificial Sequence
  Description of Artificial Sequence: Synthetic oligonucleotide
cuugguaaacagguagucc

SEQ ID NO: 3177436 - RNA, 19 nt, Artificial Sequence
  Description of Artificial Sequence: Synthetic oligonucleotide
aucagcaucacaggcagug

SEQ ID NO: 3177437 - RNA, 19 nt, Artificial Sequence
  Description of Artificial Sequence: Synthetic oligonucleotide
gagagugguguagaaauac

SEQ ID NO: 3177438 - RNA, 19 nt, Artificial Sequence
  Description of Artificial Sequence: Synthetic oligonucleotide
aggugcacacaugacuucc

SEQ ID NO: 3177439 - RNA, 19 nt, Artificial Sequence
  Description of Artificial Sequence: Synthetic oligonucleotide
ucccuucgucuucagagag

SEQ ID NO: 3177440 - RNA, 19 nt, Artificial Sequence
  Description of Artificial Sequence: Synthetic oligonucleotide
agcaucacaggcagugucc

SEQ ID NO: 3177441 - RNA, 19 nt, Artificial Sequence
  Description of Artificial Sequence: Synthetic oligonucleotide
augacuucccuucgucuuc

SEQ ID NO: 3177442 - RNA, 19 nt, Artificial Sequence
  Description of Artificial Sequence: Synthetic oligonucleotide
uccacuucugcaguggcug

SEQ ID NO: 3177443 - RNA, 19 nt, Artificial Sequence
  Description of Artificial Sequence: Synthetic oligonucleotide
ccgacgacagcacagaggg

SEQ ID NO: 3177444 - RNA, 19 nt, Artificial Sequence
  Description of Artificial Sequence: Synthetic oligonucleotide
uccacaucaagauggcgaa

SEQ ID NO: 3177445 - RNA, 19 nt, Artificial Sequence
  Description of Artificial Sequence: Synthetic oligonucleotide
accacgauaugccccaugu

SEQ ID NO: 3177446 - RNA, 19 nt, Artificial Sequence
  Description of Artificial Sequence: Synthetic oligonucleotide
agauggcgaagccaaacca

SEQ ID NO: 3177447 - RNA, 19 nt, Artificial Sequence
  Description of Artificial Sequence: Synthetic oligonucleotide
auagcugucgauggcauga

SEQ ID NO: 3177448 - RNA, 19 nt, Artificial Sequence
  Description of Artificial Sequence: Synthetic oligonucleotide
uggcuaucagcaucacagg

SEQ ID NO: 3177449 - RNA, 19 nt, Artificial Sequence
  Description of Artificial Sequence: Synthetic oligonucleotide
agugguguagaaauacaug

SEQ ID NO: 3177450 - RNA, 19 nt, Artificial Sequence
  Description of Artificial Sequence: Synthetic oligonucleotide
ucgauggcaugaccgaugu

SEQ ID NO: 3177451 - RNA, 19 nt, Artificial Sequence
  Description of Artificial Sequence: Synthetic oligonucleotide
uucuucauugauggggaug

SEQ ID NO: 3177452 - RNA, 19 nt, Artificial Sequence
  Description of Artificial Sequence: Synthetic oligonucleotide
augugcucgaagcagcccu

SEQ ID NO: 3177453 - RNA, 19 nt, Artificial Sequence
  Description of Artificial Sequence: Synthetic oligonucleotide
ggaaccaucuuccugcuuc

SEQ ID NO: 3177454 - RNA, 19 nt, Artificial Sequence
  Description of Artificial Sequence: Synthetic oligonucleotide
uaugccccauguauagcug

SEQ ID NO: 3177455 - RNA, 19 nt, Artificial Sequence
  Description of Artificial Sequence: Synthetic oligonucleotide
gaaguucccgguccgacga

SEQ ID NO: 3177456 - RNA, 19 nt, Artificial Sequence
  Description of Artificial Sequence: Synthetic oligonucleotide
gaauuccacuucugcagug

SEQ ID NO: 3177457 - RNA, 19 nt, Artificial Sequence
  Description of Artificial Sequence: Synthetic oligonucleotide
ggcaugaccgaugugcucg

SEQ ID NO: 3177458 - RNA, 19 nt, Artificial Sequence
  Description of Artificial Sequence: Synthetic oligonucleotide
aucaagauggcgaagccaa

SEQ ID NO: 3177459 - RNA, 19 nt, Artificial Sequence
  Description of Artificial Sequence: Synthetic oligonucleotide
gauggggaugaaguucccg

SEQ ID NO: 3177460 - RNA, 19 nt, Artificial Sequence
  Description of Artificial Sequence: Synthetic oligonucleotide
gauggcgaagccaaaccac

SEQ ID NO: 3177461 - RNA, 19 nt, Artificial Sequence
  Description of Artificial Sequence: Synthetic oligonucleotide
gaagccaaaccacgauaug

SEQ ID NO: 3177462 - RNA, 19 nt, Artificial Sequence
  Description of Artificial Sequence: Synthetic oligonucleotide
guccagguggcccacucgg

SEQ ID NO: 3177463 - RNA, 19 nt, Artificial Sequence
  Description of Artificial Sequence: Synthetic oligonucleotide
cacacaugacuucccuucg

SEQ ID NO: 3177464 - RNA, 19 nt, Artificial Sequence
  Description of Artificial Sequence: Synthetic oligonucleotide
gagcuucuggcagaggugc

SEQ ID NO: 3177465 - RNA, 19 nt, Artificial Sequence
  Description of Artificial Sequence: Synthetic oligonucleotide
auggcgaagccaaaccacg

SEQ ID NO: 3177466 - RNA, 19 nt, Artificial Sequence
  Description of Artificial Sequence: Synthetic oligonucleotide
acaugacuucccuucgucu

SEQ ID NO: 3177467 - RNA, 19 nt, Artificial Sequence
  Description of Artificial Sequence: Synthetic oligonucleotide
gccuucuucauugaugggg

SEQ ID NO: 3177468 - RNA, 19 nt, Artificial Sequence
  Description of Artificial Sequence: Synthetic oligonucleotide
augaccgaugugcucgaag

SEQ ID NO: 3177469 - RNA, 19 nt, Artificial Sequence
  Description of Artificial Sequence: Synthetic oligonucleotide
gcagcugagaggcaggagc

SEQ ID NO: 3177470 - RNA, 19 nt, Artificial Sequence
  Description of Artificial Sequence: Synthetic oligonucleotide
augaaguucccgguccgac

SEQ ID NO: 3177471 - RNA, 19 nt, Artificial Sequence
  Description of Artificial Sequence: Synthetic oligonucleotide
acuucugcaguggcugccc

SEQ ID NO: 3177472 - RNA, 19 nt, Artificial Sequence
  Description of Artificial Sequence: Synthetic oligonucleotide
uauagcugucgauggcaug

SEQ ID NO: 3177473 - RNA, 19 nt, Artificial Sequence
  Description of Artificial Sequence: Synthetic oligonucleotide
cugcccggaaccaucuucc

SEQ ID NO: 3177474 - RNA, 19 nt, Artificial Sequence
  Description of Artificial Sequence: Synthetic oligonucleotide
agcugucgauggcaugacc

SEQ ID NO: 3177475 - RNA, 19 nt, Artificial Sequence
  Description of Artificial Sequence: Synthetic oligonucleotide
ugcucgaagcagcccuugg

SEQ ID NO: 3177476 - RNA, 19 nt, Artificial Sequence
  Description of Artificial Sequence: Synthetic oligonucleotide
caaaccacgauaugcccca

SEQ ID NO: 3177477 - RNA, 19 nt, Artificial Sequence
  Description of Artificial Sequence: Synthetic oligonucleotide
gcugucgauggcaugaccg

SEQ ID NO: 3177478 - RNA, 19 nt, Artificial Sequence
  Description of Artificial Sequence: Synthetic oligonucleotide
ucgucuucagagaguggug

SEQ ID NO: 3177479 - RNA, 19 nt, Artificial Sequence
  Description of Artificial Sequence: Synthetic oligonucleotide
uucccuucgucuucagaga

SEQ ID NO: 3177480 - RNA, 19 nt, Artificial Sequence
  Description of Artificial Sequence: Synthetic oligonucleotide
accaucuuccugcuucucu

SEQ ID NO: 3177481 - RNA, 19 nt, Artificial Sequence
  Description of Artificial Sequence: Synthetic oligonucleotide
ucgaagcagcccuugguaa

SEQ ID NO: 3177482 - RNA, 19 nt, Artificial Sequence
  Description of Artificial Sequence: Synthetic oligonucleotide
accgaugugcucgaagcag

SEQ ID NO: 3177483 - RNA, 19 nt, Artificial Sequence
  Description of Artificial Sequence: Synthetic oligonucleotide
gagaggcaggagcuucugg

SEQ ID NO: 3177484 - RNA, 19 nt, Artificial Sequence
  Description of Artificial Sequence: Synthetic oligonucleotide
aaaaguuuguauuucuagg

SEQ ID NO: 3177485 - RNA, 19 nt, Artificial Sequence
  Description of Artificial Sequence: Synthetic oligonucleotide
aauagaagcucuuaacuag

SEQ ID NO: 3177486 - RNA, 19 nt, Artificial Sequence
  Description of Artificial Sequence: Synthetic oligonucleotide
uuugcaagacaaaagaaag

SEQ ID NO: 3177487 - RNA, 19 nt, Artificial Sequence
  Description of Artificial Sequence: Synthetic oligonucleotide
uucacuucggaacugagcg

SEQ ID NO: 3177488 - RNA, 19 nt, Artificial Sequence
  Description of Artificial Sequence: Synthetic oligonucleotide
uuuaaagugacauuaacaa

SEQ ID NO: 3177489 - RNA, 19 nt, Artificial Sequence
  Description of Artificial Sequence: Synthetic oligonucleotide
uuuaacauauuucagucca

SEQ ID NO: 3177490 - RNA, 19 nt, Artificial Sequence
  Description of Artificial Sequence: Synthetic oligonucleotide
uaugaaaacuucuuggucc

SEQ ID NO: 3177491 - RNA, 19 nt, Artificial Sequence
  Description of Artificial Sequence: Synthetic oligonucleotide
aguuuaacauauuucaguc

SEQ ID NO: 3177492 - RNA, 19 nt, Artificial Sequence
  Description of Artificial Sequence: Synthetic oligonucleotide
uguucagagaggaaaauag

SEQ ID NO: 3177493 - RNA, 19 nt, Artificial Sequence
  Description of Artificial Sequence: Synthetic oligonucleotide
aguagucugcuccauaacc

SEQ ID NO: 3177494 - RNA, 19 nt, Artificial Sequence
  Description of Artificial Sequence: Synthetic oligonucleotide
uaaagugacauuaacaauu

SEQ ID NO: 3177495 - RNA, 19 nt, Artificial Sequence
  Description of Artificial Sequence: Synthetic oligonucleotide
gaaaaguuuguauuucuag

SEQ ID NO: 3177496 - RNA, 19 nt, Artificial Sequence
  Description of Artificial Sequence: Synthetic oligonucleotide
ugauuaacugaacuggcag

SEQ ID NO: 3177497 - RNA, 19 nt, Artificial Sequence
  Description of Artificial Sequence: Synthetic oligonucleotide
accacuuuuaauuuaaagu

SEQ ID NO: 3177498 - RNA, 19 nt, Artificial Sequence
  Description of Artificial Sequence: Synthetic oligonucleotide
ugguuauugaguuugcaag

SEQ ID NO: 3177499 - RNA, 19 nt, Artificial Sequence
  Description of Artificial Sequence: Synthetic oligonucleotide
ucaagcaucaagacugggg

SEQ ID NO: 3177500 - RNA, 19 nt, Artificial Sequence
  Description of Artificial Sequence: Synthetic oligonucleotide
aucuugacuguucagagag

SEQ ID NO: 3177501 - RNA, 19 nt, Artificial Sequence
  Description of Artificial Sequence: Synthetic oligonucleotide
cuugccuauaccuucaagc

SEQ ID NO: 3177502 - RNA, 19 nt, Artificial Sequence
  Description of Artificial Sequence: Synthetic oligonucleotide
uguugguuccucaaggucc

SEQ ID NO: 3177503 - RNA, 19 nt, Artificial Sequence
  Description of Artificial Sequence: Synthetic oligonucleotide
ucauagugauugaacaagg

SEQ ID NO: 3177504 - RNA, 19 nt, Artificial Sequence
  Description of Artificial Sequence: Synthetic oligonucleotide
ugcauuuucacuucggaac

SEQ ID NO: 3177505 - RNA, 19 nt, Artificial Sequence
  Description of Artificial Sequence: Synthetic oligonucleotide
aacaauugaacaaaugaca

SEQ ID NO: 3177506 - RNA, 19 nt, Artificial Sequence
  Description of Artificial Sequence: Synthetic oligonucleotide
ugcuccauaaccuuggugu

SEQ ID NO: 3177507 - RNA, 19 nt, Artificial Sequence
  Description of Artificial Sequence: Synthetic oligonucleotide
gauagaaagaacaaagcca

SEQ ID NO: 3177508 - RNA, 19 nt, Artificial Sequence
  Description of Artificial Sequence: Synthetic oligonucleotide
uacauaugaaaacuucuug

SEQ ID NO: 3177509 - RNA, 19 nt, Artificial Sequence
  Description of Artificial Sequence: Synthetic oligonucleotide
ugaguuugcaagacaaaag

SEQ ID NO: 3177510 - RNA, 19 nt, Artificial Sequence
  Description of Artificial Sequence: Synthetic oligonucleotide
aaauagaagcucuuaacua

SEQ ID NO: 3177511 - RNA, 19 nt, Artificial Sequence
  Description of Artificial Sequence: Synthetic oligonucleotide
auaugaaaacuucuugguc

SEQ ID NO: 3177512 - RNA, 19 nt, Artificial Sequence
  Description of Artificial Sequence: Synthetic oligonucleotide
uugaacaaggccagaagag

SEQ ID NO: 3177513 - RNA, 19 nt, Artificial Sequence
  Description of Artificial Sequence: Synthetic oligonucleotide
aagaacaaagccauacuuc

SEQ ID NO: 3177514 - RNA, 19 nt, Artificial Sequence
  Description of Artificial Sequence: Synthetic oligonucleotide
uauccuguacuguacaaag

SEQ ID NO: 3177515 - RNA, 19 nt, Artificial Sequence
  Description of Artificial Sequence: Synthetic oligonucleotide
uauugaguuugcaagacaa

SEQ ID NO: 3177516 - RNA, 19 nt, Artificial Sequence
  Description of Artificial Sequence: Synthetic oligonucleotide
ugcaagacaaaagaaagca

SEQ ID NO: 3177517 - RNA, 19 nt, Artificial Sequence
  Description of Artificial Sequence: Synthetic oligonucleotide
caguaaggaauauauauug

SEQ ID NO: 3177518 - RNA, 19 nt, Artificial Sequence
  Description of Artificial Sequence: Synthetic oligonucleotide
uccacauuacuuaaaccag

SEQ ID NO: 3177519 - RNA, 19 nt, Artificial Sequence
  Description of Artificial Sequence: Synthetic oligonucleotide
uuggaggcuaucaugacug

SEQ ID NO: 3177520 - RNA, 19 nt, Artificial Sequence
  Description of Artificial Sequence: Synthetic oligonucleotide
agaacaaagccauacuucu

SEQ ID NO: 3177521 - RNA, 19 nt, Artificial Sequence
  Description of Artificial Sequence: Synthetic oligonucleotide
auugauacauaugaaaacu

SEQ ID NO: 3177522 - RNA, 19 nt, Artificial Sequence
  Description of Artificial Sequence: Synthetic oligonucleotide
cuguacuguacaaaggucc

SEQ ID NO: 3177523 - RNA, 19 nt, Artificial Sequence
  Description of Artificial Sequence: Synthetic oligonucleotide
uacuucuguauguacaaag

SEQ ID NO: 3177524 - RNA, 19 nt, Artificial Sequence
  Description of Artificial Sequence: Synthetic oligonucleotide
gaaagcaccaacguacagg

SEQ ID NO: 3177525 - RNA, 19 nt, Artificial Sequence
  Description of Artificial Sequence: Synthetic oligonucleotide
ugucauuaaggaauacacc

SEQ ID NO: 3177526 - RNA, 19 nt, Artificial Sequence
  Description of Artificial Sequence: Synthetic oligonucleotide
ucgauucagaguaaggcca

SEQ ID NO: 3177527 - RNA, 19 nt, Artificial Sequence
  Description of Artificial Sequence: Synthetic oligonucleotide
auugaacaaggccagaaga

SEQ ID NO: 3177528 - RNA, 19 nt, Artificial Sequence
  Description of Artificial Sequence: Synthetic oligonucleotide
augaaagcaagauguacag

SEQ ID NO: 3177529 - RNA, 19 nt, Artificial Sequence
  Description of Artificial Sequence: Synthetic oligonucleotide
ugugaacagguaaacaaac

SEQ ID NO: 3177530 - RNA, 19 nt, Artificial Sequence
  Description of Artificial Sequence: Synthetic oligonucleotide
cuggcaguuacacugauac

SEQ ID NO: 3177531 - RNA, 19 nt, Artificial Sequence
  Description of Artificial Sequence: Synthetic oligonucleotide
ggauagaaagaacaaagcc

SEQ ID NO: 3177532 - RNA, 19 nt, Artificial Sequence
  Description of Artificial Sequence: Synthetic oligonucleotide
ugaacagguaaacaaacuu

SEQ ID NO: 3177533 - RNA, 19 nt, Artificial Sequence
  Description of Artificial Sequence: Synthetic oligonucleotide
ugcagcuugagcaucaaaa

SEQ ID NO: 3177534 - RNA, 19 nt, Artificial Sequence
  Description of Artificial Sequence: Synthetic oligonucleotide
ugaacaaggccagaagagg

SEQ ID NO: 3177535 - RNA, 19 nt, Artificial Sequence
  Description of Artificial Sequence: Synthetic oligonucleotide
gaguuugcaagacaaaaga

SEQ ID NO: 3177536 - RNA, 19 nt, Artificial Sequence
  Description of Artificial Sequence: Synthetic oligonucleotide
uuaaccagggcuaaaucau

SEQ ID NO: 3177537 - RNA, 19 nt, Artificial Sequence
  Description of Artificial Sequence: Synthetic oligonucleotide
uuagucuuauccuguacug

SEQ ID NO: 3177538 - RNA, 19 nt, Artificial Sequence
  Description of Artificial Sequence: Synthetic oligonucleotide
uaucugggcaacacaaaag

SEQ ID NO: 3177539 - RNA, 19 nt, Artificial Sequence
  Description of Artificial Sequence: Synthetic oligonucleotide
uucuaauguaaaucuuuag

SEQ ID NO: 3177540 - RNA, 19 nt, Artificial Sequence
  Description of Artificial Sequence: Synthetic oligonucleotide
acuuacuaacacuggacag

SEQ ID NO: 3177541 - RNA, 19 nt, Artificial Sequence
  Description of Artificial Sequence: Synthetic oligonucleotide
uguuuuaccuugcauuuuc

SEQ ID NO: 3177542 - RNA, 19 nt, Artificial Sequence
  Description of Artificial Sequence: Synthetic oligonucleotide
ucauuaaggaauacaccac

SEQ ID NO: 3177543 - RNA, 19 nt, Artificial Sequence
  Description of Artificial Sequence: Synthetic oligonucleotide
aacacaaggucagucagug

SEQ ID NO: 3177544 - RNA, 19 nt, Artificial Sequence
  Description of Artificial Sequence: Synthetic oligonucleotide
ugauuauccugugauaucu

SEQ ID NO: 3177545 - RNA, 19 nt, Artificial Sequence
  Description of Artificial Sequence: Synthetic oligonucleotide
uuuagugcuuccagcagug

SEQ ID NO: 3177546 - RNA, 19 nt, Artificial Sequence
  Description of Artificial Sequence: Synthetic oligonucleotide
ccuucaagcaucaagacug

SEQ ID NO: 3177547 - RNA, 19 nt, Artificial Sequence
  Description of Artificial Sequence: Synthetic oligonucleotide
cuaaaucaucucaacuggg

SEQ ID NO: 3177548 - RNA, 19 nt, Artificial Sequence
  Description of Artificial Sequence: Synthetic oligonucleotide
aaaucccaggaucaggcgu

SEQ ID NO: 3177549 - RNA, 19 nt, Artificial Sequence
  Description of Artificial Sequence: Synthetic oligonucleotide
uugcaagacaaaagaaagc

SEQ ID NO: 3177550 - RNA, 19 nt, Artificial Sequence
  Description of Artificial Sequence: Synthetic oligonucleotide
uauaccuggugcaaauucu

SEQ ID NO: 3177551 - RNA, 19 nt, Artificial Sequence
  Description of Artificial Sequence: Synthetic oligonucleotide
caaauucugagaaucaaga

SEQ ID NO: 3177552 - RNA, 19 nt, Artificial Sequence
  Description of Artificial Sequence: Synthetic oligonucleotide
gcuaaaucaucucaacugg

SEQ ID NO: 3177553 - RNA, 19 nt, Artificial Sequence
  Description of Artificial Sequence: Synthetic oligonucleotide
guaguugugucauuaagga

SEQ ID NO: 3177554 - RNA, 19 nt, Artificial Sequence
  Description of Artificial Sequence: Synthetic oligonucleotide
auguacaaagucuucagaa

SEQ ID NO: 3177555 - RNA, 19 nt, Artificial Sequence
  Description of Artificial Sequence: Synthetic oligonucleotide
acacugggcuacuagaguc

SEQ ID NO: 3177556 - RNA, 19 nt, Artificial Sequence
  Description of Artificial Sequence: Synthetic oligonucleotide
uugauuaacugaacuggca

SEQ ID NO: 3177557 - RNA, 19 nt, Artificial Sequence
  Description of Artificial Sequence: Synthetic oligonucleotide
aaggccaucggagaagguc

SEQ ID NO: 3177558 - RNA, 19 nt, Artificial Sequence
  Description of Artificial Sequence: Synthetic oligonucleotide
acguuuucuaauguaaauc

SEQ ID NO: 3177559 - RNA, 19 nt, Artificial Sequence
  Description of Artificial Sequence: Synthetic oligonucleotide
uaaggaauacaccacuuuu

SEQ ID NO: 3177560 - RNA, 19 nt, Artificial Sequence
  Description of Artificial Sequence: Synthetic oligonucleotide
uuacaugagaacucagaac

SEQ ID NO: 3177561 - RNA, 19 nt, Artificial Sequence
  Description of Artificial Sequence: Synthetic oligonucleotide
ugcuagugcagugaagugg

SEQ ID NO: 3177562 - RNA, 19 nt, Artificial Sequence
  Description of Artificial Sequence: Synthetic oligonucleotide
uugaaaaguuuguauuucu

SEQ ID NO: 3177563 - RNA, 19 nt, Artificial Sequence
  Description of Artificial Sequence: Synthetic oligonucleotide
auagaaagaacaaagccau

SEQ ID NO: 3177564 - RNA, 19 nt, Artificial Sequence
  Description of Artificial Sequence: Synthetic oligonucleotide
ggcuaaaucaucucaacug

SEQ ID NO: 3177565 - RNA, 19 nt, Artificial Sequence
  Description of Artificial Sequence: Synthetic oligonucleotide
cacauuacuuaaaccagag

SEQ ID NO: 3177566 - RNA, 19 nt, Artificial Sequence
  Description of Artificial Sequence: Synthetic oligonucleotide
caugaaagcaagauguaca

SEQ ID NO: 3177567 - RNA, 19 nt, Artificial Sequence
  Description of Artificial Sequence: Synthetic oligonucleotide
uacagaauucucuucugcu

SEQ ID NO: 3177568 - RNA, 19 nt, Artificial Sequence
  Description of Artificial Sequence: Synthetic oligonucleotide
uguacuguacaaagguccu

SEQ ID NO: 3177569 - RNA, 19 nt, Artificial Sequence
  Description of Artificial Sequence: Synthetic oligonucleotide
aucuuuagugcuuccagca

SEQ ID NO: 3177570 - RNA, 19 nt, Artificial Sequence
  Description of Artificial Sequence: Synthetic oligonucleotide
cugagaaucaagaugucca

SEQ ID NO: 3177571 - RNA, 19 nt, Artificial Sequence
  Description of Artificial Sequence: Synthetic oligonucleotide
ugugucauuaaggaauaca

SEQ ID NO: 3177572 - RNA, 19 nt, Artificial Sequence
  Description of Artificial Sequence: Synthetic oligonucleotide
guucgauucagaguaaggc

SEQ ID NO: 3177573 - RNA, 19 nt, Artificial Sequence
  Description of Artificial Sequence: Synthetic oligonucleotide
uuauugaguuugcaagaca

SEQ ID NO: 3177574 - RNA, 19 nt, Artificial Sequence
  Description of Artificial Sequence: Synthetic oligonucleotide
cuuguuauucaugaaagca

SEQ ID NO: 3177575 - RNA, 19 nt, Artificial Sequence
  Description of Artificial Sequence: Synthetic oligonucleotide
cuuaaccagggcuaaauca

SEQ ID NO: 3177576 - RNA, 19 nt, Artificial Sequence
  Description of Artificial Sequence: Synthetic oligonucleotide
uacaccacuuuuaauuuaa

SEQ ID NO: 3177577 - RNA, 19 nt, Artificial Sequence
  Description of Artificial Sequence: Synthetic oligonucleotide
agcaaggagaagcuuccac

SEQ ID NO: 3177578 - RNA, 19 nt, Artificial Sequence
  Description of Artificial Sequence: Synthetic oligonucleotide
ucuuauccuguacuguaca

SEQ ID NO: 3177579 - RNA, 19 nt, Artificial Sequence
  Description of Artificial Sequence: Synthetic oligonucleotide
ucuaccacagcugucacuc

SEQ ID NO: 3177580 - RNA, 19 nt, Artificial Sequence
  Description of Artificial Sequence: Synthetic oligonucleotide
ucagaaacuuaaccagggc

SEQ ID NO: 3177581 - RNA, 19 nt, Artificial Sequence
  Description of Artificial Sequence: Synthetic oligonucleotide
ugaagugguauauucuauc

SEQ ID NO: 3177582 - RNA, 19 nt, Artificial Sequence
  Description of Artificial Sequence: Synthetic oligonucleotide
uaacugaacuggcaguuac

SEQ ID NO: 3177583 - RNA, 19 nt, Artificial Sequence
  Description of Artificial Sequence: Synthetic oligonucleotide
acuuaaccagggcuaaauc

SEQ ID NO: 3177584 - RNA, 19 nt, Artificial Sequence
  Description of Artificial Sequence: Synthetic oligonucleotide
aauaaauacacuguuuucc

SEQ ID NO: 3177585 - RNA, 19 nt, Artificial Sequence
  Description of Artificial Sequence: Synthetic oligonucleotide
uuaauugaaaccuucacag

SEQ ID NO: 3177586 - RNA, 19 nt, Artificial Sequence
  Description of Artificial Sequence: Synthetic oligonucleotide
aaggaguacaguuuguggc

SEQ ID NO: 3177587 - RNA, 19 nt, Artificial Sequence
  Description of Artificial Sequence: Synthetic oligonucleotide
aauguaaccgauaaacugc

SEQ ID NO: 3177588 - RNA, 19 nt, Artificial Sequence
  Description of Artificial Sequence: Synthetic oligonucleotide
aaaagauuaauugaaaccu

SEQ ID NO: 3177589 - RNA, 19 nt, Artificial Sequence
  Description of Artificial Sequence: Synthetic oligonucleotide
aaauguaaccgauaaacug

SEQ ID NO: 3177590 - RNA, 19 nt, Artificial Sequence
  Description of Artificial Sequence: Synthetic oligonucleotide
uccuaaaauaucuauuugg

SEQ ID NO: 3177591 - RNA, 19 nt, Artificial Sequence
  Description of Artificial Sequence: Synthetic oligonucleotide
acuaguuuuguacaugccc

SEQ ID NO: 3177592 - RNA, 19 nt, Artificial Sequence
  Description of Artificial Sequence: Synthetic oligonucleotide
cuuacauacaccuuuacac

SEQ ID NO: 3177593 - RNA, 19 nt, Artificial Sequence
  Description of Artificial Sequence: Synthetic oligonucleotide
uuuaaauaacugcacaagc

SEQ ID NO: 3177594 - RNA, 19 nt, Artificial Sequence
  Description of Artificial Sequence: Synthetic oligonucleotide
gaaaauguaaccgauaaac

SEQ ID NO: 3177595 - RNA, 19 nt, Artificial Sequence
  Description of Artificial Sequence: Synthetic oligonucleotide
aacuauucuguguacuccc

SEQ ID NO: 3177596 - RNA, 19 nt, Artificial Sequence
  Description of Artificial Sequence: Synthetic oligonucleotide
cuauuuggcaauuugaaac

SEQ ID NO: 3177597 - RNA, 19 nt, Artificial Sequence
  Description of Artificial Sequence: Synthetic oligonucleotide
aaaacaaaaucugaaacgu

SEQ ID NO: 3177598 - RNA, 19 nt, Artificial Sequence
  Description of Artificial Sequence: Synthetic oligonucleotide
aacggaaucccucugaaca

SEQ ID NO: 3177599 - RNA, 19 nt, Artificial Sequence
  Description of Artificial Sequence: Synthetic oligonucleotide
ucgauaggaauacagaucu

SEQ ID NO: 3177600 - RNA, 19 nt, Artificial Sequence
  Description of Artificial Sequence: Synthetic oligonucleotide
uuaaauaacugcacaagcu

SEQ ID NO: 3177601 - RNA, 19 nt, Artificial Sequence
  Description of Artificial Sequence: Synthetic oligonucleotide
aacuuuacugggcaaauug

SEQ ID NO: 3177602 - RNA, 19 nt, Artificial Sequence
  Description of Artificial Sequence: Synthetic oligonucleotide
aaaggaguacaguuugugg

SEQ ID NO: 3177603 - RNA, 19 nt, Artificial Sequence
  Description of Artificial Sequence: Synthetic oligonucleotide
ugaucaaagacccacuaca

SEQ ID NO: 3177604 - RNA, 19 nt, Artificial Sequence
  Description of Artificial Sequence: Synthetic oligonucleotide
uuugauauugcugugaauc

SEQ ID NO: 3177605 - RNA, 19 nt, Artificial Sequence
  Description of Artificial Sequence: Synthetic oligonucleotide
uuauucgauaggaauacag

SEQ ID NO: 3177606 - RNA, 19 nt, Artificial Sequence
  Description of Artificial Sequence: Synthetic oligonucleotide
acugcacaagcuuacauac

SEQ ID NO: 3177607 - RNA, 19 nt, Artificial Sequence
  Description of Artificial Sequence: Synthetic oligonucleotide
ucuuuaauaaauacacugu

SEQ ID NO: 3177608 - RNA, 19 nt, Artificial Sequence
  Description of Artificial Sequence: Synthetic oligonucleotide
aaaccuucacaguagcuuc

SEQ ID NO: 3177609 - RNA, 19 nt, Artificial Sequence
  Description of Artificial Sequence: Synthetic oligonucleotide
uuaucuuuuagucuuguaa

SEQ ID NO: 3177610 - RNA, 19 nt, Artificial Sequence
  Description of Artificial Sequence: Synthetic oligonucleotide
ugaaaugccaaauuuaaua

SEQ ID NO: 3177611 - RNA, 19 nt, Artificial Sequence
  Description of Artificial Sequence: Synthetic oligonucleotide
aacgcaagugcauaaccac

SEQ ID NO: 3177612 - RNA, 19 nt, Artificial Sequence
  Description of Artificial Sequence: Synthetic oligonucleotide
ucaaaagauuaauugaaac

SEQ ID NO: 3177613 - RNA, 19 nt, Artificial Sequence
  Description of Artificial Sequence: Synthetic oligonucleotide
uacacaaauaucuauuaga

SEQ ID NO: 3177614 - RNA, 19 nt, Artificial Sequence
  Description of Artificial Sequence: Synthetic oligonucleotide
auaaccacuacucuaauau

SEQ ID NO: 3177615 - RNA, 19 nt, Artificial Sequence
  Description of Artificial Sequence: Synthetic oligonucleotide
uauuagaaaauguaaccga

SEQ ID NO: 3177616 - RNA, 19 nt, Artificial Sequence
  Description of Artificial Sequence: Synthetic oligonucleotide
aggaauacagaucucagug

SEQ ID NO: 3177617 - RNA, 19 nt, Artificial Sequence
  Description of Artificial Sequence: Synthetic oligonucleotide
uuuuaaauaacugcacaag

SEQ ID NO: 3177618 - RNA, 19 nt, Artificial Sequence
  Description of Artificial Sequence: Synthetic oligonucleotide
cuauuagaaaauguaaccg

SEQ ID NO: 3177619 - RNA, 19 nt, Artificial Sequence
  Description of Artificial Sequence: Synthetic oligonucleotide
acuacucuaauauagugcu

SEQ ID NO: 3177620 - RNA, 19 nt, Artificial Sequence
  Description of Artificial Sequence: Synthetic oligonucleotide
uguacaugccccauaagug

SEQ ID NO: 3177621 - RNA, 19 nt, Artificial Sequence
  Description of Artificial Sequence: Synthetic oligonucleotide
uagaaaauguaaccgauaa

SEQ ID NO: 3177622 - RNA, 19 nt, Artificial Sequence
  Description of Artificial Sequence: Synthetic oligonucleotide
uaucuauuagaaaauguaa

SEQ ID NO: 3177623 - RNA, 19 nt, Artificial Sequence
  Description of Artificial Sequence: Synthetic oligonucleotide
uauagugcucaaaagauua

SEQ ID NO: 3177624 - RNA, 19 nt, Artificial Sequence
  Description of Artificial Sequence: Synthetic oligonucleotide
uaaccgauaaacugcacag

SEQ ID NO: 3177625 - RNA, 19 nt, Artificial Sequence
  Description of Artificial Sequence: Synthetic oligonucleotide
uacagugcaacccaaacaa

SEQ ID NO: 3177626 - RNA, 19 nt, Artificial Sequence
  Description of Artificial Sequence: Synthetic oligonucleotide
cacaguuuggaacaggagg

SEQ ID NO: 3177627 - RNA, 19 nt, Artificial Sequence
  Description of Artificial Sequence: Synthetic oligonucleotide
cuaguuuuguacaugcccc

SEQ ID NO: 3177628 - RNA, 19 nt, Artificial Sequence
  Description of Artificial Sequence: Synthetic oligonucleotide
agaaccaacuguuugauau

SEQ ID NO: 3177629 - RNA, 19 nt, Artificial Sequence
  Description of Artificial Sequence: Synthetic oligonucleotide
aucuauuagaaaauguaac

SEQ ID NO: 3177630 - RNA, 19 nt, Artificial Sequence
  Description of Artificial Sequence: Synthetic oligonucleotide
cuuauauugacacaauuga

SEQ ID NO: 3177631 - RNA, 19 nt, Artificial Sequence
  Description of Artificial Sequence: Synthetic oligonucleotide
uacacuguuuuccaaaacu

SEQ ID NO: 3177632 - RNA, 19 nt, Artificial Sequence
  Description of Artificial Sequence: Synthetic oligonucleotide
uguuuuauucgauaggaau

SEQ ID NO: 3177633 - RNA, 19 nt, Artificial Sequence
  Description of Artificial Sequence: Synthetic oligonucleotide
gaagguaauugcuggaugc

SEQ ID NO: 3177634 - RNA, 19 nt, Artificial Sequence
  Description of Artificial Sequence: Synthetic oligonucleotide
aagucaacuacacuaagua

SEQ ID NO: 3177635 - RNA, 19 nt, Artificial Sequence
  Description of Artificial Sequence: Synthetic oligonucleotide
uuguacaugccccauaagu

SEQ ID NO: 3177636 - RNA, 19 nt, Artificial Sequence
  Description of Artificial Sequence: Synthetic oligonucleotide
aagauuaauugaaaccuuc

SEQ ID NO: 3177637 - RNA, 19 nt, Artificial Sequence
  Description of Artificial Sequence: Synthetic oligonucleotide
uuacuaguuuuguacaugc

SEQ ID NO: 3177638 - RNA, 19 nt, Artificial Sequence
  Description of Artificial Sequence: Synthetic oligonucleotide
gaauacagaucucagugug

SEQ ID NO: 3177639 - RNA, 19 nt, Artificial Sequence
  Description of Artificial Sequence: Synthetic oligonucleotide
ugcucaaaagauuaauuga

SEQ ID NO: 3177640 - RNA, 19 nt, Artificial Sequence
  Description of Artificial Sequence: Synthetic oligonucleotide
aagugcauaaccacuacuc

SEQ ID NO: 3177641 - RNA, 19 nt, Artificial Sequence
  Description of Artificial Sequence: Synthetic oligonucleotide
uaucuauuuggcaauuuga

SEQ ID NO: 3177642 - RNA, 19 nt, Artificial Sequence
  Description of Artificial Sequence: Synthetic oligonucleotide
uguguuuuauucgauagga

SEQ ID NO: 3177643 - RNA, 19 nt, Artificial Sequence
  Description of Artificial Sequence: Synthetic oligonucleotide
aaucugaaacguuuagcug

SEQ ID NO: 3177644 - RNA, 19 nt, Artificial Sequence
  Description of Artificial Sequence: Synthetic oligonucleotide
uauucgauaggaauacaga

SEQ ID NO: 3177645 - RNA, 19 nt, Artificial Sequence
  Description of Artificial Sequence: Synthetic oligonucleotide
cacaauugaagguaauugc

SEQ ID NO: 3177646 - RNA, 19 nt, Artificial Sequence
  Description of Artificial Sequence: Synthetic oligonucleotide
uuaacaacacagaaauuuc

SEQ ID NO: 3177647 - RNA, 19 nt, Artificial Sequence
  Description of Artificial Sequence: Synthetic oligonucleotide
aauaucuauuagaaaaugu

SEQ ID NO: 3177648 - RNA, 19 nt, Artificial Sequence
  Description of Artificial Sequence: Synthetic oligonucleotide
aucaaagacccacuacagc

SEQ ID NO: 3177649 - RNA, 19 nt, Artificial Sequence
  Description of Artificial Sequence: Synthetic oligonucleotide
gauuaauugaaaccuucac

SEQ ID NO: 3177650 - RNA, 19 nt, Artificial Sequence
  Description of Artificial Sequence: Synthetic oligonucleotide
uuacauacaccuuuacaca

SEQ ID NO: 3177651 - RNA, 19 nt, Artificial Sequence
  Description of Artificial Sequence: Synthetic oligonucleotide
uaaauaacugcacaagcuu

SEQ ID NO: 3177652 - RNA, 19 nt, Artificial Sequence
  Description of Artificial Sequence: Synthetic oligonucleotide
uuuuauucgauaggaauac

SEQ ID NO: 3177653 - RNA, 19 nt, Artificial Sequence
  Description of Artificial Sequence: Synthetic oligonucleotide
uuuguaagcaacgcaagug

SEQ ID NO: 3177654 - RNA, 19 nt, Artificial Sequence
  Description of Artificial Sequence: Synthetic oligonucleotide
aaccacuacucuaauauag

SEQ ID NO: 3177655 - RNA, 19 nt, Artificial Sequence
  Description of Artificial Sequence: Synthetic oligonucleotide
ugcuacaugagaaccaacu

SEQ ID NO: 3177656 - RNA, 19 nt, Artificial Sequence
  Description of Artificial Sequence: Synthetic oligonucleotide
gaaaugccaaauuuaauaa

SEQ ID NO: 3177657 - RNA, 19 nt, Artificial Sequence
  Description of Artificial Sequence: Synthetic oligonucleotide
uuacugggcaaauuguaag

SEQ ID NO: 3177658 - RNA, 19 nt, Artificial Sequence
  Description of Artificial Sequence: Synthetic oligonucleotide
acuaaaguccuuuauuuaa

SEQ ID NO: 3177659 - RNA, 19 nt, Artificial Sequence
  Description of Artificial Sequence: Synthetic oligonucleotide
uguacagcucguuuguaag

SEQ ID NO: 3177660 - RNA, 19 nt, Artificial Sequence
  Description of Artificial Sequence: Synthetic oligonucleotide
auaucuauuuggcaauuug

SEQ ID NO: 3177661 - RNA, 19 nt, Artificial Sequence
  Description of Artificial Sequence: Synthetic oligonucleotide
uuauauugacacaauugaa

SEQ ID NO: 3177662 - RNA, 19 nt, Artificial Sequence
  Description of Artificial Sequence: Synthetic oligonucleotide
uuuccaacuauucugugua

SEQ ID NO: 3177663 - RNA, 19 nt, Artificial Sequence
  Description of Artificial Sequence: Synthetic oligonucleotide
uuauacaacugauucugca

SEQ ID NO: 3177664 - RNA, 19 nt, Artificial Sequence
  Description of Artificial Sequence: Synthetic oligonucleotide
uaacaacacagaaauuuca

SEQ ID NO: 3177665 - RNA, 19 nt, Artificial Sequence
  Description of Artificial Sequence: Synthetic oligonucleotide
agcauuaucuuuuagucuu

SEQ ID NO: 3177666 - RNA, 19 nt, Artificial Sequence
  Description of Artificial Sequence: Synthetic oligonucleotide
aauacacuguuuuccaaaa

SEQ ID NO: 3177667 - RNA, 19 nt, Artificial Sequence
  Description of Artificial Sequence: Synthetic oligonucleotide
cuacacuaaguauuugggg

SEQ ID NO: 3177668 - RNA, 19 nt, Artificial Sequence
  Description of Artificial Sequence: Synthetic oligonucleotide
auacccucuguacagcucg

SEQ ID NO: 3177669 - RNA, 19 nt, Artificial Sequence
  Description of Artificial Sequence: Synthetic oligonucleotide
uuugaaacggaaucccucu

SEQ ID NO: 3177670 - RNA, 19 nt, Artificial Sequence
  Description of Artificial Sequence: Synthetic oligonucleotide
accaugaucaaagacccac

SEQ ID NO: 3177671 - RNA, 19 nt, Artificial Sequence
  Description of Artificial Sequence: Synthetic oligonucleotide
uacucuaauauagugcuca

SEQ ID NO: 3177672 - RNA, 19 nt, Artificial Sequence
  Description of Artificial Sequence: Synthetic oligonucleotide
uuuuguacaugccccauaa

SEQ ID NO: 3177673 - RNA, 19 nt, Artificial Sequence
  Description of Artificial Sequence: Synthetic oligonucleotide
cacuacucuaauauagugc

SEQ ID NO: 3177674 - RNA, 19 nt, Artificial Sequence
  Description of Artificial Sequence: Synthetic oligonucleotide
aaaauguaaccgauaaacu

SEQ ID NO: 3177675 - RNA, 19 nt, Artificial Sequence
  Description of Artificial Sequence: Synthetic oligonucleotide
ucguuuguaagcaacgcaa

SEQ ID NO: 3177676 - RNA, 19 nt, Artificial Sequence
  Description of Artificial Sequence: Synthetic oligonucleotide
agaucucagugugaaaugc

SEQ ID NO: 3177677 - RNA, 19 nt, Artificial Sequence
  Description of Artificial Sequence: Synthetic oligonucleotide
uuucuuuaauaaauacacu

SEQ ID NO: 3177678 - RNA, 19 nt, Artificial Sequence
  Description of Artificial Sequence: Synthetic oligonucleotide
auucgauaggaauacagau

SEQ ID NO: 3177679 - RNA, 19 nt, Artificial Sequence
  Description of Artificial Sequence: Synthetic oligonucleotide
uuacagugcaacccaaaca

SEQ ID NO: 3177680 - RNA, 19 nt, Artificial Sequence
  Description of Artificial Sequence: Synthetic oligonucleotide
aaacggaaucccucugaac

SEQ ID NO: 3177681 - RNA, 19 nt, Artificial Sequence
  Description of Artificial Sequence: Synthetic oligonucleotide
gugaaucucaccaugauca

SEQ ID NO: 3177682 - RNA, 19 nt, Artificial Sequence
  Description of Artificial Sequence: Synthetic oligonucleotide
uuuacugggcaaauuguaa

SEQ ID NO: 3177683 - RNA, 19 nt, Artificial Sequence
  Description of Artificial Sequence: Synthetic oligonucleotide
uaaaguccuuuauuuaaca

SEQ ID NO: 3177684 - RNA, 19 nt, Artificial Sequence
  Description of Artificial Sequence: Synthetic oligonucleotide
ucaauaaccauauagaugc

SEQ ID NO: 3177685 - RNA, 19 nt, Artificial Sequence
  Description of Artificial Sequence: Synthetic oligonucleotide
aaauagcugaccuucaccc

SEQ ID NO: 3177686 - RNA, 19 nt, Artificial Sequence
  Description of Artificial Sequence: Synthetic oligonucleotide
uuucgaauaaccuaaagca

SEQ ID NO: 3177687 - RNA, 19 nt, Artificial Sequence
  Description of Artificial Sequence: Synthetic oligonucleotide
aaggcaaucauuaaauagc

SEQ ID NO: 3177688 - RNA, 19 nt, Artificial Sequence
  Description of Artificial Sequence: Synthetic oligonucleotide
aauaguaucuucuucucga

SEQ ID NO: 3177689 - RNA, 19 nt, Artificial Sequence
  Description of Artificial Sequence: Synthetic oligonucleotide
aauaaccuaaagcaauguc

SEQ ID NO: 3177690 - RNA, 19 nt, Artificial Sequence
  Description of Artificial Sequence: Synthetic oligonucleotide
auaaccuaaagcaaugucc

SEQ ID NO: 3177691 - RNA, 19 nt, Artificial Sequence
  Description of Artificial Sequence: Synthetic oligonucleotide
aauacuucuacucuguuuu

SEQ ID NO: 3177692 - RNA, 19 nt, Artificial Sequence
  Description of Artificial Sequence: Synthetic oligonucleotide
uuguuaaagacucaugucu

SEQ ID NO: 3177693 - RNA, 19 nt, Artificial Sequence
  Description of Artificial Sequence: Synthetic oligonucleotide
aaucauuaaauagcugacc

SEQ ID NO: 3177694 - RNA, 19 nt, Artificial Sequence
  Description of Artificial Sequence: Synthetic oligonucleotide
agcaucucaaacgagaucg

SEQ ID NO: 3177695 - RNA, 19 nt, Artificial Sequence
  Description of Artificial Sequence: Synthetic oligonucleotide
cuuucgaauaaccuaaagc

SEQ ID NO: 3177696 - RNA, 19 nt, Artificial Sequence
  Description of Artificial Sequence: Synthetic oligonucleotide
uaaagcaauguccagccgc

SEQ ID NO: 3177697 - RNA, 19 nt, Artificial Sequence
  Description of Artificial Sequence: Synthetic oligonucleotide
uauagaugcauccugccac

SEQ ID NO: 3177698 - RNA, 19 nt, Artificial Sequence
  Description of Artificial Sequence: Synthetic oligonucleotide
uuucuuucgaauaaccuaa

SEQ ID NO: 3177699 - RNA, 19 nt, Artificial Sequence
  Description of Artificial Sequence: Synthetic oligonucleotide
aagucaguguuccugguag

SEQ ID NO: 3177700 - RNA, 19 nt, Artificial Sequence
  Description of Artificial Sequence: Synthetic oligonucleotide
uaaccuaaagcaaugucca

SEQ ID NO: 3177701 - RNA, 19 nt, Artificial Sequence
  Description of Artificial Sequence: Synthetic oligonucleotide
aucauuaaauagcugaccu

SEQ ID NO: 3177702 - RNA, 19 nt, Artificial Sequence
  Description of Artificial Sequence: Synthetic oligonucleotide
ucuucucgaagucuguggg

SEQ ID NO: 3177703 - RNA, 19 nt, Artificial Sequence
  Description of Artificial Sequence: Synthetic oligonucleotide
caaggcaaucauuaaauag

SEQ ID NO: 3177704 - RNA, 19 nt, Artificial Sequence
  Description of Artificial Sequence: Synthetic oligonucleotide
uguaagauucgguuggggc

SEQ ID NO: 3177705 - RNA, 19 nt, Artificial Sequence
  Description of Artificial Sequence: Synthetic oligonucleotide
uguuuuggccuucauagcu

SEQ ID NO: 3177706 - RNA, 19 nt, Artificial Sequence
  Description of Artificial Sequence: Synthetic oligonucleotide
uaaauagcugaccuucacc

SEQ ID NO: 3177707 - RNA, 19 nt, Artificial Sequence
  Description of Artificial Sequence: Synthetic oligonucleotide
acuucuacucuguuuuggc

SEQ ID NO: 3177708 - RNA, 19 nt, Artificial Sequence
  Description of Artificial Sequence: Synthetic oligonucleotide
aauagcugaccuucacccg

SEQ ID NO: 3177709 - RNA, 19 nt, Artificial Sequence
  Description of Artificial Sequence: Synthetic oligonucleotide
aaagcaauguccagccgcc

SEQ ID NO: 3177710 - RNA, 19 nt, Artificial Sequence
  Description of Artificial Sequence: Synthetic oligonucleotide
aguaucuucuucucgaagu

SEQ ID NO: 3177711 - RNA, 19 nt, Artificial Sequence
  Description of Artificial Sequence: Synthetic oligonucleotide
uaaccauauagaugcaucc

SEQ ID NO: 3177712 - RNA, 19 nt, Artificial Sequence
  Description of Artificial Sequence: Synthetic oligonucleotide
uucaagucaguguuccugg

SEQ ID NO: 3177713 - RNA, 19 nt, Artificial Sequence
  Description of Artificial Sequence: Synthetic oligonucleotide
gaucuuguucuuugcagcg

SEQ ID NO: 3177714 - RNA, 19 nt, Artificial Sequence
  Description of Artificial Sequence: Synthetic oligonucleotide
cuucuugcccucaauaacc

SEQ ID NO: 3177715 - RNA, 19 nt, Artificial Sequence
  Description of Artificial Sequence: Synthetic oligonucleotide
cucaauaaccauauagaug

SEQ ID NO: 3177716 - RNA, 19 nt, Artificial Sequence
  Description of Artificial Sequence: Synthetic oligonucleotide
acaaggaagcauuucuuuc

SEQ ID NO: 3177717 - RNA, 19 nt, Artificial Sequence
  Description of Artificial Sequence: Synthetic oligonucleotide
ugugacuuggugcaaaauc

SEQ ID NO: 3177718 - RNA, 19 nt, Artificial Sequence
  Description of Artificial Sequence: Synthetic oligonucleotide
gucuguaagauucgguugg

SEQ ID NO: 3177719 - RNA, 19 nt, Artificial Sequence
  Description of Artificial Sequence: Synthetic oligonucleotide
ucgaauaaccuaaagcaau

SEQ ID NO: 3177720 - RNA, 19 nt, Artificial Sequence
  Description of Artificial Sequence: Synthetic oligonucleotide
uuuccugugacuuggugca

SEQ ID NO: 3177721 - RNA, 19 nt, Artificial Sequence
  Description of Artificial Sequence: Synthetic oligonucleotide
cucugugucuguaagauuc

SEQ ID NO: 3177722 - RNA, 19 nt, Artificial Sequence
  Description of Artificial Sequence: Synthetic oligonucleotide
agcgucaagcaucucaaac

SEQ ID NO: 3177723 - RNA, 19 nt, Artificial Sequence
  Description of Artificial Sequence: Synthetic oligonucleotide
ucaaacgagaucgucuccg

SEQ ID NO: 3177724 - RNA, 19 nt, Artificial Sequence
  Description of Artificial Sequence: Synthetic oligonucleotide
aagucuguggguuugugaa

SEQ ID NO: 3177725 - RNA, 19 nt, Artificial Sequence
  Description of Artificial Sequence: Synthetic oligonucleotide
uuagagacaaggaagcauu

SEQ ID NO: 3177726 - RNA, 19 nt, Artificial Sequence
  Description of Artificial Sequence: Synthetic oligonucleotide
auagcugaccuucacccgg

SEQ ID NO: 3177727 - RNA, 19 nt, Artificial Sequence
  Description of Artificial Sequence: Synthetic oligonucleotide
acaauaguaucuucuucuc

SEQ ID NO: 3177728 - RNA, 19 nt, Artificial Sequence
  Description of Artificial Sequence: Synthetic oligonucleotide
auuucuuucgaauaaccua

SEQ ID NO: 3177729 - RNA, 19 nt, Artificial Sequence
  Description of Artificial Sequence: Synthetic oligonucleotide
accuaaagcaauguccagc

SEQ ID NO: 3177730 - RNA, 19 nt, Artificial Sequence
  Description of Artificial Sequence: Synthetic oligonucleotide
uguggguuugugaagcggc

SEQ ID NO: 3177731 - RNA, 19 nt, Artificial Sequence
  Description of Artificial Sequence: Synthetic oligonucleotide
uucuucucgaagucugugg

SEQ ID NO: 3177732 - RNA, 19 nt, Artificial Sequence
  Description of Artificial Sequence: Synthetic oligonucleotide
uugauccucuucaagucag

SEQ ID NO: 3177733 - RNA, 19 nt, Artificial Sequence
  Description of Artificial Sequence: Synthetic oligonucleotide
gaccuuagagacaaggaag

SEQ ID NO: 3177734 - RNA, 19 nt, Artificial Sequence
  Description of Artificial Sequence: Synthetic oligonucleotide
accuuagagacaaggaagc

SEQ ID NO: 3177735 - RNA, 19 nt, Artificial Sequence
  Description of Artificial Sequence: Synthetic oligonucleotide
ucuuucgaauaaccuaaag

SEQ ID NO: 3177736 - RNA, 19 nt, Artificial Sequence
  Description of Artificial Sequence: Synthetic oligonucleotide
auaaccauauagaugcauc

SEQ ID NO: 3177737 - RNA, 19 nt, Artificial Sequence
  Description of Artificial Sequence: Synthetic oligonucleotide
cuuuccagguucaagcuug

SEQ ID NO: 3177738 - RNA, 19 nt, Artificial Sequence
  Description of Artificial Sequence: Synthetic oligonucleotide
caaucauuaaauagcugac

SEQ ID NO: 3177739 - RNA, 19 nt, Artificial Sequence
  Description of Artificial Sequence: Synthetic oligonucleotide
gcaaucauuaaauagcuga

SEQ ID NO: 3177740 - RNA, 19 nt, Artificial Sequence
  Description of Artificial Sequence: Synthetic oligonucleotide
aaauacuucuacucuguuu

SEQ ID NO: 3177741 - RNA, 19 nt, Artificial Sequence
  Description of Artificial Sequence: Synthetic oligonucleotide
uuaaauagcugaccuucac

SEQ ID NO: 3177742 - RNA, 19 nt, Artificial Sequence
  Description of Artificial Sequence: Synthetic oligonucleotide
uuugcugccuucuugcccu

SEQ ID NO: 3177743 - RNA, 19 nt, Artificial Sequence
  Description of Artificial Sequence: Synthetic oligonucleotide
cauccugccacugucaagg

SEQ ID NO: 3177744 - RNA, 19 nt, Artificial Sequence
  Description of Artificial Sequence: Synthetic oligonucleotide
gugcaaaauccguugaucc

SEQ ID NO: 3177745 - RNA, 19 nt, Artificial Sequence
  Description of Artificial Sequence: Synthetic oligonucleotide
auguccagccgccaggcgc

SEQ ID NO: 3177746 - RNA, 19 nt, Artificial Sequence
  Description of Artificial Sequence: Synthetic oligonucleotide
ugucaaggcaaucauuaaa

SEQ ID NO: 3177747 - RNA, 19 nt, Artificial Sequence
  Description of Artificial Sequence: Synthetic oligonucleotide
ugccuccucucucagacgg

SEQ ID NO: 3177748 - RNA, 19 nt, Artificial Sequence
  Description of Artificial Sequence: Synthetic oligonucleotide
ugugaagcggcacucugug

SEQ ID NO: 3177749 - RNA, 19 nt, Artificial Sequence
  Description of Artificial Sequence: Synthetic oligonucleotide
ugucuguaagauucgguug

SEQ ID NO: 3177750 - RNA, 19 nt, Artificial Sequence
  Description of Artificial Sequence: Synthetic oligonucleotide
uucuacucuguuuuggccu

SEQ ID NO: 3177751 - RNA, 19 nt, Artificial Sequence
  Description of Artificial Sequence: Synthetic oligonucleotide
uucaagcuuguuaaagacu

SEQ ID NO: 3177752 - RNA, 19 nt, Artificial Sequence
  Description of Artificial Sequence: Synthetic oligonucleotide
accauauagaugcauccug

SEQ ID NO: 3177753 - RNA, 19 nt, Artificial Sequence
  Description of Artificial Sequence: Synthetic oligonucleotide
ucugugucuguaagauucg

SEQ ID NO: 3177754 - RNA, 19 nt, Artificial Sequence
  Description of Artificial Sequence: Synthetic oligonucleotide
ugcagcgucaagcaucuca

SEQ ID NO: 3177755 - RNA, 19 nt, Artificial Sequence
  Description of Artificial Sequence: Synthetic oligonucleotide
uccucuucaagucaguguu

SEQ ID NO: 3177756 - RNA, 19 nt, Artificial Sequence
  Description of Artificial Sequence: Synthetic oligonucleotide
aagcauuucuuucgaauaa

SEQ ID NO: 3177757 - RNA, 19 nt, Artificial Sequence
  Description of Artificial Sequence: Synthetic oligonucleotide
aagcaucucaaacgagauc

SEQ ID NO: 3177758 - RNA, 19 nt, Artificial Sequence
  Description of Artificial Sequence: Synthetic oligonucleotide
cuuguuaaagacucauguc

SEQ ID NO: 3177759 - RNA, 19 nt, Artificial Sequence
  Description of Artificial Sequence: Synthetic oligonucleotide
caauaguaucuucuucucg

SEQ ID NO: 3177760 - RNA, 19 nt, Artificial Sequence
  Description of Artificial Sequence: Synthetic oligonucleotide
ugaagcggcacucuguguc

SEQ ID NO: 3177761 - RNA, 19 nt, Artificial Sequence
  Description of Artificial Sequence: Synthetic oligonucleotide
uguuaaagacucaugucuu

SEQ ID NO: 3177762 - RNA, 19 nt, Artificial Sequence
  Description of Artificial Sequence: Synthetic oligonucleotide
uagaccuuagagacaagga

SEQ ID NO: 3177763 - RNA, 19 nt, Artificial Sequence
  Description of Artificial Sequence: Synthetic oligonucleotide
uuugggacuuuccugugac

SEQ ID NO: 3177764 - RNA, 19 nt, Artificial Sequence
  Description of Artificial Sequence: Synthetic oligonucleotide
cuuggugcaaaauccguug

SEQ ID NO: 3177765 - RNA, 19 nt, Artificial Sequence
  Description of Artificial Sequence: Synthetic oligonucleotide
guagaccuuagagacaagg

SEQ ID NO: 3177766 - RNA, 19 nt, Artificial Sequence
  Description of Artificial Sequence: Synthetic oligonucleotide
uuugcagcgucaagcaucu

SEQ ID NO: 3177767 - RNA, 19 nt, Artificial Sequence
  Description of Artificial Sequence: Synthetic oligonucleotide
guucaagcuuguuaaagac

SEQ ID NO: 3177768 - RNA, 19 nt, Artificial Sequence
  Description of Artificial Sequence: Synthetic oligonucleotide
cuuugcagcgucaagcauc

SEQ ID NO: 3177769 - RNA, 19 nt, Artificial Sequence
  Description of Artificial Sequence: Synthetic oligonucleotide
gugacuuggugcaaaaucc

SEQ ID NO: 3177770 - RNA, 19 nt, Artificial Sequence
  Description of Artificial Sequence: Synthetic oligonucleotide
uuugugaagcggcacucug

SEQ ID NO: 3177771 - RNA, 19 nt, Artificial Sequence
  Description of Artificial Sequence: Synthetic oligonucleotide
ucucaaacgagaucgucuc

SEQ ID NO: 3177772 - RNA, 19 nt, Artificial Sequence
  Description of Artificial Sequence: Synthetic oligonucleotide
uccuccuucuugaagcgcc

SEQ ID NO: 3177773 - RNA, 19 nt, Artificial Sequence
  Description of Artificial Sequence: Synthetic oligonucleotide
aaggaagcauuucuuucga

SEQ ID NO: 3177774 - RNA, 19 nt, Artificial Sequence
  Description of Artificial Sequence: Synthetic oligonucleotide
uccugguagaccuuagaga

SEQ ID NO: 3177775 - RNA, 19 nt, Artificial Sequence
  Description of Artificial Sequence: Synthetic oligonucleotide
agaccuuagagacaaggaa

SEQ ID NO: 3177776 - RNA, 19 nt, Artificial Sequence
  Description of Artificial Sequence: Synthetic oligonucleotide
uaguaucuucuucucgaag

SEQ ID NO: 3177777 - RNA, 19 nt, Artificial Sequence
  Description of Artificial Sequence: Synthetic oligonucleotide
aauaaccauauagaugcau

SEQ ID NO: 3177778 - RNA, 19 nt, Artificial Sequence
  Description of Artificial Sequence: Synthetic oligonucleotide
uuuuggccuucauagcugc

SEQ ID NO: 3177779 - RNA, 19 nt, Artificial Sequence
  Description of Artificial Sequence: Synthetic oligonucleotide
gaagcauuucuuucgaaua

SEQ ID NO: 3177780 - RNA, 19 nt, Artificial Sequence
  Description of Artificial Sequence: Synthetic oligonucleotide
aaccuaaagcaauguccag

SEQ ID NO: 3177781 - RNA, 19 nt, Artificial Sequence
  Description of Artificial Sequence: Synthetic oligonucleotide
ccugguagaccuuagagac

SEQ ID NO: 3177782 - RNA, 19 nt, Artificial Sequence
  Description of Artificial Sequence: Synthetic oligonucleotide
agcauuucuuucgaauaac

SEQ ID NO: 3177783 - RNA, 19 nt, Artificial Sequence
  Description of Artificial Sequence: Synthetic oligonucleotide
cuucuacucuguuuuggcc

SEQ ID NO: 3177784 - RNA, 19 nt, Artificial Sequence
  Description of Artificial Sequence: Synthetic oligonucleotide
aauagugacaucuuagagc

SEQ ID NO: 3177785 - RNA, 19 nt, Artificial Sequence
  Description of Artificial Sequence: Synthetic oligonucleotide
uuuaauagugacaucuuag

SEQ ID NO: 3177786 - RNA, 19 nt, Artificial Sequence
  Description of Artificial Sequence: Synthetic oligonucleotide
aaagccucuagcugcaccc

SEQ ID NO: 3177787 - RNA, 19 nt, Artificial Sequence
  Description of Artificial Sequence: Synthetic oligonucleotide
auagugacaucuuagagca

SEQ ID NO: 3177788 - RNA, 19 nt, Artificial Sequence
  Description of Artificial Sequence: Synthetic oligonucleotide
aaaucggaaauccgcaggg

SEQ ID NO: 3177789 - RNA, 19 nt, Artificial Sequence
  Description of Artificial Sequence: Synthetic oligonucleotide
uaauagugacaucuuagag

SEQ ID NO: 3177790 - RNA, 19 nt, Artificial Sequence
  Description of Artificial Sequence: Synthetic oligonucleotide
aauaagaagguggcaaggg

SEQ ID NO: 3177791 - RNA, 19 nt, Artificial Sequence
  Description of Artificial Sequence: Synthetic oligonucleotide
uuaauagugacaucuuaga

SEQ ID NO: 3177792 - RNA, 19 nt, Artificial Sequence
  Description of Artificial Sequence: Synthetic oligonucleotide
uucuuagugcuuuuaaagc

SEQ ID NO: 3177793 - RNA, 19 nt, Artificial Sequence
  Description of Artificial Sequence: Synthetic oligonucleotide
agugacaucuuagagcagc

SEQ ID NO: 3177794 - RNA, 19 nt, Artificial Sequence
  Description of Artificial Sequence: Synthetic oligonucleotide
gaaauaagaagguggcaag

SEQ ID NO: 3177795 - RNA, 19 nt, Artificial Sequence
  Description of Artificial Sequence: Synthetic oligonucleotide
cuuaucaaaucggaaaucc

SEQ ID NO: 3177796 - RNA, 19 nt, Artificial Sequence
  Description of Artificial Sequence: Synthetic oligonucleotide
aaauaagaagguggcaagg

SEQ ID NO: 3177797 - RNA, 19 nt, Artificial Sequence
  Description of Artificial Sequence: Synthetic oligonucleotide
cagauauggaaauaagaag

SEQ ID NO: 3177798 - RNA, 19 nt, Artificial Sequence
  Description of Artificial Sequence: Synthetic oligonucleotide
gacaucuuagagcagcucc

SEQ ID NO: 3177799 - RNA, 19 nt, Artificial Sequence
  Description of Artificial Sequence: Synthetic oligonucleotide
uguuucuuuucuuagugcu

SEQ ID NO: 3177800 - RNA, 19 nt, Artificial Sequence
  Description of Artificial Sequence: Synthetic oligonucleotide
uucaugugaucagauaugg

SEQ ID NO: 3177801 - RNA, 19 nt, Artificial Sequence
  Description of Artificial Sequence: Synthetic oligonucleotide
cauaucuugccucugggcc

SEQ ID NO: 3177802 - RNA, 19 nt, Artificial Sequence
  Description of Artificial Sequence: Synthetic oligonucleotide
aaauccgcaggguacaagu

SEQ ID NO: 3177803 - RNA, 19 nt, Artificial Sequence
  Description of Artificial Sequence: Synthetic oligonucleotide
ucuuucagggcucuggcug

SEQ ID NO: 3177804 - RNA, 19 nt, Artificial Sequence
  Description of Artificial Sequence: Synthetic oligonucleotide
aauauagcgcaguggggag

SEQ ID NO: 3177805 - RNA, 19 nt, Artificial Sequence
  Description of Artificial Sequence: Synthetic oligonucleotide
ugcuuuuaaagccucuagc

SEQ ID NO: 3177806 - RNA, 19 nt, Artificial Sequence
  Description of Artificial Sequence: Synthetic oligonucleotide
caggaucuggaauagagag

SEQ ID NO: 3177807 - RNA, 19 nt, Artificial Sequence
  Description of Artificial Sequence: Synthetic oligonucleotide
uguuuguuucuuuucuuag

SEQ ID NO: 3177808 - RNA, 19 nt, Artificial Sequence
  Description of Artificial Sequence: Synthetic oligonucleotide
agcagauuuccauagcauc

SEQ ID NO: 3177809 - RNA, 19 nt, Artificial Sequence
  Description of Artificial Sequence: Synthetic oligonucleotide
ucuuagagcagcucccacg

SEQ ID NO: 3177810 - RNA, 19 nt, Artificial Sequence
  Description of Artificial Sequence: Synthetic oligonucleotide
ccaacaaaugcccagaggg

SEQ ID NO: 3177811 - RNA, 19 nt, Artificial Sequence
  Description of Artificial Sequence: Synthetic oligonucleotide
uggguuucuacacacuggc

SEQ ID NO: 3177812 - RNA, 19 nt, Artificial Sequence
  Description of Artificial Sequence: Synthetic oligonucleotide
ucuggcuuuccucaccagg

SEQ ID NO: 3177813 - RNA, 19 nt, Artificial Sequence
  Description of Artificial Sequence: Synthetic oligonucleotide
cuauccagaagcaagagaa

SEQ ID NO: 3177814 - RNA, 19 nt, Artificial Sequence
  Description of Artificial Sequence: Synthetic oligonucleotide
ucuucuaaggcagcgaaca

SEQ ID NO: 3177815 - RNA, 19 nt, Artificial Sequence
  Description of Artificial Sequence: Synthetic oligonucleotide
uacauaucuugccucuggg

SEQ ID NO: 3177816 - RNA, 19 nt, Artificial Sequence
  Description of Artificial Sequence: Synthetic oligonucleotide
acauaucuugccucugggc

SEQ ID NO: 3177817 - RNA, 19 nt, Artificial Sequence
  Description of Artificial Sequence: Synthetic oligonucleotide
auucuggguuucuacacac

SEQ ID NO: 3177818 - RNA, 19 nt, Artificial Sequence
  Description of Artificial Sequence: Synthetic oligonucleotide
uuccauagcaucacuguca

SEQ ID NO: 3177819 - RNA, 19 nt, Artificial Sequence
  Description of Artificial Sequence: Synthetic oligonucleotide
cucaccaggauccaucagg

SEQ ID NO: 3177820 - RNA, 19 nt, Artificial Sequence
  Description of Artificial Sequence: Synthetic oligonucleotide
aguggggagcaacaucucc

SEQ ID NO: 3177821 - RNA, 19 nt, Artificial Sequence
  Description of Artificial Sequence: Synthetic oligonucleotide
gaacucgugaucccguggg

SEQ ID NO: 3177822 - RNA, 19 nt, Artificial Sequence
  Description of Artificial Sequence: Synthetic oligonucleotide
aggguuucgcuccacgggc

SEQ ID NO: 3177823 - RNA, 19 nt, Artificial Sequence
  Description of Artificial Sequence: Synthetic oligonucleotide
uccaacaaaugcccagagg

SEQ ID NO: 3177824 - RNA, 19 nt, Artificial Sequence
  Description of Artificial Sequence: Synthetic oligonucleotide
ucaaaucggaaauccgcag

SEQ ID NO: 3177825 - RNA, 19 nt, Artificial Sequence
  Description of Artificial Sequence: Synthetic oligonucleotide
gugcacauccaacaaaugc

SEQ ID NO: 3177826 - RNA, 19 nt, Artificial Sequence
  Description of Artificial Sequence: Synthetic oligonucleotide
aacaaaugcccagagggga

SEQ ID NO: 3177827 - RNA, 19 nt, Artificial Sequence
  Description of Artificial Sequence: Synthetic oligonucleotide
caaaucggaaauccgcagg

SEQ ID NO: 3177828 - RNA, 19 nt, Artificial Sequence
  Description of Artificial Sequence: Synthetic oligonucleotide
guuucuacacacuggcugc

SEQ ID NO: 3177829 - RNA, 19 nt, Artificial Sequence
  Description of Artificial Sequence: Synthetic oligonucleotide
aaggcacggcugcagaggg

SEQ ID NO: 3177830 - RNA, 19 nt, Artificial Sequence
  Description of Artificial Sequence: Synthetic oligonucleotide
ucuaaggcagcgaacacuu

SEQ ID NO: 3177831 - RNA, 19 nt, Artificial Sequence
  Description of Artificial Sequence: Synthetic oligonucleotide
aaggguccagcucagggca

SEQ ID NO: 3177832 - RNA, 19 nt, Artificial Sequence
  Description of Artificial Sequence: Synthetic oligonucleotide
ggugugaacaggaagggcg

SEQ ID NO: 3177833 - RNA, 19 nt, Artificial Sequence
  Description of Artificial Sequence: Synthetic oligonucleotide
ugaucagauauggaaauaa

SEQ ID NO: 3177834 - RNA, 19 nt, Artificial Sequence
  Description of Artificial Sequence: Synthetic oligonucleotide
ggaaucugcagauucuggg

SEQ ID NO: 3177835 - RNA, 19 nt, Artificial Sequence
  Description of Artificial Sequence: Synthetic oligonucleotide
agagucgugccauuccagg

SEQ ID NO: 3177836 - RNA, 19 nt, Artificial Sequence
  Description of Artificial Sequence: Synthetic oligonucleotide
ugccauuccaggaugugca

SEQ ID NO: 3177837 - RNA, 19 nt, Artificial Sequence
  Description of Artificial Sequence: Synthetic oligonucleotide
uugaaagucugucuggcuu

SEQ ID NO: 3177838 - RNA, 19 nt, Artificial Sequence
  Description of Artificial Sequence: Synthetic oligonucleotide
uuguuucuuuucuuagugc

SEQ ID NO: 3177839 - RNA, 19 nt, Artificial Sequence
  Description of Artificial Sequence: Synthetic oligonucleotide
uucugugacuguagguccg

SEQ ID NO: 3177840 - RNA, 19 nt, Artificial Sequence
  Description of Artificial Sequence: Synthetic oligonucleotide
caacaaaugcccagagggg

SEQ ID NO: 3177841 - RNA, 19 nt, Artificial Sequence
  Description of Artificial Sequence: Synthetic oligonucleotide
gaucagauauggaaauaag

SEQ ID NO: 3177842 - RNA, 19 nt, Artificial Sequence
  Description of Artificial Sequence: Synthetic oligonucleotide
cuuggcagcagccagccac

SEQ ID NO: 3177843 - RNA, 19 nt, Artificial Sequence
  Description of Artificial Sequence: Synthetic oligonucleotide
guacauaucuugccucugg

SEQ ID NO: 3177844 - RNA, 19 nt, Artificial Sequence
  Description of Artificial Sequence: Synthetic oligonucleotide
ucuggaauagagagucgug

SEQ ID NO: 3177845 - RNA, 19 nt, Artificial Sequence
  Description of Artificial Sequence: Synthetic oligonucleotide
caccaugugauccuuccgg

SEQ ID NO: 3177846 - RNA, 19 nt, Artificial Sequence
  Description of Artificial Sequence: Synthetic oligonucleotide
acaucuuagagcagcuccc

SEQ ID NO: 3177847 - RNA, 19 nt, Artificial Sequence
  Description of Artificial Sequence: Synthetic oligonucleotide
aggaugugcacauccaaca

SEQ ID NO: 3177848 - RNA, 19 nt, Artificial Sequence
  Description of Artificial Sequence: Synthetic oligonucleotide
uucuccaucucauuccuuc

SEQ ID NO: 3177849 - RNA, 19 nt, Artificial Sequence
  Description of Artificial Sequence: Synthetic oligonucleotide
aguguguccugguuauuuc

SEQ ID NO: 3177850 - RNA, 19 nt, Artificial Sequence
  Description of Artificial Sequence: Synthetic oligonucleotide
uguccugcaaguagaggug

SEQ ID NO: 3177851 - RNA, 19 nt, Artificial Sequence
  Description of Artificial Sequence: Synthetic oligonucleotide
ucggaaauccgcaggguac

SEQ ID NO: 3177852 - RNA, 19 nt, Artificial Sequence
  Description of Artificial Sequence: Synthetic oligonucleotide
uaaagccucuagcugcacc

SEQ ID NO: 3177853 - RNA, 19 nt, Artificial Sequence
  Description of Artificial Sequence: Synthetic oligonucleotide
ugguuucuccaucucauuc

SEQ ID NO: 3177854 - RNA, 19 nt, Artificial Sequence
  Description of Artificial Sequence: Synthetic oligonucleotide
aacaucuccagggcugccg

SEQ ID NO: 3177855 - RNA, 19 nt, Artificial Sequence
  Description of Artificial Sequence: Synthetic oligonucleotide
aucagauauggaaauaaga

SEQ ID NO: 3177856 - RNA, 19 nt, Artificial Sequence
  Description of Artificial Sequence: Synthetic oligonucleotide
cuggaauagagagucgugc

SEQ ID NO: 3177857 - RNA, 19 nt, Artificial Sequence
  Description of Artificial Sequence: Synthetic oligonucleotide
aagguggcaaggguccagc

SEQ ID NO: 3177858 - RNA, 19 nt, Artificial Sequence
  Description of Artificial Sequence: Synthetic oligonucleotide
cauagcaucacugucaucu

SEQ ID NO: 3177859 - RNA, 19 nt, Artificial Sequence
  Description of Artificial Sequence: Synthetic oligonucleotide
uagugguuucuccaucuca

SEQ ID NO: 3177860 - RNA, 19 nt, Artificial Sequence
  Description of Artificial Sequence: Synthetic oligonucleotide
cacauccccauccucaaag

SEQ ID NO: 3177861 - RNA, 19 nt, Artificial Sequence
  Description of Artificial Sequence: Synthetic oligonucleotide
auauggaaauaagaaggug

SEQ ID NO: 3177862 - RNA, 19 nt, Artificial Sequence
  Description of Artificial Sequence: Synthetic oligonucleotide
uagagagucgugccauucc

SEQ ID NO: 3177863 - RNA, 19 nt, Artificial Sequence
  Description of Artificial Sequence: Synthetic oligonucleotide
cuggguuucuacacacugg

SEQ ID NO: 3177864 - RNA, 19 nt, Artificial Sequence
  Description of Artificial Sequence: Synthetic oligonucleotide
ucagggcucuggcuggugg

SEQ ID NO: 3177865 - RNA, 19 nt, Artificial Sequence
  Description of Artificial Sequence: Synthetic oligonucleotide
uuagugcuuuuaaagccuc

SEQ ID NO: 3177866 - RNA, 19 nt, Artificial Sequence
  Description of Artificial Sequence: Synthetic oligonucleotide
ucucauuccuucagugugu

SEQ ID NO: 3177867 - RNA, 19 nt, Artificial Sequence
  Description of Artificial Sequence: Synthetic oligonucleotide
cuuucagggcucuggcugg

SEQ ID NO: 3177868 - RNA, 19 nt, Artificial Sequence
  Description of Artificial Sequence: Synthetic oligonucleotide
auaucuugccucugggcca

SEQ ID NO: 3177869 - RNA, 19 nt, Artificial Sequence
  Description of Artificial Sequence: Synthetic oligonucleotide
uccgccugcagggaggugg

SEQ ID NO: 3177870 - RNA, 19 nt, Artificial Sequence
  Description of Artificial Sequence: Synthetic oligonucleotide
uccauagcaucacugucau

SEQ ID NO: 3177871 - RNA, 19 nt, Artificial Sequence
  Description of Artificial Sequence: Synthetic oligonucleotide
guagucuucuaaggcagcg

SEQ ID NO: 3177872 - RNA, 19 nt, Artificial Sequence
  Description of Artificial Sequence: Synthetic oligonucleotide
gguuucuccaucucauucc

SEQ ID NO: 3177873 - RNA, 19 nt, Artificial Sequence
  Description of Artificial Sequence: Synthetic oligonucleotide
ugguacauaucuugccucu

SEQ ID NO: 3177874 - RNA, 19 nt, Artificial Sequence
  Description of Artificial Sequence: Synthetic oligonucleotide
gaacucaggcaccauggac

SEQ ID NO: 3177875 - RNA, 19 nt, Artificial Sequence
  Description of Artificial Sequence: Synthetic oligonucleotide
aacuagacaguagaaggua

SEQ ID NO: 3177876 - RNA, 19 nt, Artificial Sequence
  Description of Artificial Sequence: Synthetic oligonucleotide
caaggguccagcucagggc

SEQ ID NO: 3177877 - RNA, 19 nt, Artificial Sequence
  Description of Artificial Sequence: Synthetic oligonucleotide
uucaguguguccugguuau

SEQ ID NO: 3177878 - RNA, 19 nt, Artificial Sequence
  Description of Artificial Sequence: Synthetic oligonucleotide
cacugguacauaucuugcc

SEQ ID NO: 3177879 - RNA, 19 nt, Artificial Sequence
  Description of Artificial Sequence: Synthetic oligonucleotide
ugugcacauccaacaaaug

SEQ ID NO: 3177880 - RNA, 19 nt, Artificial Sequence
  Description of Artificial Sequence: Synthetic oligonucleotide
uucuaaggcagcgaacacu

SEQ ID NO: 3177881 - RNA, 19 nt, Artificial Sequence
  Description of Artificial Sequence: Synthetic oligonucleotide
aucuuagagcagcucccac

SEQ ID NO: 3177882 - RNA, 19 nt, Artificial Sequence
  Description of Artificial Sequence: Synthetic oligonucleotide
ucaugugaucagauaugga

SEQ ID NO: 3177883 - RNA, 19 nt, Artificial Sequence
  Description of Artificial Sequence: Synthetic oligonucleotide
gugcuuuuaaagccucuag

SEQ ID NO: 3177884 - RNA, 19 nt, Artificial Sequence
  Description of Artificial Sequence: Synthetic oligonucleotide
aacguuuuguaucaggggc

SEQ ID NO: 3177885 - RNA, 19 nt, Artificial Sequence
  Description of Artificial Sequence: Synthetic oligonucleotide
uuagcuauggcacugauca

SEQ ID NO: 3177886 - RNA, 19 nt, Artificial Sequence
  Description of Artificial Sequence: Synthetic oligonucleotide
uaaugggccaauuagaagg

SEQ ID NO: 3177887 - RNA, 19 nt, Artificial Sequence
  Description of Artificial Sequence: Synthetic oligonucleotide
aacacaacggguuugugac

SEQ ID NO: 3177888 - RNA, 19 nt, Artificial Sequence
  Description of Artificial Sequence: Synthetic oligonucleotide
ugaauagccauucaugagg

SEQ ID NO: 3177889 - RNA, 19 nt, Artificial Sequence
  Description of Artificial Sequence: Synthetic oligonucleotide
accauaacuaauuccaucc

SEQ ID NO: 3177890 - RNA, 19 nt, Artificial Sequence
  Description of Artificial Sequence: Synthetic oligonucleotide
auuacaaaccaauaaagca

SEQ ID NO: 3177891 - RNA, 19 nt, Artificial Sequence
  Description of Artificial Sequence: Synthetic oligonucleotide
aguacauccucauugcacc

SEQ ID NO: 3177892 - RNA, 19 nt, Artificial Sequence
  Description of Artificial Sequence: Synthetic oligonucleotide
auuaaugagaguuauacuu

SEQ ID NO: 3177893 - RNA, 19 nt, Artificial Sequence
  Description of Artificial Sequence: Synthetic oligonucleotide
acacgaaucaucuguaagc

SEQ ID NO: 3177894 - RNA, 19 nt, Artificial Sequence
  Description of Artificial Sequence: Synthetic oligonucleotide
aauaauguaacguuuugua

SEQ ID NO: 3177895 - RNA, 19 nt, Artificial Sequence
  Description of Artificial Sequence: Synthetic oligonucleotide
uuuuguuuuaguauuugca

SEQ ID NO: 3177896 - RNA, 19 nt, Artificial Sequence
  Description of Artificial Sequence: Synthetic oligonucleotide
cuugcaauaggaaggagcg

SEQ ID NO: 3177897 - RNA, 19 nt, Artificial Sequence
  Description of Artificial Sequence: Synthetic oligonucleotide
acagguauggcauuauugg

SEQ ID NO: 3177898 - RNA, 19 nt, Artificial Sequence
  Description of Artificial Sequence: Synthetic oligonucleotide
aaccacagggaauuuaagg

SEQ ID NO: 3177899 - RNA, 19 nt, Artificial Sequence
  Description of Artificial Sequence: Synthetic oligonucleotide
uuauuggaagaguagcugg

SEQ ID NO: 3177900 - RNA, 19 nt, Artificial Sequence
  Description of Artificial Sequence: Synthetic oligonucleotide
uucugaauuuacaauacca

SEQ ID NO: 3177901 - RNA, 19 nt, Artificial Sequence
  Description of Artificial Sequence: Synthetic oligonucleotide
uuacaaaccaauaaagcau

SEQ ID NO: 3177902 - RNA, 19 nt, Artificial Sequence
  Description of Artificial Sequence: Synthetic oligonucleotide
uuccaauccauuuucauga

SEQ ID NO: 3177903 - RNA, 19 nt, Artificial Sequence
  Description of Artificial Sequence: Synthetic oligonucleotide
auugcuaacagguauggca

SEQ ID NO: 3177904 - RNA, 19 nt, Artificial Sequence
  Description of Artificial Sequence: Synthetic oligonucleotide
cauuacaaaccaauaaagc

SEQ ID NO: 3177905 - RNA, 19 nt, Artificial Sequence
  Description of Artificial Sequence: Synthetic oligonucleotide
uguaugucaaucaacucac

SEQ ID NO: 3177906 - RNA, 19 nt, Artificial Sequence
  Description of Artificial Sequence: Synthetic oligonucleotide
aaccuugaaucguaggagg

SEQ ID NO: 3177907 - RNA, 19 nt, Artificial Sequence
  Description of Artificial Sequence: Synthetic oligonucleotide
acaacagagccucauuagc

SEQ ID NO: 3177908 - RNA, 19 nt, Artificial Sequence
  Description of Artificial Sequence: Synthetic oligonucleotide
accaauaaagcauggacug

SEQ ID NO: 3177909 - RNA, 19 nt, Artificial Sequence
  Description of Artificial Sequence: Synthetic oligonucleotide
aaucguaggaggcagcugu

SEQ ID NO: 3177910 - RNA, 19 nt, Artificial Sequence
  Description of Artificial Sequence: Synthetic oligonucleotide
auucugaauuuacaauacc

SEQ ID NO: 3177911 - RNA, 19 nt, Artificial Sequence
  Description of Artificial Sequence: Synthetic oligonucleotide
caaaccuugcaauaggaag

SEQ ID NO: 3177912 - RNA, 19 nt, Artificial Sequence
  Description of Artificial Sequence: Synthetic oligonucleotide
uaaauaauguaacguuuug

SEQ ID NO: 3177913 - RNA, 19 nt, Artificial Sequence
  Description of Artificial Sequence: Synthetic oligonucleotide
uguggauagauguauuagc

SEQ ID NO: 3177914 - RNA, 19 nt, Artificial Sequence
  Description of Artificial Sequence: Synthetic oligonucleotide
ucacauaaacuucaccacc

SEQ ID NO: 3177915 - RNA, 19 nt, Artificial Sequence
  Description of Artificial Sequence: Synthetic oligonucleotide
ugcuaauuguagcuggcgg

SEQ ID NO: 3177916 - RNA, 19 nt, Artificial Sequence
  Description of Artificial Sequence: Synthetic oligonucleotide
gaauuagugcuguagcuug

SEQ ID NO: 3177917 - RNA, 19 nt, Artificial Sequence
  Description of Artificial Sequence: Synthetic oligonucleotide
uaaugagaguuauacuuag

SEQ ID NO: 3177918 - RNA, 19 nt, Artificial Sequence
  Description of Artificial Sequence: Synthetic oligonucleotide
uguuuugcagaguugucag

SEQ ID NO: 3177919 - RNA, 19 nt, Artificial Sequence
  Description of Artificial Sequence: Synthetic oligonucleotide
ucugucacaaaacucugac

SEQ ID NO: 3177920 - RNA, 19 nt, Artificial Sequence
  Description of Artificial Sequence: Synthetic oligonucleotide
uguugaauuacacgcuccc

SEQ ID NO: 3177921 - RNA, 19 nt, Artificial Sequence
  Description of Artificial Sequence: Synthetic oligonucleotide
gaugagucugaacugcucc

SEQ ID NO: 3177922 - RNA, 19 nt, Artificial Sequence
  Description of Artificial Sequence: Synthetic oligonucleotide
agcuaucugaauuagugcu

SEQ ID NO: 3177923 - RNA, 19 nt, Artificial Sequence
  Description of Artificial Sequence: Synthetic oligonucleotide
uugaauuacacgcucccac

SEQ ID NO: 3177924 - RNA, 19 nt, Artificial Sequence
  Description of Artificial Sequence: Synthetic oligonucleotide
ugcaauaggaaggagcgag

SEQ ID NO: 3177925 - RNA, 19 nt, Artificial Sequence
  Description of Artificial Sequence: Synthetic oligonucleotide
ugacccauuaagcaaaguc

SEQ ID NO: 3177926 - RNA, 19 nt, Artificial Sequence
  Description of Artificial Sequence: Synthetic oligonucleotide
gaauuuaaggucauucaug

SEQ ID NO: 3177927 - RNA, 19 nt, Artificial Sequence
  Description of Artificial Sequence: Synthetic oligonucleotide
aaauaauguaacguuuugu

SEQ ID NO: 3177928 - RNA, 19 nt, Artificial Sequence
  Description of Artificial Sequence: Synthetic oligonucleotide
guaacguuuuguaucaggg

SEQ ID NO: 3177929 - RNA, 19 nt, Artificial Sequence
  Description of Artificial Sequence: Synthetic oligonucleotide
cugaauuuacaauaccaac

SEQ ID NO: 3177930 - RNA, 19 nt, Artificial Sequence
  Description of Artificial Sequence: Synthetic oligonucleotide
uauggcauuauuggaagag

SEQ ID NO: 3177931 - RNA, 19 nt, Artificial Sequence
  Description of Artificial Sequence: Synthetic oligonucleotide
uaacguuuuguaucagggg

SEQ ID NO: 3177932 - RNA, 19 nt, Artificial Sequence
  Description of Artificial Sequence: Synthetic oligonucleotide
caucauuucagcuaucuga

SEQ ID NO: 3177933 - RNA, 19 nt, Artificial Sequence
  Description of Artificial Sequence: Synthetic oligonucleotide
uagugcuguagcuugaucu

SEQ ID NO: 3177934 - RNA, 19 nt, Artificial Sequence
  Description of Artificial Sequence: Synthetic oligonucleotide
caacucacuagcuaacugc

SEQ ID NO: 3177935 - RNA, 19 nt, Artificial Sequence
  Description of Artificial Sequence: Synthetic oligonucleotide
aacaagaauuagcuuuuca

SEQ ID NO: 3177936 - RNA, 19 nt, Artificial Sequence
  Description of Artificial Sequence: Synthetic oligonucleotide
uucuuugcuaucuacuagu

SEQ ID NO: 3177937 - RNA, 19 nt, Artificial Sequence
  Description of Artificial Sequence: Synthetic oligonucleotide
acuagcuaacugcaggguc

SEQ ID NO: 3177938 - RNA, 19 nt, Artificial Sequence
  Description of Artificial Sequence: Synthetic oligonucleotide
guguaugucaaucaacuca

SEQ ID NO: 3177939 - RNA, 19 nt, Artificial Sequence
  Description of Artificial Sequence: Synthetic oligonucleotide
augagucugaacugcuccc

SEQ ID NO: 3177940 - RNA, 19 nt, Artificial Sequence
  Description of Artificial Sequence: Synthetic oligonucleotide
ucgaaccugcuucaguagg

SEQ ID NO: 3177941 - RNA, 19 nt, Artificial Sequence
  Description of Artificial Sequence: Synthetic oligonucleotide
agggaauuuaaggucauuc

SEQ ID NO: 3177942 - RNA, 19 nt, Artificial Sequence
  Description of Artificial Sequence: Synthetic oligonucleotide
cagaccauaacuaauucca

SEQ ID NO: 3177943 - RNA, 19 nt, Artificial Sequence
  Description of Artificial Sequence: Synthetic oligonucleotide
aacuaauuccaucccugug

SEQ ID NO: 3177944 - RNA, 19 nt, Artificial Sequence
  Description of Artificial Sequence: Synthetic oligonucleotide
ucuaagaagaugguccagc

SEQ ID NO: 3177945 - RNA, 19 nt, Artificial Sequence
  Description of Artificial Sequence: Synthetic oligonucleotide
uauuugcaauggcuggugg

SEQ ID NO: 3177946 - RNA, 19 nt, Artificial Sequence
  Description of Artificial Sequence: Synthetic oligonucleotide
ugaucacagggugacagcg

SEQ ID NO: 3177947 - RNA, 19 nt, Artificial Sequence
  Description of Artificial Sequence: Synthetic oligonucleotide
uuacaauaccaacacuccu

SEQ ID NO: 3177948 - RNA, 19 nt, Artificial Sequence
  Description of Artificial Sequence: Synthetic oligonucleotide
uaguacauccucauugcac

SEQ ID NO: 3177949 - RNA, 19 nt, Artificial Sequence
  Description of Artificial Sequence: Synthetic oligonucleotide
auaauguaacguuuuguau

SEQ ID NO: 3177950 - RNA, 19 nt, Artificial Sequence
  Description of Artificial Sequence: Synthetic oligonucleotide
aaaucuucuuuuauugaca

SEQ ID NO: 3177951 - RNA, 19 nt, Artificial Sequence
  Description of Artificial Sequence: Synthetic oligonucleotide
cuggguuaaaguaauccug

SEQ ID NO: 3177952 - RNA, 19 nt, Artificial Sequence
  Description of Artificial Sequence: Synthetic oligonucleotide
uuuugcagaguugucagcu

SEQ ID NO: 3177953 - RNA, 19 nt, Artificial Sequence
  Description of Artificial Sequence: Synthetic oligonucleotide
caagaauuagcuuuucaga

SEQ ID NO: 3177954 - RNA, 19 nt, Artificial Sequence
  Description of Artificial Sequence: Synthetic oligonucleotide
uaaggucauucaugcaugg

SEQ ID NO: 3177955 - RNA, 19 nt, Artificial Sequence
  Description of Artificial Sequence: Synthetic oligonucleotide
aaugggccaauuagaaggg

SEQ ID NO: 3177956 - RNA, 19 nt, Artificial Sequence
  Description of Artificial Sequence: Synthetic oligonucleotide
ugaauuacacgcucccaca

SEQ ID NO: 3177957 - RNA, 19 nt, Artificial Sequence
  Description of Artificial Sequence: Synthetic oligonucleotide
uggguucgcaacacaacgg

SEQ ID NO: 3177958 - RNA, 19 nt, Artificial Sequence
  Description of Artificial Sequence: Synthetic oligonucleotide
ggaaggaucucuuuaggcc

SEQ ID NO: 3177959 - RNA, 19 nt, Artificial Sequence
  Description of Artificial Sequence: Synthetic oligonucleotide
ucucuaagaagauggucca

SEQ ID NO: 3177960 - RNA, 19 nt, Artificial Sequence
  Description of Artificial Sequence: Synthetic oligonucleotide
ucaaucaacucacuagcua

SEQ ID NO: 3177961 - RNA, 19 nt, Artificial Sequence
  Description of Artificial Sequence: Synthetic oligonucleotide
gaaccuugaaucguaggag

SEQ ID NO: 3177962 - RNA, 19 nt, Artificial Sequence
  Description of Artificial Sequence: Synthetic oligonucleotide
auuccaucccuguggauag

SEQ ID NO: 3177963 - RNA, 19 nt, Artificial Sequence
  Description of Artificial Sequence: Synthetic oligonucleotide
gcuaucuacuaguacaucc

SEQ ID NO: 3177964 - RNA, 19 nt, Artificial Sequence
  Description of Artificial Sequence: Synthetic oligonucleotide
gagaguuauacuuagguuu

SEQ ID NO: 3177965 - RNA, 19 nt, Artificial Sequence
  Description of Artificial Sequence: Synthetic oligonucleotide
auaccaacacuccuggcca

SEQ ID NO: 3177966 - RNA, 19 nt, Artificial Sequence
  Description of Artificial Sequence: Synthetic oligonucleotide
uucuagggaugccucauca

SEQ ID NO: 3177967 - RNA, 19 nt, Artificial Sequence
  Description of Artificial Sequence: Synthetic oligonucleotide
uccugggaaaguuuguugu

SEQ ID NO: 3177968 - RNA, 19 nt, Artificial Sequence
  Description of Artificial Sequence: Synthetic oligonucleotide
uagggaugccucaucagug

SEQ ID NO: 3177969 - RNA, 19 nt, Artificial Sequence
  Description of Artificial Sequence: Synthetic oligonucleotide
uuaagcaaagucgaucaaa

SEQ ID NO: 3177970 - RNA, 19 nt, Artificial Sequence
  Description of Artificial Sequence: Synthetic oligonucleotide
auaacuaauuccaucccug

SEQ ID NO: 3177971 - RNA, 19 nt, Artificial Sequence
  Description of Artificial Sequence: Synthetic oligonucleotide
acugaucacagggugacag

SEQ ID NO: 3177972 - RNA, 19 nt, Artificial Sequence
  Description of Artificial Sequence: Synthetic oligonucleotide
cugaauagccauucaugag

SEQ ID NO: 3177973 - RNA, 19 nt, Artificial Sequence
  Description of Artificial Sequence: Synthetic oligonucleotide
auugcuaauuguagcuggc

SEQ ID NO: 3177974 - RNA, 19 nt, Artificial Sequence
  Description of Artificial Sequence: Synthetic oligonucleotide
uguacugcuuuuccagugu

SEQ ID NO: 3177975 - RNA, 19 nt, Artificial Sequence
  Description of Artificial Sequence: Synthetic oligonucleotide
uuugcaucuucaugaaguc

SEQ ID NO: 3177976 - RNA, 19 nt, Artificial Sequence
  Description of Artificial Sequence: Synthetic oligonucleotide
uuacacgcucccacagucg

SEQ ID NO: 3177977 - RNA, 19 nt, Artificial Sequence
  Description of Artificial Sequence: Synthetic oligonucleotide
gguauggcauuauuggaag

SEQ ID NO: 3177978 - RNA, 19 nt, Artificial Sequence
  Description of Artificial Sequence: Synthetic oligonucleotide
ugagaguuauacuuagguu

SEQ ID NO: 3177979 - RNA, 19 nt, Artificial Sequence
  Description of Artificial Sequence: Synthetic oligonucleotide
guauuagcaucuucuuugc

SEQ ID NO: 3177980 - RNA, 19 nt, Artificial Sequence
  Description of Artificial Sequence: Synthetic oligonucleotide
auuagcaggaaggaucucu

SEQ ID NO: 3177981 - RNA, 19 nt, Artificial Sequence
  Description of Artificial Sequence: Synthetic oligonucleotide
ucggugaguucaaauuuug

SEQ ID NO: 3177982 - RNA, 19 nt, Artificial Sequence
  Description of Artificial Sequence: Synthetic oligonucleotide
uacucucugaauccuggga

SEQ ID NO: 3177983 - RNA, 19 nt, Artificial Sequence
  Description of Artificial Sequence: Synthetic oligonucleotide
uaacuaauuccaucccugu

SEQ ID NO: 3177984 - RNA, 19 nt, Artificial Sequence
  Description of Artificial Sequence: Synthetic oligonucleotide
aacacugagaggcaggaac

SEQ ID NO: 3177985 - RNA, 19 nt, Artificial Sequence
  Description of Artificial Sequence: Synthetic oligonucleotide
gaagaaaagcaucacaggc

SEQ ID NO: 3177986 - RNA, 19 nt, Artificial Sequence
  Description of Artificial Sequence: Synthetic oligonucleotide
aaacgaguuaguugaaggg

SEQ ID NO: 3177987 - RNA, 19 nt, Artificial Sequence
  Description of Artificial Sequence: Synthetic oligonucleotide
auacagagcaucuuggagg

SEQ ID NO: 3177988 - RNA, 19 nt, Artificial Sequence
  Description of Artificial Sequence: Synthetic oligonucleotide
aguuccaggaaauaguguc

SEQ ID NO: 3177989 - RNA, 19 nt, Artificial Sequence
  Description of Artificial Sequence: Synthetic oligonucleotide
aagaaaagcaucacaggcc

SEQ ID NO: 3177990 - RNA, 19 nt, Artificial Sequence
  Description of Artificial Sequence: Synthetic oligonucleotide
aguuccaccagccccaugc

SEQ ID NO: 3177991 - RNA, 19 nt, Artificial Sequence
  Description of Artificial Sequence: Synthetic oligonucleotide
aaaauuguagcgaaggcug

SEQ ID NO: 3177992 - RNA, 19 nt, Artificial Sequence
  Description of Artificial Sequence: Synthetic oligonucleotide
uuagauacagagcaucuug

SEQ ID NO: 3177993 - RNA, 19 nt, Artificial Sequence
  Description of Artificial Sequence: Synthetic oligonucleotide
ugggaugaaaauuguagcg

SEQ ID NO: 3177994 - RNA, 19 nt, Artificial Sequence
  Description of Artificial Sequence: Synthetic oligonucleotide
gagaagaaaagcaucacag

SEQ ID NO: 3177995 - RNA, 19 nt, Artificial Sequence
  Description of Artificial Sequence: Synthetic oligonucleotide
aucacaggccaacugaagc

SEQ ID NO: 3177996 - RNA, 19 nt, Artificial Sequence
  Description of Artificial Sequence: Synthetic oligonucleotide
gcaaacuucauguauaucc

SEQ ID NO: 3177997 - RNA, 19 nt, Artificial Sequence
  Description of Artificial Sequence: Synthetic oligonucleotide
ucuggguugauguagugcc

SEQ ID NO: 3177998 - RNA, 19 nt, Artificial Sequence
  Description of Artificial Sequence: Synthetic oligonucleotide
aaaagcaucacaggccaac

SEQ ID NO: 3177999 - RNA, 19 nt, Artificial Sequence
  Description of Artificial Sequence: Synthetic oligonucleotide
auacagagagaagaaaagc

SEQ ID NO: 3178000 - RNA, 19 nt, Artificial Sequence
  Description of Artificial Sequence: Synthetic oligonucleotide
caaacgaguuaguugaagg

SEQ ID NO: 3178001 - RNA, 19 nt, Artificial Sequence
  Description of Artificial Sequence: Synthetic oligonucleotide
uagauacagagcaucuugg

SEQ ID NO: 3178002 - RNA, 19 nt, Artificial Sequence
  Description of Artificial Sequence: Synthetic oligonucleotide
acucaggcgacgcaguucc

SEQ ID NO: 3178003 - RNA, 19 nt, Artificial Sequence
  Description of Artificial Sequence: Synthetic oligonucleotide
guuaguugaagggucaucg

SEQ ID NO: 3178004 - RNA, 19 nt, Artificial Sequence
  Description of Artificial Sequence: Synthetic oligonucleotide
auagcgguuggccacaggg

SEQ ID NO: 3178005 - RNA, 19 nt, Artificial Sequence
  Description of Artificial Sequence: Synthetic oligonucleotide
uguuucacaagguugggcu

SEQ ID NO: 3178006 - RNA, 19 nt, Artificial Sequence
  Description of Artificial Sequence: Synthetic oligonucleotide
aauagugucggcccaccag

SEQ ID NO: 3178007 - RNA, 19 nt, Artificial Sequence
  Description of Artificial Sequence: Synthetic oligonucleotide
uguauauccagguuagcac

SEQ ID NO: 3178008 - RNA, 19 nt, Artificial Sequence
  Description of Artificial Sequence: Synthetic oligonucleotide
gugauagagcuuuagauac

SEQ ID NO: 3178009 - RNA, 19 nt, Artificial Sequence
  Description of Artificial Sequence: Synthetic oligonucleotide
uggauuguaggucugcagc

SEQ ID NO: 3178010 - RNA, 19 nt, Artificial Sequence
  Description of Artificial Sequence: Synthetic oligonucleotide
ugaaaauuguagcgaaggc

SEQ ID NO: 3178011 - RNA, 19 nt, Artificial Sequence
  Description of Artificial Sequence: Synthetic oligonucleotide
gauacagagcaucuuggag

SEQ ID NO: 3178012 - RNA, 19 nt, Artificial Sequence
  Description of Artificial Sequence: Synthetic oligonucleotide
cuuagcucucaacagagag

SEQ ID NO: 3178013 - RNA, 19 nt, Artificial Sequence
  Description of Artificial Sequence: Synthetic oligonucleotide
uucucaaacgaguuaguug

SEQ ID NO: 3178014 - RNA, 19 nt, Artificial Sequence
  Description of Artificial Sequence: Synthetic oligonucleotide
uucucuuucucaaacgagu

SEQ ID NO: 3178015 - RNA, 19 nt, Artificial Sequence
  Description of Artificial Sequence: Synthetic oligonucleotide
aaccacacuguacaaggag

SEQ ID NO: 3178016 - RNA, 19 nt, Artificial Sequence
  Description of Artificial Sequence: Synthetic oligonucleotide
cagggaagagcauagcugg

SEQ ID NO: 3178017 - RNA, 19 nt, Artificial Sequence
  Description of Artificial Sequence: Synthetic oligonucleotide
auagucuugcuucucuuuc

SEQ ID NO: 3178018 - RNA, 19 nt, Artificial Sequence
  Description of Artificial Sequence: Synthetic oligonucleotide
cacuccuagaguaaacugg

SEQ ID NO: 3178019 - RNA, 19 nt, Artificial Sequence
  Description of Artificial Sequence: Synthetic oligonucleotide
agaguacagugccaugucc

SEQ ID NO: 3178020 - RNA, 19 nt, Artificial Sequence
  Description of Artificial Sequence: Synthetic oligonucleotide
aucgccauaaucaucuucg

SEQ ID NO: 3178021 - RNA, 19 nt, Artificial Sequence
  Description of Artificial Sequence: Synthetic oligonucleotide
ucuaggauccgcauaggcu

SEQ ID NO: 3178022 - RNA, 19 nt, Artificial Sequence
  Description of Artificial Sequence: Synthetic oligonucleotide
uaguugaagggucaucgcc

SEQ ID NO: 3178023 - RNA, 19 nt, Artificial Sequence
  Description of Artificial Sequence: Synthetic oligonucleotide
gauagagcuuuagauacag

SEQ ID NO: 3178024 - RNA, 19 nt, Artificial Sequence
  Description of Artificial Sequence: Synthetic oligonucleotide
cugggaugaaaauuguagc

SEQ ID NO: 3178025 - RNA, 19 nt, Artificial Sequence
  Description of Artificial Sequence: Synthetic oligonucleotide
gaucuguucuucuggaaug

SEQ ID NO: 3178026 - RNA, 19 nt, Artificial Sequence
  Description of Artificial Sequence: Synthetic oligonucleotide
uaggugaggguccugcggg

SEQ ID NO: 3178027 - RNA, 19 nt, Artificial Sequence
  Description of Artificial Sequence: Synthetic oligonucleotide
auaaucaucuucggugccc

SEQ ID NO: 3178028 - RNA, 19 nt, Artificial Sequence
  Description of Artificial Sequence: Synthetic oligonucleotide
ggaaccacacuguacaagg

SEQ ID NO: 3178029 - RNA, 19 nt, Artificial Sequence
  Description of Artificial Sequence: Synthetic oligonucleotide
uguacaaggagggacucag

SEQ ID NO: 3178030 - RNA, 19 nt, Artificial Sequence
  Description of Artificial Sequence: Synthetic oligonucleotide
cuaggauccgcauaggcuc

SEQ ID NO: 3178031 - RNA, 19 nt, Artificial Sequence
  Description of Artificial Sequence: Synthetic oligonucleotide
aaggugcuccaauacuggg

SEQ ID NO: 3178032 - RNA, 19 nt, Artificial Sequence
  Description of Artificial Sequence: Synthetic oligonucleotide
aagggucaucgccauaauc

SEQ ID NO: 3178033 - RNA, 19 nt, Artificial Sequence
  Description of Artificial Sequence: Synthetic oligonucleotide
ucuaccagacguagucugg

SEQ ID NO: 3178034 - RNA, 19 nt, Artificial Sequence
  Description of Artificial Sequence: Synthetic oligonucleotide
agccccaugcuauacagag

SEQ ID NO: 3178035 - RNA, 19 nt, Artificial Sequence
  Description of Artificial Sequence: Synthetic oligonucleotide
acuucauguauauccaggu

SEQ ID NO: 3178036 - RNA, 19 nt, Artificial Sequence
  Description of Artificial Sequence: Synthetic oligonucleotide
aacgaguuaguugaagggu

SEQ ID NO: 3178037 - RNA, 19 nt, Artificial Sequence
  Description of Artificial Sequence: Synthetic oligonucleotide
auguguuucacaagguugg

SEQ ID NO: 3178038 - RNA, 19 nt, Artificial Sequence
  Description of Artificial Sequence: Synthetic oligonucleotide
uacaucugggacagguagg

SEQ ID NO: 3178039 - RNA, 19 nt, Artificial Sequence
  Description of Artificial Sequence: Synthetic oligonucleotide
cuauacagagagaagaaaa

SEQ ID NO: 3178040 - RNA, 19 nt, Artificial Sequence
  Description of Artificial Sequence: Synthetic oligonucleotide
auaggcucuggguugaugu

SEQ ID NO: 3178041 - RNA, 19 nt, Artificial Sequence
  Description of Artificial Sequence: Synthetic oligonucleotide
caggaaauagugucggccc

SEQ ID NO: 3178042 - RNA, 19 nt, Artificial Sequence
  Description of Artificial Sequence: Synthetic oligonucleotide
uucggugcccucauagcgg

SEQ ID NO: 3178043 - RNA, 19 nt, Artificial Sequence
  Description of Artificial Sequence: Synthetic oligonucleotide
agcaugcccacgccaaucc

SEQ ID NO: 3178044 - RNA, 19 nt, Artificial Sequence
  Description of Artificial Sequence: Synthetic oligonucleotide
agguguggcucagagaagc

SEQ ID NO: 3178045 - RNA, 19 nt, Artificial Sequence
  Description of Artificial Sequence: Synthetic oligonucleotide
augacuccaggcaauagac

SEQ ID NO: 3178046 - RNA, 19 nt, Artificial Sequence
  Description of Artificial Sequence: Synthetic oligonucleotide
uugccaaagcccuuguggc

SEQ ID NO: 3178047 - RNA, 19 nt, Artificial Sequence
  Description of Artificial Sequence: Synthetic oligonucleotide
agcgguuggccacagggac

SEQ ID NO: 3178048 - RNA, 19 nt, Artificial Sequence
  Description of Artificial Sequence: Synthetic oligonucleotide
uccuagaguaaacugggau

SEQ ID NO: 3178049 - RNA, 19 nt, Artificial Sequence
  Description of Artificial Sequence: Synthetic oligonucleotide
acguagucuggauuguagg

SEQ ID NO: 3178050 - RNA, 19 nt, Artificial Sequence
  Description of Artificial Sequence: Synthetic oligonucleotide
acacuguacaaggagggac

SEQ ID NO: 3178051 - RNA, 19 nt, Artificial Sequence
  Description of Artificial Sequence: Synthetic oligonucleotide
augcuauacagagagaaga

SEQ ID NO: 3178052 - RNA, 19 nt, Artificial Sequence
  Description of Artificial Sequence: Synthetic oligonucleotide
ugcaacacugagaggcagg

SEQ ID NO: 3178053 - RNA, 19 nt, Artificial Sequence
  Description of Artificial Sequence: Synthetic oligonucleotide
uuggagguguggcucagag

SEQ ID NO: 3178054 - RNA, 19 nt, Artificial Sequence
  Description of Artificial Sequence: Synthetic oligonucleotide
uacagagcaucuuggaggu

SEQ ID NO: 3178055 - RNA, 19 nt, Artificial Sequence
  Description of Artificial Sequence: Synthetic oligonucleotide
ggaagaucuguucuucugg

SEQ ID NO: 3178056 - RNA, 19 nt, Artificial Sequence
  Description of Artificial Sequence: Synthetic oligonucleotide
uacugggaagaucuguucu

SEQ ID NO: 3178057 - RNA, 19 nt, Artificial Sequence
  Description of Artificial Sequence: Synthetic oligonucleotide
gaugacuccaggcaauaga

SEQ ID NO: 3178058 - RNA, 19 nt, Artificial Sequence
  Description of Artificial Sequence: Synthetic oligonucleotide
agagagaagaaaagcauca

SEQ ID NO: 3178059 - RNA, 19 nt, Artificial Sequence
  Description of Artificial Sequence: Synthetic oligonucleotide
acuccuagaguaaacuggg

SEQ ID NO: 3178060 - RNA, 19 nt, Artificial Sequence
  Description of Artificial Sequence: Synthetic oligonucleotide
acaagguugggcuccacca

SEQ ID NO: 3178061 - RNA, 19 nt, Artificial Sequence
  Description of Artificial Sequence: Synthetic oligonucleotide
aauccacucuaggauccgc

SEQ ID NO: 3178062 - RNA, 19 nt, Artificial Sequence
  Description of Artificial Sequence: Synthetic oligonucleotide
uacagugccauguccuugc

SEQ ID NO: 3178063 - RNA, 19 nt, Artificial Sequence
  Description of Artificial Sequence: Synthetic oligonucleotide
agcaucacaggccaacuga

SEQ ID NO: 3178064 - RNA, 19 nt, Artificial Sequence
  Description of Artificial Sequence: Synthetic oligonucleotide
gaugaaaauuguagcgaag

SEQ ID NO: 3178065 - RNA, 19 nt, Artificial Sequence
  Description of Artificial Sequence: Synthetic oligonucleotide
uguagcgaaggcuggagaa

SEQ ID NO: 3178066 - RNA, 19 nt, Artificial Sequence
  Description of Artificial Sequence: Synthetic oligonucleotide
guauauccagguuagcaca

SEQ ID NO: 3178067 - RNA, 19 nt, Artificial Sequence
  Description of Artificial Sequence: Synthetic oligonucleotide
auacugggaagaucuguuc

SEQ ID NO: 3178068 - RNA, 19 nt, Artificial Sequence
  Description of Artificial Sequence: Synthetic oligonucleotide
accacauaggcccgcuccc

SEQ ID NO: 3178069 - RNA, 19 nt, Artificial Sequence
  Description of Artificial Sequence: Synthetic oligonucleotide
cauguccuugccaaagccc

SEQ ID NO: 3178070 - RNA, 19 nt, Artificial Sequence
  Description of Artificial Sequence: Synthetic oligonucleotide
cccaauguguuucacaagg

SEQ ID NO: 3178071 - RNA, 19 nt, Artificial Sequence
  Description of Artificial Sequence: Synthetic oligonucleotide
guugggcuccaccacauag

SEQ ID NO: 3178072 - RNA, 19 nt, Artificial Sequence
  Description of Artificial Sequence: Synthetic oligonucleotide
cagagagaagaaaagcauc

SEQ ID NO: 3178073 - RNA, 19 nt, Artificial Sequence
  Description of Artificial Sequence: Synthetic oligonucleotide
gaaggugcuccaauacugg

SEQ ID NO: 3178074 - RNA, 19 nt, Artificial Sequence
  Description of Artificial Sequence: Synthetic oligonucleotide
ucaaacgaguuaguugaag

SEQ ID NO: 3178075 - RNA, 19 nt, Artificial Sequence
  Description of Artificial Sequence: Synthetic oligonucleotide
gccaacugaagccuggucg

SEQ ID NO: 3178076 - RNA, 19 nt, Artificial Sequence
  Description of Artificial Sequence: Synthetic oligonucleotide
agggucaucgccauaauca

SEQ ID NO: 3178077 - RNA, 19 nt, Artificial Sequence
  Description of Artificial Sequence: Synthetic oligonucleotide
uuaguugaagggucaucgc

SEQ ID NO: 3178078 - RNA, 19 nt, Artificial Sequence
  Description of Artificial Sequence: Synthetic oligonucleotide
ucugcagcgaugacuccag

SEQ ID NO: 3178079 - RNA, 19 nt, Artificial Sequence
  Description of Artificial Sequence: Synthetic oligonucleotide
acacugagaggcaggaacc

SEQ ID NO: 3178080 - RNA, 19 nt, Artificial Sequence
  Description of Artificial Sequence: Synthetic oligonucleotide
aggcaauagacauagucuu

SEQ ID NO: 3178081 - RNA, 19 nt, Artificial Sequence
  Description of Artificial Sequence: Synthetic oligonucleotide
uguaggucugcagcgauga

SEQ ID NO: 3178082 - RNA, 19 nt, Artificial Sequence
  Description of Artificial Sequence: Synthetic oligonucleotide
cucucaacagagaguacag

SEQ ID NO: 3178083 - RNA, 19 nt, Artificial Sequence
  Description of Artificial Sequence: Synthetic oligonucleotide
auagugucggcccaccagu

SEQ ID NO: 3178084 - RNA, 19 nt, Artificial Sequence
  Description of Artificial Sequence: Synthetic oligonucleotide
uguacuuaugcaaauaugg

SEQ ID NO: 3178085 - RNA, 19 nt, Artificial Sequence
  Description of Artificial Sequence: Synthetic oligonucleotide
uguuacuucaguuagucag

SEQ ID NO: 3178086 - RNA, 19 nt, Artificial Sequence
  Description of Artificial Sequence: Synthetic oligonucleotide
ugugugaaaagacaaaccc

SEQ ID NO: 3178087 - RNA, 19 nt, Artificial Sequence
  Description of Artificial Sequence: Synthetic oligonucleotide
agauacacaaaguucuucc

SEQ ID NO: 3178088 - RNA, 19 nt, Artificial Sequence
  Description of Artificial Sequence: Synthetic oligonucleotide
uggagcaugagucaagucg

SEQ ID NO: 3178089 - RNA, 19 nt, Artificial Sequence
  Description of Artificial Sequence: Synthetic oligonucleotide
acuaacacaauaaaagggc

SEQ ID NO: 3178090 - RNA, 19 nt, Artificial Sequence
  Description of Artificial Sequence: Synthetic oligonucleotide
auguggucgagauagauac

SEQ ID NO: 3178091 - RNA, 19 nt, Artificial Sequence
  Description of Artificial Sequence: Synthetic oligonucleotide
aacaacaggggauucagag

SEQ ID NO: 3178092 - RNA, 19 nt, Artificial Sequence
  Description of Artificial Sequence: Synthetic oligonucleotide
uguuaggugucauuaaagg

SEQ ID NO: 3178093 - RNA, 19 nt, Artificial Sequence
  Description of Artificial Sequence: Synthetic oligonucleotide
aaagguuucuguuacuuca

SEQ ID NO: 3178094 - RNA, 19 nt, Artificial Sequence
  Description of Artificial Sequence: Synthetic oligonucleotide
gaguaaaucaauuaacuga

SEQ ID NO: 3178095 - RNA, 19 nt, Artificial Sequence
  Description of Artificial Sequence: Synthetic oligonucleotide
cuaagaaccaccucguggg

SEQ ID NO: 3178096 - RNA, 19 nt, Artificial Sequence
  Description of Artificial Sequence: Synthetic oligonucleotide
uuaggugucauuaaaggaa

SEQ ID NO: 3178097 - RNA, 19 nt, Artificial Sequence
  Description of Artificial Sequence: Synthetic oligonucleotide
ugugaaaagacaaacccuc

SEQ ID NO: 3178098 - RNA, 19 nt, Artificial Sequence
  Description of Artificial Sequence: Synthetic oligonucleotide
uuuagucucuuuaaugagc

SEQ ID NO: 3178099 - RNA, 19 nt, Artificial Sequence
  Description of Artificial Sequence: Synthetic oligonucleotide
ucuguagggccaaucaugg

SEQ ID NO: 3178100 - RNA, 19 nt, Artificial Sequence
  Description of Artificial Sequence: Synthetic oligonucleotide
gguacuaacacaauaaaag

SEQ ID NO: 3178101 - RNA, 19 nt, Artificial Sequence
  Description of Artificial Sequence: Synthetic oligonucleotide
aagggcuccaaaugaaaac

SEQ ID NO: 3178102 - RNA, 19 nt, Artificial Sequence
  Description of Artificial Sequence: Synthetic oligonucleotide
aauuauuaguaguaagcau

SEQ ID NO: 3178103 - RNA, 19 nt, Artificial Sequence
  Description of Artificial Sequence: Synthetic oligonucleotide
acaaauuaaauucuugaau

SEQ ID NO: 3178104 - RNA, 19 nt, Artificial Sequence
  Description of Artificial Sequence: Synthetic oligonucleotide
gagaacuguaaucagagca

SEQ ID NO: 3178105 - RNA, 19 nt, Artificial Sequence
  Description of Artificial Sequence: Synthetic oligonucleotide
uauugaauuauuaguagua

SEQ ID NO: 3178106 - RNA, 19 nt, Artificial Sequence
  Description of Artificial Sequence: Synthetic oligonucleotide
uguuuggcaaugaugauaa

SEQ ID NO: 3178107 - RNA, 19 nt, Artificial Sequence
  Description of Artificial Sequence: Synthetic oligonucleotide
gaaaagacaaacccuccag

SEQ ID NO: 3178108 - RNA, 19 nt, Artificial Sequence
  Description of Artificial Sequence: Synthetic oligonucleotide
auauaaauuaucaugcaca

SEQ ID NO: 3178109 - RNA, 19 nt, Artificial Sequence
  Description of Artificial Sequence: Synthetic oligonucleotide
aguagucccaauugcaagg

SEQ ID NO: 3178110 - RNA, 19 nt, Artificial Sequence
  Description of Artificial Sequence: Synthetic oligonucleotide
acuaauugucauuauccag

SEQ ID NO: 3178111 - RNA, 19 nt, Artificial Sequence
  Description of Artificial Sequence: Synthetic oligonucleotide
aaucauggggauucccaac

SEQ ID NO: 3178112 - RNA, 19 nt, Artificial Sequence
  Description of Artificial Sequence: Synthetic oligonucleotide
cagagcaauacuauugggg

SEQ ID NO: 3178113 - RNA, 19 nt, Artificial Sequence
  Description of Artificial Sequence: Synthetic oligonucleotide
uauaaauuaucaugcacau

SEQ ID NO: 3178114 - RNA, 19 nt, Artificial Sequence
  Description of Artificial Sequence: Synthetic oligonucleotide
cauauaaauuaucaugcac

SEQ ID NO: 3178115 - RNA, 19 nt, Artificial Sequence
  Description of Artificial Sequence: Synthetic oligonucleotide
aaaggucugugguauacug

SEQ ID NO: 3178116 - RNA, 19 nt, Artificial Sequence
  Description of Artificial Sequence: Synthetic oligonucleotide
uccaguauguaacuuaauc

SEQ ID NO: 3178117 - RNA, 19 nt, Artificial Sequence
  Description of Artificial Sequence: Synthetic oligonucleotide
cugagaacuguaaucagag

SEQ ID NO: 3178118 - RNA, 19 nt, Artificial Sequence
  Description of Artificial Sequence: Synthetic oligonucleotide
aacaugaguaaaucaauua

SEQ ID NO: 3178119 - RNA, 19 nt, Artificial Sequence
  Description of Artificial Sequence: Synthetic oligonucleotide
augaaaagguaucauucag

SEQ ID NO: 3178120 - RNA, 19 nt, Artificial Sequence
  Description of Artificial Sequence: Synthetic oligonucleotide
uugauauguauauucacau

SEQ ID NO: 3178121 - RNA, 19 nt, Artificial Sequence
  Description of Artificial Sequence: Synthetic oligonucleotide
uaagcuuucaauucuugaa

SEQ ID NO: 3178122 - RNA, 19 nt, Artificial Sequence
  Description of Artificial Sequence: Synthetic oligonucleotide
gguauacugauauuacugg

SEQ ID NO: 3178123 - RNA, 19 nt, Artificial Sequence
  Description of Artificial Sequence: Synthetic oligonucleotide
cauagaaguauguagguga

SEQ ID NO: 3178124 - RNA, 19 nt, Artificial Sequence
  Description of Artificial Sequence: Synthetic oligonucleotide
gaaaagguaucauucagaa

SEQ ID NO: 3178125 - RNA, 19 nt, Artificial Sequence
  Description of Artificial Sequence: Synthetic oligonucleotide
ucuuguaguacagugcugc

SEQ ID NO: 3178126 - RNA, 19 nt, Artificial Sequence
  Description of Artificial Sequence: Synthetic oligonucleotide
aaacccuccagcuguugac

SEQ ID NO: 3178127 - RNA, 19 nt, Artificial Sequence
  Description of Artificial Sequence: Synthetic oligonucleotide
ugaaaagacaaacccucca

SEQ ID NO: 3178128 - RNA, 19 nt, Artificial Sequence
  Description of Artificial Sequence: Synthetic oligonucleotide
auguaacuuaaucuucaac

SEQ ID NO: 3178129 - RNA, 19 nt, Artificial Sequence
  Description of Artificial Sequence: Synthetic oligonucleotide
uguguacuuaugcaaauau

SEQ ID NO: 3178130 - RNA, 19 nt, Artificial Sequence
  Description of Artificial Sequence: Synthetic oligonucleotide
uuguccucuacugagaucu

SEQ ID NO: 3178131 - RNA, 19 nt, Artificial Sequence
  Description of Artificial Sequence: Synthetic oligonucleotide
ugugguauacugauauuac

SEQ ID NO: 3178132 - RNA, 19 nt, Artificial Sequence
  Description of Artificial Sequence: Synthetic oligonucleotide
ugagagucuuccaaguuga

SEQ ID NO: 3178133 - RNA, 19 nt, Artificial Sequence
  Description of Artificial Sequence: Synthetic oligonucleotide
agagaagcaaugugaagag

SEQ ID NO: 3178134 - RNA, 19 nt, Artificial Sequence
  Description of Artificial Sequence: Synthetic oligonucleotide
uucauuuggagggacauga

SEQ ID NO: 3178135 - RNA, 19 nt, Artificial Sequence
  Description of Artificial Sequence: Synthetic oligonucleotide
augcaaauaugguacuaac

SEQ ID NO: 3178136 - RNA, 19 nt, Artificial Sequence
  Description of Artificial Sequence: Synthetic oligonucleotide
cagauuaucuuuauuucac

SEQ ID NO: 3178137 - RNA, 19 nt, Artificial Sequence
  Description of Artificial Sequence: Synthetic oligonucleotide
acuuaugugauaauguugu

SEQ ID NO: 3178138 - RNA, 19 nt, Artificial Sequence
  Description of Artificial Sequence: Synthetic oligonucleotide
cacgacuuaguacugacag

SEQ ID NO: 3178139 - RNA, 19 nt, Artificial Sequence
  Description of Artificial Sequence: Synthetic oligonucleotide
guuugguaguuccacaugc

SEQ ID NO: 3178140 - RNA, 19 nt, Artificial Sequence
  Description of Artificial Sequence: Synthetic oligonucleotide
ugauuacauauacaaacau

SEQ ID NO: 3178141 - RNA, 19 nt, Artificial Sequence
  Description of Artificial Sequence: Synthetic oligonucleotide
gaguaaauucaaguuagcc

SEQ ID NO: 3178142 - RNA, 19 nt, Artificial Sequence
  Description of Artificial Sequence: Synthetic oligonucleotide
uauacugauauuacuggua

SEQ ID NO: 3178143 - RNA, 19 nt, Artificial Sequence
  Description of Artificial Sequence: Synthetic oligonucleotide
aucauugugaugguguuag

SEQ ID NO: 3178144 - RNA, 19 nt, Artificial Sequence
  Description of Artificial Sequence: Synthetic oligonucleotide
ucuugauauguauauucac

SEQ ID NO: 3178145 - RNA, 19 nt, Artificial Sequence
  Description of Artificial Sequence: Synthetic oligonucleotide
aauugcacaugugugaaaa

SEQ ID NO: 3178146 - RNA, 19 nt, Artificial Sequence
  Description of Artificial Sequence: Synthetic oligonucleotide
aaccaugucucuuagcauu

SEQ ID NO: 3178147 - RNA, 19 nt, Artificial Sequence
  Description of Artificial Sequence: Synthetic oligonucleotide
ugucagaaacagcagagau

SEQ ID NO: 3178148 - RNA, 19 nt, Artificial Sequence
  Description of Artificial Sequence: Synthetic oligonucleotide
uugacuaauugucauuauc

SEQ ID NO: 3178149 - RNA, 19 nt, Artificial Sequence
  Description of Artificial Sequence: Synthetic oligonucleotide
aggaacaucaucaggugac

SEQ ID NO: 3178150 - RNA, 19 nt, Artificial Sequence
  Description of Artificial Sequence: Synthetic oligonucleotide
uguguaagggcugaauccc

SEQ ID NO: 3178151 - RNA, 19 nt, Artificial Sequence
  Description of Artificial Sequence: Synthetic oligonucleotide
uugacuuuccuaagguucu

SEQ ID NO: 3178152 - RNA, 19 nt, Artificial Sequence
  Description of Artificial Sequence: Synthetic oligonucleotide
auuuggagggacaugaucu

SEQ ID NO: 3178153 - RNA, 19 nt, Artificial Sequence
  Description of Artificial Sequence: Synthetic oligonucleotide
agugugcuucauuuggagg

SEQ ID NO: 3178154 - RNA, 19 nt, Artificial Sequence
  Description of Artificial Sequence: Synthetic oligonucleotide
augauaaaaggcauagaag

SEQ ID NO: 3178155 - RNA, 19 nt, Artificial Sequence
  Description of Artificial Sequence: Synthetic oligonucleotide
augugugaaaagacaaacc

SEQ ID NO: 3178156 - RNA, 19 nt, Artificial Sequence
  Description of Artificial Sequence: Synthetic oligonucleotide
aaccucaucuccgugagcu

SEQ ID NO: 3178157 - RNA, 19 nt, Artificial Sequence
  Description of Artificial Sequence: Synthetic oligonucleotide
uggaaagaaagguuucugu

SEQ ID NO: 3178158 - RNA, 19 nt, Artificial Sequence
  Description of Artificial Sequence: Synthetic oligonucleotide
uccagauuaucuuuauuuc

SEQ ID NO: 3178159 - RNA, 19 nt, Artificial Sequence
  Description of Artificial Sequence: Synthetic oligonucleotide
uagcuaggguauaaucugg

SEQ ID NO: 3178160 - RNA, 19 nt, Artificial Sequence
  Description of Artificial Sequence: Synthetic oligonucleotide
auaagcuuucaauucuuga

SEQ ID NO: 3178161 - RNA, 19 nt, Artificial Sequence
  Description of Artificial Sequence: Synthetic oligonucleotide
uuugguaguuccacaugcc

SEQ ID NO: 3178162 - RNA, 19 nt, Artificial Sequence
  Description of Artificial Sequence: Synthetic oligonucleotide
uaggugucauuaaaggaac

SEQ ID NO: 3178163 - RNA, 19 nt, Artificial Sequence
  Description of Artificial Sequence: Synthetic oligonucleotide
augaguaaaucaauuaacu

SEQ ID NO: 3178164 - RNA, 19 nt, Artificial Sequence
  Description of Artificial Sequence: Synthetic oligonucleotide
gacaugaucucuucuucug

SEQ ID NO: 3178165 - RNA, 19 nt, Artificial Sequence
  Description of Artificial Sequence: Synthetic oligonucleotide
gaguagucccaauugcaag

SEQ ID NO: 3178166 - RNA, 19 nt, Artificial Sequence
  Description of Artificial Sequence: Synthetic oligonucleotide
accuauauuguccucuacu

SEQ ID NO: 3178167 - RNA, 19 nt, Artificial Sequence
  Description of Artificial Sequence: Synthetic oligonucleotide
acgacuuaguacugacagc

SEQ ID NO: 3178168 - RNA, 19 nt, Artificial Sequence
  Description of Artificial Sequence: Synthetic oligonucleotide
uggaguagucccaauugca

SEQ ID NO: 3178169 - RNA, 19 nt, Artificial Sequence
  Description of Artificial Sequence: Synthetic oligonucleotide
uccgugagcugcaucagcc

SEQ ID NO: 3178170 - RNA, 19 nt, Artificial Sequence
  Description of Artificial Sequence: Synthetic oligonucleotide
cacuuaugugauaauguug

SEQ ID NO: 3178171 - RNA, 19 nt, Artificial Sequence
  Description of Artificial Sequence: Synthetic oligonucleotide
auuaucaugcacauucgug

SEQ ID NO: 3178172 - RNA, 19 nt, Artificial Sequence
  Description of Artificial Sequence: Synthetic oligonucleotide
uuuaaguauuucagacaca

SEQ ID NO: 3178173 - RNA, 19 nt, Artificial Sequence
  Description of Artificial Sequence: Synthetic oligonucleotide
gugacacucagcucugugg

SEQ ID NO: 3178174 - RNA, 19 nt, Artificial Sequence
  Description of Artificial Sequence: Synthetic oligonucleotide
caugcuccaagucagugug

SEQ ID NO: 3178175 - RNA, 19 nt, Artificial Sequence
  Description of Artificial Sequence: Synthetic oligonucleotide
guuaggugucauuaaagga

SEQ ID NO: 3178176 - RNA, 19 nt, Artificial Sequence
  Description of Artificial Sequence: Synthetic oligonucleotide
uauucauaguugauuuuau

SEQ ID NO: 3178177 - RNA, 19 nt, Artificial Sequence
  Description of Artificial Sequence: Synthetic oligonucleotide
uguuugguaguuccacaug

SEQ ID NO: 3178178 - RNA, 19 nt, Artificial Sequence
  Description of Artificial Sequence: Synthetic oligonucleotide
ucaugcaacaugaguaaau

SEQ ID NO: 3178179 - RNA, 19 nt, Artificial Sequence
  Description of Artificial Sequence: Synthetic oligonucleotide
aauacuauuggggcauccu

SEQ ID NO: 3178180 - RNA, 19 nt, Artificial Sequence
  Description of Artificial Sequence: Synthetic oligonucleotide
gugagagucuuccaaguug

SEQ ID NO: 3178181 - RNA, 19 nt, Artificial Sequence
  Description of Artificial Sequence: Synthetic oligonucleotide
aaugagcaaagaaccaugu

SEQ ID NO: 3178182 - RNA, 19 nt, Artificial Sequence
  Description of Artificial Sequence: Synthetic oligonucleotide
uaaauugcacaugugugaa

SEQ ID NO: 3178183 - RNA, 19 nt, Artificial Sequence
  Description of Artificial Sequence: Synthetic oligonucleotide
ugaaagccaaggaaucuuc

SEQ ID NO: 3178184 - RNA, 19 nt, Artificial Sequence
  Description of Artificial Sequence: Synthetic oligonucleotide
ucaucaugguccaacaugg

SEQ ID NO: 3178185 - RNA, 19 nt, Artificial Sequence
  Description of Artificial Sequence: Synthetic oligonucleotide
uccaacaugggccaguagg

SEQ ID NO: 3178186 - RNA, 19 nt, Artificial Sequence
  Description of Artificial Sequence: Synthetic oligonucleotide
agaacugcagccuucuggc

SEQ ID NO: 3178187 - RNA, 19 nt, Artificial Sequence
  Description of Artificial Sequence: Synthetic oligonucleotide
ucaugguccaacaugggcc

SEQ ID NO: 3178188 - RNA, 19 nt, Artificial Sequence
  Description of Artificial Sequence: Synthetic oligonucleotide
agagucuugguccagaacu

SEQ ID NO: 3178189 - RNA, 19 nt, Artificial Sequence
  Description of Artificial Sequence: Synthetic oligonucleotide
aucuucuggggcuagaguc

SEQ ID NO: 3178190 - RNA, 19 nt, Artificial Sequence
  Description of Artificial Sequence: Synthetic oligonucleotide
aucaugguccaacaugggc

SEQ ID NO: 3178191 - RNA, 19 nt, Artificial Sequence
  Description of Artificial Sequence: Synthetic oligonucleotide
ugucuugcaaaguuggccc

SEQ ID NO: 3178192 - RNA, 19 nt, Artificial Sequence
  Description of Artificial Sequence: Synthetic oligonucleotide
augucuugcaaaguuggcc

SEQ ID NO: 3178193 - RNA, 19 nt, Artificial Sequence
  Description of Artificial Sequence: Synthetic oligonucleotide
aguaggguagacccuucgc

SEQ ID NO: 3178194 - RNA, 19 nt, Artificial Sequence
  Description of Artificial Sequence: Synthetic oligonucleotide
agccuucuggccuucaagg

SEQ ID NO: 3178195 - RNA, 19 nt, Artificial Sequence
  Description of Artificial Sequence: Synthetic oligonucleotide
uggauguucagcugcaggu

SEQ ID NO: 3178196 - RNA, 19 nt, Artificial Sequence
  Description of Artificial Sequence: Synthetic oligonucleotide
ucuugguccagaacugcag

SEQ ID NO: 3178197 - RNA, 19 nt, Artificial Sequence
  Description of Artificial Sequence: Synthetic oligonucleotide
aaaguuggcccaguacuuc

SEQ ID NO: 3178198 - RNA, 19 nt, Artificial Sequence
  Description of Artificial Sequence: Synthetic oligonucleotide
cucaucaugguccaacaug

SEQ ID NO: 3178199 - RNA, 19 nt, Artificial Sequence
  Description of Artificial Sequence: Synthetic oligonucleotide
aggcuggauguucagcugc

SEQ ID NO: 3178200 - RNA, 19 nt, Artificial Sequence
  Description of Artificial Sequence: Synthetic oligonucleotide
agcuccuggaucuucuggg

SEQ ID NO: 3178201 - RNA, 19 nt, Artificial Sequence
  Description of Artificial Sequence: Synthetic oligonucleotide
cagaacugcagccuucugg

SEQ ID NO: 3178202 - RNA, 19 nt, Artificial Sequence
  Description of Artificial Sequence: Synthetic oligonucleotide
aacugcagccuucuggccu

SEQ ID NO: 3178203 - RNA, 19 nt, Artificial Sequence
  Description of Artificial Sequence: Synthetic oligonucleotide
guucccaugucuugcaaag

SEQ ID NO: 3178204 - RNA, 19 nt, Artificial Sequence
  Description of Artificial Sequence: Synthetic oligonucleotide
cagguacugcucaucaugg

SEQ ID NO: 3178205 - RNA, 19 nt, Artificial Sequence
  Description of Artificial Sequence: Synthetic oligonucleotide
uuuagcuccuggaucuucu

SEQ ID NO: 3178206 - RNA, 19 nt, Artificial Sequence
  Description of Artificial Sequence: Synthetic oligonucleotide
gauguucagcugcagguac

SEQ ID NO: 3178207 - RNA, 19 nt, Artificial Sequence
  Description of Artificial Sequence: Synthetic oligonucleotide
uaggguagacccuucgcug

SEQ ID NO: 3178208 - RNA, 19 nt, Artificial Sequence
  Description of Artificial Sequence: Synthetic oligonucleotide
uucagcugcagguacugcu

SEQ ID NO: 3178209 - RNA, 19 nt, Artificial Sequence
  Description of Artificial Sequence: Synthetic oligonucleotide
ugcaaaguuggcccaguac

SEQ ID NO: 3178210 - RNA, 19 nt, Artificial Sequence
  Description of Artificial Sequence: Synthetic oligonucleotide
ucuucuggggcuagagucu

SEQ ID NO: 3178211 - RNA, 19 nt, Artificial Sequence
  Description of Artificial Sequence: Synthetic oligonucleotide
uggccuucaaggcuuggcc

SEQ ID NO: 3178212 - RNA, 19 nt, Artificial Sequence
  Description of Artificial Sequence: Synthetic oligonucleotide
ggggcuagagucuuggucc

SEQ ID NO: 3178213 - RNA, 19 nt, Artificial Sequence
  Description of Artificial Sequence: Synthetic oligonucleotide
aaguuggcccaguacuuca

SEQ ID NO: 3178214 - RNA, 19 nt, Artificial Sequence
  Description of Artificial Sequence: Synthetic oligonucleotide
guacugcucaucauggucc

SEQ ID NO: 3178215 - RNA, 19 nt, Artificial Sequence
  Description of Artificial Sequence: Synthetic oligonucleotide
uagcuccuggaucuucugg

SEQ ID NO: 3178216 - RNA, 19 nt, Artificial Sequence
  Description of Artificial Sequence: Synthetic oligonucleotide
caaggcuuggcccacagca

SEQ ID NO: 3178217 - RNA, 19 nt, Artificial Sequence
  Description of Artificial Sequence: Synthetic oligonucleotide
cuugguccagaacugcagc

SEQ ID NO: 3178218 - RNA, 19 nt, Artificial Sequence
  Description of Artificial Sequence: Synthetic oligonucleotide
ucuggggcuagagucuugg

SEQ ID NO: 3178219 - RNA, 19 nt, Artificial Sequence
  Description of Artificial Sequence: Synthetic oligonucleotide
uugguccagaacugcagcc

SEQ ID NO: 3178220 - RNA, 19 nt, Artificial Sequence
  Description of Artificial Sequence: Synthetic oligonucleotide
agacccuucgcuguugggg

SEQ ID NO: 3178221 - RNA, 19 nt, Artificial Sequence
  Description of Artificial Sequence: Synthetic oligonucleotide
uguugggguucccaugucu

SEQ ID NO: 3178222 - RNA, 19 nt, Artificial Sequence
  Description of Artificial Sequence: Synthetic oligonucleotide
aacaugggccaguagggua

SEQ ID NO: 3178223 - RNA, 19 nt, Artificial Sequence
  Description of Artificial Sequence: Synthetic oligonucleotide
cuggauguucagcugcagg

SEQ ID NO: 3178224 - RNA, 19 nt, Artificial Sequence
  Description of Artificial Sequence: Synthetic oligonucleotide
agucuugguccagaacugc

SEQ ID NO: 3178225 - RNA, 19 nt, Artificial Sequence
  Description of Artificial Sequence: Synthetic oligonucleotide
uuggcccacagcaggcugg

SEQ ID NO: 3178226 - RNA, 19 nt, Artificial Sequence
  Description of Artificial Sequence: Synthetic oligonucleotide
uuggcccaguacuucauca

SEQ ID NO: 3178227 - RNA, 19 nt, Artificial Sequence
  Description of Artificial Sequence: Synthetic oligonucleotide
caugucuugcaaaguuggc

SEQ ID NO: 3178228 - RNA, 19 nt, Artificial Sequence
  Description of Artificial Sequence: Synthetic oligonucleotide
aggcuuggcccacagcagg

SEQ ID NO: 3178229 - RNA, 19 nt, Artificial Sequence
  Description of Artificial Sequence: Synthetic oligonucleotide
ccaugucuugcaaaguugg

SEQ ID NO: 3178230 - RNA, 19 nt, Artificial Sequence
  Description of Artificial Sequence: Synthetic oligonucleotide
uggggcuagagucuugguc

SEQ ID NO: 3178231 - RNA, 19 nt, Artificial Sequence
  Description of Artificial Sequence: Synthetic oligonucleotide
ucccaugucuugcaaaguu

SEQ ID NO: 3178232 - RNA, 19 nt, Artificial Sequence
  Description of Artificial Sequence: Synthetic oligonucleotide
uucaaggcuuggcccacag

SEQ ID NO: 3178233 - RNA, 19 nt, Artificial Sequence
  Description of Artificial Sequence: Synthetic oligonucleotide
ucagcugcagguacugcuc

SEQ ID NO: 3178234 - RNA, 19 nt, Artificial Sequence
  Description of Artificial Sequence: Synthetic oligonucleotide
uccuggaucuucuggggcu

SEQ ID NO: 3178235 - RNA, 19 nt, Artificial Sequence
  Description of Artificial Sequence: Synthetic oligonucleotide
ugcucaucaugguccaaca

SEQ ID NO: 3178236 - RNA, 19 nt, Artificial Sequence
  Description of Artificial Sequence: Synthetic oligonucleotide
gggccaguaggguagaccc

SEQ ID NO: 3178237 - RNA, 19 nt, Artificial Sequence
  Description of Artificial Sequence: Synthetic oligonucleotide
ccaacaugggccaguaggg

SEQ ID NO: 3178238 - RNA, 19 nt, Artificial Sequence
  Description of Artificial Sequence: Synthetic oligonucleotide
uguucagcugcagguacug

SEQ ID NO: 3178239 - RNA, 19 nt, Artificial Sequence
  Description of Artificial Sequence: Synthetic oligonucleotide
guagacccuucgcuguugg

SEQ ID NO: 3178240 - RNA, 19 nt, Artificial Sequence
  Description of Artificial Sequence: Synthetic oligonucleotide
gcagguacugcucaucaug

SEQ ID NO: 3178241 - RNA, 19 nt, Artificial Sequence
  Description of Artificial Sequence: Synthetic oligonucleotide
ucuugcaaaguuggcccag

SEQ ID NO: 3178242 - RNA, 19 nt, Artificial Sequence
  Description of Artificial Sequence: Synthetic oligonucleotide
caucaugguccaacauggg

SEQ ID NO: 3178243 - RNA, 19 nt, Artificial Sequence
  Description of Artificial Sequence: Synthetic oligonucleotide
uagagucuugguccagaac

SEQ ID NO: 3178244 - RNA, 19 nt, Artificial Sequence
  Description of Artificial Sequence: Synthetic oligonucleotide
agcaggcuggauguucagc

SEQ ID NO: 3178245 - RNA, 19 nt, Artificial Sequence
  Description of Artificial Sequence: Synthetic oligonucleotide
acaugggccaguaggguag

SEQ ID NO: 3178246 - RNA, 19 nt, Artificial Sequence
  Description of Artificial Sequence: Synthetic oligonucleotide
uuagcuccuggaucuucug

SEQ ID NO: 3178247 - RNA, 19 nt, Artificial Sequence
  Description of Artificial Sequence: Synthetic oligonucleotide
uugggguucccaugucuug

SEQ ID NO: 3178248 - RNA, 19 nt, Artificial Sequence
  Description of Artificial Sequence: Synthetic oligonucleotide
aggguagacccuucgcugu

SEQ ID NO: 3178249 - RNA, 19 nt, Artificial Sequence
  Description of Artificial Sequence: Synthetic oligonucleotide
uacugcucaucauggucca

SEQ ID NO: 3178250 - RNA, 19 nt, Artificial Sequence
  Description of Artificial Sequence: Synthetic oligonucleotide
gguacugcucaucaugguc

SEQ ID NO: 3178251 - RNA, 19 nt, Artificial Sequence
  Description of Artificial Sequence: Synthetic oligonucleotide
gagucuugguccagaacug

SEQ ID NO: 3178252 - RNA, 19 nt, Artificial Sequence
  Description of Artificial Sequence: Synthetic oligonucleotide
ugggguucccaugucuugc

SEQ ID NO: 3178253 - RNA, 19 nt, Artificial Sequence
  Description of Artificial Sequence: Synthetic oligonucleotide
aaggcuuggcccacagcag

SEQ ID NO: 3178254 - RNA, 19 nt, Artificial Sequence
  Description of Artificial Sequence: Synthetic oligonucleotide
caugguccaacaugggcca

SEQ ID NO: 3178255 - RNA, 19 nt, Artificial Sequence
  Description of Artificial Sequence: Synthetic oligonucleotide
ucaaggcuuggcccacagc

SEQ ID NO: 3178256 - RNA, 19 nt, Artificial Sequence
  Description of Artificial Sequence: Synthetic oligonucleotide
caguaggguagacccuucg

SEQ ID NO: 3178257 - RNA, 19 nt, Artificial Sequence
  Description of Artificial Sequence: Synthetic oligonucleotide
gcaaaguuggcccaguacu

SEQ ID NO: 3178258 - RNA, 19 nt, Artificial Sequence
  Description of Artificial Sequence: Synthetic oligonucleotide
cuccuggaucuucuggggc

SEQ ID NO: 3178259 - RNA, 19 nt, Artificial Sequence
  Description of Artificial Sequence: Synthetic oligonucleotide
gaacugcagccuucuggcc

SEQ ID NO: 3178260 - RNA, 19 nt, Artificial Sequence
  Description of Artificial Sequence: Synthetic oligonucleotide
uccagaacugcagccuucu

SEQ ID NO: 3178261 - RNA, 19 nt, Artificial Sequence
  Description of Artificial Sequence: Synthetic oligonucleotide
uagacccuucgcuguuggg

SEQ ID NO: 3178262 - RNA, 19 nt, Artificial Sequence
  Description of Artificial Sequence: Synthetic oligonucleotide
ugguccagaacugcagccu

SEQ ID NO: 3178263 - RNA, 19 nt, Artificial Sequence
  Description of Artificial Sequence: Synthetic oligonucleotide
guaggguagacccuucgcu

SEQ ID NO: 3178264 - RNA, 19 nt, Artificial Sequence
  Description of Artificial Sequence: Synthetic oligonucleotide
ugggccaguaggguagacc

SEQ ID NO: 3178265 - RNA, 19 nt, Artificial Sequence
  Description of Artificial Sequence: Synthetic oligonucleotide
cagccuucuggccuucaag

SEQ ID NO: 3178266 - RNA, 19 nt, Artificial Sequence
  Description of Artificial Sequence: Synthetic oligonucleotide
cugcucaucaugguccaac

SEQ ID NO: 3178267 - RNA, 19 nt, Artificial Sequence
  Description of Artificial Sequence: Synthetic oligonucleotide
uucgcuguugggguuccca

SEQ ID NO: 3178268 - RNA, 19 nt, Artificial Sequence
  Description of Artificial Sequence: Synthetic oligonucleotide
agguacugcucaucauggu

SEQ ID NO: 3178269 - RNA, 19 nt, Artificial Sequence
  Description of Artificial Sequence: Synthetic oligonucleotide
uugcaaaguuggcccagua

SEQ ID NO: 3178270 - RNA, 19 nt, Artificial Sequence
  Description of Artificial Sequence: Synthetic oligonucleotide
gcuccuggaucuucugggg

SEQ ID NO: 3178271 - RNA, 19 nt, Artificial Sequence
  Description of Artificial Sequence: Synthetic oligonucleotide
cuuggcccacagcaggcug

SEQ ID NO: 3178272 - RNA, 19 nt, Artificial Sequence
  Description of Artificial Sequence: Synthetic oligonucleotide
ggccuucaaggcuuggccc

SEQ ID NO: 3178273 - RNA, 19 nt, Artificial Sequence
  Description of Artificial Sequence: Synthetic oligonucleotide
uggcccaguacuucaucau

SEQ ID NO: 3178274 - RNA, 19 nt, Artificial Sequence
  Description of Artificial Sequence: Synthetic oligonucleotide
cuggccuucaaggcuuggc

SEQ ID NO: 3178275 - RNA, 19 nt, Artificial Sequence
  Description of Artificial Sequence: Synthetic oligonucleotide
cugcagguacugcucauca

SEQ ID NO: 3178276 - RNA, 19 nt, Artificial Sequence
  Description of Artificial Sequence: Synthetic oligonucleotide
caggcuggauguucagcug

SEQ ID NO: 3178277 - RNA, 19 nt, Artificial Sequence
  Description of Artificial Sequence: Synthetic oligonucleotide
acagcaggcuggauguuca

SEQ ID NO: 3178278 - RNA, 19 nt, Artificial Sequence
  Description of Artificial Sequence: Synthetic oligonucleotide
ugcagguacugcucaucau

SEQ ID NO: 3178279 - RNA, 19 nt, Artificial Sequence
  Description of Artificial Sequence: Synthetic oligonucleotide
uucuggccuucaaggcuug

SEQ ID NO: 3178280 - RNA, 19 nt, Artificial Sequence
  Description of Artificial Sequence: Synthetic oligonucleotide
acugcagccuucuggccuu

SEQ ID NO: 3178281 - RNA, 19 nt, Artificial Sequence
  Description of Artificial Sequence: Synthetic oligonucleotide
gucuugcaaaguuggccca

SEQ ID NO: 3178282 - RNA, 19 nt, Artificial Sequence
  Description of Artificial Sequence: Synthetic oligonucleotide
cuuuagcuccuggaucuuc

SEQ ID NO: 3178283 - RNA, 19 nt, Artificial Sequence
  Description of Artificial Sequence: Synthetic oligonucleotide
cccaugucuugcaaaguug

SEQ ID NO: 3178284 - RNA, 19 nt, Artificial Sequence
  Description of Artificial Sequence: Synthetic oligonucleotide
aagaccguuaaauaaaacg

SEQ ID NO: 3178285 - RNA, 19 nt, Artificial Sequence
  Description of Artificial Sequence: Synthetic oligonucleotide
aauuauaaaaguguucagc

SEQ ID NO: 3178286 - RNA, 19 nt, Artificial Sequence
  Description of Artificial Sequence: Synthetic oligonucleotide
aauauauuggcuuuauuug

SEQ ID NO: 3178287 - RNA, 19 nt, Artificial Sequence
  Description of Artificial Sequence: Synthetic oligonucleotide
auuauaaaaguguucagcg

SEQ ID NO: 3178288 - RNA, 19 nt, Artificial Sequence
  Description of Artificial Sequence: Synthetic oligonucleotide
aaauaaaacgccuucagcu

SEQ ID NO: 3178289 - RNA, 19 nt, Artificial Sequence
  Description of Artificial Sequence: Synthetic oligonucleotide
aaauaaauaucaauccucc

SEQ ID NO: 3178290 - RNA, 19 nt, Artificial Sequence
  Description of Artificial Sequence: Synthetic oligonucleotide
auaaauaucaauccuccgg

SEQ ID NO: 3178291 - RNA, 19 nt, Artificial Sequence
  Description of Artificial Sequence: Synthetic oligonucleotide
uauaaaaguguucagcgag

SEQ ID NO: 3178292 - RNA, 19 nt, Artificial Sequence
  Description of Artificial Sequence: Synthetic oligonucleotide
aaaauaaauaucaauccuc

SEQ ID NO: 3178293 - RNA, 19 nt, Artificial Sequence
  Description of Artificial Sequence: Synthetic oligonucleotide
aaauauauuggcuuuauuu

SEQ ID NO: 3178294 - RNA, 19 nt, Artificial Sequence
  Description of Artificial Sequence: Synthetic oligonucleotide
uuuauuuguguccauucgg

SEQ ID NO: 3178295 - RNA, 19 nt, Artificial Sequence
  Description of Artificial Sequence: Synthetic oligonucleotide
aaaguguucagcgagagug

SEQ ID NO: 3178296 - RNA, 19 nt, Artificial Sequence
  Description of Artificial Sequence: Synthetic oligonucleotide
uuaaauaaaacgccuucag

SEQ ID NO: 3178297 - RNA, 19 nt, Artificial Sequence
  Description of Artificial Sequence: Synthetic oligonucleotide
uaaauaucaauccuccggc

SEQ ID NO: 3178298 - RNA, 19 nt, Artificial Sequence
  Description of Artificial Sequence: Synthetic oligonucleotide
aauaaauaucaauccuccg

SEQ ID NO: 3178299 - RNA, 19 nt, Artificial Sequence
  Description of Artificial Sequence: Synthetic oligonucleotide
auuggcuuuauuugugucc

SEQ ID NO: 3178300 - RNA, 19 nt, Artificial Sequence
  Description of Artificial Sequence: Synthetic oligonucleotide
agaccguuaaauaaaacgc

SEQ ID NO: 3178301 - RNA, 19 nt, Artificial Sequence
  Description of Artificial Sequence: Synthetic oligonucleotide
acaauuauaaaaguguuca

SEQ ID NO: 3178302 - RNA, 19 nt, Artificial Sequence
  Description of Artificial Sequence: Synthetic oligonucleotide
auaucaauccuccggcugc

SEQ ID NO: 3178303 - RNA, 19 nt, Artificial Sequence
  Description of Artificial Sequence: Synthetic oligonucleotide
uaaauaaaacgccuucagc

SEQ ID NO: 3178304 - RNA, 19 nt, Artificial Sequence
  Description of Artificial Sequence: Synthetic oligonucleotide
aauaucaauccuccggcug

SEQ ID NO: 3178305 - RNA, 19 nt, Artificial Sequence
  Description of Artificial Sequence: Synthetic oligonucleotide
aacgccuucagcuauugca

SEQ ID NO: 3178306 - RNA, 19 nt, Artificial Sequence
  Description of Artificial Sequence: Synthetic oligonucleotide
auuuguguccauucggacg

SEQ ID NO: 3178307 - RNA, 19 nt, Artificial Sequence
  Description of Artificial Sequence: Synthetic oligonucleotide
auucggacgucucacagac

SEQ ID NO: 3178308 - RNA, 19 nt, Artificial Sequence
  Description of Artificial Sequence: Synthetic oligonucleotide
aacaauuauaaaaguguuc

SEQ ID NO: 3178309 - RNA, 19 nt, Artificial Sequence
  Description of Artificial Sequence: Synthetic oligonucleotide
acagacaacauccagguaa

SEQ ID NO: 3178310 - RNA, 19 nt, Artificial Sequence
  Description of Artificial Sequence: Synthetic oligonucleotide
uauauuggcuuuauuugug

SEQ ID NO: 3178311 - RNA, 19 nt, Artificial Sequence
  Description of Artificial Sequence: Synthetic oligonucleotide
uuuguguccauucggacgu

SEQ ID NO: 3178312 - RNA, 19 nt, Artificial Sequence
  Description of Artificial Sequence: Synthetic oligonucleotide
ucagcuauugcaaugcaaa

SEQ ID NO: 3178313 - RNA, 19 nt, Artificial Sequence
  Description of Artificial Sequence: Synthetic oligonucleotide
uuauuuguguccauucgga

SEQ ID NO: 3178314 - RNA, 19 nt, Artificial Sequence
  Description of Artificial Sequence: Synthetic oligonucleotide
cucacagacaacauccagg

SEQ ID NO: 3178315 - RNA, 19 nt, Artificial Sequence
  Description of Artificial Sequence: Synthetic oligonucleotide
aauaaaacgccuucagcua

SEQ ID NO: 3178316 - RNA, 19 nt, Artificial Sequence
  Description of Artificial Sequence: Synthetic oligonucleotide
auauauuggcuuuauuugu

SEQ ID NO: 3178317 - RNA, 19 nt, Artificial Sequence
  Description of Artificial Sequence: Synthetic oligonucleotide
cuuuauuuguguccauucg

SEQ ID NO: 3178318 - RNA, 19 nt, Artificial Sequence
  Description of Artificial Sequence: Synthetic oligonucleotide
uuauaaaaguguucagcga

SEQ ID NO: 3178319 - RNA, 19 nt, Artificial Sequence
  Description of Artificial Sequence: Synthetic oligonucleotide
uguucagcgagagugucgg

SEQ ID NO: 3178320 - RNA, 19 nt, Artificial Sequence
  Description of Artificial Sequence: Synthetic oligonucleotide
ucacagacaacauccaggu

SEQ ID NO: 3178321 - RNA, 19 nt, Artificial Sequence
  Description of Artificial Sequence: Synthetic oligonucleotide
ugugcaaaaucggaguugc

SEQ ID NO: 3178322 - RNA, 19 nt, Artificial Sequence
  Description of Artificial Sequence: Synthetic oligonucleotide
agcccaacaauuauaaaag

SEQ ID NO: 3178323 - RNA, 19 nt, Artificial Sequence
  Description of Artificial Sequence: Synthetic oligonucleotide
aaauaucaauccuccggcu

SEQ ID NO: 3178324 - RNA, 19 nt, Artificial Sequence
  Description of Artificial Sequence: Synthetic oligonucleotide
gagagugucggcgugagug

SEQ ID NO: 3178325 - RNA, 19 nt, Artificial Sequence
  Description of Artificial Sequence: Synthetic oligonucleotide
uaaaaguguucagcgagag

SEQ ID NO: 3178326 - RNA, 19 nt, Artificial Sequence
  Description of Artificial Sequence: Synthetic oligonucleotide
ucucacagacaacauccag

SEQ ID NO: 3178327 - RNA, 19 nt, Artificial Sequence
  Description of Artificial Sequence: Synthetic oligonucleotide
ucggacgucucacagacaa

SEQ ID NO: 3178328 - RNA, 19 nt, Artificial Sequence
  Description of Artificial Sequence: Synthetic oligonucleotide
aaagaccguuaaauaaaac

SEQ ID NO: 3178329 - RNA, 19 nt, Artificial Sequence
  Description of Artificial Sequence: Synthetic oligonucleotide
gaccguuaaauaaaacgcc

SEQ ID NO: 3178330 - RNA, 19 nt, Artificial Sequence
  Description of Artificial Sequence: Synthetic oligonucleotide
caauuauaaaaguguucag

SEQ ID NO: 3178331 - RNA, 19 nt, Artificial Sequence
  Description of Artificial Sequence: Synthetic oligonucleotide
gucggcgugagugugaacg

SEQ ID NO: 3178332 - RNA, 19 nt, Artificial Sequence
  Description of Artificial Sequence: Synthetic oligonucleotide
uucagcgagagugucggcg

SEQ ID NO: 3178333 - RNA, 19 nt, Artificial Sequence
  Description of Artificial Sequence: Synthetic oligonucleotide
ugaacgggugugcacuggg

SEQ ID NO: 3178334 - RNA, 19 nt, Artificial Sequence
  Description of Artificial Sequence: Synthetic oligonucleotide
aaacgccuucagcuauugc

SEQ ID NO: 3178335 - RNA, 19 nt, Artificial Sequence
  Description of Artificial Sequence: Synthetic oligonucleotide
agugugaacgggugugcac

SEQ ID NO: 3178336 - RNA, 19 nt, Artificial Sequence
  Description of Artificial Sequence: Synthetic oligonucleotide
aaaagaccguuaaauaaaa

SEQ ID NO: 3178337 - RNA, 19 nt, Artificial Sequence
  Description of Artificial Sequence: Synthetic oligonucleotide
uuggcuuuauuugugucca

SEQ ID NO: 3178338 - RNA, 19 nt, Artificial Sequence
  Description of Artificial Sequence: Synthetic oligonucleotide
auaaaacgccuucagcuau

SEQ ID NO: 3178339 - RNA, 19 nt, Artificial Sequence
  Description of Artificial Sequence: Synthetic oligonucleotide
aaaaguguucagcgagagu

SEQ ID NO: 3178340 - RNA, 19 nt, Artificial Sequence
  Description of Artificial Sequence: Synthetic oligonucleotide
uauuuguguccauucggac

SEQ ID NO: 3178341 - RNA, 19 nt, Artificial Sequence
  Description of Artificial Sequence: Synthetic oligonucleotide
guuaaauaaaacgccuuca

SEQ ID NO: 3178342 - RNA, 19 nt, Artificial Sequence
  Description of Artificial Sequence: Synthetic oligonucleotide
auauuggcuuuauuugugu

SEQ ID NO: 3178343 - RNA, 19 nt, Artificial Sequence
  Description of Artificial Sequence: Synthetic oligonucleotide
acgucucacagacaacauc

SEQ ID NO: 3178344 - RNA, 19 nt, Artificial Sequence
  Description of Artificial Sequence: Synthetic oligonucleotide
cagcccaacaauuauaaaa

SEQ ID NO: 3178345 - RNA, 19 nt, Artificial Sequence
  Description of Artificial Sequence: Synthetic oligonucleotide
ggagcggugugcaaaaucg

SEQ ID NO: 3178346 - RNA, 19 nt, Artificial Sequence
  Description of Artificial Sequence: Synthetic oligonucleotide
uucagcuauugcaaugcaa

SEQ ID NO: 3178347 - RNA, 19 nt, Artificial Sequence
  Description of Artificial Sequence: Synthetic oligonucleotide
uguccauucggacgucuca

SEQ ID NO: 3178348 - RNA, 19 nt, Artificial Sequence
  Description of Artificial Sequence: Synthetic oligonucleotide
uguaaauauauuggcuuua

SEQ ID NO: 3178349 - RNA, 19 nt, Artificial Sequence
  Description of Artificial Sequence: Synthetic oligonucleotide
uaaauauauuggcuuuauu

SEQ ID NO: 3178350 - RNA, 19 nt, Artificial Sequence
  Description of Artificial Sequence: Synthetic oligonucleotide
uauuggcuuuauuuguguc

SEQ ID NO: 3178351 - RNA, 19 nt, Artificial Sequence
  Description of Artificial Sequence: Synthetic oligonucleotide
cccaacaauuauaaaagug

SEQ ID NO: 3178352 - RNA, 19 nt, Artificial Sequence
  Description of Artificial Sequence: Synthetic oligonucleotide
ucaauccuccggcugcagc

SEQ ID NO: 3178353 - RNA, 19 nt, Artificial Sequence
  Description of Artificial Sequence: Synthetic oligonucleotide
cgucucacagacaacaucc

SEQ ID NO: 3178354 - RNA, 19 nt, Artificial Sequence
  Description of Artificial Sequence: Synthetic oligonucleotide
accguuaaauaaaacgccu

SEQ ID NO: 3178355 - RNA, 19 nt, Artificial Sequence
  Description of Artificial Sequence: Synthetic oligonucleotide
aguucccucggccagccca

SEQ ID NO: 3178356 - RNA, 19 nt, Artificial Sequence
  Description of Artificial Sequence: Synthetic oligonucleotide
uccggcugcagcagcaggc

SEQ ID NO: 3178357 - RNA, 19 nt, Artificial Sequence
  Description of Artificial Sequence: Synthetic oligonucleotide
aaaacgccuucagcuauug

SEQ ID NO: 3178358 - RNA, 19 nt, Artificial Sequence
  Description of Artificial Sequence: Synthetic oligonucleotide
ucggcgugagugugaacgg

SEQ ID NO: 3178359 - RNA, 19 nt, Artificial Sequence
  Description of Artificial Sequence: Synthetic oligonucleotide
aguguucagcgagaguguc

SEQ ID NO: 3178360 - RNA, 19 nt, Artificial Sequence
  Description of Artificial Sequence: Synthetic oligonucleotide
ucagcgagagugucggcgu

SEQ ID NO: 3178361 - RNA, 19 nt, Artificial Sequence
  Description of Artificial Sequence: Synthetic oligonucleotide
auaaaaguguucagcgaga

SEQ ID NO: 3178362 - RNA, 19 nt, Artificial Sequence
  Description of Artificial Sequence: Synthetic oligonucleotide
ugcgccccaaguucccucg

SEQ ID NO: 3178363 - RNA, 19 nt, Artificial Sequence
  Description of Artificial Sequence: Synthetic oligonucleotide
ccaacaauuauaaaagugu

SEQ ID NO: 3178364 - RNA, 19 nt, Artificial Sequence
  Description of Artificial Sequence: Synthetic oligonucleotide
uggagcggugugcaaaauc

SEQ ID NO: 3178365 - RNA, 19 nt, Artificial Sequence
  Description of Artificial Sequence: Synthetic oligonucleotide
ugugaacgggugugcacug

SEQ ID NO: 3178366 - RNA, 19 nt, Artificial Sequence
  Description of Artificial Sequence: Synthetic oligonucleotide
gugagugugaacgggugug

SEQ ID NO: 3178367 - RNA, 19 nt, Artificial Sequence
  Description of Artificial Sequence: Synthetic oligonucleotide
gcuuuauuuguguccauuc

SEQ ID NO: 3178368 - RNA, 19 nt, Artificial Sequence
  Description of Artificial Sequence: Synthetic oligonucleotide
ugagugugaacgggugugc

SEQ ID NO: 3178369 - RNA, 19 nt, Artificial Sequence
  Description of Artificial Sequence: Synthetic oligonucleotide
aauccuccggcugcagcag

SEQ ID NO: 3178370 - RNA, 19 nt, Artificial Sequence
  Description of Artificial Sequence: Synthetic oligonucleotide
agagugucggcgugagugu

SEQ ID NO: 3178371 - RNA, 19 nt, Artificial Sequence
  Description of Artificial Sequence: Synthetic oligonucleotide
uccauucggacgucucaca

SEQ ID NO: 3178372 - RNA, 19 nt, Artificial Sequence
  Description of Artificial Sequence: Synthetic oligonucleotide
uaaaacgccuucagcuauu

SEQ ID NO: 3178373 - RNA, 19 nt, Artificial Sequence
  Description of Artificial Sequence: Synthetic oligonucleotide
aaguguucagcgagagugu

SEQ ID NO: 3178374 - RNA, 19 nt, Artificial Sequence
  Description of Artificial Sequence: Synthetic oligonucleotide
ugcagcagcaggcgcgcug

SEQ ID NO: 3178375 - RNA, 19 nt, Artificial Sequence
  Description of Artificial Sequence: Synthetic oligonucleotide
gagcggugugcaaaaucgg

SEQ ID NO: 3178376 - RNA, 19 nt, Artificial Sequence
  Description of Artificial Sequence: Synthetic oligonucleotide
caauccuccggcugcagca

SEQ ID NO: 3178377 - RNA, 19 nt, Artificial Sequence
  Description of Artificial Sequence: Synthetic oligonucleotide
aaguucccucggccagccc

SEQ ID NO: 3178378 - RNA, 19 nt, Artificial Sequence
  Description of Artificial Sequence: Synthetic oligonucleotide
ucggccagcccaacaauua

SEQ ID NO: 3178379 - RNA, 19 nt, Artificial Sequence
  Description of Artificial Sequence: Synthetic oligonucleotide
aguggagcggugugcaaaa

SEQ ID NO: 3178380 - RNA, 19 nt, Artificial Sequence
  Description of Artificial Sequence: Synthetic oligonucleotide
gaacgggugugcacugggg

SEQ ID NO: 3178381 - RNA, 19 nt, Artificial Sequence
  Description of Artificial Sequence: Synthetic oligonucleotide
gugugcaaaaucggaguug

SEQ ID NO: 3178382 - RNA, 19 nt, Artificial Sequence
  Description of Artificial Sequence: Synthetic oligonucleotide
gguggggcacaguggagcg

SEQ ID NO: 3178383 - RNA, 19 nt, Artificial Sequence
  Description of Artificial Sequence: Synthetic oligonucleotide
guguucagcgagagugucg

SEQ ID NO: 3178384 - RNA, 19 nt, Artificial Sequence
  Description of Artificial Sequence: Synthetic oligonucleotide
aggaucugcgacuugaugc

SEQ ID NO: 3178385 - RNA, 19 nt, Artificial Sequence
  Description of Artificial Sequence: Synthetic oligonucleotide
uuuugcaugaacauguacu

SEQ ID NO: 3178386 - RNA, 19 nt, Artificial Sequence
  Description of Artificial Sequence: Synthetic oligonucleotide
uuguuauugaaguaaagca

SEQ ID NO: 3178387 - RNA, 19 nt, Artificial Sequence
  Description of Artificial Sequence: Synthetic oligonucleotide
aaagccucaaaguccaccg

SEQ ID NO: 3178388 - RNA, 19 nt, Artificial Sequence
  Description of Artificial Sequence: Synthetic oligonucleotide
  modified_base (16)..(16): a, c, u, g, unknown or other
ugaaguaaagcaugunuga

SEQ ID NO: 3178389 - RNA, 19 nt, Artificial Sequence
  Description of Artificial Sequence: Synthetic oligonucleotide
  modified_base (17)..(17): a, c, u, g, unknown or other
uugaaguaaagcaugunug

SEQ ID NO: 3178390 - RNA, 19 nt, Artificial Sequence
  Description of Artificial Sequence: Synthetic oligonucleotide
aacauguacucgcacuggc

SEQ ID NO: 3178391 - RNA, 19 nt, Artificial Sequence
  Description of Artificial Sequence: Synthetic oligonucleotide
auuggggacaucuugguag

SEQ ID NO: 3178392 - RNA, 19 nt, Artificial Sequence
  Description of Artificial Sequence: Synthetic oligonucleotide
  modified_base (11)..(11): a, c, u, g, unknown or other
uaaagcaugunugauuggg

SEQ ID NO: 3178393 - RNA, 19 nt, Artificial Sequence
  Description of Artificial Sequence: Synthetic oligonucleotide
  modified_base (2)..(2): a, c, u, g, unknown or other
unugauuggggacaucuug

SEQ ID NO: 3178394 - RNA, 19 nt, Artificial Sequence
  Description of Artificial Sequence: Synthetic oligonucleotide
cuuguuauugaaguaaagc

SEQ ID NO: 3178395 - RNA, 19 nt, Artificial Sequence
  Description of Artificial Sequence: Synthetic oligonucleotide
aaaagccucaaaguccacc

SEQ ID NO: 3178396 - RNA, 19 nt, Artificial Sequence
  Description of Artificial Sequence: Synthetic oligonucleotide
  modified_base (18)..(18): a, c, u, g, unknown or other
auugaaguaaagcaugunu

SEQ ID NO: 3178397 - RNA, 19 nt, Artificial Sequence
  Description of Artificial Sequence: Synthetic oligonucleotide
caugaaaggaugcagcccc

SEQ ID NO: 3178398 - RNA, 19 nt, Artificial Sequence
  Description of Artificial Sequence: Synthetic oligonucleotide
  modified_base (10)..(10): a, c, u, g, unknown or other
aaagcaugunugauugggg

SEQ ID NO: 3178399 - RNA, 19 nt, Artificial Sequence
  Description of Artificial Sequence: Synthetic oligonucleotide
  modified_base (14)..(14): a, c, u, g, unknown or other
aaguaaagcaugunugauu

SEQ ID NO: 3178400 - RNA, 19 nt, Artificial Sequence
  Description of Artificial Sequence: Synthetic oligonucleotide
aguaguuggccuuguagcg

SEQ ID NO: 3178401 - RNA, 19 nt, Artificial Sequence
  Description of Artificial Sequence: Synthetic oligonucleotide
  modified_base (13)..(13): a, c, u, g, unknown or other
aguaaagcaugunugauug

SEQ ID NO: 3178402 - RNA, 19 nt, Artificial Sequence
  Description of Artificial Sequence: Synthetic oligonucleotide
ugaacauguacucgcacug

SEQ ID NO: 3178403 - RNA, 19 nt, Artificial Sequence
  Description of Artificial Sequence: Synthetic oligonucleotide
agccaaaagccucaaaguc

SEQ ID NO: 3178404 - RNA, 19 nt, Artificial Sequence
  Description of Artificial Sequence: Synthetic oligonucleotide
cuugccguagauaaucugc

SEQ ID NO: 3178405 - RNA, 19 nt, Artificial Sequence
  Description of Artificial Sequence: Synthetic oligonucleotide
ugcaugaacauguacucgc

SEQ ID NO: 3178406 - RNA, 19 nt, Artificial Sequence
  Description of Artificial Sequence: Synthetic oligonucleotide
  modified_base (4)..(4): a, c, u, g, unknown or other
ugunugauuggggacaucu

SEQ ID NO: 3178407 - RNA, 19 nt, Artificial Sequence
  Description of Artificial Sequence: Synthetic oligonucleotide
uucucuaggacucgaagcu

SEQ ID NO: 3178408 - RNA, 19 nt, Artificial Sequence
  Description of Artificial Sequence: Synthetic oligonucleotide
  modified_base (9)..(9): a, c, u, g, unknown or other
aagcaugunugauugggga

SEQ ID NO: 3178409 - RNA, 19 nt, Artificial Sequence
  Description of Artificial Sequence: Synthetic oligonucleotide
cucacuugagugcucaucg

SEQ ID NO: 3178410 - RNA, 19 nt, Artificial Sequence
  Description of Artificial Sequence: Synthetic oligonucleotide
uccagucccagccaaaagc

SEQ ID NO: 3178411 - RNA, 19 nt, Artificial Sequence
  Description of Artificial Sequence: Synthetic oligonucleotide
guuuaggugcguaugaucc

SEQ ID NO: 3178412 - RNA, 19 nt, Artificial Sequence
  Description of Artificial Sequence: Synthetic oligonucleotide
uuugcaugaacauguacuc

SEQ ID NO: 3178413 - RNA, 19 nt, Artificial Sequence
  Description of Artificial Sequence: Synthetic oligonucleotide
uguucucuaggacucgaag

SEQ ID NO: 3178414 - RNA, 19 nt, Artificial Sequence
  Description of Artificial Sequence: Synthetic oligonucleotide
uguugcaccaaaugggugu

SEQ ID NO: 3178415 - RNA, 19 nt, Artificial Sequence
  Description of Artificial Sequence: Synthetic oligonucleotide
  modified_base (8)..(8): a, c, u, g, unknown or other
agcaugunugauuggggac

SEQ ID NO: 3178416 - RNA, 19 nt, Artificial Sequence
  Description of Artificial Sequence: Synthetic oligonucleotide
uugaucucgaauccccucc

SEQ ID NO: 3178417 - RNA, 19 nt, Artificial Sequence
  Description of Artificial Sequence: Synthetic oligonucleotide
cauguacucgcacuggccg

SEQ ID NO: 3178418 - RNA, 19 nt, Artificial Sequence
  Description of Artificial Sequence: Synthetic oligonucleotide
uccaugaaaggaugcagcc

SEQ ID NO: 3178419 - RNA, 19 nt, Artificial Sequence
  Description of Artificial Sequence: Synthetic oligonucleotide
caguaguuggccuuguagc

SEQ ID NO: 3178420 - RNA, 19 nt, Artificial Sequence
  Description of Artificial Sequence: Synthetic oligonucleotide
uguggauacuuuugcauga

SEQ ID NO: 3178421 - RNA, 19 nt, Artificial Sequence
  Description of Artificial Sequence: Synthetic oligonucleotide
cuugaugcucuccaggcgc

SEQ ID NO: 3178422 - RNA, 19 nt, Artificial Sequence
  Description of Artificial Sequence: Synthetic oligonucleotide
ugcugcuuguuauugaagu

SEQ ID NO: 3178423 - RNA, 19 nt, Artificial Sequence
  Description of Artificial Sequence: Synthetic oligonucleotide
gacuugaugcucuccaggc

SEQ ID NO: 3178424 - RNA, 19 nt, Artificial Sequence
  Description of Artificial Sequence: Synthetic oligonucleotide
uugguaggggugcagcagg

SEQ ID NO: 3178425 - RNA, 19 nt, Artificial Sequence
  Description of Artificial Sequence: Synthetic oligonucleotide
aucaaaggcguugaucucg

SEQ ID NO: 3178426 - RNA, 19 nt, Artificial Sequence
  Description of Artificial Sequence: Synthetic oligonucleotide
guagauaaucugcugcuug

SEQ ID NO: 3178427 - RNA, 19 nt, Artificial Sequence
  Description of Artificial Sequence: Synthetic oligonucleotide
agucuugccguagauaauc

SEQ ID NO: 3178428 - RNA, 19 nt, Artificial Sequence
  Description of Artificial Sequence: Synthetic oligonucleotide
guucucuaggacucgaagc

SEQ ID NO: 3178429 - RNA, 19 nt, Artificial Sequence
  Description of Artificial Sequence: Synthetic oligonucleotide
aauccccuccuugagccgc

SEQ ID NO: 3178430 - RNA, 19 nt, Artificial Sequence
  Description of Artificial Sequence: Synthetic oligonucleotide
aaaggcguugaucucgaau

SEQ ID NO: 3178431 - RNA, 19 nt, Artificial Sequence
  Description of Artificial Sequence: Synthetic oligonucleotide
acgcagacggggcagaccg

SEQ ID NO: 3178432 - RNA, 19 nt, Artificial Sequence
  Description of Artificial Sequence: Synthetic oligonucleotide
cuuguagcguuuaggugcg

SEQ ID NO: 3178433 - RNA, 19 nt, Artificial Sequence
  Description of Artificial Sequence: Synthetic oligonucleotide
auaaucugcugcuuguuau

SEQ ID NO: 3178434 - RNA, 19 nt, Artificial Sequence
  Description of Artificial Sequence: Synthetic oligonucleotide
aguggguaucggcagcagc

SEQ ID NO: 3178435 - RNA, 19 nt, Artificial Sequence
  Description of Artificial Sequence: Synthetic oligonucleotide
agcagagccucuuggauug

SEQ ID NO: 3178436 - RNA, 19 nt, Artificial Sequence
  Description of Artificial Sequence: Synthetic oligonucleotide
cuccaugaaaggaugcagc

SEQ ID NO: 3178437 - RNA, 19 nt, Artificial Sequence
  Description of Artificial Sequence: Synthetic oligonucleotide
uagauaaucugcugcuugu

SEQ ID NO: 3178438 - RNA, 19 nt, Artificial Sequence
  Description of Artificial Sequence: Synthetic oligonucleotide
aaaguccaccgugaguggg

SEQ ID NO: 3178439 - RNA, 19 nt, Artificial Sequence
  Description of Artificial Sequence: Synthetic oligonucleotide
uuggggacaucuugguagg

SEQ ID NO: 3178440 - RNA, 19 nt, Artificial Sequence
  Description of Artificial Sequence: Synthetic oligonucleotide
aggcguugaucucgaaucc

SEQ ID NO: 3178441 - RNA, 19 nt, Artificial Sequence
  Description of Artificial Sequence: Synthetic oligonucleotide
ugcgacuugaugcucucca

SEQ ID NO: 3178442 - RNA, 19 nt, Artificial Sequence
  Description of Artificial Sequence: Synthetic oligonucleotide
ggaagugacagccagaucu

SEQ ID NO: 3178443 - RNA, 19 nt, Artificial Sequence
  Description of Artificial Sequence: Synthetic oligonucleotide
acucgaagcuccaugaaag

SEQ ID NO: 3178444 - RNA, 19 nt, Artificial Sequence
  Description of Artificial Sequence: Synthetic oligonucleotide
ugccgccacacgcagacgg

SEQ ID NO: 3178445 - RNA, 19 nt, Artificial Sequence
  Description of Artificial Sequence: Synthetic oligonucleotide
agcgggacucacuugagug

SEQ ID NO: 3178446 - RNA, 19 nt, Artificial Sequence
  Description of Artificial Sequence: Synthetic oligonucleotide
cucuaggacucgaagcucc

SEQ ID NO: 3178447 - RNA, 19 nt, Artificial Sequence
  Description of Artificial Sequence: Synthetic oligonucleotide
gauacuuuugcaugaacau

SEQ ID NO: 3178448 - RNA, 19 nt, Artificial Sequence
  Description of Artificial Sequence: Synthetic oligonucleotide
agaucugugccacugggau

SEQ ID NO: 3178449 - RNA, 19 nt, Artificial Sequence
  Description of Artificial Sequence: Synthetic oligonucleotide
accgugaguggguaucggc

SEQ ID NO: 3178450 - RNA, 19 nt, Artificial Sequence
  Description of Artificial Sequence: Synthetic oligonucleotide
uuaggugcguaugauccag

SEQ ID NO: 3178451 - RNA, 19 nt, Artificial Sequence
  Description of Artificial Sequence: Synthetic oligonucleotide
ugcuuguuauugaaguaaa

SEQ ID NO: 3178452 - RNA, 19 nt, Artificial Sequence
  Description of Artificial Sequence: Synthetic oligonucleotide
uugcaugaacauguacucg

SEQ ID NO: 3178453 - RNA, 19 nt, Artificial Sequence
  Description of Artificial Sequence: Synthetic oligonucleotide
uaggacucgaagcuccaug

SEQ ID NO: 3178454 - RNA, 19 nt, Artificial Sequence
  Description of Artificial Sequence: Synthetic oligonucleotide
gugacagccagaucugugc

SEQ ID NO: 3178455 - RNA, 19 nt, Artificial Sequence
  Description of Artificial Sequence: Synthetic oligonucleotide
guggguaucggcagcagcg

SEQ ID NO: 3178456 - RNA, 19 nt, Artificial Sequence
  Description of Artificial Sequence: Synthetic oligonucleotide
uugccguagauaaucugcu

SEQ ID NO: 3178457 - RNA, 19 nt, Artificial Sequence
  Description of Artificial Sequence: Synthetic oligonucleotide
uggauuggccuguugcacc

SEQ ID NO: 3178458 - RNA, 19 nt, Artificial Sequence
  Description of Artificial Sequence: Synthetic oligonucleotide
  modified_base (12)..(12): a, c, u, g, unknown or other
guaaagcaugunugauugg

SEQ ID NO: 3178459 - RNA, 19 nt, Artificial Sequence
  Description of Artificial Sequence: Synthetic oligonucleotide
ugacagccagaucugugcc

SEQ ID NO: 3178460 - RNA, 19 nt, Artificial Sequence
  Description of Artificial Sequence: Synthetic oligonucleotide
uaugauccagucccagcca

SEQ ID NO: 3178461 - RNA, 19 nt, Artificial Sequence
  Description of Artificial Sequence: Synthetic oligonucleotide
ucucgaauccccuccuuga

SEQ ID NO: 3178462 - RNA, 19 nt, Artificial Sequence
  Description of Artificial Sequence: Synthetic oligonucleotide
auacuuuugcaugaacaug

SEQ ID NO: 3178463 - RNA, 19 nt, Artificial Sequence
  Description of Artificial Sequence: Synthetic oligonucleotide
gaccguaccggcuccggcg

SEQ ID NO: 3178464 - RNA, 19 nt, Artificial Sequence
  Description of Artificial Sequence: Synthetic oligonucleotide
uuuaggugcguaugaucca

SEQ ID NO: 3178465 - RNA, 19 nt, Artificial Sequence
  Description of Artificial Sequence: Synthetic oligonucleotide
caaauggguguguggauac

SEQ ID NO: 3178466 - RNA, 19 nt, Artificial Sequence
  Description of Artificial Sequence: Synthetic oligonucleotide
gaagcuccaugaaaggaug

SEQ ID NO: 3178467 - RNA, 19 nt, Artificial Sequence
  Description of Artificial Sequence: Synthetic oligonucleotide
aagcuccaugaaaggaugc

SEQ ID NO: 3178468 - RNA, 19 nt, Artificial Sequence
  Description of Artificial Sequence: Synthetic oligonucleotide
ugugcugccgccacacgca

SEQ ID NO: 3178469 - RNA, 19 nt, Artificial Sequence
  Description of Artificial Sequence: Synthetic oligonucleotide
cucgaagcuccaugaaagg

SEQ ID NO: 3178470 - RNA, 19 nt, Artificial Sequence
  Description of Artificial Sequence: Synthetic oligonucleotide
agacggggcagaccguacc

SEQ ID NO: 3178471 - RNA, 19 nt, Artificial Sequence
  Description of Artificial Sequence: Synthetic oligonucleotide
gaacauguacucgcacugg

SEQ ID NO: 3178472 - RNA, 19 nt, Artificial Sequence
  Description of Artificial Sequence: Synthetic oligonucleotide
ucgaauccccuccuugagc

SEQ ID NO: 3178473 - RNA, 19 nt, Artificial Sequence
  Description of Artificial Sequence: Synthetic oligonucleotide
aucugugccacugggauca

SEQ ID NO: 3178474 - RNA, 19 nt, Artificial Sequence
  Description of Artificial Sequence: Synthetic oligonucleotide
aucuugguaggggugcagc

SEQ ID NO: 3178475 - RNA, 19 nt, Artificial Sequence
  Description of Artificial Sequence: Synthetic oligonucleotide
agcagcgggacucacuuga

SEQ ID NO: 3178476 - RNA, 19 nt, Artificial Sequence
  Description of Artificial Sequence: Synthetic oligonucleotide
ggaucaaaggcguugaucu

SEQ ID NO: 3178477 - RNA, 19 nt, Artificial Sequence
  Description of Artificial Sequence: Synthetic oligonucleotide
ggccuguugcaccaaaugg

SEQ ID NO: 3178478 - RNA, 19 nt, Artificial Sequence
  Description of Artificial Sequence: Synthetic oligonucleotide
uggccuguugcaccaaaug

SEQ ID NO: 3178479 - RNA, 19 nt, Artificial Sequence
  Description of Artificial Sequence: Synthetic oligonucleotide
acauguacucgcacuggcc

SEQ ID NO: 3178480 - RNA, 19 nt, Artificial Sequence
  Description of Artificial Sequence: Synthetic oligonucleotide
aggacucgaagcuccauga

SEQ ID NO: 3178481 - RNA, 19 nt, Artificial Sequence
  Description of Artificial Sequence: Synthetic oligonucleotide
gguguguggauacuuuugc

SEQ ID NO: 3178482 - RNA, 19 nt, Artificial Sequence
  Description of Artificial Sequence: Synthetic oligonucleotide
ugauuggggacaucuuggu

SEQ ID NO: 3178483 - RNA, 19 nt, Artificial Sequence
  Description of Artificial Sequence: Synthetic oligonucleotide
agccucaaaguccaccgug

SEQ ID NO: 3178484 - RNA, 19 nt, Artificial Sequence
  Description of Artificial Sequence: Synthetic oligonucleotide
auucauuucaaucuggucc

SEQ ID NO: 3178485 - RNA, 19 nt, Artificial Sequence
  Description of Artificial Sequence: Synthetic oligonucleotide
aacagaauucauuucaauc

SEQ ID NO: 3178486 - RNA, 19 nt, Artificial Sequence
  Description of Artificial Sequence: Synthetic oligonucleotide
uuucccuuuauacagaaag

SEQ ID NO: 3178487 - RNA, 19 nt, Artificial Sequence
  Description of Artificial Sequence: Synthetic oligonucleotide
uggugaaucauuuauuugg

SEQ ID NO: 3178488 - RNA, 19 nt, Artificial Sequence
  Description of Artificial Sequence: Synthetic oligonucleotide
ucuaucaucaauuucauua

SEQ ID NO: 3178489 - RNA, 19 nt, Artificial Sequence
  Description of Artificial Sequence: Synthetic oligonucleotide
uuagucagaaacuugaugu

SEQ ID NO: 3178490 - RNA, 19 nt, Artificial Sequence
  Description of Artificial Sequence: Synthetic oligonucleotide
aagguaagaacccucucgc

SEQ ID NO: 3178491 - RNA, 19 nt, Artificial Sequence
  Description of Artificial Sequence: Synthetic oligonucleotide
uuuucaugaaccuugauua

SEQ ID NO: 3178492 - RNA, 19 nt, Artificial Sequence
  Description of Artificial Sequence: Synthetic oligonucleotide
agaacaauuaagccuuucc

SEQ ID NO: 3178493 - RNA, 19 nt, Artificial Sequence
  Description of Artificial Sequence: Synthetic oligonucleotide
uaagguaagaacccucucg

SEQ ID NO: 3178494 - RNA, 19 nt, Artificial Sequence
  Description of Artificial Sequence: Synthetic oligonucleotide
acauuucaaauauauuagc

SEQ ID NO: 3178495 - RNA, 19 nt, Artificial Sequence
  Description of Artificial Sequence: Synthetic oligonucleotide
aacauuucaaauauauuag

SEQ ID NO: 3178496 - RNA, 19 nt, Artificial Sequence
  Description of Artificial Sequence: Synthetic oligonucleotide
auuucaccagcucugaugg

SEQ ID NO: 3178497 - RNA, 19 nt, Artificial Sequence
  Description of Artificial Sequence: Synthetic oligonucleotide
aagauguccaggcuggacg

SEQ ID NO: 3178498 - RNA, 19 nt, Artificial Sequence
  Description of Artificial Sequence: Synthetic oligonucleotide
acagaauucauuucaaucu

SEQ ID NO: 3178499 - RNA, 19 nt, Artificial Sequence
  Description of Artificial Sequence: Synthetic oligonucleotide
aacaucuccaccugguuuc

SEQ ID NO: 3178500 - RNA, 19 nt, Artificial Sequence
  Description of Artificial Sequence: Synthetic oligonucleotide
uuuaaaaccugguaguaga

SEQ ID NO: 3178501 - RNA, 19 nt, Artificial Sequence
  Description of Artificial Sequence: Synthetic oligonucleotide
ugaaucauuuauuuggaca

SEQ ID NO: 3178502 - RNA, 19 nt, Artificial Sequence
  Description of Artificial Sequence: Synthetic oligonucleotide
ucuuccuucaacuuuaaaa

SEQ ID NO: 3178503 - RNA, 19 nt, Artificial Sequence
  Description of Artificial Sequence: Synthetic oligonucleotide
auuauaauggugaccauac

SEQ ID NO: 3178504 - RNA, 19 nt, Artificial Sequence
  Description of Artificial Sequence: Synthetic oligonucleotide
aauucauuucaaucugguc

SEQ ID NO: 3178505 - RNA, 19 nt, Artificial Sequence
  Description of Artificial Sequence: Synthetic oligonucleotide
auaugcgcccaucacagcc

SEQ ID NO: 3178506 - RNA, 19 nt, Artificial Sequence
  Description of Artificial Sequence: Synthetic oligonucleotide
uucaucuuccucaaguccc

SEQ ID NO: 3178507 - RNA, 19 nt, Artificial Sequence
  Description of Artificial Sequence: Synthetic oligonucleotide
uuuagucagaaacuugaug

SEQ ID NO: 3178508 - RNA, 19 nt, Artificial Sequence
  Description of Artificial Sequence: Synthetic oligonucleotide
aacaauuaagccuuuccau

SEQ ID NO: 3178509 - RNA, 19 nt, Artificial Sequence
  Description of Artificial Sequence: Synthetic oligonucleotide
accaacguaagguaagaac

SEQ ID NO: 3178510 - RNA, 19 nt, Artificial Sequence
  Description of Artificial Sequence: Synthetic oligonucleotide
uucauuucaaucugguccc

SEQ ID NO: 3178511 - RNA, 19 nt, Artificial Sequence
  Description of Artificial Sequence: Synthetic oligonucleotide
aauuucauuauuauccccu

SEQ ID NO: 3178512 - RNA, 19 nt, Artificial Sequence
  Description of Artificial Sequence: Synthetic oligonucleotide
uggaacauuucaaauauau

SEQ ID NO: 3178513 - RNA, 19 nt, Artificial Sequence
  Description of Artificial Sequence: Synthetic oligonucleotide
uuucaaucuggucccaggg

SEQ ID NO: 3178514 - RNA, 19 nt, Artificial Sequence
  Description of Artificial Sequence: Synthetic oligonucleotide
ucacguuuuaguaacacau

SEQ ID NO: 3178515 - RNA, 19 nt, Artificial Sequence
  Description of Artificial Sequence: Synthetic oligonucleotide
uauuauccccuuuagucag

SEQ ID NO: 3178516 - RNA, 19 nt, Artificial Sequence
  Description of Artificial Sequence: Synthetic oligonucleotide
aauuaagccuuuccauauc

SEQ ID NO: 3178517 - RNA, 19 nt, Artificial Sequence
  Description of Artificial Sequence: Synthetic oligonucleotide
aaguuuguaaggaacagca

SEQ ID NO: 3178518 - RNA, 19 nt, Artificial Sequence
  Description of Artificial Sequence: Synthetic oligonucleotide
auacuugaauuuuggauag

SEQ ID NO: 3178519 - RNA, 19 nt, Artificial Sequence
  Description of Artificial Sequence: Synthetic oligonucleotide
uugaauuuuggauagucau

SEQ ID NO: 3178520 - RNA, 19 nt, Artificial Sequence
  Description of Artificial Sequence: Synthetic oligonucleotide
uuaggauucacguuuuagu

SEQ ID NO: 3178521 - RNA, 19 nt, Artificial Sequence
  Description of Artificial Sequence: Synthetic oligonucleotide
aaaguggaacauuucaaau

SEQ ID NO: 3178522 - RNA, 19 nt, Artificial Sequence
  Description of Artificial Sequence: Synthetic oligonucleotide
uacucugugaacuaucggu

SEQ ID NO: 3178523 - RNA, 19 nt, Artificial Sequence
  Description of Artificial Sequence: Synthetic oligonucleotide
aguggaacauuucaaauau

SEQ ID NO: 3178524 - RNA, 19 nt, Artificial Sequence
  Description of Artificial Sequence: Synthetic oligonucleotide
uauuucaccagcucugaug

SEQ ID NO: 3178525 - RNA, 19 nt, Artificial Sequence
  Description of Artificial Sequence: Synthetic oligonucleotide
ugaaccuugauuacucugu

SEQ ID NO: 3178526 - RNA, 19 nt, Artificial Sequence
  Description of Artificial Sequence: Synthetic oligonucleotide
aauggugaccauaccaacg

SEQ ID NO: 3178527 - RNA, 19 nt, Artificial Sequence
  Description of Artificial Sequence: Synthetic oligonucleotide
uuguucaucuuccucaagu

SEQ ID NO: 3178528 - RNA, 19 nt, Artificial Sequence
  Description of Artificial Sequence: Synthetic oligonucleotide
ucucguguuaggauucacg

SEQ ID NO: 3178529 - RNA, 19 nt, Artificial Sequence
  Description of Artificial Sequence: Synthetic oligonucleotide
uuuggauagucauucauua

SEQ ID NO: 3178530 - RNA, 19 nt, Artificial Sequence
  Description of Artificial Sequence: Synthetic oligonucleotide
ugucguuuguucaucuucc

SEQ ID NO: 3178531 - RNA, 19 nt, Artificial Sequence
  Description of Artificial Sequence: Synthetic oligonucleotide
uuccauaucaugagugcag

SEQ ID NO: 3178532 - RNA, 19 nt, Artificial Sequence
  Description of Artificial Sequence: Synthetic oligonucleotide
acaacuauuucaccagcuc

SEQ ID NO: 3178533 - RNA, 19 nt, Artificial Sequence
  Description of Artificial Sequence: Synthetic oligonucleotide
accugguuucccuuuauac

SEQ ID NO: 3178534 - RNA, 19 nt, Artificial Sequence
  Description of Artificial Sequence: Synthetic oligonucleotide
auucauuauaauggugacc

SEQ ID NO: 3178535 - RNA, 19 nt, Artificial Sequence
  Description of Artificial Sequence: Synthetic oligonucleotide
uuuguacaagccucuauca

SEQ ID NO: 3178536 - RNA, 19 nt, Artificial Sequence
  Description of Artificial Sequence: Synthetic oligonucleotide
uggauagucauucauuaua

SEQ ID NO: 3178537 - RNA, 19 nt, Artificial Sequence
  Description of Artificial Sequence: Synthetic oligonucleotide
acguccuucuuuuccagcc

SEQ ID NO: 3178538 - RNA, 19 nt, Artificial Sequence
  Description of Artificial Sequence: Synthetic oligonucleotide
aaguggaacauuucaaaua

SEQ ID NO: 3178539 - RNA, 19 nt, Artificial Sequence
  Description of Artificial Sequence: Synthetic oligonucleotide
aacacauaugcgcccauca

SEQ ID NO: 3178540 - RNA, 19 nt, Artificial Sequence
  Description of Artificial Sequence: Synthetic oligonucleotide
ucauuuauuuggacaagac

SEQ ID NO: 3178541 - RNA, 19 nt, Artificial Sequence
  Description of Artificial Sequence: Synthetic oligonucleotide
ucaaucuggucccagggac

SEQ ID NO: 3178542 - RNA, 19 nt, Artificial Sequence
  Description of Artificial Sequence: Synthetic oligonucleotide
auuucaaucuggucccagg

SEQ ID NO: 3178543 - RNA, 19 nt, Artificial Sequence
  Description of Artificial Sequence: Synthetic oligonucleotide
guuuguaaggaacagcaga

SEQ ID NO: 3178544 - RNA, 19 nt, Artificial Sequence
  Description of Artificial Sequence: Synthetic oligonucleotide
cuuuccauaucaugagugc

SEQ ID NO: 3178545 - RNA, 19 nt, Artificial Sequence
  Description of Artificial Sequence: Synthetic oligonucleotide
ccaacguaagguaagaacc

SEQ ID NO: 3178546 - RNA, 19 nt, Artificial Sequence
  Description of Artificial Sequence: Synthetic oligonucleotide
cuuuguacaagccucuauc

SEQ ID NO: 3178547 - RNA, 19 nt, Artificial Sequence
  Description of Artificial Sequence: Synthetic oligonucleotide
ucaugaaccuugauuacuc

SEQ ID NO: 3178548 - RNA, 19 nt, Artificial Sequence
  Description of Artificial Sequence: Synthetic oligonucleotide
ugaccauaccaacguaagg

SEQ ID NO: 3178549 - RNA, 19 nt, Artificial Sequence
  Description of Artificial Sequence: Synthetic oligonucleotide
ucccuuuauacagaaagug

SEQ ID NO: 3178550 - RNA, 19 nt, Artificial Sequence
  Description of Artificial Sequence: Synthetic oligonucleotide
aacuauuucaccagcucug

SEQ ID NO: 3178551 - RNA, 19 nt, Artificial Sequence
  Description of Artificial Sequence: Synthetic oligonucleotide
uuuccagccaguucuggcc

SEQ ID NO: 3178552 - RNA, 19 nt, Artificial Sequence
  Description of Artificial Sequence: Synthetic oligonucleotide
uuacucugugaacuaucgg

SEQ ID NO: 3178553 - RNA, 19 nt, Artificial Sequence
  Description of Artificial Sequence: Synthetic oligonucleotide
auuacucugugaacuaucg

SEQ ID NO: 3178554 - RNA, 19 nt, Artificial Sequence
  Description of Artificial Sequence: Synthetic oligonucleotide
caacguaagguaagaaccc

SEQ ID NO: 3178555 - RNA, 19 nt, Artificial Sequence
  Description of Artificial Sequence: Synthetic oligonucleotide
aaacuugaugucuccauua

SEQ ID NO: 3178556 - RNA, 19 nt, Artificial Sequence
  Description of Artificial Sequence: Synthetic oligonucleotide
agcaccaccacgaugggac

SEQ ID NO: 3178557 - RNA, 19 nt, Artificial Sequence
  Description of Artificial Sequence: Synthetic oligonucleotide
agaacccucucgcucuucc

SEQ ID NO: 3178558 - RNA, 19 nt, Artificial Sequence
  Description of Artificial Sequence: Synthetic oligonucleotide
aaucauuuauuuggacaag

SEQ ID NO: 3178559 - RNA, 19 nt, Artificial Sequence
  Description of Artificial Sequence: Synthetic oligonucleotide
accuugauuacucugugaa

SEQ ID NO: 3178560 - RNA, 19 nt, Artificial Sequence
  Description of Artificial Sequence: Synthetic oligonucleotide
uauauuagcuuuucucuuu

SEQ ID NO: 3178561 - RNA, 19 nt, Artificial Sequence
  Description of Artificial Sequence: Synthetic oligonucleotide
ucugugaacuaucgguaug

SEQ ID NO: 3178562 - RNA, 19 nt, Artificial Sequence
  Description of Artificial Sequence: Synthetic oligonucleotide
ucuccccugugaaaggccg

SEQ ID NO: 3178563 - RNA, 19 nt, Artificial Sequence
  Description of Artificial Sequence: Synthetic oligonucleotide
uaggauucacguuuuagua

SEQ ID NO: 3178564 - RNA, 19 nt, Artificial Sequence
  Description of Artificial Sequence: Synthetic oligonucleotide
acguuuuaguaacacauau

SEQ ID NO: 3178565 - RNA, 19 nt, Artificial Sequence
  Description of Artificial Sequence: Synthetic oligonucleotide
aaucuggucccagggacgg

SEQ ID NO: 3178566 - RNA, 19 nt, Artificial Sequence
  Description of Artificial Sequence: Synthetic oligonucleotide
ugaauuuuggauagucauu

SEQ ID NO: 3178567 - RNA, 19 nt, Artificial Sequence
  Description of Artificial Sequence: Synthetic oligonucleotide
gaaguuuguaaggaacagc

SEQ ID NO: 3178568 - RNA, 19 nt, Artificial Sequence
  Description of Artificial Sequence: Synthetic oligonucleotide
uucaaauauauuagcuuuu

SEQ ID NO: 3178569 - RNA, 19 nt, Artificial Sequence
  Description of Artificial Sequence: Synthetic oligonucleotide
cuugaugucuccauuaucu

SEQ ID NO: 3178570 - RNA, 19 nt, Artificial Sequence
  Description of Artificial Sequence: Synthetic oligonucleotide
cagaauucauuucaaucug

SEQ ID NO: 3178571 - RNA, 19 nt, Artificial Sequence
  Description of Artificial Sequence: Synthetic oligonucleotide
auucacguuuuaguaacac

SEQ ID NO: 3178572 - RNA, 19 nt, Artificial Sequence
  Description of Artificial Sequence: Synthetic oligonucleotide
ucaaauauauuagcuuuuc

SEQ ID NO: 3178573 - RNA, 19 nt, Artificial Sequence
  Description of Artificial Sequence: Synthetic oligonucleotide
acacauaugcgcccaucac

SEQ ID NO: 3178574 - RNA, 19 nt, Artificial Sequence
  Description of Artificial Sequence: Synthetic oligonucleotide
uuuuccagccaguucuggc

SEQ ID NO: 3178575 - RNA, 19 nt, Artificial Sequence
  Description of Artificial Sequence: Synthetic oligonucleotide
acuugaugucuccauuauc

SEQ ID NO: 3178576 - RNA, 19 nt, Artificial Sequence
  Description of Artificial Sequence: Synthetic oligonucleotide
cuaucgguaugucucuucc

SEQ ID NO: 3178577 - RNA, 19 nt, Artificial Sequence
  Description of Artificial Sequence: Synthetic oligonucleotide
auauauuagcuuuucucuu

SEQ ID NO: 3178578 - RNA, 19 nt, Artificial Sequence
  Description of Artificial Sequence: Synthetic oligonucleotide
agaauucauuucaaucugg

SEQ ID NO: 3178579 - RNA, 19 nt, Artificial Sequence
  Description of Artificial Sequence: Synthetic oligonucleotide
aacuugaugucuccauuau

SEQ ID NO: 3178580 - RNA, 19 nt, Artificial Sequence
  Description of Artificial Sequence: Synthetic oligonucleotide
uucccuuuauacagaaagu

SEQ ID NO: 3178581 - RNA, 19 nt, Artificial Sequence
  Description of Artificial Sequence: Synthetic oligonucleotide
auggugaccauaccaacgu

SEQ ID NO: 3178582 - RNA, 19 nt, Artificial Sequence
  Description of Artificial Sequence: Synthetic oligonucleotide
uguucaucuuccucaaguc

SEQ ID NO: 3178583 - RNA, 19 nt, Artificial Sequence
  Description of Artificial Sequence: Synthetic oligonucleotide
gagcauacuugaauuuugg

SEQ ID NO: 3178584 - RNA, 19 nt, Artificial Sequence
  Description of Artificial Sequence: Synthetic oligonucleotide
ugaacaacaggccacauug

SEQ ID NO: 3178585 - RNA, 19 nt, Artificial Sequence
  Description of Artificial Sequence: Synthetic oligonucleotide
aaacacccgacuuacaagg

SEQ ID NO: 3178586 - RNA, 19 nt, Artificial Sequence
  Description of Artificial Sequence: Synthetic oligonucleotide
uucaguggaguuuauaagg

SEQ ID NO: 3178587 - RNA, 19 nt, Artificial Sequence
  Description of Artificial Sequence: Synthetic oligonucleotide
uccaaggugaacaacaggc

SEQ ID NO: 3178588 - RNA, 19 nt, Artificial Sequence
  Description of Artificial Sequence: Synthetic oligonucleotide
uguguaacacacuacauca

SEQ ID NO: 3178589 - RNA, 19 nt, Artificial Sequence
  Description of Artificial Sequence: Synthetic oligonucleotide
aacaacaggccacauuggc

SEQ ID NO: 3178590 - RNA, 19 nt, Artificial Sequence
  Description of Artificial Sequence: Synthetic oligonucleotide
acugauuugauggagaauc

SEQ ID NO: 3178591 - RNA, 19 nt, Artificial Sequence
  Description of Artificial Sequence: Synthetic oligonucleotide
uugaucuccacauucauug

SEQ ID NO: 3178592 - RNA, 19 nt, Artificial Sequence
  Description of Artificial Sequence: Synthetic oligonucleotide
uuuucgugcaacaagcgca

SEQ ID NO: 3178593 - RNA, 19 nt, Artificial Sequence
  Description of Artificial Sequence: Synthetic oligonucleotide
uuuauaaggagaucuccag

SEQ ID NO: 3178594 - RNA, 19 nt, Artificial Sequence
  Description of Artificial Sequence: Synthetic oligonucleotide
uguaaugcaguccaccuca

SEQ ID NO: 3178595 - RNA, 19 nt, Artificial Sequence
  Description of Artificial Sequence: Synthetic oligonucleotide
uuauaaggagaucuccagg

SEQ ID NO: 3178596 - RNA, 19 nt, Artificial Sequence
  Description of Artificial Sequence: Synthetic oligonucleotide
ggaaggacugauuugaugg

SEQ ID NO: 3178597 - RNA, 19 nt, Artificial Sequence
  Description of Artificial Sequence: Synthetic oligonucleotide
aaugcaguccaccucacca

SEQ ID NO: 3178598 - RNA, 19 nt, Artificial Sequence
  Description of Artificial Sequence: Synthetic oligonucleotide
uuugcaacacagcucauca

SEQ ID NO: 3178599 - RNA, 19 nt, Artificial Sequence
  Description of Artificial Sequence: Synthetic oligonucleotide
ugcacuuauauuccuuugg

SEQ ID NO: 3178600 - RNA, 19 nt, Artificial Sequence
  Description of Artificial Sequence: Synthetic oligonucleotide
uguaacacacuacaucagc

SEQ ID NO: 3178601 - RNA, 19 nt, Artificial Sequence
  Description of Artificial Sequence: Synthetic oligonucleotide
aguuuauaaggagaucucc

SEQ ID NO: 3178602 - RNA, 19 nt, Artificial Sequence
  Description of Artificial Sequence: Synthetic oligonucleotide
uauaaggagaucuccaggu

SEQ ID NO: 3178603 - RNA, 19 nt, Artificial Sequence
  Description of Artificial Sequence: Synthetic oligonucleotide
auuccuuugggaugcaaac

SEQ ID NO: 3178604 - RNA, 19 nt, Artificial Sequence
  Description of Artificial Sequence: Synthetic oligonucleotide
uugaaauccaaggugaaca

SEQ ID NO: 3178605 - RNA, 19 nt, Artificial Sequence
  Description of Artificial Sequence: Synthetic oligonucleotide
uucauugacuccauugcag

SEQ ID NO: 3178606 - RNA, 19 nt, Artificial Sequence
  Description of Artificial Sequence: Synthetic oligonucleotide
acuuauauuccuuugggau

SEQ ID NO: 3178607 - RNA, 19 nt, Artificial Sequence
  Description of Artificial Sequence: Synthetic oligonucleotide
ugauggagaaucugcaucc

SEQ ID NO: 3178608 - RNA, 19 nt, Artificial Sequence
  Description of Artificial Sequence: Synthetic oligonucleotide
ucuccuguaaugcagucca

SEQ ID NO: 3178609 - RNA, 19 nt, Artificial Sequence
  Description of Artificial Sequence: Synthetic oligonucleotide
ucuccagguacauuaaacc

SEQ ID NO: 3178610 - RNA, 19 nt, Artificial Sequence
  Description of Artificial Sequence: Synthetic oligonucleotide
aaagcguuaccuuggcaag

SEQ ID NO: 3178611 - RNA, 19 nt, Artificial Sequence
  Description of Artificial Sequence: Synthetic oligonucleotide
caccauugcacuuauauuc

SEQ ID NO: 3178612 - RNA, 19 nt, Artificial Sequence
  Description of Artificial Sequence: Synthetic oligonucleotide
uuauauuccuuugggaugc

SEQ ID NO: 3178613 - RNA, 19 nt, Artificial Sequence
  Description of Artificial Sequence: Synthetic oligonucleotide
aaauccaaggugaacaaca

SEQ ID NO: 3178614 - RNA, 19 nt, Artificial Sequence
  Description of Artificial Sequence: Synthetic oligonucleotide
acauucauugacuccauug

SEQ ID NO: 3178615 - RNA, 19 nt, Artificial Sequence
  Description of Artificial Sequence: Synthetic oligonucleotide
cacuacaucagccaagccc

SEQ ID NO: 3178616 - RNA, 19 nt, Artificial Sequence
  Description of Artificial Sequence: Synthetic oligonucleotide
cauucauugacuccauugc

SEQ ID NO: 3178617 - RNA, 19 nt, Artificial Sequence
  Description of Artificial Sequence: Synthetic oligonucleotide
augugcuucccauucacac

SEQ ID NO: 3178618 - RNA, 19 nt, Artificial Sequence
  Description of Artificial Sequence: Synthetic oligonucleotide
gauuugauggagaaucugc

SEQ ID NO: 3178619 - RNA, 19 nt, Artificial Sequence
  Description of Artificial Sequence: Synthetic oligonucleotide
cuuugggaugcaaacaccc

SEQ ID NO: 3178620 - RNA, 19 nt, Artificial Sequence
  Description of Artificial Sequence: Synthetic oligonucleotide
cuuauauuccuuugggaug

SEQ ID NO: 3178621 - RNA, 19 nt, Artificial Sequence
  Description of Artificial Sequence: Synthetic oligonucleotide
aucacuuugaucuccacau

SEQ ID NO: 3178622 - RNA, 19 nt, Artificial Sequence
  Description of Artificial Sequence: Synthetic oligonucleotide
uucccauucacacacugga

SEQ ID NO: 3178623 - RNA, 19 nt, Artificial Sequence
  Description of Artificial Sequence: Synthetic oligonucleotide
aaacuggucucuauucccc

SEQ ID NO: 3178624 - RNA, 19 nt, Artificial Sequence
  Description of Artificial Sequence: Synthetic oligonucleotide
agcuuugcaacacagcuca

SEQ ID NO: 3178625 - RNA, 19 nt, Artificial Sequence
  Description of Artificial Sequence: Synthetic oligonucleotide
ugcaacacagcucaucacu

SEQ ID NO: 3178626 - RNA, 19 nt, Artificial Sequence
  Description of Artificial Sequence: Synthetic oligonucleotide
aacacagcucaucacuuug

SEQ ID NO: 3178627 - RNA, 19 nt, Artificial Sequence
  Description of Artificial Sequence: Synthetic oligonucleotide
uuugggaugcaaacacccg

SEQ ID NO: 3178628 - RNA, 19 nt, Artificial Sequence
  Description of Artificial Sequence: Synthetic oligonucleotide
auucaguggaguuuauaag

SEQ ID NO: 3178629 - RNA, 19 nt, Artificial Sequence
  Description of Artificial Sequence: Synthetic oligonucleotide
ucaguggaguuuauaagga

SEQ ID NO: 3178630 - RNA, 19 nt, Artificial Sequence
  Description of Artificial Sequence: Synthetic oligonucleotide
gaaagcguuaccuuggcaa

SEQ ID NO: 3178631 - RNA, 19 nt, Artificial Sequence
  Description of Artificial Sequence: Synthetic oligonucleotide
uaaggagaucuccagguac

SEQ ID NO: 3178632 - RNA, 19 nt, Artificial Sequence
  Description of Artificial Sequence: Synthetic oligonucleotide
uccacauucauugacucca

SEQ ID NO: 3178633 - RNA, 19 nt, Artificial Sequence
  Description of Artificial Sequence: Synthetic oligonucleotide
aacaagcgcacccuguuga

SEQ ID NO: 3178634 - RNA, 19 nt, Artificial Sequence
  Description of Artificial Sequence: Synthetic oligonucleotide
uugauggagaaucugcauc

SEQ ID NO: 3178635 - RNA, 19 nt, Artificial Sequence
  Description of Artificial Sequence: Synthetic oligonucleotide
aaggugaacaacaggccac

SEQ ID NO: 3178636 - RNA, 19 nt, Artificial Sequence
  Description of Artificial Sequence: Synthetic oligonucleotide
uccuuugggaugcaaacac

SEQ ID NO: 3178637 - RNA, 19 nt, Artificial Sequence
  Description of Artificial Sequence: Synthetic oligonucleotide
acccuguugaaauccaagg

SEQ ID NO: 3178638 - RNA, 19 nt, Artificial Sequence
  Description of Artificial Sequence: Synthetic oligonucleotide
aaggaaagcguuaccuugg

SEQ ID NO: 3178639 - RNA, 19 nt, Artificial Sequence
  Description of Artificial Sequence: Synthetic oligonucleotide
cuucuccugguaaaggugc

SEQ ID NO: 3178640 - RNA, 19 nt, Artificial Sequence
  Description of Artificial Sequence: Synthetic oligonucleotide
aacuggucucuauuccccg

SEQ ID NO: 3178641 - RNA, 19 nt, Artificial Sequence
  Description of Artificial Sequence: Synthetic oligonucleotide
caaggaaagcguuaccuug

SEQ ID NO: 3178642 - RNA, 19 nt, Artificial Sequence
  Description of Artificial Sequence: Synthetic oligonucleotide
caaacuggucucuauuccc

SEQ ID NO: 3178643 - RNA, 19 nt, Artificial Sequence
  Description of Artificial Sequence: Synthetic oligonucleotide
uacaaggaaagcguuaccu

SEQ ID NO: 3178644 - RNA, 19 nt, Artificial Sequence
  Description of Artificial Sequence: Synthetic oligonucleotide
uaacacacuacaucagcca

SEQ ID NO: 3178645 - RNA, 19 nt, Artificial Sequence
  Description of Artificial Sequence: Synthetic oligonucleotide
accauugcacuuauauucc

SEQ ID NO: 3178646 - RNA, 19 nt, Artificial Sequence
  Description of Artificial Sequence: Synthetic oligonucleotide
ucauugacuccauugcaga

SEQ ID NO: 3178647 - RNA, 19 nt, Artificial Sequence
  Description of Artificial Sequence: Synthetic oligonucleotide
ucuucuccugguaaaggug

SEQ ID NO: 3178648 - RNA, 19 nt, Artificial Sequence
  Description of Artificial Sequence: Synthetic oligonucleotide
aacacacuacaucagccaa

SEQ ID NO: 3178649 - RNA, 19 nt, Artificial Sequence
  Description of Artificial Sequence: Synthetic oligonucleotide
uacaugcaggcauucagug

SEQ ID NO: 3178650 - RNA, 19 nt, Artificial Sequence
  Description of Artificial Sequence: Synthetic oligonucleotide
agggaugugcuucccauuc

SEQ ID NO: 3178651 - RNA, 19 nt, Artificial Sequence
  Description of Artificial Sequence: Synthetic oligonucleotide
agaaucugcaucccgugug

SEQ ID NO: 3178652 - RNA, 19 nt, Artificial Sequence
  Description of Artificial Sequence: Synthetic oligonucleotide
cuuacaaggaaagcguuac

SEQ ID NO: 3178653 - RNA, 19 nt, Artificial Sequence
  Description of Artificial Sequence: Synthetic oligonucleotide
uugggaugcaaacacccga

SEQ ID NO: 3178654 - RNA, 19 nt, Artificial Sequence
  Description of Artificial Sequence: Synthetic oligonucleotide
gagaucuccagguacauua

SEQ ID NO: 3178655 - RNA, 19 nt, Artificial Sequence
  Description of Artificial Sequence: Synthetic oligonucleotide
ucacacacuggaaggacug

SEQ ID NO: 3178656 - RNA, 19 nt, Artificial Sequence
  Description of Artificial Sequence: Synthetic oligonucleotide
uccauugcagacucucucc

SEQ ID NO: 3178657 - RNA, 19 nt, Artificial Sequence
  Description of Artificial Sequence: Synthetic oligonucleotide
uccccggcaacguacaugc

SEQ ID NO: 3178658 - RNA, 19 nt, Artificial Sequence
  Description of Artificial Sequence: Synthetic oligonucleotide
acuacaucagccaagcccu

SEQ ID NO: 3178659 - RNA, 19 nt, Artificial Sequence
  Description of Artificial Sequence: Synthetic oligonucleotide
uauuccuuugggaugcaaa

SEQ ID NO: 3178660 - RNA, 19 nt, Artificial Sequence
  Description of Artificial Sequence: Synthetic oligonucleotide
cugguaaaggugcacuccg

SEQ ID NO: 3178661 - RNA, 19 nt, Artificial Sequence
  Description of Artificial Sequence: Synthetic oligonucleotide
uaaaggugcacuccgccaa

SEQ ID NO: 3178662 - RNA, 19 nt, Artificial Sequence
  Description of Artificial Sequence: Synthetic oligonucleotide
auucauugacuccauugca

SEQ ID NO: 3178663 - RNA, 19 nt, Artificial Sequence
  Description of Artificial Sequence: Synthetic oligonucleotide
uggagaaucugcaucccgu

SEQ ID NO: 3178664 - RNA, 19 nt, Artificial Sequence
  Description of Artificial Sequence: Synthetic oligonucleotide
aauccaaggugaacaacag

SEQ ID NO: 3178665 - RNA, 19 nt, Artificial Sequence
  Description of Artificial Sequence: Synthetic oligonucleotide
uucuucuccugguaaaggu

SEQ ID NO: 3178666 - RNA, 19 nt, Artificial Sequence
  Description of Artificial Sequence: Synthetic oligonucleotide
acuggaaggacugauuuga

SEQ ID NO: 3178667 - RNA, 19 nt, Artificial Sequence
  Description of Artificial Sequence: Synthetic oligonucleotide
auugcagacucucuccuga

SEQ ID NO: 3178668 - RNA, 19 nt, Artificial Sequence
  Description of Artificial Sequence: Synthetic oligonucleotide
aucuccagguacauuaaac

SEQ ID NO: 3178669 - RNA, 19 nt, Artificial Sequence
  Description of Artificial Sequence: Synthetic oligonucleotide
aagcguuaccuuggcaagc

SEQ ID NO: 3178670 - RNA, 19 nt, Artificial Sequence
  Description of Artificial Sequence: Synthetic oligonucleotide
cagcucaucacuuugaucu

SEQ ID NO: 3178671 - RNA, 19 nt, Artificial Sequence
  Description of Artificial Sequence: Synthetic oligonucleotide
ucucuauuccccggcaacg

SEQ ID NO: 3178672 - RNA, 19 nt, Artificial Sequence
  Description of Artificial Sequence: Synthetic oligonucleotide
aaggacugauuugauggag

SEQ ID NO: 3178673 - RNA, 19 nt, Artificial Sequence
  Description of Artificial Sequence: Synthetic oligonucleotide
acaugcaggcauucagugg

SEQ ID NO: 3178674 - RNA, 19 nt, Artificial Sequence
  Description of Artificial Sequence: Synthetic oligonucleotide
uugacuccauugcagacuc

SEQ ID NO: 3178675 - RNA, 19 nt, Artificial Sequence
  Description of Artificial Sequence: Synthetic oligonucleotide
cuguugaaauccaagguga

SEQ ID NO: 3178676 - RNA, 19 nt, Artificial Sequence
  Description of Artificial Sequence: Synthetic oligonucleotide
uccagguacauuaaaccuu

SEQ ID NO: 3178677 - RNA, 19 nt, Artificial Sequence
  Description of Artificial Sequence: Synthetic oligonucleotide
aggaaagcguuaccuuggc

SEQ ID NO: 3178678 - RNA, 19 nt, Artificial Sequence
  Description of Artificial Sequence: Synthetic oligonucleotide
uaaccgcuaguucuucucc

SEQ ID NO: 3178679 - RNA, 19 nt, Artificial Sequence
  Description of Artificial Sequence: Synthetic oligonucleotide
ucaucgucuccuguaaugc

SEQ ID NO: 3178680 - RNA, 19 nt, Artificial Sequence
  Description of Artificial Sequence: Synthetic oligonucleotide
cauucaguggaguuuauaa

SEQ ID NO: 3178681 - RNA, 19 nt, Artificial Sequence
  Description of Artificial Sequence: Synthetic oligonucleotide
caucccguguguaacacac

SEQ ID NO: 3178682 - RNA, 19 nt, Artificial Sequence
  Description of Artificial Sequence: Synthetic oligonucleotide
caaacacccgacuuacaag

SEQ ID NO: 3178683 - RNA, 19 nt, Artificial Sequence
  Description of Artificial Sequence: Synthetic oligonucleotide
ugaaauccaaggugaacaa

SEQ ID NO: 3178684 - RNA, 19 nt, Artificial Sequence
  Description of Artificial Sequence: Synthetic oligonucleotide
aauauauauauauauauau

SEQ ID NO: 3178685 - RNA, 19 nt, Artificial Sequence
  Description of Artificial Sequence: Synthetic oligonucleotide
aaauuuacaaugaauaacg

SEQ ID NO: 3178686 - RNA, 19 nt, Artificial Sequence
  Description of Artificial Sequence: Synthetic oligonucleotide
aacacuuugaauucuugcc

SEQ ID NO: 3178687 - RNA, 19 nt, Artificial Sequence
  Description of Artificial Sequence: Synthetic oligonucleotide
uauauauauauauauaugu

SEQ ID NO: 3178688 - RNA, 19 nt, Artificial Sequence
  Description of Artificial Sequence: Synthetic oligonucleotide
acaagaucaagccacaccc

SEQ ID NO: 3178689 - RNA, 19 nt, Artificial Sequence
  Description of Artificial Sequence: Synthetic oligonucleotide
gaaaccaggaagcagaagg

SEQ ID NO: 3178690 - RNA, 19 nt, Artificial Sequence
  Description of Artificial Sequence: Synthetic oligonucleotide
uauuuuaauauauauauau

SEQ ID NO: 3178691 - RNA, 19 nt, Artificial Sequence
  Description of Artificial Sequence: Synthetic oligonucleotide
acucuaaugauuuccaccc

SEQ ID NO: 3178692 - RNA, 19 nt, Artificial Sequence
  Description of Artificial Sequence: Synthetic oligonucleotide
uauauauauauauauauau

SEQ ID NO: 3178693 - RNA, 19 nt, Artificial Sequence
  Description of Artificial Sequence: Synthetic oligonucleotide
uuaauauauauauauauau

SEQ ID NO: 3178694 - RNA, 19 nt, Artificial Sequence
  Description of Artificial Sequence: Synthetic oligonucleotide
ugaaaauuuacaaugaaua

SEQ ID NO: 3178695 - RNA, 19 nt, Artificial Sequence
  Description of Artificial Sequence: Synthetic oligonucleotide
uuuuaauauauauauauau

SEQ ID NO: 3178696 - RNA, 19 nt, Artificial Sequence
  Description of Artificial Sequence: Synthetic oligonucleotide
ucaaagaucauucaaaauu

SEQ ID NO: 3178697 - RNA, 19 nt, Artificial Sequence
  Description of Artificial Sequence: Synthetic oligonucleotide
uuuuaaguguacaaguaag

SEQ ID NO: 3178698 - RNA, 19 nt, Artificial Sequence
  Description of Artificial Sequence: Synthetic oligonucleotide
uaugcuaugggacagacuc

SEQ ID NO: 3178699 - RNA, 19 nt, Artificial Sequence
  Description of Artificial Sequence: Synthetic oligonucleotide
auaaugcuaauugacaugc

SEQ ID NO: 3178700 - RNA, 19 nt, Artificial Sequence
  Description of Artificial Sequence: Synthetic oligonucleotide
uauggaguauuuaugauca

SEQ ID NO: 3178701 - RNA, 19 nt, Artificial Sequence
  Description of Artificial Sequence: Synthetic oligonucleotide
uuuaaguguacaaguaagg

SEQ ID NO: 3178702 - RNA, 19 nt, Artificial Sequence
  Description of Artificial Sequence: Synthetic oligonucleotide
aauguuuuguuuuaacaga

SEQ ID NO: 3178703 - RNA, 19 nt, Artificial Sequence
  Description of Artificial Sequence: Synthetic oligonucleotide
augaucauaucacagacag

SEQ ID NO: 3178704 - RNA, 19 nt, Artificial Sequence
  Description of Artificial Sequence: Synthetic oligonucleotide
uuaauacuuagcauuauac

SEQ ID NO: 3178705 - RNA, 19 nt, Artificial Sequence
  Description of Artificial Sequence: Synthetic oligonucleotide
uauauauauauauauguau

SEQ ID NO: 3178706 - RNA, 19 nt, Artificial Sequence
  Description of Artificial Sequence: Synthetic oligonucleotide
aaagggacaaaguuaaggu

SEQ ID NO: 3178707 - RNA, 19 nt, Artificial Sequence
  Description of Artificial Sequence: Synthetic oligonucleotide
aucuguaccucacauauac

SEQ ID NO: 3178708 - RNA, 19 nt, Artificial Sequence
  Description of Artificial Sequence: Synthetic oligonucleotide
  modified_base (14)..(14): a, c, u, g, unknown or other
aagcagaugaaugnacacc

SEQ ID NO: 3178709 - RNA, 19 nt, Artificial Sequence
  Description of Artificial Sequence: Synthetic oligonucleotide
ucacacacaaccuuaacag

SEQ ID NO: 3178710 - RNA, 19 nt, Artificial Sequence
  Description of Artificial Sequence: Synthetic oligonucleotide
uuuaauauauauauauaua

SEQ ID NO: 3178711 - RNA, 19 nt, Artificial Sequence
  Description of Artificial Sequence: Synthetic oligonucleotide
  modified_base (7)..(7): a, c, u, g, unknown or other
ugaaugnacaccuuucugu

SEQ ID NO: 3178712 - RNA, 19 nt, Artificial Sequence
  Description of Artificial Sequence: Synthetic oligonucleotide
gauacaaugcuuucuagac

SEQ ID NO: 3178713 - RNA, 19 nt, Artificial Sequence
  Description of Artificial Sequence: Synthetic oligonucleotide
uaugggacagacucuaugg

SEQ ID NO: 3178714 - RNA, 19 nt, Artificial Sequence
  Description of Artificial Sequence: Synthetic oligonucleotide
auagguacagcacagcaag

SEQ ID NO: 3178715 - RNA, 19 nt, Artificial Sequence
  Description of Artificial Sequence: Synthetic oligonucleotide
uuacauaaugcuaauugac

SEQ ID NO: 3178716 - RNA, 19 nt, Artificial Sequence
  Description of Artificial Sequence: Synthetic oligonucleotide
uaaucaaguauuuuggauc

SEQ ID NO: 3178717 - RNA, 19 nt, Artificial Sequence
  Description of Artificial Sequence: Synthetic oligonucleotide
gucacuuucaagcagauga

SEQ ID NO: 3178718 - RNA, 19 nt, Artificial Sequence
  Description of Artificial Sequence: Synthetic oligonucleotide
caaagaucauucaaaauug

SEQ ID NO: 3178719 - RNA, 19 nt, Artificial Sequence
  Description of Artificial Sequence: Synthetic oligonucleotide
uuauguauuugugagaacu

SEQ ID NO: 3178720 - RNA, 19 nt, Artificial Sequence
  Description of Artificial Sequence: Synthetic oligonucleotide
aaauuacaaagggugcugc

SEQ ID NO: 3178721 - RNA, 19 nt, Artificial Sequence
  Description of Artificial Sequence: Synthetic oligonucleotide
aaacagaaugaaaauuuac

SEQ ID NO: 3178722 - RNA, 19 nt, Artificial Sequence
  Description of Artificial Sequence: Synthetic oligonucleotide
  modified_base (16)..(16): a, c, u, g, unknown or other
ucaagcagaugaaugnaca

SEQ ID NO: 3178723 - RNA, 19 nt, Artificial Sequence
  Description of Artificial Sequence: Synthetic oligonucleotide
aaagcaaccuguguauggc

SEQ ID NO: 3178724 - RNA, 19 nt, Artificial Sequence
  Description of Artificial Sequence: Synthetic oligonucleotide
auauauauauauguauuuc

SEQ ID NO: 3178725 - RNA, 19 nt, Artificial Sequence
  Description of Artificial Sequence: Synthetic oligonucleotide
aauggguuuaucugaggag

SEQ ID NO: 3178726 - RNA, 19 nt, Artificial Sequence
  Description of Artificial Sequence: Synthetic oligonucleotide
uuagcauuauacuaauaca

SEQ ID NO: 3178727 - RNA, 19 nt, Artificial Sequence
  Description of Artificial Sequence: Synthetic oligonucleotide
cucacauauacuuagcaug

SEQ ID NO: 3178728 - RNA, 19 nt, Artificial Sequence
  Description of Artificial Sequence: Synthetic oligonucleotide
uugcuuuuggaacaauggg

SEQ ID NO: 3178729 - RNA, 19 nt, Artificial Sequence
  Description of Artificial Sequence: Synthetic oligonucleotide
uacauaaugcuaauugaca

SEQ ID NO: 3178730 - RNA, 19 nt, Artificial Sequence
  Description of Artificial Sequence: Synthetic oligonucleotide
uguaaugcagacuugcuaa

SEQ ID NO: 3178731 - RNA, 19 nt, Artificial Sequence
  Description of Artificial Sequence: Synthetic oligonucleotide
uguaguaguacuagaguca

SEQ ID NO: 3178732 - RNA, 19 nt, Artificial Sequence
  Description of Artificial Sequence: Synthetic oligonucleotide
gaauaaacaaaacuaugga

SEQ ID NO: 3178733 - RNA, 19 nt, Artificial Sequence
  Description of Artificial Sequence: Synthetic oligonucleotide
uaauauauauauauauaua

SEQ ID NO: 3178734 - RNA, 19 nt, Artificial Sequence
  Description of Artificial Sequence: Synthetic oligonucleotide
aaacaauguaaccuaauua

SEQ ID NO: 3178735 - RNA, 19 nt, Artificial Sequence
  Description of Artificial Sequence: Synthetic oligonucleotide
aaugaaaauuuacaaugaa

SEQ ID NO: 3178736 - RNA, 19 nt, Artificial Sequence
  Description of Artificial Sequence: Synthetic oligonucleotide
uguauaccauguaugaaca

SEQ ID NO: 3178737 - RNA, 19 nt, Artificial Sequence
  Description of Artificial Sequence: Synthetic oligonucleotide
aaugauuuccacccaaaau

SEQ ID NO: 3178738 - RNA, 19 nt, Artificial Sequence
  Description of Artificial Sequence: Synthetic oligonucleotide
uaaguguacaaguaaggca

SEQ ID NO: 3178739 - RNA, 19 nt, Artificial Sequence
  Description of Artificial Sequence: Synthetic oligonucleotide
aacagaaugaaaauuuaca

SEQ ID NO: 3178740 - RNA, 19 nt, Artificial Sequence
  Description of Artificial Sequence: Synthetic oligonucleotide
aguacagugucguaaaaca

SEQ ID NO: 3178741 - RNA, 19 nt, Artificial Sequence
  Description of Artificial Sequence: Synthetic oligonucleotide
uauuaaccaacguugaguc

SEQ ID NO: 3178742 - RNA, 19 nt, Artificial Sequence
  Description of Artificial Sequence: Synthetic oligonucleotide
uagcauuauacuaauacau

SEQ ID NO: 3178743 - RNA, 19 nt, Artificial Sequence
  Description of Artificial Sequence: Synthetic oligonucleotide
ugaaccacaaaugcuaugc

SEQ ID NO: 3178744 - RNA, 19 nt, Artificial Sequence
  Description of Artificial Sequence: Synthetic oligonucleotide
uauauauauauauguauuu

SEQ ID NO: 3178745 - RNA, 19 nt, Artificial Sequence
  Description of Artificial Sequence: Synthetic oligonucleotide
uaauacuuagcauuauacu

SEQ ID NO: 3178746 - RNA, 19 nt, Artificial Sequence
  Description of Artificial Sequence: Synthetic oligonucleotide
uuaaguguacaaguaaggc

SEQ ID NO: 3178747 - RNA, 19 nt, Artificial Sequence
  Description of Artificial Sequence: Synthetic oligonucleotide
uacagugucguaaaacaug

SEQ ID NO: 3178748 - RNA, 19 nt, Artificial Sequence
  Description of Artificial Sequence: Synthetic oligonucleotide
uguagguauuuuaauauau

SEQ ID NO: 3178749 - RNA, 19 nt, Artificial Sequence
  Description of Artificial Sequence: Synthetic oligonucleotide
aaugcuaauugacaugcaa

SEQ ID NO: 3178750 - RNA, 19 nt, Artificial Sequence
  Description of Artificial Sequence: Synthetic oligonucleotide
acagaaugaaaauuuacaa

SEQ ID NO: 3178751 - RNA, 19 nt, Artificial Sequence
  Description of Artificial Sequence: Synthetic oligonucleotide
cuaauugacaugcaaaaca

SEQ ID NO: 3178752 - RNA, 19 nt, Artificial Sequence
  Description of Artificial Sequence: Synthetic oligonucleotide
acagacaggauccuaagca

SEQ ID NO: 3178753 - RNA, 19 nt, Artificial Sequence
  Description of Artificial Sequence: Synthetic oligonucleotide
uacuagagucaguuuaugg

SEQ ID NO: 3178754 - RNA, 19 nt, Artificial Sequence
  Description of Artificial Sequence: Synthetic oligonucleotide
ucacauauacuuagcaugu

SEQ ID NO: 3178755 - RNA, 19 nt, Artificial Sequence
  Description of Artificial Sequence: Synthetic oligonucleotide
ucucucaugacggacgugg

SEQ ID NO: 3178756 - RNA, 19 nt, Artificial Sequence
  Description of Artificial Sequence: Synthetic oligonucleotide
ugauuuccacccaaaauac

SEQ ID NO: 3178757 - RNA, 19 nt, Artificial Sequence
  Description of Artificial Sequence: Synthetic oligonucleotide
uaaacaaaacuauggagua

SEQ ID NO: 3178758 - RNA, 19 nt, Artificial Sequence
  Description of Artificial Sequence: Synthetic oligonucleotide
caaguaaggcacaagauca

SEQ ID NO: 3178759 - RNA, 19 nt, Artificial Sequence
  Description of Artificial Sequence: Synthetic oligonucleotide
uucuagacaagagacaaga

SEQ ID NO: 3178760 - RNA, 19 nt, Artificial Sequence
  Description of Artificial Sequence: Synthetic oligonucleotide
aaaacucacacacaaccuu

SEQ ID NO: 3178761 - RNA, 19 nt, Artificial Sequence
  Description of Artificial Sequence: Synthetic oligonucleotide
auauauauauauauauaug

SEQ ID NO: 3178762 - RNA, 19 nt, Artificial Sequence
  Description of Artificial Sequence: Synthetic oligonucleotide
uucuaaugccagcagcagg

SEQ ID NO: 3178763 - RNA, 19 nt, Artificial Sequence
  Description of Artificial Sequence: Synthetic oligonucleotide
uagguauuuuaauauauau

SEQ ID NO: 3178764 - RNA, 19 nt, Artificial Sequence
  Description of Artificial Sequence: Synthetic oligonucleotide
auuauaaauguuuuacaua

SEQ ID NO: 3178765 - RNA, 19 nt, Artificial Sequence
  Description of Artificial Sequence: Synthetic oligonucleotide
ugcacgacuauuaaccaac

SEQ ID NO: 3178766 - RNA, 19 nt, Artificial Sequence
  Description of Artificial Sequence: Synthetic oligonucleotide
uaugcuacaaguucuuaaa

SEQ ID NO: 3178767 - RNA, 19 nt, Artificial Sequence
  Description of Artificial Sequence: Synthetic oligonucleotide
uauuugaagaggcugccaa

SEQ ID NO: 3178768 - RNA, 19 nt, Artificial Sequence
  Description of Artificial Sequence: Synthetic oligonucleotide
guugcuuuuggaacaaugg

SEQ ID NO: 3178769 - RNA, 19 nt, Artificial Sequence
  Description of Artificial Sequence: Synthetic oligonucleotide
uauaccauguaugaacaca

SEQ ID NO: 3178770 - RNA, 19 nt, Artificial Sequence
  Description of Artificial Sequence: Synthetic oligonucleotide
auuuuaaguguacaaguaa

SEQ ID NO: 3178771 - RNA, 19 nt, Artificial Sequence
  Description of Artificial Sequence: Synthetic oligonucleotide
acauaaugcuaauugacau

SEQ ID NO: 3178772 - RNA, 19 nt, Artificial Sequence
  Description of Artificial Sequence: Synthetic oligonucleotide
ugcuaauugacaugcaaaa

SEQ ID NO: 3178773 - RNA, 19 nt, Artificial Sequence
  Description of Artificial Sequence: Synthetic oligonucleotide
cuggaaaacaaaauaguca

SEQ ID NO: 3178774 - RNA, 19 nt, Artificial Sequence
  Description of Artificial Sequence: Synthetic oligonucleotide
uauggccuucuccugaaag

SEQ ID NO: 3178775 - RNA, 19 nt, Artificial Sequence
  Description of Artificial Sequence: Synthetic oligonucleotide
aaccaugcccaucugaaau

SEQ ID NO: 3178776 - RNA, 19 nt, Artificial Sequence
  Description of Artificial Sequence: Synthetic oligonucleotide
ugaacaagauacaaugcuu

SEQ ID NO: 3178777 - RNA, 19 nt, Artificial Sequence
  Description of Artificial Sequence: Synthetic oligonucleotide
agauacaaugcuuucuaga

SEQ ID NO: 3178778 - RNA, 19 nt, Artificial Sequence
  Description of Artificial Sequence: Synthetic oligonucleotide
aacuauggaaccaugccca

SEQ ID NO: 3178779 - RNA, 19 nt, Artificial Sequence
  Description of Artificial Sequence: Synthetic oligonucleotide
uauacuuagcaugugcgcu

SEQ ID NO: 3178780 - RNA, 19 nt, Artificial Sequence
  Description of Artificial Sequence: Synthetic oligonucleotide
caaagcaaccuguguaugg

SEQ ID NO: 3178781 - RNA, 19 nt, Artificial Sequence
  Description of Artificial Sequence: Synthetic oligonucleotide
aauuacaaagggugcugca

SEQ ID NO: 3178782 - RNA, 19 nt, Artificial Sequence
  Description of Artificial Sequence: Synthetic oligonucleotide
cugaaaggagaacugcacg

SEQ ID NO: 3178783 - RNA, 19 nt, Artificial Sequence
  Description of Artificial Sequence: Synthetic oligonucleotide
uuaaccaacguugagucau

SEQ ID NO: 3178784 - RNA, 19 nt, Artificial Sequence
  Description of Artificial Sequence: Synthetic oligonucleotide
uuuaugaaggaccacaagg

SEQ ID NO: 3178785 - RNA, 19 nt, Artificial Sequence
  Description of Artificial Sequence: Synthetic oligonucleotide
aauuggaaaccccagacgg

SEQ ID NO: 3178786 - RNA, 19 nt, Artificial Sequence
  Description of Artificial Sequence: Synthetic oligonucleotide
uccagugucagcaagaagg

SEQ ID NO: 3178787 - RNA, 19 nt, Artificial Sequence
  Description of Artificial Sequence: Synthetic oligonucleotide
acuaacacaaaacagucgg

SEQ ID NO: 3178788 - RNA, 19 nt, Artificial Sequence
  Description of Artificial Sequence: Synthetic oligonucleotide
aaugaugcggaccauguag

SEQ ID NO: 3178789 - RNA, 19 nt, Artificial Sequence
  Description of Artificial Sequence: Synthetic oligonucleotide
acuugcaugucacacaggc

SEQ ID NO: 3178790 - RNA, 19 nt, Artificial Sequence
  Description of Artificial Sequence: Synthetic oligonucleotide
uuucguuucaccuugggug

SEQ ID NO: 3178791 - RNA, 19 nt, Artificial Sequence
  Description of Artificial Sequence: Synthetic oligonucleotide
uuaugaaggaccacaaggc

SEQ ID NO: 3178792 - RNA, 19 nt, Artificial Sequence
  Description of Artificial Sequence: Synthetic oligonucleotide
aaaacagucggugaacuuc

SEQ ID NO: 3178793 - RNA, 19 nt, Artificial Sequence
  Description of Artificial Sequence: Synthetic oligonucleotide
aguccagaaacacuaacac

SEQ ID NO: 3178794 - RNA, 19 nt, Artificial Sequence
  Description of Artificial Sequence: Synthetic oligonucleotide
gaaacacuaacacaaaaca

SEQ ID NO: 3178795 - RNA, 19 nt, Artificial Sequence
  Description of Artificial Sequence: Synthetic oligonucleotide
ucugaaaauggucugagau

SEQ ID NO: 3178796 - RNA, 19 nt, Artificial Sequence
  Description of Artificial Sequence: Synthetic oligonucleotide
auucagcacaaccagguac

SEQ ID NO: 3178797 - RNA, 19 nt, Artificial Sequence
  Description of Artificial Sequence: Synthetic oligonucleotide
augcggaccauguagaagg

SEQ ID NO: 3178798 - RNA, 19 nt, Artificial Sequence
  Description of Artificial Sequence: Synthetic oligonucleotide
uuggaaaugaugcggacca

SEQ ID NO: 3178799 - RNA, 19 nt, Artificial Sequence
  Description of Artificial Sequence: Synthetic oligonucleotide
agcacaaccagguacuggg

SEQ ID NO: 3178800 - RNA, 19 nt, Artificial Sequence
  Description of Artificial Sequence: Synthetic oligonucleotide
aaaccccagacggagaacc

SEQ ID NO: 3178801 - RNA, 19 nt, Artificial Sequence
  Description of Artificial Sequence: Synthetic oligonucleotide
acagcaacgaugaugauag

SEQ ID NO: 3178802 - RNA, 19 nt, Artificial Sequence
  Description of Artificial Sequence: Synthetic oligonucleotide
ugaugauagagguagcgug

SEQ ID NO: 3178803 - RNA, 19 nt, Artificial Sequence
  Description of Artificial Sequence: Synthetic oligonucleotide
aauggucugagaugucagg

SEQ ID NO: 3178804 - RNA, 19 nt, Artificial Sequence
  Description of Artificial Sequence: Synthetic oligonucleotide
acgaugaugauagagguag

SEQ ID NO: 3178805 - RNA, 19 nt, Artificial Sequence
  Description of Artificial Sequence: Synthetic oligonucleotide
gauagagguagcgugacag

SEQ ID NO: 3178806 - RNA, 19 nt, Artificial Sequence
  Description of Artificial Sequence: Synthetic oligonucleotide
aacacaaaacagucgguga

SEQ ID NO: 3178807 - RNA, 19 nt, Artificial Sequence
  Description of Artificial Sequence: Synthetic oligonucleotide
ugauucagcacaaccaggu

SEQ ID NO: 3178808 - RNA, 19 nt, Artificial Sequence
  Description of Artificial Sequence: Synthetic oligonucleotide
gaugaugauagagguagcg

SEQ ID NO: 3178809 - RNA, 19 nt, Artificial Sequence
  Description of Artificial Sequence: Synthetic oligonucleotide
uuacuuugcacacggugag

SEQ ID NO: 3178810 - RNA, 19 nt, Artificial Sequence
  Description of Artificial Sequence: Synthetic oligonucleotide
uucucauaccugaugagga

SEQ ID NO: 3178811 - RNA, 19 nt, Artificial Sequence
  Description of Artificial Sequence: Synthetic oligonucleotide
cagugguuuaugaaggacc

SEQ ID NO: 3178812 - RNA, 19 nt, Artificial Sequence
  Description of Artificial Sequence: Synthetic oligonucleotide
ugaacggccugacaccagg

SEQ ID NO: 3178813 - RNA, 19 nt, Artificial Sequence
  Description of Artificial Sequence: Synthetic oligonucleotide
uucagcacaaccagguacu

SEQ ID NO: 3178814 - RNA, 19 nt, Artificial Sequence
  Description of Artificial Sequence: Synthetic oligonucleotide
auagagguagcgugacagc

SEQ ID NO: 3178815 - RNA, 19 nt, Artificial Sequence
  Description of Artificial Sequence: Synthetic oligonucleotide
cuucugauucagcacaacc

SEQ ID NO: 3178816 - RNA, 19 nt, Artificial Sequence
  Description of Artificial Sequence: Synthetic oligonucleotide
acacuaacacaaaacaguc

SEQ ID NO: 3178817 - RNA, 19 nt, Artificial Sequence
  Description of Artificial Sequence: Synthetic oligonucleotide
acaaccagguacuggguuc

SEQ ID NO: 3178818 - RNA, 19 nt, Artificial Sequence
  Description of Artificial Sequence: Synthetic oligonucleotide
uagagguagcgugacagcg

SEQ ID NO: 3178819 - RNA, 19 nt, Artificial Sequence
  Description of Artificial Sequence: Synthetic oligonucleotide
uuuucguuucaccuugggu

SEQ ID NO: 3178820 - RNA, 19 nt, Artificial Sequence
  Description of Artificial Sequence: Synthetic oligonucleotide
caagugggaguccagaaac

SEQ ID NO: 3178821 - RNA, 19 nt, Artificial Sequence
  Description of Artificial Sequence: Synthetic oligonucleotide
cuucucauaccugaugagg

SEQ ID NO: 3178822 - RNA, 19 nt, Artificial Sequence
  Description of Artificial Sequence: Synthetic oligonucleotide
ucucggaacaccaccguca

SEQ ID NO: 3178823 - RNA, 19 nt, Artificial Sequence
  Description of Artificial Sequence: Synthetic oligonucleotide
ugggaguccagaaacacua

SEQ ID NO: 3178824 - RNA, 19 nt, Artificial Sequence
  Description of Artificial Sequence: Synthetic oligonucleotide
caauuggaaaccccagacg

SEQ ID NO: 3178825 - RNA, 19 nt, Artificial Sequence
  Description of Artificial Sequence: Synthetic oligonucleotide
gacgucuuucccaaguggg

SEQ ID NO: 3178826 - RNA, 19 nt, Artificial Sequence
  Description of Artificial Sequence: Synthetic oligonucleotide
cuuacuuugcacacgguga

SEQ ID NO: 3178827 - RNA, 19 nt, Artificial Sequence
  Description of Artificial Sequence: Synthetic oligonucleotide
ucauaccugaugaggagcu

SEQ ID NO: 3178828 - RNA, 19 nt, Artificial Sequence
  Description of Artificial Sequence: Synthetic oligonucleotide
aagaagggugcccuguagu

SEQ ID NO: 3178829 - RNA, 19 nt, Artificial Sequence
  Description of Artificial Sequence: Synthetic oligonucleotide
aacaccaccgucagagacg

SEQ ID NO: 3178830 - RNA, 19 nt, Artificial Sequence
  Description of Artificial Sequence: Synthetic oligonucleotide
ucucauaccugaugaggag

SEQ ID NO: 3178831 - RNA, 19 nt, Artificial Sequence
  Description of Artificial Sequence: Synthetic oligonucleotide
cacuaacacaaaacagucg

SEQ ID NO: 3178832 - RNA, 19 nt, Artificial Sequence
  Description of Artificial Sequence: Synthetic oligonucleotide
ugcccuguaguccaggggu

SEQ ID NO: 3178833 - RNA, 19 nt, Artificial Sequence
  Description of Artificial Sequence: Synthetic oligonucleotide
ugugccaauuggaaacccc

SEQ ID NO: 3178834 - RNA, 19 nt, Artificial Sequence
  Description of Artificial Sequence: Synthetic oligonucleotide
agcaacgaugaugauagag

SEQ ID NO: 3178835 - RNA, 19 nt, Artificial Sequence
  Description of Artificial Sequence: Synthetic oligonucleotide
cuagaugaggcugaacggc

SEQ ID NO: 3178836 - RNA, 19 nt, Artificial Sequence
  Description of Artificial Sequence: Synthetic oligonucleotide
acuuugcacacggugaggg

SEQ ID NO: 3178837 - RNA, 19 nt, Artificial Sequence
  Description of Artificial Sequence: Synthetic oligonucleotide
cuccuuacuuugcacacgg

SEQ ID NO: 3178838 - RNA, 19 nt, Artificial Sequence
  Description of Artificial Sequence: Synthetic oligonucleotide
gaugcgaggcuagaugagg

SEQ ID NO: 3178839 - RNA, 19 nt, Artificial Sequence
  Description of Artificial Sequence: Synthetic oligonucleotide
agggguagcuucucauacc

SEQ ID NO: 3178840 - RNA, 19 nt, Artificial Sequence
  Description of Artificial Sequence: Synthetic oligonucleotide
agacgucuuucccaagugg

SEQ ID NO: 3178841 - RNA, 19 nt, Artificial Sequence
  Description of Artificial Sequence: Synthetic oligonucleotide
agacggagaaccaugcacg

SEQ ID NO: 3178842 - RNA, 19 nt, Artificial Sequence
  Description of Artificial Sequence: Synthetic oligonucleotide
aacggccugacaccagggg

SEQ ID NO: 3178843 - RNA, 19 nt, Artificial Sequence
  Description of Artificial Sequence: Synthetic oligonucleotide
acaccaggggcaauggucc

SEQ ID NO: 3178844 - RNA, 19 nt, Artificial Sequence
  Description of Artificial Sequence: Synthetic oligonucleotide
acggccugacaccaggggc

SEQ ID NO: 3178845 - RNA, 19 nt, Artificial Sequence
  Description of Artificial Sequence: Synthetic oligonucleotide
aaauggucugagaugucag

SEQ ID NO: 3178846 - RNA, 19 nt, Artificial Sequence
  Description of Artificial Sequence: Synthetic oligonucleotide
aagggugcccuguagucca

SEQ ID NO: 3178847 - RNA, 19 nt, Artificial Sequence
  Description of Artificial Sequence: Synthetic oligonucleotide
uucguuucaccuugggugu

SEQ ID NO: 3178848 - RNA, 19 nt, Artificial Sequence
  Description of Artificial Sequence: Synthetic oligonucleotide
agugggaguccagaaacac

SEQ ID NO: 3178849 - RNA, 19 nt, Artificial Sequence
  Description of Artificial Sequence: Synthetic oligonucleotide
gacggagaaccaugcacgg

SEQ ID NO: 3178850 - RNA, 19 nt, Artificial Sequence
  Description of Artificial Sequence: Synthetic oligonucleotide
ugaggagcuuguccagugg

SEQ ID NO: 3178851 - RNA, 19 nt, Artificial Sequence
  Description of Artificial Sequence: Synthetic oligonucleotide
cugauucagcacaaccagg

SEQ ID NO: 3178852 - RNA, 19 nt, Artificial Sequence
  Description of Artificial Sequence: Synthetic oligonucleotide
ugucacacaggcaccgagc

SEQ ID NO: 3178853 - RNA, 19 nt, Artificial Sequence
  Description of Artificial Sequence: Synthetic oligonucleotide
ugcaggucugacacaaucu

SEQ ID NO: 3178854 - RNA, 19 nt, Artificial Sequence
  Description of Artificial Sequence: Synthetic oligonucleotide
ucagagacgucuuucccaa

SEQ ID NO: 3178855 - RNA, 19 nt, Artificial Sequence
  Description of Artificial Sequence: Synthetic oligonucleotide
ccauguagaaggaggaugg

SEQ ID NO: 3178856 - RNA, 19 nt, Artificial Sequence
  Description of Artificial Sequence: Synthetic oligonucleotide
gaacaccaccgucagagac

SEQ ID NO: 3178857 - RNA, 19 nt, Artificial Sequence
  Description of Artificial Sequence: Synthetic oligonucleotide
gucugacacaaucuugugc

SEQ ID NO: 3178858 - RNA, 19 nt, Artificial Sequence
  Description of Artificial Sequence: Synthetic oligonucleotide
acacaaaacagucggugaa

SEQ ID NO: 3178859 - RNA, 19 nt, Artificial Sequence
  Description of Artificial Sequence: Synthetic oligonucleotide
cagacggagaaccaugcac

SEQ ID NO: 3178860 - RNA, 19 nt, Artificial Sequence
  Description of Artificial Sequence: Synthetic oligonucleotide
agcccuuuucguuucaccu

SEQ ID NO: 3178861 - RNA, 19 nt, Artificial Sequence
  Description of Artificial Sequence: Synthetic oligonucleotide
agagacgucuuucccaagu

SEQ ID NO: 3178862 - RNA, 19 nt, Artificial Sequence
  Description of Artificial Sequence: Synthetic oligonucleotide
accauguagaaggaggaug

SEQ ID NO: 3178863 - RNA, 19 nt, Artificial Sequence
  Description of Artificial Sequence: Synthetic oligonucleotide
guccagugguuuaugaagg

SEQ ID NO: 3178864 - RNA, 19 nt, Artificial Sequence
  Description of Artificial Sequence: Synthetic oligonucleotide
aaacagucggugaacuucu

SEQ ID NO: 3178865 - RNA, 19 nt, Artificial Sequence
  Description of Artificial Sequence: Synthetic oligonucleotide
cacggugagggaaacgaag

SEQ ID NO: 3178866 - RNA, 19 nt, Artificial Sequence
  Description of Artificial Sequence: Synthetic oligonucleotide
gaugauagagguagcguga

SEQ ID NO: 3178867 - RNA, 19 nt, Artificial Sequence
  Description of Artificial Sequence: Synthetic oligonucleotide
ucagcaagaagggugcccu

SEQ ID NO: 3178868 - RNA, 19 nt, Artificial Sequence
  Description of Artificial Sequence: Synthetic oligonucleotide
augauagagguagcgugac

SEQ ID NO: 3178869 - RNA, 19 nt, Artificial Sequence
  Description of Artificial Sequence: Synthetic oligonucleotide
agcgaugcgaggcuagaug

SEQ ID NO: 3178870 - RNA, 19 nt, Artificial Sequence
  Description of Artificial Sequence: Synthetic oligonucleotide
uggggcugcacugggaagg

SEQ ID NO: 3178871 - RNA, 19 nt, Artificial Sequence
  Description of Artificial Sequence: Synthetic oligonucleotide
ggacuugcaugucacacag

SEQ ID NO: 3178872 - RNA, 19 nt, Artificial Sequence
  Description of Artificial Sequence: Synthetic oligonucleotide
gugagggaaacgaaggcgc

SEQ ID NO: 3178873 - RNA, 19 nt, Artificial Sequence
  Description of Artificial Sequence: Synthetic oligonucleotide
uuggagggagaguugcccc

SEQ ID NO: 3178874 - RNA, 19 nt, Artificial Sequence
  Description of Artificial Sequence: Synthetic oligonucleotide
gcuagaugaggcugaacgg

SEQ ID NO: 3178875 - RNA, 19 nt, Artificial Sequence
  Description of Artificial Sequence: Synthetic oligonucleotide
agugguuuaugaaggacca

SEQ ID NO: 3178876 - RNA, 19 nt, Artificial Sequence
  Description of Artificial Sequence: Synthetic oligonucleotide
ggucuuggaaaugaugcgg

SEQ ID NO: 3178877 - RNA, 19 nt, Artificial Sequence
  Description of Artificial Sequence: Synthetic oligonucleotide
agacagggccugcuguggc

SEQ ID NO: 3178878 - RNA, 19 nt, Artificial Sequence
  Description of Artificial Sequence: Synthetic oligonucleotide
uagcuucucauaccugaug

SEQ ID NO: 3178879 - RNA, 19 nt, Artificial Sequence
  Description of Artificial Sequence: Synthetic oligonucleotide
uucaccuugggugucggcu

SEQ ID NO: 3178880 - RNA, 19 nt, Artificial Sequence
  Description of Artificial Sequence: Synthetic oligonucleotide
ucagacagggccugcugug

SEQ ID NO: 3178881 - RNA, 19 nt, Artificial Sequence
  Description of Artificial Sequence: Synthetic oligonucleotide
gacuuggagggagaguugc

SEQ ID NO: 3178882 - RNA, 19 nt, Artificial Sequence
  Description of Artificial Sequence: Synthetic oligonucleotide
acaaucuugugccgggccu

SEQ ID NO: 3178883 - RNA, 19 nt, Artificial Sequence
  Description of Artificial Sequence: Synthetic oligonucleotide
uuugcacacggugagggaa

SEQ ID NO: 3178884 - RNA, 19 nt, Artificial Sequence
  Description of Artificial Sequence: Synthetic oligonucleotide
aauauauuugcucgaugcc

SEQ ID NO: 3178885 - RNA, 19 nt, Artificial Sequence
  Description of Artificial Sequence: Synthetic oligonucleotide
acagccaucacauuuaagg

SEQ ID NO: 3178886 - RNA, 19 nt, Artificial Sequence
  Description of Artificial Sequence: Synthetic oligonucleotide
agaauaacuaacaagaauc

SEQ ID NO: 3178887 - RNA, 19 nt, Artificial Sequence
  Description of Artificial Sequence: Synthetic oligonucleotide
auuaucagcuuccaggagc

SEQ ID NO: 3178888 - RNA, 19 nt, Artificial Sequence
  Description of Artificial Sequence: Synthetic oligonucleotide
aaaaccauagccuuaaauu

SEQ ID NO: 3178889 - RNA, 19 nt, Artificial Sequence
  Description of Artificial Sequence: Synthetic oligonucleotide
aaaacugguucaccugucc

SEQ ID NO: 3178890 - RNA, 19 nt, Artificial Sequence
  Description of Artificial Sequence: Synthetic oligonucleotide
aguaaugguguuucgaguc

SEQ ID NO: 3178891 - RNA, 19 nt, Artificial Sequence
  Description of Artificial Sequence: Synthetic oligonucleotide
ucggauaugauuuagugau

SEQ ID NO: 3178892 - RNA, 19 nt, Artificial Sequence
  Description of Artificial Sequence: Synthetic oligonucleotide
aguaguuccauaauggcac

SEQ ID NO: 3178893 - RNA, 19 nt, Artificial Sequence
  Description of Artificial Sequence: Synthetic oligonucleotide
uuugcacuaaauauauuug

SEQ ID NO: 3178894 - RNA, 19 nt, Artificial Sequence
  Description of Artificial Sequence: Synthetic oligonucleotide
auauauuugcucgaugccc

SEQ ID NO: 3178895 - RNA, 19 nt, Artificial Sequence
  Description of Artificial Sequence: Synthetic oligonucleotide
ucgauauuaguauagaaua

SEQ ID NO: 3178896 - RNA, 19 nt, Artificial Sequence
  Description of Artificial Sequence: Synthetic oligonucleotide
gcaacaaacaugcacaugg

SEQ ID NO: 3178897 - RNA, 19 nt, Artificial Sequence
  Description of Artificial Sequence: Synthetic oligonucleotide
uacaaauuucagaacaucu

SEQ ID NO: 3178898 - RNA, 19 nt, Artificial Sequence
  Description of Artificial Sequence: Synthetic oligonucleotide
aaacugguucaccuguccc

SEQ ID NO: 3178899 - RNA, 19 nt, Artificial Sequence
  Description of Artificial Sequence: Synthetic oligonucleotide
auuauuguuaucugcucuc

SEQ ID NO: 3178900 - RNA, 19 nt, Artificial Sequence
  Description of Artificial Sequence: Synthetic oligonucleotide
auuacuaagaugagaaggg

SEQ ID NO: 3178901 - RNA, 19 nt, Artificial Sequence
  Description of Artificial Sequence: Synthetic oligonucleotide
auaaguaguuccauaaugg

SEQ ID NO: 3178902 - RNA, 19 nt, Artificial Sequence
  Description of Artificial Sequence: Synthetic oligonucleotide
auaaaauauauucuccagu

SEQ ID NO: 3178903 - RNA, 19 nt, Artificial Sequence
  Description of Artificial Sequence: Synthetic oligonucleotide
uugugcuauaucuaucugg

SEQ ID NO: 3178904 - RNA, 19 nt, Artificial Sequence
  Description of Artificial Sequence: Synthetic oligonucleotide
uauggccacacaaaguuag

SEQ ID NO: 3178905 - RNA, 19 nt, Artificial Sequence
  Description of Artificial Sequence: Synthetic oligonucleotide
auguguaagggucauuugg

SEQ ID NO: 3178906 - RNA, 19 nt, Artificial Sequence
  Description of Artificial Sequence: Synthetic oligonucleotide
aauaacuaacaagaaucuc

SEQ ID NO: 3178907 - RNA, 19 nt, Artificial Sequence
  Description of Artificial Sequence: Synthetic oligonucleotide
gauauuaguauagaauaug

SEQ ID NO: 3178908 - RNA, 19 nt, Artificial Sequence
  Description of Artificial Sequence: Synthetic oligonucleotide
aucuaucugguuuugagug

SEQ ID NO: 3178909 - RNA, 19 nt, Artificial Sequence
  Description of Artificial Sequence: Synthetic oligonucleotide
auuuauuugaaccaacauu

SEQ ID NO: 3178910 - RNA, 19 nt, Artificial Sequence
  Description of Artificial Sequence: Synthetic oligonucleotide
uaugauuuagugaugccaa

SEQ ID NO: 3178911 - RNA, 19 nt, Artificial Sequence
  Description of Artificial Sequence: Synthetic oligonucleotide
agaacaucuaagugcuugc

SEQ ID NO: 3178912 - RNA, 19 nt, Artificial Sequence
  Description of Artificial Sequence: Synthetic oligonucleotide
cuaacaagaaucucuuggc

SEQ ID NO: 3178913 - RNA, 19 nt, Artificial Sequence
  Description of Artificial Sequence: Synthetic oligonucleotide
auaacuaacaagaaucucu

SEQ ID NO: 3178914 - RNA, 19 nt, Artificial Sequence
  Description of Artificial Sequence: Synthetic oligonucleotide
aauuagaaagcaacaaaca

SEQ ID NO: 3178915 - RNA, 19 nt, Artificial Sequence
  Description of Artificial Sequence: Synthetic oligonucleotide
gucucaagcgcuuaacugg

SEQ ID NO: 3178916 - RNA, 19 nt, Artificial Sequence
  Description of Artificial Sequence: Synthetic oligonucleotide
uugcacuaaauauauuugc

SEQ ID NO: 3178917 - RNA, 19 nt, Artificial Sequence
  Description of Artificial Sequence: Synthetic oligonucleotide
ugcacuaaaguucuguaaa

SEQ ID NO: 3178918 - RNA, 19 nt, Artificial Sequence
  Description of Artificial Sequence: Synthetic oligonucleotide
uauuaacacagccaucaca

SEQ ID NO: 3178919 - RNA, 19 nt, Artificial Sequence
  Description of Artificial Sequence: Synthetic oligonucleotide
cauaaguaguuccauaaug

SEQ ID NO: 3178920 - RNA, 19 nt, Artificial Sequence
  Description of Artificial Sequence: Synthetic oligonucleotide
aaguucucgugcuguaucg

SEQ ID NO: 3178921 - RNA, 19 nt, Artificial Sequence
  Description of Artificial Sequence: Synthetic oligonucleotide
ucauaaucucauaaguagu

SEQ ID NO: 3178922 - RNA, 19 nt, Artificial Sequence
  Description of Artificial Sequence: Synthetic oligonucleotide
acaguaaugguguuucgag

SEQ ID NO: 3178923 - RNA, 19 nt, Artificial Sequence
  Description of Artificial Sequence: Synthetic oligonucleotide
uaguauagaauaugacucc

SEQ ID NO: 3178924 - RNA, 19 nt, Artificial Sequence
  Description of Artificial Sequence: Synthetic oligonucleotide
uauauuugcucgaugcccu

SEQ ID NO: 3178925 - RNA, 19 nt, Artificial Sequence
  Description of Artificial Sequence: Synthetic oligonucleotide
caacagauuguauuaacac

SEQ ID NO: 3178926 - RNA, 19 nt, Artificial Sequence
  Description of Artificial Sequence: Synthetic oligonucleotide
cuaucagugucaaaccacc

SEQ ID NO: 3178927 - RNA, 19 nt, Artificial Sequence
  Description of Artificial Sequence: Synthetic oligonucleotide
uccagagcaagacacaauc

SEQ ID NO: 3178928 - RNA, 19 nt, Artificial Sequence
  Description of Artificial Sequence: Synthetic oligonucleotide
ucugauaguucuucaggag

SEQ ID NO: 3178929 - RNA, 19 nt, Artificial Sequence
  Description of Artificial Sequence: Synthetic oligonucleotide
uguguaagggucauuuggu

SEQ ID NO: 3178930 - RNA, 19 nt, Artificial Sequence
  Description of Artificial Sequence: Synthetic oligonucleotide
uugcauagagcucugugga

SEQ ID NO: 3178931 - RNA, 19 nt, Artificial Sequence
  Description of Artificial Sequence: Synthetic oligonucleotide
cugcuuaucaucuguacac

SEQ ID NO: 3178932 - RNA, 19 nt, Artificial Sequence
  Description of Artificial Sequence: Synthetic oligonucleotide
auccgucggucauaaaucc

SEQ ID NO: 3178933 - RNA, 19 nt, Artificial Sequence
  Description of Artificial Sequence: Synthetic oligonucleotide
ugucccaagggcuaucaag

SEQ ID NO: 3178934 - RNA, 19 nt, Artificial Sequence
  Description of Artificial Sequence: Synthetic oligonucleotide
agaugagaagggauaaagc

SEQ ID NO: 3178935 - RNA, 19 nt, Artificial Sequence
  Description of Artificial Sequence: Synthetic oligonucleotide
ucggucauaaauccguacu

SEQ ID NO: 3178936 - RNA, 19 nt, Artificial Sequence
  Description of Artificial Sequence: Synthetic oligonucleotide
uccauaauggcacguaaau

SEQ ID NO: 3178937 - RNA, 19 nt, Artificial Sequence
  Description of Artificial Sequence: Synthetic oligonucleotide
uacggauuacuaauuacaa

SEQ ID NO: 3178938 - RNA, 19 nt, Artificial Sequence
  Description of Artificial Sequence: Synthetic oligonucleotide
auuaacacagccaucacau

SEQ ID NO: 3178939 - RNA, 19 nt, Artificial Sequence
  Description of Artificial Sequence: Synthetic oligonucleotide
uguacggauuacuaauuac

SEQ ID NO: 3178940 - RNA, 19 nt, Artificial Sequence
  Description of Artificial Sequence: Synthetic oligonucleotide
ugucauuccaacagauugu

SEQ ID NO: 3178941 - RNA, 19 nt, Artificial Sequence
  Description of Artificial Sequence: Synthetic oligonucleotide
gauaugauuuagugaugcc

SEQ ID NO: 3178942 - RNA, 19 nt, Artificial Sequence
  Description of Artificial Sequence: Synthetic oligonucleotide
ucuuuuauucauuguccca

SEQ ID NO: 3178943 - RNA, 19 nt, Artificial Sequence
  Description of Artificial Sequence: Synthetic oligonucleotide
ucaagacuuggauuacucc

SEQ ID NO: 3178944 - RNA, 19 nt, Artificial Sequence
  Description of Artificial Sequence: Synthetic oligonucleotide
auaaucucauaaguaguuc

SEQ ID NO: 3178945 - RNA, 19 nt, Artificial Sequence
  Description of Artificial Sequence: Synthetic oligonucleotide
auuccaguaguuccucgac

SEQ ID NO: 3178946 - RNA, 19 nt, Artificial Sequence
  Description of Artificial Sequence: Synthetic oligonucleotide
ugcucgaugcccugaacgg

SEQ ID NO: 3178947 - RNA, 19 nt, Artificial Sequence
  Description of Artificial Sequence: Synthetic oligonucleotide
uaacuaacaagaaucucuu

SEQ ID NO: 3178948 - RNA, 19 nt, Artificial Sequence
  Description of Artificial Sequence: Synthetic oligonucleotide
uugaccacgugauuaucag

SEQ ID NO: 3178949 - RNA, 19 nt, Artificial Sequence
  Description of Artificial Sequence: Synthetic oligonucleotide
gucauaaauccguacugag

SEQ ID NO: 3178950 - RNA, 19 nt, Artificial Sequence
  Description of Artificial Sequence: Synthetic oligonucleotide
uaucuaucugguuuugagu

SEQ ID NO: 3178951 - RNA, 19 nt, Artificial Sequence
  Description of Artificial Sequence: Synthetic oligonucleotide
ugaggcugcaggcaguuga

SEQ ID NO: 3178952 - RNA, 19 nt, Artificial Sequence
  Description of Artificial Sequence: Synthetic oligonucleotide
uuuaaucuuuggauaaauu

SEQ ID NO: 3178953 - RNA, 19 nt, Artificial Sequence
  Description of Artificial Sequence: Synthetic oligonucleotide
aaguaguuccauaauggca

SEQ ID NO: 3178954 - RNA, 19 nt, Artificial Sequence
  Description of Artificial Sequence: Synthetic oligonucleotide
gguguuucgagucucuucc

SEQ ID NO: 3178955 - RNA, 19 nt, Artificial Sequence
  Description of Artificial Sequence: Synthetic oligonucleotide
acggauuacuaauuacaag

SEQ ID NO: 3178956 - RNA, 19 nt, Artificial Sequence
  Description of Artificial Sequence: Synthetic oligonucleotide
uuuuaaguucucgugcugu

SEQ ID NO: 3178957 - RNA, 19 nt, Artificial Sequence
  Description of Artificial Sequence: Synthetic oligonucleotide
aacuaacaagaaucucuug

SEQ ID NO: 3178958 - RNA, 19 nt, Artificial Sequence
  Description of Artificial Sequence: Synthetic oligonucleotide
uguaacacagagacaucac

SEQ ID NO: 3178959 - RNA, 19 nt, Artificial Sequence
  Description of Artificial Sequence: Synthetic oligonucleotide
uacuaagaugagaagggau

SEQ ID NO: 3178960 - RNA, 19 nt, Artificial Sequence
  Description of Artificial Sequence: Synthetic oligonucleotide
uaaaugucguauacaaauu

SEQ ID NO: 3178961 - RNA, 19 nt, Artificial Sequence
  Description of Artificial Sequence: Synthetic oligonucleotide
aacuaaccaacuucuuuaa

SEQ ID NO: 3178962 - RNA, 19 nt, Artificial Sequence
  Description of Artificial Sequence: Synthetic oligonucleotide
ugccagaugaggcuagaug

SEQ ID NO: 3178963 - RNA, 19 nt, Artificial Sequence
  Description of Artificial Sequence: Synthetic oligonucleotide
ugauuuagugaugccaaca

SEQ ID NO: 3178964 - RNA, 19 nt, Artificial Sequence
  Description of Artificial Sequence: Synthetic oligonucleotide
ugucguaacucuucucgcc

SEQ ID NO: 3178965 - RNA, 19 nt, Artificial Sequence
  Description of Artificial Sequence: Synthetic oligonucleotide
uuagcaccccagaaauuag

SEQ ID NO: 3178966 - RNA, 19 nt, Artificial Sequence
  Description of Artificial Sequence: Synthetic oligonucleotide
ugcuguacggauuacuaau

SEQ ID NO: 3178967 - RNA, 19 nt, Artificial Sequence
  Description of Artificial Sequence: Synthetic oligonucleotide
ugccgaucccaaaugaaga

SEQ ID NO: 3178968 - RNA, 19 nt, Artificial Sequence
  Description of Artificial Sequence: Synthetic oligonucleotide
gauauggccacacaaaguu

SEQ ID NO: 3178969 - RNA, 19 nt, Artificial Sequence
  Description of Artificial Sequence: Synthetic oligonucleotide
uccucgaccugcauaauuc

SEQ ID NO: 3178970 - RNA, 19 nt, Artificial Sequence
  Description of Artificial Sequence: Synthetic oligonucleotide
ucuuguuucgcugucuccu

SEQ ID NO: 3178971 - RNA, 19 nt, Artificial Sequence
  Description of Artificial Sequence: Synthetic oligonucleotide
uuguugucaaaaccuuucu

SEQ ID NO: 3178972 - RNA, 19 nt, Artificial Sequence
  Description of Artificial Sequence: Synthetic oligonucleotide
ugcuuaucaucuguacacg

SEQ ID NO: 3178973 - RNA, 19 nt, Artificial Sequence
  Description of Artificial Sequence: Synthetic oligonucleotide
uauuguuaucugcucucca

SEQ ID NO: 3178974 - RNA, 19 nt, Artificial Sequence
  Description of Artificial Sequence: Synthetic oligonucleotide
caaaccaccuaacgguucc

SEQ ID NO: 3178975 - RNA, 19 nt, Artificial Sequence
  Description of Artificial Sequence: Synthetic oligonucleotide
uaaguucucgugcuguauc

SEQ ID NO: 3178976 - RNA, 19 nt, Artificial Sequence
  Description of Artificial Sequence: Synthetic oligonucleotide
ucauaaguaguuccauaau

SEQ ID NO: 3178977 - RNA, 19 nt, Artificial Sequence
  Description of Artificial Sequence: Synthetic oligonucleotide
auuguuaucugcucuccau

SEQ ID NO: 3178978 - RNA, 19 nt, Artificial Sequence
  Description of Artificial Sequence: Synthetic oligonucleotide
ugggucgaauggaugaggc

SEQ ID NO: 3178979 - RNA, 19 nt, Artificial Sequence
  Description of Artificial Sequence: Synthetic oligonucleotide
uaucagauugugcuauauc

SEQ ID NO: 3178980 - RNA, 19 nt, Artificial Sequence
  Description of Artificial Sequence: Synthetic oligonucleotide
uuauuguuaucugcucucc

SEQ ID NO: 3178981 - RNA, 19 nt, Artificial Sequence
  Description of Artificial Sequence: Synthetic oligonucleotide
agcaugaguucauuucgag

SEQ ID NO: 3178982 - RNA, 19 nt, Artificial Sequence
  Description of Artificial Sequence: Synthetic oligonucleotide
cucauaaguaguuccauaa

SEQ ID NO: 3178983 - RNA, 19 nt, Artificial Sequence
  Description of Artificial Sequence: Synthetic oligonucleotide
cagaaggaguuuuaaguuc

SEQ ID NO: 3178984 - RNA, 19 nt, Artificial Sequence
  Description of Artificial Sequence: Synthetic oligonucleotide
aguaacuucaaacucaucc

SEQ ID NO: 3178985 - RNA, 19 nt, Artificial Sequence
  Description of Artificial Sequence: Synthetic oligonucleotide
augaagaguaacuucaaac

SEQ ID NO: 3178986 - RNA, 19 nt, Artificial Sequence
  Description of Artificial Sequence: Synthetic oligonucleotide
aagggauuauuccuuauuc

SEQ ID NO: 3178987 - RNA, 19 nt, Artificial Sequence
  Description of Artificial Sequence: Synthetic oligonucleotide
aacagcagugaguacagac

SEQ ID NO: 3178988 - RNA, 19 nt, Artificial Sequence
  Description of Artificial Sequence: Synthetic oligonucleotide
uuauuccuuauucucauag

SEQ ID NO: 3178989 - RNA, 19 nt, Artificial Sequence
  Description of Artificial Sequence: Synthetic oligonucleotide
uugaugugcucguagaucg

SEQ ID NO: 3178990 - RNA, 19 nt, Artificial Sequence
  Description of Artificial Sequence: Synthetic oligonucleotide
ugaagaguaacuucaaacu

SEQ ID NO: 3178991 - RNA, 19 nt, Artificial Sequence
  Description of Artificial Sequence: Synthetic oligonucleotide
uccaugaagaguaacuuca

SEQ ID NO: 3178992 - RNA, 19 nt, Artificial Sequence
  Description of Artificial Sequence: Synthetic oligonucleotide
gaaaagggcgccuacuacg

SEQ ID NO: 3178993 - RNA, 19 nt, Artificial Sequence
  Description of Artificial Sequence: Synthetic oligonucleotide
uuuauguguuuccauagcu

SEQ ID NO: 3178994 - RNA, 19 nt, Artificial Sequence
  Description of Artificial Sequence: Synthetic oligonucleotide
acaggugacagguggaagc

SEQ ID NO: 3178995 - RNA, 19 nt, Artificial Sequence
  Description of Artificial Sequence: Synthetic oligonucleotide
uacaguugguccaugaaga

SEQ ID NO: 3178996 - RNA, 19 nt, Artificial Sequence
  Description of Artificial Sequence: Synthetic oligonucleotide
aaacucauccucuggcagg

SEQ ID NO: 3178997 - RNA, 19 nt, Artificial Sequence
  Description of Artificial Sequence: Synthetic oligonucleotide
agaagcuagagucuguuug

SEQ ID NO: 3178998 - RNA, 19 nt, Artificial Sequence
  Description of Artificial Sequence: Synthetic oligonucleotide
ucauaguugugcuuuaugu

SEQ ID NO: 3178999 - RNA, 19 nt, Artificial Sequence
  Description of Artificial Sequence: Synthetic oligonucleotide
auaguugugcuuuaugugu

SEQ ID NO: 3179000 - RNA, 19 nt, Artificial Sequence
  Description of Artificial Sequence: Synthetic oligonucleotide
uucaaacucauccucuggc

SEQ ID NO: 3179001 - RNA, 19 nt, Artificial Sequence
  Description of Artificial Sequence: Synthetic oligonucleotide
cacagcagaagcuagaguc

SEQ ID NO: 3179002 - RNA, 19 nt, Artificial Sequence
  Description of Artificial Sequence: Synthetic oligonucleotide
uccuuauucucauaguugu

SEQ ID NO: 3179003 - RNA, 19 nt, Artificial Sequence
  Description of Artificial Sequence: Synthetic oligonucleotide
cuuauucucauaguugugc

SEQ ID NO: 3179004 - RNA, 19 nt, Artificial Sequence
  Description of Artificial Sequence: Synthetic oligonucleotide
uuccuuauucucauaguug

SEQ ID NO: 3179005 - RNA, 19 nt, Artificial Sequence
  Description of Artificial Sequence: Synthetic oligonucleotide
gaagaguaacuucaaacuc

SEQ ID NO: 3179006 - RNA, 19 nt, Artificial Sequence
  Description of Artificial Sequence: Synthetic oligonucleotide
uauguguuuccauagcuuc

SEQ ID NO: 3179007 - RNA, 19 nt, Artificial Sequence
  Description of Artificial Sequence: Synthetic oligonucleotide
aagaguaacuucaaacuca

SEQ ID NO: 3179008 - RNA, 19 nt, Artificial Sequence
  Description of Artificial Sequence: Synthetic oligonucleotide
aagggcgccuacuacgacg

SEQ ID NO: 3179009 - RNA, 19 nt, Artificial Sequence
  Description of Artificial Sequence: Synthetic oligonucleotide
cuagagucuguuuguaggg

SEQ ID NO: 3179010 - RNA, 19 nt, Artificial Sequence
  Description of Artificial Sequence: Synthetic oligonucleotide
aacucauccucuggcaggc

SEQ ID NO: 3179011 - RNA, 19 nt, Artificial Sequence
  Description of Artificial Sequence: Synthetic oligonucleotide
agaaaagggcgccuacuac

SEQ ID NO: 3179012 - RNA, 19 nt, Artificial Sequence
  Description of Artificial Sequence: Synthetic oligonucleotide
cauaguugugcuuuaugug

SEQ ID NO: 3179013 - RNA, 19 nt, Artificial Sequence
  Description of Artificial Sequence: Synthetic oligonucleotide
gaagguggaaguccugcgg

SEQ ID NO: 3179014 - RNA, 19 nt, Artificial Sequence
  Description of Artificial Sequence: Synthetic oligonucleotide
guacaguugguccaugaag

SEQ ID NO: 3179015 - RNA, 19 nt, Artificial Sequence
  Description of Artificial Sequence: Synthetic oligonucleotide
uacuacgacggugagggcg

SEQ ID NO: 3179016 - RNA, 19 nt, Artificial Sequence
  Description of Artificial Sequence: Synthetic oligonucleotide
uugcuuguacaguuggucc

SEQ ID NO: 3179017 - RNA, 19 nt, Artificial Sequence
  Description of Artificial Sequence: Synthetic oligonucleotide
uuuccauagcuuccccugg

SEQ ID NO: 3179018 - RNA, 19 nt, Artificial Sequence
  Description of Artificial Sequence: Synthetic oligonucleotide
uuauucucauaguugugcu

SEQ ID NO: 3179019 - RNA, 19 nt, Artificial Sequence
  Description of Artificial Sequence: Synthetic oligonucleotide
aacacagcagaagcuagag

SEQ ID NO: 3179020 - RNA, 19 nt, Artificial Sequence
  Description of Artificial Sequence: Synthetic oligonucleotide
uaacuucaaacucauccuc

SEQ ID NO: 3179021 - RNA, 19 nt, Artificial Sequence
  Description of Artificial Sequence: Synthetic oligonucleotide
cuguuuguaggguggagcc

SEQ ID NO: 3179022 - RNA, 19 nt, Artificial Sequence
  Description of Artificial Sequence: Synthetic oligonucleotide
ugguccaugaagaguaacu

SEQ ID NO: 3179023 - RNA, 19 nt, Artificial Sequence
  Description of Artificial Sequence: Synthetic oligonucleotide
gcuagagucuguuuguagg

SEQ ID NO: 3179024 - RNA, 19 nt, Artificial Sequence
  Description of Artificial Sequence: Synthetic oligonucleotide
ccuacuacgacggugaggg

SEQ ID NO: 3179025 - RNA, 19 nt, Artificial Sequence
  Description of Artificial Sequence: Synthetic oligonucleotide
auuccuuauucucauaguu

SEQ ID NO: 3179026 - RNA, 19 nt, Artificial Sequence
  Description of Artificial Sequence: Synthetic oligonucleotide
gcaaacaggugacaggugg

SEQ ID NO: 3179027 - RNA, 19 nt, Artificial Sequence
  Description of Artificial Sequence: Synthetic oligonucleotide
cuuuauguguuuccauagc

SEQ ID NO: 3179028 - RNA, 19 nt, Artificial Sequence
  Description of Artificial Sequence: Synthetic oligonucleotide
ucaaacucauccucuggca

SEQ ID NO: 3179029 - RNA, 19 nt, Artificial Sequence
  Description of Artificial Sequence: Synthetic oligonucleotide
uacagacgcgcaguaaucg

SEQ ID NO: 3179030 - RNA, 19 nt, Artificial Sequence
  Description of Artificial Sequence: Synthetic oligonucleotide
aguacagacgcgcaguaau

SEQ ID NO: 3179031 - RNA, 19 nt, Artificial Sequence
  Description of Artificial Sequence: Synthetic oligonucleotide
guuuccauagcuuccccug

SEQ ID NO: 3179032 - RNA, 19 nt, Artificial Sequence
  Description of Artificial Sequence: Synthetic oligonucleotide
ucuguuuguaggguggagc

SEQ ID NO: 3179033 - RNA, 19 nt, Artificial Sequence
  Description of Artificial Sequence: Synthetic oligonucleotide
aagguggaaguccugcgga

SEQ ID NO: 3179034 - RNA, 19 nt, Artificial Sequence
  Description of Artificial Sequence: Synthetic oligonucleotide
cuggccauuggcacaaggg

SEQ ID NO: 3179035 - RNA, 19 nt, Artificial Sequence
  Description of Artificial Sequence: Synthetic oligonucleotide
aagaaaagggcgccuacua

SEQ ID NO: 3179036 - RNA, 19 nt, Artificial Sequence
  Description of Artificial Sequence: Synthetic oligonucleotide
uggccauuggcacaaggga

SEQ ID NO: 3179037 - RNA, 19 nt, Artificial Sequence
  Description of Artificial Sequence: Synthetic oligonucleotide
uguguuuccauagcuuccc

SEQ ID NO: 3179038 - RNA, 19 nt, Artificial Sequence
  Description of Artificial Sequence: Synthetic oligonucleotide
uggcacaagggauuauucc

SEQ ID NO: 3179039 - RNA, 19 nt, Artificial Sequence
  Description of Artificial Sequence: Synthetic oligonucleotide
caaacacagcagaagcuag

SEQ ID NO: 3179040 - RNA, 19 nt, Artificial Sequence
  Description of Artificial Sequence: Synthetic oligonucleotide
agugaguacagacgcgcag

SEQ ID NO: 3179041 - RNA, 19 nt, Artificial Sequence
  Description of Artificial Sequence: Synthetic oligonucleotide
uuauguguuuccauagcuu

SEQ ID NO: 3179042 - RNA, 19 nt, Artificial Sequence
  Description of Artificial Sequence: Synthetic oligonucleotide
acagcagugaguacagacg

SEQ ID NO: 3179043 - RNA, 19 nt, Artificial Sequence
  Description of Artificial Sequence: Synthetic oligonucleotide
acuucaaacucauccucug

SEQ ID NO: 3179044 - RNA, 19 nt, Artificial Sequence
  Description of Artificial Sequence: Synthetic oligonucleotide
agggauuauuccuuauucu

SEQ ID NO: 3179045 - RNA, 19 nt, Artificial Sequence
  Description of Artificial Sequence: Synthetic oligonucleotide
ugugcuuuauguguuucca

SEQ ID NO: 3179046 - RNA, 19 nt, Artificial Sequence
  Description of Artificial Sequence: Synthetic oligonucleotide
ucaaacacagcagaagcua

SEQ ID NO: 3179047 - RNA, 19 nt, Artificial Sequence
  Description of Artificial Sequence: Synthetic oligonucleotide
cagcagugaguacagacgc

SEQ ID NO: 3179048 - RNA, 19 nt, Artificial Sequence
  Description of Artificial Sequence: Synthetic oligonucleotide
uauuccuuauucucauagu

SEQ ID NO: 3179049 - RNA, 19 nt, Artificial Sequence
  Description of Artificial Sequence: Synthetic oligonucleotide
gaugugcucguagaucgcg

SEQ ID NO: 3179050 - RNA, 19 nt, Artificial Sequence
  Description of Artificial Sequence: Synthetic oligonucleotide
ugcuuuauguguuuccaua

SEQ ID NO: 3179051 - RNA, 19 nt, Artificial Sequence
  Description of Artificial Sequence: Synthetic oligonucleotide
cuucaaacucauccucugg

SEQ ID NO: 3179052 - RNA, 19 nt, Artificial Sequence
  Description of Artificial Sequence: Synthetic oligonucleotide
agagucuguuuguagggug

SEQ ID NO: 3179053 - RNA, 19 nt, Artificial Sequence
  Description of Artificial Sequence: Synthetic oligonucleotide
ugcuuguacaguuggucca

SEQ ID NO: 3179054 - RNA, 19 nt, Artificial Sequence
  Description of Artificial Sequence: Synthetic oligonucleotide
caaacucauccucuggcag

SEQ ID NO: 3179055 - RNA, 19 nt, Artificial Sequence
  Description of Artificial Sequence: Synthetic oligonucleotide
uguacaguugguccaugaa

SEQ ID NO: 3179056 - RNA, 19 nt, Artificial Sequence
  Description of Artificial Sequence: Synthetic oligonucleotide
ucugcgcccugaucgaagg

SEQ ID NO: 3179057 - RNA, 19 nt, Artificial Sequence
  Description of Artificial Sequence: Synthetic oligonucleotide
agggcgaagguggaagucc

SEQ ID NO: 3179058 - RNA, 19 nt, Artificial Sequence
  Description of Artificial Sequence: Synthetic oligonucleotide
aacuucaaacucauccucu

SEQ ID NO: 3179059 - RNA, 19 nt, Artificial Sequence
  Description of Artificial Sequence: Synthetic oligonucleotide
ucuggccauuggcacaagg

SEQ ID NO: 3179060 - RNA, 19 nt, Artificial Sequence
  Description of Artificial Sequence: Synthetic oligonucleotide
aguccugcggaacagcagu

SEQ ID NO: 3179061 - RNA, 19 nt, Artificial Sequence
  Description of Artificial Sequence: Synthetic oligonucleotide
gagucuguuuguagggugg

SEQ ID NO: 3179062 - RNA, 19 nt, Artificial Sequence
  Description of Artificial Sequence: Synthetic oligonucleotide
auguguuuccauagcuucc

SEQ ID NO: 3179063 - RNA, 19 nt, Artificial Sequence
  Description of Artificial Sequence: Synthetic oligonucleotide
uugugcuuuauguguuucc

SEQ ID NO: 3179064 - RNA, 19 nt, Artificial Sequence
  Description of Artificial Sequence: Synthetic oligonucleotide
aaagggcgccuacuacgac

SEQ ID NO: 3179065 - RNA, 19 nt, Artificial Sequence
  Description of Artificial Sequence: Synthetic oligonucleotide
acaguugguccaugaagag

SEQ ID NO: 3179066 - RNA, 19 nt, Artificial Sequence
  Description of Artificial Sequence: Synthetic oligonucleotide
gcuuuauguguuuccauag

SEQ ID NO: 3179067 - RNA, 19 nt, Artificial Sequence
  Description of Artificial Sequence: Synthetic oligonucleotide
ucguagaucgcgucugcgc

SEQ ID NO: 3179068 - RNA, 19 nt, Artificial Sequence
  Description of Artificial Sequence: Synthetic oligonucleotide
uguaggguggagccgccgc

SEQ ID NO: 3179069 - RNA, 19 nt, Artificial Sequence
  Description of Artificial Sequence: Synthetic oligonucleotide
agcuagagucuguuuguag

SEQ ID NO: 3179070 - RNA, 19 nt, Artificial Sequence
  Description of Artificial Sequence: Synthetic oligonucleotide
aguugguccaugaagagua

SEQ ID NO: 3179071 - RNA, 19 nt, Artificial Sequence
  Description of Artificial Sequence: Synthetic oligonucleotide
uguuuguaggguggagccg

SEQ ID NO: 3179072 - RNA, 19 nt, Artificial Sequence
  Description of Artificial Sequence: Synthetic oligonucleotide
ugcgcccugaucgaaggcg

SEQ ID NO: 3179073 - RNA, 19 nt, Artificial Sequence
  Description of Artificial Sequence: Synthetic oligonucleotide
caggcaaacaggugacagg

SEQ ID NO: 3179074 - RNA, 19 nt, Artificial Sequence
  Description of Artificial Sequence: Synthetic oligonucleotide
guuuguaggguggagccgc

SEQ ID NO: 3179075 - RNA, 19 nt, Artificial Sequence
  Description of Artificial Sequence: Synthetic oligonucleotide
guaacuucaaacucauccu

SEQ ID NO: 3179076 - RNA, 19 nt, Artificial Sequence
  Description of Artificial Sequence: Synthetic oligonucleotide
ugcggaacagcagugagua

SEQ ID NO: 3179077 - RNA, 19 nt, Artificial Sequence
  Description of Artificial Sequence: Synthetic oligonucleotide
gggauuauuccuuauucuc

SEQ ID NO: 3179078 - RNA, 19 nt, Artificial Sequence
  Description of Artificial Sequence: Synthetic oligonucleotide
guggaagcccuccuucugg

SEQ ID NO: 3179079 - RNA, 19 nt, Artificial Sequence
  Description of Artificial Sequence: Synthetic oligonucleotide
uguuuccauagcuuccccu

SEQ ID NO: 3179080 - RNA, 19 nt, Artificial Sequence
  Description of Artificial Sequence: Synthetic oligonucleotide
ugguugaugugcucguaga

SEQ ID NO: 3179081 - RNA, 19 nt, Artificial Sequence
  Description of Artificial Sequence: Synthetic oligonucleotide
uuggcacaagggauuauuc

SEQ ID NO: 3179082 - RNA, 19 nt, Artificial Sequence
  Description of Artificial Sequence: Synthetic oligonucleotide
aaaagggcgccuacuacga

SEQ ID NO: 3179083 - RNA, 19 nt, Artificial Sequence
  Description of Artificial Sequence: Synthetic oligonucleotide
cuugcuuguacaguugguc

SEQ ID NO: 3179084 - RNA, 19 nt, Artificial Sequence
  Description of Artificial Sequence: Synthetic oligonucleotide
cuuggcauacauuagaugg

SEQ ID NO: 3179085 - RNA, 19 nt, Artificial Sequence
  Description of Artificial Sequence: Synthetic oligonucleotide
aaaaguugccuguagguuc

SEQ ID NO: 3179086 - RNA, 19 nt, Artificial Sequence
  Description of Artificial Sequence: Synthetic oligonucleotide
uacuucaucgaccacagug

SEQ ID NO: 3179087 - RNA, 19 nt, Artificial Sequence
  Description of Artificial Sequence: Synthetic oligonucleotide
aauuauuggcugcaucuuc

SEQ ID NO: 3179088 - RNA, 19 nt, Artificial Sequence
  Description of Artificial Sequence: Synthetic oligonucleotide
ucuggcauaauuauuggcu

SEQ ID NO: 3179089 - RNA, 19 nt, Artificial Sequence
  Description of Artificial Sequence: Synthetic oligonucleotide
aaagcuguggaagaugagg

SEQ ID NO: 3179090 - RNA, 19 nt, Artificial Sequence
  Description of Artificial Sequence: Synthetic oligonucleotide
ucgaauucgguccaggacc

SEQ ID NO: 3179091 - RNA, 19 nt, Artificial Sequence
  Description of Artificial Sequence: Synthetic oligonucleotide
auacucucaauacuccucc

SEQ ID NO: 3179092 - RNA, 19 nt, Artificial Sequence
  Description of Artificial Sequence: Synthetic oligonucleotide
uaguuuucgaauucggucc

SEQ ID NO: 3179093 - RNA, 19 nt, Artificial Sequence
  Description of Artificial Sequence: Synthetic oligonucleotide
uguacaaaggcccgcuugg

SEQ ID NO: 3179094 - RNA, 19 nt, Artificial Sequence
  Description of Artificial Sequence: Synthetic oligonucleotide
uccagguccacaaacacug

SEQ ID NO: 3179095 - RNA, 19 nt, Artificial Sequence
  Description of Artificial Sequence: Synthetic oligonucleotide
gagaugcgaacccagaucc

SEQ ID NO: 3179096 - RNA, 19 nt, Artificial Sequence
  Description of Artificial Sequence: Synthetic oligonucleotide
uaaauggcaaacuccagcu

SEQ ID NO: 3179097 - RNA, 19 nt, Artificial Sequence
  Description of Artificial Sequence: Synthetic oligonucleotide
uucaacggaauccacgccc

SEQ ID NO: 3179098 - RNA, 19 nt, Artificial Sequence
  Description of Artificial Sequence: Synthetic oligonucleotide
uggaaaaguugccuguagg

SEQ ID NO: 3179099 - RNA, 19 nt, Artificial Sequence
  Description of Artificial Sequence: Synthetic oligonucleotide
cucuucauaauccuucucc

SEQ ID NO: 3179100 - RNA, 19 nt, Artificial Sequence
  Description of Artificial Sequence: Synthetic oligonucleotide
aauacuccuccccuucuuc

SEQ ID NO: 3179101 - RNA, 19 nt, Artificial Sequence
  Description of Artificial Sequence: Synthetic oligonucleotide
aaaguugccuguagguucc

SEQ ID NO: 3179102 - RNA, 19 nt, Artificial Sequence
  Description of Artificial Sequence: Synthetic oligonucleotide
auuggcugcaucuuccuuc

SEQ ID NO: 3179103 - RNA, 19 nt, Artificial Sequence
  Description of Artificial Sequence: Synthetic oligonucleotide
uuguccaccaaugaaagca

SEQ ID NO: 3179104 - RNA, 19 nt, Artificial Sequence
  Description of Artificial Sequence: Synthetic oligonucleotide
uggguaaauggcaaacucc

SEQ ID NO: 3179105 - RNA, 19 nt, Artificial Sequence
  Description of Artificial Sequence: Synthetic oligonucleotide
guaaauggcaaacuccagc

SEQ ID NO: 3179106 - RNA, 19 nt, Artificial Sequence
  Description of Artificial Sequence: Synthetic oligonucleotide
cuaguuuucgaauucgguc

SEQ ID NO: 3179107 - RNA, 19 nt, Artificial Sequence
  Description of Artificial Sequence: Synthetic oligonucleotide
aggucgacaaucuccuugc

SEQ ID NO: 3179108 - RNA, 19 nt, Artificial Sequence
  Description of Artificial Sequence: Synthetic oligonucleotide
ugcuucaacggaauccacg

SEQ ID NO: 3179109 - RNA, 19 nt, Artificial Sequence
  Description of Artificial Sequence: Synthetic oligonucleotide
ugguauaaugaccucuggc

SEQ ID NO: 3179110 - RNA, 19 nt, Artificial Sequence
  Description of Artificial Sequence: Synthetic oligonucleotide
acucucaauacuccucccc

SEQ ID NO: 3179111 - RNA, 19 nt, Artificial Sequence
  Description of Artificial Sequence: Synthetic oligonucleotide
aucagcagagaugcgaacc

SEQ ID NO: 3179112 - RNA, 19 nt, Artificial Sequence
  Description of Artificial Sequence: Synthetic oligonucleotide
ucuaggcacaugcaucccg

SEQ ID NO: 3179113 - RNA, 19 nt, Artificial Sequence
  Description of Artificial Sequence: Synthetic oligonucleotide
ucuuccuuccccgugauca

SEQ ID NO: 3179114 - RNA, 19 nt, Artificial Sequence
  Description of Artificial Sequence: Synthetic oligonucleotide
agagaugcgaacccagauc

SEQ ID NO: 3179115 - RNA, 19 nt, Artificial Sequence
  Description of Artificial Sequence: Synthetic oligonucleotide
guuccaucagcagagaugc

SEQ ID NO: 3179116 - RNA, 19 nt, Artificial Sequence
  Description of Artificial Sequence: Synthetic oligonucleotide
acaaacacugcucuaggca

SEQ ID NO: 3179117 - RNA, 19 nt, Artificial Sequence
  Description of Artificial Sequence: Synthetic oligonucleotide
ucuucauaauccuucucca

SEQ ID NO: 3179118 - RNA, 19 nt, Artificial Sequence
  Description of Artificial Sequence: Synthetic oligonucleotide
agucagaguguccaguguc

SEQ ID NO: 3179119 - RNA, 19 nt, Artificial Sequence
  Description of Artificial Sequence: Synthetic oligonucleotide
ugcuaguuuucgaauucgg

SEQ ID NO: 3179120 - RNA, 19 nt, Artificial Sequence
  Description of Artificial Sequence: Synthetic oligonucleotide
uugccaaugguauaaugac

SEQ ID NO: 3179121 - RNA, 19 nt, Artificial Sequence
  Description of Artificial Sequence: Synthetic oligonucleotide
ucgacaaucuccuugccaa

SEQ ID NO: 3179122 - RNA, 19 nt, Artificial Sequence
  Description of Artificial Sequence: Synthetic oligonucleotide
acaaucuccuugccaaugg

SEQ ID NO: 3179123 - RNA, 19 nt, Artificial Sequence
  Description of Artificial Sequence: Synthetic oligonucleotide
uccaccaaugaaagcacag

SEQ ID NO: 3179124 - RNA, 19 nt, Artificial Sequence
  Description of Artificial Sequence: Synthetic oligonucleotide
uuggcauacauuagauggc

SEQ ID NO: 3179125 - RNA, 19 nt, Artificial Sequence
  Description of Artificial Sequence: Synthetic oligonucleotide
uccacaaacacugcucuag

SEQ ID NO: 3179126 - RNA, 19 nt, Artificial Sequence
  Description of Artificial Sequence: Synthetic oligonucleotide
cucuggguggaaaaguugc

SEQ ID NO: 3179127 - RNA, 19 nt, Artificial Sequence
  Description of Artificial Sequence: Synthetic oligonucleotide
ucagcagagaugcgaaccc

SEQ ID NO: 3179128 - RNA, 19 nt, Artificial Sequence
  Description of Artificial Sequence: Synthetic oligonucleotide
gguauaaugaccucuggca

SEQ ID NO: 3179129 - RNA, 19 nt, Artificial Sequence
  Description of Artificial Sequence: Synthetic oligonucleotide
acauuagauggcuucguug

SEQ ID NO: 3179130 - RNA, 19 nt, Artificial Sequence
  Description of Artificial Sequence: Synthetic oligonucleotide
ucaucgaccacagugggcu

SEQ ID NO: 3179131 - RNA, 19 nt, Artificial Sequence
  Description of Artificial Sequence: Synthetic oligonucleotide
caaacacugcucuaggcac

SEQ ID NO: 3179132 - RNA, 19 nt, Artificial Sequence
  Description of Artificial Sequence: Synthetic oligonucleotide
cauacauuagauggcuucg

SEQ ID NO: 3179133 - RNA, 19 nt, Artificial Sequence
  Description of Artificial Sequence: Synthetic oligonucleotide
ucguuguccaccaaugaaa

SEQ ID NO: 3179134 - RNA, 19 nt, Artificial Sequence
  Description of Artificial Sequence: Synthetic oligonucleotide
uucugccucugcuucaacg

SEQ ID NO: 3179135 - RNA, 19 nt, Artificial Sequence
  Description of Artificial Sequence: Synthetic oligonucleotide
ucgguccaggaccaggucg

SEQ ID NO: 3179136 - RNA, 19 nt, Artificial Sequence
  Description of Artificial Sequence: Synthetic oligonucleotide
acuucaucgaccacagugg

SEQ ID NO: 3179137 - RNA, 19 nt, Artificial Sequence
  Description of Artificial Sequence: Synthetic oligonucleotide
aacggaauccacgcccacc

SEQ ID NO: 3179138 - RNA, 19 nt, Artificial Sequence
  Description of Artificial Sequence: Synthetic oligonucleotide
aauucgguccaggaccagg

SEQ ID NO: 3179139 - RNA, 19 nt, Artificial Sequence
  Description of Artificial Sequence: Synthetic oligonucleotide
ucugcuucaacggaaucca

SEQ ID NO: 3179140 - RNA, 19 nt, Artificial Sequence
  Description of Artificial Sequence: Synthetic oligonucleotide
uucgaauucgguccaggac

SEQ ID NO: 3179141 - RNA, 19 nt, Artificial Sequence
  Description of Artificial Sequence: Synthetic oligonucleotide
agugcguacuucaucgacc

SEQ ID NO: 3179142 - RNA, 19 nt, Artificial Sequence
  Description of Artificial Sequence: Synthetic oligonucleotide
augaggaagcccugcaguc

SEQ ID NO: 3179143 - RNA, 19 nt, Artificial Sequence
  Description of Artificial Sequence: Synthetic oligonucleotide
aacagcuguggaaaccugg

SEQ ID NO: 3179144 - RNA, 19 nt, Artificial Sequence
  Description of Artificial Sequence: Synthetic oligonucleotide
aagccguuccaucagcaga

SEQ ID NO: 3179145 - RNA, 19 nt, Artificial Sequence
  Description of Artificial Sequence: Synthetic oligonucleotide
caugccuucucccacguac

SEQ ID NO: 3179146 - RNA, 19 nt, Artificial Sequence
  Description of Artificial Sequence: Synthetic oligonucleotide
uccagugucgugugcgugg

SEQ ID NO: 3179147 - RNA, 19 nt, Artificial Sequence
  Description of Artificial Sequence: Synthetic oligonucleotide
uucguuguccaccaaugaa

SEQ ID NO: 3179148 - RNA, 19 nt, Artificial Sequence
  Description of Artificial Sequence: Synthetic oligonucleotide
cauaguccaccgaaagccg

SEQ ID NO: 3179149 - RNA, 19 nt, Artificial Sequence
  Description of Artificial Sequence: Synthetic oligonucleotide
uugccuguagguuccagug

SEQ ID NO: 3179150 - RNA, 19 nt, Artificial Sequence
  Description of Artificial Sequence: Synthetic oligonucleotide
cuggcauaauuauuggcug

SEQ ID NO: 3179151 - RNA, 19 nt, Artificial Sequence
  Description of Artificial Sequence: Synthetic oligonucleotide
agaucugcuaguuuucgaa

SEQ ID NO: 3179152 - RNA, 19 nt, Artificial Sequence
  Description of Artificial Sequence: Synthetic oligonucleotide
aagaugaggaagcccugca

SEQ ID NO: 3179153 - RNA, 19 nt, Artificial Sequence
  Description of Artificial Sequence: Synthetic oligonucleotide
aaugaccucuggcauaauu

SEQ ID NO: 3179154 - RNA, 19 nt, Artificial Sequence
  Description of Artificial Sequence: Synthetic oligonucleotide
cuucauaauccuucuccag

SEQ ID NO: 3179155 - RNA, 19 nt, Artificial Sequence
  Description of Artificial Sequence: Synthetic oligonucleotide
uccacaacagcuguggaaa

SEQ ID NO: 3179156 - RNA, 19 nt, Artificial Sequence
  Description of Artificial Sequence: Synthetic oligonucleotide
uauaaugaccucuggcaua

SEQ ID NO: 3179157 - RNA, 19 nt, Artificial Sequence
  Description of Artificial Sequence: Synthetic oligonucleotide
cuaggcacaugcaucccgg

SEQ ID NO: 3179158 - RNA, 19 nt, Artificial Sequence
  Description of Artificial Sequence: Synthetic oligonucleotide
cauacucucaauacuccuc

SEQ ID NO: 3179159 - RNA, 19 nt, Artificial Sequence
  Description of Artificial Sequence: Synthetic oligonucleotide
uguagggcuccacaacagc

SEQ ID NO: 3179160 - RNA, 19 nt, Artificial Sequence
  Description of Artificial Sequence: Synthetic oligonucleotide
uuuucgaauucgguccagg

SEQ ID NO: 3179161 - RNA, 19 nt, Artificial Sequence
  Description of Artificial Sequence: Synthetic oligonucleotide
cacugcucuaggcacaugc

SEQ ID NO: 3179162 - RNA, 19 nt, Artificial Sequence
  Description of Artificial Sequence: Synthetic oligonucleotide
accucuggcauaauuauug

SEQ ID NO: 3179163 - RNA, 19 nt, Artificial Sequence
  Description of Artificial Sequence: Synthetic oligonucleotide
uggcauaauuauuggcugc

SEQ ID NO: 3179164 - RNA, 19 nt, Artificial Sequence
  Description of Artificial Sequence: Synthetic oligonucleotide
uuucgaauucgguccagga

SEQ ID NO: 3179165 - RNA, 19 nt, Artificial Sequence
  Description of Artificial Sequence: Synthetic oligonucleotide
uggguggaaaaguugccug

SEQ ID NO: 3179166 - RNA, 19 nt, Artificial Sequence
  Description of Artificial Sequence: Synthetic oligonucleotide
uuguagggcuccacaacag

SEQ ID NO: 3179167 - RNA, 19 nt, Artificial Sequence
  Description of Artificial Sequence: Synthetic oligonucleotide
uccaucagcagagaugcga

SEQ ID NO: 3179168 - RNA, 19 nt, Artificial Sequence
  Description of Artificial Sequence: Synthetic oligonucleotide
acuccuccccuucuucugc

SEQ ID NO: 3179169 - RNA, 19 nt, Artificial Sequence
  Description of Artificial Sequence: Synthetic oligonucleotide
acccauacucucaauacuc

SEQ ID NO: 3179170 - RNA, 19 nt, Artificial Sequence
  Description of Artificial Sequence: Synthetic oligonucleotide
ucaacggaauccacgccca

SEQ ID NO: 3179171 - RNA, 19 nt, Artificial Sequence
  Description of Artificial Sequence: Synthetic oligonucleotide
acagucagaguguccagug

SEQ ID NO: 3179172 - RNA, 19 nt, Artificial Sequence
  Description of Artificial Sequence: Synthetic oligonucleotide
aagcuguggaagaugagga

SEQ ID NO: 3179173 - RNA, 19 nt, Artificial Sequence
  Description of Artificial Sequence: Synthetic oligonucleotide
ccaaugaaagcacagucag

SEQ ID NO: 3179174 - RNA, 19 nt, Artificial Sequence
  Description of Artificial Sequence: Synthetic oligonucleotide
ugcucuaggcacaugcauc

SEQ ID NO: 3179175 - RNA, 19 nt, Artificial Sequence
  Description of Artificial Sequence: Synthetic oligonucleotide
cuucaucgaccacaguggg

SEQ ID NO: 3179176 - RNA, 19 nt, Artificial Sequence
  Description of Artificial Sequence: Synthetic oligonucleotide
caccaaugaaagcacaguc

SEQ ID NO: 3179177 - RNA, 19 nt, Artificial Sequence
  Description of Artificial Sequence: Synthetic oligonucleotide
cucugcuucaacggaaucc

SEQ ID NO: 3179178 - RNA, 19 nt, Artificial Sequence
  Description of Artificial Sequence: Synthetic oligonucleotide
uacaaaggcccgcuuggca

SEQ ID NO: 3179179 - RNA, 19 nt, Artificial Sequence
  Description of Artificial Sequence: Synthetic oligonucleotide
cacguaccaguguacaaag

SEQ ID NO: 3179180 - RNA, 19 nt, Artificial Sequence
  Description of Artificial Sequence: Synthetic oligonucleotide
accgaaagccguuccauca

SEQ ID NO: 3179181 - RNA, 19 nt, Artificial Sequence
  Description of Artificial Sequence: Synthetic oligonucleotide
accuccaaagcuguggaag

SEQ ID NO: 3179182 - RNA, 19 nt, Artificial Sequence
  Description of Artificial Sequence: Synthetic oligonucleotide
cucuggcauaauuauuggc

SEQ ID NO: 3179183 - RNA, 19 nt, Artificial Sequence
  Description of Artificial Sequence: Synthetic oligonucleotide
accacagugggcuccaggu

SEQ ID NO: 3179184 - RNA, 19 nt, Artificial Sequence
  Description of Artificial Sequence: Synthetic oligonucleotide
aauguaguaggccauagcg

SEQ ID NO: 3179185 - RNA, 19 nt, Artificial Sequence
  Description of Artificial Sequence: Synthetic oligonucleotide
aucaaaagaacguagaguc

SEQ ID NO: 3179186 - RNA, 19 nt, Artificial Sequence
  Description of Artificial Sequence: Synthetic oligonucleotide
aauggaucaccauacugcc

SEQ ID NO: 3179187 - RNA, 19 nt, Artificial Sequence
  Description of Artificial Sequence: Synthetic oligonucleotide
aagugaaaccagcauaucg

SEQ ID NO: 3179188 - RNA, 19 nt, Artificial Sequence
  Description of Artificial Sequence: Synthetic oligonucleotide
uguuuauacaucuucacaa

SEQ ID NO: 3179189 - RNA, 19 nt, Artificial Sequence
  Description of Artificial Sequence: Synthetic oligonucleotide
acugccaaaguccacacac

SEQ ID NO: 3179190 - RNA, 19 nt, Artificial Sequence
  Description of Artificial Sequence: Synthetic oligonucleotide
aucgaugucaaacuuggcg

SEQ ID NO: 3179191 - RNA, 19 nt, Artificial Sequence
  Description of Artificial Sequence: Synthetic oligonucleotide
aaaggcaucaacuuuguuu

SEQ ID NO: 3179192 - RNA, 19 nt, Artificial Sequence
  Description of Artificial Sequence: Synthetic oligonucleotide
aucuucacaauguaguagg

SEQ ID NO: 3179193 - RNA, 19 nt, Artificial Sequence
  Description of Artificial Sequence: Synthetic oligonucleotide
aauucguagguuucucugg

SEQ ID NO: 3179194 - RNA, 19 nt, Artificial Sequence
  Description of Artificial Sequence: Synthetic oligonucleotide
aucacuucuacauuucagg

SEQ ID NO: 3179195 - RNA, 19 nt, Artificial Sequence
  Description of Artificial Sequence: Synthetic oligonucleotide
uacaucuucacaauguagu

SEQ ID NO: 3179196 - RNA, 19 nt, Artificial Sequence
  Description of Artificial Sequence: Synthetic oligonucleotide
accuugaucacacaaaugu

SEQ ID NO: 3179197 - RNA, 19 nt, Artificial Sequence
  Description of Artificial Sequence: Synthetic oligonucleotide
ucuaguccaagaaugaagu

SEQ ID NO: 3179198 - RNA, 19 nt, Artificial Sequence
  Description of Artificial Sequence: Synthetic oligonucleotide
uuauacaucuucacaaugu

SEQ ID NO: 3179199 - RNA, 19 nt, Artificial Sequence
  Description of Artificial Sequence: Synthetic oligonucleotide
ucaucaaaagaacguagag

SEQ ID NO: 3179200 - RNA, 19 nt, Artificial Sequence
  Description of Artificial Sequence: Synthetic oligonucleotide
ucuggaagcaucaaaugga

SEQ ID NO: 3179201 - RNA, 19 nt, Artificial Sequence
  Description of Artificial Sequence: Synthetic oligonucleotide
uguaguaggccauagcgug

SEQ ID NO: 3179202 - RNA, 19 nt, Artificial Sequence
  Description of Artificial Sequence: Synthetic oligonucleotide
uucuaguccaagaaugaag

SEQ ID NO: 3179203 - RNA, 19 nt, Artificial Sequence
  Description of Artificial Sequence: Synthetic oligonucleotide
aaggcaucaacuuuguuua

SEQ ID NO: 3179204 - RNA, 19 nt, Artificial Sequence
  Description of Artificial Sequence: Synthetic oligonucleotide
acauuucagguguuuauac

SEQ ID NO: 3179205 - RNA, 19 nt, Artificial Sequence
  Description of Artificial Sequence: Synthetic oligonucleotide
ugacauacggaucacuucu

SEQ ID NO: 3179206 - RNA, 19 nt, Artificial Sequence
  Description of Artificial Sequence: Synthetic oligonucleotide
aucaaauggaucaccauac

SEQ ID NO: 3179207 - RNA, 19 nt, Artificial Sequence
  Description of Artificial Sequence: Synthetic oligonucleotide
aacuacaaaguagucugcg

SEQ ID NO: 3179208 - RNA, 19 nt, Artificial Sequence
  Description of Artificial Sequence: Synthetic oligonucleotide
cagguaaugucucagcugc

SEQ ID NO: 3179209 - RNA, 19 nt, Artificial Sequence
  Description of Artificial Sequence: Synthetic oligonucleotide
auaucgaugucaaacuugg

SEQ ID NO: 3179210 - RNA, 19 nt, Artificial Sequence
  Description of Artificial Sequence: Synthetic oligonucleotide
gaucuugacauacggauca

SEQ ID NO: 3179211 - RNA, 19 nt, Artificial Sequence
  Description of Artificial Sequence: Synthetic oligonucleotide
uucccuucgaucuugacau

SEQ ID NO: 3179212 - RNA, 19 nt, Artificial Sequence
  Description of Artificial Sequence: Synthetic oligonucleotide
ucucauuucuggaggaacc

SEQ ID NO: 3179213 - RNA, 19 nt, Artificial Sequence
  Description of Artificial Sequence: Synthetic oligonucleotide
uuauucacauuugaacucc

SEQ ID NO: 3179214 - RNA, 19 nt, Artificial Sequence
  Description of Artificial Sequence: Synthetic oligonucleotide
uaauucguagguuucucug

SEQ ID NO: 3179215 - RNA, 19 nt, Artificial Sequence
  Description of Artificial Sequence: Synthetic oligonucleotide
ugucucagcugcuaucugg

SEQ ID NO: 3179216 - RNA, 19 nt, Artificial Sequence
  Description of Artificial Sequence: Synthetic oligonucleotide
caccauacugccaaagucc

SEQ ID NO: 3179217 - RNA, 19 nt, Artificial Sequence
  Description of Artificial Sequence: Synthetic oligonucleotide
ucgaucuugacauacggau

SEQ ID NO: 3179218 - RNA, 19 nt, Artificial Sequence
  Description of Artificial Sequence: Synthetic oligonucleotide
ucaaaagaacguagagucc

SEQ ID NO: 3179219 - RNA, 19 nt, Artificial Sequence
  Description of Artificial Sequence: Synthetic oligonucleotide
gaagucuucagguaauguc

SEQ ID NO: 3179220 - RNA, 19 nt, Artificial Sequence
  Description of Artificial Sequence: Synthetic oligonucleotide
uuucucugguuucuggaag

SEQ ID NO: 3179221 - RNA, 19 nt, Artificial Sequence
  Description of Artificial Sequence: Synthetic oligonucleotide
auuucagguguuuauacau

SEQ ID NO: 3179222 - RNA, 19 nt, Artificial Sequence
  Description of Artificial Sequence: Synthetic oligonucleotide
gucucuugcauuuucuugc

SEQ ID NO: 3179223 - RNA, 19 nt, Artificial Sequence
  Description of Artificial Sequence: Synthetic oligonucleotide
auuucucuaauucguaggu

SEQ ID NO: 3179224 - RNA, 19 nt, Artificial Sequence
  Description of Artificial Sequence: Synthetic oligonucleotide
uucacauuugaacuccacu

SEQ ID NO: 3179225 - RNA, 19 nt, Artificial Sequence
  Description of Artificial Sequence: Synthetic oligonucleotide
acuaccaacuacaaaguag

SEQ ID NO: 3179226 - RNA, 19 nt, Artificial Sequence
  Description of Artificial Sequence: Synthetic oligonucleotide
ucuucuaguccaagaauga

SEQ ID NO: 3179227 - RNA, 19 nt, Artificial Sequence
  Description of Artificial Sequence: Synthetic oligonucleotide
uggaucaccauacugccaa

SEQ ID NO: 3179228 - RNA, 19 nt, Artificial Sequence
  Description of Artificial Sequence: Synthetic oligonucleotide
aagucuucagguaaugucu

SEQ ID NO: 3179229 - RNA, 19 nt, Artificial Sequence
  Description of Artificial Sequence: Synthetic oligonucleotide
aaaguagucugcguaucuc

SEQ ID NO: 3179230 - RNA, 19 nt, Artificial Sequence
  Description of Artificial Sequence: Synthetic oligonucleotide
uucagguaaugucucagcu

SEQ ID NO: 3179231 - RNA, 19 nt, Artificial Sequence
  Description of Artificial Sequence: Synthetic oligonucleotide
agagccaucgcuccgccgg

SEQ ID NO: 3179232 - RNA, 19 nt, Artificial Sequence
  Description of Artificial Sequence: Synthetic oligonucleotide
uccacuggagucaggauca

SEQ ID NO: 3179233 - RNA, 19 nt, Artificial Sequence
  Description of Artificial Sequence: Synthetic oligonucleotide
gaucaucaaaagaacguag

SEQ ID NO: 3179234 - RNA, 19 nt, Artificial Sequence
  Description of Artificial Sequence: Synthetic oligonucleotide
ugccaaaguccacacacag

SEQ ID NO: 3179235 - RNA, 19 nt, Artificial Sequence
  Description of Artificial Sequence: Synthetic oligonucleotide
uucagguguuuauacaucu

SEQ ID NO: 3179236 - RNA, 19 nt, Artificial Sequence
  Description of Artificial Sequence: Synthetic oligonucleotide
aaguagucugcguaucuca

SEQ ID NO: 3179237 - RNA, 19 nt, Artificial Sequence
  Description of Artificial Sequence: Synthetic oligonucleotide
cauaucgaugucaaacuug

SEQ ID NO: 3179238 - RNA, 19 nt, Artificial Sequence
  Description of Artificial Sequence: Synthetic oligonucleotide
ucacacaaaugucucuugc

SEQ ID NO: 3179239 - RNA, 19 nt, Artificial Sequence
  Description of Artificial Sequence: Synthetic oligonucleotide
uaguccaagaaugaagucu

SEQ ID NO: 3179240 - RNA, 19 nt, Artificial Sequence
  Description of Artificial Sequence: Synthetic oligonucleotide
uauacaucuucacaaugua

SEQ ID NO: 3179241 - RNA, 19 nt, Artificial Sequence
  Description of Artificial Sequence: Synthetic oligonucleotide
agcauaucgaugucaaacu

SEQ ID NO: 3179242 - RNA, 19 nt, Artificial Sequence
  Description of Artificial Sequence: Synthetic oligonucleotide
ccaaaguccacacacagcc

SEQ ID NO: 3179243 - RNA, 19 nt, Artificial Sequence
  Description of Artificial Sequence: Synthetic oligonucleotide
aagucccacuaccaacuac

SEQ ID NO: 3179244 - RNA, 19 nt, Artificial Sequence
  Description of Artificial Sequence: Synthetic oligonucleotide
cuucgaucuugacauacgg

SEQ ID NO: 3179245 - RNA, 19 nt, Artificial Sequence
  Description of Artificial Sequence: Synthetic oligonucleotide
acaaaugucucuugcauuu

SEQ ID NO: 3179246 - RNA, 19 nt, Artificial Sequence
  Description of Artificial Sequence: Synthetic oligonucleotide
uguaagugucggcuggaag

SEQ ID NO: 3179247 - RNA, 19 nt, Artificial Sequence
  Description of Artificial Sequence: Synthetic oligonucleotide
ucugguuucuggaagcauc

SEQ ID NO: 3179248 - RNA, 19 nt, Artificial Sequence
  Description of Artificial Sequence: Synthetic oligonucleotide
uugaucacacaaaugucuc

SEQ ID NO: 3179249 - RNA, 19 nt, Artificial Sequence
  Description of Artificial Sequence: Synthetic oligonucleotide
cacacagccagucaucagc

SEQ ID NO: 3179250 - RNA, 19 nt, Artificial Sequence
  Description of Artificial Sequence: Synthetic oligonucleotide
ucagguaaugucucagcug

SEQ ID NO: 3179251 - RNA, 19 nt, Artificial Sequence
  Description of Artificial Sequence: Synthetic oligonucleotide
cuuuguuuauucacauuug

SEQ ID NO: 3179252 - RNA, 19 nt, Artificial Sequence
  Description of Artificial Sequence: Synthetic oligonucleotide
uucucuaauucguagguuu

SEQ ID NO: 3179253 - RNA, 19 nt, Artificial Sequence
  Description of Artificial Sequence: Synthetic oligonucleotide
gaaugaagucuucagguaa

SEQ ID NO: 3179254 - RNA, 19 nt, Artificial Sequence
  Description of Artificial Sequence: Synthetic oligonucleotide
acauacggaucacuucuac

SEQ ID NO: 3179255 - RNA, 19 nt, Artificial Sequence
  Description of Artificial Sequence: Synthetic oligonucleotide
ucuugcauuuucuugccuc

SEQ ID NO: 3179256 - RNA, 19 nt, Artificial Sequence
  Description of Artificial Sequence: Synthetic oligonucleotide
ucacuucuacauuucaggu

SEQ ID NO: 3179257 - RNA, 19 nt, Artificial Sequence
  Description of Artificial Sequence: Synthetic oligonucleotide
ucagaagugaaaccagcau

SEQ ID NO: 3179258 - RNA, 19 nt, Artificial Sequence
  Description of Artificial Sequence: Synthetic oligonucleotide
augaaaggcaucaacuuug

SEQ ID NO: 3179259 - RNA, 19 nt, Artificial Sequence
  Description of Artificial Sequence: Synthetic oligonucleotide
aucuucuaguccaagaaug

SEQ ID NO: 3179260 - RNA, 19 nt, Artificial Sequence
  Description of Artificial Sequence: Synthetic oligonucleotide
auagcguguaagugucggc

SEQ ID NO: 3179261 - RNA, 19 nt, Artificial Sequence
  Description of Artificial Sequence: Synthetic oligonucleotide
ugaaaccagcauaucgaug

SEQ ID NO: 3179262 - RNA, 19 nt, Artificial Sequence
  Description of Artificial Sequence: Synthetic oligonucleotide
acguagaguccauaauuuc

SEQ ID NO: 3179263 - RNA, 19 nt, Artificial Sequence
  Description of Artificial Sequence: Synthetic oligonucleotide
aaaccagcauaucgauguc

SEQ ID NO: 3179264 - RNA, 19 nt, Artificial Sequence
  Description of Artificial Sequence: Synthetic oligonucleotide
agugaaaccagcauaucga

SEQ ID NO: 3179265 - RNA, 19 nt, Artificial Sequence
  Description of Artificial Sequence: Synthetic oligonucleotide
gaucacuucuacauuucag

SEQ ID NO: 3179266 - RNA, 19 nt, Artificial Sequence
  Description of Artificial Sequence: Synthetic oligonucleotide
ugcuaucugggcuaacuga

SEQ ID NO: 3179267 - RNA, 19 nt, Artificial Sequence
  Description of Artificial Sequence: Synthetic oligonucleotide
uucuggaggaaccuugauc

SEQ ID NO: 3179268 - RNA, 19 nt, Artificial Sequence
  Description of Artificial Sequence: Synthetic oligonucleotide
cagcauaucgaugucaaac

SEQ ID NO: 3179269 - RNA, 19 nt, Artificial Sequence
  Description of Artificial Sequence: Synthetic oligonucleotide
ucuucagguaaugucucag

SEQ ID NO: 3179270 - RNA, 19 nt, Artificial Sequence
  Description of Artificial Sequence: Synthetic oligonucleotide
uacaaaguagucugcguau

SEQ ID NO: 3179271 - RNA, 19 nt, Artificial Sequence
  Description of Artificial Sequence: Synthetic oligonucleotide
acacaaaugucucuugcau

SEQ ID NO: 3179272 - RNA, 19 nt, Artificial Sequence
  Description of Artificial Sequence: Synthetic oligonucleotide
ucuucacaauguaguaggc

SEQ ID NO: 3179273 - RNA, 19 nt, Artificial Sequence
  Description of Artificial Sequence: Synthetic oligonucleotide
aucucauuucuggaggaac

SEQ ID NO: 3179274 - RNA, 19 nt, Artificial Sequence
  Description of Artificial Sequence: Synthetic oligonucleotide
uucgaucuugacauacgga

SEQ ID NO: 3179275 - RNA, 19 nt, Artificial Sequence
  Description of Artificial Sequence: Synthetic oligonucleotide
uucucugguuucuggaagc

SEQ ID NO: 3179276 - RNA, 19 nt, Artificial Sequence
  Description of Artificial Sequence: Synthetic oligonucleotide
aaugugaucugcggcccgg

SEQ ID NO: 3179277 - RNA, 19 nt, Artificial Sequence
  Description of Artificial Sequence: Synthetic oligonucleotide
auacugccaaaguccacac

SEQ ID NO: 3179278 - RNA, 19 nt, Artificial Sequence
  Description of Artificial Sequence: Synthetic oligonucleotide
uuucagguguuuauacauc

SEQ ID NO: 3179279 - RNA, 19 nt, Artificial Sequence
  Description of Artificial Sequence: Synthetic oligonucleotide
ucaaauggaucaccauacu

SEQ ID NO: 3179280 - RNA, 19 nt, Artificial Sequence
  Description of Artificial Sequence: Synthetic oligonucleotide
gaguccauaauuucucuaa

SEQ ID NO: 3179281 - RNA, 19 nt, Artificial Sequence
  Description of Artificial Sequence: Synthetic oligonucleotide
uuucuugccucagaaguga

SEQ ID NO: 3179282 - RNA, 19 nt, Artificial Sequence
  Description of Artificial Sequence: Synthetic oligonucleotide
ucugcguaucucauuucug

SEQ ID NO: 3179283 - RNA, 19 nt, Artificial Sequence
  Description of Artificial Sequence: Synthetic oligonucleotide
ucucuaauucguagguuuc

SEQ ID NO: 3179284 - RNA, 19 nt, Artificial Sequence
  Description of Artificial Sequence: Synthetic oligonucleotide
uauucggucacucacaucc

SEQ ID NO: 3179285 - RNA, 19 nt, Artificial Sequence
  Description of Artificial Sequence: Synthetic oligonucleotide
ucuaaauuuucgcagaucu

SEQ ID NO: 3179286 - RNA, 19 nt, Artificial Sequence
  Description of Artificial Sequence: Synthetic oligonucleotide
agcaaugacguccucaugc

SEQ ID NO: 3179287 - RNA, 19 nt, Artificial Sequence
  Description of Artificial Sequence: Synthetic oligonucleotide
uguagguucuaaauuuucg

SEQ ID NO: 3179288 - RNA, 19 nt, Artificial Sequence
  Description of Artificial Sequence: Synthetic oligonucleotide
caauucacgagcaaugacg

SEQ ID NO: 3179289 - RNA, 19 nt, Artificial Sequence
  Description of Artificial Sequence: Synthetic oligonucleotide
ucucuaucaauucacgagc

SEQ ID NO: 3179290 - RNA, 19 nt, Artificial Sequence
  Description of Artificial Sequence: Synthetic oligonucleotide
aagauguccacuguguagg

SEQ ID NO: 3179291 - RNA, 19 nt, Artificial Sequence
  Description of Artificial Sequence: Synthetic oligonucleotide
uuuuccaggcuccagaaga

SEQ ID NO: 3179292 - RNA, 19 nt, Artificial Sequence
  Description of Artificial Sequence: Synthetic oligonucleotide
aagaauggguguuuuagca

SEQ ID NO: 3179293 - RNA, 19 nt, Artificial Sequence
  Description of Artificial Sequence: Synthetic oligonucleotide
aaggagaucucugacagag

SEQ ID NO: 3179294 - RNA, 19 nt, Artificial Sequence
  Description of Artificial Sequence: Synthetic oligonucleotide
gacagagccaccuuuguag

SEQ ID NO: 3179295 - RNA, 19 nt, Artificial Sequence
  Description of Artificial Sequence: Synthetic oligonucleotide
uaucaauucacgagcaaug

SEQ ID NO: 3179296 - RNA, 19 nt, Artificial Sequence
  Description of Artificial Sequence: Synthetic oligonucleotide
aaggacuccuuuucuauuc

SEQ ID NO: 3179297 - RNA, 19 nt, Artificial Sequence
  Description of Artificial Sequence: Synthetic oligonucleotide
uuuagcacaugcuuugcag

SEQ ID NO: 3179298 - RNA, 19 nt, Artificial Sequence
  Description of Artificial Sequence: Synthetic oligonucleotide
uaaauuuucgcagaucugu

SEQ ID NO: 3179299 - RNA, 19 nt, Artificial Sequence
  Description of Artificial Sequence: Synthetic oligonucleotide
auccugaaagaacuggagc

SEQ ID NO: 3179300 - RNA, 19 nt, Artificial Sequence
  Description of Artificial Sequence: Synthetic oligonucleotide
acugucuuacuaucgggcc

SEQ ID NO: 3179301 - RNA, 19 nt, Artificial Sequence
  Description of Artificial Sequence: Synthetic oligonucleotide
aacugucuuacuaucgggc

SEQ ID NO: 3179302 - RNA, 19 nt, Artificial Sequence
  Description of Artificial Sequence: Synthetic oligonucleotide
uguuuuagcacaugcuuug

SEQ ID NO: 3179303 - RNA, 19 nt, Artificial Sequence
  Description of Artificial Sequence: Synthetic oligonucleotide
cuugccaaaaggaugguug

SEQ ID NO: 3179304 - RNA, 19 nt, Artificial Sequence
  Description of Artificial Sequence: Synthetic oligonucleotide
ucuucucuaucaauucacg

SEQ ID NO: 3179305 - RNA, 19 nt, Artificial Sequence
  Description of Artificial Sequence: Synthetic oligonucleotide
gucacucacauccugaaag

SEQ ID NO: 3179306 - RNA, 19 nt, Artificial Sequence
  Description of Artificial Sequence: Synthetic oligonucleotide
ugaacgacggcugaaacug

SEQ ID NO: 3179307 - RNA, 19 nt, Artificial Sequence
  Description of Artificial Sequence: Synthetic oligonucleotide
ucacucaacaucucugggg

SEQ ID NO: 3179308 - RNA, 19 nt, Artificial Sequence
  Description of Artificial Sequence: Synthetic oligonucleotide
uuucuauucggucacucac

SEQ ID NO: 3179309 - RNA, 19 nt, Artificial Sequence
  Description of Artificial Sequence: Synthetic oligonucleotide
uccugaaagaacuggagcu

SEQ ID NO: 3179310 - RNA, 19 nt, Artificial Sequence
  Description of Artificial Sequence: Synthetic oligonucleotide
auagcaaucaucuucucua

SEQ ID NO: 3179311 - RNA, 19 nt, Artificial Sequence
  Description of Artificial Sequence: Synthetic oligonucleotide
aacaucucuggggcgaucc

SEQ ID NO: 3179312 - RNA, 19 nt, Artificial Sequence
  Description of Artificial Sequence: Synthetic oligonucleotide
agaauggguguuuuagcac

SEQ ID NO: 3179313 - RNA, 19 nt, Artificial Sequence
  Description of Artificial Sequence: Synthetic oligonucleotide
aagcagucaaggcugcagg

SEQ ID NO: 3179314 - RNA, 19 nt, Artificial Sequence
  Description of Artificial Sequence: Synthetic oligonucleotide
agguucuaaauuuucgcag

SEQ ID NO: 3179315 - RNA, 19 nt, Artificial Sequence
  Description of Artificial Sequence: Synthetic oligonucleotide
ucuucacucaacaucucug

SEQ ID NO: 3179316 - RNA, 19 nt, Artificial Sequence
  Description of Artificial Sequence: Synthetic oligonucleotide
acaugcuuugcagagggcc

SEQ ID NO: 3179317 - RNA, 19 nt, Artificial Sequence
  Description of Artificial Sequence: Synthetic oligonucleotide
aauuuucgcagaucugucu

SEQ ID NO: 3179318 - RNA, 19 nt, Artificial Sequence
  Description of Artificial Sequence: Synthetic oligonucleotide
gaagauguccacuguguag

SEQ ID NO: 3179319 - RNA, 19 nt, Artificial Sequence
  Description of Artificial Sequence: Synthetic oligonucleotide
guagguucuaaauuuucgc

SEQ ID NO: 3179320 - RNA, 19 nt, Artificial Sequence
  Description of Artificial Sequence: Synthetic oligonucleotide
aacugugccuacccacugc

SEQ ID NO: 3179321 - RNA, 19 nt, Artificial Sequence
  Description of Artificial Sequence: Synthetic oligonucleotide
uuuccuugcagucuucacu

SEQ ID NO: 3179322 - RNA, 19 nt, Artificial Sequence
  Description of Artificial Sequence: Synthetic oligonucleotide
agaucucugacagagccac

SEQ ID NO: 3179323 - RNA, 19 nt, Artificial Sequence
  Description of Artificial Sequence: Synthetic oligonucleotide
auguccacuguguagguag

SEQ ID NO: 3179324 - RNA, 19 nt, Artificial Sequence
  Description of Artificial Sequence: Synthetic oligonucleotide
uucaccacggcucuccgcc

SEQ ID NO: 3179325 - RNA, 19 nt, Artificial Sequence
  Description of Artificial Sequence: Synthetic oligonucleotide
uagguucuaaauuuucgca

SEQ ID NO: 3179326 - RNA, 19 nt, Artificial Sequence
  Description of Artificial Sequence: Synthetic oligonucleotide
gaagaauggguguuuuagc

SEQ ID NO: 3179327 - RNA, 19 nt, Artificial Sequence
  Description of Artificial Sequence: Synthetic oligonucleotide
auuuucgcagaucugucug

SEQ ID NO: 3179328 - RNA, 19 nt, Artificial Sequence
  Description of Artificial Sequence: Synthetic oligonucleotide
guuucucauggcucgaagg

SEQ ID NO: 3179329 - RNA, 19 nt, Artificial Sequence
  Description of Artificial Sequence: Synthetic oligonucleotide
guagguaggguuuuccuug

SEQ ID NO: 3179330 - RNA, 19 nt, Artificial Sequence
  Description of Artificial Sequence: Synthetic oligonucleotide
acuccuuuucuauucgguc

SEQ ID NO: 3179331 - RNA, 19 nt, Artificial Sequence
  Description of Artificial Sequence: Synthetic oligonucleotide
aggaugguugcccucagag

SEQ ID NO: 3179332 - RNA, 19 nt, Artificial Sequence
  Description of Artificial Sequence: Synthetic oligonucleotide
aaauuuucgcagaucuguc

SEQ ID NO: 3179333 - RNA, 19 nt, Artificial Sequence
  Description of Artificial Sequence: Synthetic oligonucleotide
uggguguuuuagcacaugc

SEQ ID NO: 3179334 - RNA, 19 nt, Artificial Sequence
  Description of Artificial Sequence: Synthetic oligonucleotide
aauucacgagcaaugacgu

SEQ ID NO: 3179335 - RNA, 19 nt, Artificial Sequence
  Description of Artificial Sequence: Synthetic oligonucleotide
ugugccuacccacugccag

SEQ ID NO: 3179336 - RNA, 19 nt, Artificial Sequence
  Description of Artificial Sequence: Synthetic oligonucleotide
ucugcaaggggacagugau

SEQ ID NO: 3179337 - RNA, 19 nt, Artificial Sequence
  Description of Artificial Sequence: Synthetic oligonucleotide
gaauggguguuuuagcaca

SEQ ID NO: 3179338 - RNA, 19 nt, Artificial Sequence
  Description of Artificial Sequence: Synthetic oligonucleotide
cacucaacaucucuggggc

SEQ ID NO: 3179339 - RNA, 19 nt, Artificial Sequence
  Description of Artificial Sequence: Synthetic oligonucleotide
uugcuggggauccauagca

SEQ ID NO: 3179340 - RNA, 19 nt, Artificial Sequence
  Description of Artificial Sequence: Synthetic oligonucleotide
uuuucuauucggucacuca

SEQ ID NO: 3179341 - RNA, 19 nt, Artificial Sequence
  Description of Artificial Sequence: Synthetic oligonucleotide
uuuuagcacaugcuuugca

SEQ ID NO: 3179342 - RNA, 19 nt, Artificial Sequence
  Description of Artificial Sequence: Synthetic oligonucleotide
aaaaggaugguugcccuca

SEQ ID NO: 3179343 - RNA, 19 nt, Artificial Sequence
  Description of Artificial Sequence: Synthetic oligonucleotide
acuaucgggccauccaagg

SEQ ID NO: 3179344 - RNA, 19 nt, Artificial Sequence
  Description of Artificial Sequence: Synthetic oligonucleotide
uuagcacaugcuuugcaga

SEQ ID NO: 3179345 - RNA, 19 nt, Artificial Sequence
  Description of Artificial Sequence: Synthetic oligonucleotide
ucgcagaucugucugcaag

SEQ ID NO: 3179346 - RNA, 19 nt, Artificial Sequence
  Description of Artificial Sequence: Synthetic oligonucleotide
uaucgggccauccaaggac

SEQ ID NO: 3179347 - RNA, 19 nt, Artificial Sequence
  Description of Artificial Sequence: Synthetic oligonucleotide
ucaauucacgagcaaugac

SEQ ID NO: 3179348 - RNA, 19 nt, Artificial Sequence
  Description of Artificial Sequence: Synthetic oligonucleotide
agcagucaaggcugcaggc

SEQ ID NO: 3179349 - RNA, 19 nt, Artificial Sequence
  Description of Artificial Sequence: Synthetic oligonucleotide
ucucauggcucgaaggaga

SEQ ID NO: 3179350 - RNA, 19 nt, Artificial Sequence
  Description of Artificial Sequence: Synthetic oligonucleotide
aucuucucuaucaauucac

SEQ ID NO: 3179351 - RNA, 19 nt, Artificial Sequence
  Description of Artificial Sequence: Synthetic oligonucleotide
uagcacaugcuuugcagag

SEQ ID NO: 3179352 - RNA, 19 nt, Artificial Sequence
  Description of Artificial Sequence: Synthetic oligonucleotide
uguuucucauggcucgaag

SEQ ID NO: 3179353 - RNA, 19 nt, Artificial Sequence
  Description of Artificial Sequence: Synthetic oligonucleotide
uucuauucggucacucaca

SEQ ID NO: 3179354 - RNA, 19 nt, Artificial Sequence
  Description of Artificial Sequence: Synthetic oligonucleotide
caugcuuugcagagggccg

SEQ ID NO: 3179355 - RNA, 19 nt, Artificial Sequence
  Description of Artificial Sequence: Synthetic oligonucleotide
caguccaucuucaccacgg

SEQ ID NO: 3179356 - RNA, 19 nt, Artificial Sequence
  Description of Artificial Sequence: Synthetic oligonucleotide
acagagccaccuuuguagg

SEQ ID NO: 3179357 - RNA, 19 nt, Artificial Sequence
  Description of Artificial Sequence: Synthetic oligonucleotide
acuggagcugcuuuuccag

SEQ ID NO: 3179358 - RNA, 19 nt, Artificial Sequence
  Description of Artificial Sequence: Synthetic oligonucleotide
uuuguagguucuaaauuuu

SEQ ID NO: 3179359 - RNA, 19 nt, Artificial Sequence
  Description of Artificial Sequence: Synthetic oligonucleotide
uccaggcuccagaagaaug

SEQ ID NO: 3179360 - RNA, 19 nt, Artificial Sequence
  Description of Artificial Sequence: Synthetic oligonucleotide
gacagugauguucucccgc

SEQ ID NO: 3179361 - RNA, 19 nt, Artificial Sequence
  Description of Artificial Sequence: Synthetic oligonucleotide
uccuuuucuauucggucac

SEQ ID NO: 3179362 - RNA, 19 nt, Artificial Sequence
  Description of Artificial Sequence: Synthetic oligonucleotide
uugccaaaaggaugguugc

SEQ ID NO: 3179363 - RNA, 19 nt, Artificial Sequence
  Description of Artificial Sequence: Synthetic oligonucleotide
uuacuaucgggccauccaa

SEQ ID NO: 3179364 - RNA, 19 nt, Artificial Sequence
  Description of Artificial Sequence: Synthetic oligonucleotide
ugcuuuuccaggcuccaga

SEQ ID NO: 3179365 - RNA, 19 nt, Artificial Sequence
  Description of Artificial Sequence: Synthetic oligonucleotide
ucgaaggagaucucugaca

SEQ ID NO: 3179366 - RNA, 19 nt, Artificial Sequence
  Description of Artificial Sequence: Synthetic oligonucleotide
agugauguucucccgccag

SEQ ID NO: 3179367 - RNA, 19 nt, Artificial Sequence
  Description of Artificial Sequence: Synthetic oligonucleotide
gcaaggacuugccaaaagg

SEQ ID NO: 3179368 - RNA, 19 nt, Artificial Sequence
  Description of Artificial Sequence: Synthetic oligonucleotide
acucacauccugaaagaac

SEQ ID NO: 3179369 - RNA, 19 nt, Artificial Sequence
  Description of Artificial Sequence: Synthetic oligonucleotide
ucuauucggucacucacau

SEQ ID NO: 3179370 - RNA, 19 nt, Artificial Sequence
  Description of Artificial Sequence: Synthetic oligonucleotide
caacugucuuacuaucggg

SEQ ID NO: 3179371 - RNA, 19 nt, Artificial Sequence
  Description of Artificial Sequence: Synthetic oligonucleotide
aacuggagcugcuuuucca

SEQ ID NO: 3179372 - RNA, 19 nt, Artificial Sequence
  Description of Artificial Sequence: Synthetic oligonucleotide
ucuccaacugucuuacuau

SEQ ID NO: 3179373 - RNA, 19 nt, Artificial Sequence
  Description of Artificial Sequence: Synthetic oligonucleotide
ggacuugccaaaaggaugg

SEQ ID NO: 3179374 - RNA, 19 nt, Artificial Sequence
  Description of Artificial Sequence: Synthetic oligonucleotide
uacuaucgggccauccaag

SEQ ID NO: 3179375 - RNA, 19 nt, Artificial Sequence
  Description of Artificial Sequence: Synthetic oligonucleotide
uuguagguucuaaauuuuc

SEQ ID NO: 3179376 - RNA, 19 nt, Artificial Sequence
  Description of Artificial Sequence: Synthetic oligonucleotide
ugcaaggacuugccaaaag

SEQ ID NO: 3179377 - RNA, 19 nt, Artificial Sequence
  Description of Artificial Sequence: Synthetic oligonucleotide
uuuucgcagaucugucugc

SEQ ID NO: 3179378 - RNA, 19 nt, Artificial Sequence
  Description of Artificial Sequence: Synthetic oligonucleotide
uugcagucuucacucaaca

SEQ ID NO: 3179379 - RNA, 19 nt, Artificial Sequence
  Description of Artificial Sequence: Synthetic oligonucleotide
ucacucacauccugaaaga

SEQ ID NO: 3179380 - RNA, 19 nt, Artificial Sequence
  Description of Artificial Sequence: Synthetic oligonucleotide
aucuucaccacggcucucc

SEQ ID NO: 3179381 - RNA, 19 nt, Artificial Sequence
  Description of Artificial Sequence: Synthetic oligonucleotide
gaugguugcccucagagau

SEQ ID NO: 3179382 - RNA, 19 nt, Artificial Sequence
  Description of Artificial Sequence: Synthetic oligonucleotide
agaucugucugcaagggga

SEQ ID NO: 3179383 - RNA, 19 nt, Artificial Sequence
  Description of Artificial Sequence: Synthetic oligonucleotide
aggacuccuuuucuauucg

SEQ ID NO: 3179384 - RNA, 19 nt, Artificial Sequence
  Description of Artificial Sequence: Synthetic oligonucleotide
ugaaucacuacauaaaucc

SEQ ID NO: 3179385 - RNA, 19 nt, Artificial Sequence
  Description of Artificial Sequence: Synthetic oligonucleotide
uuuauuugcagacugaauc

SEQ ID NO: 3179386 - RNA, 19 nt, Artificial Sequence
  Description of Artificial Sequence: Synthetic oligonucleotide
uguaagaggagccagacuc

SEQ ID NO: 3179387 - RNA, 19 nt, Artificial Sequence
  Description of Artificial Sequence: Synthetic oligonucleotide
guuacuuuguuuuauuugc

SEQ ID NO: 3179388 - RNA, 19 nt, Artificial Sequence
  Description of Artificial Sequence: Synthetic oligonucleotide
acauaaauccaccucacag

SEQ ID NO: 3179389 - RNA, 19 nt, Artificial Sequence
  Description of Artificial Sequence: Synthetic oligonucleotide
gauacuuggcauaauagag

SEQ ID NO: 3179390 - RNA, 19 nt, Artificial Sequence
  Description of Artificial Sequence: Synthetic oligonucleotide
auaaauccaccucacaguc

SEQ ID NO: 3179391 - RNA, 19 nt, Artificial Sequence
  Description of Artificial Sequence: Synthetic oligonucleotide
aaucacuacauaaauccac

SEQ ID NO: 3179392 - RNA, 19 nt, Artificial Sequence
  Description of Artificial Sequence: Synthetic oligonucleotide
acuacauaaauccaccuca

SEQ ID NO: 3179393 - RNA, 19 nt, Artificial Sequence
  Description of Artificial Sequence: Synthetic oligonucleotide
aaauccaccucacagucca

SEQ ID NO: 3179394 - RNA, 19 nt, Artificial Sequence
  Description of Artificial Sequence: Synthetic oligonucleotide
cuuuguuuuauuugcagac

SEQ ID NO: 3179395 - RNA, 19 nt, Artificial Sequence
  Description of Artificial Sequence: Synthetic oligonucleotide
uuguuuuauuugcagacug

SEQ ID NO: 3179396 - RNA, 19 nt, Artificial Sequence
  Description of Artificial Sequence: Synthetic oligonucleotide
auaauagagaugacaauac

SEQ ID NO: 3179397 - RNA, 19 nt, Artificial Sequence
  Description of Artificial Sequence: Synthetic oligonucleotide
uuauuugcagacugaauca

SEQ ID NO: 3179398 - RNA, 19 nt, Artificial Sequence
  Description of Artificial Sequence: Synthetic oligonucleotide
aaaauacagcucuccauug

SEQ ID NO: 3179399 - RNA, 19 nt, Artificial Sequence
  Description of Artificial Sequence: Synthetic oligonucleotide
aacacagggauacuuggca

SEQ ID NO: 3179400 - RNA, 19 nt, Artificial Sequence
  Description of Artificial Sequence: Synthetic oligonucleotide
cucacaguccaacacaggg

SEQ ID NO: 3179401 - RNA, 19 nt, Artificial Sequence
  Description of Artificial Sequence: Synthetic oligonucleotide
aauagagaugacaauacaa

SEQ ID NO: 3179402 - RNA, 19 nt, Artificial Sequence
  Description of Artificial Sequence: Synthetic oligonucleotide
cuuggcauaauagagauga

SEQ ID NO: 3179403 - RNA, 19 nt, Artificial Sequence
  Description of Artificial Sequence: Synthetic oligonucleotide
aucacuacauaaauccacc

SEQ ID NO: 3179404 - RNA, 19 nt, Artificial Sequence
  Description of Artificial Sequence: Synthetic oligonucleotide
ugagauccagaauuucagg

SEQ ID NO: 3179405 - RNA, 19 nt, Artificial Sequence
  Description of Artificial Sequence: Synthetic oligonucleotide
uaauagagaugacaauaca

SEQ ID NO: 3179406 - RNA, 19 nt, Artificial Sequence
  Description of Artificial Sequence: Synthetic oligonucleotide
gauccagaauuucagguac

SEQ ID NO: 3179407 - RNA, 19 nt, Artificial Sequence
  Description of Artificial Sequence: Synthetic oligonucleotide
uacuuuguuuuauuugcag

SEQ ID NO: 3179408 - RNA, 19 nt, Artificial Sequence
  Description of Artificial Sequence: Synthetic oligonucleotide
uccaguccaagccagugag

SEQ ID NO: 3179409 - RNA, 19 nt, Artificial Sequence
  Description of Artificial Sequence: Synthetic oligonucleotide
aaauacagcucuccauugu

SEQ ID NO: 3179410 - RNA, 19 nt, Artificial Sequence
  Description of Artificial Sequence: Synthetic oligonucleotide
ugcagacugaaucacuaca

SEQ ID NO: 3179411 - RNA, 19 nt, Artificial Sequence
  Description of Artificial Sequence: Synthetic oligonucleotide
acugaaucacuacauaaau

SEQ ID NO: 3179412 - RNA, 19 nt, Artificial Sequence
  Description of Artificial Sequence: Synthetic oligonucleotide
uguuuuauuugcagacuga

SEQ ID NO: 3179413 - RNA, 19 nt, Artificial Sequence
  Description of Artificial Sequence: Synthetic oligonucleotide
auuguaagaggagccagac

SEQ ID NO: 3179414 - RNA, 19 nt, Artificial Sequence
  Description of Artificial Sequence: Synthetic oligonucleotide
agaggagccagacucagcu

SEQ ID NO: 3179415 - RNA, 19 nt, Artificial Sequence
  Description of Artificial Sequence: Synthetic oligonucleotide
uagagaugacaauacaaaa

SEQ ID NO: 3179416 - RNA, 19 nt, Artificial Sequence
  Description of Artificial Sequence: Synthetic oligonucleotide
acuuuguuuuauuugcaga

SEQ ID NO: 3179417 - RNA, 19 nt, Artificial Sequence
  Description of Artificial Sequence: Synthetic oligonucleotide
agcuuguuccaguccaagc

SEQ ID NO: 3179418 - RNA, 19 nt, Artificial Sequence
  Description of Artificial Sequence: Synthetic oligonucleotide
guccaagccagugagaucc

SEQ ID NO: 3179419 - RNA, 19 nt, Artificial Sequence
  Description of Artificial Sequence: Synthetic oligonucleotide
uuugcagacugaaucacua

SEQ ID NO: 3179420 - RNA, 19 nt, Artificial Sequence
  Description of Artificial Sequence: Synthetic oligonucleotide
uccaacacagggauacuug

SEQ ID NO: 3179421 - RNA, 19 nt, Artificial Sequence
  Description of Artificial Sequence: Synthetic oligonucleotide
uuacuuuguuuuauuugca

SEQ ID NO: 3179422 - RNA, 19 nt, Artificial Sequence
  Description of Artificial Sequence: Synthetic oligonucleotide
uacuuggcauaauagagau

SEQ ID NO: 3179423 - RNA, 19 nt, Artificial Sequence
  Description of Artificial Sequence: Synthetic oligonucleotide
aauacagcucuccauugua

SEQ ID NO: 3179424 - RNA, 19 nt, Artificial Sequence
  Description of Artificial Sequence: Synthetic oligonucleotide
ucuccauuguaagaggagc

SEQ ID NO: 3179425 - RNA, 19 nt, Artificial Sequence
  Description of Artificial Sequence: Synthetic oligonucleotide
uacagcucuccauuguaag

SEQ ID NO: 3179426 - RNA, 19 nt, Artificial Sequence
  Description of Artificial Sequence: Synthetic oligonucleotide
agacugaaucacuacauaa

SEQ ID NO: 3179427 - RNA, 19 nt, Artificial Sequence
  Description of Artificial Sequence: Synthetic oligonucleotide
aagccagugagauccagaa

SEQ ID NO: 3179428 - RNA, 19 nt, Artificial Sequence
  Description of Artificial Sequence: Synthetic oligonucleotide
uuuuauuugcagacugaau

SEQ ID NO: 3179429 - RNA, 19 nt, Artificial Sequence
  Description of Artificial Sequence: Synthetic oligonucleotide
gguuacuuuguuuuauuug

SEQ ID NO: 3179430 - RNA, 19 nt, Artificial Sequence
  Description of Artificial Sequence: Synthetic oligonucleotide
cuccauuguaagaggagcc

SEQ ID NO: 3179431 - RNA, 19 nt, Artificial Sequence
  Description of Artificial Sequence: Synthetic oligonucleotide
auagagaugacaauacaaa

SEQ ID NO: 3179432 - RNA, 19 nt, Artificial Sequence
  Description of Artificial Sequence: Synthetic oligonucleotide
uuuguuuuauuugcagacu

SEQ ID NO: 3179433 - RNA, 19 nt, Artificial Sequence
  Description of Artificial Sequence: Synthetic oligonucleotide
cauaauagagaugacaaua

SEQ ID NO: 3179434 - RNA, 19 nt, Artificial Sequence
  Description of Artificial Sequence: Synthetic oligonucleotide
uggcauaauagagaugaca

SEQ ID NO: 3179435 - RNA, 19 nt, Artificial Sequence
  Description of Artificial Sequence: Synthetic oligonucleotide
cugaaucacuacauaaauc

SEQ ID NO: 3179436 - RNA, 19 nt, Artificial Sequence
  Description of Artificial Sequence: Synthetic oligonucleotide
uacauaaauccaccucaca

SEQ ID NO: 3179437 - RNA, 19 nt, Artificial Sequence
  Description of Artificial Sequence: Synthetic oligonucleotide
ucacaguccaacacaggga

SEQ ID NO: 3179438 - RNA, 19 nt, Artificial Sequence
  Description of Artificial Sequence: Synthetic oligonucleotide
uaaauccaccucacagucc

SEQ ID NO: 3179439 - RNA, 19 nt, Artificial Sequence
  Description of Artificial Sequence: Synthetic oligonucleotide
aggagccagacucagcuug

SEQ ID NO: 3179440 - RNA, 19 nt, Artificial Sequence
  Description of Artificial Sequence: Synthetic oligonucleotide
uuguuccaguccaagccag

SEQ ID NO: 3179441 - RNA, 19 nt, Artificial Sequence
  Description of Artificial Sequence: Synthetic oligonucleotide
acucagcuuguuccagucc

SEQ ID NO: 3179442 - RNA, 19 nt, Artificial Sequence
  Description of Artificial Sequence: Synthetic oligonucleotide
cuacauaaauccaccucac

SEQ ID NO: 3179443 - RNA, 19 nt, Artificial Sequence
  Description of Artificial Sequence: Synthetic oligonucleotide
gugagauccagaauuucag

SEQ ID NO: 3179444 - RNA, 19 nt, Artificial Sequence
  Description of Artificial Sequence: Synthetic oligonucleotide
uauuugcagacugaaucac

SEQ ID NO: 3179445 - RNA, 19 nt, Artificial Sequence
  Description of Artificial Sequence: Synthetic oligonucleotide
gcuuguuccaguccaagcc

SEQ ID NO: 3179446 - RNA, 19 nt, Artificial Sequence
  Description of Artificial Sequence: Synthetic oligonucleotide
ucacuacauaaauccaccu

SEQ ID NO: 3179447 - RNA, 19 nt, Artificial Sequence
  Description of Artificial Sequence: Synthetic oligonucleotide
agugagauccagaauuuca

SEQ ID NO: 3179448 - RNA, 19 nt, Artificial Sequence
  Description of Artificial Sequence: Synthetic oligonucleotide
agcucuccauuguaagagg

SEQ ID NO: 3179449 - RNA, 19 nt, Artificial Sequence
  Description of Artificial Sequence: Synthetic oligonucleotide
cacuacauaaauccaccuc

SEQ ID NO: 3179450 - RNA, 19 nt, Artificial Sequence
  Description of Artificial Sequence: Synthetic oligonucleotide
agauccagaauuucaggua

SEQ ID NO: 3179451 - RNA, 19 nt, Artificial Sequence
  Description of Artificial Sequence: Synthetic oligonucleotide
uaagaggagccagacucag

SEQ ID NO: 3179452 - RNA, 19 nt, Artificial Sequence
  Description of Artificial Sequence: Synthetic oligonucleotide
caguccaacacagggauac

SEQ ID NO: 3179453 - RNA, 19 nt, Artificial Sequence
  Description of Artificial Sequence: Synthetic oligonucleotide
ggauacuuggcauaauaga

SEQ ID NO: 3179454 - RNA, 19 nt, Artificial Sequence
  Description of Artificial Sequence: Synthetic oligonucleotide
gagauccagaauuucaggu

SEQ ID NO: 3179455 - RNA, 19 nt, Artificial Sequence
  Description of Artificial Sequence: Synthetic oligonucleotide
cucuccauuguaagaggag

SEQ ID NO: 3179456 - RNA, 19 nt, Artificial Sequence
  Description of Artificial Sequence: Synthetic oligonucleotide
uccauuguaagaggagcca

SEQ ID NO: 3179457 - RNA, 19 nt, Artificial Sequence
  Description of Artificial Sequence: Synthetic oligonucleotide
caacacagggauacuuggc

SEQ ID NO: 3179458 - RNA, 19 nt, Artificial Sequence
  Description of Artificial Sequence: Synthetic oligonucleotide
auacuuggcauaauagaga

SEQ ID NO: 3179459 - RNA, 19 nt, Artificial Sequence
  Description of Artificial Sequence: Synthetic oligonucleotide
cagcucuccauuguaagag

SEQ ID NO: 3179460 - RNA, 19 nt, Artificial Sequence
  Description of Artificial Sequence: Synthetic oligonucleotide
gacugaaucacuacauaaa

SEQ ID NO: 3179461 - RNA, 19 nt, Artificial Sequence
  Description of Artificial Sequence: Synthetic oligonucleotide
acagcucuccauuguaaga

SEQ ID NO: 3179462 - RNA, 19 nt, Artificial Sequence
  Description of Artificial Sequence: Synthetic oligonucleotide
gaaucacuacauaaaucca

SEQ ID NO: 3179463 - RNA, 19 nt, Artificial Sequence
  Description of Artificial Sequence: Synthetic oligonucleotide
uuccaguccaagccaguga

SEQ ID NO: 3179464 - RNA, 19 nt, Artificial Sequence
  Description of Artificial Sequence: Synthetic oligonucleotide
aagaggagccagacucagc

SEQ ID NO: 3179465 - RNA, 19 nt, Artificial Sequence
  Description of Artificial Sequence: Synthetic oligonucleotide
agggauacuuggcauaaua

SEQ ID NO: 3179466 - RNA, 19 nt, Artificial Sequence
  Description of Artificial Sequence: Synthetic oligonucleotide
gccagacucagcuuguucc

SEQ ID NO: 3179467 - RNA, 19 nt, Artificial Sequence
  Description of Artificial Sequence: Synthetic oligonucleotide
cauaaauccaccucacagu

SEQ ID NO: 3179468 - RNA, 19 nt, Artificial Sequence
  Description of Artificial Sequence: Synthetic oligonucleotide
uuguaagaggagccagacu

SEQ ID NO: 3179469 - RNA, 19 nt, Artificial Sequence
  Description of Artificial Sequence: Synthetic oligonucleotide
ggcauaauagagaugacaa

SEQ ID NO: 3179470 - RNA, 19 nt, Artificial Sequence
  Description of Artificial Sequence: Synthetic oligonucleotide
ugguuacuuuguuuuauuu

SEQ ID NO: 3179471 - RNA, 19 nt, Artificial Sequence
  Description of Artificial Sequence: Synthetic oligonucleotide
auugguuacuuuguuuuau

SEQ ID NO: 3179472 - RNA, 19 nt, Artificial Sequence
  Description of Artificial Sequence: Synthetic oligonucleotide
uccaccucacaguccaaca

SEQ ID NO: 3179473 - RNA, 19 nt, Artificial Sequence
  Description of Artificial Sequence: Synthetic oligonucleotide
guuuuauuugcagacugaa

SEQ ID NO: 3179474 - RNA, 19 nt, Artificial Sequence
  Description of Artificial Sequence: Synthetic oligonucleotide
aguccaagccagugagauc

SEQ ID NO: 3179475 - RNA, 19 nt, Artificial Sequence
  Description of Artificial Sequence: Synthetic oligonucleotide
cucagcuuguuccagucca

SEQ ID NO: 3179476 - RNA, 19 nt, Artificial Sequence
  Description of Artificial Sequence: Synthetic oligonucleotide
ccaacacagggauacuugg

SEQ ID NO: 3179477 - RNA, 19 nt, Artificial Sequence
  Description of Artificial Sequence: Synthetic oligonucleotide
cuuguuccaguccaagcca

SEQ ID NO: 3179478 - RNA, 19 nt, Artificial Sequence
  Description of Artificial Sequence: Synthetic oligonucleotide
agccagacucagcuuguuc

SEQ ID NO: 3179479 - RNA, 19 nt, Artificial Sequence
  Description of Artificial Sequence: Synthetic oligonucleotide
uugcagacugaaucacuac

SEQ ID NO: 3179480 - RNA, 19 nt, Artificial Sequence
  Description of Artificial Sequence: Synthetic oligonucleotide
uugguuacuuuguuuuauu

SEQ ID NO: 3179481 - RNA, 19 nt, Artificial Sequence
  Description of Artificial Sequence: Synthetic oligonucleotide
gggauacuuggcauaauag

SEQ ID NO: 3179482 - RNA, 19 nt, Artificial Sequence
  Description of Artificial Sequence: Synthetic oligonucleotide
gacucagcuuguuccaguc

SEQ ID NO: 3179483 - RNA, 19 nt, Artificial Sequence
  Description of Artificial Sequence: Synthetic oligonucleotide
uccagaauuucagguacaa

SEQ ID NO: 3179484 - RNA, 19 nt, Artificial Sequence
  Description of Artificial Sequence: Synthetic oligonucleotide
gaugcaguaacuuuugggg

SEQ ID NO: 3179485 - RNA, 19 nt, Artificial Sequence
  Description of Artificial Sequence: Synthetic oligonucleotide
uccagaaucaguuccaggg

SEQ ID NO: 3179486 - RNA, 19 nt, Artificial Sequence
  Description of Artificial Sequence: Synthetic oligonucleotide
agagguuccaaguggaugc

SEQ ID NO: 3179487 - RNA, 19 nt, Artificial Sequence
  Description of Artificial Sequence: Synthetic oligonucleotide
uucuguucaaucuugccgg

SEQ ID NO: 3179488 - RNA, 19 nt, Artificial Sequence
  Description of Artificial Sequence: Synthetic oligonucleotide
aacuuugagaugcucuugg

SEQ ID NO: 3179489 - RNA, 19 nt, Artificial Sequence
  Description of Artificial Sequence: Synthetic oligonucleotide
uuacugacaaggaacaggc

SEQ ID NO: 3179490 - RNA, 19 nt, Artificial Sequence
  Description of Artificial Sequence: Synthetic oligonucleotide
uuuacugacaaggaacagg

SEQ ID NO: 3179491 - RNA, 19 nt, Artificial Sequence
  Description of Artificial Sequence: Synthetic oligonucleotide
agagcuguccgcaacaucc

SEQ ID NO: 3179492 - RNA, 19 nt, Artificial Sequence
  Description of Artificial Sequence: Synthetic oligonucleotide
guucuguucaaucuugccg

SEQ ID NO: 3179493 - RNA, 19 nt, Artificial Sequence
  Description of Artificial Sequence: Synthetic oligonucleotide
uguuuacugacaaggaaca

SEQ ID NO: 3179494 - RNA, 19 nt, Artificial Sequence
  Description of Artificial Sequence: Synthetic oligonucleotide
gauguggugguucuggcag

SEQ ID NO: 3179495 - RNA, 19 nt, Artificial Sequence
  Description of Artificial Sequence: Synthetic oligonucleotide
ucuucgauguuccucuucc

SEQ ID NO: 3179496 - RNA, 19 nt, Artificial Sequence
  Description of Artificial Sequence: Synthetic oligonucleotide
augaccgaguaccacagac

SEQ ID NO: 3179497 - RNA, 19 nt, Artificial Sequence
  Description of Artificial Sequence: Synthetic oligonucleotide
acugacaaggaacaggcca

SEQ ID NO: 3179498 - RNA, 19 nt, Artificial Sequence
  Description of Artificial Sequence: Synthetic oligonucleotide
aguucuguucaaucuugcc

SEQ ID NO: 3179499 - RNA, 19 nt, Artificial Sequence
  Description of Artificial Sequence: Synthetic oligonucleotide
agcuacgccagcccgaggc

SEQ ID NO: 3179500 - RNA, 19 nt, Artificial Sequence
  Description of Artificial Sequence: Synthetic oligonucleotide
agagaaccagccuagguug

SEQ ID NO: 3179501 - RNA, 19 nt, Artificial Sequence
  Description of Artificial Sequence: Synthetic oligonucleotide
agacacucggcguaccucc

SEQ ID NO: 3179502 - RNA, 19 nt, Artificial Sequence
  Description of Artificial Sequence: Synthetic oligonucleotide
uaggccaacuuugagaugc

SEQ ID NO: 3179503 - RNA, 19 nt, Artificial Sequence
  Description of Artificial Sequence: Synthetic oligonucleotide
ugaccacaggcccugaucc

SEQ ID NO: 3179504 - RNA, 19 nt, Artificial Sequence
  Description of Artificial Sequence: Synthetic oligonucleotide
acuacgcaggaguaugggc

SEQ ID NO: 3179505 - RNA, 19 nt, Artificial Sequence
  Description of Artificial Sequence: Synthetic oligonucleotide
agccuccagaaucaguucc

SEQ ID NO: 3179506 - RNA, 19 nt, Artificial Sequence
  Description of Artificial Sequence: Synthetic oligonucleotide
aguaccacagaccuaggcu

SEQ ID NO: 3179507 - RNA, 19 nt, Artificial Sequence
  Description of Artificial Sequence: Synthetic oligonucleotide
agaguguacaagucaguuc

SEQ ID NO: 3179508 - RNA, 19 nt, Artificial Sequence
  Description of Artificial Sequence: Synthetic oligonucleotide
ucaguucuguucaaucuug

SEQ ID NO: 3179509 - RNA, 19 nt, Artificial Sequence
  Description of Artificial Sequence: Synthetic oligonucleotide
guugucagcgaugaugugg

SEQ ID NO: 3179510 - RNA, 19 nt, Artificial Sequence
  Description of Artificial Sequence: Synthetic oligonucleotide
uccaaguggaugcaguaac

SEQ ID NO: 3179511 - RNA, 19 nt, Artificial Sequence
  Description of Artificial Sequence: Synthetic oligonucleotide
uucgauguuccucuucccc

SEQ ID NO: 3179512 - RNA, 19 nt, Artificial Sequence
  Description of Artificial Sequence: Synthetic oligonucleotide
aaucaguuccagggcaccc

SEQ ID NO: 3179513 - RNA, 19 nt, Artificial Sequence
  Description of Artificial Sequence: Synthetic oligonucleotide
acagaccuaggcuugcagg

SEQ ID NO: 3179514 - RNA, 19 nt, Artificial Sequence
  Description of Artificial Sequence: Synthetic oligonucleotide
aucucuucgauguuccucu

SEQ ID NO: 3179515 - RNA, 19 nt, Artificial Sequence
  Description of Artificial Sequence: Synthetic oligonucleotide
uucaggucagagaaccagc

SEQ ID NO: 3179516 - RNA, 19 nt, Artificial Sequence
  Description of Artificial Sequence: Synthetic oligonucleotide
cagcuguuuacugacaagg

SEQ ID NO: 3179517 - RNA, 19 nt, Artificial Sequence
  Description of Artificial Sequence: Synthetic oligonucleotide
cugacaaggaacaggccag

SEQ ID NO: 3179518 - RNA, 19 nt, Artificial Sequence
  Description of Artificial Sequence: Synthetic oligonucleotide
aggaguaugggcacgcggc

SEQ ID NO: 3179519 - RNA, 19 nt, Artificial Sequence
  Description of Artificial Sequence: Synthetic oligonucleotide
uguucaaucuugccgggaa

SEQ ID NO: 3179520 - RNA, 19 nt, Artificial Sequence
  Description of Artificial Sequence: Synthetic oligonucleotide
ugguaggccaacuuugaga

SEQ ID NO: 3179521 - RNA, 19 nt, Artificial Sequence
  Description of Artificial Sequence: Synthetic oligonucleotide
uccggguccgcacacuacg

SEQ ID NO: 3179522 - RNA, 19 nt, Artificial Sequence
  Description of Artificial Sequence: Synthetic oligonucleotide
ggaugcaguaacuuuuggg

SEQ ID NO: 3179523 - RNA, 19 nt, Artificial Sequence
  Description of Artificial Sequence: Synthetic oligonucleotide
uggugguaggccaacuuug

SEQ ID NO: 3179524 - RNA, 19 nt, Artificial Sequence
  Description of Artificial Sequence: Synthetic oligonucleotide
ucagcgaugaugugguggu

SEQ ID NO: 3179525 - RNA, 19 nt, Artificial Sequence
  Description of Artificial Sequence: Synthetic oligonucleotide
augauguggugguucuggc

SEQ ID NO: 3179526 - RNA, 19 nt, Artificial Sequence
  Description of Artificial Sequence: Synthetic oligonucleotide
ugaccgaguaccacagacc

SEQ ID NO: 3179527 - RNA, 19 nt, Artificial Sequence
  Description of Artificial Sequence: Synthetic oligonucleotide
ucaaucuugccgggaaggg

SEQ ID NO: 3179528 - RNA, 19 nt, Artificial Sequence
  Description of Artificial Sequence: Synthetic oligonucleotide
uggaugcaguaacuuuugg

SEQ ID NO: 3179529 - RNA, 19 nt, Artificial Sequence
  Description of Artificial Sequence: Synthetic oligonucleotide
ucagagaaccagccuaggu

SEQ ID NO: 3179530 - RNA, 19 nt, Artificial Sequence
  Description of Artificial Sequence: Synthetic oligonucleotide
ucuguucaaucuugccggg

SEQ ID NO: 3179531 - RNA, 19 nt, Artificial Sequence
  Description of Artificial Sequence: Synthetic oligonucleotide
ugguucagcagccuccaga

SEQ ID NO: 3179532 - RNA, 19 nt, Artificial Sequence
  Description of Artificial Sequence: Synthetic oligonucleotide
aggaucucuucgauguucc

SEQ ID NO: 3179533 - RNA, 19 nt, Artificial Sequence
  Description of Artificial Sequence: Synthetic oligonucleotide
uguagacgagcugguagcg

SEQ ID NO: 3179534 - RNA, 19 nt, Artificial Sequence
  Description of Artificial Sequence: Synthetic oligonucleotide
agccucugaaucccagagc

SEQ ID NO: 3179535 - RNA, 19 nt, Artificial Sequence
  Description of Artificial Sequence: Synthetic oligonucleotide
gguguagacgagcugguag

SEQ ID NO: 3179536 - RNA, 19 nt, Artificial Sequence
  Description of Artificial Sequence: Synthetic oligonucleotide
aaccagccuagguugucag

SEQ ID NO: 3179537 - RNA, 19 nt, Artificial Sequence
  Description of Artificial Sequence: Synthetic oligonucleotide
uaggcuugcagguguagac

SEQ ID NO: 3179538 - RNA, 19 nt, Artificial Sequence
  Description of Artificial Sequence: Synthetic oligonucleotide
gaaggguaggauccucacc

SEQ ID NO: 3179539 - RNA, 19 nt, Artificial Sequence
  Description of Artificial Sequence: Synthetic oligonucleotide
guaggugacagcuguuuac

SEQ ID NO: 3179540 - RNA, 19 nt, Artificial Sequence
  Description of Artificial Sequence: Synthetic oligonucleotide
uagacgagcugguagcggu

SEQ ID NO: 3179541 - RNA, 19 nt, Artificial Sequence
  Description of Artificial Sequence: Synthetic oligonucleotide
cuacgcaggaguaugggca

SEQ ID NO: 3179542 - RNA, 19 nt, Artificial Sequence
  Description of Artificial Sequence: Synthetic oligonucleotide
gucagcgaugauguggugg

SEQ ID NO: 3179543 - RNA, 19 nt, Artificial Sequence
  Description of Artificial Sequence: Synthetic oligonucleotide
gccucugaaucccagagcc

SEQ ID NO: 3179544 - RNA, 19 nt, Artificial Sequence
  Description of Artificial Sequence: Synthetic oligonucleotide
agaaucaguuccagggcac

SEQ ID NO: 3179545 - RNA, 19 nt, Artificial Sequence
  Description of Artificial Sequence: Synthetic oligonucleotide
aggguaggauccucacccc

SEQ ID NO: 3179546 - RNA, 19 nt, Artificial Sequence
  Description of Artificial Sequence: Synthetic oligonucleotide
aguccacagccgcagagug

SEQ ID NO: 3179547 - RNA, 19 nt, Artificial Sequence
  Description of Artificial Sequence: Synthetic oligonucleotide
gagagguuccaaguggaug

SEQ ID NO: 3179548 - RNA, 19 nt, Artificial Sequence
  Description of Artificial Sequence: Synthetic oligonucleotide
aggucagagaaccagccua

SEQ ID NO: 3179549 - RNA, 19 nt, Artificial Sequence
  Description of Artificial Sequence: Synthetic oligonucleotide
gcagguguagacgagcugg

SEQ ID NO: 3179550 - RNA, 19 nt, Artificial Sequence
  Description of Artificial Sequence: Synthetic oligonucleotide
cucuccgcgguccucaggc

SEQ ID NO: 3179551 - RNA, 19 nt, Artificial Sequence
  Description of Artificial Sequence: Synthetic oligonucleotide
agcgaugauguggugguuc

SEQ ID NO: 3179552 - RNA, 19 nt, Artificial Sequence
  Description of Artificial Sequence: Synthetic oligonucleotide
aguaugggcacgcggcuca

SEQ ID NO: 3179553 - RNA, 19 nt, Artificial Sequence
  Description of Artificial Sequence: Synthetic oligonucleotide
cuucuggggcagcaggugg

SEQ ID NO: 3179554 - RNA, 19 nt, Artificial Sequence
  Description of Artificial Sequence: Synthetic oligonucleotide
aaucuugccgggaagggua

SEQ ID NO: 3179555 - RNA, 19 nt, Artificial Sequence
  Description of Artificial Sequence: Synthetic oligonucleotide
acccucgccagacacucgg

SEQ ID NO: 3179556 - RNA, 19 nt, Artificial Sequence
  Description of Artificial Sequence: Synthetic oligonucleotide
uaccacagaccuaggcuug

SEQ ID NO: 3179557 - RNA, 19 nt, Artificial Sequence
  Description of Artificial Sequence: Synthetic oligonucleotide
gaccacaccguggugguag

SEQ ID NO: 3179558 - RNA, 19 nt, Artificial Sequence
  Description of Artificial Sequence: Synthetic oligonucleotide
aaucccagagccgccccgg

SEQ ID NO: 3179559 - RNA, 19 nt, Artificial Sequence
  Description of Artificial Sequence: Synthetic oligonucleotide
uguacaagucaguucuguu

SEQ ID NO: 3179560 - RNA, 19 nt, Artificial Sequence
  Description of Artificial Sequence: Synthetic oligonucleotide
aggugguucagcagccucc

SEQ ID NO: 3179561 - RNA, 19 nt, Artificial Sequence
  Description of Artificial Sequence: Synthetic oligonucleotide
ugcucuuggaugaccgagu

SEQ ID NO: 3179562 - RNA, 19 nt, Artificial Sequence
  Description of Artificial Sequence: Synthetic oligonucleotide
cuguccgcaacauccugcc

SEQ ID NO: 3179563 - RNA, 19 nt, Artificial Sequence
  Description of Artificial Sequence: Synthetic oligonucleotide
uaggugacagcuguuuacu

SEQ ID NO: 3179564 - RNA, 19 nt, Artificial Sequence
  Description of Artificial Sequence: Synthetic oligonucleotide
aggccugagagguuccaag

SEQ ID NO: 3179565 - RNA, 19 nt, Artificial Sequence
  Description of Artificial Sequence: Synthetic oligonucleotide
gacagcuguuuacugacaa

SEQ ID NO: 3179566 - RNA, 19 nt, Artificial Sequence
  Description of Artificial Sequence: Synthetic oligonucleotide
agccgcagaguguacaagu

SEQ ID NO: 3179567 - RNA, 19 nt, Artificial Sequence
  Description of Artificial Sequence: Synthetic oligonucleotide
guucaaucuugccgggaag

SEQ ID NO: 3179568 - RNA, 19 nt, Artificial Sequence
  Description of Artificial Sequence: Synthetic oligonucleotide
caguucuguucaaucuugc

SEQ ID NO: 3179569 - RNA, 19 nt, Artificial Sequence
  Description of Artificial Sequence: Synthetic oligonucleotide
uacugacaaggaacaggcc

SEQ ID NO: 3179570 - RNA, 19 nt, Artificial Sequence
  Description of Artificial Sequence: Synthetic oligonucleotide
aguggaugcaguaacuuuu

SEQ ID NO: 3179571 - RNA, 19 nt, Artificial Sequence
  Description of Artificial Sequence: Synthetic oligonucleotide
cacacuacgcaggaguaug

SEQ ID NO: 3179572 - RNA, 19 nt, Artificial Sequence
  Description of Artificial Sequence: Synthetic oligonucleotide
cucgagcuacgccagcccg

SEQ ID NO: 3179573 - RNA, 19 nt, Artificial Sequence
  Description of Artificial Sequence: Synthetic oligonucleotide
agccccgucgucucuccgc

SEQ ID NO: 3179574 - RNA, 19 nt, Artificial Sequence
  Description of Artificial Sequence: Synthetic oligonucleotide
gaucucuucgauguuccuc

SEQ ID NO: 3179575 - RNA, 19 nt, Artificial Sequence
  Description of Artificial Sequence: Synthetic oligonucleotide
caggaguaugggcacgcgg

SEQ ID NO: 3179576 - RNA, 19 nt, Artificial Sequence
  Description of Artificial Sequence: Synthetic oligonucleotide
uacgcaggaguaugggcac

SEQ ID NO: 3179577 - RNA, 19 nt, Artificial Sequence
  Description of Artificial Sequence: Synthetic oligonucleotide
gaaucaguuccagggcacc

SEQ ID NO: 3179578 - RNA, 19 nt, Artificial Sequence
  Description of Artificial Sequence: Synthetic oligonucleotide
aggcccugaucccugcgcg

SEQ ID NO: 3179579 - RNA, 19 nt, Artificial Sequence
  Description of Artificial Sequence: Synthetic oligonucleotide
aggcuugcagguguagacg

SEQ ID NO: 3179580 - RNA, 19 nt, Artificial Sequence
  Description of Artificial Sequence: Synthetic oligonucleotide
cagaaucaguuccagggca

SEQ ID NO: 3179581 - RNA, 19 nt, Artificial Sequence
  Description of Artificial Sequence: Synthetic oligonucleotide
ugcagguguagacgagcug

SEQ ID NO: 3179582 - RNA, 19 nt, Artificial Sequence
  Description of Artificial Sequence: Synthetic oligonucleotide
guuuacugacaaggaacag

SEQ ID NO: 3179583 - RNA, 19 nt, Artificial Sequence
  Description of Artificial Sequence: Synthetic oligonucleotide
cuucgauguuccucuuccc

SEQ ID NO: 3179584 - RNA, 19 nt, Artificial Sequence
  Description of Artificial Sequence: Synthetic oligonucleotide
aauucaauauacuucagug

SEQ ID NO: 3179585 - RNA, 19 nt, Artificial Sequence
  Description of Artificial Sequence: Synthetic oligonucleotide
aacaucuuugcccaaaagg

SEQ ID NO: 3179586 - RNA, 19 nt, Artificial Sequence
  Description of Artificial Sequence: Synthetic oligonucleotide
aagaauucaauauacuuca

SEQ ID NO: 3179587 - RNA, 19 nt, Artificial Sequence
  Description of Artificial Sequence: Synthetic oligonucleotide
aauuguugaacacucaaga

SEQ ID NO: 3179588 - RNA, 19 nt, Artificial Sequence
  Description of Artificial Sequence: Synthetic oligonucleotide
ucaaaauccgaaaagaaau

SEQ ID NO: 3179589 - RNA, 19 nt, Artificial Sequence
  Description of Artificial Sequence: Synthetic oligonucleotide
acauucaggacguaauucc

SEQ ID NO: 3179590 - RNA, 19 nt, Artificial Sequence
  Description of Artificial Sequence: Synthetic oligonucleotide
aaaaggaacucacauucag

SEQ ID NO: 3179591 - RNA, 19 nt, Artificial Sequence
  Description of Artificial Sequence: Synthetic oligonucleotide
aauguuaccaacaucuuug

SEQ ID NO: 3179592 - RNA, 19 nt, Artificial Sequence
  Description of Artificial Sequence: Synthetic oligonucleotide
uucaauauacuucagugaa

SEQ ID NO: 3179593 - RNA, 19 nt, Artificial Sequence
  Description of Artificial Sequence: Synthetic oligonucleotide
cuuucuaugggaauuuucc

SEQ ID NO: 3179594 - RNA, 19 nt, Artificial Sequence
  Description of Artificial Sequence: Synthetic oligonucleotide
guuaccaacaucuuugccc

SEQ ID NO: 3179595 - RNA, 19 nt, Artificial Sequence
  Description of Artificial Sequence: Synthetic oligonucleotide
uaaagacaaagccagcugc

SEQ ID NO: 3179596 - RNA, 19 nt, Artificial Sequence
  Description of Artificial Sequence: Synthetic oligonucleotide
uuauacuggaaauuguuga

SEQ ID NO: 3179597 - RNA, 19 nt, Artificial Sequence
  Description of Artificial Sequence: Synthetic oligonucleotide
uuuauacuggaaauuguug

SEQ ID NO: 3179598 - RNA, 19 nt, Artificial Sequence
  Description of Artificial Sequence: Synthetic oligonucleotide
aaggaacucacauucagga

SEQ ID NO: 3179599 - RNA, 19 nt, Artificial Sequence
  Description of Artificial Sequence: Synthetic oligonucleotide
caagaauucaauauacuuc

SEQ ID NO: 3179600 - RNA, 19 nt, Artificial Sequence
  Description of Artificial Sequence: Synthetic oligonucleotide
uaccuguaaagacaaagcc

SEQ ID NO: 3179601 - RNA, 19 nt, Artificial Sequence
  Description of Artificial Sequence: Synthetic oligonucleotide
uuaccuguaaagacaaagc

SEQ ID NO: 3179602 - RNA, 19 nt, Artificial Sequence
  Description of Artificial Sequence: Synthetic oligonucleotide
acccuuacaucauacuugc

SEQ ID NO: 3179603 - RNA, 19 nt, Artificial Sequence
  Description of Artificial Sequence: Synthetic oligonucleotide
uguugaacacucaagaauu

SEQ ID NO: 3179604 - RNA, 19 nt, Artificial Sequence
  Description of Artificial Sequence: Synthetic oligonucleotide
aaauccgaaaagaaaucac

SEQ ID NO: 3179605 - RNA, 19 nt, Artificial Sequence
  Description of Artificial Sequence: Synthetic oligonucleotide
aaaauccgaaaagaaauca

SEQ ID NO: 3179606 - RNA, 19 nt, Artificial Sequence
  Description of Artificial Sequence: Synthetic oligonucleotide
uuugucaccucucagcuuc

SEQ ID NO: 3179607 - RNA, 19 nt, Artificial Sequence
  Description of Artificial Sequence: Synthetic oligonucleotide
ucaagaauucaauauacuu

SEQ ID NO: 3179608 - RNA, 19 nt, Artificial Sequence
  Description of Artificial Sequence: Synthetic oligonucleotide
aaggacuccagucuggccu

SEQ ID NO: 3179609 - RNA, 19 nt, Artificial Sequence
  Description of Artificial Sequence: Synthetic oligonucleotide
ggaacucacauucaggacg

SEQ ID NO: 3179610 - RNA, 19 nt, Artificial Sequence
  Description of Artificial Sequence: Synthetic oligonucleotide
uauacuucagugaaacaaa

SEQ ID NO: 3179611 - RNA, 19 nt, Artificial Sequence
  Description of Artificial Sequence: Synthetic oligonucleotide
ucauacuugccaauguuac

SEQ ID NO: 3179612 - RNA, 19 nt, Artificial Sequence
  Description of Artificial Sequence: Synthetic oligonucleotide
uuguugaacacucaagaau

SEQ ID NO: 3179613 - RNA, 19 nt, Artificial Sequence
  Description of Artificial Sequence: Synthetic oligonucleotide
ugucccaugggcauaaaac

SEQ ID NO: 3179614 - RNA, 19 nt, Artificial Sequence
  Description of Artificial Sequence: Synthetic oligonucleotide
uuaccaacaucuuugccca

SEQ ID NO: 3179615 - RNA, 19 nt, Artificial Sequence
  Description of Artificial Sequence: Synthetic oligonucleotide
acucaagaauucaauauac

SEQ ID NO: 3179616 - RNA, 19 nt, Artificial Sequence
  Description of Artificial Sequence: Synthetic oligonucleotide
uggaaauuguugaacacuc

SEQ ID NO: 3179617 - RNA, 19 nt, Artificial Sequence
  Description of Artificial Sequence: Synthetic oligonucleotide
aaauuguugaacacucaag

SEQ ID NO: 3179618 - RNA, 19 nt, Artificial Sequence
  Description of Artificial Sequence: Synthetic oligonucleotide
ucccaugggcauaaaacgg

SEQ ID NO: 3179619 - RNA, 19 nt, Artificial Sequence
  Description of Artificial Sequence: Synthetic oligonucleotide
acuggaaauuguugaacac

SEQ ID NO: 3179620 - RNA, 19 nt, Artificial Sequence
  Description of Artificial Sequence: Synthetic oligonucleotide
auucaauauacuucaguga

SEQ ID NO: 3179621 - RNA, 19 nt, Artificial Sequence
  Description of Artificial Sequence: Synthetic oligonucleotide
cuuaccuguaaagacaaag

SEQ ID NO: 3179622 - RNA, 19 nt, Artificial Sequence
  Description of Artificial Sequence: Synthetic oligonucleotide
auauacuucagugaaacaa

SEQ ID NO: 3179623 - RNA, 19 nt, Artificial Sequence
  Description of Artificial Sequence: Synthetic oligonucleotide
agacucaaaauccgaaaag

SEQ ID NO: 3179624 - RNA, 19 nt, Artificial Sequence
  Description of Artificial Sequence: Synthetic oligonucleotide
uguaaagacaaagccagcu

SEQ ID NO: 3179625 - RNA, 19 nt, Artificial Sequence
  Description of Artificial Sequence: Synthetic oligonucleotide
aaaggacuccagucuggcc

SEQ ID NO: 3179626 - RNA, 19 nt, Artificial Sequence
  Description of Artificial Sequence: Synthetic oligonucleotide
gucccaugggcauaaaacg

SEQ ID NO: 3179627 - RNA, 19 nt, Artificial Sequence
  Description of Artificial Sequence: Synthetic oligonucleotide
uacuggaaauuguugaaca

SEQ ID NO: 3179628 - RNA, 19 nt, Artificial Sequence
  Description of Artificial Sequence: Synthetic oligonucleotide
ucucaaaggacuccagucu

SEQ ID NO: 3179629 - RNA, 19 nt, Artificial Sequence
  Description of Artificial Sequence: Synthetic oligonucleotide
aaaggaacucacauucagg

SEQ ID NO: 3179630 - RNA, 19 nt, Artificial Sequence
  Description of Artificial Sequence: Synthetic oligonucleotide
aauccgaaaagaaaucaca

SEQ ID NO: 3179631 - RNA, 19 nt, Artificial Sequence
  Description of Artificial Sequence: Synthetic oligonucleotide
caauauacuucagugaaac

SEQ ID NO: 3179632 - RNA, 19 nt, Artificial Sequence
  Description of Artificial Sequence: Synthetic oligonucleotide
gacucuuaccuguaaagac

SEQ ID NO: 3179633 - RNA, 19 nt, Artificial Sequence
  Description of Artificial Sequence: Synthetic oligonucleotide
aacacucaagaauucaaua

SEQ ID NO: 3179634 - RNA, 19 nt, Artificial Sequence
  Description of Artificial Sequence: Synthetic oligonucleotide
auguuaccaacaucuuugc

SEQ ID NO: 3179635 - RNA, 19 nt, Artificial Sequence
  Description of Artificial Sequence: Synthetic oligonucleotide
aauauacuucagugaaaca

SEQ ID NO: 3179636 - RNA, 19 nt, Artificial Sequence
  Description of Artificial Sequence: Synthetic oligonucleotide
ucaaaggacuccagucugg

SEQ ID NO: 3179637 - RNA, 19 nt, Artificial Sequence
  Description of Artificial Sequence: Synthetic oligonucleotide
ugaacacucaagaauucaa

SEQ ID NO: 3179638 - RNA, 19 nt, Artificial Sequence
  Description of Artificial Sequence: Synthetic oligonucleotide
ccuguaaagacaaagccag

SEQ ID NO: 3179639 - RNA, 19 nt, Artificial Sequence
  Description of Artificial Sequence: Synthetic oligonucleotide
uucucuggacucuucaccc

SEQ ID NO: 3179640 - RNA, 19 nt, Artificial Sequence
  Description of Artificial Sequence: Synthetic oligonucleotide
agaggucagacucuuaccu

SEQ ID NO: 3179641 - RNA, 19 nt, Artificial Sequence
  Description of Artificial Sequence: Synthetic oligonucleotide
aaacggccaguucucaaag

SEQ ID NO: 3179642 - RNA, 19 nt, Artificial Sequence
  Description of Artificial Sequence: Synthetic oligonucleotide
uauacuggaaauuguugaa

SEQ ID NO: 3179643 - RNA, 19 nt, Artificial Sequence
  Description of Artificial Sequence: Synthetic oligonucleotide
gaaauuguugaacacucaa

SEQ ID NO: 3179644 - RNA, 19 nt, Artificial Sequence
  Description of Artificial Sequence: Synthetic oligonucleotide
ugcuuugucaccucucagc

SEQ ID NO: 3179645 - RNA, 19 nt, Artificial Sequence
  Description of Artificial Sequence: Synthetic oligonucleotide
acacucaagaauucaauau

SEQ ID NO: 3179646 - RNA, 19 nt, Artificial Sequence
  Description of Artificial Sequence: Synthetic oligonucleotide
aaaacggccaguucucaaa

SEQ ID NO: 3179647 - RNA, 19 nt, Artificial Sequence
  Description of Artificial Sequence: Synthetic oligonucleotide
uucucaaaggacuccaguc

SEQ ID NO: 3179648 - RNA, 19 nt, Artificial Sequence
  Description of Artificial Sequence: Synthetic oligonucleotide
auacuggaaauuguugaac

SEQ ID NO: 3179649 - RNA, 19 nt, Artificial Sequence
  Description of Artificial Sequence: Synthetic oligonucleotide
gacaaagccagcugcugag

SEQ ID NO: 3179650 - RNA, 19 nt, Artificial Sequence
  Description of Artificial Sequence: Synthetic oligonucleotide
acaucuuugcccaaaagga

SEQ ID NO: 3179651 - RNA, 19 nt, Artificial Sequence
  Description of Artificial Sequence: Synthetic oligonucleotide
acucuucacccuuacauca

SEQ ID NO: 3179652 - RNA, 19 nt, Artificial Sequence
  Description of Artificial Sequence: Synthetic oligonucleotide
aucuuugcccaaaaggaac

SEQ ID NO: 3179653 - RNA, 19 nt, Artificial Sequence
  Description of Artificial Sequence: Synthetic oligonucleotide
auacuugccaauguuacca

SEQ ID NO: 3179654 - RNA, 19 nt, Artificial Sequence
  Description of Artificial Sequence: Synthetic oligonucleotide
ucuuugcccaaaaggaacu

SEQ ID NO: 3179655 - RNA, 19 nt, Artificial Sequence
  Description of Artificial Sequence: Synthetic oligonucleotide
uuucuaugggaauuuuccu

SEQ ID NO: 3179656 - RNA, 19 nt, Artificial Sequence
  Description of Artificial Sequence: Synthetic oligonucleotide
caaaauccgaaaagaaauc

SEQ ID NO: 3179657 - RNA, 19 nt, Artificial Sequence
  Description of Artificial Sequence: Synthetic oligonucleotide
guaaagacaaagccagcug

SEQ ID NO: 3179658 - RNA, 19 nt, Artificial Sequence
  Description of Artificial Sequence: Synthetic oligonucleotide
aggacguaauucccugugc

SEQ ID NO: 3179659 - RNA, 19 nt, Artificial Sequence
  Description of Artificial Sequence: Synthetic oligonucleotide
cagacucuuaccuguaaag

SEQ ID NO: 3179660 - RNA, 19 nt, Artificial Sequence
  Description of Artificial Sequence: Synthetic oligonucleotide
ugcugagagaacacguggc

SEQ ID NO: 3179661 - RNA, 19 nt, Artificial Sequence
  Description of Artificial Sequence: Synthetic oligonucleotide
aggaacucacauucaggac

SEQ ID NO: 3179662 - RNA, 19 nt, Artificial Sequence
  Description of Artificial Sequence: Synthetic oligonucleotide
cauucaggacguaauuccc

SEQ ID NO: 3179663 - RNA, 19 nt, Artificial Sequence
  Description of Artificial Sequence: Synthetic oligonucleotide
auuguugaacacucaagaa

SEQ ID NO: 3179664 - RNA, 19 nt, Artificial Sequence
  Description of Artificial Sequence: Synthetic oligonucleotide
ccaaaaggaacucacauuc

SEQ ID NO: 3179665 - RNA, 19 nt, Artificial Sequence
  Description of Artificial Sequence: Synthetic oligonucleotide
augggcauaaaacggccag

SEQ ID NO: 3179666 - RNA, 19 nt, Artificial Sequence
  Description of Artificial Sequence: Synthetic oligonucleotide
cuucucuggacucuucacc

SEQ ID NO: 3179667 - RNA, 19 nt, Artificial Sequence
  Description of Artificial Sequence: Synthetic oligonucleotide
gacucaaaauccgaaaaga

SEQ ID NO: 3179668 - RNA, 19 nt, Artificial Sequence
  Description of Artificial Sequence: Synthetic oligonucleotide
uacaucauacuugccaaug

SEQ ID NO: 3179669 - RNA, 19 nt, Artificial Sequence
  Description of Artificial Sequence: Synthetic oligonucleotide
cauaaaacggccaguucuc

SEQ ID NO: 3179670 - RNA, 19 nt, Artificial Sequence
  Description of Artificial Sequence: Synthetic oligonucleotide
ucaauauacuucagugaaa

SEQ ID NO: 3179671 - RNA, 19 nt, Artificial Sequence
  Description of Artificial Sequence: Synthetic oligonucleotide
cacccuuacaucauacuug

SEQ ID NO: 3179672 - RNA, 19 nt, Artificial Sequence
  Description of Artificial Sequence: Synthetic oligonucleotide
uucaggacguaauucccug

SEQ ID NO: 3179673 - RNA, 19 nt, Artificial Sequence
  Description of Artificial Sequence: Synthetic oligonucleotide
uguuaccaacaucuuugcc

SEQ ID NO: 3179674 - RNA, 19 nt, Artificial Sequence
  Description of Artificial Sequence: Synthetic oligonucleotide
cucaaaauccgaaaagaaa

SEQ ID NO: 3179675 - RNA, 19 nt, Artificial Sequence
  Description of Artificial Sequence: Synthetic oligonucleotide
ucacccuuacaucauacuu

SEQ ID NO: 3179676 - RNA, 19 nt, Artificial Sequence
  Description of Artificial Sequence: Synthetic oligonucleotide
ucaccucucagcuucucug

SEQ ID NO: 3179677 - RNA, 19 nt, Artificial Sequence
  Description of Artificial Sequence: Synthetic oligonucleotide
aacggccaguucucaaagg

SEQ ID NO: 3179678 - RNA, 19 nt, Artificial Sequence
  Description of Artificial Sequence: Synthetic oligonucleotide
agaacacguggcgaugucc

SEQ ID NO: 3179679 - RNA, 19 nt, Artificial Sequence
  Description of Artificial Sequence: Synthetic oligonucleotide
cauacuugccaauguuacc

SEQ ID NO: 3179680 - RNA, 19 nt, Artificial Sequence
  Description of Artificial Sequence: Synthetic oligonucleotide
ucuggccuccucuucuugg

SEQ ID NO: 3179681 - RNA, 19 nt, Artificial Sequence
  Description of Artificial Sequence: Synthetic oligonucleotide
uugcccaaaaggaacucac

SEQ ID NO: 3179682 - RNA, 19 nt, Artificial Sequence
  Description of Artificial Sequence: Synthetic oligonucleotide
cuuacaucauacuugccaa

SEQ ID NO: 3179683 - RNA, 19 nt, Artificial Sequence
  Description of Artificial Sequence: Synthetic oligonucleotide
acuugccaauguuaccaac

SEQ ID NO: 3179684 - RNA, 19 nt, Artificial Sequence
  Description of Artificial Sequence: Synthetic oligonucleotide
auaaauucaucucauaggc

SEQ ID NO: 3179685 - RNA, 19 nt, Artificial Sequence
  Description of Artificial Sequence: Synthetic oligonucleotide
aaugaauugaguuucacca

SEQ ID NO: 3179686 - RNA, 19 nt, Artificial Sequence
  Description of Artificial Sequence: Synthetic oligonucleotide
ugucaaaacaauuugacag

SEQ ID NO: 3179687 - RNA, 19 nt, Artificial Sequence
  Description of Artificial Sequence: Synthetic oligonucleotide
uauuauaacauucaaacaa

SEQ ID NO: 3179688 - RNA, 19 nt, Artificial Sequence
  Description of Artificial Sequence: Synthetic oligonucleotide
acaaguaucaucaugauac

SEQ ID NO: 3179689 - RNA, 19 nt, Artificial Sequence
  Description of Artificial Sequence: Synthetic oligonucleotide
aauauaaacaguuggggug

SEQ ID NO: 3179690 - RNA, 19 nt, Artificial Sequence
  Description of Artificial Sequence: Synthetic oligonucleotide
uguaugacuaauaaaagca

SEQ ID NO: 3179691 - RNA, 19 nt, Artificial Sequence
  Description of Artificial Sequence: Synthetic oligonucleotide
aauaaauacgcaaugaucu

SEQ ID NO: 3179692 - RNA, 19 nt, Artificial Sequence
  Description of Artificial Sequence: Synthetic oligonucleotide
gauaaauucaucucauagg

SEQ ID NO: 3179693 - RNA, 19 nt, Artificial Sequence
  Description of Artificial Sequence: Synthetic oligonucleotide
uauugcacaauacaugagg

SEQ ID NO: 3179694 - RNA, 19 nt, Artificial Sequence
  Description of Artificial Sequence: Synthetic oligonucleotide
gacuacuaaacuuaaacag

SEQ ID NO: 3179695 - RNA, 19 nt, Artificial Sequence
  Description of Artificial Sequence: Synthetic oligonucleotide
aacaaaugaauugaguuuc

SEQ ID NO: 3179696 - RNA, 19 nt, Artificial Sequence
  Description of Artificial Sequence: Synthetic oligonucleotide
uuuacuucagagauugagg

SEQ ID NO: 3179697 - RNA, 19 nt, Artificial Sequence
  Description of Artificial Sequence: Synthetic oligonucleotide
guaaagaaaauuuacaaga

SEQ ID NO: 3179698 - RNA, 19 nt, Artificial Sequence
  Description of Artificial Sequence: Synthetic oligonucleotide
aaaauaacaggcccaaaug

SEQ ID NO: 3179699 - RNA, 19 nt, Artificial Sequence
  Description of Artificial Sequence: Synthetic oligonucleotide
uacgguacaggauugaagg

SEQ ID NO: 3179700 - RNA, 19 nt, Artificial Sequence
  Description of Artificial Sequence: Synthetic oligonucleotide
aguaaagaaaauuuacaag

SEQ ID NO: 3179701 - RNA, 19 nt, Artificial Sequence
  Description of Artificial Sequence: Synthetic oligonucleotide
ucaacaugcgcccagaaug

SEQ ID NO: 3179702 - RNA, 19 nt, Artificial Sequence
  Description of Artificial Sequence: Synthetic oligonucleotide
uggauaaacagauaugacc

SEQ ID NO: 3179703 - RNA, 19 nt, Artificial Sequence
  Description of Artificial Sequence: Synthetic oligonucleotide
aaguaaagaaaauuuacaa

SEQ ID NO: 3179704 - RNA, 19 nt, Artificial Sequence
  Description of Artificial Sequence: Synthetic oligonucleotide
ucuuuuacauuuaauguca

SEQ ID NO: 3179705 - RNA, 19 nt, Artificial Sequence
  Description of Artificial Sequence: Synthetic oligonucleotide
aacaacuuaaaauguaaca

SEQ ID NO: 3179706 - RNA, 19 nt, Artificial Sequence
  Description of Artificial Sequence: Synthetic oligonucleotide
auauuauucacaccuuuac

SEQ ID NO: 3179707 - RNA, 19 nt, Artificial Sequence
  Description of Artificial Sequence: Synthetic oligonucleotide
uaaaguauuauaacauuca

SEQ ID NO: 3179708 - RNA, 19 nt, Artificial Sequence
  Description of Artificial Sequence: Synthetic oligonucleotide
uaaacuuaaacagaaguug

SEQ ID NO: 3179709 - RNA, 19 nt, Artificial Sequence
  Description of Artificial Sequence: Synthetic oligonucleotide
uauuucaccaguaaacaug

SEQ ID NO: 3179710 - RNA, 19 nt, Artificial Sequence
  Description of Artificial Sequence: Synthetic oligonucleotide
augcuaauaaugcuaagac

SEQ ID NO: 3179711 - RNA, 19 nt, Artificial Sequence
  Description of Artificial Sequence: Synthetic oligonucleotide
uuaaaguauuauaacauuc

SEQ ID NO: 3179712 - RNA, 19 nt, Artificial Sequence
  Description of Artificial Sequence: Synthetic oligonucleotide
acuaaacuuaaacagaagu

SEQ ID NO: 3179713 - RNA, 19 nt, Artificial Sequence
  Description of Artificial Sequence: Synthetic oligonucleotide
uucaaagacugaaugauca

SEQ ID NO: 3179714 - RNA, 19 nt, Artificial Sequence
  Description of Artificial Sequence: Synthetic oligonucleotide
uuuacauuuaaugucauuc

SEQ ID NO: 3179715 - RNA, 19 nt, Artificial Sequence
  Description of Artificial Sequence: Synthetic oligonucleotide
auaaugcuaagacagacug

SEQ ID NO: 3179716 - RNA, 19 nt, Artificial Sequence
  Description of Artificial Sequence: Synthetic oligonucleotide
ucaugcauuaaucaccgag

SEQ ID NO: 3179717 - RNA, 19 nt, Artificial Sequence
  Description of Artificial Sequence: Synthetic oligonucleotide
gagauugaggacuauauac

SEQ ID NO: 3179718 - RNA, 19 nt, Artificial Sequence
  Description of Artificial Sequence: Synthetic oligonucleotide
acuaauaaaagcaugucag

SEQ ID NO: 3179719 - RNA, 19 nt, Artificial Sequence
  Description of Artificial Sequence: Synthetic oligonucleotide
uagaauccaaauauaaaca

SEQ ID NO: 3179720 - RNA, 19 nt, Artificial Sequence
  Description of Artificial Sequence: Synthetic oligonucleotide
uugaggacuauauacaaca

SEQ ID NO: 3179721 - RNA, 19 nt, Artificial Sequence
  Description of Artificial Sequence: Synthetic oligonucleotide
ucgacuacuaaacuuaaac

SEQ ID NO: 3179722 - RNA, 19 nt, Artificial Sequence
  Description of Artificial Sequence: Synthetic oligonucleotide
auauuugacauuuccugac

SEQ ID NO: 3179723 - RNA, 19 nt, Artificial Sequence
  Description of Artificial Sequence: Synthetic oligonucleotide
aaaauggaauuauauuuga

SEQ ID NO: 3179724 - RNA, 19 nt, Artificial Sequence
  Description of Artificial Sequence: Synthetic oligonucleotide
acuaucuucugcuacgagg

SEQ ID NO: 3179725 - RNA, 19 nt, Artificial Sequence
  Description of Artificial Sequence: Synthetic oligonucleotide
ugcuaagacagacugacug

SEQ ID NO: 3179726 - RNA, 19 nt, Artificial Sequence
  Description of Artificial Sequence: Synthetic oligonucleotide
auaguguuuaggcaguagg

SEQ ID NO: 3179727 - RNA, 19 nt, Artificial Sequence
  Description of Artificial Sequence: Synthetic oligonucleotide
ugaaugaucaaagugcuca

SEQ ID NO: 3179728 - RNA, 19 nt, Artificial Sequence
  Description of Artificial Sequence: Synthetic oligonucleotide
aauguuggaucccucacug

SEQ ID NO: 3179729 - RNA, 19 nt, Artificial Sequence
  Description of Artificial Sequence: Synthetic oligonucleotide
auuauaacauucaaacaac

SEQ ID NO: 3179730 - RNA, 19 nt, Artificial Sequence
  Description of Artificial Sequence: Synthetic oligonucleotide
agaaaacucuuccuguuac

SEQ ID NO: 3179731 - RNA, 19 nt, Artificial Sequence
  Description of Artificial Sequence: Synthetic oligonucleotide
uugacagcagauauaaaca

SEQ ID NO: 3179732 - RNA, 19 nt, Artificial Sequence
  Description of Artificial Sequence: Synthetic oligonucleotide
uccaaacauaaauaaauga

SEQ ID NO: 3179733 - RNA, 19 nt, Artificial Sequence
  Description of Artificial Sequence: Synthetic oligonucleotide
aguaauucaagcaucacug

SEQ ID NO: 3179734 - RNA, 19 nt, Artificial Sequence
  Description of Artificial Sequence: Synthetic oligonucleotide
ugcaguaaaaggaaguagu

SEQ ID NO: 3179735 - RNA, 19 nt, Artificial Sequence
  Description of Artificial Sequence: Synthetic oligonucleotide
cauauaagguaccuggugc

SEQ ID NO: 3179736 - RNA, 19 nt, Artificial Sequence
  Description of Artificial Sequence: Synthetic oligonucleotide
uaauucaagcaucacugcc

SEQ ID NO: 3179737 - RNA, 19 nt, Artificial Sequence
  Description of Artificial Sequence: Synthetic oligonucleotide
aacauauuguaccucucug

SEQ ID NO: 3179738 - RNA, 19 nt, Artificial Sequence
  Description of Artificial Sequence: Synthetic oligonucleotide
acaacaaaugaauugaguu

SEQ ID NO: 3179739 - RNA, 19 nt, Artificial Sequence
  Description of Artificial Sequence: Synthetic oligonucleotide
aaaguauuauaacauucaa

SEQ ID NO: 3179740 - RNA, 19 nt, Artificial Sequence
  Description of Artificial Sequence: Synthetic oligonucleotide
uaguguuuaggcaguaggg

SEQ ID NO: 3179741 - RNA, 19 nt, Artificial Sequence
  Description of Artificial Sequence: Synthetic oligonucleotide
aguggcaucaacaaguauc

SEQ ID NO: 3179742 - RNA, 19 nt, Artificial Sequence
  Description of Artificial Sequence: Synthetic oligonucleotide
gaguuaagaaaacucuucc

SEQ ID NO: 3179743 - RNA, 19 nt, Artificial Sequence
  Description of Artificial Sequence: Synthetic oligonucleotide
auugacgccaugaugaaac

SEQ ID NO: 3179744 - RNA, 19 nt, Artificial Sequence
  Description of Artificial Sequence: Synthetic oligonucleotide
aaagcaugcuaauaaugcu

SEQ ID NO: 3179745 - RNA, 19 nt, Artificial Sequence
  Description of Artificial Sequence: Synthetic oligonucleotide
aauugaauuuugaacgcuc

SEQ ID NO: 3179746 - RNA, 19 nt, Artificial Sequence
  Description of Artificial Sequence: Synthetic oligonucleotide
guuggggugacuuucaaug

SEQ ID NO: 3179747 - RNA, 19 nt, Artificial Sequence
  Description of Artificial Sequence: Synthetic oligonucleotide
uucaaacaacuuaaaaugu

SEQ ID NO: 3179748 - RNA, 19 nt, Artificial Sequence
  Description of Artificial Sequence: Synthetic oligonucleotide
aguguaauauacuugggaa

SEQ ID NO: 3179749 - RNA, 19 nt, Artificial Sequence
  Description of Artificial Sequence: Synthetic oligonucleotide
auugcuauacacaugagga

SEQ ID NO: 3179750 - RNA, 19 nt, Artificial Sequence
  Description of Artificial Sequence: Synthetic oligonucleotide
auuauucacaccuuuacuu

SEQ ID NO: 3179751 - RNA, 19 nt, Artificial Sequence
  Description of Artificial Sequence: Synthetic oligonucleotide
accauugcuauacacauga

SEQ ID NO: 3179752 - RNA, 19 nt, Artificial Sequence
  Description of Artificial Sequence: Synthetic oligonucleotide
uuaaucaccgaguggcagg

SEQ ID NO: 3179753 - RNA, 19 nt, Artificial Sequence
  Description of Artificial Sequence: Synthetic oligonucleotide
aacagauaugaccauugcu

SEQ ID NO: 3179754 - RNA, 19 nt, Artificial Sequence
  Description of Artificial Sequence: Synthetic oligonucleotide
uuuuccccuucauauaagg

SEQ ID NO: 3179755 - RNA, 19 nt, Artificial Sequence
  Description of Artificial Sequence: Synthetic oligonucleotide
cuagcgggaaguaacagag

SEQ ID NO: 3179756 - RNA, 19 nt, Artificial Sequence
  Description of Artificial Sequence: Synthetic oligonucleotide
ucauauaagguaccuggug

SEQ ID NO: 3179757 - RNA, 19 nt, Artificial Sequence
  Description of Artificial Sequence: Synthetic oligonucleotide
uuuccuuccuaaaugcagc

SEQ ID NO: 3179758 - RNA, 19 nt, Artificial Sequence
  Description of Artificial Sequence: Synthetic oligonucleotide
caagaugauacaaguaaag

SEQ ID NO: 3179759 - RNA, 19 nt, Artificial Sequence
  Description of Artificial Sequence: Synthetic oligonucleotide
uauuauucacaccuuuacu

SEQ ID NO: 3179760 - RNA, 19 nt, Artificial Sequence
  Description of Artificial Sequence: Synthetic oligonucleotide
ucacauaaaaggaauuguc

SEQ ID NO: 3179761 - RNA, 19 nt, Artificial Sequence
  Description of Artificial Sequence: Synthetic oligonucleotide
uguaauauacuugggaaaa

SEQ ID NO: 3179762 - RNA, 19 nt, Artificial Sequence
  Description of Artificial Sequence: Synthetic oligonucleotide
gagagucaaauggauaucg

SEQ ID NO: 3179763 - RNA, 19 nt, Artificial Sequence
  Description of Artificial Sequence: Synthetic oligonucleotide
uuucuuacgguccuguaaa

SEQ ID NO: 3179764 - RNA, 19 nt, Artificial Sequence
  Description of Artificial Sequence: Synthetic oligonucleotide
gacuaauaaaagcauguca

SEQ ID NO: 3179765 - RNA, 19 nt, Artificial Sequence
  Description of Artificial Sequence: Synthetic oligonucleotide
gucguuucugcauugacgc

SEQ ID NO: 3179766 - RNA, 19 nt, Artificial Sequence
  Description of Artificial Sequence: Synthetic oligonucleotide
gcaaugaucuuucuuacgg

SEQ ID NO: 3179767 - RNA, 19 nt, Artificial Sequence
  Description of Artificial Sequence: Synthetic oligonucleotide
guaauugaauuuugaacgc

SEQ ID NO: 3179768 - RNA, 19 nt, Artificial Sequence
  Description of Artificial Sequence: Synthetic oligonucleotide
cuauaggucacuuccaguc

SEQ ID NO: 3179769 - RNA, 19 nt, Artificial Sequence
  Description of Artificial Sequence: Synthetic oligonucleotide
gaugauaacaguggcauca

SEQ ID NO: 3179770 - RNA, 19 nt, Artificial Sequence
  Description of Artificial Sequence: Synthetic oligonucleotide
aagaugauacaaguaaaga

SEQ ID NO: 3179771 - RNA, 19 nt, Artificial Sequence
  Description of Artificial Sequence: Synthetic oligonucleotide
uguccuuauaaucccacga

SEQ ID NO: 3179772 - RNA, 19 nt, Artificial Sequence
  Description of Artificial Sequence: Synthetic oligonucleotide
uguucucacauaaaaggaa

SEQ ID NO: 3179773 - RNA, 19 nt, Artificial Sequence
  Description of Artificial Sequence: Synthetic oligonucleotide
aagacagacugacuggacu

SEQ ID NO: 3179774 - RNA, 19 nt, Artificial Sequence
  Description of Artificial Sequence: Synthetic oligonucleotide
auuaaaguauuauaacauu

SEQ ID NO: 3179775 - RNA, 19 nt, Artificial Sequence
  Description of Artificial Sequence: Synthetic oligonucleotide
acaacuuaaaauguaacaa

SEQ ID NO: 3179776 - RNA, 19 nt, Artificial Sequence
  Description of Artificial Sequence: Synthetic oligonucleotide
ucaaacaacuuaaaaugua

SEQ ID NO: 3179777 - RNA, 19 nt, Artificial Sequence
  Description of Artificial Sequence: Synthetic oligonucleotide
aacaguuggggugacuuuc

SEQ ID NO: 3179778 - RNA, 19 nt, Artificial Sequence
  Description of Artificial Sequence: Synthetic oligonucleotide
uauauuauucacaccuuua

SEQ ID NO: 3179779 - RNA, 19 nt, Artificial Sequence
  Description of Artificial Sequence: Synthetic oligonucleotide
ucucacauaaaaggaauug

SEQ ID NO: 3179780 - RNA, 19 nt, Artificial Sequence
  Description of Artificial Sequence: Synthetic oligonucleotide
uacaacaaaugaauugagu

SEQ ID NO: 3179781 - RNA, 19 nt, Artificial Sequence
  Description of Artificial Sequence: Synthetic oligonucleotide
aggacaagaugauacaagu

SEQ ID NO: 3179782 - RNA, 19 nt, Artificial Sequence
  Description of Artificial Sequence: Synthetic oligonucleotide
caaguaaagaaaauuuaca

SEQ ID NO: 3179783 - RNA, 19 nt, Artificial Sequence
  Description of Artificial Sequence: Synthetic oligonucleotide
auaacaguggcaucaacaa

SEQ ID NO: 3179784 - RNA, 19 nt, Artificial Sequence
  Description of Artificial Sequence: Synthetic oligonucleotide
aauguaacaaguaauacuc

SEQ ID NO: 3179785 - RNA, 19 nt, Artificial Sequence
  Description of Artificial Sequence: Synthetic oligonucleotide
aaaagcacaauucucaacu

SEQ ID NO: 3179786 - RNA, 19 nt, Artificial Sequence
  Description of Artificial Sequence: Synthetic oligonucleotide
uguccauauaucaagaaag

SEQ ID NO: 3179787 - RNA, 19 nt, Artificial Sequence
  Description of Artificial Sequence: Synthetic oligonucleotide
uuuaucaacaccagcaggc

SEQ ID NO: 3179788 - RNA, 19 nt, Artificial Sequence
  Description of Artificial Sequence: Synthetic oligonucleotide
uguaugaaacuauagcggg

SEQ ID NO: 3179789 - RNA, 19 nt, Artificial Sequence
  Description of Artificial Sequence: Synthetic oligonucleotide
ugaaaugagaaacugcagc

SEQ ID NO: 3179790 - RNA, 19 nt, Artificial Sequence
  Description of Artificial Sequence: Synthetic oligonucleotide
gacucauagguauaaaggg

SEQ ID NO: 3179791 - RNA, 19 nt, Artificial Sequence
  Description of Artificial Sequence: Synthetic oligonucleotide
aagaguaaaagcacaauuc

SEQ ID NO: 3179792 - RNA, 19 nt, Artificial Sequence
  Description of Artificial Sequence: Synthetic oligonucleotide
aagcacaauucucaacucc

SEQ ID NO: 3179793 - RNA, 19 nt, Artificial Sequence
  Description of Artificial Sequence: Synthetic oligonucleotide
cuaugauaaaggaacagag

SEQ ID NO: 3179794 - RNA, 19 nt, Artificial Sequence
  Description of Artificial Sequence: Synthetic oligonucleotide
uccuucauuuacaucaacg

SEQ ID NO: 3179795 - RNA, 19 nt, Artificial Sequence
  Description of Artificial Sequence: Synthetic oligonucleotide
agugcggucaucuuccacc

SEQ ID NO: 3179796 - RNA, 19 nt, Artificial Sequence
  Description of Artificial Sequence: Synthetic oligonucleotide
ugaaacuauagcgggaucg

SEQ ID NO: 3179797 - RNA, 19 nt, Artificial Sequence
  Description of Artificial Sequence: Synthetic oligonucleotide
agauuuuaucaacaccagc

SEQ ID NO: 3179798 - RNA, 19 nt, Artificial Sequence
  Description of Artificial Sequence: Synthetic oligonucleotide
aacuuagccacucuuguga

SEQ ID NO: 3179799 - RNA, 19 nt, Artificial Sequence
  Description of Artificial Sequence: Synthetic oligonucleotide
aagaaauagcaaaauaucu

SEQ ID NO: 3179800 - RNA, 19 nt, Artificial Sequence
  Description of Artificial Sequence: Synthetic oligonucleotide
ucuuuuguagugauucucc

SEQ ID NO: 3179801 - RNA, 19 nt, Artificial Sequence
  Description of Artificial Sequence: Synthetic oligonucleotide
uguaacaaguaauacucca

SEQ ID NO: 3179802 - RNA, 19 nt, Artificial Sequence
  Description of Artificial Sequence: Synthetic oligonucleotide
uguucguggucucugacag

SEQ ID NO: 3179803 - RNA, 19 nt, Artificial Sequence
  Description of Artificial Sequence: Synthetic oligonucleotide
aauuccugcaaggagcccg

SEQ ID NO: 3179804 - RNA, 19 nt, Artificial Sequence
  Description of Artificial Sequence: Synthetic oligonucleotide
uuacuuaugaugccuguca

SEQ ID NO: 3179805 - RNA, 19 nt, Artificial Sequence
  Description of Artificial Sequence: Synthetic oligonucleotide
aguaauacuccagauggcg

SEQ ID NO: 3179806 - RNA, 19 nt, Artificial Sequence
  Description of Artificial Sequence: Synthetic oligonucleotide
ucaaggauccuucauuuac

SEQ ID NO: 3179807 - RNA, 19 nt, Artificial Sequence
  Description of Artificial Sequence: Synthetic oligonucleotide
uccaaugugucccuggagc

SEQ ID NO: 3179808 - RNA, 19 nt, Artificial Sequence
  Description of Artificial Sequence: Synthetic oligonucleotide
uguaacuuagccacucuug

SEQ ID NO: 3179809 - RNA, 19 nt, Artificial Sequence
  Description of Artificial Sequence: Synthetic oligonucleotide
acaaaucugcugcauggcc

SEQ ID NO: 3179810 - RNA, 19 nt, Artificial Sequence
  Description of Artificial Sequence: Synthetic oligonucleotide
ugugagaaaugccauuuug

SEQ ID NO: 3179811 - RNA, 19 nt, Artificial Sequence
  Description of Artificial Sequence: Synthetic oligonucleotide
gaaaugagaaacugcagca

SEQ ID NO: 3179812 - RNA, 19 nt, Artificial Sequence
  Description of Artificial Sequence: Synthetic oligonucleotide
agagcuaauuccugcaagg

SEQ ID NO: 3179813 - RNA, 19 nt, Artificial Sequence
  Description of Artificial Sequence: Synthetic oligonucleotide
ucuuuuggucauaauuuag

SEQ ID NO: 3179814 - RNA, 19 nt, Artificial Sequence
  Description of Artificial Sequence: Synthetic oligonucleotide
uaaaggaacagagggacag

SEQ ID NO: 3179815 - RNA, 19 nt, Artificial Sequence
  Description of Artificial Sequence: Synthetic oligonucleotide
aaagcacaauucucaacuc

SEQ ID NO: 3179816 - RNA, 19 nt, Artificial Sequence
  Description of Artificial Sequence: Synthetic oligonucleotide
gaaauaaagucaucuauaa

SEQ ID NO: 3179817 - RNA, 19 nt, Artificial Sequence
  Description of Artificial Sequence: Synthetic oligonucleotide
ugaaauaaggcagagguuu

SEQ ID NO: 3179818 - RNA, 19 nt, Artificial Sequence
  Description of Artificial Sequence: Synthetic oligonucleotide
aaagaauaaacaggcaggu

SEQ ID NO: 3179819 - RNA, 19 nt, Artificial Sequence
  Description of Artificial Sequence: Synthetic oligonucleotide
ugccaaacaugccaugugg

SEQ ID NO: 3179820 - RNA, 19 nt, Artificial Sequence
  Description of Artificial Sequence: Synthetic oligonucleotide
gucucuaugauaaaggaac

SEQ ID NO: 3179821 - RNA, 19 nt, Artificial Sequence
  Description of Artificial Sequence: Synthetic oligonucleotide
acaauaaugcccaagccag

SEQ ID NO: 3179822 - RNA, 19 nt, Artificial Sequence
  Description of Artificial Sequence: Synthetic oligonucleotide
ugcugcuuuacuuaugaug

SEQ ID NO: 3179823 - RNA, 19 nt, Artificial Sequence
  Description of Artificial Sequence: Synthetic oligonucleotide
uuuaaacugccgcagucug

SEQ ID NO: 3179824 - RNA, 19 nt, Artificial Sequence
  Description of Artificial Sequence: Synthetic oligonucleotide
ugaauacaacccuucaaug

SEQ ID NO: 3179825 - RNA, 19 nt, Artificial Sequence
  Description of Artificial Sequence: Synthetic oligonucleotide
uuuacaucaacgucaaguu

SEQ ID NO: 3179826 - RNA, 19 nt, Artificial Sequence
  Description of Artificial Sequence: Synthetic oligonucleotide
auagcuguagggcuggaag

SEQ ID NO: 3179827 - RNA, 19 nt, Artificial Sequence
  Description of Artificial Sequence: Synthetic oligonucleotide
acucauagguauaaagggc

SEQ ID NO: 3179828 - RNA, 19 nt, Artificial Sequence
  Description of Artificial Sequence: Synthetic oligonucleotide
aaaagcauugauggcauca

SEQ ID NO: 3179829 - RNA, 19 nt, Artificial Sequence
  Description of Artificial Sequence: Synthetic oligonucleotide
acuuaugaugccugucagc

SEQ ID NO: 3179830 - RNA, 19 nt, Artificial Sequence
  Description of Artificial Sequence: Synthetic oligonucleotide
ucaaguucacuuagcauac

SEQ ID NO: 3179831 - RNA, 19 nt, Artificial Sequence
  Description of Artificial Sequence: Synthetic oligonucleotide
ugucauaauagcugaagaa

SEQ ID NO: 3179832 - RNA, 19 nt, Artificial Sequence
  Description of Artificial Sequence: Synthetic oligonucleotide
uuguucacaagugagggug

SEQ ID NO: 3179833 - RNA, 19 nt, Artificial Sequence
  Description of Artificial Sequence: Synthetic oligonucleotide
aaguagacaauaaugccca

SEQ ID NO: 3179834 - RNA, 19 nt, Artificial Sequence
  Description of Artificial Sequence: Synthetic oligonucleotide
aaucuguuggcgugcaaug

SEQ ID NO: 3179835 - RNA, 19 nt, Artificial Sequence
  Description of Artificial Sequence: Synthetic oligonucleotide
acuauagcgggaucgaacu

SEQ ID NO: 3179836 - RNA, 19 nt, Artificial Sequence
  Description of Artificial Sequence: Synthetic oligonucleotide
aaagcgacuuagcaguccu

SEQ ID NO: 3179837 - RNA, 19 nt, Artificial Sequence
  Description of Artificial Sequence: Synthetic oligonucleotide
uuuuaagagaggaggcugu

SEQ ID NO: 3179838 - RNA, 19 nt, Artificial Sequence
  Description of Artificial Sequence: Synthetic oligonucleotide
auaaagggcuuuuaagaga

SEQ ID NO: 3179839 - RNA, 19 nt, Artificial Sequence
  Description of Artificial Sequence: Synthetic oligonucleotide
aaacaaggaguccugggaa

SEQ ID NO: 3179840 - RNA, 19 nt, Artificial Sequence
  Description of Artificial Sequence: Synthetic oligonucleotide
ucggaaugugaaaugagaa

SEQ ID NO: 3179841 - RNA, 19 nt, Artificial Sequence
  Description of Artificial Sequence: Synthetic oligonucleotide
uuagcaguccuaagcacug

SEQ ID NO: 3179842 - RNA, 19 nt, Artificial Sequence
  Description of Artificial Sequence: Synthetic oligonucleotide
gucaaguucacuuagcaua

SEQ ID NO: 3179843 - RNA, 19 nt, Artificial Sequence
  Description of Artificial Sequence: Synthetic oligonucleotide
uacuuaugaugccugucag

SEQ ID NO: 3179844 - RNA, 19 nt, Artificial Sequence
  Description of Artificial Sequence: Synthetic oligonucleotide
acuuagcaguccuaagcac

SEQ ID NO: 3179845 - RNA, 19 nt, Artificial Sequence
  Description of Artificial Sequence: Synthetic oligonucleotide
aaguaauacuccagauggc

SEQ ID NO: 3179846 - RNA, 19 nt, Artificial Sequence
  Description of Artificial Sequence: Synthetic oligonucleotide
agcauugauggcaucagac

SEQ ID NO: 3179847 - RNA, 19 nt, Artificial Sequence
  Description of Artificial Sequence: Synthetic oligonucleotide
aaagagacacacggcacuc

SEQ ID NO: 3179848 - RNA, 19 nt, Artificial Sequence
  Description of Artificial Sequence: Synthetic oligonucleotide
ggagaaucugccgauaucg

SEQ ID NO: 3179849 - RNA, 19 nt, Artificial Sequence
  Description of Artificial Sequence: Synthetic oligonucleotide
ucuacauucuguagcuugu

SEQ ID NO: 3179850 - RNA, 19 nt, Artificial Sequence
  Description of Artificial Sequence: Synthetic oligonucleotide
aucaacgucaaguucacuu

SEQ ID NO: 3179851 - RNA, 19 nt, Artificial Sequence
  Description of Artificial Sequence: Synthetic oligonucleotide
aacugccgcagucugucgg

SEQ ID NO: 3179852 - RNA, 19 nt, Artificial Sequence
  Description of Artificial Sequence: Synthetic oligonucleotide
aaacaggcaggucucuaug

SEQ ID NO: 3179853 - RNA, 19 nt, Artificial Sequence
  Description of Artificial Sequence: Synthetic oligonucleotide
agcuaauuccugcaaggag

SEQ ID NO: 3179854 - RNA, 19 nt, Artificial Sequence
  Description of Artificial Sequence: Synthetic oligonucleotide
aagaauaaacaggcagguc

SEQ ID NO: 3179855 - RNA, 19 nt, Artificial Sequence
  Description of Artificial Sequence: Synthetic oligonucleotide
ucucaacuccuugauaucc

SEQ ID NO: 3179856 - RNA, 19 nt, Artificial Sequence
  Description of Artificial Sequence: Synthetic oligonucleotide
ucuuccaaugugucccugg

SEQ ID NO: 3179857 - RNA, 19 nt, Artificial Sequence
  Description of Artificial Sequence: Synthetic oligonucleotide
ugucggaaugugaaaugag

SEQ ID NO: 3179858 - RNA, 19 nt, Artificial Sequence
  Description of Artificial Sequence: Synthetic oligonucleotide
guagagauuuuaucaacac

SEQ ID NO: 3179859 - RNA, 19 nt, Artificial Sequence
  Description of Artificial Sequence: Synthetic oligonucleotide
auuuuauuguucacaagug

SEQ ID NO: 3179860 - RNA, 19 nt, Artificial Sequence
  Description of Artificial Sequence: Synthetic oligonucleotide
ggugaaauaaggcagaggu

SEQ ID NO: 3179861 - RNA, 19 nt, Artificial Sequence
  Description of Artificial Sequence: Synthetic oligonucleotide
agcaguccuaagcacuggc

SEQ ID NO: 3179862 - RNA, 19 nt, Artificial Sequence
  Description of Artificial Sequence: Synthetic oligonucleotide
gacuuagcaguccuaagca

SEQ ID NO: 3179863 - RNA, 19 nt, Artificial Sequence
  Description of Artificial Sequence: Synthetic oligonucleotide
aacccuucaauguccagaa

SEQ ID NO: 3179864 - RNA, 19 nt, Artificial Sequence
  Description of Artificial Sequence: Synthetic oligonucleotide
guaagcucugcagagugcg

SEQ ID NO: 3179865 - RNA, 19 nt, Artificial Sequence
  Description of Artificial Sequence: Synthetic oligonucleotide
uaaaagcacaauucucaac

SEQ ID NO: 3179866 - RNA, 19 nt, Artificial Sequence
  Description of Artificial Sequence: Synthetic oligonucleotide
gguaaagagacacacggca

SEQ ID NO: 3179867 - RNA, 19 nt, Artificial Sequence
  Description of Artificial Sequence: Synthetic oligonucleotide
uguggguccaucucugggc

SEQ ID NO: 3179868 - RNA, 19 nt, Artificial Sequence
  Description of Artificial Sequence: Synthetic oligonucleotide
auacaacccuucaaugucc

SEQ ID NO: 3179869 - RNA, 19 nt, Artificial Sequence
  Description of Artificial Sequence: Synthetic oligonucleotide
cuuuuggucauaauuuaga

SEQ ID NO: 3179870 - RNA, 19 nt, Artificial Sequence
  Description of Artificial Sequence: Synthetic oligonucleotide
ccuacaagcaaacaaggag

SEQ ID NO: 3179871 - RNA, 19 nt, Artificial Sequence
  Description of Artificial Sequence: Synthetic oligonucleotide
acuaacauccugacagcgc

SEQ ID NO: 3179872 - RNA, 19 nt, Artificial Sequence
  Description of Artificial Sequence: Synthetic oligonucleotide
cuuuuaagagaggaggcug

SEQ ID NO: 3179873 - RNA, 19 nt, Artificial Sequence
  Description of Artificial Sequence: Synthetic oligonucleotide
uccucaguucaucucuucc

SEQ ID NO: 3179874 - RNA, 19 nt, Artificial Sequence
  Description of Artificial Sequence: Synthetic oligonucleotide
uccuacaagcaaacaagga

SEQ ID NO: 3179875 - RNA, 19 nt, Artificial Sequence
  Description of Artificial Sequence: Synthetic oligonucleotide
gaauacaacccuucaaugu

SEQ ID NO: 3179876 - RNA, 19 nt, Artificial Sequence
  Description of Artificial Sequence: Synthetic oligonucleotide
gaagcuggucuauaucgug

SEQ ID NO: 3179877 - RNA, 19 nt, Artificial Sequence
  Description of Artificial Sequence: Synthetic oligonucleotide
cuuggcacgguuauugauc

SEQ ID NO: 3179878 - RNA, 19 nt, Artificial Sequence
  Description of Artificial Sequence: Synthetic oligonucleotide
cagagugcggucaucuucc

SEQ ID NO: 3179879 - RNA, 19 nt, Artificial Sequence
  Description of Artificial Sequence: Synthetic oligonucleotide
auguaacaaguaauacucc

SEQ ID NO: 3179880 - RNA, 19 nt, Artificial Sequence
  Description of Artificial Sequence: Synthetic oligonucleotide
aaggaccuucagcuccacc

SEQ ID NO: 3179881 - RNA, 19 nt, Artificial Sequence
  Description of Artificial Sequence: Synthetic oligonucleotide
aggaugaccuggcauagcu

SEQ ID NO: 3179882 - RNA, 19 nt, Artificial Sequence
  Description of Artificial Sequence: Synthetic oligonucleotide
uccuugcuguaacuuagcc

SEQ ID NO: 3179883 - RNA, 19 nt, Artificial Sequence
  Description of Artificial Sequence: Synthetic oligonucleotide
uuacaucaacgucaaguuc

SEQ ID NO: 3179884 - RNA, 19 nt, Artificial Sequence
  Description of Artificial Sequence: Synthetic oligonucleotide
  modified_base (4)..(4): a, c, u, g, unknown or other
  modified_base (7)..(7): a, c, u, g, unknown or other
uuunuunuuaauaauuuau

SEQ ID NO: 3179885 - RNA, 19 nt, Artificial Sequence
  Description of Artificial Sequence: Synthetic oligonucleotide
auuuauuuauuauaugugg

SEQ ID NO: 3179886 - RNA, 19 nt, Artificial Sequence
  Description of Artificial Sequence: Synthetic oligonucleotide
uaauuuauuuauuauaugu

SEQ ID NO: 3179887 - RNA, 19 nt, Artificial Sequence
  Description of Artificial Sequence: Synthetic oligonucleotide
  modified_base (3)..(3): a, c, u, g, unknown or other
uunuuaauaauuuauuuau

SEQ ID NO: 3179888 - RNA, 19 nt, Artificial Sequence
  Description of Artificial Sequence: Synthetic oligonucleotide
aauccuagcauuugggagg

SEQ ID NO: 3179889 - RNA, 19 nt, Artificial Sequence
  Description of Artificial Sequence: Synthetic oligonucleotide
aauaauuuauuuauuauau

SEQ ID NO: 3179890 - RNA, 19 nt, Artificial Sequence
  Description of Artificial Sequence: Synthetic oligonucleotide
uuuaauccuagcauuuggg

SEQ ID NO: 3179891 - RNA, 19 nt, Artificial Sequence
  Description of Artificial Sequence: Synthetic oligonucleotide
uuuauuuauuauauguggu

SEQ ID NO: 3179892 - RNA, 19 nt, Artificial Sequence
  Description of Artificial Sequence: Synthetic oligonucleotide
uuauuuauuauauguggug

SEQ ID NO: 3179893 - RNA, 19 nt, Artificial Sequence
  Description of Artificial Sequence: Synthetic oligonucleotide
aauuuauuuauuauaugug

SEQ ID NO: 3179894 - RNA, 19 nt, Artificial Sequence
  Description of Artificial Sequence: Synthetic oligonucleotide
uacaaagugaguuacggga

SEQ ID NO: 3179895 - RNA, 19 nt, Artificial Sequence
  Description of Artificial Sequence: Synthetic oligonucleotide
ugacacaugccuuuaaucc

SEQ ID NO: 3179896 - RNA, 19 nt, Artificial Sequence
  Description of Artificial Sequence: Synthetic oligonucleotide
auuuauuauauguggugac

SEQ ID NO: 3179897 - RNA, 19 nt, Artificial Sequence
  Description of Artificial Sequence: Synthetic oligonucleotide
uauauguggugacacaugc

SEQ ID NO: 3179898 - RNA, 19 nt, Artificial Sequence
  Description of Artificial Sequence: Synthetic oligonucleotide
ugaguuacgggacagccag

SEQ ID NO: 3179899 - RNA, 19 nt, Artificial Sequence
  Description of Artificial Sequence: Synthetic oligonucleotide
uaauaauuuauuuauuaua

SEQ ID NO: 3179900 - RNA, 19 nt, Artificial Sequence
  Description of Artificial Sequence: Synthetic oligonucleotide
uguacaaagugaguuacgg

SEQ ID NO: 3179901 - RNA, 19 nt, Artificial Sequence
  Description of Artificial Sequence: Synthetic oligonucleotide
  modified_base (2)..(2): a, c, u, g, unknown or other
  modified_base (5)..(5): a, c, u, g, unknown or other
unuunuuaauaauuuauuu

SEQ ID NO: 3179902 - RNA, 19 nt, Artificial Sequence
  Description of Artificial Sequence: Synthetic oligonucleotide
uuaauaauuuauuuauuau

SEQ ID NO: 3179903 - RNA, 19 nt, Artificial Sequence
  Description of Artificial Sequence: Synthetic oligonucleotide
  modified_base (3)..(3): a, c, u, g, unknown or other
  modified_base (6)..(6): a, c, u, g, unknown or other
uunuunuuaauaauuuauu

SEQ ID NO: 3179904 - RNA, 19 nt, Artificial Sequence
  Description of Artificial Sequence: Synthetic oligonucleotide
auugaggccagccugaugu

SEQ ID NO: 3179905 - RNA, 19 nt, Artificial Sequence
  Description of Artificial Sequence: Synthetic oligonucleotide
uauguggugacacaugccu

SEQ ID NO: 3179906 - RNA, 19 nt, Artificial Sequence
  Description of Artificial Sequence: Synthetic oligonucleotide
uaauccuagcauuugggag

SEQ ID NO: 3179907 - RNA, 19 nt, Artificial Sequence
  Description of Artificial Sequence: Synthetic oligonucleotide
uauuuauuauaugugguga

SEQ ID NO: 3179908 - RNA, 19 nt, Artificial Sequence
  Description of Artificial Sequence: Synthetic oligonucleotide
auaauuuauuuauuauaug

SEQ ID NO: 3179909 - RNA, 19 nt, Artificial Sequence
  Description of Artificial Sequence: Synthetic oligonucleotide
ugagauugaggccagccug

SEQ ID NO: 3179910 - RNA, 19 nt, Artificial Sequence
  Description of Artificial Sequence: Synthetic oligonucleotide
  modified_base (5)..(5): a, c, u, g, unknown or other
  modified_base (8)..(8): a, c, u, g, unknown or other
uuuunuunuuaauaauuua

SEQ ID NO: 3179911 - RNA, 19 nt, Artificial Sequence
  Description of Artificial Sequence: Synthetic oligonucleotide
uuugggaggcagaagcagg

SEQ ID NO: 3179912 - RNA, 19 nt, Artificial Sequence
  Description of Artificial Sequence: Synthetic oligonucleotide
cuuuaauccuagcauuugg

SEQ ID NO: 3179913 - RNA, 19 nt, Artificial Sequence
  Description of Artificial Sequence: Synthetic oligonucleotide
agugaguuacgggacagcc

SEQ ID NO: 3179914 - RNA, 19 nt, Artificial Sequence
  Description of Artificial Sequence: Synthetic oligonucleotide
uuaauccuagcauuuggga

SEQ ID NO: 3179915 - RNA, 19 nt, Artificial Sequence
  Description of Artificial Sequence: Synthetic oligonucleotide
uuuauuauauguggugaca

SEQ ID NO: 3179916 - RNA, 19 nt, Artificial Sequence
  Description of Artificial Sequence: Synthetic oligonucleotide
uuauuauauguggugacac

SEQ ID NO: 3179917 - RNA, 19 nt, Artificial Sequence
  Description of Artificial Sequence: Synthetic oligonucleotide
  modified_base (2)..(2): a, c, u, g, unknown or other
unuuaauaauuuauuuauu

SEQ ID NO: 3179918 - RNA, 19 nt, Artificial Sequence
  Description of Artificial Sequence: Synthetic oligonucleotide
uuauauguggugacacaug

SEQ ID NO: 3179919 - RNA, 19 nt, Artificial Sequence
  Description of Artificial Sequence: Synthetic oligonucleotide
uuacgggacagccagggcu

SEQ ID NO: 3179920 - RNA, 19 nt, Artificial Sequence
  Description of Artificial Sequence: Synthetic oligonucleotide
gauguacaaagugaguuac

SEQ ID NO: 3179921 - RNA, 19 nt, Artificial Sequence
  Description of Artificial Sequence: Synthetic oligonucleotide
uauuauauguggugacaca

SEQ ID NO: 3179922 - RNA, 19 nt, Artificial Sequence
  Description of Artificial Sequence: Synthetic oligonucleotide
guacaaagugaguuacggg

SEQ ID NO: 3179923 - RNA, 19 nt, Artificial Sequence
  Description of Artificial Sequence: Synthetic oligonucleotide
uacacagagaaacccugug

SEQ ID NO: 3179924 - RNA, 19 nt, Artificial Sequence
  Description of Artificial Sequence: Synthetic oligonucleotide
cacagagaaacccugugug

SEQ ID NO: 3179925 - RNA, 19 nt, Artificial Sequence
  Description of Artificial Sequence: Synthetic oligonucleotide
aaagugaguuacgggacag

SEQ ID NO: 3179926 - RNA, 19 nt, Artificial Sequence
  Description of Artificial Sequence: Synthetic oligonucleotide
aagcaggugggucucugag

SEQ ID NO: 3179927 - RNA, 19 nt, Artificial Sequence
  Description of Artificial Sequence: Synthetic oligonucleotide
acaaagugaguuacgggac

SEQ ID NO: 3179928 - RNA, 19 nt, Artificial Sequence
  Description of Artificial Sequence: Synthetic oligonucleotide
gacagccagggcuacacag

SEQ ID NO: 3179929 - RNA, 19 nt, Artificial Sequence
  Description of Artificial Sequence: Synthetic oligonucleotide
auuauauguggugacacau

SEQ ID NO: 3179930 - RNA, 19 nt, Artificial Sequence
  Description of Artificial Sequence: Synthetic oligonucleotide
ugauguacaaagugaguua

SEQ ID NO: 3179931 - RNA, 19 nt, Artificial Sequence
  Description of Artificial Sequence: Synthetic oligonucleotide
ugggucucugagauugagg

SEQ ID NO: 3179932 - RNA, 19 nt, Artificial Sequence
  Description of Artificial Sequence: Synthetic oligonucleotide
gcauuugggaggcagaagc

SEQ ID NO: 3179933 - RNA, 19 nt, Artificial Sequence
  Description of Artificial Sequence: Synthetic oligonucleotide
gggucucugagauugaggc

SEQ ID NO: 3179934 - RNA, 19 nt, Artificial Sequence
  Description of Artificial Sequence: Synthetic oligonucleotide
augccuuuaauccuagcau

SEQ ID NO: 3179935 - RNA, 19 nt, Artificial Sequence
  Description of Artificial Sequence: Synthetic oligonucleotide
ucugagauugaggccagcc

SEQ ID NO: 3179936 - RNA, 19 nt, Artificial Sequence
  Description of Artificial Sequence: Synthetic oligonucleotide
cagggcuacacagagaaac

SEQ ID NO: 3179937 - RNA, 19 nt, Artificial Sequence
  Description of Artificial Sequence: Synthetic oligonucleotide
aguuacgggacagccaggg

SEQ ID NO: 3179938 - RNA, 19 nt, Artificial Sequence
  Description of Artificial Sequence: Synthetic oligonucleotide
aagugaguuacgggacagc

SEQ ID NO: 3179939 - RNA, 19 nt, Artificial Sequence
  Description of Artificial Sequence: Synthetic oligonucleotide
caugccuuuaauccuagca

SEQ ID NO: 3179940 - RNA, 19 nt, Artificial Sequence
  Description of Artificial Sequence: Synthetic oligonucleotide
aggugggucucugagauug

SEQ ID NO: 3179941 - RNA, 19 nt, Artificial Sequence
  Description of Artificial Sequence: Synthetic oligonucleotide
acacagagaaacccugugu

SEQ ID NO: 3179942 - RNA, 19 nt, Artificial Sequence
  Description of Artificial Sequence: Synthetic oligonucleotide
acagagaaacccugugugu

SEQ ID NO: 3179943 - RNA, 19 nt, Artificial Sequence
  Description of Artificial Sequence: Synthetic oligonucleotide
auuugggaggcagaagcag

SEQ ID NO: 3179944 - RNA, 19 nt, Artificial Sequence
  Description of Artificial Sequence: Synthetic oligonucleotide
auauguggugacacaugcc

SEQ ID NO: 3179945 - RNA, 19 nt, Artificial Sequence
  Description of Artificial Sequence: Synthetic oligonucleotide
agagaaacccuguguguca

SEQ ID NO: 3179946 - RNA, 19 nt, Artificial Sequence
  Description of Artificial Sequence: Synthetic oligonucleotide
auccuagcauuugggaggc

SEQ ID NO: 3179947 - RNA, 19 nt, Artificial Sequence
  Description of Artificial Sequence: Synthetic oligonucleotide
gucucugagauugaggcca

SEQ ID NO: 3179948 - RNA, 19 nt, Artificial Sequence
  Description of Artificial Sequence: Synthetic oligonucleotide
ugccuuuaauccuagcauu

SEQ ID NO: 3179949 - RNA, 19 nt, Artificial Sequence
  Description of Artificial Sequence: Synthetic oligonucleotide
agggcuacacagagaaacc

SEQ ID NO: 3179950 - RNA, 19 nt, Artificial Sequence
  Description of Artificial Sequence: Synthetic oligonucleotide
uugggaggcagaagcaggu

SEQ ID NO: 3179951 - RNA, 19 nt, Artificial Sequence
  Description of Artificial Sequence: Synthetic oligonucleotide
cagccugauguacaaagug

SEQ ID NO: 3179952 - RNA, 19 nt, Artificial Sequence
  Description of Artificial Sequence: Synthetic oligonucleotide
gugacacaugccuuuaauc

SEQ ID NO: 3179953 - RNA, 19 nt, Artificial Sequence
  Description of Artificial Sequence: Synthetic oligonucleotide
uguggugacacaugccuuu

SEQ ID NO: 3179954 - RNA, 19 nt, Artificial Sequence
  Description of Artificial Sequence: Synthetic oligonucleotide
acaugccuuuaauccuagc

SEQ ID NO: 3179955 - RNA, 19 nt, Artificial Sequence
  Description of Artificial Sequence: Synthetic oligonucleotide
ucucugagauugaggccag

SEQ ID NO: 3179956 - RNA, 19 nt, Artificial Sequence
  Description of Artificial Sequence: Synthetic oligonucleotide
gacacaugccuuuaauccu

SEQ ID NO: 3179957 - RNA, 19 nt, Artificial Sequence
  Description of Artificial Sequence: Synthetic oligonucleotide
gccagccugauguacaaag

SEQ ID NO: 3179958 - RNA, 19 nt, Artificial Sequence
  Description of Artificial Sequence: Synthetic oligonucleotide
gggaggcagaagcaggugg

SEQ ID NO: 3179959 - RNA, 19 nt, Artificial Sequence
  Description of Artificial Sequence: Synthetic oligonucleotide
cagagaaacccuguguguc

SEQ ID NO: 3179960 - RNA, 19 nt, Artificial Sequence
  Description of Artificial Sequence: Synthetic oligonucleotide
auguacaaagugaguuacg

SEQ ID NO: 3179961 - RNA, 19 nt, Artificial Sequence
  Description of Artificial Sequence: Synthetic oligonucleotide
agccugauguacaaaguga

SEQ ID NO: 3179962 - RNA, 19 nt, Artificial Sequence
  Description of Artificial Sequence: Synthetic oligonucleotide
uacgggacagccagggcua

SEQ ID NO: 3179963 - RNA, 19 nt, Artificial Sequence
  Description of Artificial Sequence: Synthetic oligonucleotide
cagccagggcuacacagag

SEQ ID NO: 3179964 - RNA, 19 nt, Artificial Sequence
  Description of Artificial Sequence: Synthetic oligonucleotide
caaagugaguuacgggaca

SEQ ID NO: 3179965 - RNA, 19 nt, Artificial Sequence
  Description of Artificial Sequence: Synthetic oligonucleotide
gccugauguacaaagugag

SEQ ID NO: 3179966 - RNA, 19 nt, Artificial Sequence
  Description of Artificial Sequence: Synthetic oligonucleotide
gauugaggccagccugaug

SEQ ID NO: 3179967 - RNA, 19 nt, Artificial Sequence
  Description of Artificial Sequence: Synthetic oligonucleotide
gaaacccugugugucaaaa

SEQ ID NO: 3179968 - RNA, 19 nt, Artificial Sequence
  Description of Artificial Sequence: Synthetic oligonucleotide
uagcauuugggaggcagaa

SEQ ID NO: 3179969 - RNA, 19 nt, Artificial Sequence
  Description of Artificial Sequence: Synthetic oligonucleotide
cacaugccuuuaauccuag

SEQ ID NO: 3179970 - RNA, 19 nt, Artificial Sequence
  Description of Artificial Sequence: Synthetic oligonucleotide
cauuugggaggcagaagca

SEQ ID NO: 3179971 - RNA, 19 nt, Artificial Sequence
  Description of Artificial Sequence: Synthetic oligonucleotide
ggaggcagaagcagguggg

SEQ ID NO: 3179972 - RNA, 19 nt, Artificial Sequence
  Description of Artificial Sequence: Synthetic oligonucleotide
gagauugaggccagccuga

SEQ ID NO: 3179973 - RNA, 19 nt, Artificial Sequence
  Description of Artificial Sequence: Synthetic oligonucleotide
agcaggugggucucugaga

SEQ ID NO: 3179974 - RNA, 19 nt, Artificial Sequence
  Description of Artificial Sequence: Synthetic oligonucleotide
cuagcauuugggaggcaga

SEQ ID NO: 3179975 - RNA, 19 nt, Artificial Sequence
  Description of Artificial Sequence: Synthetic oligonucleotide
agcauuugggaggcagaag

SEQ ID NO: 3179976 - RNA, 19 nt, Artificial Sequence
  Description of Artificial Sequence: Synthetic oligonucleotide
aggcagaagcagguggguc

SEQ ID NO: 3179977 - RNA, 19 nt, Artificial Sequence
  Description of Artificial Sequence: Synthetic oligonucleotide
gcuacacagagaaacccug

SEQ ID NO: 3179978 - RNA, 19 nt, Artificial Sequence
  Description of Artificial Sequence: Synthetic oligonucleotide
gccagggcuacacagagaa

SEQ ID NO: 3179979 - RNA, 19 nt, Artificial Sequence
  Description of Artificial Sequence: Synthetic oligonucleotide
ugaggccagccugauguac

SEQ ID NO: 3179980 - RNA, 19 nt, Artificial Sequence
  Description of Artificial Sequence: Synthetic oligonucleotide
gaagcaggugggucucuga

SEQ ID NO: 3179981 - RNA, 19 nt, Artificial Sequence
  Description of Artificial Sequence: Synthetic oligonucleotide
guuacgggacagccagggc

SEQ ID NO: 3179982 - RNA, 19 nt, Artificial Sequence
  Description of Artificial Sequence: Synthetic oligonucleotide
ggucucugagauugaggcc

SEQ ID NO: 3179983 - RNA, 19 nt, Artificial Sequence
  Description of Artificial Sequence: Synthetic oligonucleotide
cugauguacaaagugaguu

SEQ ID NO: 3179984 - RNA, 19 nt, Artificial Sequence
  Description of Artificial Sequence: Synthetic oligonucleotide
aauacagucacaauccucc

SEQ ID NO: 3179985 - RNA, 19 nt, Artificial Sequence
  Description of Artificial Sequence: Synthetic oligonucleotide
aaaauuggaaacuugcuug

SEQ ID NO: 3179986 - RNA, 19 nt, Artificial Sequence
  Description of Artificial Sequence: Synthetic oligonucleotide
auucauuaugaauucagcc

SEQ ID NO: 3179987 - RNA, 19 nt, Artificial Sequence
  Description of Artificial Sequence: Synthetic oligonucleotide
uaugaauucagccacaaaa

SEQ ID NO: 3179988 - RNA, 19 nt, Artificial Sequence
  Description of Artificial Sequence: Synthetic oligonucleotide
ucaaacuucuucaugaagc

SEQ ID NO: 3179989 - RNA, 19 nt, Artificial Sequence
  Description of Artificial Sequence: Synthetic oligonucleotide
cuuguaagcacccacaucc

SEQ ID NO: 3179990 - RNA, 19 nt, Artificial Sequence
  Description of Artificial Sequence: Synthetic oligonucleotide
aaugaugccaucuucaaau

SEQ ID NO: 3179991 - RNA, 19 nt, Artificial Sequence
  Description of Artificial Sequence: Synthetic oligonucleotide
aagagcauuucccagaucu

SEQ ID NO: 3179992 - RNA, 19 nt, Artificial Sequence
  Description of Artificial Sequence: Synthetic oligonucleotide
aauucagccacaaaauugg

SEQ ID NO: 3179993 - RNA, 19 nt, Artificial Sequence
  Description of Artificial Sequence: Synthetic oligonucleotide
uuauucauuaugaauucag

SEQ ID NO: 3179994 - RNA, 19 nt, Artificial Sequence
  Description of Artificial Sequence: Synthetic oligonucleotide
uucauuaugaauucagcca

SEQ ID NO: 3179995 - RNA, 19 nt, Artificial Sequence
  Description of Artificial Sequence: Synthetic oligonucleotide
aaauggaaguacuaaguga

SEQ ID NO: 3179996 - RNA, 19 nt, Artificial Sequence
  Description of Artificial Sequence: Synthetic oligonucleotide
uuagguucaaacuucuuca

SEQ ID NO: 3179997 - RNA, 19 nt, Artificial Sequence
  Description of Artificial Sequence: Synthetic oligonucleotide
aggagaaaagagcauuucc

SEQ ID NO: 3179998 - RNA, 19 nt, Artificial Sequence
  Description of Artificial Sequence: Synthetic oligonucleotide
ucauuaugaauucagccac

SEQ ID NO: 3179999 - RNA, 19 nt, Artificial Sequence
  Description of Artificial Sequence: Synthetic oligonucleotide
uaagugauggucaccauug

SEQ ID NO: 3180000 - RNA, 19 nt, Artificial Sequence
  Description of Artificial Sequence: Synthetic oligonucleotide
uuuagguucaaacuucuuc

SEQ ID NO: 3180001 - RNA, 19 nt, Artificial Sequence
  Description of Artificial Sequence: Synthetic oligonucleotide
cacaaaauuggaaacuugc

SEQ ID NO: 3180002 - RNA, 19 nt, Artificial Sequence
  Description of Artificial Sequence: Synthetic oligonucleotide
uauucauuaugaauucagc

SEQ ID NO: 3180003 - RNA, 19 nt, Artificial Sequence
  Description of Artificial Sequence: Synthetic oligonucleotide
aaacuugcuuguaagcacc

SEQ ID NO: 3180004 - RNA, 19 nt, Artificial Sequence
  Description of Artificial Sequence: Synthetic oligonucleotide
aguacuaagugauggucac

SEQ ID NO: 3180005 - RNA, 19 nt, Artificial Sequence
  Description of Artificial Sequence: Synthetic oligonucleotide
uggaaguacuaagugaugg

SEQ ID NO: 3180006 - RNA, 19 nt, Artificial Sequence
  Description of Artificial Sequence: Synthetic oligonucleotide
ugcaaauggaaguacuaag

SEQ ID NO: 3180007 - RNA, 19 nt, Artificial Sequence
  Description of Artificial Sequence: Synthetic oligonucleotide
uguguuauucauuaugaau

SEQ ID NO: 3180008 - RNA, 19 nt, Artificial Sequence
  Description of Artificial Sequence: Synthetic oligonucleotide
ucagccacaaaauuggaaa

SEQ ID NO: 3180009 - RNA, 19 nt, Artificial Sequence
  Description of Artificial Sequence: Synthetic oligonucleotide
aauggaaguacuaagugau

SEQ ID NO: 3180010 - RNA, 19 nt, Artificial Sequence
  Description of Artificial Sequence: Synthetic oligonucleotide
aaauuggaaacuugcuugu

SEQ ID NO: 3180011 - RNA, 19 nt, Artificial Sequence
  Description of Artificial Sequence: Synthetic oligonucleotide
aguuaaugaugccaucuuc

SEQ ID NO: 3180012 - RNA, 19 nt, Artificial Sequence
  Description of Artificial Sequence: Synthetic oligonucleotide
gaauucagccacaaaauug

SEQ ID NO: 3180013 - RNA, 19 nt, Artificial Sequence
  Description of Artificial Sequence: Synthetic oligonucleotide
ugcuguguuauucauuaug

SEQ ID NO: 3180014 - RNA, 19 nt, Artificial Sequence
  Description of Artificial Sequence: Synthetic oligonucleotide
uugcuugaggagaaaagag

SEQ ID NO: 3180015 - RNA, 19 nt, Artificial Sequence
  Description of Artificial Sequence: Synthetic oligonucleotide
cuucaugaagccaucuucc

SEQ ID NO: 3180016 - RNA, 19 nt, Artificial Sequence
  Description of Artificial Sequence: Synthetic oligonucleotide
ugcuugaggagaaaagagc

SEQ ID NO: 3180017 - RNA, 19 nt, Artificial Sequence
  Description of Artificial Sequence: Synthetic oligonucleotide
uguugcuugaggagaaaag

SEQ ID NO: 3180018 - RNA, 19 nt, Artificial Sequence
  Description of Artificial Sequence: Synthetic oligonucleotide
uuggaaacuugcuuguaag

SEQ ID NO: 3180019 - RNA, 19 nt, Artificial Sequence
  Description of Artificial Sequence: Synthetic oligonucleotide
ucuucaugaagccaucuuc

SEQ ID NO: 3180020 - RNA, 19 nt, Artificial Sequence
  Description of Artificial Sequence: Synthetic oligonucleotide
agaaaagagcauuucccag

SEQ ID NO: 3180021 - RNA, 19 nt, Artificial Sequence
  Description of Artificial Sequence: Synthetic oligonucleotide
uucaaacuucuucaugaag

SEQ ID NO: 3180022 - RNA, 19 nt, Artificial Sequence
  Description of Artificial Sequence: Synthetic oligonucleotide
ucaccauugucgaaggagc

SEQ ID NO: 3180023 - RNA, 19 nt, Artificial Sequence
  Description of Artificial Sequence: Synthetic oligonucleotide
caugaagccaucuucccag

SEQ ID NO: 3180024 - RNA, 19 nt, Artificial Sequence
  Description of Artificial Sequence: Synthetic oligonucleotide
gugauggucaccauugucg

SEQ ID NO: 3180025 - RNA, 19 nt, Artificial Sequence
  Description of Artificial Sequence: Synthetic oligonucleotide
agccaaucugcucuugugc

SEQ ID NO: 3180026 - RNA, 19 nt, Artificial Sequence
  Description of Artificial Sequence: Synthetic oligonucleotide
caaacuucuucaugaagcc

SEQ ID NO: 3180027 - RNA, 19 nt, Artificial Sequence
  Description of Artificial Sequence: Synthetic oligonucleotide
aagucacccagccagauuu

SEQ ID NO: 3180028 - RNA, 19 nt, Artificial Sequence
  Description of Artificial Sequence: Synthetic oligonucleotide
gaaacuugcuuguaagcac

SEQ ID NO: 3180029 - RNA, 19 nt, Artificial Sequence
  Description of Artificial Sequence: Synthetic oligonucleotide
ucugcuguguuauucauua

SEQ ID NO: 3180030 - RNA, 19 nt, Artificial Sequence
  Description of Artificial Sequence: Synthetic oligonucleotide
uguuauucauuaugaauuc

SEQ ID NO: 3180031 - RNA, 19 nt, Artificial Sequence
  Description of Artificial Sequence: Synthetic oligonucleotide
aguaguguugcuugaggag

SEQ ID NO: 3180032 - RNA, 19 nt, Artificial Sequence
  Description of Artificial Sequence: Synthetic oligonucleotide
aaauacagucacaauccuc

SEQ ID NO: 3180033 - RNA, 19 nt, Artificial Sequence
  Description of Artificial Sequence: Synthetic oligonucleotide
caaauggaaguacuaagug

SEQ ID NO: 3180034 - RNA, 19 nt, Artificial Sequence
  Description of Artificial Sequence: Synthetic oligonucleotide
aaaagagcauuucccagau

SEQ ID NO: 3180035 - RNA, 19 nt, Artificial Sequence
  Description of Artificial Sequence: Synthetic oligonucleotide
ucccagaucugcccuaucg

SEQ ID NO: 3180036 - RNA, 19 nt, Artificial Sequence
  Description of Artificial Sequence: Synthetic oligonucleotide
ugucgaaggagccaggguc

SEQ ID NO: 3180037 - RNA, 19 nt, Artificial Sequence
  Description of Artificial Sequence: Synthetic oligonucleotide
gaaaagagcauuucccaga

SEQ ID NO: 3180038 - RNA, 19 nt, Artificial Sequence
  Description of Artificial Sequence: Synthetic oligonucleotide
uaagcacccacauccaagc

SEQ ID NO: 3180039 - RNA, 19 nt, Artificial Sequence
  Description of Artificial Sequence: Synthetic oligonucleotide
aagccaucuucccagccuc

SEQ ID NO: 3180040 - RNA, 19 nt, Artificial Sequence
  Description of Artificial Sequence: Synthetic oligonucleotide
gagaaaagagcauuuccca

SEQ ID NO: 3180041 - RNA, 19 nt, Artificial Sequence
  Description of Artificial Sequence: Synthetic oligonucleotide
aaggcaaauacagucacaa

SEQ ID NO: 3180042 - RNA, 19 nt, Artificial Sequence
  Description of Artificial Sequence: Synthetic oligonucleotide
agauuuagguucaaacuuc

SEQ ID NO: 3180043 - RNA, 19 nt, Artificial Sequence
  Description of Artificial Sequence: Synthetic oligonucleotide
uacuaagugauggucacca

SEQ ID NO: 3180044 - RNA, 19 nt, Artificial Sequence
  Description of Artificial Sequence: Synthetic oligonucleotide
ggcaaauacagucacaauc

SEQ ID NO: 3180045 - RNA, 19 nt, Artificial Sequence
  Description of Artificial Sequence: Synthetic oligonucleotide
auccaagccaaucugcucu

SEQ ID NO: 3180046 - RNA, 19 nt, Artificial Sequence
  Description of Artificial Sequence: Synthetic oligonucleotide
agugauggucaccauuguc

SEQ ID NO: 3180047 - RNA, 19 nt, Artificial Sequence
  Description of Artificial Sequence: Synthetic oligonucleotide
agaucugcccuaucguuuc

SEQ ID NO: 3180048 - RNA, 19 nt, Artificial Sequence
  Description of Artificial Sequence: Synthetic oligonucleotide
uuugcaaauggaaguacua

SEQ ID NO: 3180049 - RNA, 19 nt, Artificial Sequence
  Description of Artificial Sequence: Synthetic oligonucleotide
ugaauucagccacaaaauu

SEQ ID NO: 3180050 - RNA, 19 nt, Artificial Sequence
  Description of Artificial Sequence: Synthetic oligonucleotide
uuaaugaugccaucuucaa

SEQ ID NO: 3180051 - RNA, 19 nt, Artificial Sequence
  Description of Artificial Sequence: Synthetic oligonucleotide
uccauucugacguauccac

SEQ ID NO: 3180052 - RNA, 19 nt, Artificial Sequence
  Description of Artificial Sequence: Synthetic oligonucleotide
uggaaacuugcuuguaagc

SEQ ID NO: 3180053 - RNA, 19 nt, Artificial Sequence
  Description of Artificial Sequence: Synthetic oligonucleotide
gguucaaacuucuucauga

SEQ ID NO: 3180054 - RNA, 19 nt, Artificial Sequence
  Description of Artificial Sequence: Synthetic oligonucleotide
ucaugaagccaucuuccca

SEQ ID NO: 3180055 - RNA, 19 nt, Artificial Sequence
  Description of Artificial Sequence: Synthetic oligonucleotide
auacagucacaauccuccc

SEQ ID NO: 3180056 - RNA, 19 nt, Artificial Sequence
  Description of Artificial Sequence: Synthetic oligonucleotide
aaguacuaagugaugguca

SEQ ID NO: 3180057 - RNA, 19 nt, Artificial Sequence
  Description of Artificial Sequence: Synthetic oligonucleotide
ucugacguauccacucugc

SEQ ID NO: 3180058 - RNA, 19 nt, Artificial Sequence
  Description of Artificial Sequence: Synthetic oligonucleotide
gcaaauacagucacaaucc

SEQ ID NO: 3180059 - RNA, 19 nt, Artificial Sequence
  Description of Artificial Sequence: Synthetic oligonucleotide
aacuucuucaugaagccau

SEQ ID NO: 3180060 - RNA, 19 nt, Artificial Sequence
  Description of Artificial Sequence: Synthetic oligonucleotide
aagcacccacauccaagcc

SEQ ID NO: 3180061 - RNA, 19 nt, Artificial Sequence
  Description of Artificial Sequence: Synthetic oligonucleotide
ugcccuaucguuuccagaa

SEQ ID NO: 3180062 - RNA, 19 nt, Artificial Sequence
  Description of Artificial Sequence: Synthetic oligonucleotide
aagccaaucugcucuugug

SEQ ID NO: 3180063 - RNA, 19 nt, Artificial Sequence
  Description of Artificial Sequence: Synthetic oligonucleotide
uucaugaagccaucuuccc

SEQ ID NO: 3180064 - RNA, 19 nt, Artificial Sequence
  Description of Artificial Sequence: Synthetic oligonucleotide
cauucugacguauccacuc

SEQ ID NO: 3180065 - RNA, 19 nt, Artificial Sequence
  Description of Artificial Sequence: Synthetic oligonucleotide
caaaggcaaauacagucac

SEQ ID NO: 3180066 - RNA, 19 nt, Artificial Sequence
  Description of Artificial Sequence: Synthetic oligonucleotide
ugauggucaccauugucga

SEQ ID NO: 3180067 - RNA, 19 nt, Artificial Sequence
  Description of Artificial Sequence: Synthetic oligonucleotide
ugacguauccacucugcug

SEQ ID NO: 3180068 - RNA, 19 nt, Artificial Sequence
  Description of Artificial Sequence: Synthetic oligonucleotide
aacuugcuuguaagcaccc

SEQ ID NO: 3180069 - RNA, 19 nt, Artificial Sequence
  Description of Artificial Sequence: Synthetic oligonucleotide
uacagucacaauccucccc

SEQ ID NO: 3180070 - RNA, 19 nt, Artificial Sequence
  Description of Artificial Sequence: Synthetic oligonucleotide
guuaaugaugccaucuuca

SEQ ID NO: 3180071 - RNA, 19 nt, Artificial Sequence
  Description of Artificial Sequence: Synthetic oligonucleotide
auuggaaacuugcuuguaa

SEQ ID NO: 3180072 - RNA, 19 nt, Artificial Sequence
  Description of Artificial Sequence: Synthetic oligonucleotide
ggagaaaagagcauuuccc

SEQ ID NO: 3180073 - RNA, 19 nt, Artificial Sequence
  Description of Artificial Sequence: Synthetic oligonucleotide
gaaguacuaagugaugguc

SEQ ID NO: 3180074 - RNA, 19 nt, Artificial Sequence
  Description of Artificial Sequence: Synthetic oligonucleotide
cuugcuuguaagcacccac

SEQ ID NO: 3180075 - RNA, 19 nt, Artificial Sequence
  Description of Artificial Sequence: Synthetic oligonucleotide
auggucaccauugucgaag

SEQ ID NO: 3180076 - RNA, 19 nt, Artificial Sequence
  Description of Artificial Sequence: Synthetic oligonucleotide
gucaccauugucgaaggag

SEQ ID NO: 3180077 - RNA, 19 nt, Artificial Sequence
  Description of Artificial Sequence: Synthetic oligonucleotide
uugcuuguaagcacccaca

SEQ ID NO: 3180078 - RNA, 19 nt, Artificial Sequence
  Description of Artificial Sequence: Synthetic oligonucleotide
aaagagcauuucccagauc

SEQ ID NO: 3180079 - RNA, 19 nt, Artificial Sequence
  Description of Artificial Sequence: Synthetic oligonucleotide
agcauuucccagaucugcc

SEQ ID NO: 3180080 - RNA, 19 nt, Artificial Sequence
  Description of Artificial Sequence: Synthetic oligonucleotide
gacguauccacucugcugu

SEQ ID NO: 3180081 - RNA, 19 nt, Artificial Sequence
  Description of Artificial Sequence: Synthetic oligonucleotide
uaaugaugccaucuucaaa

SEQ ID NO: 3180082 - RNA, 19 nt, Artificial Sequence
  Description of Artificial Sequence: Synthetic oligonucleotide
cacauccaagccaaucugc

SEQ ID NO: 3180083 - RNA, 19 nt, Artificial Sequence
  Description of Artificial Sequence: Synthetic oligonucleotide
ucacccagccagauuuagg

SEQ ID NO: 3180084 - RNA, 19 nt, Artificial Sequence
  Description of Artificial Sequence: Synthetic oligonucleotide
aacauuucuacauagucac

SEQ ID NO: 3180085 - RNA, 19 nt, Artificial Sequence
  Description of Artificial Sequence: Synthetic oligonucleotide
ucuacauagucacagaacg

SEQ ID NO: 3180086 - RNA, 19 nt, Artificial Sequence
  Description of Artificial Sequence: Synthetic oligonucleotide
aacaaaauaacccacauuu

SEQ ID NO: 3180087 - RNA, 19 nt, Artificial Sequence
  Description of Artificial Sequence: Synthetic oligonucleotide
aaaagaauugcaaacuucc

SEQ ID NO: 3180088 - RNA, 19 nt, Artificial Sequence
  Description of Artificial Sequence: Synthetic oligonucleotide
aaguauuguccccagaagc

SEQ ID NO: 3180089 - RNA, 19 nt, Artificial Sequence
  Description of Artificial Sequence: Synthetic oligonucleotide
agaacgauacuguagaaac

SEQ ID NO: 3180090 - RNA, 19 nt, Artificial Sequence
  Description of Artificial Sequence: Synthetic oligonucleotide
aauacuaugacuaugcuaa

SEQ ID NO: 3180091 - RNA, 19 nt, Artificial Sequence
  Description of Artificial Sequence: Synthetic oligonucleotide
aaaagaaaaucucauuucu

SEQ ID NO: 3180092 - RNA, 19 nt, Artificial Sequence
  Description of Artificial Sequence: Synthetic oligonucleotide
auaagcauuaaauauaaaa

SEQ ID NO: 3180093 - RNA, 19 nt, Artificial Sequence
  Description of Artificial Sequence: Synthetic oligonucleotide
aagaauugcaaacuuccag

SEQ ID NO: 3180094 - RNA, 19 nt, Artificial Sequence
  Description of Artificial Sequence: Synthetic oligonucleotide
aguucaauaauaaauuuuc

SEQ ID NO: 3180095 - RNA, 19 nt, Artificial Sequence
  Description of Artificial Sequence: Synthetic oligonucleotide
aguucaagaaguauugucc

SEQ ID NO: 3180096 - RNA, 19 nt, Artificial Sequence
  Description of Artificial Sequence: Synthetic oligonucleotide
cuagaauggaagaagguag

SEQ ID NO: 3180097 - RNA, 19 nt, Artificial Sequence
  Description of Artificial Sequence: Synthetic oligonucleotide
cauaacaguacuuggacag

SEQ ID NO: 3180098 - RNA, 19 nt, Artificial Sequence
  Description of Artificial Sequence: Synthetic oligonucleotide
aguucuuuugauuuaaggu

SEQ ID NO: 3180099 - RNA, 19 nt, Artificial Sequence
  Description of Artificial Sequence: Synthetic oligonucleotide
gacuaugcuaacaagacag

SEQ ID NO: 3180100 - RNA, 19 nt, Artificial Sequence
  Description of Artificial Sequence: Synthetic oligonucleotide
aacaacaguguacaugaag

SEQ ID NO: 3180101 - RNA, 19 nt, Artificial Sequence
  Description of Artificial Sequence: Synthetic oligonucleotide
ucaauaauaaauuuuccuu

SEQ ID NO: 3180102 - RNA, 19 nt, Artificial Sequence
  Description of Artificial Sequence: Synthetic oligonucleotide
ucuuucucuagaauggaag

SEQ ID NO: 3180103 - RNA, 19 nt, Artificial Sequence
  Description of Artificial Sequence: Synthetic oligonucleotide
aaggcauguucguauuucc

SEQ ID NO: 3180104 - RNA, 19 nt, Artificial Sequence
  Description of Artificial Sequence: Synthetic oligonucleotide
augcuaacaagacagcaac

SEQ ID NO: 3180105 - RNA, 19 nt, Artificial Sequence
  Description of Artificial Sequence: Synthetic oligonucleotide
ucguauuuccacccgaggg

SEQ ID NO: 3180106 - RNA, 19 nt, Artificial Sequence
  Description of Artificial Sequence: Synthetic oligonucleotide
agaaaacauuucuacauag

SEQ ID NO: 3180107 - RNA, 19 nt, Artificial Sequence
  Description of Artificial Sequence: Synthetic oligonucleotide
aaauuuuccuucuuuguau

SEQ ID NO: 3180108 - RNA, 19 nt, Artificial Sequence
  Description of Artificial Sequence: Synthetic oligonucleotide
gaaaacagccuagagagag

SEQ ID NO: 3180109 - RNA, 19 nt, Artificial Sequence
  Description of Artificial Sequence: Synthetic oligonucleotide
aaggugagucaucaguugg

SEQ ID NO: 3180110 - RNA, 19 nt, Artificial Sequence
  Description of Artificial Sequence: Synthetic oligonucleotide
ucaucuuucauaacaguac

SEQ ID NO: 3180111 - RNA, 19 nt, Artificial Sequence
  Description of Artificial Sequence: Synthetic oligonucleotide
uuugauuuaaggugaguca

SEQ ID NO: 3180112 - RNA, 19 nt, Artificial Sequence
  Description of Artificial Sequence: Synthetic oligonucleotide
aguugguuaauucuuucuc

SEQ ID NO: 3180113 - RNA, 19 nt, Artificial Sequence
  Description of Artificial Sequence: Synthetic oligonucleotide
gacagcaacaaaauaaccc

SEQ ID NO: 3180114 - RNA, 19 nt, Artificial Sequence
  Description of Artificial Sequence: Synthetic oligonucleotide
aagaaggugggaucguuuc

SEQ ID NO: 3180115 - RNA, 19 nt, Artificial Sequence
  Description of Artificial Sequence: Synthetic oligonucleotide
uuucauaacaguacuugga

SEQ ID NO: 3180116 - RNA, 19 nt, Artificial Sequence
  Description of Artificial Sequence: Synthetic oligonucleotide
aacgauacuguagaaacug

SEQ ID NO: 3180117 - RNA, 19 nt, Artificial Sequence
  Description of Artificial Sequence: Synthetic oligonucleotide
uuaucagcacaucugguug

SEQ ID NO: 3180118 - RNA, 19 nt, Artificial Sequence
  Description of Artificial Sequence: Synthetic oligonucleotide
uucauaacaguacuuggac

SEQ ID NO: 3180119 - RNA, 19 nt, Artificial Sequence
  Description of Artificial Sequence: Synthetic oligonucleotide
acagcaacaaaauaaccca

SEQ ID NO: 3180120 - RNA, 19 nt, Artificial Sequence
  Description of Artificial Sequence: Synthetic oligonucleotide
uuuugcaucacuuccccug

SEQ ID NO: 3180121 - RNA, 19 nt, Artificial Sequence
  Description of Artificial Sequence: Synthetic oligonucleotide
aaauaacccacauuucuaa

SEQ ID NO: 3180122 - RNA, 19 nt, Artificial Sequence
  Description of Artificial Sequence: Synthetic oligonucleotide
ucuuucauaacaguacuug

SEQ ID NO: 3180123 - RNA, 19 nt, Artificial Sequence
  Description of Artificial Sequence: Synthetic oligonucleotide
agaauugcaaacuuccaga

SEQ ID NO: 3180124 - RNA, 19 nt, Artificial Sequence
  Description of Artificial Sequence: Synthetic oligonucleotide
aacugaagaaggugggauc

SEQ ID NO: 3180125 - RNA, 19 nt, Artificial Sequence
  Description of Artificial Sequence: Synthetic oligonucleotide
uaacccacauuucuaaagc

SEQ ID NO: 3180126 - RNA, 19 nt, Artificial Sequence
  Description of Artificial Sequence: Synthetic oligonucleotide
cuuucauaacaguacuugg

SEQ ID NO: 3180127 - RNA, 19 nt, Artificial Sequence
  Description of Artificial Sequence: Synthetic oligonucleotide
aacccacauuucuaaagcg

SEQ ID NO: 3180128 - RNA, 19 nt, Artificial Sequence
  Description of Artificial Sequence: Synthetic oligonucleotide
aguauuguccccagaagcc

SEQ ID NO: 3180129 - RNA, 19 nt, Artificial Sequence
  Description of Artificial Sequence: Synthetic oligonucleotide
auaacccacauuucuaaag

SEQ ID NO: 3180130 - RNA, 19 nt, Artificial Sequence
  Description of Artificial Sequence: Synthetic oligonucleotide
uuuugauuuaaggugaguc

SEQ ID NO: 3180131 - RNA, 19 nt, Artificial Sequence
  Description of Artificial Sequence: Synthetic oligonucleotide
uaaauuuuccuucuuugua

SEQ ID NO: 3180132 - RNA, 19 nt, Artificial Sequence
  Description of Artificial Sequence: Synthetic oligonucleotide
augcagcccaguuagaagg

SEQ ID NO: 3180133 - RNA, 19 nt, Artificial Sequence
  Description of Artificial Sequence: Synthetic oligonucleotide
guuuucacaguagaugucg

SEQ ID NO: 3180134 - RNA, 19 nt, Artificial Sequence
  Description of Artificial Sequence: Synthetic oligonucleotide
cauagucacagaacgauac

SEQ ID NO: 3180135 - RNA, 19 nt, Artificial Sequence
  Description of Artificial Sequence: Synthetic oligonucleotide
aaaggcauguucguauuuc

SEQ ID NO: 3180136 - RNA, 19 nt, Artificial Sequence
  Description of Artificial Sequence: Synthetic oligonucleotide
ucacagaacgauacuguag

SEQ ID NO: 3180137 - RNA, 19 nt, Artificial Sequence
  Description of Artificial Sequence: Synthetic oligonucleotide
acuuccagaaacaacagug

SEQ ID NO: 3180138 - RNA, 19 nt, Artificial Sequence
  Description of Artificial Sequence: Synthetic oligonucleotide
uaugcuaacaagacagcaa

SEQ ID NO: 3180139 - RNA, 19 nt, Artificial Sequence
  Description of Artificial Sequence: Synthetic oligonucleotide
uuucuacauagucacagaa

SEQ ID NO: 3180140 - RNA, 19 nt, Artificial Sequence
  Description of Artificial Sequence: Synthetic oligonucleotide
augacuaugcuaacaagac

SEQ ID NO: 3180141 - RNA, 19 nt, Artificial Sequence
  Description of Artificial Sequence: Synthetic oligonucleotide
agauggggacaccuuaccc

SEQ ID NO: 3180142 - RNA, 19 nt, Artificial Sequence
  Description of Artificial Sequence: Synthetic oligonucleotide
guucaagaaguauuguccc

SEQ ID NO: 3180143 - RNA, 19 nt, Artificial Sequence
  Description of Artificial Sequence: Synthetic oligonucleotide
auuucugagcuuuucaaau

SEQ ID NO: 3180144 - RNA, 19 nt, Artificial Sequence
  Description of Artificial Sequence: Synthetic oligonucleotide
aaagaaaaucucauuucug

SEQ ID NO: 3180145 - RNA, 19 nt, Artificial Sequence
  Description of Artificial Sequence: Synthetic oligonucleotide
cauuucuacauagucacag

SEQ ID NO: 3180146 - RNA, 19 nt, Artificial Sequence
  Description of Artificial Sequence: Synthetic oligonucleotide
aagaaaacauuucuacaua

SEQ ID NO: 3180147 - RNA, 19 nt, Artificial Sequence
  Description of Artificial Sequence: Synthetic oligonucleotide
acuaugacuaugcuaacaa

SEQ ID NO: 3180148 - RNA, 19 nt, Artificial Sequence
  Description of Artificial Sequence: Synthetic oligonucleotide
acuuggacaggaguggacc

SEQ ID NO: 3180149 - RNA, 19 nt, Artificial Sequence
  Description of Artificial Sequence: Synthetic oligonucleotide
auuucuaaagcgggguggc

SEQ ID NO: 3180150 - RNA, 19 nt, Artificial Sequence
  Description of Artificial Sequence: Synthetic oligonucleotide
acugaagaaggugggaucg

SEQ ID NO: 3180151 - RNA, 19 nt, Artificial Sequence
  Description of Artificial Sequence: Synthetic oligonucleotide
acaguuuaucagcacaucu

SEQ ID NO: 3180152 - RNA, 19 nt, Artificial Sequence
  Description of Artificial Sequence: Synthetic oligonucleotide
cuuuucaaauacccgacug

SEQ ID NO: 3180153 - RNA, 19 nt, Artificial Sequence
  Description of Artificial Sequence: Synthetic oligonucleotide
agaaacaacaguguacaug

SEQ ID NO: 3180154 - RNA, 19 nt, Artificial Sequence
  Description of Artificial Sequence: Synthetic oligonucleotide
uuaaggugagucaucaguu

SEQ ID NO: 3180155 - RNA, 19 nt, Artificial Sequence
  Description of Artificial Sequence: Synthetic oligonucleotide
uucuacauagucacagaac

SEQ ID NO: 3180156 - RNA, 19 nt, Artificial Sequence
  Description of Artificial Sequence: Synthetic oligonucleotide
uuacccagaaaacagccua

SEQ ID NO: 3180157 - RNA, 19 nt, Artificial Sequence
  Description of Artificial Sequence: Synthetic oligonucleotide
gaucaugugggcaaguuca

SEQ ID NO: 3180158 - RNA, 19 nt, Artificial Sequence
  Description of Artificial Sequence: Synthetic oligonucleotide
uagaauggaagaagguaga

SEQ ID NO: 3180159 - RNA, 19 nt, Artificial Sequence
  Description of Artificial Sequence: Synthetic oligonucleotide
ucauaacaguacuuggaca

SEQ ID NO: 3180160 - RNA, 19 nt, Artificial Sequence
  Description of Artificial Sequence: Synthetic oligonucleotide
ucacacucaucuuucauaa

SEQ ID NO: 3180161 - RNA, 19 nt, Artificial Sequence
  Description of Artificial Sequence: Synthetic oligonucleotide
ucuagaauggaagaaggua

SEQ ID NO: 3180162 - RNA, 19 nt, Artificial Sequence
  Description of Artificial Sequence: Synthetic oligonucleotide
uuaauucuuucucuagaau

SEQ ID NO: 3180163 - RNA, 19 nt, Artificial Sequence
  Description of Artificial Sequence: Synthetic oligonucleotide
ucuacucccagccauuguc

SEQ ID NO: 3180164 - RNA, 19 nt, Artificial Sequence
  Description of Artificial Sequence: Synthetic oligonucleotide
ucauggucaguucuuuuga

SEQ ID NO: 3180165 - RNA, 19 nt, Artificial Sequence
  Description of Artificial Sequence: Synthetic oligonucleotide
caaguguugaacugggcug

SEQ ID NO: 3180166 - RNA, 19 nt, Artificial Sequence
  Description of Artificial Sequence: Synthetic oligonucleotide
uucguauuuccacccgagg

SEQ ID NO: 3180167 - RNA, 19 nt, Artificial Sequence
  Description of Artificial Sequence: Synthetic oligonucleotide
ugguuaauucuuucucuag

SEQ ID NO: 3180168 - RNA, 19 nt, Artificial Sequence
  Description of Artificial Sequence: Synthetic oligonucleotide
cauguucguauuuccaccc

SEQ ID NO: 3180169 - RNA, 19 nt, Artificial Sequence
  Description of Artificial Sequence: Synthetic oligonucleotide
aauuuuccuucuuuguauu

SEQ ID NO: 3180170 - RNA, 19 nt, Artificial Sequence
  Description of Artificial Sequence: Synthetic oligonucleotide
ucaagaaguauugucccca

SEQ ID NO: 3180171 - RNA, 19 nt, Artificial Sequence
  Description of Artificial Sequence: Synthetic oligonucleotide
ugacuaugcuaacaagaca

SEQ ID NO: 3180172 - RNA, 19 nt, Artificial Sequence
  Description of Artificial Sequence: Synthetic oligonucleotide
aaauacccgacugaugcca

SEQ ID NO: 3180173 - RNA, 19 nt, Artificial Sequence
  Description of Artificial Sequence: Synthetic oligonucleotide
aucaagaauaagcauuaaa

SEQ ID NO: 3180174 - RNA, 19 nt, Artificial Sequence
  Description of Artificial Sequence: Synthetic oligonucleotide
uuccccugaagccagcuca

SEQ ID NO: 3180175 - RNA, 19 nt, Artificial Sequence
  Description of Artificial Sequence: Synthetic oligonucleotide
uucaagaaguauugucccc

SEQ ID NO: 3180176 - RNA, 19 nt, Artificial Sequence
  Description of Artificial Sequence: Synthetic oligonucleotide
uauuguccccagaagccag

SEQ ID NO: 3180177 - RNA, 19 nt, Artificial Sequence
  Description of Artificial Sequence: Synthetic oligonucleotide
gauuuaaggugagucauca

SEQ ID NO: 3180178 - RNA, 19 nt, Artificial Sequence
  Description of Artificial Sequence: Synthetic oligonucleotide
ugggcaaguucaauaauaa

SEQ ID NO: 3180179 - RNA, 19 nt, Artificial Sequence
  Description of Artificial Sequence: Synthetic oligonucleotide
ucuugcaguuuucacagua

SEQ ID NO: 3180180 - RNA, 19 nt, Artificial Sequence
  Description of Artificial Sequence: Synthetic oligonucleotide
agaauaagcauuaaauaua

SEQ ID NO: 3180181 - RNA, 19 nt, Artificial Sequence
  Description of Artificial Sequence: Synthetic oligonucleotide
uacauagucacagaacgau

SEQ ID NO: 3180182 - RNA, 19 nt, Artificial Sequence
  Description of Artificial Sequence: Synthetic oligonucleotide
uaaggugagucaucaguug

SEQ ID NO: 3180183 - RNA, 19 nt, Artificial Sequence
  Description of Artificial Sequence: Synthetic oligonucleotide
aaaauaacccacauuucua

SEQ ID NO: 3180184 - RNA, 19 nt, Artificial Sequence
  Description of Artificial Sequence: Synthetic oligonucleotide
acuuauaccaccugcagac

SEQ ID NO: 3180185 - RNA, 19 nt, Artificial Sequence
  Description of Artificial Sequence: Synthetic oligonucleotide
ugugaagacacacuuauac

SEQ ID NO: 3180186 - RNA, 19 nt, Artificial Sequence
  Description of Artificial Sequence: Synthetic oligonucleotide
aaaauggugaccuggucag

SEQ ID NO: 3180187 - RNA, 19 nt, Artificial Sequence
  Description of Artificial Sequence: Synthetic oligonucleotide
agaauaaggacccgaagac

SEQ ID NO: 3180188 - RNA, 19 nt, Artificial Sequence
  Description of Artificial Sequence: Synthetic oligonucleotide
ugaagacacacuuauacca

SEQ ID NO: 3180189 - RNA, 19 nt, Artificial Sequence
  Description of Artificial Sequence: Synthetic oligonucleotide
gaugagaccaggcagcagg

SEQ ID NO: 3180190 - RNA, 19 nt, Artificial Sequence
  Description of Artificial Sequence: Synthetic oligonucleotide
aguccauggucucacaucc

SEQ ID NO: 3180191 - RNA, 19 nt, Artificial Sequence
  Description of Artificial Sequence: Synthetic oligonucleotide
aagacacacuuauaccacc

SEQ ID NO: 3180192 - RNA, 19 nt, Artificial Sequence
  Description of Artificial Sequence: Synthetic oligonucleotide
cauagaaguagacaggggc

SEQ ID NO: 3180193 - RNA, 19 nt, Artificial Sequence
  Description of Artificial Sequence: Synthetic oligonucleotide
aaaccauccucagaggagc

SEQ ID NO: 3180194 - RNA, 19 nt, Artificial Sequence
  Description of Artificial Sequence: Synthetic oligonucleotide
cauucuuuacaaaggaggg

SEQ ID NO: 3180195 - RNA, 19 nt, Artificial Sequence
  Description of Artificial Sequence: Synthetic oligonucleotide
guguaaaccauccucagag

SEQ ID NO: 3180196 - RNA, 19 nt, Artificial Sequence
  Description of Artificial Sequence: Synthetic oligonucleotide
uggucucacauccagacag

SEQ ID NO: 3180197 - RNA, 19 nt, Artificial Sequence
  Description of Artificial Sequence: Synthetic oligonucleotide
caugauggcaccauggaag

SEQ ID NO: 3180198 - RNA, 19 nt, Artificial Sequence
  Description of Artificial Sequence: Synthetic oligonucleotide
acauucuuuacaaaggagg

SEQ ID NO: 3180199 - RNA, 19 nt, Artificial Sequence
  Description of Artificial Sequence: Synthetic oligonucleotide
auggaagaguccuuuagac

SEQ ID NO: 3180200 - RNA, 19 nt, Artificial Sequence
  Description of Artificial Sequence: Synthetic oligonucleotide
gauguuggaacucauagaa

SEQ ID NO: 3180201 - RNA, 19 nt, Artificial Sequence
  Description of Artificial Sequence: Synthetic oligonucleotide
acacacuuauaccaccugc

SEQ ID NO: 3180202 - RNA, 19 nt, Artificial Sequence
  Description of Artificial Sequence: Synthetic oligonucleotide
uauucugcuggacccagcg

SEQ ID NO: 3180203 - RNA, 19 nt, Artificial Sequence
  Description of Artificial Sequence: Synthetic oligonucleotide
gaguccuuuagacaugggg

SEQ ID NO: 3180204 - RNA, 19 nt, Artificial Sequence
  Description of Artificial Sequence: Synthetic oligonucleotide
cuuguuaauggccagaaca

SEQ ID NO: 3180205 - RNA, 19 nt, Artificial Sequence
  Description of Artificial Sequence: Synthetic oligonucleotide
cugacauucuuuacaaagg

SEQ ID NO: 3180206 - RNA, 19 nt, Artificial Sequence
  Description of Artificial Sequence: Synthetic oligonucleotide
aaagugggcgauauucugc

SEQ ID NO: 3180207 - RNA, 19 nt, Artificial Sequence
  Description of Artificial Sequence: Synthetic oligonucleotide
aacaugugaagacacacuu

SEQ ID NO: 3180208 - RNA, 19 nt, Artificial Sequence
  Description of Artificial Sequence: Synthetic oligonucleotide
ugacauucuuuacaaagga

SEQ ID NO: 3180209 - RNA, 19 nt, Artificial Sequence
  Description of Artificial Sequence: Synthetic oligonucleotide
uggagaugagaccaggcag

SEQ ID NO: 3180210 - RNA, 19 nt, Artificial Sequence
  Description of Artificial Sequence: Synthetic oligonucleotide
ucaaguuucacaccccaga

SEQ ID NO: 3180211 - RNA, 19 nt, Artificial Sequence
  Description of Artificial Sequence: Synthetic oligonucleotide
uauaccaccugcagacucg

SEQ ID NO: 3180212 - RNA, 19 nt, Artificial Sequence
  Description of Artificial Sequence: Synthetic oligonucleotide
uacaaaggaggguugaugu

SEQ ID NO: 3180213 - RNA, 19 nt, Artificial Sequence
  Description of Artificial Sequence: Synthetic oligonucleotide
uaaaccauccucagaggag

SEQ ID NO: 3180214 - RNA, 19 nt, Artificial Sequence
  Description of Artificial Sequence: Synthetic oligonucleotide
gaggucaaguuucacaccc

SEQ ID NO: 3180215 - RNA, 19 nt, Artificial Sequence
  Description of Artificial Sequence: Synthetic oligonucleotide
aaaaggaaccucaucacca

SEQ ID NO: 3180216 - RNA, 19 nt, Artificial Sequence
  Description of Artificial Sequence: Synthetic oligonucleotide
uucacaccccagaauaagg

SEQ ID NO: 3180217 - RNA, 19 nt, Artificial Sequence
  Description of Artificial Sequence: Synthetic oligonucleotide
acaacaugugaagacacac

SEQ ID NO: 3180218 - RNA, 19 nt, Artificial Sequence
  Description of Artificial Sequence: Synthetic oligonucleotide
agaaauggccucgaagacc

SEQ ID NO: 3180219 - RNA, 19 nt, Artificial Sequence
  Description of Artificial Sequence: Synthetic oligonucleotide
acaucugcuucacucuugc

SEQ ID NO: 3180220 - RNA, 19 nt, Artificial Sequence
  Description of Artificial Sequence: Synthetic oligonucleotide
aauggugaccuggucaggg

SEQ ID NO: 3180221 - RNA, 19 nt, Artificial Sequence
  Description of Artificial Sequence: Synthetic oligonucleotide
cucauagaaguagacaggg

SEQ ID NO: 3180222 - RNA, 19 nt, Artificial Sequence
  Description of Artificial Sequence: Synthetic oligonucleotide
auccagacagguuugccac

SEQ ID NO: 3180223 - RNA, 19 nt, Artificial Sequence
  Description of Artificial Sequence: Synthetic oligonucleotide
aauaaggacccgaagacaa

SEQ ID NO: 3180224 - RNA, 19 nt, Artificial Sequence
  Description of Artificial Sequence: Synthetic oligonucleotide
accauuguguaaaccaucc

SEQ ID NO: 3180225 - RNA, 19 nt, Artificial Sequence
  Description of Artificial Sequence: Synthetic oligonucleotide
ucauagaaguagacagggg

SEQ ID NO: 3180226 - RNA, 19 nt, Artificial Sequence
  Description of Artificial Sequence: Synthetic oligonucleotide
aguuucacaccccagaaua

SEQ ID NO: 3180227 - RNA, 19 nt, Artificial Sequence
  Description of Artificial Sequence: Synthetic oligonucleotide
cauuguguaaaccauccuc

SEQ ID NO: 3180228 - RNA, 19 nt, Artificial Sequence
  Description of Artificial Sequence: Synthetic oligonucleotide
aagaguccuuuagacaugg

SEQ ID NO: 3180229 - RNA, 19 nt, Artificial Sequence
  Description of Artificial Sequence: Synthetic oligonucleotide
uuggaacucauagaaguag

SEQ ID NO: 3180230 - RNA, 19 nt, Artificial Sequence
  Description of Artificial Sequence: Synthetic oligonucleotide
uguaaaccauccucagagg

SEQ ID NO: 3180231 - RNA, 19 nt, Artificial Sequence
  Description of Artificial Sequence: Synthetic oligonucleotide
uuaauggccagaacaucug

SEQ ID NO: 3180232 - RNA, 19 nt, Artificial Sequence
  Description of Artificial Sequence: Synthetic oligonucleotide
guugccuccaaagugggcg

SEQ ID NO: 3180233 - RNA, 19 nt, Artificial Sequence
  Description of Artificial Sequence: Synthetic oligonucleotide
uuguuaauggccagaacau

SEQ ID NO: 3180234 - RNA, 19 nt, Artificial Sequence
  Description of Artificial Sequence: Synthetic oligonucleotide
caaaaggaaccucaucacc

SEQ ID NO: 3180235 - RNA, 19 nt, Artificial Sequence
  Description of Artificial Sequence: Synthetic oligonucleotide
cagaacaucugcuucacuc

SEQ ID NO: 3180236 - RNA, 19 nt, Artificial Sequence
  Description of Artificial Sequence: Synthetic oligonucleotide
caccacaccagaaauggcc

SEQ ID NO: 3180237 - RNA, 19 nt, Artificial Sequence
  Description of Artificial Sequence: Synthetic oligonucleotide
auggucagccuucacgugg

SEQ ID NO: 3180238 - RNA, 19 nt, Artificial Sequence
  Description of Artificial Sequence: Synthetic oligonucleotide
uuugccaccauuguguaaa

SEQ ID NO: 3180239 - RNA, 19 nt, Artificial Sequence
  Description of Artificial Sequence: Synthetic oligonucleotide
aggacccgaagacaaaagg

SEQ ID NO: 3180240 - RNA, 19 nt, Artificial Sequence
  Description of Artificial Sequence: Synthetic oligonucleotide
ucacucuugccucucacga

SEQ ID NO: 3180241 - RNA, 19 nt, Artificial Sequence
  Description of Artificial Sequence: Synthetic oligonucleotide
uccauggucucacauccag

SEQ ID NO: 3180242 - RNA, 19 nt, Artificial Sequence
  Description of Artificial Sequence: Synthetic oligonucleotide
aucugcuucacucuugccu

SEQ ID NO: 3180243 - RNA, 19 nt, Artificial Sequence
  Description of Artificial Sequence: Synthetic oligonucleotide
gaagacaaaaggaaccuca

SEQ ID NO: 3180244 - RNA, 19 nt, Artificial Sequence
  Description of Artificial Sequence: Synthetic oligonucleotide
uccaaagugggcgauauuc

SEQ ID NO: 3180245 - RNA, 19 nt, Artificial Sequence
  Description of Artificial Sequence: Synthetic oligonucleotide
cucaucaccauggucagcc

SEQ ID NO: 3180246 - RNA, 19 nt, Artificial Sequence
  Description of Artificial Sequence: Synthetic oligonucleotide
cauggucucacauccagac

SEQ ID NO: 3180247 - RNA, 19 nt, Artificial Sequence
  Description of Artificial Sequence: Synthetic oligonucleotide
gaaguagacaggggcaugg

SEQ ID NO: 3180248 - RNA, 19 nt, Artificial Sequence
  Description of Artificial Sequence: Synthetic oligonucleotide
aagugggcgauauucugcu

SEQ ID NO: 3180249 - RNA, 19 nt, Artificial Sequence
  Description of Artificial Sequence: Synthetic oligonucleotide
aaaggaggguugauguugg

SEQ ID NO: 3180250 - RNA, 19 nt, Artificial Sequence
  Description of Artificial Sequence: Synthetic oligonucleotide
uggaacucauagaaguaga

SEQ ID NO: 3180251 - RNA, 19 nt, Artificial Sequence
  Description of Artificial Sequence: Synthetic oligonucleotide
ugauguuggaacucauaga

SEQ ID NO: 3180252 - RNA, 19 nt, Artificial Sequence
  Description of Artificial Sequence: Synthetic oligonucleotide
uucacucuugccucucacg

SEQ ID NO: 3180253 - RNA, 19 nt, Artificial Sequence
  Description of Artificial Sequence: Synthetic oligonucleotide
uguguaaaccauccucaga

SEQ ID NO: 3180254 - RNA, 19 nt, Artificial Sequence
  Description of Artificial Sequence: Synthetic oligonucleotide
gugaagacacacuuauacc

SEQ ID NO: 3180255 - RNA, 19 nt, Artificial Sequence
  Description of Artificial Sequence: Synthetic oligonucleotide
ucuuuacaaaggaggguug

SEQ ID NO: 3180256 - RNA, 19 nt, Artificial Sequence
  Description of Artificial Sequence: Synthetic oligonucleotide
accagaaauggccucgaag

SEQ ID NO: 3180257 - RNA, 19 nt, Artificial Sequence
  Description of Artificial Sequence: Synthetic oligonucleotide
agacaaaaggaaccucauc

SEQ ID NO: 3180258 - RNA, 19 nt, Artificial Sequence
  Description of Artificial Sequence: Synthetic oligonucleotide
aagaccuuguuaauggcca

SEQ ID NO: 3180259 - RNA, 19 nt, Artificial Sequence
  Description of Artificial Sequence: Synthetic oligonucleotide
acaccccagaauaaggacc

SEQ ID NO: 3180260 - RNA, 19 nt, Artificial Sequence
  Description of Artificial Sequence: Synthetic oligonucleotide
agaacaucugcuucacucu

SEQ ID NO: 3180261 - RNA, 19 nt, Artificial Sequence
  Description of Artificial Sequence: Synthetic oligonucleotide
auuguguaaaccauccuca

SEQ ID NO: 3180262 - RNA, 19 nt, Artificial Sequence
  Description of Artificial Sequence: Synthetic oligonucleotide
uucuuuacaaaggaggguu

SEQ ID NO: 3180263 - RNA, 19 nt, Artificial Sequence
  Description of Artificial Sequence: Synthetic oligonucleotide
aggagcuggagaugagacc

SEQ ID NO: 3180264 - RNA, 19 nt, Artificial Sequence
  Description of Artificial Sequence: Synthetic oligonucleotide
ucacaccccagaauaagga

SEQ ID NO: 3180265 - RNA, 19 nt, Artificial Sequence
  Description of Artificial Sequence: Synthetic oligonucleotide
ucugcuucacucuugccuc

SEQ ID NO: 3180266 - RNA, 19 nt, Artificial Sequence
  Description of Artificial Sequence: Synthetic oligonucleotide
acuccacucuccaugaugg

SEQ ID NO: 3180267 - RNA, 19 nt, Artificial Sequence
  Description of Artificial Sequence: Synthetic oligonucleotide
cagaauaaggacccgaaga

SEQ ID NO: 3180268 - RNA, 19 nt, Artificial Sequence
  Description of Artificial Sequence: Synthetic oligonucleotide
gacauucuuuacaaaggag

SEQ ID NO: 3180269 - RNA, 19 nt, Artificial Sequence
  Description of Artificial Sequence: Synthetic oligonucleotide
gaagaccuuguuaauggcc

SEQ ID NO: 3180270 - RNA, 19 nt, Artificial Sequence
  Description of Artificial Sequence: Synthetic oligonucleotide
acacuuauaccaccugcag

SEQ ID NO: 3180271 - RNA, 19 nt, Artificial Sequence
  Description of Artificial Sequence: Synthetic oligonucleotide
gugggcgauauucugcugg

SEQ ID NO: 3180272 - RNA, 19 nt, Artificial Sequence
  Description of Artificial Sequence: Synthetic oligonucleotide
uuauaccaccugcagacuc

SEQ ID NO: 3180273 - RNA, 19 nt, Artificial Sequence
  Description of Artificial Sequence: Synthetic oligonucleotide
uggaagaguccuuuagaca

SEQ ID NO: 3180274 - RNA, 19 nt, Artificial Sequence
  Description of Artificial Sequence: Synthetic oligonucleotide
aaaggaaccucaucaccau

SEQ ID NO: 3180275 - RNA, 19 nt, Artificial Sequence
  Description of Artificial Sequence: Synthetic oligonucleotide
uuucacaccccagaauaag

SEQ ID NO: 3180276 - RNA, 19 nt, Artificial Sequence
  Description of Artificial Sequence: Synthetic oligonucleotide
uacuccacucuccaugaug

SEQ ID NO: 3180277 - RNA, 19 nt, Artificial Sequence
  Description of Artificial Sequence: Synthetic oligonucleotide
uggccugacauucuuuaca

SEQ ID NO: 3180278 - RNA, 19 nt, Artificial Sequence
  Description of Artificial Sequence: Synthetic oligonucleotide
uuacaaaggaggguugaug

SEQ ID NO: 3180279 - RNA, 19 nt, Artificial Sequence
  Description of Artificial Sequence: Synthetic oligonucleotide
guagacaggggcaugggag

SEQ ID NO: 3180280 - RNA, 19 nt, Artificial Sequence
  Description of Artificial Sequence: Synthetic oligonucleotide
uccaugauggcaccaugga

SEQ ID NO: 3180281 - RNA, 19 nt, Artificial Sequence
  Description of Artificial Sequence: Synthetic oligonucleotide
guaaaccauccucagagga

SEQ ID NO: 3180282 - RNA, 19 nt, Artificial Sequence
  Description of Artificial Sequence: Synthetic oligonucleotide
cuccaugauggcaccaugg

SEQ ID NO: 3180283 - RNA, 19 nt, Artificial Sequence
  Description of Artificial Sequence: Synthetic oligonucleotide
caccccagaauaaggaccc

SEQ ID NO: 3180284 - RNA, 19 nt, Artificial Sequence
  Description of Artificial Sequence: Synthetic oligonucleotide
auuauuauuacuuacuuac

SEQ ID NO: 3180285 - RNA, 19 nt, Artificial Sequence
  Description of Artificial Sequence: Synthetic oligonucleotide
acuuauuauuauuacuuac

SEQ ID NO: 3180286 - RNA, 19 nt, Artificial Sequence
  Description of Artificial Sequence: Synthetic oligonucleotide
aaugcuuagacuuauuauu

SEQ ID NO: 3180287 - RNA, 19 nt, Artificial Sequence
  Description of Artificial Sequence: Synthetic oligonucleotide
aagagcacuuccuugggac

SEQ ID NO: 3180288 - RNA, 19 nt, Artificial Sequence
  Description of Artificial Sequence: Synthetic oligonucleotide
agaaagagcacuuccuugg

SEQ ID NO: 3180289 - RNA, 19 nt, Artificial Sequence
  Description of Artificial Sequence: Synthetic oligonucleotide
uacuuacuuacuuacuccg

SEQ ID NO: 3180290 - RNA, 19 nt, Artificial Sequence
  Description of Artificial Sequence: Synthetic oligonucleotide
uuauuacuuacuuacuuac

SEQ ID NO: 3180291 - RNA, 19 nt, Artificial Sequence
  Description of Artificial Sequence: Synthetic oligonucleotide
uggguuauagaugacaccc

SEQ ID NO: 3180292 - RNA, 19 nt, Artificial Sequence
  Description of Artificial Sequence: Synthetic oligonucleotide
uucaugcccagaaagagca

SEQ ID NO: 3180293 - RNA, 19 nt, Artificial Sequence
  Description of Artificial Sequence: Synthetic oligonucleotide
gagucuuuaaugcuuagac

SEQ ID NO: 3180294 - RNA, 19 nt, Artificial Sequence
  Description of Artificial Sequence: Synthetic oligonucleotide
uccacuggguuauagauga

SEQ ID NO: 3180295 - RNA, 19 nt, Artificial Sequence
  Description of Artificial Sequence: Synthetic oligonucleotide
acugugugcacuccagucc

SEQ ID NO: 3180296 - RNA, 19 nt, Artificial Sequence
  Description of Artificial Sequence: Synthetic oligonucleotide
uuauuauuauuacuuacuu

SEQ ID NO: 3180297 - RNA, 19 nt, Artificial Sequence
  Description of Artificial Sequence: Synthetic oligonucleotide
uuacuuacuuacuuacucc

SEQ ID NO: 3180298 - RNA, 19 nt, Artificial Sequence
  Description of Artificial Sequence: Synthetic oligonucleotide
uauuauuacuuacuuacuu

SEQ ID NO: 3180299 - RNA, 19 nt, Artificial Sequence
  Description of Artificial Sequence: Synthetic oligonucleotide
agaaccagcacaagaaagc

SEQ ID NO: 3180300 - RNA, 19 nt, Artificial Sequence
  Description of Artificial Sequence: Synthetic oligonucleotide
aauccacuggguuauagau

SEQ ID NO: 3180301 - RNA, 19 nt, Artificial Sequence
  Description of Artificial Sequence: Synthetic oligonucleotide
aaggguccuggguucaugc

SEQ ID NO: 3180302 - RNA, 19 nt, Artificial Sequence
  Description of Artificial Sequence: Synthetic oligonucleotide
uuagacuuauuauuauuac

SEQ ID NO: 3180303 - RNA, 19 nt, Artificial Sequence
  Description of Artificial Sequence: Synthetic oligonucleotide
acuuacuccgacugugugc

SEQ ID NO: 3180304 - RNA, 19 nt, Artificial Sequence
  Description of Artificial Sequence: Synthetic oligonucleotide
cuuacuuacuuacuuacuc

SEQ ID NO: 3180305 - RNA, 19 nt, Artificial Sequence
  Description of Artificial Sequence: Synthetic oligonucleotide
uuaaugcuuagacuuauua

SEQ ID NO: 3180306 - RNA, 19 nt, Artificial Sequence
  Description of Artificial Sequence: Synthetic oligonucleotide
uggguucaugcccagaaag

SEQ ID NO: 3180307 - RNA, 19 nt, Artificial Sequence
  Description of Artificial Sequence: Synthetic oligonucleotide
uacuuacuuacuccgacug

SEQ ID NO: 3180308 - RNA, 19 nt, Artificial Sequence
  Description of Artificial Sequence: Synthetic oligonucleotide
uuccuugggaccuuggcag

SEQ ID NO: 3180309 - RNA, 19 nt, Artificial Sequence
  Description of Artificial Sequence: Synthetic oligonucleotide
auuacuuacuuacuuacuu

SEQ ID NO: 3180310 - RNA, 19 nt, Artificial Sequence
  Description of Artificial Sequence: Synthetic oligonucleotide
uacuuacuuacuuacuuac

SEQ ID NO: 3180311 - RNA, 19 nt, Artificial Sequence
  Description of Artificial Sequence: Synthetic oligonucleotide
uagacuuauuauuauuacu

SEQ ID NO: 3180312 - RNA, 19 nt, Artificial Sequence
  Description of Artificial Sequence: Synthetic oligonucleotide
uuauuauuacuuacuuacu

SEQ ID NO: 3180313 - RNA, 19 nt, Artificial Sequence
  Description of Artificial Sequence: Synthetic oligonucleotide
acauucacuucuccaaagg

SEQ ID NO: 3180314 - RNA, 19 nt, Artificial Sequence
  Description of Artificial Sequence: Synthetic oligonucleotide
auuauuacuuacuuacuua

SEQ ID NO: 3180315 - RNA, 19 nt, Artificial Sequence
  Description of Artificial Sequence: Synthetic oligonucleotide
acaagaaagccuacgaguc

SEQ ID NO: 3180316 - RNA, 19 nt, Artificial Sequence
  Description of Artificial Sequence: Synthetic oligonucleotide
aagggaagagagaaccagc

SEQ ID NO: 3180317 - RNA, 19 nt, Artificial Sequence
  Description of Artificial Sequence: Synthetic oligonucleotide
gagggguccgcacagagcc

SEQ ID NO: 3180318 - RNA, 19 nt, Artificial Sequence
  Description of Artificial Sequence: Synthetic oligonucleotide
acacuggucgcuuagggug

SEQ ID NO: 3180319 - RNA, 19 nt, Artificial Sequence
  Description of Artificial Sequence: Synthetic oligonucleotide
uauuauuauuacuuacuua

SEQ ID NO: 3180320 - RNA, 19 nt, Artificial Sequence
  Description of Artificial Sequence: Synthetic oligonucleotide
cauucacuucuccaaaggg

SEQ ID NO: 3180321 - RNA, 19 nt, Artificial Sequence
  Description of Artificial Sequence: Synthetic oligonucleotide
uaaugcuuagacuuauuau

SEQ ID NO: 3180322 - RNA, 19 nt, Artificial Sequence
  Description of Artificial Sequence: Synthetic oligonucleotide
uucacuucuccaaagggua

SEQ ID NO: 3180323 - RNA, 19 nt, Artificial Sequence
  Description of Artificial Sequence: Synthetic oligonucleotide
uauuacuuacuuacuuacu

SEQ ID NO: 3180324 - RNA, 19 nt, Artificial Sequence
  Description of Artificial Sequence: Synthetic oligonucleotide
uagcgagucacguaguuac

SEQ ID NO: 3180325 - RNA, 19 nt, Artificial Sequence
  Description of Artificial Sequence: Synthetic oligonucleotide
aagccuacgagucuuuaau

SEQ ID NO: 3180326 - RNA, 19 nt, Artificial Sequence
  Description of Artificial Sequence: Synthetic oligonucleotide
agagagaaccagcacaaga

SEQ ID NO: 3180327 - RNA, 19 nt, Artificial Sequence
  Description of Artificial Sequence: Synthetic oligonucleotide
cuuacuuacuuacuccgac

SEQ ID NO: 3180328 - RNA, 19 nt, Artificial Sequence
  Description of Artificial Sequence: Synthetic oligonucleotide
acuggguuauagaugacac

SEQ ID NO: 3180329 - RNA, 19 nt, Artificial Sequence
  Description of Artificial Sequence: Synthetic oligonucleotide
acuuccuugggaccuuggc

SEQ ID NO: 3180330 - RNA, 19 nt, Artificial Sequence
  Description of Artificial Sequence: Synthetic oligonucleotide
gaagggaagagagaaccag

SEQ ID NO: 3180331 - RNA, 19 nt, Artificial Sequence
  Description of Artificial Sequence: Synthetic oligonucleotide
ucugggccaugccaaaggg

SEQ ID NO: 3180332 - RNA, 19 nt, Artificial Sequence
  Description of Artificial Sequence: Synthetic oligonucleotide
gaaagagcacuuccuuggg

SEQ ID NO: 3180333 - RNA, 19 nt, Artificial Sequence
  Description of Artificial Sequence: Synthetic oligonucleotide
gucacguaguuacugugcg

SEQ ID NO: 3180334 - RNA, 19 nt, Artificial Sequence
  Description of Artificial Sequence: Synthetic oligonucleotide
agagcacuuccuugggacc

SEQ ID NO: 3180335 - RNA, 19 nt, Artificial Sequence
  Description of Artificial Sequence: Synthetic oligonucleotide
cuuagacuuauuauuauua

SEQ ID NO: 3180336 - RNA, 19 nt, Artificial Sequence
  Description of Artificial Sequence: Synthetic oligonucleotide
ccaagcauaauccacuggg

SEQ ID NO: 3180337 - RNA, 19 nt, Artificial Sequence
  Description of Artificial Sequence: Synthetic oligonucleotide
agacuuauuauuauuacuu

SEQ ID NO: 3180338 - RNA, 19 nt, Artificial Sequence
  Description of Artificial Sequence: Synthetic oligonucleotide
agucuuuaaugcuuagacu

SEQ ID NO: 3180339 - RNA, 19 nt, Artificial Sequence
  Description of Artificial Sequence: Synthetic oligonucleotide
gagaaccagcacaagaaag

SEQ ID NO: 3180340 - RNA, 19 nt, Artificial Sequence
  Description of Artificial Sequence: Synthetic oligonucleotide
cuuauuauuauuacuuacu

SEQ ID NO: 3180341 - RNA, 19 nt, Artificial Sequence
  Description of Artificial Sequence: Synthetic oligonucleotide
uacugugcggcucccaagc

SEQ ID NO: 3180342 - RNA, 19 nt, Artificial Sequence
  Description of Artificial Sequence: Synthetic oligonucleotide
aacacuggucgcuuagggu

SEQ ID NO: 3180343 - RNA, 19 nt, Artificial Sequence
  Description of Artificial Sequence: Synthetic oligonucleotide
aagcauaauccacuggguu

SEQ ID NO: 3180344 - RNA, 19 nt, Artificial Sequence
  Description of Artificial Sequence: Synthetic oligonucleotide
ucuccaaaggguaccccag

SEQ ID NO: 3180345 - RNA, 19 nt, Artificial Sequence
  Description of Artificial Sequence: Synthetic oligonucleotide
aaggguaccccagucuggg

SEQ ID NO: 3180346 - RNA, 19 nt, Artificial Sequence
  Description of Artificial Sequence: Synthetic oligonucleotide
agcacaagaaagccuacga

SEQ ID NO: 3180347 - RNA, 19 nt, Artificial Sequence
  Description of Artificial Sequence: Synthetic oligonucleotide
ucgcuuagggugcucuugg

SEQ ID NO: 3180348 - RNA, 19 nt, Artificial Sequence
  Description of Artificial Sequence: Synthetic oligonucleotide
uuacuuacuuacuuacuua

SEQ ID NO: 3180349 - RNA, 19 nt, Artificial Sequence
  Description of Artificial Sequence: Synthetic oligonucleotide
cuuacuuacuccgacugug

SEQ ID NO: 3180350 - RNA, 19 nt, Artificial Sequence
  Description of Artificial Sequence: Synthetic oligonucleotide
ugggccaugccaaaggguc

SEQ ID NO: 3180351 - RNA, 19 nt, Artificial Sequence
  Description of Artificial Sequence: Synthetic oligonucleotide
ucuuuaaugcuuagacuua

SEQ ID NO: 3180352 - RNA, 19 nt, Artificial Sequence
  Description of Artificial Sequence: Synthetic oligonucleotide
agucacguaguuacugugc

SEQ ID NO: 3180353 - RNA, 19 nt, Artificial Sequence
  Description of Artificial Sequence: Synthetic oligonucleotide
aaagagcacuuccuuggga

SEQ ID NO: 3180354 - RNA, 19 nt, Artificial Sequence
  Description of Artificial Sequence: Synthetic oligonucleotide
gaaccagcacaagaaagcc

SEQ ID NO: 3180355 - RNA, 19 nt, Artificial Sequence
  Description of Artificial Sequence: Synthetic oligonucleotide
uaauccacuggguuauaga

SEQ ID NO: 3180356 - RNA, 19 nt, Artificial Sequence
  Description of Artificial Sequence: Synthetic oligonucleotide
uucuccaaaggguacccca

SEQ ID NO: 3180357 - RNA, 19 nt, Artificial Sequence
  Description of Artificial Sequence: Synthetic oligonucleotide
uuagggugcucuuggggag

SEQ ID NO: 3180358 - RNA, 19 nt, Artificial Sequence
  Description of Artificial Sequence: Synthetic oligonucleotide
uuacuuacuuacuccgacu

SEQ ID NO: 3180359 - RNA, 19 nt, Artificial Sequence
  Description of Artificial Sequence: Synthetic oligonucleotide
caaaggguaccccagucug

SEQ ID NO: 3180360 - RNA, 19 nt, Artificial Sequence
  Description of Artificial Sequence: Synthetic oligonucleotide
uuggcaguagcgagucacg

SEQ ID NO: 3180361 - RNA, 19 nt, Artificial Sequence
  Description of Artificial Sequence: Synthetic oligonucleotide
gucuuuaaugcuuagacuu

SEQ ID NO: 3180362 - RNA, 19 nt, Artificial Sequence
  Description of Artificial Sequence: Synthetic oligonucleotide
accacauucacuucuccaa

SEQ ID NO: 3180363 - RNA, 19 nt, Artificial Sequence
  Description of Artificial Sequence: Synthetic oligonucleotide
aaagccuacgagucuuuaa

SEQ ID NO: 3180364 - RNA, 19 nt, Artificial Sequence
  Description of Artificial Sequence: Synthetic oligonucleotide
ggaagagagaaccagcaca

SEQ ID NO: 3180365 - RNA, 19 nt, Artificial Sequence
  Description of Artificial Sequence: Synthetic oligonucleotide
cacguaguuacugugcggc

SEQ ID NO: 3180366 - RNA, 19 nt, Artificial Sequence
  Description of Artificial Sequence: Synthetic oligonucleotide
gcaguagcgagucacguag

SEQ ID NO: 3180367 - RNA, 19 nt, Artificial Sequence
  Description of Artificial Sequence: Synthetic oligonucleotide
agcauaauccacuggguua

SEQ ID NO: 3180368 - RNA, 19 nt, Artificial Sequence
  Description of Artificial Sequence: Synthetic oligonucleotide
guaguuacugugcggcucc

SEQ ID NO: 3180369 - RNA, 19 nt, Artificial Sequence
  Description of Artificial Sequence: Synthetic oligonucleotide
acuucuccaaaggguaccc

SEQ ID NO: 3180370 - RNA, 19 nt, Artificial Sequence
  Description of Artificial Sequence: Synthetic oligonucleotide
cagaaagagcacuuccuug

SEQ ID NO: 3180371 - RNA, 19 nt, Artificial Sequence
  Description of Artificial Sequence: Synthetic oligonucleotide
uacuuacuccgacugugug

SEQ ID NO: 3180372 - RNA, 19 nt, Artificial Sequence
  Description of Artificial Sequence: Synthetic oligonucleotide
ucacguaguuacugugcgg

SEQ ID NO: 3180373 - RNA, 19 nt, Artificial Sequence
  Description of Artificial Sequence: Synthetic oligonucleotide
gacuuauuauuauuacuua

SEQ ID NO: 3180374 - RNA, 19 nt, Artificial Sequence
  Description of Artificial Sequence: Synthetic oligonucleotide
uuacuuacuccgacugugu

SEQ ID NO: 3180375 - RNA, 19 nt, Artificial Sequence
  Description of Artificial Sequence: Synthetic oligonucleotide
cuuagggugcucuugggga

SEQ ID NO: 3180376 - RNA, 19 nt, Artificial Sequence
  Description of Artificial Sequence: Synthetic oligonucleotide
cacauucacuucuccaaag

SEQ ID NO: 3180377 - RNA, 19 nt, Artificial Sequence
  Description of Artificial Sequence: Synthetic oligonucleotide
caacacuggucgcuuaggg

SEQ ID NO: 3180378 - RNA, 19 nt, Artificial Sequence
  Description of Artificial Sequence: Synthetic oligonucleotide
gagucacguaguuacugug

SEQ ID NO: 3180379 - RNA, 19 nt, Artificial Sequence
  Description of Artificial Sequence: Synthetic oligonucleotide
caugccaaaggguccuggg

SEQ ID NO: 3180380 - RNA, 19 nt, Artificial Sequence
  Description of Artificial Sequence: Synthetic oligonucleotide
aaaggguaccccagucugg

SEQ ID NO: 3180381 - RNA, 19 nt, Artificial Sequence
  Description of Artificial Sequence: Synthetic oligonucleotide
gagagaaccagcacaagaa

SEQ ID NO: 3180382 - RNA, 19 nt, Artificial Sequence
  Description of Artificial Sequence: Synthetic oligonucleotide
cugugugcacuccaguccc

SEQ ID NO: 3180383 - RNA, 19 nt, Artificial Sequence
  Description of Artificial Sequence: Synthetic oligonucleotide
cacuccagucccaacacug

SEQ ID NO: 3180384 - RNA, 19 nt, Artificial Sequence
  Description of Artificial Sequence: Synthetic oligonucleotide
aaacacauugcuuccaacc

SEQ ID NO: 3180385 - RNA, 19 nt, Artificial Sequence
  Description of Artificial Sequence: Synthetic oligonucleotide
uuucccagcauuuugauca

SEQ ID NO: 3180386 - RNA, 19 nt, Artificial Sequence
  Description of Artificial Sequence: Synthetic oligonucleotide
ucaauauaaugucugaugu

SEQ ID NO: 3180387 - RNA, 19 nt, Artificial Sequence
  Description of Artificial Sequence: Synthetic oligonucleotide
augucugauguauuuaucc

SEQ ID NO: 3180388 - RNA, 19 nt, Artificial Sequence
  Description of Artificial Sequence: Synthetic oligonucleotide
aacacauugcuuccaaccg

SEQ ID NO: 3180389 - RNA, 19 nt, Artificial Sequence
  Description of Artificial Sequence: Synthetic oligonucleotide
ucuucuuuaaacaccaacu

SEQ ID NO: 3180390 - RNA, 19 nt, Artificial Sequence
  Description of Artificial Sequence: Synthetic oligonucleotide
ucuuuaaacaccaacucuc

SEQ ID NO: 3180391 - RNA, 19 nt, Artificial Sequence
  Description of Artificial Sequence: Synthetic oligonucleotide
aauauaaugucugauguau

SEQ ID NO: 3180392 - RNA, 19 nt, Artificial Sequence
  Description of Artificial Sequence: Synthetic oligonucleotide
ugauguauuuauccaaacc

SEQ ID NO: 3180393 - RNA, 19 nt, Artificial Sequence
  Description of Artificial Sequence: Synthetic oligonucleotide
aucaauauaaugucugaug

SEQ ID NO: 3180394 - RNA, 19 nt, Artificial Sequence
  Description of Artificial Sequence: Synthetic oligonucleotide
uuauccuucgauagucucg

SEQ ID NO: 3180395 - RNA, 19 nt, Artificial Sequence
  Description of Artificial Sequence: Synthetic oligonucleotide
aucuucuuuaaacaccaac

SEQ ID NO: 3180396 - RNA, 19 nt, Artificial Sequence
  Description of Artificial Sequence: Synthetic oligonucleotide
gauguauuuauccaaaccu

SEQ ID NO: 3180397 - RNA, 19 nt, Artificial Sequence
  Description of Artificial Sequence: Synthetic oligonucleotide
ucugaugugacauagccuu

SEQ ID NO: 3180398 - RNA, 19 nt, Artificial Sequence
  Description of Artificial Sequence: Synthetic oligonucleotide
ucgauagucucgcagacca

SEQ ID NO: 3180399 - RNA, 19 nt, Artificial Sequence
  Description of Artificial Sequence: Synthetic oligonucleotide
uucuuuaaacaccaacucu

SEQ ID NO: 3180400 - RNA, 19 nt, Artificial Sequence
  Description of Artificial Sequence: Synthetic oligonucleotide
agaccaaucaauauaaugu

SEQ ID NO: 3180401 - RNA, 19 nt, Artificial Sequence
  Description of Artificial Sequence: Synthetic oligonucleotide
ugugacauagccuucucac

SEQ ID NO: 3180402 - RNA, 19 nt, Artificial Sequence
  Description of Artificial Sequence: Synthetic oligonucleotide
aucgaaacacauugcuucc

SEQ ID NO: 3180403 - RNA, 19 nt, Artificial Sequence
  Description of Artificial Sequence: Synthetic oligonucleotide
caucgaaacacauugcuuc

SEQ ID NO: 3180404 - RNA, 19 nt, Artificial Sequence
  Description of Artificial Sequence: Synthetic oligonucleotide
acauagccuucucacaccc

SEQ ID NO: 3180405 - RNA, 19 nt, Artificial Sequence
  Description of Artificial Sequence: Synthetic oligonucleotide
uuggccaucuucuuuaaac

SEQ ID NO: 3180406 - RNA, 19 nt, Artificial Sequence
  Description of Artificial Sequence: Synthetic oligonucleotide
ugacauagccuucucacac

SEQ ID NO: 3180407 - RNA, 19 nt, Artificial Sequence
  Description of Artificial Sequence: Synthetic oligonucleotide
uauaaugucugauguauuu

SEQ ID NO: 3180408 - RNA, 19 nt, Artificial Sequence
  Description of Artificial Sequence: Synthetic oligonucleotide
uuaaacaccaacucucuuu

SEQ ID NO: 3180409 - RNA, 19 nt, Artificial Sequence
  Description of Artificial Sequence: Synthetic oligonucleotide
ucugauguauuuauccaaa

SEQ ID NO: 3180410 - RNA, 19 nt, Artificial Sequence
  Description of Artificial Sequence: Synthetic oligonucleotide
uguauuuauccaaaccuuu

SEQ ID NO: 3180411 - RNA, 19 nt, Artificial Sequence
  Description of Artificial Sequence: Synthetic oligonucleotide
cagaccaaucaauauaaug

SEQ ID NO: 3180412 - RNA, 19 nt, Artificial Sequence
  Description of Artificial Sequence: Synthetic oligonucleotide
ugucugauguauuuaucca

SEQ ID NO: 3180413 - RNA, 19 nt, Artificial Sequence
  Description of Artificial Sequence: Synthetic oligonucleotide
gaccaaucaauauaauguc

SEQ ID NO: 3180414 - RNA, 19 nt, Artificial Sequence
  Description of Artificial Sequence: Synthetic oligonucleotide
auuuugaucaccugcgcau

SEQ ID NO: 3180415 - RNA, 19 nt, Artificial Sequence
  Description of Artificial Sequence: Synthetic oligonucleotide
cuucuuuaaacaccaacuc

SEQ ID NO: 3180416 - RNA, 19 nt, Artificial Sequence
  Description of Artificial Sequence: Synthetic oligonucleotide
agcauuuugaucaccugcg

SEQ ID NO: 3180417 - RNA, 19 nt, Artificial Sequence
  Description of Artificial Sequence: Synthetic oligonucleotide
ucaacuuuccucugaugug

SEQ ID NO: 3180418 - RNA, 19 nt, Artificial Sequence
  Description of Artificial Sequence: Synthetic oligonucleotide
uaaugucugauguauuuau

SEQ ID NO: 3180419 - RNA, 19 nt, Artificial Sequence
  Description of Artificial Sequence: Synthetic oligonucleotide
aaugucugauguauuuauc

SEQ ID NO: 3180420 - RNA, 19 nt, Artificial Sequence
  Description of Artificial Sequence: Synthetic oligonucleotide
cacccaucgaaacacauug

SEQ ID NO: 3180421 - RNA, 19 nt, Artificial Sequence
  Description of Artificial Sequence: Synthetic oligonucleotide
agccuucucacacccaucg

SEQ ID NO: 3180422 - RNA, 19 nt, Artificial Sequence
  Description of Artificial Sequence: Synthetic oligonucleotide
aaucaauauaaugucugau

SEQ ID NO: 3180423 - RNA, 19 nt, Artificial Sequence
  Description of Artificial Sequence: Synthetic oligonucleotide
uaaacaccaacucucuuuu

SEQ ID NO: 3180424 - RNA, 19 nt, Artificial Sequence
  Description of Artificial Sequence: Synthetic oligonucleotide
uccuucgauagucucgcag

SEQ ID NO: 3180425 - RNA, 19 nt, Artificial Sequence
  Description of Artificial Sequence: Synthetic oligonucleotide
cagcauuuugaucaccugc

SEQ ID NO: 3180426 - RNA, 19 nt, Artificial Sequence
  Description of Artificial Sequence: Synthetic oligonucleotide
uuucacgauuucauuuuca

SEQ ID NO: 3180427 - RNA, 19 nt, Artificial Sequence
  Description of Artificial Sequence: Synthetic oligonucleotide
uauccuucgauagucucgc

SEQ ID NO: 3180428 - RNA, 19 nt, Artificial Sequence
  Description of Artificial Sequence: Synthetic oligonucleotide
cuuccaaccguccauuuuc

SEQ ID NO: 3180429 - RNA, 19 nt, Artificial Sequence
  Description of Artificial Sequence: Synthetic oligonucleotide
caaccguccauuuucccag

SEQ ID NO: 3180430 - RNA, 19 nt, Artificial Sequence
  Description of Artificial Sequence: Synthetic oligonucleotide
ucucacacccaucgaaaca

SEQ ID NO: 3180431 - RNA, 19 nt, Artificial Sequence
  Description of Artificial Sequence: Synthetic oligonucleotide
uuucucaacuuuccucuga

SEQ ID NO: 3180432 - RNA, 19 nt, Artificial Sequence
  Description of Artificial Sequence: Synthetic oligonucleotide
uucacgauuucauuuucau

SEQ ID NO: 3180433 - RNA, 19 nt, Artificial Sequence
  Description of Artificial Sequence: Synthetic oligonucleotide
uggccaucuucuuuaaaca

SEQ ID NO: 3180434 - RNA, 19 nt, Artificial Sequence
  Description of Artificial Sequence: Synthetic oligonucleotide
uuuucacgauuucauuuuc

SEQ ID NO: 3180435 - RNA, 19 nt, Artificial Sequence
  Description of Artificial Sequence: Synthetic oligonucleotide
ccaaucaauauaaugucug

SEQ ID NO: 3180436 - RNA, 19 nt, Artificial Sequence
  Description of Artificial Sequence: Synthetic oligonucleotide
uagucucgcagaccaauca

SEQ ID NO: 3180437 - RNA, 19 nt, Artificial Sequence
  Description of Artificial Sequence: Synthetic oligonucleotide
ucgcagaccaaucaauaua

SEQ ID NO: 3180438 - RNA, 19 nt, Artificial Sequence
  Description of Artificial Sequence: Synthetic oligonucleotide
aaccguccauuuucccagc

SEQ ID NO: 3180439 - RNA, 19 nt, Artificial Sequence
  Description of Artificial Sequence: Synthetic oligonucleotide
cacgauuucauuuucauuu

SEQ ID NO: 3180440 - RNA, 19 nt, Artificial Sequence
  Description of Artificial Sequence: Synthetic oligonucleotide
gacauagccuucucacacc

SEQ ID NO: 3180441 - RNA, 19 nt, Artificial Sequence
  Description of Artificial Sequence: Synthetic oligonucleotide
cauacucuuggccaucuuc

SEQ ID NO: 3180442 - RNA, 19 nt, Artificial Sequence
  Description of Artificial Sequence: Synthetic oligonucleotide
uuccucugaugugacauag

SEQ ID NO: 3180443 - RNA, 19 nt, Artificial Sequence
  Description of Artificial Sequence: Synthetic oligonucleotide
uuugaucaccugcgcauac

SEQ ID NO: 3180444 - RNA, 19 nt, Artificial Sequence
  Description of Artificial Sequence: Synthetic oligonucleotide
cucacacccaucgaaacac

SEQ ID NO: 3180445 - RNA, 19 nt, Artificial Sequence
  Description of Artificial Sequence: Synthetic oligonucleotide
cugauguauuuauccaaac

SEQ ID NO: 3180446 - RNA, 19 nt, Artificial Sequence
  Description of Artificial Sequence: Synthetic oligonucleotide
auagccuucucacacccau

SEQ ID NO: 3180447 - RNA, 19 nt, Artificial Sequence
  Description of Artificial Sequence: Synthetic oligonucleotide
ugaucaccugcgcauacuc

SEQ ID NO: 3180448 - RNA, 19 nt, Artificial Sequence
  Description of Artificial Sequence: Synthetic oligonucleotide
uuuucucaacuuuccucug

SEQ ID NO: 3180449 - RNA, 19 nt, Artificial Sequence
  Description of Artificial Sequence: Synthetic oligonucleotide
cauuuucccagcauuuuga

SEQ ID NO: 3180450 - RNA, 19 nt, Artificial Sequence
  Description of Artificial Sequence: Synthetic oligonucleotide
gaaacacauugcuuccaac

SEQ ID NO: 3180451 - RNA, 19 nt, Artificial Sequence
  Description of Artificial Sequence: Synthetic oligonucleotide
auugcuuccaaccguccau

SEQ ID NO: 3180452 - RNA, 19 nt, Artificial Sequence
  Description of Artificial Sequence: Synthetic oligonucleotide
uuuaaacaccaacucucuu

SEQ ID NO: 3180453 - RNA, 19 nt, Artificial Sequence
  Description of Artificial Sequence: Synthetic oligonucleotide
uucucaacuuuccucugau

SEQ ID NO: 3180454 - RNA, 19 nt, Artificial Sequence
  Description of Artificial Sequence: Synthetic oligonucleotide
uucucacacccaucgaaac

SEQ ID NO: 3180455 - RNA, 19 nt, Artificial Sequence
  Description of Artificial Sequence: Synthetic oligonucleotide
caaucaauauaaugucuga

SEQ ID NO: 3180456 - RNA, 19 nt, Artificial Sequence
  Description of Artificial Sequence: Synthetic oligonucleotide
ucucgcagaccaaucaaua

SEQ ID NO: 3180457 - RNA, 19 nt, Artificial Sequence
  Description of Artificial Sequence: Synthetic oligonucleotide
uuccaaccguccauuuucc

SEQ ID NO: 3180458 - RNA, 19 nt, Artificial Sequence
  Description of Artificial Sequence: Synthetic oligonucleotide
aacuuuccucugaugugac

SEQ ID NO: 3180459 - RNA, 19 nt, Artificial Sequence
  Description of Artificial Sequence: Synthetic oligonucleotide
acacauugcuuccaaccgu

SEQ ID NO: 3180460 - RNA, 19 nt, Artificial Sequence
  Description of Artificial Sequence: Synthetic oligonucleotide
ugaugugacauagccuucu

SEQ ID NO: 3180461 - RNA, 19 nt, Artificial Sequence
  Description of Artificial Sequence: Synthetic oligonucleotide
guuauccuucgauagucuc

SEQ ID NO: 3180462 - RNA, 19 nt, Artificial Sequence
  Description of Artificial Sequence: Synthetic oligonucleotide
cacauugcuuccaaccguc

SEQ ID NO: 3180463 - RNA, 19 nt, Artificial Sequence
  Description of Artificial Sequence: Synthetic oligonucleotide
uuuucccagcauuuugauc

SEQ ID NO: 3180464 - RNA, 19 nt, Artificial Sequence
  Description of Artificial Sequence: Synthetic oligonucleotide
cucaacuuuccucugaugu

SEQ ID NO: 3180465 - RNA, 19 nt, Artificial Sequence
  Description of Artificial Sequence: Synthetic oligonucleotide
auacucuuggccaucuucu

SEQ ID NO: 3180466 - RNA, 19 nt, Artificial Sequence
  Description of Artificial Sequence: Synthetic oligonucleotide
ccucugaugugacauagcc

SEQ ID NO: 3180467 - RNA, 19 nt, Artificial Sequence
  Description of Artificial Sequence: Synthetic oligonucleotide
accaaucaauauaaugucu

SEQ ID NO: 3180468 - RNA, 19 nt, Artificial Sequence
  Description of Artificial Sequence: Synthetic oligonucleotide
cuucgauagucucgcagac

SEQ ID NO: 3180469 - RNA, 19 nt, Artificial Sequence
  Description of Artificial Sequence: Synthetic oligonucleotide
ucaccugcgcauacucuug

SEQ ID NO: 3180470 - RNA, 19 nt, Artificial Sequence
  Description of Artificial Sequence: Synthetic oligonucleotide
auuuucccagcauuuugau

SEQ ID NO: 3180471 - RNA, 19 nt, Artificial Sequence
  Description of Artificial Sequence: Synthetic oligonucleotide
cauuuugaucaccugcgca

SEQ ID NO: 3180472 - RNA, 19 nt, Artificial Sequence
  Description of Artificial Sequence: Synthetic oligonucleotide
gucugauguauuuauccaa

SEQ ID NO: 3180473 - RNA, 19 nt, Artificial Sequence
  Description of Artificial Sequence: Synthetic oligonucleotide
ucucaacuuuccucugaug

SEQ ID NO: 3180474 - RNA, 19 nt, Artificial Sequence
  Description of Artificial Sequence: Synthetic oligonucleotide
accugcgcauacucuuggc

SEQ ID NO: 3180475 - RNA, 19 nt, Artificial Sequence
  Description of Artificial Sequence: Synthetic oligonucleotide
aucaccugcgcauacucuu

SEQ ID NO: 3180476 - RNA, 19 nt, Artificial Sequence
  Description of Artificial Sequence: Synthetic oligonucleotide
augugacauagccuucuca

SEQ ID NO: 3180477 - RNA, 19 nt, Artificial Sequence
  Description of Artificial Sequence: Synthetic oligonucleotide
ucacgauuucauuuucauu

SEQ ID NO: 3180478 - RNA, 19 nt, Artificial Sequence
  Description of Artificial Sequence: Synthetic oligonucleotide
uccucugaugugacauagc

SEQ ID NO: 3180479 - RNA, 19 nt, Artificial Sequence
  Description of Artificial Sequence: Synthetic oligonucleotide
auguauuuauccaaaccuu

SEQ ID NO: 3180480 - RNA, 19 nt, Artificial Sequence
  Description of Artificial Sequence: Synthetic oligonucleotide
auagucucgcagaccaauc

SEQ ID NO: 3180481 - RNA, 19 nt, Artificial Sequence
  Description of Artificial Sequence: Synthetic oligonucleotide
uucgauagucucgcagacc

SEQ ID NO: 3180482 - RNA, 19 nt, Artificial Sequence
  Description of Artificial Sequence: Synthetic oligonucleotide
auaaugucugauguauuua

SEQ ID NO: 3180483 - RNA, 19 nt, Artificial Sequence
  Description of Artificial Sequence: Synthetic oligonucleotide
acgauuucauuuucauuuu

SEQ ID NO: 3180484 - RNA, 19 nt, Artificial Sequence
  Description of Artificial Sequence: Synthetic oligonucleotide
uccaaaaugccucuugacg

SEQ ID NO: 3180485 - RNA, 19 nt, Artificial Sequence
  Description of Artificial Sequence: Synthetic oligonucleotide
aggauuugaucacuggugc

SEQ ID NO: 3180486 - RNA, 19 nt, Artificial Sequence
  Description of Artificial Sequence: Synthetic oligonucleotide
auaaccguggaugagggcc

SEQ ID NO: 3180487 - RNA, 19 nt, Artificial Sequence
  Description of Artificial Sequence: Synthetic oligonucleotide
agcauuagaacugucaagg

SEQ ID NO: 3180488 - RNA, 19 nt, Artificial Sequence
  Description of Artificial Sequence: Synthetic oligonucleotide
aauaaggucgucccuaccu

SEQ ID NO: 3180489 - RNA, 19 nt, Artificial Sequence
  Description of Artificial Sequence: Synthetic oligonucleotide
uguggaaugugcuguaugg

SEQ ID NO: 3180490 - RNA, 19 nt, Artificial Sequence
  Description of Artificial Sequence: Synthetic oligonucleotide
ucugcacccacuuucagag

SEQ ID NO: 3180491 - RNA, 19 nt, Artificial Sequence
  Description of Artificial Sequence: Synthetic oligonucleotide
ugagauuccugcaaaauau

SEQ ID NO: 3180492 - RNA, 19 nt, Artificial Sequence
  Description of Artificial Sequence: Synthetic oligonucleotide
gaaugugcuguauggaggg

SEQ ID NO: 3180493 - RNA, 19 nt, Artificial Sequence
  Description of Artificial Sequence: Synthetic oligonucleotide
aauguuucucaccaacuga

SEQ ID NO: 3180494 - RNA, 19 nt, Artificial Sequence
  Description of Artificial Sequence: Synthetic oligonucleotide
uugguugcuuccaaaaugc

SEQ ID NO: 3180495 - RNA, 19 nt, Artificial Sequence
  Description of Artificial Sequence: Synthetic oligonucleotide
auuccugcaaaauauggug

SEQ ID NO: 3180496 - RNA, 19 nt, Artificial Sequence
  Description of Artificial Sequence: Synthetic oligonucleotide
uugagaauaaggucguccc

SEQ ID NO: 3180497 - RNA, 19 nt, Artificial Sequence
  Description of Artificial Sequence: Synthetic oligonucleotide
acgacaagggcaugcagcc

SEQ ID NO: 3180498 - RNA, 19 nt, Artificial Sequence
  Description of Artificial Sequence: Synthetic oligonucleotide
uuucuucgaggucagagca

SEQ ID NO: 3180499 - RNA, 19 nt, Artificial Sequence
  Description of Artificial Sequence: Synthetic oligonucleotide
ugauaaccguggaugaggg

SEQ ID NO: 3180500 - RNA, 19 nt, Artificial Sequence
  Description of Artificial Sequence: Synthetic oligonucleotide
aaauucuccauguccuuug

SEQ ID NO: 3180501 - RNA, 19 nt, Artificial Sequence
  Description of Artificial Sequence: Synthetic oligonucleotide
gacguuguugagaauaagg

SEQ ID NO: 3180502 - RNA, 19 nt, Artificial Sequence
  Description of Artificial Sequence: Synthetic oligonucleotide
agaacugucaaggacuggg

SEQ ID NO: 3180503 - RNA, 19 nt, Artificial Sequence
  Description of Artificial Sequence: Synthetic oligonucleotide
uauggagggagaaugcucu

SEQ ID NO: 3180504 - RNA, 19 nt, Artificial Sequence
  Description of Artificial Sequence: Synthetic oligonucleotide
uguaggauuugaucacugg

SEQ ID NO: 3180505 - RNA, 19 nt, Artificial Sequence
  Description of Artificial Sequence: Synthetic oligonucleotide
uggaaugugcuguauggag

SEQ ID NO: 3180506 - RNA, 19 nt, Artificial Sequence
  Description of Artificial Sequence: Synthetic oligonucleotide
uguccuuuguggaaugugc

SEQ ID NO: 3180507 - RNA, 19 nt, Artificial Sequence
  Description of Artificial Sequence: Synthetic oligonucleotide
auuagaacugucaaggacu

SEQ ID NO: 3180508 - RNA, 19 nt, Artificial Sequence
  Description of Artificial Sequence: Synthetic oligonucleotide
aaaauauggugcuccugug

SEQ ID NO: 3180509 - RNA, 19 nt, Artificial Sequence
  Description of Artificial Sequence: Synthetic oligonucleotide
aacagggaugucccuggcc

SEQ ID NO: 3180510 - RNA, 19 nt, Artificial Sequence
  Description of Artificial Sequence: Synthetic oligonucleotide
uggacgaucaguucugggc

SEQ ID NO: 3180511 - RNA, 19 nt, Artificial Sequence
  Description of Artificial Sequence: Synthetic oligonucleotide
caugggucaaaucugcacc

SEQ ID NO: 3180512 - RNA, 19 nt, Artificial Sequence
  Description of Artificial Sequence: Synthetic oligonucleotide
aaauauggugcuccugugu

SEQ ID NO: 3180513 - RNA, 19 nt, Artificial Sequence
  Description of Artificial Sequence: Synthetic oligonucleotide
uuagaacugucaaggacug

SEQ ID NO: 3180514 - RNA, 19 nt, Artificial Sequence
  Description of Artificial Sequence: Synthetic oligonucleotide
augggucaaaucugcaccc

SEQ ID NO: 3180515 - RNA, 19 nt, Artificial Sequence
  Description of Artificial Sequence: Synthetic oligonucleotide
ugcugaauuccacacguug

SEQ ID NO: 3180516 - RNA, 19 nt, Artificial Sequence
  Description of Artificial Sequence: Synthetic oligonucleotide
acaugggucaaaucugcac

SEQ ID NO: 3180517 - RNA, 19 nt, Artificial Sequence
  Description of Artificial Sequence: Synthetic oligonucleotide
aauauggugcuccugugua

SEQ ID NO: 3180518 - RNA, 19 nt, Artificial Sequence
  Description of Artificial Sequence: Synthetic oligonucleotide
cucaacagcauuagaacug

SEQ ID NO: 3180519 - RNA, 19 nt, Artificial Sequence
  Description of Artificial Sequence: Synthetic oligonucleotide
agaauaaggucgucccuac

SEQ ID NO: 3180520 - RNA, 19 nt, Artificial Sequence
  Description of Artificial Sequence: Synthetic oligonucleotide
gaacacaugggucaaaucu

SEQ ID NO: 3180521 - RNA, 19 nt, Artificial Sequence
  Description of Artificial Sequence: Synthetic oligonucleotide
uuccugcaaaauauggugc

SEQ ID NO: 3180522 - RNA, 19 nt, Artificial Sequence
  Description of Artificial Sequence: Synthetic oligonucleotide
cucucuguaaaacugcgug

SEQ ID NO: 3180523 - RNA, 19 nt, Artificial Sequence
  Description of Artificial Sequence: Synthetic oligonucleotide
ugcucucuguaaaacugcg

SEQ ID NO: 3180524 - RNA, 19 nt, Artificial Sequence
  Description of Artificial Sequence: Synthetic oligonucleotide
cauuagaacugucaaggac

SEQ ID NO: 3180525 - RNA, 19 nt, Artificial Sequence
  Description of Artificial Sequence: Synthetic oligonucleotide
cuucugauaaccguggaug

SEQ ID NO: 3180526 - RNA, 19 nt, Artificial Sequence
  Description of Artificial Sequence: Synthetic oligonucleotide
uccucaacagcauuagaac

SEQ ID NO: 3180527 - RNA, 19 nt, Artificial Sequence
  Description of Artificial Sequence: Synthetic oligonucleotide
cugaauuccacacguuggg

SEQ ID NO: 3180528 - RNA, 19 nt, Artificial Sequence
  Description of Artificial Sequence: Synthetic oligonucleotide
aucaguucugggcuguagg

SEQ ID NO: 3180529 - RNA, 19 nt, Artificial Sequence
  Description of Artificial Sequence: Synthetic oligonucleotide
uccgcaucgaugacaacag

SEQ ID NO: 3180530 - RNA, 19 nt, Artificial Sequence
  Description of Artificial Sequence: Synthetic oligonucleotide
ucagagcugagauuccugc

SEQ ID NO: 3180531 - RNA, 19 nt, Artificial Sequence
  Description of Artificial Sequence: Synthetic oligonucleotide
agagcaggcacaauguuuc

SEQ ID NO: 3180532 - RNA, 19 nt, Artificial Sequence
  Description of Artificial Sequence: Synthetic oligonucleotide
agaaugcucucuguaaaac

SEQ ID NO: 3180533 - RNA, 19 nt, Artificial Sequence
  Description of Artificial Sequence: Synthetic oligonucleotide
aacugucaaggacugggug

SEQ ID NO: 3180534 - RNA, 19 nt, Artificial Sequence
  Description of Artificial Sequence: Synthetic oligonucleotide
gacuaugccuauucuuccg

SEQ ID NO: 3180535 - RNA, 19 nt, Artificial Sequence
  Description of Artificial Sequence: Synthetic oligonucleotide
ucuucgaggucagagcagg

SEQ ID NO: 3180536 - RNA, 19 nt, Artificial Sequence
  Description of Artificial Sequence: Synthetic oligonucleotide
ucucuguaaaacugcgugc

SEQ ID NO: 3180537 - RNA, 19 nt, Artificial Sequence
  Description of Artificial Sequence: Synthetic oligonucleotide
aacacaugggucaaaucug

SEQ ID NO: 3180538 - RNA, 19 nt, Artificial Sequence
  Description of Artificial Sequence: Synthetic oligonucleotide
cuauucuuccgucuugccc

SEQ ID NO: 3180539 - RNA, 19 nt, Artificial Sequence
  Description of Artificial Sequence: Synthetic oligonucleotide
agcuaucagccacaggccg

SEQ ID NO: 3180540 - RNA, 19 nt, Artificial Sequence
  Description of Artificial Sequence: Synthetic oligonucleotide
agauuccugcaaaauaugg

SEQ ID NO: 3180541 - RNA, 19 nt, Artificial Sequence
  Description of Artificial Sequence: Synthetic oligonucleotide
aacagcauuagaacuguca

SEQ ID NO: 3180542 - RNA, 19 nt, Artificial Sequence
  Description of Artificial Sequence: Synthetic oligonucleotide
auuugaucacuggugcagc

SEQ ID NO: 3180543 - RNA, 19 nt, Artificial Sequence
  Description of Artificial Sequence: Synthetic oligonucleotide
ugcacccacuuucagagcu

SEQ ID NO: 3180544 - RNA, 19 nt, Artificial Sequence
  Description of Artificial Sequence: Synthetic oligonucleotide
ucgaugacaacagggaugu

SEQ ID NO: 3180545 - RNA, 19 nt, Artificial Sequence
  Description of Artificial Sequence: Synthetic oligonucleotide
uggguggacgaucaguucu

SEQ ID NO: 3180546 - RNA, 19 nt, Artificial Sequence
  Description of Artificial Sequence: Synthetic oligonucleotide
aaaacugcgugcagcggcg

SEQ ID NO: 3180547 - RNA, 19 nt, Artificial Sequence
  Description of Artificial Sequence: Synthetic oligonucleotide
uggcacagaacacaugggu

SEQ ID NO: 3180548 - RNA, 19 nt, Artificial Sequence
  Description of Artificial Sequence: Synthetic oligonucleotide
cacgacaagggcaugcagc

SEQ ID NO: 3180549 - RNA, 19 nt, Artificial Sequence
  Description of Artificial Sequence: Synthetic oligonucleotide
uaaccguggaugagggccg

SEQ ID NO: 3180550 - RNA, 19 nt, Artificial Sequence
  Description of Artificial Sequence: Synthetic oligonucleotide
guugagaauaaggucgucc

SEQ ID NO: 3180551 - RNA, 19 nt, Artificial Sequence
  Description of Artificial Sequence: Synthetic oligonucleotide
cugauaaccguggaugagg

SEQ ID NO: 3180552 - RNA, 19 nt, Artificial Sequence
  Description of Artificial Sequence: Synthetic oligonucleotide
uucugauaaccguggauga

SEQ ID NO: 3180553 - RNA, 19 nt, Artificial Sequence
  Description of Artificial Sequence: Synthetic oligonucleotide
auauggugcuccuguguac

SEQ ID NO: 3180554 - RNA, 19 nt, Artificial Sequence
  Description of Artificial Sequence: Synthetic oligonucleotide
aggcacaauguuucucacc

SEQ ID NO: 3180555 - RNA, 19 nt, Artificial Sequence
  Description of Artificial Sequence: Synthetic oligonucleotide
cacaauguuucucaccaac

SEQ ID NO: 3180556 - RNA, 19 nt, Artificial Sequence
  Description of Artificial Sequence: Synthetic oligonucleotide
acagggaugucccuggccu

SEQ ID NO: 3180557 - RNA, 19 nt, Artificial Sequence
  Description of Artificial Sequence: Synthetic oligonucleotide
ugaauuccacacguugggg

SEQ ID NO: 3180558 - RNA, 19 nt, Artificial Sequence
  Description of Artificial Sequence: Synthetic oligonucleotide
uguguuucuucgaggucag

SEQ ID NO: 3180559 - RNA, 19 nt, Artificial Sequence
  Description of Artificial Sequence: Synthetic oligonucleotide
acacaugggucaaaucugc

SEQ ID NO: 3180560 - RNA, 19 nt, Artificial Sequence
  Description of Artificial Sequence: Synthetic oligonucleotide
uuguggaaugugcuguaug

SEQ ID NO: 3180561 - RNA, 19 nt, Artificial Sequence
  Description of Artificial Sequence: Synthetic oligonucleotide
ucaaggacuggguggacga

SEQ ID NO: 3180562 - RNA, 19 nt, Artificial Sequence
  Description of Artificial Sequence: Synthetic oligonucleotide
aauggccuucugauaaccg

SEQ ID NO: 3180563 - RNA, 19 nt, Artificial Sequence
  Description of Artificial Sequence: Synthetic oligonucleotide
cuguguacucuugacagcc

SEQ ID NO: 3180564 - RNA, 19 nt, Artificial Sequence
  Description of Artificial Sequence: Synthetic oligonucleotide
aagggcaugcagccugggg

SEQ ID NO: 3180565 - RNA, 19 nt, Artificial Sequence
  Description of Artificial Sequence: Synthetic oligonucleotide
uuugaucacuggugcagcc

SEQ ID NO: 3180566 - RNA, 19 nt, Artificial Sequence
  Description of Artificial Sequence: Synthetic oligonucleotide
ucaguucugggcuguagga

SEQ ID NO: 3180567 - RNA, 19 nt, Artificial Sequence
  Description of Artificial Sequence: Synthetic oligonucleotide
ccuggcacagaacacaugg

SEQ ID NO: 3180568 - RNA, 19 nt, Artificial Sequence
  Description of Artificial Sequence: Synthetic oligonucleotide
ugagaauaaggucgucccu

SEQ ID NO: 3180569 - RNA, 19 nt, Artificial Sequence
  Description of Artificial Sequence: Synthetic oligonucleotide
aggucgucccuaccuaggc

SEQ ID NO: 3180570 - RNA, 19 nt, Artificial Sequence
  Description of Artificial Sequence: Synthetic oligonucleotide
uaugccuauucuuccgucu

SEQ ID NO: 3180571 - RNA, 19 nt, Artificial Sequence
  Description of Artificial Sequence: Synthetic oligonucleotide
uggccuucugauaaccgug

SEQ ID NO: 3180572 - RNA, 19 nt, Artificial Sequence
  Description of Artificial Sequence: Synthetic oligonucleotide
ucuccauguccuuugugga

SEQ ID NO: 3180573 - RNA, 19 nt, Artificial Sequence
  Description of Artificial Sequence: Synthetic oligonucleotide
augucccuggccuugguug

SEQ ID NO: 3180574 - RNA, 19 nt, Artificial Sequence
  Description of Artificial Sequence: Synthetic oligonucleotide
uaaggucgucccuaccuag

SEQ ID NO: 3180575 - RNA, 19 nt, Artificial Sequence
  Description of Artificial Sequence: Synthetic oligonucleotide
aaaaugccucuugacguug

SEQ ID NO: 3180576 - RNA, 19 nt, Artificial Sequence
  Description of Artificial Sequence: Synthetic oligonucleotide
aacugcgugcagcggcggc

SEQ ID NO: 3180577 - RNA, 19 nt, Artificial Sequence
  Description of Artificial Sequence: Synthetic oligonucleotide
cugcaaaauauggugcucc

SEQ ID NO: 3180578 - RNA, 19 nt, Artificial Sequence
  Description of Artificial Sequence: Synthetic oligonucleotide
aaucugcacccacuuucag

SEQ ID NO: 3180579 - RNA, 19 nt, Artificial Sequence
  Description of Artificial Sequence: Synthetic oligonucleotide
ugugcuguauggagggaga

SEQ ID NO: 3180580 - RNA, 19 nt, Artificial Sequence
  Description of Artificial Sequence: Synthetic oligonucleotide
uccgucuugcccuuugugu

SEQ ID NO: 3180581 - RNA, 19 nt, Artificial Sequence
  Description of Artificial Sequence: Synthetic oligonucleotide
uccuuuguggaaugugcug

SEQ ID NO: 3180582 - RNA, 19 nt, Artificial Sequence
  Description of Artificial Sequence: Synthetic oligonucleotide
uucagagcugagauuccug

SEQ ID NO: 3180583 - RNA, 19 nt, Artificial Sequence
  Description of Artificial Sequence: Synthetic oligonucleotide
uugacguuguugagaauaa

SEQ ID NO: 3180584 - RNA, 19 nt, Artificial Sequence
  Description of Artificial Sequence: Synthetic oligonucleotide
aauaagaucaaaccaagcu

SEQ ID NO: 3180585 - RNA, 19 nt, Artificial Sequence
  Description of Artificial Sequence: Synthetic oligonucleotide
aauugcacacuucaaaagg

SEQ ID NO: 3180586 - RNA, 19 nt, Artificial Sequence
  Description of Artificial Sequence: Synthetic oligonucleotide
uaagaucaaaccaagcugg

SEQ ID NO: 3180587 - RNA, 19 nt, Artificial Sequence
  Description of Artificial Sequence: Synthetic oligonucleotide
ucagcaccaaauaagauca

SEQ ID NO: 3180588 - RNA, 19 nt, Artificial Sequence
  Description of Artificial Sequence: Synthetic oligonucleotide
gaagaaaucacucaaaggu

SEQ ID NO: 3180589 - RNA, 19 nt, Artificial Sequence
  Description of Artificial Sequence: Synthetic oligonucleotide
agaaggggaaguuaauugc

SEQ ID NO: 3180590 - RNA, 19 nt, Artificial Sequence
  Description of Artificial Sequence: Synthetic oligonucleotide
uuccagaacacacuggagg

SEQ ID NO: 3180591 - RNA, 19 nt, Artificial Sequence
  Description of Artificial Sequence: Synthetic oligonucleotide
gaugacuaaggcaagaaag

SEQ ID NO: 3180592 - RNA, 19 nt, Artificial Sequence
  Description of Artificial Sequence: Synthetic oligonucleotide
auaagaucaaaccaagcug

SEQ ID NO: 3180593 - RNA, 19 nt, Artificial Sequence
  Description of Artificial Sequence: Synthetic oligonucleotide
aaguuaauugcacacuuca

SEQ ID NO: 3180594 - RNA, 19 nt, Artificial Sequence
  Description of Artificial Sequence: Synthetic oligonucleotide
uugaagagaaccagugucg

SEQ ID NO: 3180595 - RNA, 19 nt, Artificial Sequence
  Description of Artificial Sequence: Synthetic oligonucleotide
aaagcagcuacuucuccac

SEQ ID NO: 3180596 - RNA, 19 nt, Artificial Sequence
  Description of Artificial Sequence: Synthetic oligonucleotide
agaagaaaucacucaaagg

SEQ ID NO: 3180597 - RNA, 19 nt, Artificial Sequence
  Description of Artificial Sequence: Synthetic oligonucleotide
acuaaggcaagaaagcagc

SEQ ID NO: 3180598 - RNA, 19 nt, Artificial Sequence
  Description of Artificial Sequence: Synthetic oligonucleotide
accaaauaagaucaaacca

SEQ ID NO: 3180599 - RNA, 19 nt, Artificial Sequence
  Description of Artificial Sequence: Synthetic oligonucleotide
aaauaagaucaaaccaagc

SEQ ID NO: 3180600 - RNA, 19 nt, Artificial Sequence
  Description of Artificial Sequence: Synthetic oligonucleotide
uuaauugcacacuucaaaa

SEQ ID NO: 3180601 - RNA, 19 nt, Artificial Sequence
  Description of Artificial Sequence: Synthetic oligonucleotide
augucaacggugcagacag

SEQ ID NO: 3180602 - RNA, 19 nt, Artificial Sequence
  Description of Artificial Sequence: Synthetic oligonucleotide
caccaaauaagaucaaacc

SEQ ID NO: 3180603 - RNA, 19 nt, Artificial Sequence
  Description of Artificial Sequence: Synthetic oligonucleotide
agugucgaaauauuuuauc

SEQ ID NO: 3180604 - RNA, 19 nt, Artificial Sequence
  Description of Artificial Sequence: Synthetic oligonucleotide
caaauaagaucaaaccaag

SEQ ID NO: 3180605 - RNA, 19 nt, Artificial Sequence
  Description of Artificial Sequence: Synthetic oligonucleotide
aagaaaucacucaaagguc

SEQ ID NO: 3180606 - RNA, 19 nt, Artificial Sequence
  Description of Artificial Sequence: Synthetic oligonucleotide
aaccaagcugggcaggagc

SEQ ID NO: 3180607 - RNA, 19 nt, Artificial Sequence
  Description of Artificial Sequence: Synthetic oligonucleotide
acuucaaaaggccauguca

SEQ ID NO: 3180608 - RNA, 19 nt, Artificial Sequence
  Description of Artificial Sequence: Synthetic oligonucleotide
aaucuucucccuuugcuca

SEQ ID NO: 3180609 - RNA, 19 nt, Artificial Sequence
  Description of Artificial Sequence: Synthetic oligonucleotide
gaagucagcaccaaauaag

SEQ ID NO: 3180610 - RNA, 19 nt, Artificial Sequence
  Description of Artificial Sequence: Synthetic oligonucleotide
ucaaaaggccaugucaacg

SEQ ID NO: 3180611 - RNA, 19 nt, Artificial Sequence
  Description of Artificial Sequence: Synthetic oligonucleotide
cuuugcucacuucugaggg

SEQ ID NO: 3180612 - RNA, 19 nt, Artificial Sequence
  Description of Artificial Sequence: Synthetic oligonucleotide
uaauugcacacuucaaaag

SEQ ID NO: 3180613 - RNA, 19 nt, Artificial Sequence
  Description of Artificial Sequence: Synthetic oligonucleotide
uacagaagaaaucacucaa

SEQ ID NO: 3180614 - RNA, 19 nt, Artificial Sequence
  Description of Artificial Sequence: Synthetic oligonucleotide
augacuaaggcaagaaagc

SEQ ID NO: 3180615 - RNA, 19 nt, Artificial Sequence
  Description of Artificial Sequence: Synthetic oligonucleotide
ucacucaaaggucacuucc

SEQ ID NO: 3180616 - RNA, 19 nt, Artificial Sequence
  Description of Artificial Sequence: Synthetic oligonucleotide
ugugaguugaagagaacca

SEQ ID NO: 3180617 - RNA, 19 nt, Artificial Sequence
  Description of Artificial Sequence: Synthetic oligonucleotide
acaucacagccacagaagg

SEQ ID NO: 3180618 - RNA, 19 nt, Artificial Sequence
  Description of Artificial Sequence: Synthetic oligonucleotide
caaaaggccaugucaacgg

SEQ ID NO: 3180619 - RNA, 19 nt, Artificial Sequence
  Description of Artificial Sequence: Synthetic oligonucleotide
gaucaaaccaagcugggca

SEQ ID NO: 3180620 - RNA, 19 nt, Artificial Sequence
  Description of Artificial Sequence: Synthetic oligonucleotide
uaauccacaucacagccac

SEQ ID NO: 3180621 - RNA, 19 nt, Artificial Sequence
  Description of Artificial Sequence: Synthetic oligonucleotide
aaggccaugucaacggugc

SEQ ID NO: 3180622 - RNA, 19 nt, Artificial Sequence
  Description of Artificial Sequence: Synthetic oligonucleotide
acuacagaagaaaucacuc

SEQ ID NO: 3180623 - RNA, 19 nt, Artificial Sequence
  Description of Artificial Sequence: Synthetic oligonucleotide
auugcacacuucaaaaggc

SEQ ID NO: 3180624 - RNA, 19 nt, Artificial Sequence
  Description of Artificial Sequence: Synthetic oligonucleotide
ugucgaaauauuuuaucac

SEQ ID NO: 3180625 - RNA, 19 nt, Artificial Sequence
  Description of Artificial Sequence: Synthetic oligonucleotide
guugaagagaaccaguguc

SEQ ID NO: 3180626 - RNA, 19 nt, Artificial Sequence
  Description of Artificial Sequence: Synthetic oligonucleotide
uccuggaguuuccugaggg

SEQ ID NO: 3180627 - RNA, 19 nt, Artificial Sequence
  Description of Artificial Sequence: Synthetic oligonucleotide
uugcauggcaacuacagaa

SEQ ID NO: 3180628 - RNA, 19 nt, Artificial Sequence
  Description of Artificial Sequence: Synthetic oligonucleotide
cagaagaaaucacucaaag

SEQ ID NO: 3180629 - RNA, 19 nt, Artificial Sequence
  Description of Artificial Sequence: Synthetic oligonucleotide
cauucuugaugacuaaggc

SEQ ID NO: 3180630 - RNA, 19 nt, Artificial Sequence
  Description of Artificial Sequence: Synthetic oligonucleotide
uguaacugcagccgcagcu

SEQ ID NO: 3180631 - RNA, 19 nt, Artificial Sequence
  Description of Artificial Sequence: Synthetic oligonucleotide
auucuugaugacuaaggca

SEQ ID NO: 3180632 - RNA, 19 nt, Artificial Sequence
  Description of Artificial Sequence: Synthetic oligonucleotide
aucacagccacagaagggg

SEQ ID NO: 3180633 - RNA, 19 nt, Artificial Sequence
  Description of Artificial Sequence: Synthetic oligonucleotide
aaaggucacuuccucuauc

SEQ ID NO: 3180634 - RNA, 19 nt, Artificial Sequence
  Description of Artificial Sequence: Synthetic oligonucleotide
uauccauucuugaugacua

SEQ ID NO: 3180635 - RNA, 19 nt, Artificial Sequence
  Description of Artificial Sequence: Synthetic oligonucleotide
ucucagaguggccugcagg

SEQ ID NO: 3180636 - RNA, 19 nt, Artificial Sequence
  Description of Artificial Sequence: Synthetic oligonucleotide
aaggguaauccacaucaca

SEQ ID NO: 3180637 - RNA, 19 nt, Artificial Sequence
  Description of Artificial Sequence: Synthetic oligonucleotide
ugcauggcaacuacagaag

SEQ ID NO: 3180638 - RNA, 19 nt, Artificial Sequence
  Description of Artificial Sequence: Synthetic oligonucleotide
caggacagaagucagcacc

SEQ ID NO: 3180639 - RNA, 19 nt, Artificial Sequence
  Description of Artificial Sequence: Synthetic oligonucleotide
aagcuuccagaacacacug

SEQ ID NO: 3180640 - RNA, 19 nt, Artificial Sequence
  Description of Artificial Sequence: Synthetic oligonucleotide
aacuacagaagaaaucacu

SEQ ID NO: 3180641 - RNA, 19 nt, Artificial Sequence
  Description of Artificial Sequence: Synthetic oligonucleotide
ugagggagugacaggacag

SEQ ID NO: 3180642 - RNA, 19 nt, Artificial Sequence
  Description of Artificial Sequence: Synthetic oligonucleotide
ugaguugaagagaaccagu

SEQ ID NO: 3180643 - RNA, 19 nt, Artificial Sequence
  Description of Artificial Sequence: Synthetic oligonucleotide
gucagcaccaaauaagauc

SEQ ID NO: 3180644 - RNA, 19 nt, Artificial Sequence
  Description of Artificial Sequence: Synthetic oligonucleotide
guuaauugcacacuucaaa

SEQ ID NO: 3180645 - RNA, 19 nt, Artificial Sequence
  Description of Artificial Sequence: Synthetic oligonucleotide
acuucugagggagugacag

SEQ ID NO: 3180646 - RNA, 19 nt, Artificial Sequence
  Description of Artificial Sequence: Synthetic oligonucleotide
ucucccuuugcucacuucu

SEQ ID NO: 3180647 - RNA, 19 nt, Artificial Sequence
  Description of Artificial Sequence: Synthetic oligonucleotide
aagcagcuacuucuccacc

SEQ ID NO: 3180648 - RNA, 19 nt, Artificial Sequence
  Description of Artificial Sequence: Synthetic oligonucleotide
uugcacacuucaaaaggcc

SEQ ID NO: 3180649 - RNA, 19 nt, Artificial Sequence
  Description of Artificial Sequence: Synthetic oligonucleotide
auuugcauggcaacuacag

SEQ ID NO: 3180650 - RNA, 19 nt, Artificial Sequence
  Description of Artificial Sequence: Synthetic oligonucleotide
cugugaguugaagagaacc

SEQ ID NO: 3180651 - RNA, 19 nt, Artificial Sequence
  Description of Artificial Sequence: Synthetic oligonucleotide
aagagaaccagugucgaaa

SEQ ID NO: 3180652 - RNA, 19 nt, Artificial Sequence
  Description of Artificial Sequence: Synthetic oligonucleotide
gugucgaaauauuuuauca

SEQ ID NO: 3180653 - RNA, 19 nt, Artificial Sequence
  Description of Artificial Sequence: Synthetic oligonucleotide
aagaaagcagcuacuucuc

SEQ ID NO: 3180654 - RNA, 19 nt, Artificial Sequence
  Description of Artificial Sequence: Synthetic oligonucleotide
aaggggaaguuaauugcac

SEQ ID NO: 3180655 - RNA, 19 nt, Artificial Sequence
  Description of Artificial Sequence: Synthetic oligonucleotide
gacuaaggcaagaaagcag

SEQ ID NO: 3180656 - RNA, 19 nt, Artificial Sequence
  Description of Artificial Sequence: Synthetic oligonucleotide
gguaauccacaucacagcc

SEQ ID NO: 3180657 - RNA, 19 nt, Artificial Sequence
  Description of Artificial Sequence: Synthetic oligonucleotide
agcgcauuugcauggcaac

SEQ ID NO: 3180658 - RNA, 19 nt, Artificial Sequence
  Description of Artificial Sequence: Synthetic oligonucleotide
uccugugaguugaagagaa

SEQ ID NO: 3180659 - RNA, 19 nt, Artificial Sequence
  Description of Artificial Sequence: Synthetic oligonucleotide
aacacacuggaggaggcag

SEQ ID NO: 3180660 - RNA, 19 nt, Artificial Sequence
  Description of Artificial Sequence: Synthetic oligonucleotide
aucaaaccaagcugggcag

SEQ ID NO: 3180661 - RNA, 19 nt, Artificial Sequence
  Description of Artificial Sequence: Synthetic oligonucleotide
uuugcauggcaacuacaga

SEQ ID NO: 3180662 - RNA, 19 nt, Artificial Sequence
  Description of Artificial Sequence: Synthetic oligonucleotide
ugcacacuucaaaaggcca

SEQ ID NO: 3180663 - RNA, 19 nt, Artificial Sequence
  Description of Artificial Sequence: Synthetic oligonucleotide
ucaaaggucacuuccucua

SEQ ID NO: 3180664 - RNA, 19 nt, Artificial Sequence
  Description of Artificial Sequence: Synthetic oligonucleotide
aggguaauccacaucacag

SEQ ID NO: 3180665 - RNA, 19 nt, Artificial Sequence
  Description of Artificial Sequence: Synthetic oligonucleotide
acucaaaggucacuuccuc

SEQ ID NO: 3180666 - RNA, 19 nt, Artificial Sequence
  Description of Artificial Sequence: Synthetic oligonucleotide
gaaucuucucccuuugcuc

SEQ ID NO: 3180667 - RNA, 19 nt, Artificial Sequence
  Description of Artificial Sequence: Synthetic oligonucleotide
agaaaucacucaaagguca

SEQ ID NO: 3180668 - RNA, 19 nt, Artificial Sequence
  Description of Artificial Sequence: Synthetic oligonucleotide
aagucagcaccaaauaaga

SEQ ID NO: 3180669 - RNA, 19 nt, Artificial Sequence
  Description of Artificial Sequence: Synthetic oligonucleotide
agaagucagcaccaaauaa

SEQ ID NO: 3180670 - RNA, 19 nt, Artificial Sequence
  Description of Artificial Sequence: Synthetic oligonucleotide
ugacuaaggcaagaaagca

SEQ ID NO: 3180671 - RNA, 19 nt, Artificial Sequence
  Description of Artificial Sequence: Synthetic oligonucleotide
agaucaaaccaagcugggc

SEQ ID NO: 3180672 - RNA, 19 nt, Artificial Sequence
  Description of Artificial Sequence: Synthetic oligonucleotide
gaguugaagagaaccagug

SEQ ID NO: 3180673 - RNA, 19 nt, Artificial Sequence
  Description of Artificial Sequence: Synthetic oligonucleotide
agacagcgcauuugcaugg

SEQ ID NO: 3180674 - RNA, 19 nt, Artificial Sequence
  Description of Artificial Sequence: Synthetic oligonucleotide
ugaacagccugcuguaacu

SEQ ID NO: 3180675 - RNA, 19 nt, Artificial Sequence
  Description of Artificial Sequence: Synthetic oligonucleotide
ugaugacuaaggcaagaaa

SEQ ID NO: 3180676 - RNA, 19 nt, Artificial Sequence
  Description of Artificial Sequence: Synthetic oligonucleotide
gcaaggguaauccacauca

SEQ ID NO: 3180677 - RNA, 19 nt, Artificial Sequence
  Description of Artificial Sequence: Synthetic oligonucleotide
uucugagggagugacagga

SEQ ID NO: 3180678 - RNA, 19 nt, Artificial Sequence
  Description of Artificial Sequence: Synthetic oligonucleotide
agcacacuccugaacagcc

SEQ ID NO: 3180679 - RNA, 19 nt, Artificial Sequence
  Description of Artificial Sequence: Synthetic oligonucleotide
ucuugaugacuaaggcaag

SEQ ID NO: 3180680 - RNA, 19 nt, Artificial Sequence
  Description of Artificial Sequence: Synthetic oligonucleotide
gaaagcagcuacuucucca

SEQ ID NO: 3180681 - RNA, 19 nt, Artificial Sequence
  Description of Artificial Sequence: Synthetic oligonucleotide
aagaucaaaccaagcuggg

SEQ ID NO: 3180682 - RNA, 19 nt, Artificial Sequence
  Description of Artificial Sequence: Synthetic oligonucleotide
uggaguuuccugagggacc

SEQ ID NO: 3180683 - RNA, 19 nt, Artificial Sequence
  Description of Artificial Sequence: Synthetic oligonucleotide
caucacagccacagaaggg

SEQ ID NO: 3180684 - RNA, 19 nt, Artificial Sequence
  Description of Artificial Sequence: Synthetic oligonucleotide
uauuauuuaaauaaaaugu

SEQ ID NO: 3180685 - RNA, 19 nt, Artificial Sequence
  Description of Artificial Sequence: Synthetic oligonucleotide
aaauaauaacacuacagac

SEQ ID NO: 3180686 - RNA, 19 nt, Artificial Sequence
  Description of Artificial Sequence: Synthetic oligonucleotide
gaaaacaaaagcuaugugg

SEQ ID NO: 3180687 - RNA, 19 nt, Artificial Sequence
  Description of Artificial Sequence: Synthetic oligonucleotide
aaagaaaagacuuuccaag

SEQ ID NO: 3180688 - RNA, 19 nt, Artificial Sequence
  Description of Artificial Sequence: Synthetic oligonucleotide
uuauuauuuaaauaaaaug

SEQ ID NO: 3180689 - RNA, 19 nt, Artificial Sequence
  Description of Artificial Sequence: Synthetic oligonucleotide
uugauuauuauuuaaauaa

SEQ ID NO: 3180690 - RNA, 19 nt, Artificial Sequence
  Description of Artificial Sequence: Synthetic oligonucleotide
uauuuaaauaaaaugugag

SEQ ID NO: 3180691 - RNA, 19 nt, Artificial Sequence
  Description of Artificial Sequence: Synthetic oligonucleotide
aagguuauuucccucauac

SEQ ID NO: 3180692 - RNA, 19 nt, Artificial Sequence
  Description of Artificial Sequence: Synthetic oligonucleotide
aagaaaagacuuuccaagc

SEQ ID NO: 3180693 - RNA, 19 nt, Artificial Sequence
  Description of Artificial Sequence: Synthetic oligonucleotide
uuuaaauauggcauccucg

SEQ ID NO: 3180694 - RNA, 19 nt, Artificial Sequence
  Description of Artificial Sequence: Synthetic oligonucleotide
aauaacacuacagacaucu

SEQ ID NO: 3180695 - RNA, 19 nt, Artificial Sequence
  Description of Artificial Sequence: Synthetic oligonucleotide
uuaaauauggcauccucgg

SEQ ID NO: 3180696 - RNA, 19 nt, Artificial Sequence
  Description of Artificial Sequence: Synthetic oligonucleotide
aaaaugugaguuuaaauau

SEQ ID NO: 3180697 - RNA, 19 nt, Artificial Sequence
  Description of Artificial Sequence: Synthetic oligonucleotide
aaccaaauuaaauucagga

SEQ ID NO: 3180698 - RNA, 19 nt, Artificial Sequence
  Description of Artificial Sequence: Synthetic oligonucleotide
acagacaucugguugagcc

SEQ ID NO: 3180699 - RNA, 19 nt, Artificial Sequence
  Description of Artificial Sequence: Synthetic oligonucleotide
uuauuuaaauaaaauguga

SEQ ID NO: 3180700 - RNA, 19 nt, Artificial Sequence
  Description of Artificial Sequence: Synthetic oligonucleotide
uaaaaugugaguuuaaaua

SEQ ID NO: 3180701 - RNA, 19 nt, Artificial Sequence
  Description of Artificial Sequence: Synthetic oligonucleotide
auaguuuucaaccaaauua

SEQ ID NO: 3180702 - RNA, 19 nt, Artificial Sequence
  Description of Artificial Sequence: Synthetic oligonucleotide
aauaauaacacuacagaca

SEQ ID NO: 3180703 - RNA, 19 nt, Artificial Sequence
  Description of Artificial Sequence: Synthetic oligonucleotide
ucaggagcaaauaauaaca

SEQ ID NO: 3180704 - RNA, 19 nt, Artificial Sequence
  Description of Artificial Sequence: Synthetic oligonucleotide
aaagcuaugugguugauua

SEQ ID NO: 3180705 - RNA, 19 nt, Artificial Sequence
  Description of Artificial Sequence: Synthetic oligonucleotide
uuuaaauaaaaugugaguu

SEQ ID NO: 3180706 - RNA, 19 nt, Artificial Sequence
  Description of Artificial Sequence: Synthetic oligonucleotide
aaugugaguuuaaauaugg

SEQ ID NO: 3180707 - RNA, 19 nt, Artificial Sequence
  Description of Artificial Sequence: Synthetic oligonucleotide
uaacacuacagacaucugg

SEQ ID NO: 3180708 - RNA, 19 nt, Artificial Sequence
  Description of Artificial Sequence: Synthetic oligonucleotide
uuuucaaccaaauuaaauu

SEQ ID NO: 3180709 - RNA, 19 nt, Artificial Sequence
  Description of Artificial Sequence: Synthetic oligonucleotide
uuugccuuugcaaagaaaa

SEQ ID NO: 3180710 - RNA, 19 nt, Artificial Sequence
  Description of Artificial Sequence: Synthetic oligonucleotide
aaaacaaaagcuauguggu

SEQ ID NO: 3180711 - RNA, 19 nt, Artificial Sequence
  Description of Artificial Sequence: Synthetic oligonucleotide
ugugaguuuaaauauggca

SEQ ID NO: 3180712 - RNA, 19 nt, Artificial Sequence
  Description of Artificial Sequence: Synthetic oligonucleotide
auaauaacacuacagacau

SEQ ID NO: 3180713 - RNA, 19 nt, Artificial Sequence
  Description of Artificial Sequence: Synthetic oligonucleotide
auuuaaauaaaaugugagu

SEQ ID NO: 3180714 - RNA, 19 nt, Artificial Sequence
  Description of Artificial Sequence: Synthetic oligonucleotide
caagcaugaaaacaaaagc

SEQ ID NO: 3180715 - RNA, 19 nt, Artificial Sequence
  Description of Artificial Sequence: Synthetic oligonucleotide
ucaaccaaauuaaauucag

SEQ ID NO: 3180716 - RNA, 19 nt, Artificial Sequence
  Description of Artificial Sequence: Synthetic oligonucleotide
auuauuuaaauaaaaugug

SEQ ID NO: 3180717 - RNA, 19 nt, Artificial Sequence
  Description of Artificial Sequence: Synthetic oligonucleotide
ucuaaguuaggacagucgu

SEQ ID NO: 3180718 - RNA, 19 nt, Artificial Sequence
  Description of Artificial Sequence: Synthetic oligonucleotide
accaaauuaaauucaggag

SEQ ID NO: 3180719 - RNA, 19 nt, Artificial Sequence
  Description of Artificial Sequence: Synthetic oligonucleotide
uuucaaccaaauuaaauuc

SEQ ID NO: 3180720 - RNA, 19 nt, Artificial Sequence
  Description of Artificial Sequence: Synthetic oligonucleotide
uuuccaagcaugaaaacaa

SEQ ID NO: 3180721 - RNA, 19 nt, Artificial Sequence
  Description of Artificial Sequence: Synthetic oligonucleotide
aaauauggcauccucggaa

SEQ ID NO: 3180722 - RNA, 19 nt, Artificial Sequence
  Description of Artificial Sequence: Synthetic oligonucleotide
uaguuuucaaccaaauuaa

SEQ ID NO: 3180723 - RNA, 19 nt, Artificial Sequence
  Description of Artificial Sequence: Synthetic oligonucleotide
aacaaaagcuaugugguug

SEQ ID NO: 3180724 - RNA, 19 nt, Artificial Sequence
  Description of Artificial Sequence: Synthetic oligonucleotide
gguuauuucccucauacag

SEQ ID NO: 3180725 - RNA, 19 nt, Artificial Sequence
  Description of Artificial Sequence: Synthetic oligonucleotide
ccaaauuaaauucaggagc

SEQ ID NO: 3180726 - RNA, 19 nt, Artificial Sequence
  Description of Artificial Sequence: Synthetic oligonucleotide
uucaaccaaauuaaauuca

SEQ ID NO: 3180727 - RNA, 19 nt, Artificial Sequence
  Description of Artificial Sequence: Synthetic oligonucleotide
aagcaugaaaacaaaagcu

SEQ ID NO: 3180728 - RNA, 19 nt, Artificial Sequence
  Description of Artificial Sequence: Synthetic oligonucleotide
uuauuucccucauacagca

SEQ ID NO: 3180729 - RNA, 19 nt, Artificial Sequence
  Description of Artificial Sequence: Synthetic oligonucleotide
ugauuauuauuuaaauaaa

SEQ ID NO: 3180730 - RNA, 19 nt, Artificial Sequence
  Description of Artificial Sequence: Synthetic oligonucleotide
uaaauucaggagcaaauaa

SEQ ID NO: 3180731 - RNA, 19 nt, Artificial Sequence
  Description of Artificial Sequence: Synthetic oligonucleotide
uuaaauaaaaugugaguuu

SEQ ID NO: 3180732 - RNA, 19 nt, Artificial Sequence
  Description of Artificial Sequence: Synthetic oligonucleotide
gaaaauucacuucauuguc

SEQ ID NO: 3180733 - RNA, 19 nt, Artificial Sequence
  Description of Artificial Sequence: Synthetic oligonucleotide
caaauaauaacacuacaga

SEQ ID NO: 3180734 - RNA, 19 nt, Artificial Sequence
  Description of Artificial Sequence: Synthetic oligonucleotide
uucaggagcaaauaauaac

SEQ ID NO: 3180735 - RNA, 19 nt, Artificial Sequence
  Description of Artificial Sequence: Synthetic oligonucleotide
acuucauugucuaaguuag

SEQ ID NO: 3180736 - RNA, 19 nt, Artificial Sequence
  Description of Artificial Sequence: Synthetic oligonucleotide
aauaguuuucaaccaaauu

SEQ ID NO: 3180737 - RNA, 19 nt, Artificial Sequence
  Description of Artificial Sequence: Synthetic oligonucleotide
auuauuauuuaaauaaaau

SEQ ID NO: 3180738 - RNA, 19 nt, Artificial Sequence
  Description of Artificial Sequence: Synthetic oligonucleotide
ucugguugagccccaaaag

SEQ ID NO: 3180739 - RNA, 19 nt, Artificial Sequence
  Description of Artificial Sequence: Synthetic oligonucleotide
aauaaaaugugaguuuaaa

SEQ ID NO: 3180740 - RNA, 19 nt, Artificial Sequence
  Description of Artificial Sequence: Synthetic oligonucleotide
ugaaaacaaaagcuaugug

SEQ ID NO: 3180741 - RNA, 19 nt, Artificial Sequence
  Description of Artificial Sequence: Synthetic oligonucleotide
caaauuaaauucaggagca

SEQ ID NO: 3180742 - RNA, 19 nt, Artificial Sequence
  Description of Artificial Sequence: Synthetic oligonucleotide
auaaaaugugaguuuaaau

SEQ ID NO: 3180743 - RNA, 19 nt, Artificial Sequence
  Description of Artificial Sequence: Synthetic oligonucleotide
uaaauaaaaugugaguuua

SEQ ID NO: 3180744 - RNA, 19 nt, Artificial Sequence
  Description of Artificial Sequence: Synthetic oligonucleotide
ugcaaagaaaagacuuucc

SEQ ID NO: 3180745 - RNA, 19 nt, Artificial Sequence
  Description of Artificial Sequence: Synthetic oligonucleotide
acuacagacaucugguuga

SEQ ID NO: 3180746 - RNA, 19 nt, Artificial Sequence
  Description of Artificial Sequence: Synthetic oligonucleotide
aaauucacuucauugucua

SEQ ID NO: 3180747 - RNA, 19 nt, Artificial Sequence
  Description of Artificial Sequence: Synthetic oligonucleotide
caugaaaacaaaagcuaug

SEQ ID NO: 3180748 - RNA, 19 nt, Artificial Sequence
  Description of Artificial Sequence: Synthetic oligonucleotide
uucauugucuaaguuagga

SEQ ID NO: 3180749 - RNA, 19 nt, Artificial Sequence
  Description of Artificial Sequence: Synthetic oligonucleotide
cauugucuaaguuaggaca

SEQ ID NO: 3180750 - RNA, 19 nt, Artificial Sequence
  Description of Artificial Sequence: Synthetic oligonucleotide
aauuaaauucaggagcaaa

SEQ ID NO: 3180751 - RNA, 19 nt, Artificial Sequence
  Description of Artificial Sequence: Synthetic oligonucleotide
ugaguuuaaauauggcauc

SEQ ID NO: 3180752 - RNA, 19 nt, Artificial Sequence
  Description of Artificial Sequence: Synthetic oligonucleotide
agaaaagacuuuccaagca

SEQ ID NO: 3180753 - RNA, 19 nt, Artificial Sequence
  Description of Artificial Sequence: Synthetic oligonucleotide
aaaugugaguuuaaauaug

SEQ ID NO: 3180754 - RNA, 19 nt, Artificial Sequence
  Description of Artificial Sequence: Synthetic oligonucleotide
ugguugauuauuauuuaaa

SEQ ID NO: 3180755 - RNA, 19 nt, Artificial Sequence
  Description of Artificial Sequence: Synthetic oligonucleotide
augaaaacaaaagcuaugu

SEQ ID NO: 3180756 - RNA, 19 nt, Artificial Sequence
  Description of Artificial Sequence: Synthetic oligonucleotide
aauauggcauccucggaaa

SEQ ID NO: 3180757 - RNA, 19 nt, Artificial Sequence
  Description of Artificial Sequence: Synthetic oligonucleotide
gauuauuauuuaaauaaaa

SEQ ID NO: 3180758 - RNA, 19 nt, Artificial Sequence
  Description of Artificial Sequence: Synthetic oligonucleotide
aacacuacagacaucuggu

SEQ ID NO: 3180759 - RNA, 19 nt, Artificial Sequence
  Description of Artificial Sequence: Synthetic oligonucleotide
cugguugagccccaaaagg

SEQ ID NO: 3180760 - RNA, 19 nt, Artificial Sequence
  Description of Artificial Sequence: Synthetic oligonucleotide
auuucccucauacagcagu

SEQ ID NO: 3180761 - RNA, 19 nt, Artificial Sequence
  Description of Artificial Sequence: Synthetic oligonucleotide
aaaagacuuuccaagcaug

SEQ ID NO: 3180762 - RNA, 19 nt, Artificial Sequence
  Description of Artificial Sequence: Synthetic oligonucleotide
uuugcaaagaaaagacuuu

SEQ ID NO: 3180763 - RNA, 19 nt, Artificial Sequence
  Description of Artificial Sequence: Synthetic oligonucleotide
aaaauucacuucauugucu

SEQ ID NO: 3180764 - RNA, 19 nt, Artificial Sequence
  Description of Artificial Sequence: Synthetic oligonucleotide
ucauacagcaguuugccuu

SEQ ID NO: 3180765 - RNA, 19 nt, Artificial Sequence
  Description of Artificial Sequence: Synthetic oligonucleotide
aauucaggagcaaauaaua

SEQ ID NO: 3180766 - RNA, 19 nt, Artificial Sequence
  Description of Artificial Sequence: Synthetic oligonucleotide
aaauucaggagcaaauaau

SEQ ID NO: 3180767 - RNA, 19 nt, Artificial Sequence
  Description of Artificial Sequence: Synthetic oligonucleotide
gcaaauaauaacacuacag

SEQ ID NO: 3180768 - RNA, 19 nt, Artificial Sequence
  Description of Artificial Sequence: Synthetic oligonucleotide
agacaucugguugagcccc

SEQ ID NO: 3180769 - RNA, 19 nt, Artificial Sequence
  Description of Artificial Sequence: Synthetic oligonucleotide
auucacuucauugucuaag

SEQ ID NO: 3180770 - RNA, 19 nt, Artificial Sequence
  Description of Artificial Sequence: Synthetic oligonucleotide
agcaaauaauaacacuaca

SEQ ID NO: 3180771 - RNA, 19 nt, Artificial Sequence
  Description of Artificial Sequence: Synthetic oligonucleotide
caaccaaauuaaauucagg

SEQ ID NO: 3180772 - RNA, 19 nt, Artificial Sequence
  Description of Artificial Sequence: Synthetic oligonucleotide
ucauugucuaaguuaggac

SEQ ID NO: 3180773 - RNA, 19 nt, Artificial Sequence
  Description of Artificial Sequence: Synthetic oligonucleotide
auugucuaaguuaggacag

SEQ ID NO: 3180774 - RNA, 19 nt, Artificial Sequence
  Description of Artificial Sequence: Synthetic oligonucleotide
aaaauaguuuucaaccaaa

SEQ ID NO: 3180775 - RNA, 19 nt, Artificial Sequence
  Description of Artificial Sequence: Synthetic oligonucleotide
ugguugagccccaaaaggu

SEQ ID NO: 3180776 - RNA, 19 nt, Artificial Sequence
  Description of Artificial Sequence: Synthetic oligonucleotide
uugccuuugcaaagaaaag

SEQ ID NO: 3180777 - RNA, 19 nt, Artificial Sequence
  Description of Artificial Sequence: Synthetic oligonucleotide
acuuuccaagcaugaaaac

SEQ ID NO: 3180778 - RNA, 19 nt, Artificial Sequence
  Description of Artificial Sequence: Synthetic oligonucleotide
gaguuuaaauauggcaucc

SEQ ID NO: 3180779 - RNA, 19 nt, Artificial Sequence
  Description of Artificial Sequence: Synthetic oligonucleotide
guugauuauuauuuaaaua

SEQ ID NO: 3180780 - RNA, 19 nt, Artificial Sequence
  Description of Artificial Sequence: Synthetic oligonucleotide
ugccuuugcaaagaaaaga

SEQ ID NO: 3180781 - RNA, 19 nt, Artificial Sequence
  Description of Artificial Sequence: Synthetic oligonucleotide
uaaguuaggacagucguuu

SEQ ID NO: 3180782 - RNA, 19 nt, Artificial Sequence
  Description of Artificial Sequence: Synthetic oligonucleotide
guuauuucccucauacagc

SEQ ID NO: 3180783 - RNA, 19 nt, Artificial Sequence
  Description of Artificial Sequence: Synthetic oligonucleotide
acaaaagcuaugugguuga

SEQ ID NO: 3180784 - RNA, 19 nt, Artificial Sequence
  Description of Artificial Sequence: Synthetic oligonucleotide
aaccacagccuccagaccc

SEQ ID NO: 3180785 - RNA, 19 nt, Artificial Sequence
  Description of Artificial Sequence: Synthetic oligonucleotide
ugcuacagcauccagagcu

SEQ ID NO: 3180786 - RNA, 19 nt, Artificial Sequence
  Description of Artificial Sequence: Synthetic oligonucleotide
uuuggugucuggcacuugg

SEQ ID NO: 3180787 - RNA, 19 nt, Artificial Sequence
  Description of Artificial Sequence: Synthetic oligonucleotide
acugcuacagcauccagag

SEQ ID NO: 3180788 - RNA, 19 nt, Artificial Sequence
  Description of Artificial Sequence: Synthetic oligonucleotide
uuggaggacacuuuggugu

SEQ ID NO: 3180789 - RNA, 19 nt, Artificial Sequence
  Description of Artificial Sequence: Synthetic oligonucleotide
uccagagcugugacgaugg

SEQ ID NO: 3180790 - RNA, 19 nt, Artificial Sequence
  Description of Artificial Sequence: Synthetic oligonucleotide
ucaggcagcagccaccacc

SEQ ID NO: 3180791 - RNA, 19 nt, Artificial Sequence
  Description of Artificial Sequence: Synthetic oligonucleotide
ugcagcagccuccagagcu

SEQ ID NO: 3180792 - RNA, 19 nt, Artificial Sequence
  Description of Artificial Sequence: Synthetic oligonucleotide
gacgaagagaucugcgggg

SEQ ID NO: 3180793 - RNA, 19 nt, Artificial Sequence
  Description of Artificial Sequence: Synthetic oligonucleotide
cagagcuggaaccacagcc

SEQ ID NO: 3180794 - RNA, 19 nt, Artificial Sequence
  Description of Artificial Sequence: Synthetic oligonucleotide
acacuuuggugucuggcac

SEQ ID NO: 3180795 - RNA, 19 nt, Artificial Sequence
  Description of Artificial Sequence: Synthetic oligonucleotide
ugggagggcacuuuggugu

SEQ ID NO: 3180796 - RNA, 19 nt, Artificial Sequence
  Description of Artificial Sequence: Synthetic oligonucleotide
uuuggaggacacuuuggug

SEQ ID NO: 3180797 - RNA, 19 nt, Artificial Sequence
  Description of Artificial Sequence: Synthetic oligonucleotide
ugcagcacgaugacacagg

SEQ ID NO: 3180798 - RNA, 19 nt, Artificial Sequence
  Description of Artificial Sequence: Synthetic oligonucleotide
gugucuggcacuugggagg

SEQ ID NO: 3180799 - RNA, 19 nt, Artificial Sequence
  Description of Artificial Sequence: Synthetic oligonucleotide
uuccacagcagccacugcu

SEQ ID NO: 3180800 - RNA, 19 nt, Artificial Sequence
  Description of Artificial Sequence: Synthetic oligonucleotide
agccuccagagcuggaacc

SEQ ID NO: 3180801 - RNA, 19 nt, Artificial Sequence
  Description of Artificial Sequence: Synthetic oligonucleotide
uccagagcuggaaccacag

SEQ ID NO: 3180802 - RNA, 19 nt, Artificial Sequence
  Description of Artificial Sequence: Synthetic oligonucleotide
agagcugugacgauggcga

SEQ ID NO: 3180803 - RNA, 19 nt, Artificial Sequence
  Description of Artificial Sequence: Synthetic oligonucleotide
gacacuuuggugucuggca

SEQ ID NO: 3180804 - RNA, 19 nt, Artificial Sequence
  Description of Artificial Sequence: Synthetic oligonucleotide
ugugacgauggcgacgaag

SEQ ID NO: 3180805 - RNA, 19 nt, Artificial Sequence
  Description of Artificial Sequence: Synthetic oligonucleotide
acgaagagaucugcggggc

SEQ ID NO: 3180806 - RNA, 19 nt, Artificial Sequence
  Description of Artificial Sequence: Synthetic oligonucleotide
uccacagcagccacugcug

SEQ ID NO: 3180807 - RNA, 19 nt, Artificial Sequence
  Description of Artificial Sequence: Synthetic oligonucleotide
agaucugcggggccugugg

SEQ ID NO: 3180808 - RNA, 19 nt, Artificial Sequence
  Description of Artificial Sequence: Synthetic oligonucleotide
acagccuccagaccccagg

SEQ ID NO: 3180809 - RNA, 19 nt, Artificial Sequence
  Description of Artificial Sequence: Synthetic oligonucleotide
uuggugucuggcacuuggg

SEQ ID NO: 3180810 - RNA, 19 nt, Artificial Sequence
  Description of Artificial Sequence: Synthetic oligonucleotide
ucugcggggccuguggugg

SEQ ID NO: 3180811 - RNA, 19 nt, Artificial Sequence
  Description of Artificial Sequence: Synthetic oligonucleotide
ggaaccacagccuccagac

SEQ ID NO: 3180812 - RNA, 19 nt, Artificial Sequence
  Description of Artificial Sequence: Synthetic oligonucleotide
agcauccagagcugugacg

SEQ ID NO: 3180813 - RNA, 19 nt, Artificial Sequence
  Description of Artificial Sequence: Synthetic oligonucleotide
cagagcuggaaccacagca

SEQ ID NO: 3180814 - RNA, 19 nt, Artificial Sequence
  Description of Artificial Sequence: Synthetic oligonucleotide
uggaaccacagccuccaga

SEQ ID NO: 3180815 - RNA, 19 nt, Artificial Sequence
  Description of Artificial Sequence: Synthetic oligonucleotide
gauggcgacgaagagaucu

SEQ ID NO: 3180816 - RNA, 19 nt, Artificial Sequence
  Description of Artificial Sequence: Synthetic oligonucleotide
uggugucuggcacuuggga

SEQ ID NO: 3180817 - RNA, 19 nt, Artificial Sequence
  Description of Artificial Sequence: Synthetic oligonucleotide
caggcagcagccaccaccc

SEQ ID NO: 3180818 - RNA, 19 nt, Artificial Sequence
  Description of Artificial Sequence: Synthetic oligonucleotide
ugguggcucaggcagcagc

SEQ ID NO: 3180819 - RNA, 19 nt, Artificial Sequence
  Description of Artificial Sequence: Synthetic oligonucleotide
agcuggaaccacagcagcc

SEQ ID NO: 3180820 - RNA, 19 nt, Artificial Sequence
  Description of Artificial Sequence: Synthetic oligonucleotide
ugucuggcacuugggaggg

SEQ ID NO: 3180821 - RNA, 19 nt, Artificial Sequence
  Description of Artificial Sequence: Synthetic oligonucleotide
cacuuuggaggacacuuug

SEQ ID NO: 3180822 - RNA, 19 nt, Artificial Sequence
  Description of Artificial Sequence: Synthetic oligonucleotide
gaccccaggcugcagcacg

SEQ ID NO: 3180823 - RNA, 19 nt, Artificial Sequence
  Description of Artificial Sequence: Synthetic oligonucleotide
cacugcuuccacagcagcc

SEQ ID NO: 3180824 - RNA, 19 nt, Artificial Sequence
  Description of Artificial Sequence: Synthetic oligonucleotide
ugacgauggcgacgaagag

SEQ ID NO: 3180825 - RNA, 19 nt, Artificial Sequence
  Description of Artificial Sequence: Synthetic oligonucleotide
ggugucuggcacuugggag

SEQ ID NO: 3180826 - RNA, 19 nt, Artificial Sequence
  Description of Artificial Sequence: Synthetic oligonucleotide
agagcuggaaccacagcag

SEQ ID NO: 3180827 - RNA, 19 nt, Artificial Sequence
  Description of Artificial Sequence: Synthetic oligonucleotide
uacagcauccagagcugug

SEQ ID NO: 3180828 - RNA, 19 nt, Artificial Sequence
  Description of Artificial Sequence: Synthetic oligonucleotide
uugggagggcacuuuggug

SEQ ID NO: 3180829 - RNA, 19 nt, Artificial Sequence
  Description of Artificial Sequence: Synthetic oligonucleotide
gagcuggaaccacagcagc

SEQ ID NO: 3180830 - RNA, 19 nt, Artificial Sequence
  Description of Artificial Sequence: Synthetic oligonucleotide
acgauggcgacgaagagau

SEQ ID NO: 3180831 - RNA, 19 nt, Artificial Sequence
  Description of Artificial Sequence: Synthetic oligonucleotide
acuuuggaggacacuuugg

SEQ ID NO: 3180832 - RNA, 19 nt, Artificial Sequence
  Description of Artificial Sequence: Synthetic oligonucleotide
gcgacgaagagaucugcgg

SEQ ID NO: 3180833 - RNA, 19 nt, Artificial Sequence
  Description of Artificial Sequence: Synthetic oligonucleotide
acugcuuccacagcagcca

SEQ ID NO: 3180834 - RNA, 19 nt, Artificial Sequence
  Description of Artificial Sequence: Synthetic oligonucleotide
ugccaccacugcuacagca

SEQ ID NO: 3180835 - RNA, 19 nt, Artificial Sequence
  Description of Artificial Sequence: Synthetic oligonucleotide
gcugcagcagccuccagag

SEQ ID NO: 3180836 - RNA, 19 nt, Artificial Sequence
  Description of Artificial Sequence: Synthetic oligonucleotide
ccugugguggcucaggcag

SEQ ID NO: 3180837 - RNA, 19 nt, Artificial Sequence
  Description of Artificial Sequence: Synthetic oligonucleotide
agcugcagcagccuccaga

SEQ ID NO: 3180838 - RNA, 19 nt, Artificial Sequence
  Description of Artificial Sequence: Synthetic oligonucleotide
ucuggcacuugggagggca

SEQ ID NO: 3180839 - RNA, 19 nt, Artificial Sequence
  Description of Artificial Sequence: Synthetic oligonucleotide
gugacgauggcgacgaaga

SEQ ID NO: 3180840 - RNA, 19 nt, Artificial Sequence
  Description of Artificial Sequence: Synthetic oligonucleotide
cagagcugcagcagccucc

SEQ ID NO: 3180841 - RNA, 19 nt, Artificial Sequence
  Description of Artificial Sequence: Synthetic oligonucleotide
cagagcugugacgauggcg

SEQ ID NO: 3180842 - RNA, 19 nt, Artificial Sequence
  Description of Artificial Sequence: Synthetic oligonucleotide
caccacugcuacagcaucc

SEQ ID NO: 3180843 - RNA, 19 nt, Artificial Sequence
  Description of Artificial Sequence: Synthetic oligonucleotide
cacuugggagggcacuugg

SEQ ID NO: 3180844 - RNA, 19 nt, Artificial Sequence
  Description of Artificial Sequence: Synthetic oligonucleotide
uggaggacacuuugguguc

SEQ ID NO: 3180845 - RNA, 19 nt, Artificial Sequence
  Description of Artificial Sequence: Synthetic oligonucleotide
acagcauccagagcuguga

SEQ ID NO: 3180846 - RNA, 19 nt, Artificial Sequence
  Description of Artificial Sequence: Synthetic oligonucleotide
gacgauggcgacgaagaga

SEQ ID NO: 3180847 - RNA, 19 nt, Artificial Sequence
  Description of Artificial Sequence: Synthetic oligonucleotide
gcugccaccacugcuacag

SEQ ID NO: 3180848 - RNA, 19 nt, Artificial Sequence
  Description of Artificial Sequence: Synthetic oligonucleotide
agagcuggaaccacagccu

SEQ ID NO: 3180849 - RNA, 19 nt, Artificial Sequence
  Description of Artificial Sequence: Synthetic oligonucleotide
agcuggaaccacagccucc

SEQ ID NO: 3180850 - RNA, 19 nt, Artificial Sequence
  Description of Artificial Sequence: Synthetic oligonucleotide
gcagcacgaugacacaggg

SEQ ID NO: 3180851 - RNA, 19 nt, Artificial Sequence
  Description of Artificial Sequence: Synthetic oligonucleotide
cacugcuacagcauccaga

SEQ ID NO: 3180852 - RNA, 19 nt, Artificial Sequence
  Description of Artificial Sequence: Synthetic oligonucleotide
gaaccacagccuccagacc

SEQ ID NO: 3180853 - RNA, 19 nt, Artificial Sequence
  Description of Artificial Sequence: Synthetic oligonucleotide
aagagaucugcggggccug

SEQ ID NO: 3180854 - RNA, 19 nt, Artificial Sequence
  Description of Artificial Sequence: Synthetic oligonucleotide
acuugggagggcacuuugg

SEQ ID NO: 3180855 - RNA, 19 nt, Artificial Sequence
  Description of Artificial Sequence: Synthetic oligonucleotide
ugugguggcucaggcagca

SEQ ID NO: 3180856 - RNA, 19 nt, Artificial Sequence
  Description of Artificial Sequence: Synthetic oligonucleotide
cuggaaccacagcagcccc

SEQ ID NO: 3180857 - RNA, 19 nt, Artificial Sequence
  Description of Artificial Sequence: Synthetic oligonucleotide
acagcagccacugcugcca

SEQ ID NO: 3180858 - RNA, 19 nt, Artificial Sequence
  Description of Artificial Sequence: Synthetic oligonucleotide
agcugugacgauggcgacg

SEQ ID NO: 3180859 - RNA, 19 nt, Artificial Sequence
  Description of Artificial Sequence: Synthetic oligonucleotide
cacagcagccacugcugcc

SEQ ID NO: 3180860 - RNA, 19 nt, Artificial Sequence
  Description of Artificial Sequence: Synthetic oligonucleotide
accacagccuccagacccc

SEQ ID NO: 3180861 - RNA, 19 nt, Artificial Sequence
  Description of Artificial Sequence: Synthetic oligonucleotide
gaggacacuuuggugucug

SEQ ID NO: 3180862 - RNA, 19 nt, Artificial Sequence
  Description of Artificial Sequence: Synthetic oligonucleotide
gacacuuuggaggacacuu

SEQ ID NO: 3180863 - RNA, 19 nt, Artificial Sequence
  Description of Artificial Sequence: Synthetic oligonucleotide
cagcacgaugacacagggg

SEQ ID NO: 3180864 - RNA, 19 nt, Artificial Sequence
  Description of Artificial Sequence: Synthetic oligonucleotide
aggacacuuuggugucugg

SEQ ID NO: 3180865 - RNA, 19 nt, Artificial Sequence
  Description of Artificial Sequence: Synthetic oligonucleotide
ggcugcagcacgaugacac

SEQ ID NO: 3180866 - RNA, 19 nt, Artificial Sequence
  Description of Artificial Sequence: Synthetic oligonucleotide
cuuuggaggacacuuuggu

SEQ ID NO: 3180867 - RNA, 19 nt, Artificial Sequence
  Description of Artificial Sequence: Synthetic oligonucleotide
agcagccacugcugccacc

SEQ ID NO: 3180868 - RNA, 19 nt, Artificial Sequence
  Description of Artificial Sequence: Synthetic oligonucleotide
gagcuggaaccacagccuc

SEQ ID NO: 3180869 - RNA, 19 nt, Artificial Sequence
  Description of Artificial Sequence: Synthetic oligonucleotide
uggcucaggcagcagccac

SEQ ID NO: 3180870 - RNA, 19 nt, Artificial Sequence
  Description of Artificial Sequence: Synthetic oligonucleotide
auccagagcugugacgaug

SEQ ID NO: 3180871 - RNA, 19 nt, Artificial Sequence
  Description of Artificial Sequence: Synthetic oligonucleotide
cugcagcacgaugacacag

SEQ ID NO: 3180872 - RNA, 19 nt, Artificial Sequence
  Description of Artificial Sequence: Synthetic oligonucleotide
acuugggagggcacuuggg

SEQ ID NO: 3180873 - RNA, 19 nt, Artificial Sequence
  Description of Artificial Sequence: Synthetic oligonucleotide
gcauccagagcugugacga

SEQ ID NO: 3180874 - RNA, 19 nt, Artificial Sequence
  Description of Artificial Sequence: Synthetic oligonucleotide
ggcacuuuggugucuggca

SEQ ID NO: 3180875 - RNA, 19 nt, Artificial Sequence
  Description of Artificial Sequence: Synthetic oligonucleotide
cacuugggagggcacuuug

SEQ ID NO: 3180876 - RNA, 19 nt, Artificial Sequence
  Description of Artificial Sequence: Synthetic oligonucleotide
gcuggaaccacagcagccc

SEQ ID NO: 3180877 - RNA, 19 nt, Artificial Sequence
  Description of Artificial Sequence: Synthetic oligonucleotide
ugcuuccacagcagccacu

SEQ ID NO: 3180878 - RNA, 19 nt, Artificial Sequence
  Description of Artificial Sequence: Synthetic oligonucleotide
cgacgaagagaucugcggg

SEQ ID NO: 3180879 - RNA, 19 nt, Artificial Sequence
  Description of Artificial Sequence: Synthetic oligonucleotide
aucugcggggccuguggug

SEQ ID NO: 3180880 - RNA, 19 nt, Artificial Sequence
  Description of Artificial Sequence: Synthetic oligonucleotide
accacugcuacagcaucca

SEQ ID NO: 3180881 - RNA, 19 nt, Artificial Sequence
  Description of Artificial Sequence: Synthetic oligonucleotide
agccacugcugccaccacu

SEQ ID NO: 3180882 - RNA, 19 nt, Artificial Sequence
  Description of Artificial Sequence: Synthetic oligonucleotide
gcacuuuggugucuggcac

SEQ ID NO: 3180883 - RNA, 19 nt, Artificial Sequence
  Description of Artificial Sequence: Synthetic oligonucleotide
acugcugccaccacugcua

SEQ ID NO: 3180884 - RNA, 19 nt, Artificial Sequence
  Description of Artificial Sequence: Synthetic oligonucleotide
accaaauaaauauuaagcc

SEQ ID NO: 3180885 - RNA, 19 nt, Artificial Sequence
  Description of Artificial Sequence: Synthetic oligonucleotide
aaccaaauaaauauuaagc

SEQ ID NO: 3180886 - RNA, 19 nt, Artificial Sequence
  Description of Artificial Sequence: Synthetic oligonucleotide
aauaaguuccuacagagga

SEQ ID NO: 3180887 - RNA, 19 nt, Artificial Sequence
  Description of Artificial Sequence: Synthetic oligonucleotide
ugaauaaccaaauaaauau

SEQ ID NO: 3180888 - RNA, 19 nt, Artificial Sequence
  Description of Artificial Sequence: Synthetic oligonucleotide
uacuauugaaauaaguucc

SEQ ID NO: 3180889 - RNA, 19 nt, Artificial Sequence
  Description of Artificial Sequence: Synthetic oligonucleotide
uuuguuuggaaucaccagg

SEQ ID NO: 3180890 - RNA, 19 nt, Artificial Sequence
  Description of Artificial Sequence: Synthetic oligonucleotide
auaaauauuaagccuuccc

SEQ ID NO: 3180891 - RNA, 19 nt, Artificial Sequence
  Description of Artificial Sequence: Synthetic oligonucleotide
gaaauaaguuccuacagag

SEQ ID NO: 3180892 - RNA, 19 nt, Artificial Sequence
  Description of Artificial Sequence: Synthetic oligonucleotide
uaaauauuaagccuucccc

SEQ ID NO: 3180893 - RNA, 19 nt, Artificial Sequence
  Description of Artificial Sequence: Synthetic oligonucleotide
uuuguuuagauuaccaagc

SEQ ID NO: 3180894 - RNA, 19 nt, Artificial Sequence
  Description of Artificial Sequence: Synthetic oligonucleotide
aguuguauuucacagacag

SEQ ID NO: 3180895 - RNA, 19 nt, Artificial Sequence
  Description of Artificial Sequence: Synthetic oligonucleotide
uguauuuugaauaaccaaa

SEQ ID NO: 3180896 - RNA, 19 nt, Artificial Sequence
  Description of Artificial Sequence: Synthetic oligonucleotide
uuuugaauaaccaaauaaa

SEQ ID NO: 3180897 - RNA, 19 nt, Artificial Sequence
  Description of Artificial Sequence: Synthetic oligonucleotide
aaggagaaagaaugcaggc

SEQ ID NO: 3180898 - RNA, 19 nt, Artificial Sequence
  Description of Artificial Sequence: Synthetic oligonucleotide
aauauuaagccuuccccuc

SEQ ID NO: 3180899 - RNA, 19 nt, Artificial Sequence
  Description of Artificial Sequence: Synthetic oligonucleotide
acaguuguauuucacagac

SEQ ID NO: 3180900 - RNA, 19 nt, Artificial Sequence
  Description of Artificial Sequence: Synthetic oligonucleotide
uuuggaaucaccaggcucc

SEQ ID NO: 3180901 - RNA, 19 nt, Artificial Sequence
  Description of Artificial Sequence: Synthetic oligonucleotide
aagacuggaaaucuaaacu

SEQ ID NO: 3180902 - RNA, 19 nt, Artificial Sequence
  Description of Artificial Sequence: Synthetic oligonucleotide
aaauauuaagccuuccccu

SEQ ID NO: 3180903 - RNA, 19 nt, Artificial Sequence
  Description of Artificial Sequence: Synthetic oligonucleotide
uucacagacagaaagguga

SEQ ID NO: 3180904 - RNA, 19 nt, Artificial Sequence
  Description of Artificial Sequence: Synthetic oligonucleotide
uauuucacagacagaaagg

SEQ ID NO: 3180905 - RNA, 19 nt, Artificial Sequence
  Description of Artificial Sequence: Synthetic oligonucleotide
auauguauuuugaauaacc

SEQ ID NO: 3180906 - RNA, 19 nt, Artificial Sequence
  Description of Artificial Sequence: Synthetic oligonucleotide
uaaccaaauaaauauuaag

SEQ ID NO: 3180907 - RNA, 19 nt, Artificial Sequence
  Description of Artificial Sequence: Synthetic oligonucleotide
auuuugaauaaccaaauaa

SEQ ID NO: 3180908 - RNA, 19 nt, Artificial Sequence
  Description of Artificial Sequence: Synthetic oligonucleotide
uuacuauugaaauaaguuc

SEQ ID NO: 3180909 - RNA, 19 nt, Artificial Sequence
  Description of Artificial Sequence: Synthetic oligonucleotide
gauauuacuauugaaauaa

SEQ ID NO: 3180910 - RNA, 19 nt, Artificial Sequence
  Description of Artificial Sequence: Synthetic oligonucleotide
ucagguuucucacugguag

SEQ ID NO: 3180911 - RNA, 19 nt, Artificial Sequence
  Description of Artificial Sequence: Synthetic oligonucleotide
uugaaauaaguuccuacag

SEQ ID NO: 3180912 - RNA, 19 nt, Artificial Sequence
  Description of Artificial Sequence: Synthetic oligonucleotide
uuugaauaaccaaauaaau

SEQ ID NO: 3180913 - RNA, 19 nt, Artificial Sequence
  Description of Artificial Sequence: Synthetic oligonucleotide
guauuucacagacagaaag

SEQ ID NO: 3180914 - RNA, 19 nt, Artificial Sequence
  Description of Artificial Sequence: Synthetic oligonucleotide
aauaaauauuaagccuucc

SEQ ID NO: 3180915 - RNA, 19 nt, Artificial Sequence
  Description of Artificial Sequence: Synthetic oligonucleotide
uauguauuuugaauaacca

SEQ ID NO: 3180916 - RNA, 19 nt, Artificial Sequence
  Description of Artificial Sequence: Synthetic oligonucleotide
guuuguuuagauuaccaag

SEQ ID NO: 3180917 - RNA, 19 nt, Artificial Sequence
  Description of Artificial Sequence: Synthetic oligonucleotide
agacuggaaaucuaaacuc

SEQ ID NO: 3180918 - RNA, 19 nt, Artificial Sequence
  Description of Artificial Sequence: Synthetic oligonucleotide
aaucuaaacucugauaugu

SEQ ID NO: 3180919 - RNA, 19 nt, Artificial Sequence
  Description of Artificial Sequence: Synthetic oligonucleotide
aucaccaggcuccacaacc

SEQ ID NO: 3180920 - RNA, 19 nt, Artificial Sequence
  Description of Artificial Sequence: Synthetic oligonucleotide
acuaaagugucuugaaauc

SEQ ID NO: 3180921 - RNA, 19 nt, Artificial Sequence
  Description of Artificial Sequence: Synthetic oligonucleotide
aaagaaugcaggcgauggc

SEQ ID NO: 3180922 - RNA, 19 nt, Artificial Sequence
  Description of Artificial Sequence: Synthetic oligonucleotide
auugaaauaaguuccuaca

SEQ ID NO: 3180923 - RNA, 19 nt, Artificial Sequence
  Description of Artificial Sequence: Synthetic oligonucleotide
aacucugauauguauuuug

SEQ ID NO: 3180924 - RNA, 19 nt, Artificial Sequence
  Description of Artificial Sequence: Synthetic oligonucleotide
ugaaauaaguuccuacaga

SEQ ID NO: 3180925 - RNA, 19 nt, Artificial Sequence
  Description of Artificial Sequence: Synthetic oligonucleotide
uugauauuacuauugaaau

SEQ ID NO: 3180926 - RNA, 19 nt, Artificial Sequence
  Description of Artificial Sequence: Synthetic oligonucleotide
uagauuaccaagcagucuc

SEQ ID NO: 3180927 - RNA, 19 nt, Artificial Sequence
  Description of Artificial Sequence: Synthetic oligonucleotide
uugaauaaccaaauaaaua

SEQ ID NO: 3180928 - RNA, 19 nt, Artificial Sequence
  Description of Artificial Sequence: Synthetic oligonucleotide
uauuacuauugaaauaagu

SEQ ID NO: 3180929 - RNA, 19 nt, Artificial Sequence
  Description of Artificial Sequence: Synthetic oligonucleotide
uuguauuucacagacagaa

SEQ ID NO: 3180930 - RNA, 19 nt, Artificial Sequence
  Description of Artificial Sequence: Synthetic oligonucleotide
gaaaucuaaacucugauau

SEQ ID NO: 3180931 - RNA, 19 nt, Artificial Sequence
  Description of Artificial Sequence: Synthetic oligonucleotide
aaaagagggaccaagcugu

SEQ ID NO: 3180932 - RNA, 19 nt, Artificial Sequence
  Description of Artificial Sequence: Synthetic oligonucleotide
agagggaccaagcuguuac

SEQ ID NO: 3180933 - RNA, 19 nt, Artificial Sequence
  Description of Artificial Sequence: Synthetic oligonucleotide
agcgaaaccgccaacauac

SEQ ID NO: 3180934 - RNA, 19 nt, Artificial Sequence
  Description of Artificial Sequence: Synthetic oligonucleotide
uauugaaauaaguuccuac

SEQ ID NO: 3180935 - RNA, 19 nt, Artificial Sequence
  Description of Artificial Sequence: Synthetic oligonucleotide
uccacaaccugucaucagg

SEQ ID NO: 3180936 - RNA, 19 nt, Artificial Sequence
  Description of Artificial Sequence: Synthetic oligonucleotide
gaaaagagggaccaagcug

SEQ ID NO: 3180937 - RNA, 19 nt, Artificial Sequence
  Description of Artificial Sequence: Synthetic oligonucleotide
gaaagaaugcaggcgaugg

SEQ ID NO: 3180938 - RNA, 19 nt, Artificial Sequence
  Description of Artificial Sequence: Synthetic oligonucleotide
ucugauauguauuuugaau

SEQ ID NO: 3180939 - RNA, 19 nt, Artificial Sequence
  Description of Artificial Sequence: Synthetic oligonucleotide
aaauaaauauuaagccuuc

SEQ ID NO: 3180940 - RNA, 19 nt, Artificial Sequence
  Description of Artificial Sequence: Synthetic oligonucleotide
uccuacagaggaaaagagg

SEQ ID NO: 3180941 - RNA, 19 nt, Artificial Sequence
  Description of Artificial Sequence: Synthetic oligonucleotide
aaaucuaaacucugauaug

SEQ ID NO: 3180942 - RNA, 19 nt, Artificial Sequence
  Description of Artificial Sequence: Synthetic oligonucleotide
gaaggagaaagaaugcagg

SEQ ID NO: 3180943 - RNA, 19 nt, Artificial Sequence
  Description of Artificial Sequence: Synthetic oligonucleotide
auauuaagccuuccccucc

SEQ ID NO: 3180944 - RNA, 19 nt, Artificial Sequence
  Description of Artificial Sequence: Synthetic oligonucleotide
aaagccacaguuguauuuc

SEQ ID NO: 3180945 - RNA, 19 nt, Artificial Sequence
  Description of Artificial Sequence: Synthetic oligonucleotide
uguagcaccagaaggagaa

SEQ ID NO: 3180946 - RNA, 19 nt, Artificial Sequence
  Description of Artificial Sequence: Synthetic oligonucleotide
ugguaguuuguuuagauua

SEQ ID NO: 3180947 - RNA, 19 nt, Artificial Sequence
  Description of Artificial Sequence: Synthetic oligonucleotide
uguuuagauuaccaagcag

SEQ ID NO: 3180948 - RNA, 19 nt, Artificial Sequence
  Description of Artificial Sequence: Synthetic oligonucleotide
aauaaccaaauaaauauua

SEQ ID NO: 3180949 - RNA, 19 nt, Artificial Sequence
  Description of Artificial Sequence: Synthetic oligonucleotide
ucucaguacaucuuguugu

SEQ ID NO: 3180950 - RNA, 19 nt, Artificial Sequence
  Description of Artificial Sequence: Synthetic oligonucleotide
acagacagaaaggugaagg

SEQ ID NO: 3180951 - RNA, 19 nt, Artificial Sequence
  Description of Artificial Sequence: Synthetic oligonucleotide
uacuaaagugucuugaaau

SEQ ID NO: 3180952 - RNA, 19 nt, Artificial Sequence
  Description of Artificial Sequence: Synthetic oligonucleotide
uuguuuggaaucaccaggc

SEQ ID NO: 3180953 - RNA, 19 nt, Artificial Sequence
  Description of Artificial Sequence: Synthetic oligonucleotide
uuaccaagcagucucagua

SEQ ID NO: 3180954 - RNA, 19 nt, Artificial Sequence
  Description of Artificial Sequence: Synthetic oligonucleotide
uuuagauuaccaagcaguc

SEQ ID NO: 3180955 - RNA, 19 nt, Artificial Sequence
  Description of Artificial Sequence: Synthetic oligonucleotide
ccuacagaggaaaagaggg

SEQ ID NO: 3180956 - RNA, 19 nt, Artificial Sequence
  Description of Artificial Sequence: Synthetic oligonucleotide
uaagacuggaaaucuaaac

SEQ ID NO: 3180957 - RNA, 19 nt, Artificial Sequence
  Description of Artificial Sequence: Synthetic oligonucleotide
ugaaaucucucuucucagg

SEQ ID NO: 3180958 - RNA, 19 nt, Artificial Sequence
  Description of Artificial Sequence: Synthetic oligonucleotide
ugauauguauuuugaauaa

SEQ ID NO: 3180959 - RNA, 19 nt, Artificial Sequence
  Description of Artificial Sequence: Synthetic oligonucleotide
aaauaaguuccuacagagg

SEQ ID NO: 3180960 - RNA, 19 nt, Artificial Sequence
  Description of Artificial Sequence: Synthetic oligonucleotide
gagcuguagcaccagaagg

SEQ ID NO: 3180961 - RNA, 19 nt, Artificial Sequence
  Description of Artificial Sequence: Synthetic oligonucleotide
uacaucuuguuguugauau

SEQ ID NO: 3180962 - RNA, 19 nt, Artificial Sequence
  Description of Artificial Sequence: Synthetic oligonucleotide
gacagaaaggugaagggcc

SEQ ID NO: 3180963 - RNA, 19 nt, Artificial Sequence
  Description of Artificial Sequence: Synthetic oligonucleotide
accagaaggagaaagaaug

SEQ ID NO: 3180964 - RNA, 19 nt, Artificial Sequence
  Description of Artificial Sequence: Synthetic oligonucleotide
auuacuauugaaauaaguu

SEQ ID NO: 3180965 - RNA, 19 nt, Artificial Sequence
  Description of Artificial Sequence: Synthetic oligonucleotide
agacagaaaggugaagggc

SEQ ID NO: 3180966 - RNA, 19 nt, Artificial Sequence
  Description of Artificial Sequence: Synthetic oligonucleotide
agaacauagcgaaaccgcc

SEQ ID NO: 3180967 - RNA, 19 nt, Artificial Sequence
  Description of Artificial Sequence: Synthetic oligonucleotide
cagaacauagcgaaaccgc

SEQ ID NO: 3180968 - RNA, 19 nt, Artificial Sequence
  Description of Artificial Sequence: Synthetic oligonucleotide
uuguugauauuacuauuga

SEQ ID NO: 3180969 - RNA, 19 nt, Artificial Sequence
  Description of Artificial Sequence: Synthetic oligonucleotide
uuccuacagaggaaaagag

SEQ ID NO: 3180970 - RNA, 19 nt, Artificial Sequence
  Description of Artificial Sequence: Synthetic oligonucleotide
guugauauuacuauugaaa

SEQ ID NO: 3180971 - RNA, 19 nt, Artificial Sequence
  Description of Artificial Sequence: Synthetic oligonucleotide
uugaaaucucucuucucag

SEQ ID NO: 3180972 - RNA, 19 nt, Artificial Sequence
  Description of Artificial Sequence: Synthetic oligonucleotide
uaguuuguuuagauuacca

SEQ ID NO: 3180973 - RNA, 19 nt, Artificial Sequence
  Description of Artificial Sequence: Synthetic oligonucleotide
guuguugauauuacuauug

SEQ ID NO: 3180974 - RNA, 19 nt, Artificial Sequence
  Description of Artificial Sequence: Synthetic oligonucleotide
uaaacucugauauguauuu

SEQ ID NO: 3180975 - RNA, 19 nt, Artificial Sequence
  Description of Artificial Sequence: Synthetic oligonucleotide
uuguuuagauuaccaagca

SEQ ID NO: 3180976 - RNA, 19 nt, Artificial Sequence
  Description of Artificial Sequence: Synthetic oligonucleotide
uaaagugucuugaaaucuc

SEQ ID NO: 3180977 - RNA, 19 nt, Artificial Sequence
  Description of Artificial Sequence: Synthetic oligonucleotide
aaucucucuucucaggaaa

SEQ ID NO: 3180978 - RNA, 19 nt, Artificial Sequence
  Description of Artificial Sequence: Synthetic oligonucleotide
ucuaaacucugauauguau

SEQ ID NO: 3180979 - RNA, 19 nt, Artificial Sequence
  Description of Artificial Sequence: Synthetic oligonucleotide
agugucuugaaaucucucu

SEQ ID NO: 3180980 - RNA, 19 nt, Artificial Sequence
  Description of Artificial Sequence: Synthetic oligonucleotide
uguuacuaaagugucuuga

SEQ ID NO: 3180981 - RNA, 19 nt, Artificial Sequence
  Description of Artificial Sequence: Synthetic oligonucleotide
uuguuguugauauuacuau

SEQ ID NO: 3180982 - RNA, 19 nt, Artificial Sequence
  Description of Artificial Sequence: Synthetic oligonucleotide
cuugaaaucucucuucuca

SEQ ID NO: 3180983 - RNA, 19 nt, Artificial Sequence
  Description of Artificial Sequence: Synthetic oligonucleotide
gauggcuuuguuuggaauc

SEQ ID NO: 3180984 - RNA, 19 nt, Artificial Sequence
  Description of Artificial Sequence: Synthetic oligonucleotide
ugcuggaugacauucaugg

SEQ ID NO: 3180985 - RNA, 19 nt, Artificial Sequence
  Description of Artificial Sequence: Synthetic oligonucleotide
uuaaugggagcauuccucg

SEQ ID NO: 3180986 - RNA, 19 nt, Artificial Sequence
  Description of Artificial Sequence: Synthetic oligonucleotide
ugauuguuguuaaugggag

SEQ ID NO: 3180987 - RNA, 19 nt, Artificial Sequence
  Description of Artificial Sequence: Synthetic oligonucleotide
uugauuguuguuaauggga

SEQ ID NO: 3180988 - RNA, 19 nt, Artificial Sequence
  Description of Artificial Sequence: Synthetic oligonucleotide
ugauggcagauguaaaugg

SEQ ID NO: 3180989 - RNA, 19 nt, Artificial Sequence
  Description of Artificial Sequence: Synthetic oligonucleotide
cuggaugacauucaugggg

SEQ ID NO: 3180990 - RNA, 19 nt, Artificial Sequence
  Description of Artificial Sequence: Synthetic oligonucleotide
cuugauuguuguuaauggg

SEQ ID NO: 3180991 - RNA, 19 nt, Artificial Sequence
  Description of Artificial Sequence: Synthetic oligonucleotide
ucagcgaaggccaaagcgc

SEQ ID NO: 3180992 - RNA, 19 nt, Artificial Sequence
  Description of Artificial Sequence: Synthetic oligonucleotide
auucauggggaucauuuuc

SEQ ID NO: 3180993 - RNA, 19 nt, Artificial Sequence
  Description of Artificial Sequence: Synthetic oligonucleotide
auuuuccacacccucuucg

SEQ ID NO: 3180994 - RNA, 19 nt, Artificial Sequence
  Description of Artificial Sequence: Synthetic oligonucleotide
uucauggggaucauuuucc

SEQ ID NO: 3180995 - RNA, 19 nt, Artificial Sequence
  Description of Artificial Sequence: Synthetic oligonucleotide
uucagcuuagcccacuggc

SEQ ID NO: 3180996 - RNA, 19 nt, Artificial Sequence
  Description of Artificial Sequence: Synthetic oligonucleotide
acccucuucgccuugauug

SEQ ID NO: 3180997 - RNA, 19 nt, Artificial Sequence
  Description of Artificial Sequence: Synthetic oligonucleotide
ucagcuuagcccacuggcg

SEQ ID NO: 3180998 - RNA, 19 nt, Artificial Sequence
  Description of Artificial Sequence: Synthetic oligonucleotide
uggaugacauucaugggga

SEQ ID NO: 3180999 - RNA, 19 nt, Artificial Sequence
  Description of Artificial Sequence: Synthetic oligonucleotide
auuccucgguuccugaugg

SEQ ID NO: 3181000 - RNA, 19 nt, Artificial Sequence
  Description of Artificial Sequence: Synthetic oligonucleotide
gaggccaccugucucagcg

SEQ ID NO: 3181001 - RNA, 19 nt, Artificial Sequence
  Description of Artificial Sequence: Synthetic oligonucleotide
auuguuguuaaugggagca

SEQ ID NO: 3181002 - RNA, 19 nt, Artificial Sequence
  Description of Artificial Sequence: Synthetic oligonucleotide
cucagcgaaggccaaagcg

SEQ ID NO: 3181003 - RNA, 19 nt, Artificial Sequence
  Description of Artificial Sequence: Synthetic oligonucleotide
aaugggagcauuccucggu

SEQ ID NO: 3181004 - RNA, 19 nt, Artificial Sequence
  Description of Artificial Sequence: Synthetic oligonucleotide
auggggaucauuuuccaca

SEQ ID NO: 3181005 - RNA, 19 nt, Artificial Sequence
  Description of Artificial Sequence: Synthetic oligonucleotide
guuguuguugcgucggcgg

SEQ ID NO: 3181006 - RNA, 19 nt, Artificial Sequence
  Description of Artificial Sequence: Synthetic oligonucleotide
uguuaaugggagcauuccu

SEQ ID NO: 3181007 - RNA, 19 nt, Artificial Sequence
  Description of Artificial Sequence: Synthetic oligonucleotide
gauggcagauguaaauggg

SEQ ID NO: 3181008 - RNA, 19 nt, Artificial Sequence
  Description of Artificial Sequence: Synthetic oligonucleotide
agcgcgaggagccgcaacc

SEQ ID NO: 3181009 - RNA, 19 nt, Artificial Sequence
  Description of Artificial Sequence: Synthetic oligonucleotide
uggcagauguaaaugggga

SEQ ID NO: 3181010 - RNA, 19 nt, Artificial Sequence
  Description of Artificial Sequence: Synthetic oligonucleotide
gauuguuguuaaugggagc

SEQ ID NO: 3181011 - RNA, 19 nt, Artificial Sequence
  Description of Artificial Sequence: Synthetic oligonucleotide
aaauggggaggccaccugu

SEQ ID NO: 3181012 - RNA, 19 nt, Artificial Sequence
  Description of Artificial Sequence: Synthetic oligonucleotide
uuuuccacacccucuucgc

SEQ ID NO: 3181013 - RNA, 19 nt, Artificial Sequence
  Description of Artificial Sequence: Synthetic oligonucleotide
augacauucauggggauca

SEQ ID NO: 3181014 - RNA, 19 nt, Artificial Sequence
  Description of Artificial Sequence: Synthetic oligonucleotide
gaucauuuuccacacccuc

SEQ ID NO: 3181015 - RNA, 19 nt, Artificial Sequence
  Description of Artificial Sequence: Synthetic oligonucleotide
ccuugauuguuguuaaugg

SEQ ID NO: 3181016 - RNA, 19 nt, Artificial Sequence
  Description of Artificial Sequence: Synthetic oligonucleotide
accugucucagcgaaggcc

SEQ ID NO: 3181017 - RNA, 19 nt, Artificial Sequence
  Description of Artificial Sequence: Synthetic oligonucleotide
gggaucauuuuccacaccc

SEQ ID NO: 3181018 - RNA, 19 nt, Artificial Sequence
  Description of Artificial Sequence: Synthetic oligonucleotide
gauguaaauggggaggcca

SEQ ID NO: 3181019 - RNA, 19 nt, Artificial Sequence
  Description of Artificial Sequence: Synthetic oligonucleotide
ggaucuucagcuuagccca

SEQ ID NO: 3181020 - RNA, 19 nt, Artificial Sequence
  Description of Artificial Sequence: Synthetic oligonucleotide
uuguuaaugggagcauucc

SEQ ID NO: 3181021 - RNA, 19 nt, Artificial Sequence
  Description of Artificial Sequence: Synthetic oligonucleotide
aaggccaaagcgcgaggag

SEQ ID NO: 3181022 - RNA, 19 nt, Artificial Sequence
  Description of Artificial Sequence: Synthetic oligonucleotide
uaaugggagcauuccucgg

SEQ ID NO: 3181023 - RNA, 19 nt, Artificial Sequence
  Description of Artificial Sequence: Synthetic oligonucleotide
ucauuuuccacacccucuu

SEQ ID NO: 3181024 - RNA, 19 nt, Artificial Sequence
  Description of Artificial Sequence: Synthetic oligonucleotide
guuaaugggagcauuccuc

SEQ ID NO: 3181025 - RNA, 19 nt, Artificial Sequence
  Description of Artificial Sequence: Synthetic oligonucleotide
ucuugcuggaugacauuca

SEQ ID NO: 3181026 - RNA, 19 nt, Artificial Sequence
  Description of Artificial Sequence: Synthetic oligonucleotide
auggcagauguaaaugggg

SEQ ID NO: 3181027 - RNA, 19 nt, Artificial Sequence
  Description of Artificial Sequence: Synthetic oligonucleotide
aggccaaagcgcgaggagc

SEQ ID NO: 3181028 - RNA, 19 nt, Artificial Sequence
  Description of Artificial Sequence: Synthetic oligonucleotide
cagcgaaggccaaagcgcg

SEQ ID NO: 3181029 - RNA, 19 nt, Artificial Sequence
  Description of Artificial Sequence: Synthetic oligonucleotide
uuuccacacccucuucgcc

SEQ ID NO: 3181030 - RNA, 19 nt, Artificial Sequence
  Description of Artificial Sequence: Synthetic oligonucleotide
gaugggucuugcuggauga

SEQ ID NO: 3181031 - RNA, 19 nt, Artificial Sequence
  Description of Artificial Sequence: Synthetic oligonucleotide
agauguaaauggggaggcc

SEQ ID NO: 3181032 - RNA, 19 nt, Artificial Sequence
  Description of Artificial Sequence: Synthetic oligonucleotide
uucgccuugauuguuguua

SEQ ID NO: 3181033 - RNA, 19 nt, Artificial Sequence
  Description of Artificial Sequence: Synthetic oligonucleotide
gcagauguaaauggggagg

SEQ ID NO: 3181034 - RNA, 19 nt, Artificial Sequence
  Description of Artificial Sequence: Synthetic oligonucleotide
cagauguaaauggggaggc

SEQ ID NO: 3181035 - RNA, 19 nt, Artificial Sequence
  Description of Artificial Sequence: Synthetic oligonucleotide
ucuucagcuuagcccacug

SEQ ID NO: 3181036 - RNA, 19 nt, Artificial Sequence
  Description of Artificial Sequence: Synthetic oligonucleotide
auguaaauggggaggccac

SEQ ID NO: 3181037 - RNA, 19 nt, Artificial Sequence
  Description of Artificial Sequence: Synthetic oligonucleotide
uuccugauggcagauguaa

SEQ ID NO: 3181038 - RNA, 19 nt, Artificial Sequence
  Description of Artificial Sequence: Synthetic oligonucleotide
uaaauggggaggccaccug

SEQ ID NO: 3181039 - RNA, 19 nt, Artificial Sequence
  Description of Artificial Sequence: Synthetic oligonucleotide
uguuguugcgucggcggcg

SEQ ID NO: 3181040 - RNA, 19 nt, Artificial Sequence
  Description of Artificial Sequence: Synthetic oligonucleotide
aggagccgcaaccacgcgg

SEQ ID NO: 3181041 - RNA, 19 nt, Artificial Sequence
  Description of Artificial Sequence: Synthetic oligonucleotide
uggggaucauuuuccacac

SEQ ID NO: 3181042 - RNA, 19 nt, Artificial Sequence
  Description of Artificial Sequence: Synthetic oligonucleotide
cugauggcagauguaaaug

SEQ ID NO: 3181043 - RNA, 19 nt, Artificial Sequence
  Description of Artificial Sequence: Synthetic oligonucleotide
uuguuguugcgucggcggc

SEQ ID NO: 3181044 - RNA, 19 nt, Artificial Sequence
  Description of Artificial Sequence: Synthetic oligonucleotide
accacgcgguuguuguugc

SEQ ID NO: 3181045 - RNA, 19 nt, Artificial Sequence
  Description of Artificial Sequence: Synthetic oligonucleotide
uuccacacccucuucgccu

SEQ ID NO: 3181046 - RNA, 19 nt, Artificial Sequence
  Description of Artificial Sequence: Synthetic oligonucleotide
aauggggaggccaccuguc

SEQ ID NO: 3181047 - RNA, 19 nt, Artificial Sequence
  Description of Artificial Sequence: Synthetic oligonucleotide
ucauggggaucauuuucca

SEQ ID NO: 3181048 - RNA, 19 nt, Artificial Sequence
  Description of Artificial Sequence: Synthetic oligonucleotide
cagcuuagcccacuggcgc

SEQ ID NO: 3181049 - RNA, 19 nt, Artificial Sequence
  Description of Artificial Sequence: Synthetic oligonucleotide
aaccacgcgguuguuguug

SEQ ID NO: 3181050 - RNA, 19 nt, Artificial Sequence
  Description of Artificial Sequence: Synthetic oligonucleotide
uugcuggaugacauucaug

SEQ ID NO: 3181051 - RNA, 19 nt, Artificial Sequence
  Description of Artificial Sequence: Synthetic oligonucleotide
uguaaauggggaggccacc

SEQ ID NO: 3181052 - RNA, 19 nt, Artificial Sequence
  Description of Artificial Sequence: Synthetic oligonucleotide
guuguuaaugggagcauuc

SEQ ID NO: 3181053 - RNA, 19 nt, Artificial Sequence
  Description of Artificial Sequence: Synthetic oligonucleotide
acauucauggggaucauuu

SEQ ID NO: 3181054 - RNA, 19 nt, Artificial Sequence
  Description of Artificial Sequence: Synthetic oligonucleotide
ggcagauguaaauggggag

SEQ ID NO: 3181055 - RNA, 19 nt, Artificial Sequence
  Description of Artificial Sequence: Synthetic oligonucleotide
gaugacauucauggggauc

SEQ ID NO: 3181056 - RNA, 19 nt, Artificial Sequence
  Description of Artificial Sequence: Synthetic oligonucleotide
aagcgcgaggagccgcaac

SEQ ID NO: 3181057 - RNA, 19 nt, Artificial Sequence
  Description of Artificial Sequence: Synthetic oligonucleotide
cuucagcuuagcccacugg

SEQ ID NO: 3181058 - RNA, 19 nt, Artificial Sequence
  Description of Artificial Sequence: Synthetic oligonucleotide
aucauuuuccacacccucu

SEQ ID NO: 3181059 - RNA, 19 nt, Artificial Sequence
  Description of Artificial Sequence: Synthetic oligonucleotide
ucucagcgaaggccaaagc

SEQ ID NO: 3181060 - RNA, 19 nt, Artificial Sequence
  Description of Artificial Sequence: Synthetic oligonucleotide
cauuccucgguuccugaug

SEQ ID NO: 3181061 - RNA, 19 nt, Artificial Sequence
  Description of Artificial Sequence: Synthetic oligonucleotide
ucuucgccuugauuguugu

SEQ ID NO: 3181062 - RNA, 19 nt, Artificial Sequence
  Description of Artificial Sequence: Synthetic oligonucleotide
cauggggaucauuuuccac

SEQ ID NO: 3181063 - RNA, 19 nt, Artificial Sequence
  Description of Artificial Sequence: Synthetic oligonucleotide
acgcgguuguuguugcguc

SEQ ID NO: 3181064 - RNA, 19 nt, Artificial Sequence
  Description of Artificial Sequence: Synthetic oligonucleotide
uguugcgucggcggcggcg

SEQ ID NO: 3181065 - RNA, 19 nt, Artificial Sequence
  Description of Artificial Sequence: Synthetic oligonucleotide
cucuucgccuugauuguug

SEQ ID NO: 3181066 - RNA, 19 nt, Artificial Sequence
  Description of Artificial Sequence: Synthetic oligonucleotide
uguuguuaaugggagcauu

SEQ ID NO: 3181067 - RNA, 19 nt, Artificial Sequence
  Description of Artificial Sequence: Synthetic oligonucleotide
uccugauggcagauguaaa

SEQ ID NO: 3181068 - RNA, 19 nt, Artificial Sequence
  Description of Artificial Sequence: Synthetic oligonucleotide
cggaucuucagcuuagccc

SEQ ID NO: 3181069 - RNA, 19 nt, Artificial Sequence
  Description of Artificial Sequence: Synthetic oligonucleotide
ucgccuugauuguuguuaa

SEQ ID NO: 3181070 - RNA, 19 nt, Artificial Sequence
  Description of Artificial Sequence: Synthetic oligonucleotide
guuguugcgucggcggcgg

SEQ ID NO: 3181071 - RNA, 19 nt, Artificial Sequence
  Description of Artificial Sequence: Synthetic oligonucleotide
gucucagcgaaggccaaag

SEQ ID NO: 3181072 - RNA, 19 nt, Artificial Sequence
  Description of Artificial Sequence: Synthetic oligonucleotide
gucuugcuggaugacauuc

SEQ ID NO: 3181073 - RNA, 19 nt, Artificial Sequence
  Description of Artificial Sequence: Synthetic oligonucleotide
uccucgguuccugauggca

SEQ ID NO: 3181074 - RNA, 19 nt, Artificial Sequence
  Description of Artificial Sequence: Synthetic oligonucleotide
gccuugauuguuguuaaug

SEQ ID NO: 3181075 - RNA, 19 nt, Artificial Sequence
  Description of Artificial Sequence: Synthetic oligonucleotide
ugggucuugcuggaugaca

SEQ ID NO: 3181076 - RNA, 19 nt, Artificial Sequence
  Description of Artificial Sequence: Synthetic oligonucleotide
gaaggccaaagcgcgagga

SEQ ID NO: 3181077 - RNA, 19 nt, Artificial Sequence
  Description of Artificial Sequence: Synthetic oligonucleotide
gcuggaugacauucauggg

SEQ ID NO: 3181078 - RNA, 19 nt, Artificial Sequence
  Description of Artificial Sequence: Synthetic oligonucleotide
agcccacuggcgcuucagg

SEQ ID NO: 3181079 - RNA, 19 nt, Artificial Sequence
  Description of Artificial Sequence: Synthetic oligonucleotide
agcuuagcccacuggcgcu

SEQ ID NO: 3181080 - RNA, 19 nt, Artificial Sequence
  Description of Artificial Sequence: Synthetic oligonucleotide
caccggaucuucagcuuag

SEQ ID NO: 3181081 - RNA, 19 nt, Artificial Sequence
  Description of Artificial Sequence: Synthetic oligonucleotide
ggaugggucuugcuggaug

SEQ ID NO: 3181082 - RNA, 19 nt, Artificial Sequence
  Description of Artificial Sequence: Synthetic oligonucleotide
gggagcauuccucgguucc

SEQ ID NO: 3181083 - RNA, 19 nt, Artificial Sequence
  Description of Artificial Sequence: Synthetic oligonucleotide
gguuguuguugcgucggcg

SEQ ID NO: 3181084 - RNA, 19 nt, Artificial Sequence
  Description of Artificial Sequence: Synthetic oligonucleotide
uggauauucaauaaagugg

SEQ ID NO: 3181085 - RNA, 19 nt, Artificial Sequence
  Description of Artificial Sequence: Synthetic oligonucleotide
uuugcuugaagauugauag

SEQ ID NO: 3181086 - RNA, 19 nt, Artificial Sequence
  Description of Artificial Sequence: Synthetic oligonucleotide
aacauauugcaacauaagg

SEQ ID NO: 3181087 - RNA, 19 nt, Artificial Sequence
  Description of Artificial Sequence: Synthetic oligonucleotide
ucaauaaaguggcugaugg

SEQ ID NO: 3181088 - RNA, 19 nt, Artificial Sequence
  Description of Artificial Sequence: Synthetic oligonucleotide
ucauuuauggaauuggggc

SEQ ID NO: 3181089 - RNA, 19 nt, Artificial Sequence
  Description of Artificial Sequence: Synthetic oligonucleotide
caaguuuucuaaaauagcc

SEQ ID NO: 3181090 - RNA, 19 nt, Artificial Sequence
  Description of Artificial Sequence: Synthetic oligonucleotide
ugcaaguuuucuaaaauag

SEQ ID NO: 3181091 - RNA, 19 nt, Artificial Sequence
  Description of Artificial Sequence: Synthetic oligonucleotide
uugaagauugauaguaacg

SEQ ID NO: 3181092 - RNA, 19 nt, Artificial Sequence
  Description of Artificial Sequence: Synthetic oligonucleotide
acauauugcaacauaaggc

SEQ ID NO: 3181093 - RNA, 19 nt, Artificial Sequence
  Description of Artificial Sequence: Synthetic oligonucleotide
aagauugauaguaacgugg

SEQ ID NO: 3181094 - RNA, 19 nt, Artificial Sequence
  Description of Artificial Sequence: Synthetic oligonucleotide
uauugcaacauaaggcugg

SEQ ID NO: 3181095 - RNA, 19 nt, Artificial Sequence
  Description of Artificial Sequence: Synthetic oligonucleotide
uaaaauagccaucuguugu

SEQ ID NO: 3181096 - RNA, 19 nt, Artificial Sequence
  Description of Artificial Sequence: Synthetic oligonucleotide
uucauuuauggaauugggg

SEQ ID NO: 3181097 - RNA, 19 nt, Artificial Sequence
  Description of Artificial Sequence: Synthetic oligonucleotide
ugcaacauaaggcugggag

SEQ ID NO: 3181098 - RNA, 19 nt, Artificial Sequence
  Description of Artificial Sequence: Synthetic oligonucleotide
aauaaaguggcugauggga

SEQ ID NO: 3181099 - RNA, 19 nt, Artificial Sequence
  Description of Artificial Sequence: Synthetic oligonucleotide
cauacauacauucuaggag

SEQ ID NO: 3181100 - RNA, 19 nt, Artificial Sequence
  Description of Artificial Sequence: Synthetic oligonucleotide
uauucaauaaaguggcuga

SEQ ID NO: 3181101 - RNA, 19 nt, Artificial Sequence
  Description of Artificial Sequence: Synthetic oligonucleotide
uucuaaaauagccaucugu

SEQ ID NO: 3181102 - RNA, 19 nt, Artificial Sequence
  Description of Artificial Sequence: Synthetic oligonucleotide
uuuucuaaaauagccaucu

SEQ ID NO: 3181103 - RNA, 19 nt, Artificial Sequence
  Description of Artificial Sequence: Synthetic oligonucleotide
ucuaaaauagccaucuguu

SEQ ID NO: 3181104 - RNA, 19 nt, Artificial Sequence
  Description of Artificial Sequence: Synthetic oligonucleotide
auacauacauucuaggagu

SEQ ID NO: 3181105 - RNA, 19 nt, Artificial Sequence
  Description of Artificial Sequence: Synthetic oligonucleotide
cuggauauucaauaaagug

SEQ ID NO: 3181106 - RNA, 19 nt, Artificial Sequence
  Description of Artificial Sequence: Synthetic oligonucleotide
ugaagauugauaguaacgu

SEQ ID NO: 3181107 - RNA, 19 nt, Artificial Sequence
  Description of Artificial Sequence: Synthetic oligonucleotide
auaaggcugggagagaacc

SEQ ID NO: 3181108 - RNA, 19 nt, Artificial Sequence
  Description of Artificial Sequence: Synthetic oligonucleotide
uggagguuggcauacauac

SEQ ID NO: 3181109 - RNA, 19 nt, Artificial Sequence
  Description of Artificial Sequence: Synthetic oligonucleotide
cauucuaggaguccuaggc

SEQ ID NO: 3181110 - RNA, 19 nt, Artificial Sequence
  Description of Artificial Sequence: Synthetic oligonucleotide
accauuguugcuuuccuuc

SEQ ID NO: 3181111 - RNA, 19 nt, Artificial Sequence
  Description of Artificial Sequence: Synthetic oligonucleotide
aaaacauauugcaacauaa

SEQ ID NO: 3181112 - RNA, 19 nt, Artificial Sequence
  Description of Artificial Sequence: Synthetic oligonucleotide
auuccuugggcuucuggcc

SEQ ID NO: 3181113 - RNA, 19 nt, Artificial Sequence
  Description of Artificial Sequence: Synthetic oligonucleotide
ugggagagaaccauuguug

SEQ ID NO: 3181114 - RNA, 19 nt, Artificial Sequence
  Description of Artificial Sequence: Synthetic oligonucleotide
aguucauuuauggaauugg

SEQ ID NO: 3181115 - RNA, 19 nt, Artificial Sequence
  Description of Artificial Sequence: Synthetic oligonucleotide
aauagccaucuguuguugg

SEQ ID NO: 3181116 - RNA, 19 nt, Artificial Sequence
  Description of Artificial Sequence: Synthetic oligonucleotide
aguuuucuaaaauagccau

SEQ ID NO: 3181117 - RNA, 19 nt, Artificial Sequence
  Description of Artificial Sequence: Synthetic oligonucleotide
cuguuguugggcaagcugg

SEQ ID NO: 3181118 - RNA, 19 nt, Artificial Sequence
  Description of Artificial Sequence: Synthetic oligonucleotide
uuuguugucuggauauuca

SEQ ID NO: 3181119 - RNA, 19 nt, Artificial Sequence
  Description of Artificial Sequence: Synthetic oligonucleotide
ucuggauauucaauaaagu

SEQ ID NO: 3181120 - RNA, 19 nt, Artificial Sequence
  Description of Artificial Sequence: Synthetic oligonucleotide
augggaauuugcuugaaga

SEQ ID NO: 3181121 - RNA, 19 nt, Artificial Sequence
  Description of Artificial Sequence: Synthetic oligonucleotide
aaacauauugcaacauaag

SEQ ID NO: 3181122 - RNA, 19 nt, Artificial Sequence
  Description of Artificial Sequence: Synthetic oligonucleotide
gaagauugauaguaacgug

SEQ ID NO: 3181123 - RNA, 19 nt, Artificial Sequence
  Description of Artificial Sequence: Synthetic oligonucleotide
agaaccauuguugcuuucc

SEQ ID NO: 3181124 - RNA, 19 nt, Artificial Sequence
  Description of Artificial Sequence: Synthetic oligonucleotide
auauucaauaaaguggcug

SEQ ID NO: 3181125 - RNA, 19 nt, Artificial Sequence
  Description of Artificial Sequence: Synthetic oligonucleotide
uggcauacauacauucuag

SEQ ID NO: 3181126 - RNA, 19 nt, Artificial Sequence
  Description of Artificial Sequence: Synthetic oligonucleotide
aaaauagccaucuguuguu

SEQ ID NO: 3181127 - RNA, 19 nt, Artificial Sequence
  Description of Artificial Sequence: Synthetic oligonucleotide
ggauauucaauaaaguggc

SEQ ID NO: 3181128 - RNA, 19 nt, Artificial Sequence
  Description of Artificial Sequence: Synthetic oligonucleotide
cuugaagauugauaguaac

SEQ ID NO: 3181129 - RNA, 19 nt, Artificial Sequence
  Description of Artificial Sequence: Synthetic oligonucleotide
ucuguuguugggcaagcug

SEQ ID NO: 3181130 - RNA, 19 nt, Artificial Sequence
  Description of Artificial Sequence: Synthetic oligonucleotide
cuaaaauagccaucuguug

SEQ ID NO: 3181131 - RNA, 19 nt, Artificial Sequence
  Description of Artificial Sequence: Synthetic oligonucleotide
aaguuuucuaaaauagcca

SEQ ID NO: 3181132 - RNA, 19 nt, Artificial Sequence
  Description of Artificial Sequence: Synthetic oligonucleotide
auagccaucuguuguuggg

SEQ ID NO: 3181133 - RNA, 19 nt, Artificial Sequence
  Description of Artificial Sequence: Synthetic oligonucleotide
ucuggccagcuccugaagg

SEQ ID NO: 3181134 - RNA, 19 nt, Artificial Sequence
  Description of Artificial Sequence: Synthetic oligonucleotide
auggaauuggggcagguga

SEQ ID NO: 3181135 - RNA, 19 nt, Artificial Sequence
  Description of Artificial Sequence: Synthetic oligonucleotide
aagguaucuuuguugucug

SEQ ID NO: 3181136 - RNA, 19 nt, Artificial Sequence
  Description of Artificial Sequence: Synthetic oligonucleotide
gauugauaguaacgugggg

SEQ ID NO: 3181137 - RNA, 19 nt, Artificial Sequence
  Description of Artificial Sequence: Synthetic oligonucleotide
ugggcuucuggccagcucc

SEQ ID NO: 3181138 - RNA, 19 nt, Artificial Sequence
  Description of Artificial Sequence: Synthetic oligonucleotide
gucuggauauucaauaaag

SEQ ID NO: 3181139 - RNA, 19 nt, Artificial Sequence
  Description of Artificial Sequence: Synthetic oligonucleotide
cauuccuugggcuucuggc

SEQ ID NO: 3181140 - RNA, 19 nt, Artificial Sequence
  Description of Artificial Sequence: Synthetic oligonucleotide
agauugauaguaacguggg

SEQ ID NO: 3181141 - RNA, 19 nt, Artificial Sequence
  Description of Artificial Sequence: Synthetic oligonucleotide
uguuguugggcaagcuggg

SEQ ID NO: 3181142 - RNA, 19 nt, Artificial Sequence
  Description of Artificial Sequence: Synthetic oligonucleotide
cauauugcaacauaaggcu

SEQ ID NO: 3181143 - RNA, 19 nt, Artificial Sequence
  Description of Artificial Sequence: Synthetic oligonucleotide
uuggcauacauacauucua

SEQ ID NO: 3181144 - RNA, 19 nt, Artificial Sequence
  Description of Artificial Sequence: Synthetic oligonucleotide
ugauagggaugcuugcaag

SEQ ID NO: 3181145 - RNA, 19 nt, Artificial Sequence
  Description of Artificial Sequence: Synthetic oligonucleotide
guucauuuauggaauuggg

SEQ ID NO: 3181146 - RNA, 19 nt, Artificial Sequence
  Description of Artificial Sequence: Synthetic oligonucleotide
auuuauggaauuggggcag

SEQ ID NO: 3181147 - RNA, 19 nt, Artificial Sequence
  Description of Artificial Sequence: Synthetic oligonucleotide
aucuuuguugucuggauau

SEQ ID NO: 3181148 - RNA, 19 nt, Artificial Sequence
  Description of Artificial Sequence: Synthetic oligonucleotide
ugcuugaagauugauagua

SEQ ID NO: 3181149 - RNA, 19 nt, Artificial Sequence
  Description of Artificial Sequence: Synthetic oligonucleotide
ggaauuugcuugaagauug

SEQ ID NO: 3181150 - RNA, 19 nt, Artificial Sequence
  Description of Artificial Sequence: Synthetic oligonucleotide
caacauaaggcugggagag

SEQ ID NO: 3181151 - RNA, 19 nt, Artificial Sequence
  Description of Artificial Sequence: Synthetic oligonucleotide
caauaaaguggcugauggg

SEQ ID NO: 3181152 - RNA, 19 nt, Artificial Sequence
  Description of Artificial Sequence: Synthetic oligonucleotide
aguccuaggcauuccuugg

SEQ ID NO: 3181153 - RNA, 19 nt, Artificial Sequence
  Description of Artificial Sequence: Synthetic oligonucleotide
gcugaugggaauuugcuug

SEQ ID NO: 3181154 - RNA, 19 nt, Artificial Sequence
  Description of Artificial Sequence: Synthetic oligonucleotide
uguugcuuuccuucccagg

SEQ ID NO: 3181155 - RNA, 19 nt, Artificial Sequence
  Description of Artificial Sequence: Synthetic oligonucleotide
gaugggaauuugcuugaag

SEQ ID NO: 3181156 - RNA, 19 nt, Artificial Sequence
  Description of Artificial Sequence: Synthetic oligonucleotide
ugucuggauauucaauaaa

SEQ ID NO: 3181157 - RNA, 19 nt, Artificial Sequence
  Description of Artificial Sequence: Synthetic oligonucleotide
guugugauagggaugcuug

SEQ ID NO: 3181158 - RNA, 19 nt, Artificial Sequence
  Description of Artificial Sequence: Synthetic oligonucleotide
cauuuauggaauuggggca

SEQ ID NO: 3181159 - RNA, 19 nt, Artificial Sequence
  Description of Artificial Sequence: Synthetic oligonucleotide
uugcaaguuuucuaaaaua

SEQ ID NO: 3181160 - RNA, 19 nt, Artificial Sequence
  Description of Artificial Sequence: Synthetic oligonucleotide
acauacauucuaggagucc

SEQ ID NO: 3181161 - RNA, 19 nt, Artificial Sequence
  Description of Artificial Sequence: Synthetic oligonucleotide
gaguccuaggcauuccuug

SEQ ID NO: 3181162 - RNA, 19 nt, Artificial Sequence
  Description of Artificial Sequence: Synthetic oligonucleotide
uccaguugugauagggaug

SEQ ID NO: 3181163 - RNA, 19 nt, Artificial Sequence
  Description of Artificial Sequence: Synthetic oligonucleotide
uguugggcaagcugggucu

SEQ ID NO: 3181164 - RNA, 19 nt, Artificial Sequence
  Description of Artificial Sequence: Synthetic oligonucleotide
uucaauaaaguggcugaug

SEQ ID NO: 3181165 - RNA, 19 nt, Artificial Sequence
  Description of Artificial Sequence: Synthetic oligonucleotide
uuucuaaaauagccaucug

SEQ ID NO: 3181166 - RNA, 19 nt, Artificial Sequence
  Description of Artificial Sequence: Synthetic oligonucleotide
ugaagcuggagguuggcau

SEQ ID NO: 3181167 - RNA, 19 nt, Artificial Sequence
  Description of Artificial Sequence: Synthetic oligonucleotide
ugggaauuugcuugaagau

SEQ ID NO: 3181168 - RNA, 19 nt, Artificial Sequence
  Description of Artificial Sequence: Synthetic oligonucleotide
uucuaggaguccuaggcau

SEQ ID NO: 3181169 - RNA, 19 nt, Artificial Sequence
  Description of Artificial Sequence: Synthetic oligonucleotide
guugucuggauauucaaua

SEQ ID NO: 3181170 - RNA, 19 nt, Artificial Sequence
  Description of Artificial Sequence: Synthetic oligonucleotide
uguugucuggauauucaau

SEQ ID NO: 3181171 - RNA, 19 nt, Artificial Sequence
  Description of Artificial Sequence: Synthetic oligonucleotide
uacauucuaggaguccuag

SEQ ID NO: 3181172 - RNA, 19 nt, Artificial Sequence
  Description of Artificial Sequence: Synthetic oligonucleotide
aaauagccaucuguuguug

SEQ ID NO: 3181173 - RNA, 19 nt, Artificial Sequence
  Description of Artificial Sequence: Synthetic oligonucleotide
acauucuaggaguccuagg

SEQ ID NO: 3181174 - RNA, 19 nt, Artificial Sequence
  Description of Artificial Sequence: Synthetic oligonucleotide
uuccaguugugauagggau

SEQ ID NO: 3181175 - RNA, 19 nt, Artificial Sequence
  Description of Artificial Sequence: Synthetic oligonucleotide
cugggucugaagcuggagg

SEQ ID NO: 3181176 - RNA, 19 nt, Artificial Sequence
  Description of Artificial Sequence: Synthetic oligonucleotide
uaucuuuguugucuggaua

SEQ ID NO: 3181177 - RNA, 19 nt, Artificial Sequence
  Description of Artificial Sequence: Synthetic oligonucleotide
uugucuggauauucaauaa

SEQ ID NO: 3181178 - RNA, 19 nt, Artificial Sequence
  Description of Artificial Sequence: Synthetic oligonucleotide
auucuaggaguccuaggca

SEQ ID NO: 3181179 - RNA, 19 nt, Artificial Sequence
  Description of Artificial Sequence: Synthetic oligonucleotide
gaugcuugcaaguuuucua

SEQ ID NO: 3181180 - RNA, 19 nt, Artificial Sequence
  Description of Artificial Sequence: Synthetic oligonucleotide
ugggucugaagcuggaggu

SEQ ID NO: 3181181 - RNA, 19 nt, Artificial Sequence
  Description of Artificial Sequence: Synthetic oligonucleotide
auuguugcuuuccuuccca

SEQ ID NO: 3181182 - RNA, 19 nt, Artificial Sequence
  Description of Artificial Sequence: Synthetic oligonucleotide
uacauacauucuaggaguc

SEQ ID NO: 3181183 - RNA, 19 nt, Artificial Sequence
  Description of Artificial Sequence: Synthetic oligonucleotide
augcuugcaaguuuucuaa

SEQ ID NO: 3181184 - RNA, 19 nt, Artificial Sequence
  Description of Artificial Sequence: Synthetic oligonucleotide
aauugagaaauccagcccc

SEQ ID NO: 3181185 - RNA, 19 nt, Artificial Sequence
  Description of Artificial Sequence: Synthetic oligonucleotide
aaauacaauugagaaaucc

SEQ ID NO: 3181186 - RNA, 19 nt, Artificial Sequence
  Description of Artificial Sequence: Synthetic oligonucleotide
acaauugagaaauccagcc

SEQ ID NO: 3181187 - RNA, 19 nt, Artificial Sequence
  Description of Artificial Sequence: Synthetic oligonucleotide
aauucugccucuuugaaug

SEQ ID NO: 3181188 - RNA, 19 nt, Artificial Sequence
  Description of Artificial Sequence: Synthetic oligonucleotide
aucuccauuauucuaauuc

SEQ ID NO: 3181189 - RNA, 19 nt, Artificial Sequence
  Description of Artificial Sequence: Synthetic oligonucleotide
uuugaaugaacucugucca

SEQ ID NO: 3181190 - RNA, 19 nt, Artificial Sequence
  Description of Artificial Sequence: Synthetic oligonucleotide
uauucuaauucccuucugg

SEQ ID NO: 3181191 - RNA, 19 nt, Artificial Sequence
  Description of Artificial Sequence: Synthetic oligonucleotide
cuuugaaugaacucugucc

SEQ ID NO: 3181192 - RNA, 19 nt, Artificial Sequence
  Description of Artificial Sequence: Synthetic oligonucleotide
uccaaaauacaauugagaa

SEQ ID NO: 3181193 - RNA, 19 nt, Artificial Sequence
  Description of Artificial Sequence: Synthetic oligonucleotide
ugaacucuguccaauuugg

SEQ ID NO: 3181194 - RNA, 19 nt, Artificial Sequence
  Description of Artificial Sequence: Synthetic oligonucleotide
uuaagaaugcacuagcaaa

SEQ ID NO: 3181195 - RNA, 19 nt, Artificial Sequence
  Description of Artificial Sequence: Synthetic oligonucleotide
uuuccaaaauacaauugag

SEQ ID NO: 3181196 - RNA, 19 nt, Artificial Sequence
  Description of Artificial Sequence: Synthetic oligonucleotide
ucuaauucccuucugggcu

SEQ ID NO: 3181197 - RNA, 19 nt, Artificial Sequence
  Description of Artificial Sequence: Synthetic oligonucleotide
aaaaguuuccaaaauacaa

SEQ ID NO: 3181198 - RNA, 19 nt, Artificial Sequence
  Description of Artificial Sequence: Synthetic oligonucleotide
auucuaauucccuucuggg

SEQ ID NO: 3181199 - RNA, 19 nt, Artificial Sequence
  Description of Artificial Sequence: Synthetic oligonucleotide
aauacaauugagaaaucca

SEQ ID NO: 3181200 - RNA, 19 nt, Artificial Sequence
  Description of Artificial Sequence: Synthetic oligonucleotide
ucuccauuauucuaauucc

SEQ ID NO: 3181201 - RNA, 19 nt, Artificial Sequence
  Description of Artificial Sequence: Synthetic oligonucleotide
uuccaaaauacaauugaga

SEQ ID NO: 3181202 - RNA, 19 nt, Artificial Sequence
  Description of Artificial Sequence: Synthetic oligonucleotide
uacaauugagaaauccagc

SEQ ID NO: 3181203 - RNA, 19 nt, Artificial Sequence
  Description of Artificial Sequence: Synthetic oligonucleotide
uugaaauucugccucuuug

SEQ ID NO: 3181204 - RNA, 19 nt, Artificial Sequence
  Description of Artificial Sequence: Synthetic oligonucleotide
uaagaaugcacuagcaaaa

SEQ ID NO: 3181205 - RNA, 19 nt, Artificial Sequence
  Description of Artificial Sequence: Synthetic oligonucleotide
uccaauuuggauuuuccac

SEQ ID NO: 3181206 - RNA, 19 nt, Artificial Sequence
  Description of Artificial Sequence: Synthetic oligonucleotide
uguuccuugagcagcaucu

SEQ ID NO: 3181207 - RNA, 19 nt, Artificial Sequence
  Description of Artificial Sequence: Synthetic oligonucleotide
aaguuuccaaaauacaauu

SEQ ID NO: 3181208 - RNA, 19 nt, Artificial Sequence
  Description of Artificial Sequence: Synthetic oligonucleotide
auuuuccacacuuucccgg

SEQ ID NO: 3181209 - RNA, 19 nt, Artificial Sequence
  Description of Artificial Sequence: Synthetic oligonucleotide
ugcacuagcaaaaguuucc

SEQ ID NO: 3181210 - RNA, 19 nt, Artificial Sequence
  Description of Artificial Sequence: Synthetic oligonucleotide
cugugauugaaauucugcc

SEQ ID NO: 3181211 - RNA, 19 nt, Artificial Sequence
  Description of Artificial Sequence: Synthetic oligonucleotide
ugugauugaaauucugccu

SEQ ID NO: 3181212 - RNA, 19 nt, Artificial Sequence
  Description of Artificial Sequence: Synthetic oligonucleotide
aaggaggcauacugugucc

SEQ ID NO: 3181213 - RNA, 19 nt, Artificial Sequence
  Description of Artificial Sequence: Synthetic oligonucleotide
auuauucuaauucccuucu

SEQ ID NO: 3181214 - RNA, 19 nt, Artificial Sequence
  Description of Artificial Sequence: Synthetic oligonucleotide
guuuccaaaauacaauuga

SEQ ID NO: 3181215 - RNA, 19 nt, Artificial Sequence
  Description of Artificial Sequence: Synthetic oligonucleotide
ugaaauucugccucuuuga

SEQ ID NO: 3181216 - RNA, 19 nt, Artificial Sequence
  Description of Artificial Sequence: Synthetic oligonucleotide
acagacucuucccucaagg

SEQ ID NO: 3181217 - RNA, 19 nt, Artificial Sequence
  Description of Artificial Sequence: Synthetic oligonucleotide
ucuuaagaaugcacuagca

SEQ ID NO: 3181218 - RNA, 19 nt, Artificial Sequence
  Description of Artificial Sequence: Synthetic oligonucleotide
aauccagccccugugauug

SEQ ID NO: 3181219 - RNA, 19 nt, Artificial Sequence
  Description of Artificial Sequence: Synthetic oligonucleotide
uuucccggaagacagacuc

SEQ ID NO: 3181220 - RNA, 19 nt, Artificial Sequence
  Description of Artificial Sequence: Synthetic oligonucleotide
gauuuuccacacuuucccg

SEQ ID NO: 3181221 - RNA, 19 nt, Artificial Sequence
  Description of Artificial Sequence: Synthetic oligonucleotide
gacucuucccucaaggagg

SEQ ID NO: 3181222 - RNA, 19 nt, Artificial Sequence
  Description of Artificial Sequence: Synthetic oligonucleotide
auacaauugagaaauccag

SEQ ID NO: 3181223 - RNA, 19 nt, Artificial Sequence
  Description of Artificial Sequence: Synthetic oligonucleotide
uccauuauucuaauucccu

SEQ ID NO: 3181224 - RNA, 19 nt, Artificial Sequence
  Description of Artificial Sequence: Synthetic oligonucleotide
aaaguuuccaaaauacaau

SEQ ID NO: 3181225 - RNA, 19 nt, Artificial Sequence
  Description of Artificial Sequence: Synthetic oligonucleotide
uggauuuuccacacuuucc

SEQ ID NO: 3181226 - RNA, 19 nt, Artificial Sequence
  Description of Artificial Sequence: Synthetic oligonucleotide
acuagcaaaaguuuccaaa

SEQ ID NO: 3181227 - RNA, 19 nt, Artificial Sequence
  Description of Artificial Sequence: Synthetic oligonucleotide
agcagcaucuccauuauuc

SEQ ID NO: 3181228 - RNA, 19 nt, Artificial Sequence
  Description of Artificial Sequence: Synthetic oligonucleotide
uucuaauucccuucugggc

SEQ ID NO: 3181229 - RNA, 19 nt, Artificial Sequence
  Description of Artificial Sequence: Synthetic oligonucleotide
cauacuguguccacgugag

SEQ ID NO: 3181230 - RNA, 19 nt, Artificial Sequence
  Description of Artificial Sequence: Synthetic oligonucleotide
ugucuuaagaaugcacuag

SEQ ID NO: 3181231 - RNA, 19 nt, Artificial Sequence
  Description of Artificial Sequence: Synthetic oligonucleotide
uguccaauuuggauuuucc

SEQ ID NO: 3181232 - RNA, 19 nt, Artificial Sequence
  Description of Artificial Sequence: Synthetic oligonucleotide
cauuauucuaauucccuuc

SEQ ID NO: 3181233 - RNA, 19 nt, Artificial Sequence
  Description of Artificial Sequence: Synthetic oligonucleotide
aacucuguccaauuuggau

SEQ ID NO: 3181234 - RNA, 19 nt, Artificial Sequence
  Description of Artificial Sequence: Synthetic oligonucleotide
caaaauacaauugagaaau

SEQ ID NO: 3181235 - RNA, 19 nt, Artificial Sequence
  Description of Artificial Sequence: Synthetic oligonucleotide
uuggauuuuccacacuuuc

SEQ ID NO: 3181236 - RNA, 19 nt, Artificial Sequence
  Description of Artificial Sequence: Synthetic oligonucleotide
aaauucugccucuuugaau

SEQ ID NO: 3181237 - RNA, 19 nt, Artificial Sequence
  Description of Artificial Sequence: Synthetic oligonucleotide
caauugagaaauccagccc

SEQ ID NO: 3181238 - RNA, 19 nt, Artificial Sequence
  Description of Artificial Sequence: Synthetic oligonucleotide
augaacucuguccaauuug

SEQ ID NO: 3181239 - RNA, 19 nt, Artificial Sequence
  Description of Artificial Sequence: Synthetic oligonucleotide
agacucuucccucaaggag

SEQ ID NO: 3181240 - RNA, 19 nt, Artificial Sequence
  Description of Artificial Sequence: Synthetic oligonucleotide
aagaaugcacuagcaaaag

SEQ ID NO: 3181241 - RNA, 19 nt, Artificial Sequence
  Description of Artificial Sequence: Synthetic oligonucleotide
gugauugaaauucugccuc

SEQ ID NO: 3181242 - RNA, 19 nt, Artificial Sequence
  Description of Artificial Sequence: Synthetic oligonucleotide
auuuggauuuuccacacuu

SEQ ID NO: 3181243 - RNA, 19 nt, Artificial Sequence
  Description of Artificial Sequence: Synthetic oligonucleotide
gucuuaagaaugcacuagc

SEQ ID NO: 3181244 - RNA, 19 nt, Artificial Sequence
  Description of Artificial Sequence: Synthetic oligonucleotide
aagacagacucuucccuca

SEQ ID NO: 3181245 - RNA, 19 nt, Artificial Sequence
  Description of Artificial Sequence: Synthetic oligonucleotide
uacuguguccacgugaggc

SEQ ID NO: 3181246 - RNA, 19 nt, Artificial Sequence
  Description of Artificial Sequence: Synthetic oligonucleotide
accacacuguuccuugagc

SEQ ID NO: 3181247 - RNA, 19 nt, Artificial Sequence
  Description of Artificial Sequence: Synthetic oligonucleotide
aaugaacucuguccaauuu

SEQ ID NO: 3181248 - RNA, 19 nt, Artificial Sequence
  Description of Artificial Sequence: Synthetic oligonucleotide
ggauuuuccacacuuuccc

SEQ ID NO: 3181249 - RNA, 19 nt, Artificial Sequence
  Description of Artificial Sequence: Synthetic oligonucleotide
cuccauuauucuaauuccc

SEQ ID NO: 3181250 - RNA, 19 nt, Artificial Sequence
  Description of Artificial Sequence: Synthetic oligonucleotide
ucuuugaaugaacucuguc

SEQ ID NO: 3181251 - RNA, 19 nt, Artificial Sequence
  Description of Artificial Sequence: Synthetic oligonucleotide
agugacuccguauagccau

SEQ ID NO: 3181252 - RNA, 19 nt, Artificial Sequence
  Description of Artificial Sequence: Synthetic oligonucleotide
uugagcagcaucuccauua

SEQ ID NO: 3181253 - RNA, 19 nt, Artificial Sequence
  Description of Artificial Sequence: Synthetic oligonucleotide
acacuguuccuugagcagc

SEQ ID NO: 3181254 - RNA, 19 nt, Artificial Sequence
  Description of Artificial Sequence: Synthetic oligonucleotide
aaaauacaauugagaaauc

SEQ ID NO: 3181255 - RNA, 19 nt, Artificial Sequence
  Description of Artificial Sequence: Synthetic oligonucleotide
uccuugagcagcaucucca

SEQ ID NO: 3181256 - RNA, 19 nt, Artificial Sequence
  Description of Artificial Sequence: Synthetic oligonucleotide
gagaaauccagccccugug

SEQ ID NO: 3181257 - RNA, 19 nt, Artificial Sequence
  Description of Artificial Sequence: Synthetic oligonucleotide
agcaaaaguuuccaaaaua

SEQ ID NO: 3181258 - RNA, 19 nt, Artificial Sequence
  Description of Artificial Sequence: Synthetic oligonucleotide
caauuuggauuuuccacac

SEQ ID NO: 3181259 - RNA, 19 nt, Artificial Sequence
  Description of Artificial Sequence: Synthetic oligonucleotide
uuauucuaauucccuucug

SEQ ID NO: 3181260 - RNA, 19 nt, Artificial Sequence
  Description of Artificial Sequence: Synthetic oligonucleotide
cucaaggaggcauacugug

SEQ ID NO: 3181261 - RNA, 19 nt, Artificial Sequence
  Description of Artificial Sequence: Synthetic oligonucleotide
caaaaguuuccaaaauaca

SEQ ID NO: 3181262 - RNA, 19 nt, Artificial Sequence
  Description of Artificial Sequence: Synthetic oligonucleotide
acucuguccaauuuggauu

SEQ ID NO: 3181263 - RNA, 19 nt, Artificial Sequence
  Description of Artificial Sequence: Synthetic oligonucleotide
aaccacacuguuccuugag

SEQ ID NO: 3181264 - RNA, 19 nt, Artificial Sequence
  Description of Artificial Sequence: Synthetic oligonucleotide
cuagcaaaaguuuccaaaa

SEQ ID NO: 3181265 - RNA, 19 nt, Artificial Sequence
  Description of Artificial Sequence: Synthetic oligonucleotide
aaugcacuagcaaaaguuu

SEQ ID NO: 3181266 - RNA, 19 nt, Artificial Sequence
  Description of Artificial Sequence: Synthetic oligonucleotide
uuuuccacacuuucccgga

SEQ ID NO: 3181267 - RNA, 19 nt, Artificial Sequence
  Description of Artificial Sequence: Synthetic oligonucleotide
ugagaaauccagccccugu

SEQ ID NO: 3181268 - RNA, 19 nt, Artificial Sequence
  Description of Artificial Sequence: Synthetic oligonucleotide
aauuuggauuuuccacacu

SEQ ID NO: 3181269 - RNA, 19 nt, Artificial Sequence
  Description of Artificial Sequence: Synthetic oligonucleotide
gcaaaaguuuccaaaauac

SEQ ID NO: 3181270 - RNA, 19 nt, Artificial Sequence
  Description of Artificial Sequence: Synthetic oligonucleotide
ugauugaaauucugccucu

SEQ ID NO: 3181271 - RNA, 19 nt, Artificial Sequence
  Description of Artificial Sequence: Synthetic oligonucleotide
ucaaggaggcauacugugu

SEQ ID NO: 3181272 - RNA, 19 nt, Artificial Sequence
  Description of Artificial Sequence: Synthetic oligonucleotide
acuuucccggaagacagac

SEQ ID NO: 3181273 - RNA, 19 nt, Artificial Sequence
  Description of Artificial Sequence: Synthetic oligonucleotide
uuccuugagcagcaucucc

SEQ ID NO: 3181274 - RNA, 19 nt, Artificial Sequence
  Description of Artificial Sequence: Synthetic oligonucleotide
gaagacagacucuucccuc

SEQ ID NO: 3181275 - RNA, 19 nt, Artificial Sequence
  Description of Artificial Sequence: Synthetic oligonucleotide
uagcaaaaguuuccaaaau

SEQ ID NO: 3181276 - RNA, 19 nt, Artificial Sequence
  Description of Artificial Sequence: Synthetic oligonucleotide
agaaugcacuagcaaaagu

SEQ ID NO: 3181277 - RNA, 19 nt, Artificial Sequence
  Description of Artificial Sequence: Synthetic oligonucleotide
acacuuucccggaagacag

SEQ ID NO: 3181278 - RNA, 19 nt, Artificial Sequence
  Description of Artificial Sequence: Synthetic oligonucleotide
ucugccucuuugaaugaac

SEQ ID NO: 3181279 - RNA, 19 nt, Artificial Sequence
  Description of Artificial Sequence: Synthetic oligonucleotide
cucccugucuuaagaaugc

SEQ ID NO: 3181280 - RNA, 19 nt, Artificial Sequence
  Description of Artificial Sequence: Synthetic oligonucleotide
aguuuccaaaauacaauug

SEQ ID NO: 3181281 - RNA, 19 nt, Artificial Sequence
  Description of Artificial Sequence: Synthetic oligonucleotide
cuuaagaaugcacuagcaa

SEQ ID NO: 3181282 - RNA, 19 nt, Artificial Sequence
  Description of Artificial Sequence: Synthetic oligonucleotide
uuccacacuuucccggaag

SEQ ID NO: 3181283 - RNA, 19 nt, Artificial Sequence
  Description of Artificial Sequence: Synthetic oligonucleotide
caaggaggcauacuguguc

SEQ ID NO: 3181284 - RNA, 19 nt, Artificial Sequence
  Description of Artificial Sequence: Synthetic oligonucleotide
aaaaugacuauccauagac

SEQ ID NO: 3181285 - RNA, 19 nt, Artificial Sequence
  Description of Artificial Sequence: Synthetic oligonucleotide
aaaguacuagauuugaacc

SEQ ID NO: 3181286 - RNA, 19 nt, Artificial Sequence
  Description of Artificial Sequence: Synthetic oligonucleotide
gacauugucacacacauag

SEQ ID NO: 3181287 - RNA, 19 nt, Artificial Sequence
  Description of Artificial Sequence: Synthetic oligonucleotide
ucuguuuucuccuagauug

SEQ ID NO: 3181288 - RNA, 19 nt, Artificial Sequence
  Description of Artificial Sequence: Synthetic oligonucleotide
aaguacuagauuugaaccc

SEQ ID NO: 3181289 - RNA, 19 nt, Artificial Sequence
  Description of Artificial Sequence: Synthetic oligonucleotide
auugcaaccacuuucauca

SEQ ID NO: 3181290 - RNA, 19 nt, Artificial Sequence
  Description of Artificial Sequence: Synthetic oligonucleotide
uacaggaacagauaaaucc

SEQ ID NO: 3181291 - RNA, 19 nt, Artificial Sequence
  Description of Artificial Sequence: Synthetic oligonucleotide
cuauccauagacuugaagc

SEQ ID NO: 3181292 - RNA, 19 nt, Artificial Sequence
  Description of Artificial Sequence: Synthetic oligonucleotide
aagccaucugcacagagac

SEQ ID NO: 3181293 - RNA, 19 nt, Artificial Sequence
  Description of Artificial Sequence: Synthetic oligonucleotide
aaaugcaguuuccauugcc

SEQ ID NO: 3181294 - RNA, 19 nt, Artificial Sequence
  Description of Artificial Sequence: Synthetic oligonucleotide
aaggucaccacagucaucg

SEQ ID NO: 3181295 - RNA, 19 nt, Artificial Sequence
  Description of Artificial Sequence: Synthetic oligonucleotide
aacccaggaauacaggaac

SEQ ID NO: 3181296 - RNA, 19 nt, Artificial Sequence
  Description of Artificial Sequence: Synthetic oligonucleotide
aaccacuuucaucagaaag

SEQ ID NO: 3181297 - RNA, 19 nt, Artificial Sequence
  Description of Artificial Sequence: Synthetic oligonucleotide
uuugaacccaggaauacag

SEQ ID NO: 3181298 - RNA, 19 nt, Artificial Sequence
  Description of Artificial Sequence: Synthetic oligonucleotide
auucaguuuguguacaagg

SEQ ID NO: 3181299 - RNA, 19 nt, Artificial Sequence
  Description of Artificial Sequence: Synthetic oligonucleotide
uucacauauguuuucagca

SEQ ID NO: 3181300 - RNA, 19 nt, Artificial Sequence
  Description of Artificial Sequence: Synthetic oligonucleotide
aaugacuauccauagacuu

SEQ ID NO: 3181301 - RNA, 19 nt, Artificial Sequence
  Description of Artificial Sequence: Synthetic oligonucleotide
aaacugcucacacucauug

SEQ ID NO: 3181302 - RNA, 19 nt, Artificial Sequence
  Description of Artificial Sequence: Synthetic oligonucleotide
agaaaugcaguuuccauug

SEQ ID NO: 3181303 - RNA, 19 nt, Artificial Sequence
  Description of Artificial Sequence: Synthetic oligonucleotide
uauccauagacuugaagcc

SEQ ID NO: 3181304 - RNA, 19 nt, Artificial Sequence
  Description of Artificial Sequence: Synthetic oligonucleotide
aauacaggaacagauaaau

SEQ ID NO: 3181305 - RNA, 19 nt, Artificial Sequence
  Description of Artificial Sequence: Synthetic oligonucleotide
uagacuugaagccaucugc

SEQ ID NO: 3181306 - RNA, 19 nt, Artificial Sequence
  Description of Artificial Sequence: Synthetic oligonucleotide
uccuccauugcuuaacugg

SEQ ID NO: 3181307 - RNA, 19 nt, Artificial Sequence
  Description of Artificial Sequence: Synthetic oligonucleotide
uagauuugaacccaggaau

SEQ ID NO: 3181308 - RNA, 19 nt, Artificial Sequence
  Description of Artificial Sequence: Synthetic oligonucleotide
auguuuucagcacauguuc

SEQ ID NO: 3181309 - RNA, 19 nt, Artificial Sequence
  Description of Artificial Sequence: Synthetic oligonucleotide
caaaguacuagauuugaac

SEQ ID NO: 3181310 - RNA, 19 nt, Artificial Sequence
  Description of Artificial Sequence: Synthetic oligonucleotide
uucuccaaaaugacuaucc

SEQ ID NO: 3181311 - RNA, 19 nt, Artificial Sequence
  Description of Artificial Sequence: Synthetic oligonucleotide
acagauaaauccuccauug

SEQ ID NO: 3181312 - RNA, 19 nt, Artificial Sequence
  Description of Artificial Sequence: Synthetic oligonucleotide
uccaaaaugacuauccaua

SEQ ID NO: 3181313 - RNA, 19 nt, Artificial Sequence
  Description of Artificial Sequence: Synthetic oligonucleotide
uccauugccacacuuauau

SEQ ID NO: 3181314 - RNA, 19 nt, Artificial Sequence
  Description of Artificial Sequence: Synthetic oligonucleotide
ugcacagagacauucauaa

SEQ ID NO: 3181315 - RNA, 19 nt, Artificial Sequence
  Description of Artificial Sequence: Synthetic oligonucleotide
uccuuugcuauuucgacag

SEQ ID NO: 3181316 - RNA, 19 nt, Artificial Sequence
  Description of Artificial Sequence: Synthetic oligonucleotide
cacacuuauauucaguuug

SEQ ID NO: 3181317 - RNA, 19 nt, Artificial Sequence
  Description of Artificial Sequence: Synthetic oligonucleotide
agagacauucauaacuucc

SEQ ID NO: 3181318 - RNA, 19 nt, Artificial Sequence
  Description of Artificial Sequence: Synthetic oligonucleotide
acauucauaacuuccuuug

SEQ ID NO: 3181319 - RNA, 19 nt, Artificial Sequence
  Description of Artificial Sequence: Synthetic oligonucleotide
uucaguuuguguacaaggc

SEQ ID NO: 3181320 - RNA, 19 nt, Artificial Sequence
  Description of Artificial Sequence: Synthetic oligonucleotide
uauuucgacagcucugggg

SEQ ID NO: 3181321 - RNA, 19 nt, Artificial Sequence
  Description of Artificial Sequence: Synthetic oligonucleotide
acuuucaucagaaagguca

SEQ ID NO: 3181322 - RNA, 19 nt, Artificial Sequence
  Description of Artificial Sequence: Synthetic oligonucleotide
uguccaaaguacuagauuu

SEQ ID NO: 3181323 - RNA, 19 nt, Artificial Sequence
  Description of Artificial Sequence: Synthetic oligonucleotide
uacaguucuguucacauau

SEQ ID NO: 3181324 - RNA, 19 nt, Artificial Sequence
  Description of Artificial Sequence: Synthetic oligonucleotide
ucaguuuguguacaaggcc

SEQ ID NO: 3181325 - RNA, 19 nt, Artificial Sequence
  Description of Artificial Sequence: Synthetic oligonucleotide
agauaaauccuccauugcu

SEQ ID NO: 3181326 - RNA, 19 nt, Artificial Sequence
  Description of Artificial Sequence: Synthetic oligonucleotide
uuauauucaguuuguguac

SEQ ID NO: 3181327 - RNA, 19 nt, Artificial Sequence
  Description of Artificial Sequence: Synthetic oligonucleotide
auugucacacacauagugc

SEQ ID NO: 3181328 - RNA, 19 nt, Artificial Sequence
  Description of Artificial Sequence: Synthetic oligonucleotide
cuuauauucaguuugugua

SEQ ID NO: 3181329 - RNA, 19 nt, Artificial Sequence
  Description of Artificial Sequence: Synthetic oligonucleotide
cuugaagccaucugcacag

SEQ ID NO: 3181330 - RNA, 19 nt, Artificial Sequence
  Description of Artificial Sequence: Synthetic oligonucleotide
auauguuuucagcacaugu

SEQ ID NO: 3181331 - RNA, 19 nt, Artificial Sequence
  Description of Artificial Sequence: Synthetic oligonucleotide
aacuuccuuugcuauuucg

SEQ ID NO: 3181332 - RNA, 19 nt, Artificial Sequence
  Description of Artificial Sequence: Synthetic oligonucleotide
acuuauauucaguuugugu

SEQ ID NO: 3181333 - RNA, 19 nt, Artificial Sequence
  Description of Artificial Sequence: Synthetic oligonucleotide
uagauugcaaccacuuuca

SEQ ID NO: 3181334 - RNA, 19 nt, Artificial Sequence
  Description of Artificial Sequence: Synthetic oligonucleotide
cuagauugcaaccacuuuc

SEQ ID NO: 3181335 - RNA, 19 nt, Artificial Sequence
  Description of Artificial Sequence: Synthetic oligonucleotide
acauagugcugagaaaugc

SEQ ID NO: 3181336 - RNA, 19 nt, Artificial Sequence
  Description of Artificial Sequence: Synthetic oligonucleotide
aaauccuccauugcuuaac

SEQ ID NO: 3181337 - RNA, 19 nt, Artificial Sequence
  Description of Artificial Sequence: Synthetic oligonucleotide
cauugucacacacauagug

SEQ ID NO: 3181338 - RNA, 19 nt, Artificial Sequence
  Description of Artificial Sequence: Synthetic oligonucleotide
accacagucaucgacauug

SEQ ID NO: 3181339 - RNA, 19 nt, Artificial Sequence
  Description of Artificial Sequence: Synthetic oligonucleotide
accacuuucaucagaaagg

SEQ ID NO: 3181340 - RNA, 19 nt, Artificial Sequence
  Description of Artificial Sequence: Synthetic oligonucleotide
cauugccacacuuauauuc

SEQ ID NO: 3181341 - RNA, 19 nt, Artificial Sequence
  Description of Artificial Sequence: Synthetic oligonucleotide
uacaaggccaggauggaug

SEQ ID NO: 3181342 - RNA, 19 nt, Artificial Sequence
  Description of Artificial Sequence: Synthetic oligonucleotide
aacagauaaauccuccauu

SEQ ID NO: 3181343 - RNA, 19 nt, Artificial Sequence
  Description of Artificial Sequence: Synthetic oligonucleotide
uguguacaaggccaggaug

SEQ ID NO: 3181344 - RNA, 19 nt, Artificial Sequence
  Description of Artificial Sequence: Synthetic oligonucleotide
ucgacauugucacacacau

SEQ ID NO: 3181345 - RNA, 19 nt, Artificial Sequence
  Description of Artificial Sequence: Synthetic oligonucleotide
ugaacccaggaauacagga

SEQ ID NO: 3181346 - RNA, 19 nt, Artificial Sequence
  Description of Artificial Sequence: Synthetic oligonucleotide
ucauugauaucuuggcaug

SEQ ID NO: 3181347 - RNA, 19 nt, Artificial Sequence
  Description of Artificial Sequence: Synthetic oligonucleotide
acuggguacaguucuguuc

SEQ ID NO: 3181348 - RNA, 19 nt, Artificial Sequence
  Description of Artificial Sequence: Synthetic oligonucleotide
auucauaacuuccuuugcu

SEQ ID NO: 3181349 - RNA, 19 nt, Artificial Sequence
  Description of Artificial Sequence: Synthetic oligonucleotide
uuuucuccuagauugcaac

SEQ ID NO: 3181350 - RNA, 19 nt, Artificial Sequence
  Description of Artificial Sequence: Synthetic oligonucleotide
uugucacacacauagugcu

SEQ ID NO: 3181351 - RNA, 19 nt, Artificial Sequence
  Description of Artificial Sequence: Synthetic oligonucleotide
ugauaucuuggcaugaauu

SEQ ID NO: 3181352 - RNA, 19 nt, Artificial Sequence
  Description of Artificial Sequence: Synthetic oligonucleotide
uauguuuucagcacauguu

SEQ ID NO: 3181353 - RNA, 19 nt, Artificial Sequence
  Description of Artificial Sequence: Synthetic oligonucleotide
cacauguucuguuuucucc

SEQ ID NO: 3181354 - RNA, 19 nt, Artificial Sequence
  Description of Artificial Sequence: Synthetic oligonucleotide
uuuuguccaaaguacuaga

SEQ ID NO: 3181355 - RNA, 19 nt, Artificial Sequence
  Description of Artificial Sequence: Synthetic oligonucleotide
acuagauuugaacccagga

SEQ ID NO: 3181356 - RNA, 19 nt, Artificial Sequence
  Description of Artificial Sequence: Synthetic oligonucleotide
guucacauauguuuucagc

SEQ ID NO: 3181357 - RNA, 19 nt, Artificial Sequence
  Description of Artificial Sequence: Synthetic oligonucleotide
uucaucagaaaggucacca

SEQ ID NO: 3181358 - RNA, 19 nt, Artificial Sequence
  Description of Artificial Sequence: Synthetic oligonucleotide
ugccaaacugcucacacuc

SEQ ID NO: 3181359 - RNA, 19 nt, Artificial Sequence
  Description of Artificial Sequence: Synthetic oligonucleotide
uguuuucagcacauguucu

SEQ ID NO: 3181360 - RNA, 19 nt, Artificial Sequence
  Description of Artificial Sequence: Synthetic oligonucleotide
cagucaucgacauugucac

SEQ ID NO: 3181361 - RNA, 19 nt, Artificial Sequence
  Description of Artificial Sequence: Synthetic oligonucleotide
ucacauauguuuucagcac

SEQ ID NO: 3181362 - RNA, 19 nt, Artificial Sequence
  Description of Artificial Sequence: Synthetic oligonucleotide
acacacauagugcugagaa

SEQ ID NO: 3181363 - RNA, 19 nt, Artificial Sequence
  Description of Artificial Sequence: Synthetic oligonucleotide
guguacaaggccaggaugg

SEQ ID NO: 3181364 - RNA, 19 nt, Artificial Sequence
  Description of Artificial Sequence: Synthetic oligonucleotide
cacucauugauaucuuggc

SEQ ID NO: 3181365 - RNA, 19 nt, Artificial Sequence
  Description of Artificial Sequence: Synthetic oligonucleotide
uuuccauugccacacuuau

SEQ ID NO: 3181366 - RNA, 19 nt, Artificial Sequence
  Description of Artificial Sequence: Synthetic oligonucleotide
uacuagauuugaacccagg

SEQ ID NO: 3181367 - RNA, 19 nt, Artificial Sequence
  Description of Artificial Sequence: Synthetic oligonucleotide
gaugccaaacugcucacac

SEQ ID NO: 3181368 - RNA, 19 nt, Artificial Sequence
  Description of Artificial Sequence: Synthetic oligonucleotide
ugcugagaaaugcaguuuc

SEQ ID NO: 3181369 - RNA, 19 nt, Artificial Sequence
  Description of Artificial Sequence: Synthetic oligonucleotide
uguucacauauguuuucag

SEQ ID NO: 3181370 - RNA, 19 nt, Artificial Sequence
  Description of Artificial Sequence: Synthetic oligonucleotide
aggaacagauaaauccucc

SEQ ID NO: 3181371 - RNA, 19 nt, Artificial Sequence
  Description of Artificial Sequence: Synthetic oligonucleotide
uugaacccaggaauacagg

SEQ ID NO: 3181372 - RNA, 19 nt, Artificial Sequence
  Description of Artificial Sequence: Synthetic oligonucleotide
augcaguuuccauugccac

SEQ ID NO: 3181373 - RNA, 19 nt, Artificial Sequence
  Description of Artificial Sequence: Synthetic oligonucleotide
acuauccauagacuugaag

SEQ ID NO: 3181374 - RNA, 19 nt, Artificial Sequence
  Description of Artificial Sequence: Synthetic oligonucleotide
ucuccaaaaugacuaucca

SEQ ID NO: 3181375 - RNA, 19 nt, Artificial Sequence
  Description of Artificial Sequence: Synthetic oligonucleotide
aaugcaguuuccauugcca

SEQ ID NO: 3181376 - RNA, 19 nt, Artificial Sequence
  Description of Artificial Sequence: Synthetic oligonucleotide
ugacuauccauagacuuga

SEQ ID NO: 3181377 - RNA, 19 nt, Artificial Sequence
  Description of Artificial Sequence: Synthetic oligonucleotide
acaaggccaggauggaugg

SEQ ID NO: 3181378 - RNA, 19 nt, Artificial Sequence
  Description of Artificial Sequence: Synthetic oligonucleotide
uucauaacuuccuuugcua

SEQ ID NO: 3181379 - RNA, 19 nt, Artificial Sequence
  Description of Artificial Sequence: Synthetic oligonucleotide
uugcuauuucgacagcucu

SEQ ID NO: 3181380 - RNA, 19 nt, Artificial Sequence
  Description of Artificial Sequence: Synthetic oligonucleotide
aauccuccauugcuuaacu

SEQ ID NO: 3181381 - RNA, 19 nt, Artificial Sequence
  Description of Artificial Sequence: Synthetic oligonucleotide
uuucuccuagauugcaacc

SEQ ID NO: 3181382 - RNA, 19 nt, Artificial Sequence
  Description of Artificial Sequence: Synthetic oligonucleotide
ugcuauuucgacagcucug

SEQ ID NO: 3181383 - RNA, 19 nt, Artificial Sequence
  Description of Artificial Sequence: Synthetic oligonucleotide
uuuguccaaaguacuagau

SEQ ID NO: 3181384 - RNA, 19 nt, Artificial Sequence
  Description of Artificial Sequence: Synthetic oligonucleotide
aaagccuacaauuaaggcc

SEQ ID NO: 3181385 - RNA, 19 nt, Artificial Sequence
  Description of Artificial Sequence: Synthetic oligonucleotide
aauucaauuucuuuggcac

SEQ ID NO: 3181386 - RNA, 19 nt, Artificial Sequence
  Description of Artificial Sequence: Synthetic oligonucleotide
uuuauugcuagcuugauag

SEQ ID NO: 3181387 - RNA, 19 nt, Artificial Sequence
  Description of Artificial Sequence: Synthetic oligonucleotide
uuuagaguugcuaugaagc

SEQ ID NO: 3181388 - RNA, 19 nt, Artificial Sequence
  Description of Artificial Sequence: Synthetic oligonucleotide
gauaccaucaucaucaaag

SEQ ID NO: 3181389 - RNA, 19 nt, Artificial Sequence
  Description of Artificial Sequence: Synthetic oligonucleotide
acaauuaaggccgauauac

SEQ ID NO: 3181390 - RNA, 19 nt, Artificial Sequence
  Description of Artificial Sequence: Synthetic oligonucleotide
uucuauuucaguuaccugc

SEQ ID NO: 3181391 - RNA, 19 nt, Artificial Sequence
  Description of Artificial Sequence: Synthetic oligonucleotide
aauucuuuucuagaaauuc

SEQ ID NO: 3181392 - RNA, 19 nt, Artificial Sequence
  Description of Artificial Sequence: Synthetic oligonucleotide
ucuagcaacgcuuuuauug

SEQ ID NO: 3181393 - RNA, 19 nt, Artificial Sequence
  Description of Artificial Sequence: Synthetic oligonucleotide
ugggauaccaucaucauca

SEQ ID NO: 3181394 - RNA, 19 nt, Artificial Sequence
  Description of Artificial Sequence: Synthetic oligonucleotide
uaaacaucuucaaagguug

SEQ ID NO: 3181395 - RNA, 19 nt, Artificial Sequence
  Description of Artificial Sequence: Synthetic oligonucleotide
caugguaaguaccagaggg

SEQ ID NO: 3181396 - RNA, 19 nt, Artificial Sequence
  Description of Artificial Sequence: Synthetic oligonucleotide
aagccuacaauuaaggccg

SEQ ID NO: 3181397 - RNA, 19 nt, Artificial Sequence
  Description of Artificial Sequence: Synthetic oligonucleotide
ucuuaugauagccaguuca

SEQ ID NO: 3181398 - RNA, 19 nt, Artificial Sequence
  Description of Artificial Sequence: Synthetic oligonucleotide
agaaauagcaucuucugug

SEQ ID NO: 3181399 - RNA, 19 nt, Artificial Sequence
  Description of Artificial Sequence: Synthetic oligonucleotide
ucaaagccuacaauuaagg

SEQ ID NO: 3181400 - RNA, 19 nt, Artificial Sequence
  Description of Artificial Sequence: Synthetic oligonucleotide
ugcaauucaauuucuuugg

SEQ ID NO: 3181401 - RNA, 19 nt, Artificial Sequence
  Description of Artificial Sequence: Synthetic oligonucleotide
uguucuucccaccagacug

SEQ ID NO: 3181402 - RNA, 19 nt, Artificial Sequence
  Description of Artificial Sequence: Synthetic oligonucleotide
uaugaagcgaguuauguac

SEQ ID NO: 3181403 - RNA, 19 nt, Artificial Sequence
  Description of Artificial Sequence: Synthetic oligonucleotide
aauuaaggccgauauacca

SEQ ID NO: 3181404 - RNA, 19 nt, Artificial Sequence
  Description of Artificial Sequence: Synthetic oligonucleotide
acaguuuuagcacuccggc

SEQ ID NO: 3181405 - RNA, 19 nt, Artificial Sequence
  Description of Artificial Sequence: Synthetic oligonucleotide
auuucuuuggcacuaaaca

SEQ ID NO: 3181406 - RNA, 19 nt, Artificial Sequence
  Description of Artificial Sequence: Synthetic oligonucleotide
ugaucucuucuuaugauag

SEQ ID NO: 3181407 - RNA, 19 nt, Artificial Sequence
  Description of Artificial Sequence: Synthetic oligonucleotide
aguucaauguucuucccac

SEQ ID NO: 3181408 - RNA, 19 nt, Artificial Sequence
  Description of Artificial Sequence: Synthetic oligonucleotide
aguuauguacuccacagug

SEQ ID NO: 3181409 - RNA, 19 nt, Artificial Sequence
  Description of Artificial Sequence: Synthetic oligonucleotide
ucuagaaauucccggacag

SEQ ID NO: 3181410 - RNA, 19 nt, Artificial Sequence
  Description of Artificial Sequence: Synthetic oligonucleotide
uucuuuucuagaaauuccc

SEQ ID NO: 3181411 - RNA, 19 nt, Artificial Sequence
  Description of Artificial Sequence: Synthetic oligonucleotide
uuagaguugcuaugaagcg

SEQ ID NO: 3181412 - RNA, 19 nt, Artificial Sequence
  Description of Artificial Sequence: Synthetic oligonucleotide
ucuuuucuagaaauucccg

SEQ ID NO: 3181413 - RNA, 19 nt, Artificial Sequence
  Description of Artificial Sequence: Synthetic oligonucleotide
uaugauagccaguucaaug

SEQ ID NO: 3181414 - RNA, 19 nt, Artificial Sequence
  Description of Artificial Sequence: Synthetic oligonucleotide
ugucauuagaaauagcauc

SEQ ID NO: 3181415 - RNA, 19 nt, Artificial Sequence
  Description of Artificial Sequence: Synthetic oligonucleotide
uauacuucugcuuuagagu

SEQ ID NO: 3181416 - RNA, 19 nt, Artificial Sequence
  Description of Artificial Sequence: Synthetic oligonucleotide
cuuuucuagaaauucccgg

SEQ ID NO: 3181417 - RNA, 19 nt, Artificial Sequence
  Description of Artificial Sequence: Synthetic oligonucleotide
uuagaaauagcaucuucug

SEQ ID NO: 3181418 - RNA, 19 nt, Artificial Sequence
  Description of Artificial Sequence: Synthetic oligonucleotide
ucuugggauaccaucauca

SEQ ID NO: 3181419 - RNA, 19 nt, Artificial Sequence
  Description of Artificial Sequence: Synthetic oligonucleotide
aauuucuuuggcacuaaac

SEQ ID NO: 3181420 - RNA, 19 nt, Artificial Sequence
  Description of Artificial Sequence: Synthetic oligonucleotide
guauacuucugcuuuagag

SEQ ID NO: 3181421 - RNA, 19 nt, Artificial Sequence
  Description of Artificial Sequence: Synthetic oligonucleotide
ucugauacagucuugggau

SEQ ID NO: 3181422 - RNA, 19 nt, Artificial Sequence
  Description of Artificial Sequence: Synthetic oligonucleotide
auaccaucaucaucaaagc

SEQ ID NO: 3181423 - RNA, 19 nt, Artificial Sequence
  Description of Artificial Sequence: Synthetic oligonucleotide
uucuguguaauucuuuucu

SEQ ID NO: 3181424 - RNA, 19 nt, Artificial Sequence
  Description of Artificial Sequence: Synthetic oligonucleotide
auugucauuagaaauagca

SEQ ID NO: 3181425 - RNA, 19 nt, Artificial Sequence
  Description of Artificial Sequence: Synthetic oligonucleotide
uuuucuagaaauucccgga

SEQ ID NO: 3181426 - RNA, 19 nt, Artificial Sequence
  Description of Artificial Sequence: Synthetic oligonucleotide
uccacuguaagcuuauggc

SEQ ID NO: 3181427 - RNA, 19 nt, Artificial Sequence
  Description of Artificial Sequence: Synthetic oligonucleotide
auugcauuugccuuccaag

SEQ ID NO: 3181428 - RNA, 19 nt, Artificial Sequence
  Description of Artificial Sequence: Synthetic oligonucleotide
uuauguacuccacagugac

SEQ ID NO: 3181429 - RNA, 19 nt, Artificial Sequence
  Description of Artificial Sequence: Synthetic oligonucleotide
agacuggacaacuucuagc

SEQ ID NO: 3181430 - RNA, 19 nt, Artificial Sequence
  Description of Artificial Sequence: Synthetic oligonucleotide
uuuucuauuucaguuaccu

SEQ ID NO: 3181431 - RNA, 19 nt, Artificial Sequence
  Description of Artificial Sequence: Synthetic oligonucleotide
aucucuucuuaugauagcc

SEQ ID NO: 3181432 - RNA, 19 nt, Artificial Sequence
  Description of Artificial Sequence: Synthetic oligonucleotide
uggacaacuucuagcaacg

SEQ ID NO: 3181433 - RNA, 19 nt, Artificial Sequence
  Description of Artificial Sequence: Synthetic oligonucleotide
auucuuuucuagaaauucc

SEQ ID NO: 3181434 - RNA, 19 nt, Artificial Sequence
  Description of Artificial Sequence: Synthetic oligonucleotide
uucauugucauuagaaaua

SEQ ID NO: 3181435 - RNA, 19 nt, Artificial Sequence
  Description of Artificial Sequence: Synthetic oligonucleotide
cacuaaacaucuucaaagg

SEQ ID NO: 3181436 - RNA, 19 nt, Artificial Sequence
  Description of Artificial Sequence: Synthetic oligonucleotide
uaccaaaaggucuucgucc

SEQ ID NO: 3181437 - RNA, 19 nt, Artificial Sequence
  Description of Artificial Sequence: Synthetic oligonucleotide
aguuuuagcacuccggccu

SEQ ID NO: 3181438 - RNA, 19 nt, Artificial Sequence
  Description of Artificial Sequence: Synthetic oligonucleotide
uuaccugcaauucaauuuc

SEQ ID NO: 3181439 - RNA, 19 nt, Artificial Sequence
  Description of Artificial Sequence: Synthetic oligonucleotide
uuuggcacuaaacaucuuc

SEQ ID NO: 3181440 - RNA, 19 nt, Artificial Sequence
  Description of Artificial Sequence: Synthetic oligonucleotide
ucuauuucaguuaccugca

SEQ ID NO: 3181441 - RNA, 19 nt, Artificial Sequence
  Description of Artificial Sequence: Synthetic oligonucleotide
uguguaauucuuuucuaga

SEQ ID NO: 3181442 - RNA, 19 nt, Artificial Sequence
  Description of Artificial Sequence: Synthetic oligonucleotide
ucuuuggcacuaaacaucu

SEQ ID NO: 3181443 - RNA, 19 nt, Artificial Sequence
  Description of Artificial Sequence: Synthetic oligonucleotide
aauagcaucuucuguguaa

SEQ ID NO: 3181444 - RNA, 19 nt, Artificial Sequence
  Description of Artificial Sequence: Synthetic oligonucleotide
cuagcaacgcuuuuauugc

SEQ ID NO: 3181445 - RNA, 19 nt, Artificial Sequence
  Description of Artificial Sequence: Synthetic oligonucleotide
uguaauucuuuucuagaaa

SEQ ID NO: 3181446 - RNA, 19 nt, Artificial Sequence
  Description of Artificial Sequence: Synthetic oligonucleotide
aucaucaaagccuacaauu

SEQ ID NO: 3181447 - RNA, 19 nt, Artificial Sequence
  Description of Artificial Sequence: Synthetic oligonucleotide
auaccaaaaggucuucguc

SEQ ID NO: 3181448 - RNA, 19 nt, Artificial Sequence
  Description of Artificial Sequence: Synthetic oligonucleotide
ucaaagguugaucucuucu

SEQ ID NO: 3181449 - RNA, 19 nt, Artificial Sequence
  Description of Artificial Sequence: Synthetic oligonucleotide
ucauugucauuagaaauag

SEQ ID NO: 3181450 - RNA, 19 nt, Artificial Sequence
  Description of Artificial Sequence: Synthetic oligonucleotide
augauagccaguucaaugu

SEQ ID NO: 3181451 - RNA, 19 nt, Artificial Sequence
  Description of Artificial Sequence: Synthetic oligonucleotide
aggccgauauaccaaaagg

SEQ ID NO: 3181452 - RNA, 19 nt, Artificial Sequence
  Description of Artificial Sequence: Synthetic oligonucleotide
aaaaggucuucguccauug

SEQ ID NO: 3181453 - RNA, 19 nt, Artificial Sequence
  Description of Artificial Sequence: Synthetic oligonucleotide
aaggucuucguccauugcu

SEQ ID NO: 3181454 - RNA, 19 nt, Artificial Sequence
  Description of Artificial Sequence: Synthetic oligonucleotide
acagucuugggauaccauc

SEQ ID NO: 3181455 - RNA, 19 nt, Artificial Sequence
  Description of Artificial Sequence: Synthetic oligonucleotide
cugcaauucaauuucuuug

SEQ ID NO: 3181456 - RNA, 19 nt, Artificial Sequence
  Description of Artificial Sequence: Synthetic oligonucleotide
gcacuaaacaucuucaaag

SEQ ID NO: 3181457 - RNA, 19 nt, Artificial Sequence
  Description of Artificial Sequence: Synthetic oligonucleotide
aaaggucuucguccauugc

SEQ ID NO: 3181458 - RNA, 19 nt, Artificial Sequence
  Description of Artificial Sequence: Synthetic oligonucleotide
ucugcuuuagaguugcuau

SEQ ID NO: 3181459 - RNA, 19 nt, Artificial Sequence
  Description of Artificial Sequence: Synthetic oligonucleotide
uucuuuggcacuaaacauc

SEQ ID NO: 3181460 - RNA, 19 nt, Artificial Sequence
  Description of Artificial Sequence: Synthetic oligonucleotide
uucaauguucuucccacca

SEQ ID NO: 3181461 - RNA, 19 nt, Artificial Sequence
  Description of Artificial Sequence: Synthetic oligonucleotide
aaggccgauauaccaaaag

SEQ ID NO: 3181462 - RNA, 19 nt, Artificial Sequence
  Description of Artificial Sequence: Synthetic oligonucleotide
aacgcuuuuauugcuagcu

SEQ ID NO: 3181463 - RNA, 19 nt, Artificial Sequence
  Description of Artificial Sequence: Synthetic oligonucleotide
auuagaaauagcaucuucu

SEQ ID NO: 3181464 - RNA, 19 nt, Artificial Sequence
  Description of Artificial Sequence: Synthetic oligonucleotide
cuuuagaguugcuaugaag

SEQ ID NO: 3181465 - RNA, 19 nt, Artificial Sequence
  Description of Artificial Sequence: Synthetic oligonucleotide
acuucugcuuuagaguugc

SEQ ID NO: 3181466 - RNA, 19 nt, Artificial Sequence
  Description of Artificial Sequence: Synthetic oligonucleotide
uagaaauagcaucuucugu

SEQ ID NO: 3181467 - RNA, 19 nt, Artificial Sequence
  Description of Artificial Sequence: Synthetic oligonucleotide
ucuucaaagguugaucucu

SEQ ID NO: 3181468 - RNA, 19 nt, Artificial Sequence
  Description of Artificial Sequence: Synthetic oligonucleotide
uuucuuuggcacuaaacau

SEQ ID NO: 3181469 - RNA, 19 nt, Artificial Sequence
  Description of Artificial Sequence: Synthetic oligonucleotide
ucaguuaccugcaauucaa

SEQ ID NO: 3181470 - RNA, 19 nt, Artificial Sequence
  Description of Artificial Sequence: Synthetic oligonucleotide
aauguucuucccaccagac

SEQ ID NO: 3181471 - RNA, 19 nt, Artificial Sequence
  Description of Artificial Sequence: Synthetic oligonucleotide
uuggcacuaaacaucuuca

SEQ ID NO: 3181472 - RNA, 19 nt, Artificial Sequence
  Description of Artificial Sequence: Synthetic oligonucleotide
gauagcuucauugucauua

SEQ ID NO: 3181473 - RNA, 19 nt, Artificial Sequence
  Description of Artificial Sequence: Synthetic oligonucleotide
ucaucaaagccuacaauua

SEQ ID NO: 3181474 - RNA, 19 nt, Artificial Sequence
  Description of Artificial Sequence: Synthetic oligonucleotide
uucaguuaccugcaauuca

SEQ ID NO: 3181475 - RNA, 19 nt, Artificial Sequence
  Description of Artificial Sequence: Synthetic oligonucleotide
uugcauuugccuuccaagc

SEQ ID NO: 3181476 - RNA, 19 nt, Artificial Sequence
  Description of Artificial Sequence: Synthetic oligonucleotide
uuucuagaaauucccggac

SEQ ID NO: 3181477 - RNA, 19 nt, Artificial Sequence
  Description of Artificial Sequence: Synthetic oligonucleotide
acuaaacaucuucaaaggu

SEQ ID NO: 3181478 - RNA, 19 nt, Artificial Sequence
  Description of Artificial Sequence: Synthetic oligonucleotide
uucccggacaguuuuagca

SEQ ID NO: 3181479 - RNA, 19 nt, Artificial Sequence
  Description of Artificial Sequence: Synthetic oligonucleotide
uauaccaaaaggucuucgu

SEQ ID NO: 3181480 - RNA, 19 nt, Artificial Sequence
  Description of Artificial Sequence: Synthetic oligonucleotide
gacuggacaacuucuagca

SEQ ID NO: 3181481 - RNA, 19 nt, Artificial Sequence
  Description of Artificial Sequence: Synthetic oligonucleotide
caaagccuacaauuaaggc

SEQ ID NO: 3181482 - RNA, 19 nt, Artificial Sequence
  Description of Artificial Sequence: Synthetic oligonucleotide
uugucauuagaaauagcau

SEQ ID NO: 3181483 - RNA, 19 nt, Artificial Sequence
  Description of Artificial Sequence: Synthetic oligonucleotide
cuguguaauucuuuucuag

SEQ ID NO: 3181484 - RNA, 19 nt, Artificial Sequence
  Description of Artificial Sequence: Synthetic oligonucleotide
aacucuugggcacagcugc

SEQ ID NO: 3181485 - RNA, 19 nt, Artificial Sequence
  Description of Artificial Sequence: Synthetic oligonucleotide
ucuauguccacacagcucc

SEQ ID NO: 3181486 - RNA, 19 nt, Artificial Sequence
  Description of Artificial Sequence: Synthetic oligonucleotide
uugagagucacuucgaucc

SEQ ID NO: 3181487 - RNA, 19 nt, Artificial Sequence
  Description of Artificial Sequence: Synthetic oligonucleotide
uuccucaacaacuugagag

SEQ ID NO: 3181488 - RNA, 19 nt, Artificial Sequence
  Description of Artificial Sequence: Synthetic oligonucleotide
aaccacagcaaguuacugc

SEQ ID NO: 3181489 - RNA, 19 nt, Artificial Sequence
  Description of Artificial Sequence: Synthetic oligonucleotide
acuucgauccacaagaggc

SEQ ID NO: 3181490 - RNA, 19 nt, Artificial Sequence
  Description of Artificial Sequence: Synthetic oligonucleotide
aacgccgucacgcucaaac

SEQ ID NO: 3181491 - RNA, 19 nt, Artificial Sequence
  Description of Artificial Sequence: Synthetic oligonucleotide
ucuucuuccacccgaaaag

SEQ ID NO: 3181492 - RNA, 19 nt, Artificial Sequence
  Description of Artificial Sequence: Synthetic oligonucleotide
agauccaagagcuuagcgg

SEQ ID NO: 3181493 - RNA, 19 nt, Artificial Sequence
  Description of Artificial Sequence: Synthetic oligonucleotide
ucauacuucuggaagagca

SEQ ID NO: 3181494 - RNA, 19 nt, Artificial Sequence
  Description of Artificial Sequence: Synthetic oligonucleotide
aaguuauccaccucaaaga

SEQ ID NO: 3181495 - RNA, 19 nt, Artificial Sequence
  Description of Artificial Sequence: Synthetic oligonucleotide
uucaugagagcugugauag

SEQ ID NO: 3181496 - RNA, 19 nt, Artificial Sequence
  Description of Artificial Sequence: Synthetic oligonucleotide
gauccaagagcuuagcggc

SEQ ID NO: 3181497 - RNA, 19 nt, Artificial Sequence
  Description of Artificial Sequence: Synthetic oligonucleotide
gauagcauagccucgggug

SEQ ID NO: 3181498 - RNA, 19 nt, Artificial Sequence
  Description of Artificial Sequence: Synthetic oligonucleotide
acaguuacccuccagcagg

SEQ ID NO: 3181499 - RNA, 19 nt, Artificial Sequence
  Description of Artificial Sequence: Synthetic oligonucleotide
aagauggugucaaugugcc

SEQ ID NO: 3181500 - RNA, 19 nt, Artificial Sequence
  Description of Artificial Sequence: Synthetic oligonucleotide
ugcgucgucccucacaugg

SEQ ID NO: 3181501 - RNA, 19 nt, Artificial Sequence
  Description of Artificial Sequence: Synthetic oligonucleotide
cacguuauacuccacagcc

SEQ ID NO: 3181502 - RNA, 19 nt, Artificial Sequence
  Description of Artificial Sequence: Synthetic oligonucleotide
ugcaucuggaaacucuugg

SEQ ID NO: 3181503 - RNA, 19 nt, Artificial Sequence
  Description of Artificial Sequence: Synthetic oligonucleotide
ugccuggcaaauaaagugg

SEQ ID NO: 3181504 - RNA, 19 nt, Artificial Sequence
  Description of Artificial Sequence: Synthetic oligonucleotide
gauggcagcccucaugugg

SEQ ID NO: 3181505 - RNA, 19 nt, Artificial Sequence
  Description of Artificial Sequence: Synthetic oligonucleotide
agagcuggaauuguguccc

SEQ ID NO: 3181506 - RNA, 19 nt, Artificial Sequence
  Description of Artificial Sequence: Synthetic oligonucleotide
aaagguccaguugaacgcc

SEQ ID NO: 3181507 - RNA, 19 nt, Artificial Sequence
  Description of Artificial Sequence: Synthetic oligonucleotide
ucgauuuccucacaguuac

SEQ ID NO: 3181508 - RNA, 19 nt, Artificial Sequence
  Description of Artificial Sequence: Synthetic oligonucleotide
uggcaaauaaaguggguag

SEQ ID NO: 3181509 - RNA, 19 nt, Artificial Sequence
  Description of Artificial Sequence: Synthetic oligonucleotide
gagaagguguacuaaggcc

SEQ ID NO: 3181510 - RNA, 19 nt, Artificial Sequence
  Description of Artificial Sequence: Synthetic oligonucleotide
agaucuagcagauccaaga

SEQ ID NO: 3181511 - RNA, 19 nt, Artificial Sequence
  Description of Artificial Sequence: Synthetic oligonucleotide
ucgagaagguguacuaagg

SEQ ID NO: 3181512 - RNA, 19 nt, Artificial Sequence
  Description of Artificial Sequence: Synthetic oligonucleotide
agccagaggaggaagaugc

SEQ ID NO: 3181513 - RNA, 19 nt, Artificial Sequence
  Description of Artificial Sequence: Synthetic oligonucleotide
auagcauagccucgggugg

SEQ ID NO: 3181514 - RNA, 19 nt, Artificial Sequence
  Description of Artificial Sequence: Synthetic oligonucleotide
aagagcacguuauacucca

SEQ ID NO: 3181515 - RNA, 19 nt, Artificial Sequence
  Description of Artificial Sequence: Synthetic oligonucleotide
uacgauuguuaucuccccg

SEQ ID NO: 3181516 - RNA, 19 nt, Artificial Sequence
  Description of Artificial Sequence: Synthetic oligonucleotide
acuaagaguaagccugggg

SEQ ID NO: 3181517 - RNA, 19 nt, Artificial Sequence
  Description of Artificial Sequence: Synthetic oligonucleotide
gaucuagcagauccaagag

SEQ ID NO: 3181518 - RNA, 19 nt, Artificial Sequence
  Description of Artificial Sequence: Synthetic oligonucleotide
cuguugaagcucuaugucc

SEQ ID NO: 3181519 - RNA, 19 nt, Artificial Sequence
  Description of Artificial Sequence: Synthetic oligonucleotide
auacgauuguuaucucccc

SEQ ID NO: 3181520 - RNA, 19 nt, Artificial Sequence
  Description of Artificial Sequence: Synthetic oligonucleotide
acgauuguuaucuccccgg

SEQ ID NO: 3181521 - RNA, 19 nt, Artificial Sequence
  Description of Artificial Sequence: Synthetic oligonucleotide
guagauggacaccaccugg

SEQ ID NO: 3181522 - RNA, 19 nt, Artificial Sequence
  Description of Artificial Sequence: Synthetic oligonucleotide
aacaacuugagagucacuu

SEQ ID NO: 3181523 - RNA, 19 nt, Artificial Sequence
  Description of Artificial Sequence: Synthetic oligonucleotide
cugccuggcaaauaaagug

SEQ ID NO: 3181524 - RNA, 19 nt, Artificial Sequence
  Description of Artificial Sequence: Synthetic oligonucleotide
gaauuguguccccacuggg

SEQ ID NO: 3181525 - RNA, 19 nt, Artificial Sequence
  Description of Artificial Sequence: Synthetic oligonucleotide
aaguuacugccacgucucc

SEQ ID NO: 3181526 - RNA, 19 nt, Artificial Sequence
  Description of Artificial Sequence: Synthetic oligonucleotide
aggagguccccauacucgc

SEQ ID NO: 3181527 - RNA, 19 nt, Artificial Sequence
  Description of Artificial Sequence: Synthetic oligonucleotide
guggucauacuucuggaag

SEQ ID NO: 3181528 - RNA, 19 nt, Artificial Sequence
  Description of Artificial Sequence: Synthetic oligonucleotide
agcacguuauacuccacag

SEQ ID NO: 3181529 - RNA, 19 nt, Artificial Sequence
  Description of Artificial Sequence: Synthetic oligonucleotide
cuuuccucaacaacuugag

SEQ ID NO: 3181530 - RNA, 19 nt, Artificial Sequence
  Description of Artificial Sequence: Synthetic oligonucleotide
agaggcaucuuuucaagga

SEQ ID NO: 3181531 - RNA, 19 nt, Artificial Sequence
  Description of Artificial Sequence: Synthetic oligonucleotide
uggaauuguguccccacug

SEQ ID NO: 3181532 - RNA, 19 nt, Artificial Sequence
  Description of Artificial Sequence: Synthetic oligonucleotide
agagcugggugacaggaag

SEQ ID NO: 3181533 - RNA, 19 nt, Artificial Sequence
  Description of Artificial Sequence: Synthetic oligonucleotide
uagagcuggaauugugucc

SEQ ID NO: 3181534 - RNA, 19 nt, Artificial Sequence
  Description of Artificial Sequence: Synthetic oligonucleotide
ggauugaggauucugaaga

SEQ ID NO: 3181535 - RNA, 19 nt, Artificial Sequence
  Description of Artificial Sequence: Synthetic oligonucleotide
uccucaacaacuugagagu

SEQ ID NO: 3181536 - RNA, 19 nt, Artificial Sequence
  Description of Artificial Sequence: Synthetic oligonucleotide
agauguccucugcuaaggc

SEQ ID NO: 3181537 - RNA, 19 nt, Artificial Sequence
  Description of Artificial Sequence: Synthetic oligonucleotide
agguacacagggaaggucg

SEQ ID NO: 3181538 - RNA, 19 nt, Artificial Sequence
  Description of Artificial Sequence: Synthetic oligonucleotide
aucuggaaacucuugggca

SEQ ID NO: 3181539 - RNA, 19 nt, Artificial Sequence
  Description of Artificial Sequence: Synthetic oligonucleotide
ucacaguuacccuccagca

SEQ ID NO: 3181540 - RNA, 19 nt, Artificial Sequence
  Description of Artificial Sequence: Synthetic oligonucleotide
uggucauacuucuggaaga

SEQ ID NO: 3181541 - RNA, 19 nt, Artificial Sequence
  Description of Artificial Sequence: Synthetic oligonucleotide
cuuuucaaggauggcagcc

SEQ ID NO: 3181542 - RNA, 19 nt, Artificial Sequence
  Description of Artificial Sequence: Synthetic oligonucleotide
ucgccaaugcaccaagcug

SEQ ID NO: 3181543 - RNA, 19 nt, Artificial Sequence
  Description of Artificial Sequence: Synthetic oligonucleotide
uugaacgccgucacgcuca

SEQ ID NO: 3181544 - RNA, 19 nt, Artificial Sequence
  Description of Artificial Sequence: Synthetic oligonucleotide
gucgagaagguguacuaag

SEQ ID NO: 3181545 - RNA, 19 nt, Artificial Sequence
  Description of Artificial Sequence: Synthetic oligonucleotide
uuccaguagcgcuagcacc

SEQ ID NO: 3181546 - RNA, 19 nt, Artificial Sequence
  Description of Artificial Sequence: Synthetic oligonucleotide
uuuucaaggauggcagccc

SEQ ID NO: 3181547 - RNA, 19 nt, Artificial Sequence
  Description of Artificial Sequence: Synthetic oligonucleotide
agacaggaaccacagcaag

SEQ ID NO: 3181548 - RNA, 19 nt, Artificial Sequence
  Description of Artificial Sequence: Synthetic oligonucleotide
aggcaaguuauccaccuca

SEQ ID NO: 3181549 - RNA, 19 nt, Artificial Sequence
  Description of Artificial Sequence: Synthetic oligonucleotide
agcuuuagucgcaaagucg

SEQ ID NO: 3181550 - RNA, 19 nt, Artificial Sequence
  Description of Artificial Sequence: Synthetic oligonucleotide
uccacaggcaaguuaucca

SEQ ID NO: 3181551 - RNA, 19 nt, Artificial Sequence
  Description of Artificial Sequence: Synthetic oligonucleotide
agagacggcgcacagagua

SEQ ID NO: 3181552 - RNA, 19 nt, Artificial Sequence
  Description of Artificial Sequence: Synthetic oligonucleotide
gagauguccucugcuaagg

SEQ ID NO: 3181553 - RNA, 19 nt, Artificial Sequence
  Description of Artificial Sequence: Synthetic oligonucleotide
caaguuacugccacgucuc

SEQ ID NO: 3181554 - RNA, 19 nt, Artificial Sequence
  Description of Artificial Sequence: Synthetic oligonucleotide
aggaagaugcugggcaugc

SEQ ID NO: 3181555 - RNA, 19 nt, Artificial Sequence
  Description of Artificial Sequence: Synthetic oligonucleotide
uuggcuacugcgucguccc

SEQ ID NO: 3181556 - RNA, 19 nt, Artificial Sequence
  Description of Artificial Sequence: Synthetic oligonucleotide
uuucaaggauggcagcccu

SEQ ID NO: 3181557 - RNA, 19 nt, Artificial Sequence
  Description of Artificial Sequence: Synthetic oligonucleotide
uagcauccuccuuugagga

SEQ ID NO: 3181558 - RNA, 19 nt, Artificial Sequence
  Description of Artificial Sequence: Synthetic oligonucleotide
ggaauuguguccccacugg

SEQ ID NO: 3181559 - RNA, 19 nt, Artificial Sequence
  Description of Artificial Sequence: Synthetic oligonucleotide
uuuagucgcaaagucgccu

SEQ ID NO: 3181560 - RNA, 19 nt, Artificial Sequence
  Description of Artificial Sequence: Synthetic oligonucleotide
uccacaagaggcaucuuuu

SEQ ID NO: 3181561 - RNA, 19 nt, Artificial Sequence
  Description of Artificial Sequence: Synthetic oligonucleotide
uuucaugagagcugugaua

SEQ ID NO: 3181562 - RNA, 19 nt, Artificial Sequence
  Description of Artificial Sequence: Synthetic oligonucleotide
gaagagcacguuauacucc

SEQ ID NO: 3181563 - RNA, 19 nt, Artificial Sequence
  Description of Artificial Sequence: Synthetic oligonucleotide
cauacuucuggaagagcac

SEQ ID NO: 3181564 - RNA, 19 nt, Artificial Sequence
  Description of Artificial Sequence: Synthetic oligonucleotide
ugauagcauagccucgggu

SEQ ID NO: 3181565 - RNA, 19 nt, Artificial Sequence
  Description of Artificial Sequence: Synthetic oligonucleotide
ugagacuggggaugggagc

SEQ ID NO: 3181566 - RNA, 19 nt, Artificial Sequence
  Description of Artificial Sequence: Synthetic oligonucleotide
guuaucuccccggagccgg

SEQ ID NO: 3181567 - RNA, 19 nt, Artificial Sequence
  Description of Artificial Sequence: Synthetic oligonucleotide
agaucuccuguacuggcug

SEQ ID NO: 3181568 - RNA, 19 nt, Artificial Sequence
  Description of Artificial Sequence: Synthetic oligonucleotide
uuuccucaacaacuugaga

SEQ ID NO: 3181569 - RNA, 19 nt, Artificial Sequence
  Description of Artificial Sequence: Synthetic oligonucleotide
uaagaguaagccugggguu

SEQ ID NO: 3181570 - RNA, 19 nt, Artificial Sequence
  Description of Artificial Sequence: Synthetic oligonucleotide
acaggcaaguuauccaccu

SEQ ID NO: 3181571 - RNA, 19 nt, Artificial Sequence
  Description of Artificial Sequence: Synthetic oligonucleotide
uguacuggcuggccaaagu

SEQ ID NO: 3181572 - RNA, 19 nt, Artificial Sequence
  Description of Artificial Sequence: Synthetic oligonucleotide
ucacgcucaaacacucuga

SEQ ID NO: 3181573 - RNA, 19 nt, Artificial Sequence
  Description of Artificial Sequence: Synthetic oligonucleotide
gaucuccuguacuggcugg

SEQ ID NO: 3181574 - RNA, 19 nt, Artificial Sequence
  Description of Artificial Sequence: Synthetic oligonucleotide
caguugaacgccgucacgc

SEQ ID NO: 3181575 - RNA, 19 nt, Artificial Sequence
  Description of Artificial Sequence: Synthetic oligonucleotide
gcugguagggacaaguggg

SEQ ID NO: 3181576 - RNA, 19 nt, Artificial Sequence
  Description of Artificial Sequence: Synthetic oligonucleotide
guagggacaagugggacug

SEQ ID NO: 3181577 - RNA, 19 nt, Artificial Sequence
  Description of Artificial Sequence: Synthetic oligonucleotide
guuaggauugaggauucug

SEQ ID NO: 3181578 - RNA, 19 nt, Artificial Sequence
  Description of Artificial Sequence: Synthetic oligonucleotide
guacuggcuggccaaagug

SEQ ID NO: 3181579 - RNA, 19 nt, Artificial Sequence
  Description of Artificial Sequence: Synthetic oligonucleotide
uacucgccaaugcaccaag

SEQ ID NO: 3181580 - RNA, 19 nt, Artificial Sequence
  Description of Artificial Sequence: Synthetic oligonucleotide
gucacgcucaaacacucug

SEQ ID NO: 3181581 - RNA, 19 nt, Artificial Sequence
  Description of Artificial Sequence: Synthetic oligonucleotide
gacaccaccuggcggauac

SEQ ID NO: 3181582 - RNA, 19 nt, Artificial Sequence
  Description of Artificial Sequence: Synthetic oligonucleotide
ucgucccucacaugggugc

SEQ ID NO: 3181583 - RNA, 19 nt, Artificial Sequence
  Description of Artificial Sequence: Synthetic oligonucleotide
aaggucgagaagguguacu

SEQ ID NO: 3181584 - RNA, 19 nt, Artificial Sequence
  Description of Artificial Sequence: Synthetic oligonucleotide
aaaaguaguaauuaaaauc

SEQ ID NO: 3181585 - RNA, 19 nt, Artificial Sequence
  Description of Artificial Sequence: Synthetic oligonucleotide
aagaucaacauucuuuugc

SEQ ID NO: 3181586 - RNA, 19 nt, Artificial Sequence
  Description of Artificial Sequence: Synthetic oligonucleotide
aaauauguaaaauggaacu

SEQ ID NO: 3181587 - RNA, 19 nt, Artificial Sequence
  Description of Artificial Sequence: Synthetic oligonucleotide
ucaagauuuaacaaaaucu

SEQ ID NO: 3181588 - RNA, 19 nt, Artificial Sequence
  Description of Artificial Sequence: Synthetic oligonucleotide
aauggaacuacguccaggc

SEQ ID NO: 3181589 - RNA, 19 nt, Artificial Sequence
  Description of Artificial Sequence: Synthetic oligonucleotide
aaaguaguaauuaaaaucu

SEQ ID NO: 3181590 - RNA, 19 nt, Artificial Sequence
  Description of Artificial Sequence: Synthetic oligonucleotide
uaauaaauugaguagaggu

SEQ ID NO: 3181591 - RNA, 19 nt, Artificial Sequence
  Description of Artificial Sequence: Synthetic oligonucleotide
uuaguaauaaauugaguag

SEQ ID NO: 3181592 - RNA, 19 nt, Artificial Sequence
  Description of Artificial Sequence: Synthetic oligonucleotide
auuuauaauggauucuucg

SEQ ID NO: 3181593 - RNA, 19 nt, Artificial Sequence
  Description of Artificial Sequence: Synthetic oligonucleotide
uuugcuaauucaaauaugu

SEQ ID NO: 3181594 - RNA, 19 nt, Artificial Sequence
  Description of Artificial Sequence: Synthetic oligonucleotide
uauggaagaaaguugaucu

SEQ ID NO: 3181595 - RNA, 19 nt, Artificial Sequence
  Description of Artificial Sequence: Synthetic oligonucleotide
cucauuuuaagaaaaguag

SEQ ID NO: 3181596 - RNA, 19 nt, Artificial Sequence
  Description of Artificial Sequence: Synthetic oligonucleotide
ugaguagagguauuuaugg

SEQ ID NO: 3181597 - RNA, 19 nt, Artificial Sequence
  Description of Artificial Sequence: Synthetic oligonucleotide
guaaaauggaacuacgucc

SEQ ID NO: 3181598 - RNA, 19 nt, Artificial Sequence
  Description of Artificial Sequence: Synthetic oligonucleotide
uuauugauucauaugaacu

SEQ ID NO: 3181599 - RNA, 19 nt, Artificial Sequence
  Description of Artificial Sequence: Synthetic oligonucleotide
ucaauugggaguauggacc

SEQ ID NO: 3181600 - RNA, 19 nt, Artificial Sequence
  Description of Artificial Sequence: Synthetic oligonucleotide
aaaucuuccuacauuaaac

SEQ ID NO: 3181601 - RNA, 19 nt, Artificial Sequence
  Description of Artificial Sequence: Synthetic oligonucleotide
guaauuaaaaucuuccuac

SEQ ID NO: 3181602 - RNA, 19 nt, Artificial Sequence
  Description of Artificial Sequence: Synthetic oligonucleotide
acauuaaacacaaaacacc

SEQ ID NO: 3181603 - RNA, 19 nt, Artificial Sequence
  Description of Artificial Sequence: Synthetic oligonucleotide
aacacaacuugucaguauc

SEQ ID NO: 3181604 - RNA, 19 nt, Artificial Sequence
  Description of Artificial Sequence: Synthetic oligonucleotide
ucaacugaaagguacacug

SEQ ID NO: 3181605 - RNA, 19 nt, Artificial Sequence
  Description of Artificial Sequence: Synthetic oligonucleotide
uuuauaauggauucuucgc

SEQ ID NO: 3181606 - RNA, 19 nt, Artificial Sequence
  Description of Artificial Sequence: Synthetic oligonucleotide
cuaaacaccuacuucagcc

SEQ ID NO: 3181607 - RNA, 19 nt, Artificial Sequence
  Description of Artificial Sequence: Synthetic oligonucleotide
auacauuuauaauggauuc

SEQ ID NO: 3181608 - RNA, 19 nt, Artificial Sequence
  Description of Artificial Sequence: Synthetic oligonucleotide
aaauagcucauuuuaagaa

SEQ ID NO: 3181609 - RNA, 19 nt, Artificial Sequence
  Description of Artificial Sequence: Synthetic oligonucleotide
uuaaaaucuuccuacauua

SEQ ID NO: 3181610 - RNA, 19 nt, Artificial Sequence
  Description of Artificial Sequence: Synthetic oligonucleotide
uaaaauggaacuacgucca

SEQ ID NO: 3181611 - RNA, 19 nt, Artificial Sequence
  Description of Artificial Sequence: Synthetic oligonucleotide
aacaguaugugcauccacc

SEQ ID NO: 3181612 - RNA, 19 nt, Artificial Sequence
  Description of Artificial Sequence: Synthetic oligonucleotide
caagauuuaacaaaaucuc

SEQ ID NO: 3181613 - RNA, 19 nt, Artificial Sequence
  Description of Artificial Sequence: Synthetic oligonucleotide
ugcuaauucaaauauguaa

SEQ ID NO: 3181614 - RNA, 19 nt, Artificial Sequence
  Description of Artificial Sequence: Synthetic oligonucleotide
ucuguugaagaucugcuug

SEQ ID NO: 3181615 - RNA, 19 nt, Artificial Sequence
  Description of Artificial Sequence: Synthetic oligonucleotide
aacauucuuuugcuaauuc

SEQ ID NO: 3181616 - RNA, 19 nt, Artificial Sequence
  Description of Artificial Sequence: Synthetic oligonucleotide
cuucauauugcagugaacc

SEQ ID NO: 3181617 - RNA, 19 nt, Artificial Sequence
  Description of Artificial Sequence: Synthetic oligonucleotide
uuuaagaaaaguaguaauu

SEQ ID NO: 3181618 - RNA, 19 nt, Artificial Sequence
  Description of Artificial Sequence: Synthetic oligonucleotide
uuauaauggauucuucgcu

SEQ ID NO: 3181619 - RNA, 19 nt, Artificial Sequence
  Description of Artificial Sequence: Synthetic oligonucleotide
aaagugaacacugaagccu

SEQ ID NO: 3181620 - RNA, 19 nt, Artificial Sequence
  Description of Artificial Sequence: Synthetic oligonucleotide
acaaauagcucauuuuaag

SEQ ID NO: 3181621 - RNA, 19 nt, Artificial Sequence
  Description of Artificial Sequence: Synthetic oligonucleotide
uuguacaugggauacauuc

SEQ ID NO: 3181622 - RNA, 19 nt, Artificial Sequence
  Description of Artificial Sequence: Synthetic oligonucleotide
aauacauuuauaauggauu

SEQ ID NO: 3181623 - RNA, 19 nt, Artificial Sequence
  Description of Artificial Sequence: Synthetic oligonucleotide
acuaagcucaacugaaagg

SEQ ID NO: 3181624 - RNA, 19 nt, Artificial Sequence
  Description of Artificial Sequence: Synthetic oligonucleotide
aggaacaguaugugcaucc

SEQ ID NO: 3181625 - RNA, 19 nt, Artificial Sequence
  Description of Artificial Sequence: Synthetic oligonucleotide
aauagcucauuuuaagaaa

SEQ ID NO: 3181626 - RNA, 19 nt, Artificial Sequence
  Description of Artificial Sequence: Synthetic oligonucleotide
gagaauggcucucugaagc

SEQ ID NO: 3181627 - RNA, 19 nt, Artificial Sequence
  Description of Artificial Sequence: Synthetic oligonucleotide
aagagaauccucuucuacu

SEQ ID NO: 3181628 - RNA, 19 nt, Artificial Sequence
  Description of Artificial Sequence: Synthetic oligonucleotide
gauucauaugaacuguuug

SEQ ID NO: 3181629 - RNA, 19 nt, Artificial Sequence
  Description of Artificial Sequence: Synthetic oligonucleotide
agaccuuaguaauaaauug

SEQ ID NO: 3181630 - RNA, 19 nt, Artificial Sequence
  Description of Artificial Sequence: Synthetic oligonucleotide
ucuuuuauugauucauaug

SEQ ID NO: 3181631 - RNA, 19 nt, Artificial Sequence
  Description of Artificial Sequence: Synthetic oligonucleotide
aaaaucuuccuacauuaaa

SEQ ID NO: 3181632 - RNA, 19 nt, Artificial Sequence
  Description of Artificial Sequence: Synthetic oligonucleotide
uuaaaaccuuucaaaauuc

SEQ ID NO: 3181633 - RNA, 19 nt, Artificial Sequence
  Description of Artificial Sequence: Synthetic oligonucleotide
aacaccaaagaccuuagua

SEQ ID NO: 3181634 - RNA, 19 nt, Artificial Sequence
  Description of Artificial Sequence: Synthetic oligonucleotide
uuagguugaauacauuuau

SEQ ID NO: 3181635 - RNA, 19 nt, Artificial Sequence
  Description of Artificial Sequence: Synthetic oligonucleotide
uaaaaccuuucaaaauucc

SEQ ID NO: 3181636 - RNA, 19 nt, Artificial Sequence
  Description of Artificial Sequence: Synthetic oligonucleotide
ugaagccugacucaccucc

SEQ ID NO: 3181637 - RNA, 19 nt, Artificial Sequence
  Description of Artificial Sequence: Synthetic oligonucleotide
cauucaauugggaguaugg

SEQ ID NO: 3181638 - RNA, 19 nt, Artificial Sequence
  Description of Artificial Sequence: Synthetic oligonucleotide
aguaauuaaaaucuuccua

SEQ ID NO: 3181639 - RNA, 19 nt, Artificial Sequence
  Description of Artificial Sequence: Synthetic oligonucleotide
uugaucucaaagaugcucu

SEQ ID NO: 3181640 - RNA, 19 nt, Artificial Sequence
  Description of Artificial Sequence: Synthetic oligonucleotide
augggauacauucuugguc

SEQ ID NO: 3181641 - RNA, 19 nt, Artificial Sequence
  Description of Artificial Sequence: Synthetic oligonucleotide
acaaguguggccuccuuac

SEQ ID NO: 3181642 - RNA, 19 nt, Artificial Sequence
  Description of Artificial Sequence: Synthetic oligonucleotide
acuacguccaggcucagag

SEQ ID NO: 3181643 - RNA, 19 nt, Artificial Sequence
  Description of Artificial Sequence: Synthetic oligonucleotide
uaguaauaaauugaguaga

SEQ ID NO: 3181644 - RNA, 19 nt, Artificial Sequence
  Description of Artificial Sequence: Synthetic oligonucleotide
uugaguagagguauuuaug

SEQ ID NO: 3181645 - RNA, 19 nt, Artificial Sequence
  Description of Artificial Sequence: Synthetic oligonucleotide
ugucaguauccacacaugc

SEQ ID NO: 3181646 - RNA, 19 nt, Artificial Sequence
  Description of Artificial Sequence: Synthetic oligonucleotide
ugggauacauucuuggucu

SEQ ID NO: 3181647 - RNA, 19 nt, Artificial Sequence
  Description of Artificial Sequence: Synthetic oligonucleotide
ucaguauccacacaugcau

SEQ ID NO: 3181648 - RNA, 19 nt, Artificial Sequence
  Description of Artificial Sequence: Synthetic oligonucleotide
uauggacccauugagaaug

SEQ ID NO: 3181649 - RNA, 19 nt, Artificial Sequence
  Description of Artificial Sequence: Synthetic oligonucleotide
aagaugcucucauucacug

SEQ ID NO: 3181650 - RNA, 19 nt, Artificial Sequence
  Description of Artificial Sequence: Synthetic oligonucleotide
uugcagauuucauaaacca

SEQ ID NO: 3181651 - RNA, 19 nt, Artificial Sequence
  Description of Artificial Sequence: Synthetic oligonucleotide
aacguaaacaccaccagca

SEQ ID NO: 3181652 - RNA, 19 nt, Artificial Sequence
  Description of Artificial Sequence: Synthetic oligonucleotide
aacaccaccagcagacugc

SEQ ID NO: 3181653 - RNA, 19 nt, Artificial Sequence
  Description of Artificial Sequence: Synthetic oligonucleotide
aagcucaacugaaagguac

SEQ ID NO: 3181654 - RNA, 19 nt, Artificial Sequence
  Description of Artificial Sequence: Synthetic oligonucleotide
acuacuuaaaaccuuucaa

SEQ ID NO: 3181655 - RNA, 19 nt, Artificial Sequence
  Description of Artificial Sequence: Synthetic oligonucleotide
aaggagucugcuuuguaca

SEQ ID NO: 3181656 - RNA, 19 nt, Artificial Sequence
  Description of Artificial Sequence: Synthetic oligonucleotide
uaauuaaaaucuuccuaca

SEQ ID NO: 3181657 - RNA, 19 nt, Artificial Sequence
  Description of Artificial Sequence: Synthetic oligonucleotide
uugacaaugucuguugaag

SEQ ID NO: 3181658 - RNA, 19 nt, Artificial Sequence
  Description of Artificial Sequence: Synthetic oligonucleotide
accaaacacaacuugucag

SEQ ID NO: 3181659 - RNA, 19 nt, Artificial Sequence
  Description of Artificial Sequence: Synthetic oligonucleotide
ucagaguuagguugaauac

SEQ ID NO: 3181660 - RNA, 19 nt, Artificial Sequence
  Description of Artificial Sequence: Synthetic oligonucleotide
agguugaauacauuuauaa

SEQ ID NO: 3181661 - RNA, 19 nt, Artificial Sequence
  Description of Artificial Sequence: Synthetic oligonucleotide
uucaauugggaguauggac

SEQ ID NO: 3181662 - RNA, 19 nt, Artificial Sequence
  Description of Artificial Sequence: Synthetic oligonucleotide
auuaaaaucuuccuacauu

SEQ ID NO: 3181663 - RNA, 19 nt, Artificial Sequence
  Description of Artificial Sequence: Synthetic oligonucleotide
acuaaacaccuacuucagc

SEQ ID NO: 3181664 - RNA, 19 nt, Artificial Sequence
  Description of Artificial Sequence: Synthetic oligonucleotide
uugagaauggcucucugaa

SEQ ID NO: 3181665 - RNA, 19 nt, Artificial Sequence
  Description of Artificial Sequence: Synthetic oligonucleotide
aaccaaacacaacuuguca

SEQ ID NO: 3181666 - RNA, 19 nt, Artificial Sequence
  Description of Artificial Sequence: Synthetic oligonucleotide
ugcucaagauuuaacaaaa

SEQ ID NO: 3181667 - RNA, 19 nt, Artificial Sequence
  Description of Artificial Sequence: Synthetic oligonucleotide
uaaacaagaucaacauucu

SEQ ID NO: 3181668 - RNA, 19 nt, Artificial Sequence
  Description of Artificial Sequence: Synthetic oligonucleotide
aguuagguugaauacauuu

SEQ ID NO: 3181669 - RNA, 19 nt, Artificial Sequence
  Description of Artificial Sequence: Synthetic oligonucleotide
cucaagauuuaacaaaauc

SEQ ID NO: 3181670 - RNA, 19 nt, Artificial Sequence
  Description of Artificial Sequence: Synthetic oligonucleotide
auuuaacaaaaucucuaca

SEQ ID NO: 3181671 - RNA, 19 nt, Artificial Sequence
  Description of Artificial Sequence: Synthetic oligonucleotide
aagauuuaacaaaaucucu

SEQ ID NO: 3181672 - RNA, 19 nt, Artificial Sequence
  Description of Artificial Sequence: Synthetic oligonucleotide
auuccagggaaacuguaag

SEQ ID NO: 3181673 - RNA, 19 nt, Artificial Sequence
  Description of Artificial Sequence: Synthetic oligonucleotide
aaauggaacuacguccagg

SEQ ID NO: 3181674 - RNA, 19 nt, Artificial Sequence
  Description of Artificial Sequence: Synthetic oligonucleotide
aguagagguauuuauggaa

SEQ ID NO: 3181675 - RNA, 19 nt, Artificial Sequence
  Description of Artificial Sequence: Synthetic oligonucleotide
auaaauugaguagagguau

SEQ ID NO: 3181676 - RNA, 19 nt, Artificial Sequence
  Description of Artificial Sequence: Synthetic oligonucleotide
aauaaauugaguagaggua

SEQ ID NO: 3181677 - RNA, 19 nt, Artificial Sequence
  Description of Artificial Sequence: Synthetic oligonucleotide
agaguuaaguggcuugauc

SEQ ID NO: 3181678 - RNA, 19 nt, Artificial Sequence
  Description of Artificial Sequence: Synthetic oligonucleotide
acaccaaagaccuuaguaa

SEQ ID NO: 3181679 - RNA, 19 nt, Artificial Sequence
  Description of Artificial Sequence: Synthetic oligonucleotide
uggaagaaaguugaucucc

SEQ ID NO: 3181680 - RNA, 19 nt, Artificial Sequence
  Description of Artificial Sequence: Synthetic oligonucleotide
aaggaaggccaacguaaac

SEQ ID NO: 3181681 - RNA, 19 nt, Artificial Sequence
  Description of Artificial Sequence: Synthetic oligonucleotide
agguauuuauggaagaaag

SEQ ID NO: 3181682 - RNA, 19 nt, Artificial Sequence
  Description of Artificial Sequence: Synthetic oligonucleotide
aucaacauucuuuugcuaa

SEQ ID NO: 3181683 - RNA, 19 nt, Artificial Sequence
  Description of Artificial Sequence: Synthetic oligonucleotide
agaagaaggagucugcuuu

SEQ ID NO: 3181684 - RNA, 19 nt, Artificial Sequence
  Description of Artificial Sequence: Synthetic oligonucleotide
ucgacaaugaaacagaagg

SEQ ID NO: 3181685 - RNA, 19 nt, Artificial Sequence
  Description of Artificial Sequence: Synthetic oligonucleotide
ucagaaaucgccaaacucg

SEQ ID NO: 3181686 - RNA, 19 nt, Artificial Sequence
  Description of Artificial Sequence: Synthetic oligonucleotide
aaaagcaucgaagacacac

SEQ ID NO: 3181687 - RNA, 19 nt, Artificial Sequence
  Description of Artificial Sequence: Synthetic oligonucleotide
auuucgaggauccaauucc

SEQ ID NO: 3181688 - RNA, 19 nt, Artificial Sequence
  Description of Artificial Sequence: Synthetic oligonucleotide
aagagcgccauccaagucc

SEQ ID NO: 3181689 - RNA, 19 nt, Artificial Sequence
  Description of Artificial Sequence: Synthetic oligonucleotide
aauucaacagcacacggug

SEQ ID NO: 3181690 - RNA, 19 nt, Artificial Sequence
  Description of Artificial Sequence: Synthetic oligonucleotide
ugagaaacugacaugcggg

SEQ ID NO: 3181691 - RNA, 19 nt, Artificial Sequence
  Description of Artificial Sequence: Synthetic oligonucleotide
uuaaaagcaucgaagacac

SEQ ID NO: 3181692 - RNA, 19 nt, Artificial Sequence
  Description of Artificial Sequence: Synthetic oligonucleotide
agguuguacaaacacaucg

SEQ ID NO: 3181693 - RNA, 19 nt, Artificial Sequence
  Description of Artificial Sequence: Synthetic oligonucleotide
uaggacaccucucauagcg

SEQ ID NO: 3181694 - RNA, 19 nt, Artificial Sequence
  Description of Artificial Sequence: Synthetic oligonucleotide
augauuagguuguacaaac

SEQ ID NO: 3181695 - RNA, 19 nt, Artificial Sequence
  Description of Artificial Sequence: Synthetic oligonucleotide
acaaacacaucgcaaauuc

SEQ ID NO: 3181696 - RNA, 19 nt, Artificial Sequence
  Description of Artificial Sequence: Synthetic oligonucleotide
aacaugauuagguuguaca

SEQ ID NO: 3181697 - RNA, 19 nt, Artificial Sequence
  Description of Artificial Sequence: Synthetic oligonucleotide
caaugaaacagaaggacgg

SEQ ID NO: 3181698 - RNA, 19 nt, Artificial Sequence
  Description of Artificial Sequence: Synthetic oligonucleotide
agaaccgugagagugaugg

SEQ ID NO: 3181699 - RNA, 19 nt, Artificial Sequence
  Description of Artificial Sequence: Synthetic oligonucleotide
aagacuucugcaguuauuc

SEQ ID NO: 3181700 - RNA, 19 nt, Artificial Sequence
  Description of Artificial Sequence: Synthetic oligonucleotide
ucucagaaagcaaaugacc

SEQ ID NO: 3181701 - RNA, 19 nt, Artificial Sequence
  Description of Artificial Sequence: Synthetic oligonucleotide
uuagguuguacaaacacau

SEQ ID NO: 3181702 - RNA, 19 nt, Artificial Sequence
  Description of Artificial Sequence: Synthetic oligonucleotide
ugucucagaaagcaaauga

SEQ ID NO: 3181703 - RNA, 19 nt, Artificial Sequence
  Description of Artificial Sequence: Synthetic oligonucleotide
aaaugaccugcagacaacc

SEQ ID NO: 3181704 - RNA, 19 nt, Artificial Sequence
  Description of Artificial Sequence: Synthetic oligonucleotide
aaugaaacagaaggacggc

SEQ ID NO: 3181705 - RNA, 19 nt, Artificial Sequence
  Description of Artificial Sequence: Synthetic oligonucleotide
aaucacugggcauuggugu

SEQ ID NO: 3181706 - RNA, 19 nt, Artificial Sequence
  Description of Artificial Sequence: Synthetic oligonucleotide
aacagcacacggugcagcc

SEQ ID NO: 3181707 - RNA, 19 nt, Artificial Sequence
  Description of Artificial Sequence: Synthetic oligonucleotide
uauucugucucagaaagca

SEQ ID NO: 3181708 - RNA, 19 nt, Artificial Sequence
  Description of Artificial Sequence: Synthetic oligonucleotide
aaguccuuuaaaagcaucg

SEQ ID NO: 3181709 - RNA, 19 nt, Artificial Sequence
  Description of Artificial Sequence: Synthetic oligonucleotide
cauaggacaccucucauag

SEQ ID NO: 3181710 - RNA, 19 nt, Artificial Sequence
  Description of Artificial Sequence: Synthetic oligonucleotide
acaucgcaaauucaacagc

SEQ ID NO: 3181711 - RNA, 19 nt, Artificial Sequence
  Description of Artificial Sequence: Synthetic oligonucleotide
cuuuacuggaggaaaacug

SEQ ID NO: 3181712 - RNA, 19 nt, Artificial Sequence
  Description of Artificial Sequence: Synthetic oligonucleotide
aguccgagaacauaggaca

SEQ ID NO: 3181713 - RNA, 19 nt, Artificial Sequence
  Description of Artificial Sequence: Synthetic oligonucleotide
ucagcaggaaaccuguuac

SEQ ID NO: 3181714 - RNA, 19 nt, Artificial Sequence
  Description of Artificial Sequence: Synthetic oligonucleotide
uggaaacaugauuagguug

SEQ ID NO: 3181715 - RNA, 19 nt, Artificial Sequence
  Description of Artificial Sequence: Synthetic oligonucleotide
ugaaacagaaggacggcug

SEQ ID NO: 3181716 - RNA, 19 nt, Artificial Sequence
  Description of Artificial Sequence: Synthetic oligonucleotide
ucuaugugaggugagaaac

SEQ ID NO: 3181717 - RNA, 19 nt, Artificial Sequence
  Description of Artificial Sequence: Synthetic oligonucleotide
aaccuuuucuaugagccuc

SEQ ID NO: 3181718 - RNA, 19 nt, Artificial Sequence
  Description of Artificial Sequence: Synthetic oligonucleotide
uuucgaggauccaauuccg

SEQ ID NO: 3181719 - RNA, 19 nt, Artificial Sequence
  Description of Artificial Sequence: Synthetic oligonucleotide
ucuagcuccguagaaagcc

SEQ ID NO: 3181720 - RNA, 19 nt, Artificial Sequence
  Description of Artificial Sequence: Synthetic oligonucleotide
gagaaacugacaugcgggg

SEQ ID NO: 3181721 - RNA, 19 nt, Artificial Sequence
  Description of Artificial Sequence: Synthetic oligonucleotide
gugagagugauggugaccg

SEQ ID NO: 3181722 - RNA, 19 nt, Artificial Sequence
  Description of Artificial Sequence: Synthetic oligonucleotide
uucaacagcacacggugca

SEQ ID NO: 3181723 - RNA, 19 nt, Artificial Sequence
  Description of Artificial Sequence: Synthetic oligonucleotide
aaccgggucagaaaucgcc

SEQ ID NO: 3181724 - RNA, 19 nt, Artificial Sequence
  Description of Artificial Sequence: Synthetic oligonucleotide
gugagaaacugacaugcgg

SEQ ID NO: 3181725 - RNA, 19 nt, Artificial Sequence
  Description of Artificial Sequence: Synthetic oligonucleotide
aacacaucgcaaauucaac

SEQ ID NO: 3181726 - RNA, 19 nt, Artificial Sequence
  Description of Artificial Sequence: Synthetic oligonucleotide
uuacguucuagcuccguag

SEQ ID NO: 3181727 - RNA, 19 nt, Artificial Sequence
  Description of Artificial Sequence: Synthetic oligonucleotide
aaagcaucgaagacacacg

SEQ ID NO: 3181728 - RNA, 19 nt, Artificial Sequence
  Description of Artificial Sequence: Synthetic oligonucleotide
gaaaucgccaaacucgaca

SEQ ID NO: 3181729 - RNA, 19 nt, Artificial Sequence
  Description of Artificial Sequence: Synthetic oligonucleotide
cacaucgcaaauucaacag

SEQ ID NO: 3181730 - RNA, 19 nt, Artificial Sequence
  Description of Artificial Sequence: Synthetic oligonucleotide
ccaaacucgacaaugaaac

SEQ ID NO: 3181731 - RNA, 19 nt, Artificial Sequence
  Description of Artificial Sequence: Synthetic oligonucleotide
uaaucacugggcauuggug

SEQ ID NO: 3181732 - RNA, 19 nt, Artificial Sequence
  Description of Artificial Sequence: Synthetic oligonucleotide
guucuagcuccguagaaag

SEQ ID NO: 3181733 - RNA, 19 nt, Artificial Sequence
  Description of Artificial Sequence: Synthetic oligonucleotide
augauugaggucuuccucu

SEQ ID NO: 3181734 - RNA, 19 nt, Artificial Sequence
  Description of Artificial Sequence: Synthetic oligonucleotide
gaaacagaaggacggcugc

SEQ ID NO: 3181735 - RNA, 19 nt, Artificial Sequence
  Description of Artificial Sequence: Synthetic oligonucleotide
agggcgagaaaggagagcg

SEQ ID NO: 3181736 - RNA, 19 nt, Artificial Sequence
  Description of Artificial Sequence: Synthetic oligonucleotide
caaaaccuuuucuaugagc

SEQ ID NO: 3181737 - RNA, 19 nt, Artificial Sequence
  Description of Artificial Sequence: Synthetic oligonucleotide
gagagcauuucuaugugag

SEQ ID NO: 3181738 - RNA, 19 nt, Artificial Sequence
  Description of Artificial Sequence: Synthetic oligonucleotide
ucgcaaauucaacagcaca

SEQ ID NO: 3181739 - RNA, 19 nt, Artificial Sequence
  Description of Artificial Sequence: Synthetic oligonucleotide
aaggacggcugccuguuuc

SEQ ID NO: 3181740 - RNA, 19 nt, Artificial Sequence
  Description of Artificial Sequence: Synthetic oligonucleotide
ucucucaaccacucguccg

SEQ ID NO: 3181741 - RNA, 19 nt, Artificial Sequence
  Description of Artificial Sequence: Synthetic oligonucleotide
agugauggugaccggcagc

SEQ ID NO: 3181742 - RNA, 19 nt, Artificial Sequence
  Description of Artificial Sequence: Synthetic oligonucleotide
accuguuacguucuagcuc

SEQ ID NO: 3181743 - RNA, 19 nt, Artificial Sequence
  Description of Artificial Sequence: Synthetic oligonucleotide
auaggaucagaaccgugag

SEQ ID NO: 3181744 - RNA, 19 nt, Artificial Sequence
  Description of Artificial Sequence: Synthetic oligonucleotide
gaagacacacgcagaaccg

SEQ ID NO: 3181745 - RNA, 19 nt, Artificial Sequence
  Description of Artificial Sequence: Synthetic oligonucleotide
uaugugaggugagaaacug

SEQ ID NO: 3181746 - RNA, 19 nt, Artificial Sequence
  Description of Artificial Sequence: Synthetic oligonucleotide
uacuggaggaaaacuggag

SEQ ID NO: 3181747 - RNA, 19 nt, Artificial Sequence
  Description of Artificial Sequence: Synthetic oligonucleotide
acacaucgcaaauucaaca

SEQ ID NO: 3181748 - RNA, 19 nt, Artificial Sequence
  Description of Artificial Sequence: Synthetic oligonucleotide
agagcauuucuaugugagg

SEQ ID NO: 3181749 - RNA, 19 nt, Artificial Sequence
  Description of Artificial Sequence: Synthetic oligonucleotide
gauuucgaggauccaauuc

SEQ ID NO: 3181750 - RNA, 19 nt, Artificial Sequence
  Description of Artificial Sequence: Synthetic oligonucleotide
gaugauugaggucuuccuc

SEQ ID NO: 3181751 - RNA, 19 nt, Artificial Sequence
  Description of Artificial Sequence: Synthetic oligonucleotide
aaauucaacagcacacggu

SEQ ID NO: 3181752 - RNA, 19 nt, Artificial Sequence
  Description of Artificial Sequence: Synthetic oligonucleotide
uuacuggaggaaaacugga

SEQ ID NO: 3181753 - RNA, 19 nt, Artificial Sequence
  Description of Artificial Sequence: Synthetic oligonucleotide
aaaccuuuucuaugagccu

SEQ ID NO: 3181754 - RNA, 19 nt, Artificial Sequence
  Description of Artificial Sequence: Synthetic oligonucleotide
gaacauaggacaccucuca

SEQ ID NO: 3181755 - RNA, 19 nt, Artificial Sequence
  Description of Artificial Sequence: Synthetic oligonucleotide
aagacacacgcagaaccgg

SEQ ID NO: 3181756 - RNA, 19 nt, Artificial Sequence
  Description of Artificial Sequence: Synthetic oligonucleotide
cuugggacauaaucacugg

SEQ ID NO: 3181757 - RNA, 19 nt, Artificial Sequence
  Description of Artificial Sequence: Synthetic oligonucleotide
caggaaaccuguuacguuc

SEQ ID NO: 3181758 - RNA, 19 nt, Artificial Sequence
  Description of Artificial Sequence: Synthetic oligonucleotide
cauaggaucagaaccguga

SEQ ID NO: 3181759 - RNA, 19 nt, Artificial Sequence
  Description of Artificial Sequence: Synthetic oligonucleotide
ucgaggauccaauuccgug

SEQ ID NO: 3181760 - RNA, 19 nt, Artificial Sequence
  Description of Artificial Sequence: Synthetic oligonucleotide
acaugauuagguuguacaa

SEQ ID NO: 3181761 - RNA, 19 nt, Artificial Sequence
  Description of Artificial Sequence: Synthetic oligonucleotide
accagaacggcucuggaaa

SEQ ID NO: 3181762 - RNA, 19 nt, Artificial Sequence
  Description of Artificial Sequence: Synthetic oligonucleotide
uggugucuggcaaggauca

SEQ ID NO: 3181763 - RNA, 19 nt, Artificial Sequence
  Description of Artificial Sequence: Synthetic oligonucleotide
gauagcaccauaggaucag

SEQ ID NO: 3181764 - RNA, 19 nt, Artificial Sequence
  Description of Artificial Sequence: Synthetic oligonucleotide
aaccacucguccgugcugg

SEQ ID NO: 3181765 - RNA, 19 nt, Artificial Sequence
  Description of Artificial Sequence: Synthetic oligonucleotide
uuggugucuggcaaggauc

SEQ ID NO: 3181766 - RNA, 19 nt, Artificial Sequence
  Description of Artificial Sequence: Synthetic oligonucleotide
uuccucagcaggaaaccug

SEQ ID NO: 3181767 - RNA, 19 nt, Artificial Sequence
  Description of Artificial Sequence: Synthetic oligonucleotide
agccaaaaccuuuucuaug

SEQ ID NO: 3181768 - RNA, 19 nt, Artificial Sequence
  Description of Artificial Sequence: Synthetic oligonucleotide
gucagaaaucgccaaacuc

SEQ ID NO: 3181769 - RNA, 19 nt, Artificial Sequence
  Description of Artificial Sequence: Synthetic oligonucleotide
agccucaaaaguccuuggg

SEQ ID NO: 3181770 - RNA, 19 nt, Artificial Sequence
  Description of Artificial Sequence: Synthetic oligonucleotide
caucgcaaauucaacagca

SEQ ID NO: 3181771 - RNA, 19 nt, Artificial Sequence
  Description of Artificial Sequence: Synthetic oligonucleotide
agcauuucuaugugaggug

SEQ ID NO: 3181772 - RNA, 19 nt, Artificial Sequence
  Description of Artificial Sequence: Synthetic oligonucleotide
ugucuggcaaggaucagau

SEQ ID NO: 3181773 - RNA, 19 nt, Artificial Sequence
  Description of Artificial Sequence: Synthetic oligonucleotide
aacggcucuggaaacauga

SEQ ID NO: 3181774 - RNA, 19 nt, Artificial Sequence
  Description of Artificial Sequence: Synthetic oligonucleotide
ugacaugcggggaugcaga

SEQ ID NO: 3181775 - RNA, 19 nt, Artificial Sequence
  Description of Artificial Sequence: Synthetic oligonucleotide
cuagcuccguagaaagccg

SEQ ID NO: 3181776 - RNA, 19 nt, Artificial Sequence
  Description of Artificial Sequence: Synthetic oligonucleotide
aucacugggcauugguguc

SEQ ID NO: 3181777 - RNA, 19 nt, Artificial Sequence
  Description of Artificial Sequence: Synthetic oligonucleotide
uaugagccucaaaaguccu

SEQ ID NO: 3181778 - RNA, 19 nt, Artificial Sequence
  Description of Artificial Sequence: Synthetic oligonucleotide
aguccuugggacauaauca

SEQ ID NO: 3181779 - RNA, 19 nt, Artificial Sequence
  Description of Artificial Sequence: Synthetic oligonucleotide
ugcagccaaaaccuuuucu

SEQ ID NO: 3181780 - RNA, 19 nt, Artificial Sequence
  Description of Artificial Sequence: Synthetic oligonucleotide
uacguucuagcuccguaga

SEQ ID NO: 3181781 - RNA, 19 nt, Artificial Sequence
  Description of Artificial Sequence: Synthetic oligonucleotide
aacauaggacaccucucau

SEQ ID NO: 3181782 - RNA, 19 nt, Artificial Sequence
  Description of Artificial Sequence: Synthetic oligonucleotide
uucuaugugaggugagaaa

SEQ ID NO: 3181783 - RNA, 19 nt, Artificial Sequence
  Description of Artificial Sequence: Synthetic oligonucleotide
aucgaagacacacgcagaa

SEQ ID NO: 3181784 - RNA, 19 nt, Artificial Sequence
  Description of Artificial Sequence: Synthetic oligonucleotide
uagagauacacuuaacccg

SEQ ID NO: 3181785 - RNA, 19 nt, Artificial Sequence
  Description of Artificial Sequence: Synthetic oligonucleotide
uguaguguagguuaaagga

SEQ ID NO: 3181786 - RNA, 19 nt, Artificial Sequence
  Description of Artificial Sequence: Synthetic oligonucleotide
ucuagagauacacuuaacc

SEQ ID NO: 3181787 - RNA, 19 nt, Artificial Sequence
  Description of Artificial Sequence: Synthetic oligonucleotide
ucuuguuccagacaggagc

SEQ ID NO: 3181788 - RNA, 19 nt, Artificial Sequence
  Description of Artificial Sequence: Synthetic oligonucleotide
aaaggauugguauggcaac

SEQ ID NO: 3181789 - RNA, 19 nt, Artificial Sequence
  Description of Artificial Sequence: Synthetic oligonucleotide
gaagucuuguuccagacag

SEQ ID NO: 3181790 - RNA, 19 nt, Artificial Sequence
  Description of Artificial Sequence: Synthetic oligonucleotide
agaggugacaagcugaggg

SEQ ID NO: 3181791 - RNA, 19 nt, Artificial Sequence
  Description of Artificial Sequence: Synthetic oligonucleotide
cuagagauacacuuaaccc

SEQ ID NO: 3181792 - RNA, 19 nt, Artificial Sequence
  Description of Artificial Sequence: Synthetic oligonucleotide
ugagaagcagcccaccugg

SEQ ID NO: 3181793 - RNA, 19 nt, Artificial Sequence
  Description of Artificial Sequence: Synthetic oligonucleotide
aacauauucuuauccaggu

SEQ ID NO: 3181794 - RNA, 19 nt, Artificial Sequence
  Description of Artificial Sequence: Synthetic oligonucleotide
cauauucuuauccagguug

SEQ ID NO: 3181795 - RNA, 19 nt, Artificial Sequence
  Description of Artificial Sequence: Synthetic oligonucleotide
uucuuauccagguuggugc

SEQ ID NO: 3181796 - RNA, 19 nt, Artificial Sequence
  Description of Artificial Sequence: Synthetic oligonucleotide
gauacacuuaacccgcugg

SEQ ID NO: 3181797 - RNA, 19 nt, Artificial Sequence
  Description of Artificial Sequence: Synthetic oligonucleotide
uauucucagaguucuagag

SEQ ID NO: 3181798 - RNA, 19 nt, Artificial Sequence
  Description of Artificial Sequence: Synthetic oligonucleotide
uaaaggauugguauggcaa

SEQ ID NO: 3181799 - RNA, 19 nt, Artificial Sequence
  Description of Artificial Sequence: Synthetic oligonucleotide
uguguuucugagaagcagc

SEQ ID NO: 3181800 - RNA, 19 nt, Artificial Sequence
  Description of Artificial Sequence: Synthetic oligonucleotide
aacccgcuggguuaggccc

SEQ ID NO: 3181801 - RNA, 19 nt, Artificial Sequence
  Description of Artificial Sequence: Synthetic oligonucleotide
agagauacacuuaacccgc

SEQ ID NO: 3181802 - RNA, 19 nt, Artificial Sequence
  Description of Artificial Sequence: Synthetic oligonucleotide
caacauauucuuauccagg

SEQ ID NO: 3181803 - RNA, 19 nt, Artificial Sequence
  Description of Artificial Sequence: Synthetic oligonucleotide
auguaguguagguuaaagg

SEQ ID NO: 3181804 - RNA, 19 nt, Artificial Sequence
  Description of Artificial Sequence: Synthetic oligonucleotide
uagguuaaaggauugguau

SEQ ID NO: 3181805 - RNA, 19 nt, Artificial Sequence
  Description of Artificial Sequence: Synthetic oligonucleotide
uauggcaacauauucuuau

SEQ ID NO: 3181806 - RNA, 19 nt, Artificial Sequence
  Description of Artificial Sequence: Synthetic oligonucleotide
ugagcuguggccauuucug

SEQ ID NO: 3181807 - RNA, 19 nt, Artificial Sequence
  Description of Artificial Sequence: Synthetic oligonucleotide
uguacuuucucuggcagag

SEQ ID NO: 3181808 - RNA, 19 nt, Artificial Sequence
  Description of Artificial Sequence: Synthetic oligonucleotide
ucuauucucagaguucuag

SEQ ID NO: 3181809 - RNA, 19 nt, Artificial Sequence
  Description of Artificial Sequence: Synthetic oligonucleotide
gaagcucuggacugcaggg

SEQ ID NO: 3181810 - RNA, 19 nt, Artificial Sequence
  Description of Artificial Sequence: Synthetic oligonucleotide
ggugcuucuauucucagag

SEQ ID NO: 3181811 - RNA, 19 nt, Artificial Sequence
  Description of Artificial Sequence: Synthetic oligonucleotide
agauccacuggaugagucc

SEQ ID NO: 3181812 - RNA, 19 nt, Artificial Sequence
  Description of Artificial Sequence: Synthetic oligonucleotide
uucucagaguucuagagau

SEQ ID NO: 3181813 - RNA, 19 nt, Artificial Sequence
  Description of Artificial Sequence: Synthetic oligonucleotide
uggcaacauauucuuaucc

SEQ ID NO: 3181814 - RNA, 19 nt, Artificial Sequence
  Description of Artificial Sequence: Synthetic oligonucleotide
ugguauggcaacauauucu

SEQ ID NO: 3181815 - RNA, 19 nt, Artificial Sequence
  Description of Artificial Sequence: Synthetic oligonucleotide
auacacuuaacccgcuggg

SEQ ID NO: 3181816 - RNA, 19 nt, Artificial Sequence
  Description of Artificial Sequence: Synthetic oligonucleotide
uuuagauccacuggaugag

SEQ ID NO: 3181817 - RNA, 19 nt, Artificial Sequence
  Description of Artificial Sequence: Synthetic oligonucleotide
aguuuuccugagcuguggc

SEQ ID NO: 3181818 - RNA, 19 nt, Artificial Sequence
  Description of Artificial Sequence: Synthetic oligonucleotide
acuggaguuuuccugagcu

SEQ ID NO: 3181819 - RNA, 19 nt, Artificial Sequence
  Description of Artificial Sequence: Synthetic oligonucleotide
cuuuagauccacuggauga

SEQ ID NO: 3181820 - RNA, 19 nt, Artificial Sequence
  Description of Artificial Sequence: Synthetic oligonucleotide
aagcagcccaccuggggcc

SEQ ID NO: 3181821 - RNA, 19 nt, Artificial Sequence
  Description of Artificial Sequence: Synthetic oligonucleotide
uuaaaggauugguauggca

SEQ ID NO: 3181822 - RNA, 19 nt, Artificial Sequence
  Description of Artificial Sequence: Synthetic oligonucleotide
gauguaguguagguuaaag

SEQ ID NO: 3181823 - RNA, 19 nt, Artificial Sequence
  Description of Artificial Sequence: Synthetic oligonucleotide
uugguauggcaacauauuc

SEQ ID NO: 3181824 - RNA, 19 nt, Artificial Sequence
  Description of Artificial Sequence: Synthetic oligonucleotide
cuuguuccagacaggagcc

SEQ ID NO: 3181825 - RNA, 19 nt, Artificial Sequence
  Description of Artificial Sequence: Synthetic oligonucleotide
gguuaaaggauugguaugg

SEQ ID NO: 3181826 - RNA, 19 nt, Artificial Sequence
  Description of Artificial Sequence: Synthetic oligonucleotide
uggguuaggcccuaguaga

SEQ ID NO: 3181827 - RNA, 19 nt, Artificial Sequence
  Description of Artificial Sequence: Synthetic oligonucleotide
aggaagucuuguuccagac

SEQ ID NO: 3181828 - RNA, 19 nt, Artificial Sequence
  Description of Artificial Sequence: Synthetic oligonucleotide
uacuuucucuggcagaggu

SEQ ID NO: 3181829 - RNA, 19 nt, Artificial Sequence
  Description of Artificial Sequence: Synthetic oligonucleotide
ucuggcagaggugacaagc

SEQ ID NO: 3181830 - RNA, 19 nt, Artificial Sequence
  Description of Artificial Sequence: Synthetic oligonucleotide
guagauguaguguagguua

SEQ ID NO: 3181831 - RNA, 19 nt, Artificial Sequence
  Description of Artificial Sequence: Synthetic oligonucleotide
uguagguuaaaggauuggu

SEQ ID NO: 3181832 - RNA, 19 nt, Artificial Sequence
  Description of Artificial Sequence: Synthetic oligonucleotide
aacuggguguacuuucucu

SEQ ID NO: 3181833 - RNA, 19 nt, Artificial Sequence
  Description of Artificial Sequence: Synthetic oligonucleotide
ugugucucugggaagcucu

SEQ ID NO: 3181834 - RNA, 19 nt, Artificial Sequence
  Description of Artificial Sequence: Synthetic oligonucleotide
gaagcagcccaccuggggc

SEQ ID NO: 3181835 - RNA, 19 nt, Artificial Sequence
  Description of Artificial Sequence: Synthetic oligonucleotide
guuucugagaagcagccca

SEQ ID NO: 3181836 - RNA, 19 nt, Artificial Sequence
  Description of Artificial Sequence: Synthetic oligonucleotide
ucugggaagcucuggacug

SEQ ID NO: 3181837 - RNA, 19 nt, Artificial Sequence
  Description of Artificial Sequence: Synthetic oligonucleotide
uccacuggaguuuuccuga

SEQ ID NO: 3181838 - RNA, 19 nt, Artificial Sequence
  Description of Artificial Sequence: Synthetic oligonucleotide
ugcagggcaccuuucuugg

SEQ ID NO: 3181839 - RNA, 19 nt, Artificial Sequence
  Description of Artificial Sequence: Synthetic oligonucleotide
ucuggugggagggagagga

SEQ ID NO: 3181840 - RNA, 19 nt, Artificial Sequence
  Description of Artificial Sequence: Synthetic oligonucleotide
ucuugauggaaccccugug

SEQ ID NO: 3181841 - RNA, 19 nt, Artificial Sequence
  Description of Artificial Sequence: Synthetic oligonucleotide
auauucuuauccagguugg

SEQ ID NO: 3181842 - RNA, 19 nt, Artificial Sequence
  Description of Artificial Sequence: Synthetic oligonucleotide
agguuaaaggauugguaug

SEQ ID NO: 3181843 - RNA, 19 nt, Artificial Sequence
  Description of Artificial Sequence: Synthetic oligonucleotide
ugcuucuauucucagaguu

SEQ ID NO: 3181844 - RNA, 19 nt, Artificial Sequence
  Description of Artificial Sequence: Synthetic oligonucleotide
uuuuccugagcuguggcca

SEQ ID NO: 3181845 - RNA, 19 nt, Artificial Sequence
  Description of Artificial Sequence: Synthetic oligonucleotide
auggcaacauauucuuauc

SEQ ID NO: 3181846 - RNA, 19 nt, Artificial Sequence
  Description of Artificial Sequence: Synthetic oligonucleotide
cucagaguucuagagauac

SEQ ID NO: 3181847 - RNA, 19 nt, Artificial Sequence
  Description of Artificial Sequence: Synthetic oligonucleotide
uuguguuucugagaagcag

SEQ ID NO: 3181848 - RNA, 19 nt, Artificial Sequence
  Description of Artificial Sequence: Synthetic oligonucleotide
auucucagaguucuagaga

SEQ ID NO: 3181849 - RNA, 19 nt, Artificial Sequence
  Description of Artificial Sequence: Synthetic oligonucleotide
cuaguagauguaguguagg

SEQ ID NO: 3181850 - RNA, 19 nt, Artificial Sequence
  Description of Artificial Sequence: Synthetic oligonucleotide
cuggaugagucccaucucc

SEQ ID NO: 3181851 - RNA, 19 nt, Artificial Sequence
  Description of Artificial Sequence: Synthetic oligonucleotide
uaguguagguuaaaggauu

SEQ ID NO: 3181852 - RNA, 19 nt, Artificial Sequence
  Description of Artificial Sequence: Synthetic oligonucleotide
cagaguucuagagauacac

SEQ ID NO: 3181853 - RNA, 19 nt, Artificial Sequence
  Description of Artificial Sequence: Synthetic oligonucleotide
acuggguguacuuucucug

SEQ ID NO: 3181854 - RNA, 19 nt, Artificial Sequence
  Description of Artificial Sequence: Synthetic oligonucleotide
augagucccaucuccacug

SEQ ID NO: 3181855 - RNA, 19 nt, Artificial Sequence
  Description of Artificial Sequence: Synthetic oligonucleotide
uguucuugauggaaccccu

SEQ ID NO: 3181856 - RNA, 19 nt, Artificial Sequence
  Description of Artificial Sequence: Synthetic oligonucleotide
ggagaggaagucuuguucc

SEQ ID NO: 3181857 - RNA, 19 nt, Artificial Sequence
  Description of Artificial Sequence: Synthetic oligonucleotide
aucuccacuggaguuuucc

SEQ ID NO: 3181858 - RNA, 19 nt, Artificial Sequence
  Description of Artificial Sequence: Synthetic oligonucleotide
cuggguuaggcccuaguag

SEQ ID NO: 3181859 - RNA, 19 nt, Artificial Sequence
  Description of Artificial Sequence: Synthetic oligonucleotide
uucuugauggaaccccugu

SEQ ID NO: 3181860 - RNA, 19 nt, Artificial Sequence
  Description of Artificial Sequence: Synthetic oligonucleotide
gguuguguuucugagaagc

SEQ ID NO: 3181861 - RNA, 19 nt, Artificial Sequence
  Description of Artificial Sequence: Synthetic oligonucleotide
aagcucuggacugcagggc

SEQ ID NO: 3181862 - RNA, 19 nt, Artificial Sequence
  Description of Artificial Sequence: Synthetic oligonucleotide
uggaguuuuccugagcugu

SEQ ID NO: 3181863 - RNA, 19 nt, Artificial Sequence
  Description of Artificial Sequence: Synthetic oligonucleotide
gcaacauauucuuauccag

SEQ ID NO: 3181864 - RNA, 19 nt, Artificial Sequence
  Description of Artificial Sequence: Synthetic oligonucleotide
uaguagauguaguguaggu

SEQ ID NO: 3181865 - RNA, 19 nt, Artificial Sequence
  Description of Artificial Sequence: Synthetic oligonucleotide
uuauccagguuggugcuag

SEQ ID NO: 3181866 - RNA, 19 nt, Artificial Sequence
  Description of Artificial Sequence: Synthetic oligonucleotide
gcugagggaggucugaagg

SEQ ID NO: 3181867 - RNA, 19 nt, Artificial Sequence
  Description of Artificial Sequence: Synthetic oligonucleotide
ucugagaagcagcccaccu

SEQ ID NO: 3181868 - RNA, 19 nt, Artificial Sequence
  Description of Artificial Sequence: Synthetic oligonucleotide
agaagcagcccaccugggg

SEQ ID NO: 3181869 - RNA, 19 nt, Artificial Sequence
  Description of Artificial Sequence: Synthetic oligonucleotide
uccagguuggugcuagcug

SEQ ID NO: 3181870 - RNA, 19 nt, Artificial Sequence
  Description of Artificial Sequence: Synthetic oligonucleotide
uugauggaaccccuguguc

SEQ ID NO: 3181871 - RNA, 19 nt, Artificial Sequence
  Description of Artificial Sequence: Synthetic oligonucleotide
gaggucugaaggcuguggc

SEQ ID NO: 3181872 - RNA, 19 nt, Artificial Sequence
  Description of Artificial Sequence: Synthetic oligonucleotide
gauccacuggaugaguccc

SEQ ID NO: 3181873 - RNA, 19 nt, Artificial Sequence
  Description of Artificial Sequence: Synthetic oligonucleotide
cuuaucugggagagguggc

SEQ ID NO: 3181874 - RNA, 19 nt, Artificial Sequence
  Description of Artificial Sequence: Synthetic oligonucleotide
uuucuggugggagggagag

SEQ ID NO: 3181875 - RNA, 19 nt, Artificial Sequence
  Description of Artificial Sequence: Synthetic oligonucleotide
uggguguacuuucucuggc

SEQ ID NO: 3181876 - RNA, 19 nt, Artificial Sequence
  Description of Artificial Sequence: Synthetic oligonucleotide
guucuagagauacacuuaa

SEQ ID NO: 3181877 - RNA, 19 nt, Artificial Sequence
  Description of Artificial Sequence: Synthetic oligonucleotide
cuggguguacuuucucugg

SEQ ID NO: 3181878 - RNA, 19 nt, Artificial Sequence
  Description of Artificial Sequence: Synthetic oligonucleotide
agcugguuguguuucugag

SEQ ID NO: 3181879 - RNA, 19 nt, Artificial Sequence
  Description of Artificial Sequence: Synthetic oligonucleotide
uuucugagaagcagcccac

SEQ ID NO: 3181880 - RNA, 19 nt, Artificial Sequence
  Description of Artificial Sequence: Synthetic oligonucleotide
auucuuauccagguuggug

SEQ ID NO: 3181881 - RNA, 19 nt, Artificial Sequence
  Description of Artificial Sequence: Synthetic oligonucleotide
agagguggcagggaacugg

SEQ ID NO: 3181882 - RNA, 19 nt, Artificial Sequence
  Description of Artificial Sequence: Synthetic oligonucleotide
ucuuauccagguuggugcu

SEQ ID NO: 3181883 - RNA, 19 nt, Artificial Sequence
  Description of Artificial Sequence: Synthetic oligonucleotide
ucugggagagguggcaggg

SEQ ID NO: 3181884 - RNA, 19 nt, Artificial Sequence
  Description of Artificial Sequence: Synthetic oligonucleotide
aauucuuuauuccaacagg

SEQ ID NO: 3181885 - RNA, 19 nt, Artificial Sequence
  Description of Artificial Sequence: Synthetic oligonucleotide
ugugacauaaugcagcugc

SEQ ID NO: 3181886 - RNA, 19 nt, Artificial Sequence
  Description of Artificial Sequence: Synthetic oligonucleotide
gaagacuuugccuugauca

SEQ ID NO: 3181887 - RNA, 19 nt, Artificial Sequence
  Description of Artificial Sequence: Synthetic oligonucleotide
gaauucuuuauuccaacag

SEQ ID NO: 3181888 - RNA, 19 nt, Artificial Sequence
  Description of Artificial Sequence: Synthetic oligonucleotide
ugguugaugguaaucaugc

SEQ ID NO: 3181889 - RNA, 19 nt, Artificial Sequence
  Description of Artificial Sequence: Synthetic oligonucleotide
ucuuuauuccaacaggacu

SEQ ID NO: 3181890 - RNA, 19 nt, Artificial Sequence
  Description of Artificial Sequence: Synthetic oligonucleotide
aaguucuggugguugaugg

SEQ ID NO: 3181891 - RNA, 19 nt, Artificial Sequence
  Description of Artificial Sequence: Synthetic oligonucleotide
aguucugugacauaaugca

SEQ ID NO: 3181892 - RNA, 19 nt, Artificial Sequence
  Description of Artificial Sequence: Synthetic oligonucleotide
aaucaugcuguuguagacc

SEQ ID NO: 3181893 - RNA, 19 nt, Artificial Sequence
  Description of Artificial Sequence: Synthetic oligonucleotide
uugaugguaaucaugcugu

SEQ ID NO: 3181894 - RNA, 19 nt, Artificial Sequence
  Description of Artificial Sequence: Synthetic oligonucleotide
cuguuguagaccaaggugc

SEQ ID NO: 3181895 - RNA, 19 nt, Artificial Sequence
  Description of Artificial Sequence: Synthetic oligonucleotide
acuuggagaagacuuugcc

SEQ ID NO: 3181896 - RNA, 19 nt, Artificial Sequence
  Description of Artificial Sequence: Synthetic oligonucleotide
uucugugacauaaugcagc

SEQ ID NO: 3181897 - RNA, 19 nt, Artificial Sequence
  Description of Artificial Sequence: Synthetic oligonucleotide
auggccagggcaaagaucc

SEQ ID NO: 3181898 - RNA, 19 nt, Artificial Sequence
  Description of Artificial Sequence: Synthetic oligonucleotide
cuuagggucaaccuuuucc

SEQ ID NO: 3181899 - RNA, 19 nt, Artificial Sequence
  Description of Artificial Sequence: Synthetic oligonucleotide
uguggcacacaccacauca

SEQ ID NO: 3181900 - RNA, 19 nt, Artificial Sequence
  Description of Artificial Sequence: Synthetic oligonucleotide
gacauaaugcagcugcucc

SEQ ID NO: 3181901 - RNA, 19 nt, Artificial Sequence
  Description of Artificial Sequence: Synthetic oligonucleotide
ugggauguggcacacacca

SEQ ID NO: 3181902 - RNA, 19 nt, Artificial Sequence
  Description of Artificial Sequence: Synthetic oligonucleotide
ugcucuugguuucagacug

SEQ ID NO: 3181903 - RNA, 19 nt, Artificial Sequence
  Description of Artificial Sequence: Synthetic oligonucleotide
caaggugcugcucagaagc

SEQ ID NO: 3181904 - RNA, 19 nt, Artificial Sequence
  Description of Artificial Sequence: Synthetic oligonucleotide
augguaaucaugcuguugu

SEQ ID NO: 3181905 - RNA, 19 nt, Artificial Sequence
  Description of Artificial Sequence: Synthetic oligonucleotide
uuuuccacauccccuaggc

SEQ ID NO: 3181906 - RNA, 19 nt, Artificial Sequence
  Description of Artificial Sequence: Synthetic oligonucleotide
cacaguggagcccagaggg

SEQ ID NO: 3181907 - RNA, 19 nt, Artificial Sequence
  Description of Artificial Sequence: Synthetic oligonucleotide
aagacuuugccuugaucag

SEQ ID NO: 3181908 - RNA, 19 nt, Artificial Sequence
  Description of Artificial Sequence: Synthetic oligonucleotide
uuccacauccccuaggccc

SEQ ID NO: 3181909 - RNA, 19 nt, Artificial Sequence
  Description of Artificial Sequence: Synthetic oligonucleotide
ugaguucugugacauaaug

SEQ ID NO: 3181910 - RNA, 19 nt, Artificial Sequence
  Description of Artificial Sequence: Synthetic oligonucleotide
uuagggucaaccuuuucca

SEQ ID NO: 3181911 - RNA, 19 nt, Artificial Sequence
  Description of Artificial Sequence: Synthetic oligonucleotide
guugaugguaaucaugcug

SEQ ID NO: 3181912 - RNA, 19 nt, Artificial Sequence
  Description of Artificial Sequence: Synthetic oligonucleotide
ucaguauccaggaggacca

SEQ ID NO: 3181913 - RNA, 19 nt, Artificial Sequence
  Description of Artificial Sequence: Synthetic oligonucleotide
uccaacaggacuuggagaa

SEQ ID NO: 3181914 - RNA, 19 nt, Artificial Sequence
  Description of Artificial Sequence: Synthetic oligonucleotide
gaugcucuugguuucagac

SEQ ID NO: 3181915 - RNA, 19 nt, Artificial Sequence
  Description of Artificial Sequence: Synthetic oligonucleotide
auuccaacaggacuuggag

SEQ ID NO: 3181916 - RNA, 19 nt, Artificial Sequence
  Description of Artificial Sequence: Synthetic oligonucleotide
uugguuucagacugcacag

SEQ ID NO: 3181917 - RNA, 19 nt, Artificial Sequence
  Description of Artificial Sequence: Synthetic oligonucleotide
uagaccaaggugcugcuca

SEQ ID NO: 3181918 - RNA, 19 nt, Artificial Sequence
  Description of Artificial Sequence: Synthetic oligonucleotide
uugaucagcucauugaguu

SEQ ID NO: 3181919 - RNA, 19 nt, Artificial Sequence
  Description of Artificial Sequence: Synthetic oligonucleotide
ugugcucuggcuugguggg

SEQ ID NO: 3181920 - RNA, 19 nt, Artificial Sequence
  Description of Artificial Sequence: Synthetic oligonucleotide
uuggagaagacuuugccuu

SEQ ID NO: 3181921 - RNA, 19 nt, Artificial Sequence
  Description of Artificial Sequence: Synthetic oligonucleotide
agggcaaagauccacgagu

SEQ ID NO: 3181922 - RNA, 19 nt, Artificial Sequence
  Description of Artificial Sequence: Synthetic oligonucleotide
ucagacugcacaguggagc

SEQ ID NO: 3181923 - RNA, 19 nt, Artificial Sequence
  Description of Artificial Sequence: Synthetic oligonucleotide
cuugguuucagacugcaca

SEQ ID NO: 3181924 - RNA, 19 nt, Artificial Sequence
  Description of Artificial Sequence: Synthetic oligonucleotide
uauuccaacaggacuugga

SEQ ID NO: 3181925 - RNA, 19 nt, Artificial Sequence
  Description of Artificial Sequence: Synthetic oligonucleotide
uucuuuauuccaacaggac

SEQ ID NO: 3181926 - RNA, 19 nt, Artificial Sequence
  Description of Artificial Sequence: Synthetic oligonucleotide
uuguagaccaaggugcugc

SEQ ID NO: 3181927 - RNA, 19 nt, Artificial Sequence
  Description of Artificial Sequence: Synthetic oligonucleotide
ugcacaguggagcccagag

SEQ ID NO: 3181928 - RNA, 19 nt, Artificial Sequence
  Description of Artificial Sequence: Synthetic oligonucleotide
uaggcccucaguauccagg

SEQ ID NO: 3181929 - RNA, 19 nt, Artificial Sequence
  Description of Artificial Sequence: Synthetic oligonucleotide
aucagaugcucuugguuuc

SEQ ID NO: 3181930 - RNA, 19 nt, Artificial Sequence
  Description of Artificial Sequence: Synthetic oligonucleotide
agcucauugaguucuguga

SEQ ID NO: 3181931 - RNA, 19 nt, Artificial Sequence
  Description of Artificial Sequence: Synthetic oligonucleotide
cucaguauccaggaggacc

SEQ ID NO: 3181932 - RNA, 19 nt, Artificial Sequence
  Description of Artificial Sequence: Synthetic oligonucleotide
ucaaccuuuuccacauccc

SEQ ID NO: 3181933 - RNA, 19 nt, Artificial Sequence
  Description of Artificial Sequence: Synthetic oligonucleotide
ucugugacauaaugcagcu

SEQ ID NO: 3181934 - RNA, 19 nt, Artificial Sequence
  Description of Artificial Sequence: Synthetic oligonucleotide
uaaucaugcuguuguagac

SEQ ID NO: 3181935 - RNA, 19 nt, Artificial Sequence
  Description of Artificial Sequence: Synthetic oligonucleotide
guaaucaugcuguuguaga

SEQ ID NO: 3181936 - RNA, 19 nt, Artificial Sequence
  Description of Artificial Sequence: Synthetic oligonucleotide
aaugcagcugcuccaaguu

SEQ ID NO: 3181937 - RNA, 19 nt, Artificial Sequence
  Description of Artificial Sequence: Synthetic oligonucleotide
auugaguucugugacauaa

SEQ ID NO: 3181938 - RNA, 19 nt, Artificial Sequence
  Description of Artificial Sequence: Synthetic oligonucleotide
aucaugcuguuguagacca

SEQ ID NO: 3181939 - RNA, 19 nt, Artificial Sequence
  Description of Artificial Sequence: Synthetic oligonucleotide
cugguucacagacagcugc

SEQ ID NO: 3181940 - RNA, 19 nt, Artificial Sequence
  Description of Artificial Sequence: Synthetic oligonucleotide
gucaaccuuuuccacaucc

SEQ ID NO: 3181941 - RNA, 19 nt, Artificial Sequence
  Description of Artificial Sequence: Synthetic oligonucleotide
ugcagcugcuccaaguucu

SEQ ID NO: 3181942 - RNA, 19 nt, Artificial Sequence
  Description of Artificial Sequence: Synthetic oligonucleotide
auucuuuauuccaacagga

SEQ ID NO: 3181943 - RNA, 19 nt, Artificial Sequence
  Description of Artificial Sequence: Synthetic oligonucleotide
acgaguccuucuuaggguc

SEQ ID NO: 3181944 - RNA, 19 nt, Artificial Sequence
  Description of Artificial Sequence: Synthetic oligonucleotide
uggaauucuuuauuccaac

SEQ ID NO: 3181945 - RNA, 19 nt, Artificial Sequence
  Description of Artificial Sequence: Synthetic oligonucleotide
uguuguagaccaaggugcu

SEQ ID NO: 3181946 - RNA, 19 nt, Artificial Sequence
  Description of Artificial Sequence: Synthetic oligonucleotide
gaguucugugacauaaugc

SEQ ID NO: 3181947 - RNA, 19 nt, Artificial Sequence
  Description of Artificial Sequence: Synthetic oligonucleotide
gugugcucuggcuuggugg

SEQ ID NO: 3181948 - RNA, 19 nt, Artificial Sequence
  Description of Artificial Sequence: Synthetic oligonucleotide
uccaggaggaccagggugu

SEQ ID NO: 3181949 - RNA, 19 nt, Artificial Sequence
  Description of Artificial Sequence: Synthetic oligonucleotide
agaagacuuugccuugauc

SEQ ID NO: 3181950 - RNA, 19 nt, Artificial Sequence
  Description of Artificial Sequence: Synthetic oligonucleotide
agacuuugccuugaucagc

SEQ ID NO: 3181951 - RNA, 19 nt, Artificial Sequence
  Description of Artificial Sequence: Synthetic oligonucleotide
uuugccuugaucagcucau

SEQ ID NO: 3181952 - RNA, 19 nt, Artificial Sequence
  Description of Artificial Sequence: Synthetic oligonucleotide
caaccuuuuccacaucccc

SEQ ID NO: 3181953 - RNA, 19 nt, Artificial Sequence
  Description of Artificial Sequence: Synthetic oligonucleotide
uggugguugaugguaauca

SEQ ID NO: 3181954 - RNA, 19 nt, Artificial Sequence
  Description of Artificial Sequence: Synthetic oligonucleotide
aaagauccacgaguccuuc

SEQ ID NO: 3181955 - RNA, 19 nt, Artificial Sequence
  Description of Artificial Sequence: Synthetic oligonucleotide
uuuauuccaacaggacuug

SEQ ID NO: 3181956 - RNA, 19 nt, Artificial Sequence
  Description of Artificial Sequence: Synthetic oligonucleotide
guauccaggaggaccaggg

SEQ ID NO: 3181957 - RNA, 19 nt, Artificial Sequence
  Description of Artificial Sequence: Synthetic oligonucleotide
ugcuguuguagaccaaggu

SEQ ID NO: 3181958 - RNA, 19 nt, Artificial Sequence
  Description of Artificial Sequence: Synthetic oligonucleotide
uaaugcagcugcuccaagu

SEQ ID NO: 3181959 - RNA, 19 nt, Artificial Sequence
  Description of Artificial Sequence: Synthetic oligonucleotide
uucacagacagcugcuccu

SEQ ID NO: 3181960 - RNA, 19 nt, Artificial Sequence
  Description of Artificial Sequence: Synthetic oligonucleotide
gcuguuguagaccaaggug

SEQ ID NO: 3181961 - RNA, 19 nt, Artificial Sequence
  Description of Artificial Sequence: Synthetic oligonucleotide
uuccaacaggacuuggaga

SEQ ID NO: 3181962 - RNA, 19 nt, Artificial Sequence
  Description of Artificial Sequence: Synthetic oligonucleotide
cucagaagcauggccaggg

SEQ ID NO: 3181963 - RNA, 19 nt, Artificial Sequence
  Description of Artificial Sequence: Synthetic oligonucleotide
acauaaugcagcugcucca

SEQ ID NO: 3181964 - RNA, 19 nt, Artificial Sequence
  Description of Artificial Sequence: Synthetic oligonucleotide
auccaggaggaccagggug

SEQ ID NO: 3181965 - RNA, 19 nt, Artificial Sequence
  Description of Artificial Sequence: Synthetic oligonucleotide
aacaggacuuggagaagac

SEQ ID NO: 3181966 - RNA, 19 nt, Artificial Sequence
  Description of Artificial Sequence: Synthetic oligonucleotide
cagacugcacaguggagcc

SEQ ID NO: 3181967 - RNA, 19 nt, Artificial Sequence
  Description of Artificial Sequence: Synthetic oligonucleotide
ucauugaguucugugacau

SEQ ID NO: 3181968 - RNA, 19 nt, Artificial Sequence
  Description of Artificial Sequence: Synthetic oligonucleotide
uccacgaguccuucuuagg

SEQ ID NO: 3181969 - RNA, 19 nt, Artificial Sequence
  Description of Artificial Sequence: Synthetic oligonucleotide
ugcucagaagcauggccag

SEQ ID NO: 3181970 - RNA, 19 nt, Artificial Sequence
  Description of Artificial Sequence: Synthetic oligonucleotide
caugcuguuguagaccaag

SEQ ID NO: 3181971 - RNA, 19 nt, Artificial Sequence
  Description of Artificial Sequence: Synthetic oligonucleotide
gaugguaaucaugcuguug

SEQ ID NO: 3181972 - RNA, 19 nt, Artificial Sequence
  Description of Artificial Sequence: Synthetic oligonucleotide
ugccuugaucagcucauug

SEQ ID NO: 3181973 - RNA, 19 nt, Artificial Sequence
  Description of Artificial Sequence: Synthetic oligonucleotide
agacagcugcuccuugugg

SEQ ID NO: 3181974 - RNA, 19 nt, Artificial Sequence
  Description of Artificial Sequence: Synthetic oligonucleotide
guucacagacagcugcucc

SEQ ID NO: 3181975 - RNA, 19 nt, Artificial Sequence
  Description of Artificial Sequence: Synthetic oligonucleotide
uuuccacauccccuaggcc

SEQ ID NO: 3181976 - RNA, 19 nt, Artificial Sequence
  Description of Artificial Sequence: Synthetic oligonucleotide
uccuucuuagggucaaccu

SEQ ID NO: 3181977 - RNA, 19 nt, Artificial Sequence
  Description of Artificial Sequence: Synthetic oligonucleotide
guuucagacugcacagugg

SEQ ID NO: 3181978 - RNA, 19 nt, Artificial Sequence
  Description of Artificial Sequence: Synthetic oligonucleotide
auccacgaguccuucuuag

SEQ ID NO: 3181979 - RNA, 19 nt, Artificial Sequence
  Description of Artificial Sequence: Synthetic oligonucleotide
cuuuuccacauccccuagg

SEQ ID NO: 3181980 - RNA, 19 nt, Artificial Sequence
  Description of Artificial Sequence: Synthetic oligonucleotide
ucugguucacagacagcug

SEQ ID NO: 3181981 - RNA, 19 nt, Artificial Sequence
  Description of Artificial Sequence: Synthetic oligonucleotide
uuauuccaacaggacuugg

SEQ ID NO: 3181982 - RNA, 19 nt, Artificial Sequence
  Description of Artificial Sequence: Synthetic oligonucleotide
cuuuauuccaacaggacuu

SEQ ID NO: 3181983 - RNA, 19 nt, Artificial Sequence
  Description of Artificial Sequence: Synthetic oligonucleotide
uggagaagacuuugccuug

SEQ ID NO: 3181984 - RNA, 19 nt, Artificial Sequence
  Description of Artificial Sequence: Synthetic oligonucleotide
auagccauucuucagaagc

SEQ ID NO: 3181985 - RNA, 19 nt, Artificial Sequence
  Description of Artificial Sequence: Synthetic oligonucleotide
uccaccuucaacaagaccc

SEQ ID NO: 3181986 - RNA, 19 nt, Artificial Sequence
  Description of Artificial Sequence: Synthetic oligonucleotide
aaugcaaugugguucauga

SEQ ID NO: 3181987 - RNA, 19 nt, Artificial Sequence
  Description of Artificial Sequence: Synthetic oligonucleotide
uaaggcaggaaacagagga

SEQ ID NO: 3181988 - RNA, 19 nt, Artificial Sequence
  Description of Artificial Sequence: Synthetic oligonucleotide
uucaacaagacccggauga

SEQ ID NO: 3181989 - RNA, 19 nt, Artificial Sequence
  Description of Artificial Sequence: Synthetic oligonucleotide
augagaagcccgcagaccc

SEQ ID NO: 3181990 - RNA, 19 nt, Artificial Sequence
  Description of Artificial Sequence: Synthetic oligonucleotide
aaacgcacaacacucagca

SEQ ID NO: 3181991 - RNA, 19 nt, Artificial Sequence
  Description of Artificial Sequence: Synthetic oligonucleotide
aauauaauguuguccuucu

SEQ ID NO: 3181992 - RNA, 19 nt, Artificial Sequence
  Description of Artificial Sequence: Synthetic oligonucleotide
gacaaauggaagcaggaag

SEQ ID NO: 3181993 - RNA, 19 nt, Artificial Sequence
  Description of Artificial Sequence: Synthetic oligonucleotide
ugugacaaauggaagcagg

SEQ ID NO: 3181994 - RNA, 19 nt, Artificial Sequence
  Description of Artificial Sequence: Synthetic oligonucleotide
uagcuuacuaaacuuuugg

SEQ ID NO: 3181995 - RNA, 19 nt, Artificial Sequence
  Description of Artificial Sequence: Synthetic oligonucleotide
aauguuguccuucuucuca

SEQ ID NO: 3181996 - RNA, 19 nt, Artificial Sequence
  Description of Artificial Sequence: Synthetic oligonucleotide
aaugaugauggugaucaac

SEQ ID NO: 3181997 - RNA, 19 nt, Artificial Sequence
  Description of Artificial Sequence: Synthetic oligonucleotide
acaaauggaagcaggaagc

SEQ ID NO: 3181998 - RNA, 19 nt, Artificial Sequence
  Description of Artificial Sequence: Synthetic oligonucleotide
uggugagugugacaaaugg

SEQ ID NO: 3181999 - RNA, 19 nt, Artificial Sequence
  Description of Artificial Sequence: Synthetic oligonucleotide
uauaauguuguccuucuuc

SEQ ID NO: 3182000 - RNA, 19 nt, Artificial Sequence
  Description of Artificial Sequence: Synthetic oligonucleotide
uguccuucuucucauagcc

SEQ ID NO: 3182001 - RNA, 19 nt, Artificial Sequence
  Description of Artificial Sequence: Synthetic oligonucleotide
uccauaugaccccacagag

SEQ ID NO: 3182002 - RNA, 19 nt, Artificial Sequence
  Description of Artificial Sequence: Synthetic oligonucleotide
aucaggagguagcagaugg

SEQ ID NO: 3182003 - RNA, 19 nt, Artificial Sequence
  Description of Artificial Sequence: Synthetic oligonucleotide
aaacagaggaggaagauga

SEQ ID NO: 3182004 - RNA, 19 nt, Artificial Sequence
  Description of Artificial Sequence: Synthetic oligonucleotide
aauccauaugaccccacag

SEQ ID NO: 3182005 - RNA, 19 nt, Artificial Sequence
  Description of Artificial Sequence: Synthetic oligonucleotide
uguugaaaaggguggacag

SEQ ID NO: 3182006 - RNA, 19 nt, Artificial Sequence
  Description of Artificial Sequence: Synthetic oligonucleotide
cuuacuaaacuuuugggga

SEQ ID NO: 3182007 - RNA, 19 nt, Artificial Sequence
  Description of Artificial Sequence: Synthetic oligonucleotide
agaagcaucgcugaggaag

SEQ ID NO: 3182008 - RNA, 19 nt, Artificial Sequence
  Description of Artificial Sequence: Synthetic oligonucleotide
gagugugacaaauggaagc

SEQ ID NO: 3182009 - RNA, 19 nt, Artificial Sequence
  Description of Artificial Sequence: Synthetic oligonucleotide
uuacuaaacuuuuggggag

SEQ ID NO: 3182010 - RNA, 19 nt, Artificial Sequence
  Description of Artificial Sequence: Synthetic oligonucleotide
auaauguuguccuucuucu

SEQ ID NO: 3182011 - RNA, 19 nt, Artificial Sequence
  Description of Artificial Sequence: Synthetic oligonucleotide
uaaacuuuuggggagucag

SEQ ID NO: 3182012 - RNA, 19 nt, Artificial Sequence
  Description of Artificial Sequence: Synthetic oligonucleotide
ugcaaugugguucaugauc

SEQ ID NO: 3182013 - RNA, 19 nt, Artificial Sequence
  Description of Artificial Sequence: Synthetic oligonucleotide
aauggaagcaggaagccug

SEQ ID NO: 3182014 - RNA, 19 nt, Artificial Sequence
  Description of Artificial Sequence: Synthetic oligonucleotide
uucaugaucaguagcuuac

SEQ ID NO: 3182015 - RNA, 19 nt, Artificial Sequence
  Description of Artificial Sequence: Synthetic oligonucleotide
agcuuacuaaacuuuuggg

SEQ ID NO: 3182016 - RNA, 19 nt, Artificial Sequence
  Description of Artificial Sequence: Synthetic oligonucleotide
gaugauggugaucaacgcc

SEQ ID NO: 3182017 - RNA, 19 nt, Artificial Sequence
  Description of Artificial Sequence: Synthetic oligonucleotide
cuuuuggggagucagcucc

SEQ ID NO: 3182018 - RNA, 19 nt, Artificial Sequence
  Description of Artificial Sequence: Synthetic oligonucleotide
gcuuacuaaacuuuugggg

SEQ ID NO: 3182019 - RNA, 19 nt, Artificial Sequence
  Description of Artificial Sequence: Synthetic oligonucleotide
aaaaggguggacaguggcc

SEQ ID NO: 3182020 - RNA, 19 nt, Artificial Sequence
  Description of Artificial Sequence: Synthetic oligonucleotide
ucagaagcaucgcugagga

SEQ ID NO: 3182021 - RNA, 19 nt, Artificial Sequence
  Description of Artificial Sequence: Synthetic oligonucleotide
augaugauggugaucaacg

SEQ ID NO: 3182022 - RNA, 19 nt, Artificial Sequence
  Description of Artificial Sequence: Synthetic oligonucleotide
uucuucagaagcaucgcug

SEQ ID NO: 3182023 - RNA, 19 nt, Artificial Sequence
  Description of Artificial Sequence: Synthetic oligonucleotide
ugaucaguagcuuacuaaa

SEQ ID NO: 3182024 - RNA, 19 nt, Artificial Sequence
  Description of Artificial Sequence: Synthetic oligonucleotide
guuaaggcaggaaacagag

SEQ ID NO: 3182025 - RNA, 19 nt, Artificial Sequence
  Description of Artificial Sequence: Synthetic oligonucleotide
ugguucaugaucaguagcu

SEQ ID NO: 3182026 - RNA, 19 nt, Artificial Sequence
  Description of Artificial Sequence: Synthetic oligonucleotide
agcauggcaaugaugaugg

SEQ ID NO: 3182027 - RNA, 19 nt, Artificial Sequence
  Description of Artificial Sequence: Synthetic oligonucleotide
ugagugugacaaauggaag

SEQ ID NO: 3182028 - RNA, 19 nt, Artificial Sequence
  Description of Artificial Sequence: Synthetic oligonucleotide
acuaaugcaaugugguuca

SEQ ID NO: 3182029 - RNA, 19 nt, Artificial Sequence
  Description of Artificial Sequence: Synthetic oligonucleotide
aucaguagcuuacuaaacu

SEQ ID NO: 3182030 - RNA, 19 nt, Artificial Sequence
  Description of Artificial Sequence: Synthetic oligonucleotide
aacaagacccggaugauca

SEQ ID NO: 3182031 - RNA, 19 nt, Artificial Sequence
  Description of Artificial Sequence: Synthetic oligonucleotide
ugccacuaaugcaaugugg

SEQ ID NO: 3182032 - RNA, 19 nt, Artificial Sequence
  Description of Artificial Sequence: Synthetic oligonucleotide
uugaaaaggguggacagug

SEQ ID NO: 3182033 - RNA, 19 nt, Artificial Sequence
  Description of Artificial Sequence: Synthetic oligonucleotide
gaaaaggguggacaguggc

SEQ ID NO: 3182034 - RNA, 19 nt, Artificial Sequence
  Description of Artificial Sequence: Synthetic oligonucleotide
cauaugaccccacagagga

SEQ ID NO: 3182035 - RNA, 19 nt, Artificial Sequence
  Description of Artificial Sequence: Synthetic oligonucleotide
augagcauggcaaugauga

SEQ ID NO: 3182036 - RNA, 19 nt, Artificial Sequence
  Description of Artificial Sequence: Synthetic oligonucleotide
auccaggcacuccugacgc

SEQ ID NO: 3182037 - RNA, 19 nt, Artificial Sequence
  Description of Artificial Sequence: Synthetic oligonucleotide
uccaggcacaauauaaugu

SEQ ID NO: 3182038 - RNA, 19 nt, Artificial Sequence
  Description of Artificial Sequence: Synthetic oligonucleotide
ucuggaaucuccaccuuca

SEQ ID NO: 3182039 - RNA, 19 nt, Artificial Sequence
  Description of Artificial Sequence: Synthetic oligonucleotide
uggacaguggccaggaaac

SEQ ID NO: 3182040 - RNA, 19 nt, Artificial Sequence
  Description of Artificial Sequence: Synthetic oligonucleotide
gauccaggcacuccugacg

SEQ ID NO: 3182041 - RNA, 19 nt, Artificial Sequence
  Description of Artificial Sequence: Synthetic oligonucleotide
acgccuuccuaugagaagc

SEQ ID NO: 3182042 - RNA, 19 nt, Artificial Sequence
  Description of Artificial Sequence: Synthetic oligonucleotide
augaucaggagguagcaga

SEQ ID NO: 3182043 - RNA, 19 nt, Artificial Sequence
  Description of Artificial Sequence: Synthetic oligonucleotide
auggugaucaacgccuucc

SEQ ID NO: 3182044 - RNA, 19 nt, Artificial Sequence
  Description of Artificial Sequence: Synthetic oligonucleotide
uucagaagcaucgcugagg

SEQ ID NO: 3182045 - RNA, 19 nt, Artificial Sequence
  Description of Artificial Sequence: Synthetic oligonucleotide
ucuucagaagcaucgcuga

SEQ ID NO: 3182046 - RNA, 19 nt, Artificial Sequence
  Description of Artificial Sequence: Synthetic oligonucleotide
ugaaaaggguggacagugg

SEQ ID NO: 3182047 - RNA, 19 nt, Artificial Sequence
  Description of Artificial Sequence: Synthetic oligonucleotide
cuucucauagccauucuuc

SEQ ID NO: 3182048 - RNA, 19 nt, Artificial Sequence
  Description of Artificial Sequence: Synthetic oligonucleotide
ggaaucuccaccuucaaca

SEQ ID NO: 3182049 - RNA, 19 nt, Artificial Sequence
  Description of Artificial Sequence: Synthetic oligonucleotide
aaauccauaugaccccaca

SEQ ID NO: 3182050 - RNA, 19 nt, Artificial Sequence
  Description of Artificial Sequence: Synthetic oligonucleotide
ugugguucaugaucaguag

SEQ ID NO: 3182051 - RNA, 19 nt, Artificial Sequence
  Description of Artificial Sequence: Synthetic oligonucleotide
cuuccuaugagaagcccgc

SEQ ID NO: 3182052 - RNA, 19 nt, Artificial Sequence
  Description of Artificial Sequence: Synthetic oligonucleotide
cauggagcuguugaaaagg

SEQ ID NO: 3182053 - RNA, 19 nt, Artificial Sequence
  Description of Artificial Sequence: Synthetic oligonucleotide
aaacuuuuggggagucagc

SEQ ID NO: 3182054 - RNA, 19 nt, Artificial Sequence
  Description of Artificial Sequence: Synthetic oligonucleotide
acagaggaggaagaugagc

SEQ ID NO: 3182055 - RNA, 19 nt, Artificial Sequence
  Description of Artificial Sequence: Synthetic oligonucleotide
uucucauagccauucuuca

SEQ ID NO: 3182056 - RNA, 19 nt, Artificial Sequence
  Description of Artificial Sequence: Synthetic oligonucleotide
acgcacaacacucagcaca

SEQ ID NO: 3182057 - RNA, 19 nt, Artificial Sequence
  Description of Artificial Sequence: Synthetic oligonucleotide
gaagcaggaagccugccac

SEQ ID NO: 3182058 - RNA, 19 nt, Artificial Sequence
  Description of Artificial Sequence: Synthetic oligonucleotide
uuaaggcaggaaacagagg

SEQ ID NO: 3182059 - RNA, 19 nt, Artificial Sequence
  Description of Artificial Sequence: Synthetic oligonucleotide
aaaggguggacaguggcca

SEQ ID NO: 3182060 - RNA, 19 nt, Artificial Sequence
  Description of Artificial Sequence: Synthetic oligonucleotide
aacuuuuggggagucagcu

SEQ ID NO: 3182061 - RNA, 19 nt, Artificial Sequence
  Description of Artificial Sequence: Synthetic oligonucleotide
uggggagucagcuccaggc

SEQ ID NO: 3182062 - RNA, 19 nt, Artificial Sequence
  Description of Artificial Sequence: Synthetic oligonucleotide
caggaaacgcacaacacuc

SEQ ID NO: 3182063 - RNA, 19 nt, Artificial Sequence
  Description of Artificial Sequence: Synthetic oligonucleotide
cacaauauaauguuguccu

SEQ ID NO: 3182064 - RNA, 19 nt, Artificial Sequence
  Description of Artificial Sequence: Synthetic oligonucleotide
auggcaaugaugaugguga

SEQ ID NO: 3182065 - RNA, 19 nt, Artificial Sequence
  Description of Artificial Sequence: Synthetic oligonucleotide
aaucuccaccuucaacaag

SEQ ID NO: 3182066 - RNA, 19 nt, Artificial Sequence
  Description of Artificial Sequence: Synthetic oligonucleotide
ucucauagccauucuucag

SEQ ID NO: 3182067 - RNA, 19 nt, Artificial Sequence
  Description of Artificial Sequence: Synthetic oligonucleotide
gacccggaugaucaggagg

SEQ ID NO: 3182068 - RNA, 19 nt, Artificial Sequence
  Description of Artificial Sequence: Synthetic oligonucleotide
aagaugagcauggcaauga

SEQ ID NO: 3182069 - RNA, 19 nt, Artificial Sequence
  Description of Artificial Sequence: Synthetic oligonucleotide
aacgccuuccuaugagaag

SEQ ID NO: 3182070 - RNA, 19 nt, Artificial Sequence
  Description of Artificial Sequence: Synthetic oligonucleotide
aagcccgcagacccgacuc

SEQ ID NO: 3182071 - RNA, 19 nt, Artificial Sequence
  Description of Artificial Sequence: Synthetic oligonucleotide
gagcuguugaaaagggugg

SEQ ID NO: 3182072 - RNA, 19 nt, Artificial Sequence
  Description of Artificial Sequence: Synthetic oligonucleotide
ugaucaacgccuuccuaug

SEQ ID NO: 3182073 - RNA, 19 nt, Artificial Sequence
  Description of Artificial Sequence: Synthetic oligonucleotide
gaaacagaggaggaagaug

SEQ ID NO: 3182074 - RNA, 19 nt, Artificial Sequence
  Description of Artificial Sequence: Synthetic oligonucleotide
ugaugauggugaucaacgc

SEQ ID NO: 3182075 - RNA, 19 nt, Artificial Sequence
  Description of Artificial Sequence: Synthetic oligonucleotide
ucaguagcuuacuaaacuu

SEQ ID NO: 3182076 - RNA, 19 nt, Artificial Sequence
  Description of Artificial Sequence: Synthetic oligonucleotide
guuguccuucuucucauag

SEQ ID NO: 3182077 - RNA, 19 nt, Artificial Sequence
  Description of Artificial Sequence: Synthetic oligonucleotide
auccauaugaccccacaga

SEQ ID NO: 3182078 - RNA, 19 nt, Artificial Sequence
  Description of Artificial Sequence: Synthetic oligonucleotide
augaucaguagcuuacuaa

SEQ ID NO: 3182079 - RNA, 19 nt, Artificial Sequence
  Description of Artificial Sequence: Synthetic oligonucleotide
uccuaugagaagcccgcag

SEQ ID NO: 3182080 - RNA, 19 nt, Artificial Sequence
  Description of Artificial Sequence: Synthetic oligonucleotide
aacgcacaacacucagcac

SEQ ID NO: 3182081 - RNA, 19 nt, Artificial Sequence
  Description of Artificial Sequence: Synthetic oligonucleotide
ccauucuucagaagcaucg

SEQ ID NO: 3182082 - RNA, 19 nt, Artificial Sequence
  Description of Artificial Sequence: Synthetic oligonucleotide
ugaggaagccaugauaaaa

SEQ ID NO: 3182083 - RNA, 19 nt, Artificial Sequence
  Description of Artificial Sequence: Synthetic oligonucleotide
cagaggaggaagaugagca

SEQ ID NO: 3182084 - RNA, 19 nt, Artificial Sequence
  Description of Artificial Sequence: Synthetic oligonucleotide
aaaggcguuaacuugaggg

SEQ ID NO: 3182085 - RNA, 19 nt, Artificial Sequence
  Description of Artificial Sequence: Synthetic oligonucleotide
acagaugacauauuaaggc

SEQ ID NO: 3182086 - RNA, 19 nt, Artificial Sequence
  Description of Artificial Sequence: Synthetic oligonucleotide
aaaucgagaacggagaggg

SEQ ID NO: 3182087 - RNA, 19 nt, Artificial Sequence
  Description of Artificial Sequence: Synthetic oligonucleotide
aauguugacaacuucucug

SEQ ID NO: 3182088 - RNA, 19 nt, Artificial Sequence
  Description of Artificial Sequence: Synthetic oligonucleotide
uuaauaaucccuuggucag

SEQ ID NO: 3182089 - RNA, 19 nt, Artificial Sequence
  Description of Artificial Sequence: Synthetic oligonucleotide
uucucugguagaauaaggg

SEQ ID NO: 3182090 - RNA, 19 nt, Artificial Sequence
  Description of Artificial Sequence: Synthetic oligonucleotide
uagaauaugacccaucuuu

SEQ ID NO: 3182091 - RNA, 19 nt, Artificial Sequence
  Description of Artificial Sequence: Synthetic oligonucleotide
auaugacccaucuuuaccg

SEQ ID NO: 3182092 - RNA, 19 nt, Artificial Sequence
  Description of Artificial Sequence: Synthetic oligonucleotide
cuugaaaucgagaacggag

SEQ ID NO: 3182093 - RNA, 19 nt, Artificial Sequence
  Description of Artificial Sequence: Synthetic oligonucleotide
uggaacaaggcuaauguug

SEQ ID NO: 3182094 - RNA, 19 nt, Artificial Sequence
  Description of Artificial Sequence: Synthetic oligonucleotide
aauaaucccuuggucagcc

SEQ ID NO: 3182095 - RNA, 19 nt, Artificial Sequence
  Description of Artificial Sequence: Synthetic oligonucleotide
uuuugcaucccauuucccg

SEQ ID NO: 3182096 - RNA, 19 nt, Artificial Sequence
  Description of Artificial Sequence: Synthetic oligonucleotide
agcgaugucauacuugaac

SEQ ID NO: 3182097 - RNA, 19 nt, Artificial Sequence
  Description of Artificial Sequence: Synthetic oligonucleotide
aucuuuaccgcuuuaacca

SEQ ID NO: 3182098 - RNA, 19 nt, Artificial Sequence
  Description of Artificial Sequence: Synthetic oligonucleotide
uccauaucgagacagauuu

SEQ ID NO: 3182099 - RNA, 19 nt, Artificial Sequence
  Description of Artificial Sequence: Synthetic oligonucleotide
aaugugagacguuuggacu

SEQ ID NO: 3182100 - RNA, 19 nt, Artificial Sequence
  Description of Artificial Sequence: Synthetic oligonucleotide
aauaaggguaguuaauaau

SEQ ID NO: 3182101 - RNA, 19 nt, Artificial Sequence
  Description of Artificial Sequence: Synthetic oligonucleotide
uaggcuuugcuccaauugg

SEQ ID NO: 3182102 - RNA, 19 nt, Artificial Sequence
  Description of Artificial Sequence: Synthetic oligonucleotide
cacuggucaauguagaagg

SEQ ID NO: 3182103 - RNA, 19 nt, Artificial Sequence
  Description of Artificial Sequence: Synthetic oligonucleotide
uuagcgaugaccguuuucc

SEQ ID NO: 3182104 - RNA, 19 nt, Artificial Sequence
  Description of Artificial Sequence: Synthetic oligonucleotide
ucauacuugaacuucuccu

SEQ ID NO: 3182105 - RNA, 19 nt, Artificial Sequence
  Description of Artificial Sequence: Synthetic oligonucleotide
uuuguuggggcuuugucug

SEQ ID NO: 3182106 - RNA, 19 nt, Artificial Sequence
  Description of Artificial Sequence: Synthetic oligonucleotide
uaggaaucuggcuucaugc

SEQ ID NO: 3182107 - RNA, 19 nt, Artificial Sequence
  Description of Artificial Sequence: Synthetic oligonucleotide
guuuucagaauacagguga

SEQ ID NO: 3182108 - RNA, 19 nt, Artificial Sequence
  Description of Artificial Sequence: Synthetic oligonucleotide
ucuauguuguauccuaaga

SEQ ID NO: 3182109 - RNA, 19 nt, Artificial Sequence
  Description of Artificial Sequence: Synthetic oligonucleotide
ucuauguuugcaagcacug

SEQ ID NO: 3182110 - RNA, 19 nt, Artificial Sequence
  Description of Artificial Sequence: Synthetic oligonucleotide
uaccgcuuuaaccagaggu

SEQ ID NO: 3182111 - RNA, 19 nt, Artificial Sequence
  Description of Artificial Sequence: Synthetic oligonucleotide
ugaaaucgagaacggagag

SEQ ID NO: 3182112 - RNA, 19 nt, Artificial Sequence
  Description of Artificial Sequence: Synthetic oligonucleotide
ucaacccugaccuuuuaag

SEQ ID NO: 3182113 - RNA, 19 nt, Artificial Sequence
  Description of Artificial Sequence: Synthetic oligonucleotide
guuguaaccaucuccugag

SEQ ID NO: 3182114 - RNA, 19 nt, Artificial Sequence
  Description of Artificial Sequence: Synthetic oligonucleotide
uauguuguauccuaagaua

SEQ ID NO: 3182115 - RNA, 19 nt, Artificial Sequence
  Description of Artificial Sequence: Synthetic oligonucleotide
acuuguuaggaucugggca

SEQ ID NO: 3182116 - RNA, 19 nt, Artificial Sequence
  Description of Artificial Sequence: Synthetic oligonucleotide
gucauauccugauagagca

SEQ ID NO: 3182117 - RNA, 19 nt, Artificial Sequence
  Description of Artificial Sequence: Synthetic oligonucleotide
uguuguaaaaucugaggaa

SEQ ID NO: 3182118 - RNA, 19 nt, Artificial Sequence
  Description of Artificial Sequence: Synthetic oligonucleotide
uguaaaaucugaggaaucu

SEQ ID NO: 3182119 - RNA, 19 nt, Artificial Sequence
  Description of Artificial Sequence: Synthetic oligonucleotide
uugagggucacuuguuagg

SEQ ID NO: 3182120 - RNA, 19 nt, Artificial Sequence
  Description of Artificial Sequence: Synthetic oligonucleotide
auguucuguaccuucgagg

SEQ ID NO: 3182121 - RNA, 19 nt, Artificial Sequence
  Description of Artificial Sequence: Synthetic oligonucleotide
uucaauacuggaagcacgu

SEQ ID NO: 3182122 - RNA, 19 nt, Artificial Sequence
  Description of Artificial Sequence: Synthetic oligonucleotide
uucggcagacaucaggaag

SEQ ID NO: 3182123 - RNA, 19 nt, Artificial Sequence
  Description of Artificial Sequence: Synthetic oligonucleotide
uuugcaucccauuucccgc

SEQ ID NO: 3182124 - RNA, 19 nt, Artificial Sequence
  Description of Artificial Sequence: Synthetic oligonucleotide
ucggcagacaucaggaagc

SEQ ID NO: 3182125 - RNA, 19 nt, Artificial Sequence
  Description of Artificial Sequence: Synthetic oligonucleotide
cuucauacacaaucagucc

SEQ ID NO: 3182126 - RNA, 19 nt, Artificial Sequence
  Description of Artificial Sequence: Synthetic oligonucleotide
aaggcguuaacuugagggu

SEQ ID NO: 3182127 - RNA, 19 nt, Artificial Sequence
  Description of Artificial Sequence: Synthetic oligonucleotide
cagaguuuucagaauacag

SEQ ID NO: 3182128 - RNA, 19 nt, Artificial Sequence
  Description of Artificial Sequence: Synthetic oligonucleotide
ucuuagauacuggacagca

SEQ ID NO: 3182129 - RNA, 19 nt, Artificial Sequence
  Description of Artificial Sequence: Synthetic oligonucleotide
uguaccuucgaggguaugg

SEQ ID NO: 3182130 - RNA, 19 nt, Artificial Sequence
  Description of Artificial Sequence: Synthetic oligonucleotide
uuaccgaccaacagcaagu

SEQ ID NO: 3182131 - RNA, 19 nt, Artificial Sequence
  Description of Artificial Sequence: Synthetic oligonucleotide
uauccuaagauaucagcaa

SEQ ID NO: 3182132 - RNA, 19 nt, Artificial Sequence
  Description of Artificial Sequence: Synthetic oligonucleotide
uucggugaaguuuaggaau

SEQ ID NO: 3182133 - RNA, 19 nt, Artificial Sequence
  Description of Artificial Sequence: Synthetic oligonucleotide
aucacgauacguuuucucu

SEQ ID NO: 3182134 - RNA, 19 nt, Artificial Sequence
  Description of Artificial Sequence: Synthetic oligonucleotide
cuucucugguagaauaagg

SEQ ID NO: 3182135 - RNA, 19 nt, Artificial Sequence
  Description of Artificial Sequence: Synthetic oligonucleotide
guguccauagcaacgaagg

SEQ ID NO: 3182136 - RNA, 19 nt, Artificial Sequence
  Description of Artificial Sequence: Synthetic oligonucleotide
caaguguucuccgaggacg

SEQ ID NO: 3182137 - RNA, 19 nt, Artificial Sequence
  Description of Artificial Sequence: Synthetic oligonucleotide
caaugugagacguuuggac

SEQ ID NO: 3182138 - RNA, 19 nt, Artificial Sequence
  Description of Artificial Sequence: Synthetic oligonucleotide
auacguuuucucuuccauc

SEQ ID NO: 3182139 - RNA, 19 nt, Artificial Sequence
  Description of Artificial Sequence: Synthetic oligonucleotide
cauacuugaacuucuccuc

SEQ ID NO: 3182140 - RNA, 19 nt, Artificial Sequence
  Description of Artificial Sequence: Synthetic oligonucleotide
aacccugaccuuuuaagaa

SEQ ID NO: 3182141 - RNA, 19 nt, Artificial Sequence
  Description of Artificial Sequence: Synthetic oligonucleotide
acacaagaucuuuugcauc

SEQ ID NO: 3182142 - RNA, 19 nt, Artificial Sequence
  Description of Artificial Sequence: Synthetic oligonucleotide
ucucugguagaauaagggu

SEQ ID NO: 3182143 - RNA, 19 nt, Artificial Sequence
  Description of Artificial Sequence: Synthetic oligonucleotide
uauucucggggucuguuga

SEQ ID NO: 3182144 - RNA, 19 nt, Artificial Sequence
  Description of Artificial Sequence: Synthetic oligonucleotide
uccaauugggaucccauau

SEQ ID NO: 3182145 - RNA, 19 nt, Artificial Sequence
  Description of Artificial Sequence: Synthetic oligonucleotide
accccauuuccuuuucggc

SEQ ID NO: 3182146 - RNA, 19 nt, Artificial Sequence
  Description of Artificial Sequence: Synthetic oligonucleotide
aaauacauuccgaaccaca

SEQ ID NO: 3182147 - RNA, 19 nt, Artificial Sequence
  Description of Artificial Sequence: Synthetic oligonucleotide
uauuggguacucuucuaug

SEQ ID NO: 3182148 - RNA, 19 nt, Artificial Sequence
  Description of Artificial Sequence: Synthetic oligonucleotide
gaauaugacccaucuuuac

SEQ ID NO: 3182149 - RNA, 19 nt, Artificial Sequence
  Description of Artificial Sequence: Synthetic oligonucleotide
cuaacccggacaaucuucc

SEQ ID NO: 3182150 - RNA, 19 nt, Artificial Sequence
  Description of Artificial Sequence: Synthetic oligonucleotide
gaaaucgagaacggagagg

SEQ ID NO: 3182151 - RNA, 19 nt, Artificial Sequence
  Description of Artificial Sequence: Synthetic oligonucleotide
ucugaagccuggcugcuug

SEQ ID NO: 3182152 - RNA, 19 nt, Artificial Sequence
  Description of Artificial Sequence: Synthetic oligonucleotide
guucaauacuggaagcacg

SEQ ID NO: 3182153 - RNA, 19 nt, Artificial Sequence
  Description of Artificial Sequence: Synthetic oligonucleotide
augugagacguuuggacug

SEQ ID NO: 3182154 - RNA, 19 nt, Artificial Sequence
  Description of Artificial Sequence: Synthetic oligonucleotide
gaauaaggguaguuaauaa

SEQ ID NO: 3182155 - RNA, 19 nt, Artificial Sequence
  Description of Artificial Sequence: Synthetic oligonucleotide
uuaugucaaugugagacgu

SEQ ID NO: 3182156 - RNA, 19 nt, Artificial Sequence
  Description of Artificial Sequence: Synthetic oligonucleotide
guaggcuuugcuccaauug

SEQ ID NO: 3182157 - RNA, 19 nt, Artificial Sequence
  Description of Artificial Sequence: Synthetic oligonucleotide
uguacacuggugcacugac

SEQ ID NO: 3182158 - RNA, 19 nt, Artificial Sequence
  Description of Artificial Sequence: Synthetic oligonucleotide
uagaauaaggguaguuaau

SEQ ID NO: 3182159 - RNA, 19 nt, Artificial Sequence
  Description of Artificial Sequence: Synthetic oligonucleotide
ugaucuuggagaagcuugu

SEQ ID NO: 3182160 - RNA, 19 nt, Artificial Sequence
  Description of Artificial Sequence: Synthetic oligonucleotide
gccagaugcacauugguag

SEQ ID NO: 3182161 - RNA, 19 nt, Artificial Sequence
  Description of Artificial Sequence: Synthetic oligonucleotide
cuuugcuccaauugggauc

SEQ ID NO: 3182162 - RNA, 19 nt, Artificial Sequence
  Description of Artificial Sequence: Synthetic oligonucleotide
uguucaauacuggaagcac

SEQ ID NO: 3182163 - RNA, 19 nt, Artificial Sequence
  Description of Artificial Sequence: Synthetic oligonucleotide
uaucgagacagauuugcau

SEQ ID NO: 3182164 - RNA, 19 nt, Artificial Sequence
  Description of Artificial Sequence: Synthetic oligonucleotide
uucuccugggcauuguaca

SEQ ID NO: 3182165 - RNA, 19 nt, Artificial Sequence
  Description of Artificial Sequence: Synthetic oligonucleotide
aucacuaucaugugcugaa

SEQ ID NO: 3182166 - RNA, 19 nt, Artificial Sequence
  Description of Artificial Sequence: Synthetic oligonucleotide
uuguaaaaucugaggaauc

SEQ ID NO: 3182167 - RNA, 19 nt, Artificial Sequence
  Description of Artificial Sequence: Synthetic oligonucleotide
uugggcacuggcaagccca

SEQ ID NO: 3182168 - RNA, 19 nt, Artificial Sequence
  Description of Artificial Sequence: Synthetic oligonucleotide
cugagagugggcaugcaug

SEQ ID NO: 3182169 - RNA, 19 nt, Artificial Sequence
  Description of Artificial Sequence: Synthetic oligonucleotide
guauccuaagauaucagca

SEQ ID NO: 3182170 - RNA, 19 nt, Artificial Sequence
  Description of Artificial Sequence: Synthetic oligonucleotide
cucgauccaucguacaggc

SEQ ID NO: 3182171 - RNA, 19 nt, Artificial Sequence
  Description of Artificial Sequence: Synthetic oligonucleotide
aguauucaucagcuucuuc

SEQ ID NO: 3182172 - RNA, 19 nt, Artificial Sequence
  Description of Artificial Sequence: Synthetic oligonucleotide
cauauccugauagagcaug

SEQ ID NO: 3182173 - RNA, 19 nt, Artificial Sequence
  Description of Artificial Sequence: Synthetic oligonucleotide
uauuccauaucgagacaga

SEQ ID NO: 3182174 - RNA, 19 nt, Artificial Sequence
  Description of Artificial Sequence: Synthetic oligonucleotide
aacagcaaguguucuccga

SEQ ID NO: 3182175 - RNA, 19 nt, Artificial Sequence
  Description of Artificial Sequence: Synthetic oligonucleotide
acugacagcgccaauccuc

SEQ ID NO: 3182176 - RNA, 19 nt, Artificial Sequence
  Description of Artificial Sequence: Synthetic oligonucleotide
uucuuugguaauguccuug

SEQ ID NO: 3182177 - RNA, 19 nt, Artificial Sequence
  Description of Artificial Sequence: Synthetic oligonucleotide
aucacucggaaauguucac

SEQ ID NO: 3182178 - RNA, 19 nt, Artificial Sequence
  Description of Artificial Sequence: Synthetic oligonucleotide
acgauacguuuucucuucc

SEQ ID NO: 3182179 - RNA, 19 nt, Artificial Sequence
  Description of Artificial Sequence: Synthetic oligonucleotide
uggguucuauguuguaucc

SEQ ID NO: 3182180 - RNA, 19 nt, Artificial Sequence
  Description of Artificial Sequence: Synthetic oligonucleotide
uuuaaccagaggugagucu

SEQ ID NO: 3182181 - RNA, 19 nt, Artificial Sequence
  Description of Artificial Sequence: Synthetic oligonucleotide
ucuuuagugugaucuugga

SEQ ID NO: 3182182 - RNA, 19 nt, Artificial Sequence
  Description of Artificial Sequence: Synthetic oligonucleotide
augguccccacucaugcag

SEQ ID NO: 3182183 - RNA, 19 nt, Artificial Sequence
  Description of Artificial Sequence: Synthetic oligonucleotide
agaauaaggguaguuaaua

SEQ ID NO: 3182184 - RNA, 19 nt, Artificial Sequence
  Description of Artificial Sequence: Synthetic oligonucleotide
uauacauucauucaaauaa

SEQ ID NO: 3182185 - RNA, 19 nt, Artificial Sequence
  Description of Artificial Sequence: Synthetic oligonucleotide
aaaggcaggacauccaacc

SEQ ID NO: 3182186 - RNA, 19 nt, Artificial Sequence
  Description of Artificial Sequence: Synthetic oligonucleotide
ucaaauaacaguuucaaau

SEQ ID NO: 3182187 - RNA, 19 nt, Artificial Sequence
  Description of Artificial Sequence: Synthetic oligonucleotide
uguaauuucaucugcagca

SEQ ID NO: 3182188 - RNA, 19 nt, Artificial Sequence
  Description of Artificial Sequence: Synthetic oligonucleotide
uuuacaacuugucagcacc

SEQ ID NO: 3182189 - RNA, 19 nt, Artificial Sequence
  Description of Artificial Sequence: Synthetic oligonucleotide
aguucuacaucacggaccc

SEQ ID NO: 3182190 - RNA, 19 nt, Artificial Sequence
  Description of Artificial Sequence: Synthetic oligonucleotide
uucaguugcaaaauuuccg

SEQ ID NO: 3182191 - RNA, 19 nt, Artificial Sequence
  Description of Artificial Sequence: Synthetic oligonucleotide
ucaaauguggguaaauaug

SEQ ID NO: 3182192 - RNA, 19 nt, Artificial Sequence
  Description of Artificial Sequence: Synthetic oligonucleotide
aguguguugggauaggaac

SEQ ID NO: 3182193 - RNA, 19 nt, Artificial Sequence
  Description of Artificial Sequence: Synthetic oligonucleotide
ugucuuuacaacuugucag

SEQ ID NO: 3182194 - RNA, 19 nt, Artificial Sequence
  Description of Artificial Sequence: Synthetic oligonucleotide
aaaagucaaggccaguaag

SEQ ID NO: 3182195 - RNA, 19 nt, Artificial Sequence
  Description of Artificial Sequence: Synthetic oligonucleotide
uaaauaugucuucaguugc

SEQ ID NO: 3182196 - RNA, 19 nt, Artificial Sequence
  Description of Artificial Sequence: Synthetic oligonucleotide
ugggauaggaacaucagug

SEQ ID NO: 3182197 - RNA, 19 nt, Artificial Sequence
  Description of Artificial Sequence: Synthetic oligonucleotide
aaauuuccgagacaggcug

SEQ ID NO: 3182198 - RNA, 19 nt, Artificial Sequence
  Description of Artificial Sequence: Synthetic oligonucleotide
aaauaacaguuucaaaugu

SEQ ID NO: 3182199 - RNA, 19 nt, Artificial Sequence
  Description of Artificial Sequence: Synthetic oligonucleotide
ugcaaaauuuccgagacag

SEQ ID NO: 3182200 - RNA, 19 nt, Artificial Sequence
  Description of Artificial Sequence: Synthetic oligonucleotide
aauguggguaaauaugucu

SEQ ID NO: 3182201 - RNA, 19 nt, Artificial Sequence
  Description of Artificial Sequence: Synthetic oligonucleotide
ugcagcaucaaaauggcca

SEQ ID NO: 3182202 - RNA, 19 nt, Artificial Sequence
  Description of Artificial Sequence: Synthetic oligonucleotide
guaaauaugucuucaguug

SEQ ID NO: 3182203 - RNA, 19 nt, Artificial Sequence
  Description of Artificial Sequence: Synthetic oligonucleotide
caaauaacaguuucaaaug

SEQ ID NO: 3182204 - RNA, 19 nt, Artificial Sequence
  Description of Artificial Sequence: Synthetic oligonucleotide
agaauuuccucauuuuguc

SEQ ID NO: 3182205 - RNA, 19 nt, Artificial Sequence
  Description of Artificial Sequence: Synthetic oligonucleotide
aacaguuucaaaugugggu

SEQ ID NO: 3182206 - RNA, 19 nt, Artificial Sequence
  Description of Artificial Sequence: Synthetic oligonucleotide
agcaccacaaaauagugug

SEQ ID NO: 3182207 - RNA, 19 nt, Artificial Sequence
  Description of Artificial Sequence: Synthetic oligonucleotide
aguaaggaguucuacauca

SEQ ID NO: 3182208 - RNA, 19 nt, Artificial Sequence
  Description of Artificial Sequence: Synthetic oligonucleotide
uuccugauaaaagucaagg

SEQ ID NO: 3182209 - RNA, 19 nt, Artificial Sequence
  Description of Artificial Sequence: Synthetic oligonucleotide
aauuuccucauuuugucaa

SEQ ID NO: 3182210 - RNA, 19 nt, Artificial Sequence
  Description of Artificial Sequence: Synthetic oligonucleotide
ugagggaugaugaaaggca

SEQ ID NO: 3182211 - RNA, 19 nt, Artificial Sequence
  Description of Artificial Sequence: Synthetic oligonucleotide
uaacaguuucaaauguggg

SEQ ID NO: 3182212 - RNA, 19 nt, Artificial Sequence
  Description of Artificial Sequence: Synthetic oligonucleotide
ugucaaauugcuuuauaca

SEQ ID NO: 3182213 - RNA, 19 nt, Artificial Sequence
  Description of Artificial Sequence: Synthetic oligonucleotide
aauugcuuuauacauucau

SEQ ID NO: 3182214 - RNA, 19 nt, Artificial Sequence
  Description of Artificial Sequence: Synthetic oligonucleotide
uccucauuuugucaaauug

SEQ ID NO: 3182215 - RNA, 19 nt, Artificial Sequence
  Description of Artificial Sequence: Synthetic oligonucleotide
aaagucaaggccaguaagg

SEQ ID NO: 3182216 - RNA, 19 nt, Artificial Sequence
  Description of Artificial Sequence: Synthetic oligonucleotide
uuuacuagagaauuuccuc

SEQ ID NO: 3182217 - RNA, 19 nt, Artificial Sequence
  Description of Artificial Sequence: Synthetic oligonucleotide
gaugaugaaaggcaggaca

SEQ ID NO: 3182218 - RNA, 19 nt, Artificial Sequence
  Description of Artificial Sequence: Synthetic oligonucleotide
uuacuagagaauuuccuca

SEQ ID NO: 3182219 - RNA, 19 nt, Artificial Sequence
  Description of Artificial Sequence: Synthetic oligonucleotide
caaaauuuccgagacaggc

SEQ ID NO: 3182220 - RNA, 19 nt, Artificial Sequence
  Description of Artificial Sequence: Synthetic oligonucleotide
aucaguguuggcuacaugu

SEQ ID NO: 3182221 - RNA, 19 nt, Artificial Sequence
  Description of Artificial Sequence: Synthetic oligonucleotide
ugugcuuuaaaccugucuu

SEQ ID NO: 3182222 - RNA, 19 nt, Artificial Sequence
  Description of Artificial Sequence: Synthetic oligonucleotide
uaaggaguucuacaucacg

SEQ ID NO: 3182223 - RNA, 19 nt, Artificial Sequence
  Description of Artificial Sequence: Synthetic oligonucleotide
auaacaguuucaaaugugg

SEQ ID NO: 3182224 - RNA, 19 nt, Artificial Sequence
  Description of Artificial Sequence: Synthetic oligonucleotide
aucugcagcaucaaaaugg

SEQ ID NO: 3182225 - RNA, 19 nt, Artificial Sequence
  Description of Artificial Sequence: Synthetic oligonucleotide
caaauugcuuuauacauuc

SEQ ID NO: 3182226 - RNA, 19 nt, Artificial Sequence
  Description of Artificial Sequence: Synthetic oligonucleotide
aaggaguucuacaucacgg

SEQ ID NO: 3182227 - RNA, 19 nt, Artificial Sequence
  Description of Artificial Sequence: Synthetic oligonucleotide
uguugggauaggaacauca

SEQ ID NO: 3182228 - RNA, 19 nt, Artificial Sequence
  Description of Artificial Sequence: Synthetic oligonucleotide
uacauguuguguaauuuca

SEQ ID NO: 3182229 - RNA, 19 nt, Artificial Sequence
  Description of Artificial Sequence: Synthetic oligonucleotide
ucauucaaauaacaguuuc

SEQ ID NO: 3182230 - RNA, 19 nt, Artificial Sequence
  Description of Artificial Sequence: Synthetic oligonucleotide
uugcuuuauacauucauuc

SEQ ID NO: 3182231 - RNA, 19 nt, Artificial Sequence
  Description of Artificial Sequence: Synthetic oligonucleotide
uguuuacuagagaauuucc

SEQ ID NO: 3182232 - RNA, 19 nt, Artificial Sequence
  Description of Artificial Sequence: Synthetic oligonucleotide
ugauaaaagucaaggccag

SEQ ID NO: 3182233 - RNA, 19 nt, Artificial Sequence
  Description of Artificial Sequence: Synthetic oligonucleotide
uguuguguaauuucaucug

SEQ ID NO: 3182234 - RNA, 19 nt, Artificial Sequence
  Description of Artificial Sequence: Synthetic oligonucleotide
uugucaaauugcuuuauac

SEQ ID NO: 3182235 - RNA, 19 nt, Artificial Sequence
  Description of Artificial Sequence: Synthetic oligonucleotide
agagaauuuccucauuuug

SEQ ID NO: 3182236 - RNA, 19 nt, Artificial Sequence
  Description of Artificial Sequence: Synthetic oligonucleotide
aaaauggccaucauaauua

SEQ ID NO: 3182237 - RNA, 19 nt, Artificial Sequence
  Description of Artificial Sequence: Synthetic oligonucleotide
uucaucugcagcaucaaaa

SEQ ID NO: 3182238 - RNA, 19 nt, Artificial Sequence
  Description of Artificial Sequence: Synthetic oligonucleotide
uguguaauuucaucugcag

SEQ ID NO: 3182239 - RNA, 19 nt, Artificial Sequence
  Description of Artificial Sequence: Synthetic oligonucleotide
uaugucuucaguugcaaaa

SEQ ID NO: 3182240 - RNA, 19 nt, Artificial Sequence
  Description of Artificial Sequence: Synthetic oligonucleotide
ucaguugcaaaauuuccga

SEQ ID NO: 3182241 - RNA, 19 nt, Artificial Sequence
  Description of Artificial Sequence: Synthetic oligonucleotide
uugucuuuacaacuuguca

SEQ ID NO: 3182242 - RNA, 19 nt, Artificial Sequence
  Description of Artificial Sequence: Synthetic oligonucleotide
uacauucauucaaauaaca

SEQ ID NO: 3182243 - RNA, 19 nt, Artificial Sequence
  Description of Artificial Sequence: Synthetic oligonucleotide
aauaacaguuucaaaugug

SEQ ID NO: 3182244 - RNA, 19 nt, Artificial Sequence
  Description of Artificial Sequence: Synthetic oligonucleotide
uucuacaucacggacccgg

SEQ ID NO: 3182245 - RNA, 19 nt, Artificial Sequence
  Description of Artificial Sequence: Synthetic oligonucleotide
auguuguguaauuucaucu

SEQ ID NO: 3182246 - RNA, 19 nt, Artificial Sequence
  Description of Artificial Sequence: Synthetic oligonucleotide
aaauaguguguugggauag

SEQ ID NO: 3182247 - RNA, 19 nt, Artificial Sequence
  Description of Artificial Sequence: Synthetic oligonucleotide
ucuucaguugcaaaauuuc

SEQ ID NO: 3182248 - RNA, 19 nt, Artificial Sequence
  Description of Artificial Sequence: Synthetic oligonucleotide
cugauaaaagucaaggcca

SEQ ID NO: 3182249 - RNA, 19 nt, Artificial Sequence
  Description of Artificial Sequence: Synthetic oligonucleotide
aucaaaauggccaucauaa

SEQ ID NO: 3182250 - RNA, 19 nt, Artificial Sequence
  Description of Artificial Sequence: Synthetic oligonucleotide
gaugaaaggcaggacaucc

SEQ ID NO: 3182251 - RNA, 19 nt, Artificial Sequence
  Description of Artificial Sequence: Synthetic oligonucleotide
cagcuuuccauguuggugg

SEQ ID NO: 3182252 - RNA, 19 nt, Artificial Sequence
  Description of Artificial Sequence: Synthetic oligonucleotide
cuucaguugcaaaauuucc

SEQ ID NO: 3182253 - RNA, 19 nt, Artificial Sequence
  Description of Artificial Sequence: Synthetic oligonucleotide
uuaaaccugucuuccaccc

SEQ ID NO: 3182254 - RNA, 19 nt, Artificial Sequence
  Description of Artificial Sequence: Synthetic oligonucleotide
aggacauccaaccacccag

SEQ ID NO: 3182255 - RNA, 19 nt, Artificial Sequence
  Description of Artificial Sequence: Synthetic oligonucleotide
uuuaaaccugucuuccacc

SEQ ID NO: 3182256 - RNA, 19 nt, Artificial Sequence
  Description of Artificial Sequence: Synthetic oligonucleotide
auaggaacaucaguguugg

SEQ ID NO: 3182257 - RNA, 19 nt, Artificial Sequence
  Description of Artificial Sequence: Synthetic oligonucleotide
guugcaaaauuuccgagac

SEQ ID NO: 3182258 - RNA, 19 nt, Artificial Sequence
  Description of Artificial Sequence: Synthetic oligonucleotide
uuuuguuuacuagagaauu

SEQ ID NO: 3182259 - RNA, 19 nt, Artificial Sequence
  Description of Artificial Sequence: Synthetic oligonucleotide
uucaaauguggguaaauau

SEQ ID NO: 3182260 - RNA, 19 nt, Artificial Sequence
  Description of Artificial Sequence: Synthetic oligonucleotide
ucugcagcaucaaaauggc

SEQ ID NO: 3182261 - RNA, 19 nt, Artificial Sequence
  Description of Artificial Sequence: Synthetic oligonucleotide
aaaauaguguguugggaua

SEQ ID NO: 3182262 - RNA, 19 nt, Artificial Sequence
  Description of Artificial Sequence: Synthetic oligonucleotide
ugucagcaccacaaaauag

SEQ ID NO: 3182263 - RNA, 19 nt, Artificial Sequence
  Description of Artificial Sequence: Synthetic oligonucleotide
ucuucuguucuguuuucgg

SEQ ID NO: 3182264 - RNA, 19 nt, Artificial Sequence
  Description of Artificial Sequence: Synthetic oligonucleotide
ccugauaaaagucaaggcc

SEQ ID NO: 3182265 - RNA, 19 nt, Artificial Sequence
  Description of Artificial Sequence: Synthetic oligonucleotide
aauuucaucugcagcauca

SEQ ID NO: 3182266 - RNA, 19 nt, Artificial Sequence
  Description of Artificial Sequence: Synthetic oligonucleotide
augagggaugaugaaaggc

SEQ ID NO: 3182267 - RNA, 19 nt, Artificial Sequence
  Description of Artificial Sequence: Synthetic oligonucleotide
gauaggaacaucaguguug

SEQ ID NO: 3182268 - RNA, 19 nt, Artificial Sequence
  Description of Artificial Sequence: Synthetic oligonucleotide
uccugauaaaagucaaggc

SEQ ID NO: 3182269 - RNA, 19 nt, Artificial Sequence
  Description of Artificial Sequence: Synthetic oligonucleotide
auucauucaaauaacaguu

SEQ ID NO: 3182270 - RNA, 19 nt, Artificial Sequence
  Description of Artificial Sequence: Synthetic oligonucleotide
uuauacauucauucaaaua

SEQ ID NO: 3182271 - RNA, 19 nt, Artificial Sequence
  Description of Artificial Sequence: Synthetic oligonucleotide
cacaaaauaguguguuggg

SEQ ID NO: 3182272 - RNA, 19 nt, Artificial Sequence
  Description of Artificial Sequence: Synthetic oligonucleotide
ugcuuuauacauucauuca

SEQ ID NO: 3182273 - RNA, 19 nt, Artificial Sequence
  Description of Artificial Sequence: Synthetic oligonucleotide
ucagcaccacaaaauagug

SEQ ID NO: 3182274 - RNA, 19 nt, Artificial Sequence
  Description of Artificial Sequence: Synthetic oligonucleotide
uuuuccugauaaaagucaa

SEQ ID NO: 3182275 - RNA, 19 nt, Artificial Sequence
  Description of Artificial Sequence: Synthetic oligonucleotide
guuguguaauuucaucugc

SEQ ID NO: 3182276 - RNA, 19 nt, Artificial Sequence
  Description of Artificial Sequence: Synthetic oligonucleotide
uuuauacauucauucaaau

SEQ ID NO: 3182277 - RNA, 19 nt, Artificial Sequence
  Description of Artificial Sequence: Synthetic oligonucleotide
uuugucuuuacaacuuguc

SEQ ID NO: 3182278 - RNA, 19 nt, Artificial Sequence
  Description of Artificial Sequence: Synthetic oligonucleotide
auacauucauucaaauaac

SEQ ID NO: 3182279 - RNA, 19 nt, Artificial Sequence
  Description of Artificial Sequence: Synthetic oligonucleotide
aguugcaaaauuuccgaga

SEQ ID NO: 3182280 - RNA, 19 nt, Artificial Sequence
  Description of Artificial Sequence: Synthetic oligonucleotide
uuuccugauaaaagucaag

SEQ ID NO: 3182281 - RNA, 19 nt, Artificial Sequence
  Description of Artificial Sequence: Synthetic oligonucleotide
gaugagggaugaugaaagg

SEQ ID NO: 3182282 - RNA, 19 nt, Artificial Sequence
  Description of Artificial Sequence: Synthetic oligonucleotide
gucuuuacaacuugucagc

SEQ ID NO: 3182283 - RNA, 19 nt, Artificial Sequence
  Description of Artificial Sequence: Synthetic oligonucleotide
cuucuguucuguuuucggg

SEQ ID NO: 3182284 - RNA, 19 nt, Artificial Sequence
  Description of Artificial Sequence: Synthetic oligonucleotide
aagcaaaucauacaaauac

SEQ ID NO: 3182285 - RNA, 19 nt, Artificial Sequence
  Description of Artificial Sequence: Synthetic oligonucleotide
auuuauuuguuccugaugc

SEQ ID NO: 3182286 - RNA, 19 nt, Artificial Sequence
  Description of Artificial Sequence: Synthetic oligonucleotide
aaucucauuuauuuguucc

SEQ ID NO: 3182287 - RNA, 19 nt, Artificial Sequence
  Description of Artificial Sequence: Synthetic oligonucleotide
cuaaaguuggacuagaucc

SEQ ID NO: 3182288 - RNA, 19 nt, Artificial Sequence
  Description of Artificial Sequence: Synthetic oligonucleotide
aaaucauacaaauacugag

SEQ ID NO: 3182289 - RNA, 19 nt, Artificial Sequence
  Description of Artificial Sequence: Synthetic oligonucleotide
acuacauucacauauaugu

SEQ ID NO: 3182290 - RNA, 19 nt, Artificial Sequence
  Description of Artificial Sequence: Synthetic oligonucleotide
cuuacauuucauuucaucg

SEQ ID NO: 3182291 - RNA, 19 nt, Artificial Sequence
  Description of Artificial Sequence: Synthetic oligonucleotide
aacaauaagcaaaucauac

SEQ ID NO: 3182292 - RNA, 19 nt, Artificial Sequence
  Description of Artificial Sequence: Synthetic oligonucleotide
uauauucuuaagaacagcc

SEQ ID NO: 3182293 - RNA, 19 nt, Artificial Sequence
  Description of Artificial Sequence: Synthetic oligonucleotide
uuaagaacagccaucaaga

SEQ ID NO: 3182294 - RNA, 19 nt, Artificial Sequence
  Description of Artificial Sequence: Synthetic oligonucleotide
uuaacaauaaaguaaggaa

SEQ ID NO: 3182295 - RNA, 19 nt, Artificial Sequence
  Description of Artificial Sequence: Synthetic oligonucleotide
uauguauauauucuuaaga

SEQ ID NO: 3182296 - RNA, 19 nt, Artificial Sequence
  Description of Artificial Sequence: Synthetic oligonucleotide
aaauagacagaugagucac

SEQ ID NO: 3182297 - RNA, 19 nt, Artificial Sequence
  Description of Artificial Sequence: Synthetic oligonucleotide
cuggguaagaaauagacag

SEQ ID NO: 3182298 - RNA, 19 nt, Artificial Sequence
  Description of Artificial Sequence: Synthetic oligonucleotide
aauuacucaaguaaccugg

SEQ ID NO: 3182299 - RNA, 19 nt, Artificial Sequence
  Description of Artificial Sequence: Synthetic oligonucleotide
aaggaaugcuuucugauag

SEQ ID NO: 3182300 - RNA, 19 nt, Artificial Sequence
  Description of Artificial Sequence: Synthetic oligonucleotide
aguaacaauaagcaaauca

SEQ ID NO: 3182301 - RNA, 19 nt, Artificial Sequence
  Description of Artificial Sequence: Synthetic oligonucleotide
agacagaugagucacugcc

SEQ ID NO: 3182302 - RNA, 19 nt, Artificial Sequence
  Description of Artificial Sequence: Synthetic oligonucleotide
uacaguaacaauaagcaaa

SEQ ID NO: 3182303 - RNA, 19 nt, Artificial Sequence
  Description of Artificial Sequence: Synthetic oligonucleotide
aucauacaaauacugaggg

SEQ ID NO: 3182304 - RNA, 19 nt, Artificial Sequence
  Description of Artificial Sequence: Synthetic oligonucleotide
uauauauucuuaagaacag

SEQ ID NO: 3182305 - RNA, 19 nt, Artificial Sequence
  Description of Artificial Sequence: Synthetic oligonucleotide
guaagaaauagacagauga

SEQ ID NO: 3182306 - RNA, 19 nt, Artificial Sequence
  Description of Artificial Sequence: Synthetic oligonucleotide
aagaacagccaucaagagg

SEQ ID NO: 3182307 - RNA, 19 nt, Artificial Sequence
  Description of Artificial Sequence: Synthetic oligonucleotide
aacgguaucaauuacucaa

SEQ ID NO: 3182308 - RNA, 19 nt, Artificial Sequence
  Description of Artificial Sequence: Synthetic oligonucleotide
aaucauacaaauacugagg

SEQ ID NO: 3182309 - RNA, 19 nt, Artificial Sequence
  Description of Artificial Sequence: Synthetic oligonucleotide
uugcaugucacuaaaguug

SEQ ID NO: 3182310 - RNA, 19 nt, Artificial Sequence
  Description of Artificial Sequence: Synthetic oligonucleotide
caagagguuaacaauaaag

SEQ ID NO: 3182311 - RNA, 19 nt, Artificial Sequence
  Description of Artificial Sequence: Synthetic oligonucleotide
uuucugauaggauuacugg

SEQ ID NO: 3182312 - RNA, 19 nt, Artificial Sequence
  Description of Artificial Sequence: Synthetic oligonucleotide
uaacaauaaaguaaggaau

SEQ ID NO: 3182313 - RNA, 19 nt, Artificial Sequence
  Description of Artificial Sequence: Synthetic oligonucleotide
cuuaagaacagccaucaag

SEQ ID NO: 3182314 - RNA, 19 nt, Artificial Sequence
  Description of Artificial Sequence: Synthetic oligonucleotide
aaugcuuucugauaggauu

SEQ ID NO: 3182315 - RNA, 19 nt, Artificial Sequence
  Description of Artificial Sequence: Synthetic oligonucleotide
aaguaaccugguaagagcc

SEQ ID NO: 3182316 - RNA, 19 nt, Artificial Sequence
  Description of Artificial Sequence: Synthetic oligonucleotide
aacaauaaaguaaggaaug

SEQ ID NO: 3182317 - RNA, 19 nt, Artificial Sequence
  Description of Artificial Sequence: Synthetic oligonucleotide
uaagaaauagacagaugag

SEQ ID NO: 3182318 - RNA, 19 nt, Artificial Sequence
  Description of Artificial Sequence: Synthetic oligonucleotide
ugcaugucacuaaaguugg

SEQ ID NO: 3182319 - RNA, 19 nt, Artificial Sequence
  Description of Artificial Sequence: Synthetic oligonucleotide
uguauauauucuuaagaac

SEQ ID NO: 3182320 - RNA, 19 nt, Artificial Sequence
  Description of Artificial Sequence: Synthetic oligonucleotide
uuuugcaugucacuaaagu

SEQ ID NO: 3182321 - RNA, 19 nt, Artificial Sequence
  Description of Artificial Sequence: Synthetic oligonucleotide
uucacauauauguauauau

SEQ ID NO: 3182322 - RNA, 19 nt, Artificial Sequence
  Description of Artificial Sequence: Synthetic oligonucleotide
uucugauaggauuacuggg

SEQ ID NO: 3182323 - RNA, 19 nt, Artificial Sequence
  Description of Artificial Sequence: Synthetic oligonucleotide
uaucaauuacucaaguaac

SEQ ID NO: 3182324 - RNA, 19 nt, Artificial Sequence
  Description of Artificial Sequence: Synthetic oligonucleotide
aaaucucauuuauuuguuc

SEQ ID NO: 3182325 - RNA, 19 nt, Artificial Sequence
  Description of Artificial Sequence: Synthetic oligonucleotide
guauauauucuuaagaaca

SEQ ID NO: 3182326 - RNA, 19 nt, Artificial Sequence
  Description of Artificial Sequence: Synthetic oligonucleotide
caguacaguaacaauaagc

SEQ ID NO: 3182327 - RNA, 19 nt, Artificial Sequence
  Description of Artificial Sequence: Synthetic oligonucleotide
uuucauuucaucguggacu

SEQ ID NO: 3182328 - RNA, 19 nt, Artificial Sequence
  Description of Artificial Sequence: Synthetic oligonucleotide
aagaaauagacagaugagu

SEQ ID NO: 3182329 - RNA, 19 nt, Artificial Sequence
  Description of Artificial Sequence: Synthetic oligonucleotide
aguacaguaacaauaagca

SEQ ID NO: 3182330 - RNA, 19 nt, Artificial Sequence
  Description of Artificial Sequence: Synthetic oligonucleotide
acuaaaguuggacuagauc

SEQ ID NO: 3182331 - RNA, 19 nt, Artificial Sequence
  Description of Artificial Sequence: Synthetic oligonucleotide
aaguaacagguuaacaacg

SEQ ID NO: 3182332 - RNA, 19 nt, Artificial Sequence
  Description of Artificial Sequence: Synthetic oligonucleotide
agaaauagacagaugaguc

SEQ ID NO: 3182333 - RNA, 19 nt, Artificial Sequence
  Description of Artificial Sequence: Synthetic oligonucleotide
auaagcaaaucauacaaau

SEQ ID NO: 3182334 - RNA, 19 nt, Artificial Sequence
  Description of Artificial Sequence: Synthetic oligonucleotide
aagagguuaacaauaaagu

SEQ ID NO: 3182335 - RNA, 19 nt, Artificial Sequence
  Description of Artificial Sequence: Synthetic oligonucleotide
auguauauauucuuaagaa

SEQ ID NO: 3182336 - RNA, 19 nt, Artificial Sequence
  Description of Artificial Sequence: Synthetic oligonucleotide
uauauguauauauucuuaa

SEQ ID NO: 3182337 - RNA, 19 nt, Artificial Sequence
  Description of Artificial Sequence: Synthetic oligonucleotide
uauucuuaagaacagccau

SEQ ID NO: 3182338 - RNA, 19 nt, Artificial Sequence
  Description of Artificial Sequence: Synthetic oligonucleotide
uacuggguaagaaauagac

SEQ ID NO: 3182339 - RNA, 19 nt, Artificial Sequence
  Description of Artificial Sequence: Synthetic oligonucleotide
uuguuccugaugcacaagg

SEQ ID NO: 3182340 - RNA, 19 nt, Artificial Sequence
  Description of Artificial Sequence: Synthetic oligonucleotide
acaauaaaguaaggaaugc

SEQ ID NO: 3182341 - RNA, 19 nt, Artificial Sequence
  Description of Artificial Sequence: Synthetic oligonucleotide
uuaacaacgguaucaauua

SEQ ID NO: 3182342 - RNA, 19 nt, Artificial Sequence
  Description of Artificial Sequence: Synthetic oligonucleotide
auauguauauauucuuaag

SEQ ID NO: 3182343 - RNA, 19 nt, Artificial Sequence
  Description of Artificial Sequence: Synthetic oligonucleotide
cacauauauguauauauuc

SEQ ID NO: 3182344 - RNA, 19 nt, Artificial Sequence
  Description of Artificial Sequence: Synthetic oligonucleotide
uacauuucauuucaucgug

SEQ ID NO: 3182345 - RNA, 19 nt, Artificial Sequence
  Description of Artificial Sequence: Synthetic oligonucleotide
aauacugaggggaaggaug

SEQ ID NO: 3182346 - RNA, 19 nt, Artificial Sequence
  Description of Artificial Sequence: Synthetic oligonucleotide
agaacagccaucaagaggu

SEQ ID NO: 3182347 - RNA, 19 nt, Artificial Sequence
  Description of Artificial Sequence: Synthetic oligonucleotide
ucugauaggauuacugggu

SEQ ID NO: 3182348 - RNA, 19 nt, Artificial Sequence
  Description of Artificial Sequence: Synthetic oligonucleotide
uuggacuagauccacaauc

SEQ ID NO: 3182349 - RNA, 19 nt, Artificial Sequence
  Description of Artificial Sequence: Synthetic oligonucleotide
aaggauguccccuugacua

SEQ ID NO: 3182350 - RNA, 19 nt, Artificial Sequence
  Description of Artificial Sequence: Synthetic oligonucleotide
guaucaauuacucaaguaa

SEQ ID NO: 3182351 - RNA, 19 nt, Artificial Sequence
  Description of Artificial Sequence: Synthetic oligonucleotide
uuccugaugcacaagggag

SEQ ID NO: 3182352 - RNA, 19 nt, Artificial Sequence
  Description of Artificial Sequence: Synthetic oligonucleotide
uuacauuucauuucaucgu

SEQ ID NO: 3182353 - RNA, 19 nt, Artificial Sequence
  Description of Artificial Sequence: Synthetic oligonucleotide
uacucaaguaaccugguaa

SEQ ID NO: 3182354 - RNA, 19 nt, Artificial Sequence
  Description of Artificial Sequence: Synthetic oligonucleotide
aucaauuacucaaguaacc

SEQ ID NO: 3182355 - RNA, 19 nt, Artificial Sequence
  Description of Artificial Sequence: Synthetic oligonucleotide
uucaucguggacuuggcug

SEQ ID NO: 3182356 - RNA, 19 nt, Artificial Sequence
  Description of Artificial Sequence: Synthetic oligonucleotide
auauauucuuaagaacagc

SEQ ID NO: 3182357 - RNA, 19 nt, Artificial Sequence
  Description of Artificial Sequence: Synthetic oligonucleotide
ugagucacugccaaguaac

SEQ ID NO: 3182358 - RNA, 19 nt, Artificial Sequence
  Description of Artificial Sequence: Synthetic oligonucleotide
aauaaaguaaggaaugcuu

SEQ ID NO: 3182359 - RNA, 19 nt, Artificial Sequence
  Description of Artificial Sequence: Synthetic oligonucleotide
caaguaacagguuaacaac

SEQ ID NO: 3182360 - RNA, 19 nt, Artificial Sequence
  Description of Artificial Sequence: Synthetic oligonucleotide
auuacuggguaagaaauag

SEQ ID NO: 3182361 - RNA, 19 nt, Artificial Sequence
  Description of Artificial Sequence: Synthetic oligonucleotide
cuuucugauaggauuacug

SEQ ID NO: 3182362 - RNA, 19 nt, Artificial Sequence
  Description of Artificial Sequence: Synthetic oligonucleotide
gucacugccaaguaacagg

SEQ ID NO: 3182363 - RNA, 19 nt, Artificial Sequence
  Description of Artificial Sequence: Synthetic oligonucleotide
ucaucguggacuuggcugg

SEQ ID NO: 3182364 - RNA, 19 nt, Artificial Sequence
  Description of Artificial Sequence: Synthetic oligonucleotide
ucauacaaauacugagggg

SEQ ID NO: 3182365 - RNA, 19 nt, Artificial Sequence
  Description of Artificial Sequence: Synthetic oligonucleotide
uaaaguuggacuagaucca

SEQ ID NO: 3182366 - RNA, 19 nt, Artificial Sequence
  Description of Artificial Sequence: Synthetic oligonucleotide
ucaaguaaccugguaagag

SEQ ID NO: 3182367 - RNA, 19 nt, Artificial Sequence
  Description of Artificial Sequence: Synthetic oligonucleotide
agguuaacaauaaaguaag

SEQ ID NO: 3182368 - RNA, 19 nt, Artificial Sequence
  Description of Artificial Sequence: Synthetic oligonucleotide
acucaaguaaccugguaag

SEQ ID NO: 3182369 - RNA, 19 nt, Artificial Sequence
  Description of Artificial Sequence: Synthetic oligonucleotide
acaauaagcaaaucauaca

SEQ ID NO: 3182370 - RNA, 19 nt, Artificial Sequence
  Description of Artificial Sequence: Synthetic oligonucleotide
uacauucacauauauguau

SEQ ID NO: 3182371 - RNA, 19 nt, Artificial Sequence
  Description of Artificial Sequence: Synthetic oligonucleotide
gauaggauuacuggguaag

SEQ ID NO: 3182372 - RNA, 19 nt, Artificial Sequence
  Description of Artificial Sequence: Synthetic oligonucleotide
uauuuguuccugaugcaca

SEQ ID NO: 3182373 - RNA, 19 nt, Artificial Sequence
  Description of Artificial Sequence: Synthetic oligonucleotide
gaaauagacagaugaguca

SEQ ID NO: 3182374 - RNA, 19 nt, Artificial Sequence
  Description of Artificial Sequence: Synthetic oligonucleotide
guuaacaauaaaguaagga

SEQ ID NO: 3182375 - RNA, 19 nt, Artificial Sequence
  Description of Artificial Sequence: Synthetic oligonucleotide
auuucauuucaucguggac

SEQ ID NO: 3182376 - RNA, 19 nt, Artificial Sequence
  Description of Artificial Sequence: Synthetic oligonucleotide
aaaguuggacuagauccac

SEQ ID NO: 3182377 - RNA, 19 nt, Artificial Sequence
  Description of Artificial Sequence: Synthetic oligonucleotide
agggcuuacauuucauuuc

SEQ ID NO: 3182378 - RNA, 19 nt, Artificial Sequence
  Description of Artificial Sequence: Synthetic oligonucleotide
cauacaaauacugagggga

SEQ ID NO: 3182379 - RNA, 19 nt, Artificial Sequence
  Description of Artificial Sequence: Synthetic oligonucleotide
uggacuagauccacaaucu

SEQ ID NO: 3182380 - RNA, 19 nt, Artificial Sequence
  Description of Artificial Sequence: Synthetic oligonucleotide
aaaguaaggaaugcuuucu

SEQ ID NO: 3182381 - RNA, 19 nt, Artificial Sequence
  Description of Artificial Sequence: Synthetic oligonucleotide
acaaauacugaggggaagg

SEQ ID NO: 3182382 - RNA, 19 nt, Artificial Sequence
  Description of Artificial Sequence: Synthetic oligonucleotide
uguuccugaugcacaaggg

SEQ ID NO: 3182383 - RNA, 19 nt, Artificial Sequence
  Description of Artificial Sequence: Synthetic oligonucleotide
ucaauuacucaaguaaccu

SEQ ID NO: 3182384 - RNA, 19 nt, Artificial Sequence
  Description of Artificial Sequence: Synthetic oligonucleotide
aauauuaauauauaaaugu

SEQ ID NO: 3182385 - RNA, 19 nt, Artificial Sequence
  Description of Artificial Sequence: Synthetic oligonucleotide
uuuauuaaggaucacauug

SEQ ID NO: 3182386 - RNA, 19 nt, Artificial Sequence
  Description of Artificial Sequence: Synthetic oligonucleotide
aaaagagcaauccugugcc

SEQ ID NO: 3182387 - RNA, 19 nt, Artificial Sequence
  Description of Artificial Sequence: Synthetic oligonucleotide
ugauaaauauuuauuaagg

SEQ ID NO: 3182388 - RNA, 19 nt, Artificial Sequence
  Description of Artificial Sequence: Synthetic oligonucleotide
uuuguuaugcaacauaaag

SEQ ID NO: 3182389 - RNA, 19 nt, Artificial Sequence
  Description of Artificial Sequence: Synthetic oligonucleotide
uuagccuuuacauauauag

SEQ ID NO: 3182390 - RNA, 19 nt, Artificial Sequence
  Description of Artificial Sequence: Synthetic oligonucleotide
aaagaaaauguauucauca

SEQ ID NO: 3182391 - RNA, 19 nt, Artificial Sequence
  Description of Artificial Sequence: Synthetic oligonucleotide
uaucuuuccaugcaaaugg

SEQ ID NO: 3182392 - RNA, 19 nt, Artificial Sequence
  Description of Artificial Sequence: Synthetic oligonucleotide
uaaauauuuauuaaggauc

SEQ ID NO: 3182393 - RNA, 19 nt, Artificial Sequence
  Description of Artificial Sequence: Synthetic oligonucleotide
aaugcauaucuuuccaugc

SEQ ID NO: 3182394 - RNA, 19 nt, Artificial Sequence
  Description of Artificial Sequence: Synthetic oligonucleotide
acauauauaaugcauaucu

SEQ ID NO: 3182395 - RNA, 19 nt, Artificial Sequence
  Description of Artificial Sequence: Synthetic oligonucleotide
ugaauauuaauauauaaau

SEQ ID NO: 3182396 - RNA, 19 nt, Artificial Sequence
  Description of Artificial Sequence: Synthetic oligonucleotide
auuauauuguuuguuaugc

SEQ ID NO: 3182397 - RNA, 19 nt, Artificial Sequence
  Description of Artificial Sequence: Synthetic oligonucleotide
uuaugcaacauaaagaaaa

SEQ ID NO: 3182398 - RNA, 19 nt, Artificial Sequence
  Description of Artificial Sequence: Synthetic oligonucleotide
aaaagugagacuuuacaug

SEQ ID NO: 3182399 - RNA, 19 nt, Artificial Sequence
  Description of Artificial Sequence: Synthetic oligonucleotide
aauauauaaauguguuuuc

SEQ ID NO: 3182400 - RNA, 19 nt, Artificial Sequence
  Description of Artificial Sequence: Synthetic oligonucleotide
uuuucuuugaauauuaaua

SEQ ID NO: 3182401 - RNA, 19 nt, Artificial Sequence
  Description of Artificial Sequence: Synthetic oligonucleotide
ugcaacauaaagaaaaugu

SEQ ID NO: 3182402 - RNA, 19 nt, Artificial Sequence
  Description of Artificial Sequence: Synthetic oligonucleotide
aauguuagccuuuacauau

SEQ ID NO: 3182403 - RNA, 19 nt, Artificial Sequence
  Description of Artificial Sequence: Synthetic oligonucleotide
uauaccuuugcuuuuauca

SEQ ID NO: 3182404 - RNA, 19 nt, Artificial Sequence
  Description of Artificial Sequence: Synthetic oligonucleotide
uauuaauauauaaaugugu

SEQ ID NO: 3182405 - RNA, 19 nt, Artificial Sequence
  Description of Artificial Sequence: Synthetic oligonucleotide
uaugagcugacuaauaagc

SEQ ID NO: 3182406 - RNA, 19 nt, Artificial Sequence
  Description of Artificial Sequence: Synthetic oligonucleotide
auauaaugcauaucuuucc

SEQ ID NO: 3182407 - RNA, 19 nt, Artificial Sequence
  Description of Artificial Sequence: Synthetic oligonucleotide
aauguauucaucaugaaaa

SEQ ID NO: 3182408 - RNA, 19 nt, Artificial Sequence
  Description of Artificial Sequence: Synthetic oligonucleotide
uuuccaugcaaauggaucg

SEQ ID NO: 3182409 - RNA, 19 nt, Artificial Sequence
  Description of Artificial Sequence: Synthetic oligonucleotide
uguuaugcaacauaaagaa

SEQ ID NO: 3182410 - RNA, 19 nt, Artificial Sequence
  Description of Artificial Sequence: Synthetic oligonucleotide
ucuuugaauauuaauauau

SEQ ID NO: 3182411 - RNA, 19 nt, Artificial Sequence
  Description of Artificial Sequence: Synthetic oligonucleotide
aaagugagacuuuacauga

SEQ ID NO: 3182412 - RNA, 19 nt, Artificial Sequence
  Description of Artificial Sequence: Synthetic oligonucleotide
uuuacaugaagcaaaauuu

SEQ ID NO: 3182413 - RNA, 19 nt, Artificial Sequence
  Description of Artificial Sequence: Synthetic oligonucleotide
aucuuuaccacacagauaa

SEQ ID NO: 3182414 - RNA, 19 nt, Artificial Sequence
  Description of Artificial Sequence: Synthetic oligonucleotide
acauaaagaaaauguauuc

SEQ ID NO: 3182415 - RNA, 19 nt, Artificial Sequence
  Description of Artificial Sequence: Synthetic oligonucleotide
ucaccuauuaucuuuacca

SEQ ID NO: 3182416 - RNA, 19 nt, Artificial Sequence
  Description of Artificial Sequence: Synthetic oligonucleotide
aaauguguuuuccuuuuac

SEQ ID NO: 3182417 - RNA, 19 nt, Artificial Sequence
  Description of Artificial Sequence: Synthetic oligonucleotide
uugaauauuaauauauaaa

SEQ ID NO: 3182418 - RNA, 19 nt, Artificial Sequence
  Description of Artificial Sequence: Synthetic oligonucleotide
uuuaaguucugauaaauau

SEQ ID NO: 3182419 - RNA, 19 nt, Artificial Sequence
  Description of Artificial Sequence: Synthetic oligonucleotide
uuuaucaccucacauauau

SEQ ID NO: 3182420 - RNA, 19 nt, Artificial Sequence
  Description of Artificial Sequence: Synthetic oligonucleotide
aaacaccugaaauaaaacu

SEQ ID NO: 3182421 - RNA, 19 nt, Artificial Sequence
  Description of Artificial Sequence: Synthetic oligonucleotide
auaaauauuuauuaaggau

SEQ ID NO: 3182422 - RNA, 19 nt, Artificial Sequence
  Description of Artificial Sequence: Synthetic oligonucleotide
cugauaaauauuuauuaag

SEQ ID NO: 3182423 - RNA, 19 nt, Artificial Sequence
  Description of Artificial Sequence: Synthetic oligonucleotide
uauauaaugcauaucuuuc

SEQ ID NO: 3182424 - RNA, 19 nt, Artificial Sequence
  Description of Artificial Sequence: Synthetic oligonucleotide
uuugaauauuaauauauaa

SEQ ID NO: 3182425 - RNA, 19 nt, Artificial Sequence
  Description of Artificial Sequence: Synthetic oligonucleotide
auauauaaauguguuuucc

SEQ ID NO: 3182426 - RNA, 19 nt, Artificial Sequence
  Description of Artificial Sequence: Synthetic oligonucleotide
uauuaucuuuaccacacag

SEQ ID NO: 3182427 - RNA, 19 nt, Artificial Sequence
  Description of Artificial Sequence: Synthetic oligonucleotide
uauuuauuaaggaucacau

SEQ ID NO: 3182428 - RNA, 19 nt, Artificial Sequence
  Description of Artificial Sequence: Synthetic oligonucleotide
ugaaaagugagacuuuaca

SEQ ID NO: 3182429 - RNA, 19 nt, Artificial Sequence
  Description of Artificial Sequence: Synthetic oligonucleotide
uuacaagucaaacaccuga

SEQ ID NO: 3182430 - RNA, 19 nt, Artificial Sequence
  Description of Artificial Sequence: Synthetic oligonucleotide
gauaaauauuuauuaagga

SEQ ID NO: 3182431 - RNA, 19 nt, Artificial Sequence
  Description of Artificial Sequence: Synthetic oligonucleotide
uuguuaugcaacauaaaga

SEQ ID NO: 3182432 - RNA, 19 nt, Artificial Sequence
  Description of Artificial Sequence: Synthetic oligonucleotide
uuaucuuuaccacacagau

SEQ ID NO: 3182433 - RNA, 19 nt, Artificial Sequence
  Description of Artificial Sequence: Synthetic oligonucleotide
uuucuuugaauauuaauau

SEQ ID NO: 3182434 - RNA, 19 nt, Artificial Sequence
  Description of Artificial Sequence: Synthetic oligonucleotide
aaauauuuauuaaggauca

SEQ ID NO: 3182435 - RNA, 19 nt, Artificial Sequence
  Description of Artificial Sequence: Synthetic oligonucleotide
gaauauuaauauauaaaug

SEQ ID NO: 3182436 - RNA, 19 nt, Artificial Sequence
  Description of Artificial Sequence: Synthetic oligonucleotide
aaauguauucaucaugaaa

SEQ ID NO: 3182437 - RNA, 19 nt, Artificial Sequence
  Description of Artificial Sequence: Synthetic oligonucleotide
uuuuagaagguuugggaag

SEQ ID NO: 3182438 - RNA, 19 nt, Artificial Sequence
  Description of Artificial Sequence: Synthetic oligonucleotide
uaauauauaaauguguuuu

SEQ ID NO: 3182439 - RNA, 19 nt, Artificial Sequence
  Description of Artificial Sequence: Synthetic oligonucleotide
uaaguucugauaaauauuu

SEQ ID NO: 3182440 - RNA, 19 nt, Artificial Sequence
  Description of Artificial Sequence: Synthetic oligonucleotide
aaaaucaccuauuaucuuu

SEQ ID NO: 3182441 - RNA, 19 nt, Artificial Sequence
  Description of Artificial Sequence: Synthetic oligonucleotide
aacaccugaaauaaaacug

SEQ ID NO: 3182442 - RNA, 19 nt, Artificial Sequence
  Description of Artificial Sequence: Synthetic oligonucleotide
ucaaacaccugaaauaaaa

SEQ ID NO: 3182443 - RNA, 19 nt, Artificial Sequence
  Description of Artificial Sequence: Synthetic oligonucleotide
uuaaggaucacauugucuu

SEQ ID NO: 3182444 - RNA, 19 nt, Artificial Sequence
  Description of Artificial Sequence: Synthetic oligonucleotide
ucagauuuuagaagguuug

SEQ ID NO: 3182445 - RNA, 19 nt, Artificial Sequence
  Description of Artificial Sequence: Synthetic oligonucleotide
agaaaauguauucaucaug

SEQ ID NO: 3182446 - RNA, 19 nt, Artificial Sequence
  Description of Artificial Sequence: Synthetic oligonucleotide
aaauggaucggacucagau

SEQ ID NO: 3182447 - RNA, 19 nt, Artificial Sequence
  Description of Artificial Sequence: Synthetic oligonucleotide
uuuaccacacagauaacca

SEQ ID NO: 3182448 - RNA, 19 nt, Artificial Sequence
  Description of Artificial Sequence: Synthetic oligonucleotide
uguuuguuaugcaacauaa

SEQ ID NO: 3182449 - RNA, 19 nt, Artificial Sequence
  Description of Artificial Sequence: Synthetic oligonucleotide
uuuagcuuuucuuugaaua

SEQ ID NO: 3182450 - RNA, 19 nt, Artificial Sequence
  Description of Artificial Sequence: Synthetic oligonucleotide
uauaaugcauaucuuucca

SEQ ID NO: 3182451 - RNA, 19 nt, Artificial Sequence
  Description of Artificial Sequence: Synthetic oligonucleotide
guauucaucaugaaaagug

SEQ ID NO: 3182452 - RNA, 19 nt, Artificial Sequence
  Description of Artificial Sequence: Synthetic oligonucleotide
gaucacauugucuuuauga

SEQ ID NO: 3182453 - RNA, 19 nt, Artificial Sequence
  Description of Artificial Sequence: Synthetic oligonucleotide
uauucaucaugaaaaguga

SEQ ID NO: 3182454 - RNA, 19 nt, Artificial Sequence
  Description of Artificial Sequence: Synthetic oligonucleotide
uuuaugagcugacuaauaa

SEQ ID NO: 3182455 - RNA, 19 nt, Artificial Sequence
  Description of Artificial Sequence: Synthetic oligonucleotide
gaaaauguauucaucauga

SEQ ID NO: 3182456 - RNA, 19 nt, Artificial Sequence
  Description of Artificial Sequence: Synthetic oligonucleotide
cagauaaccaauguuagcc

SEQ ID NO: 3182457 - RNA, 19 nt, Artificial Sequence
  Description of Artificial Sequence: Synthetic oligonucleotide
auaaagaaaauguauucau

SEQ ID NO: 3182458 - RNA, 19 nt, Artificial Sequence
  Description of Artificial Sequence: Synthetic oligonucleotide
ucugauaaauauuuauuaa

SEQ ID NO: 3182459 - RNA, 19 nt, Artificial Sequence
  Description of Artificial Sequence: Synthetic oligonucleotide
uucugauaaauauuuauua

SEQ ID NO: 3182460 - RNA, 19 nt, Artificial Sequence
  Description of Artificial Sequence: Synthetic oligonucleotide
uauauuguuuguuaugcaa

SEQ ID NO: 3182461 - RNA, 19 nt, Artificial Sequence
  Description of Artificial Sequence: Synthetic oligonucleotide
aauguguuuuccuuuuaca

SEQ ID NO: 3182462 - RNA, 19 nt, Artificial Sequence
  Description of Artificial Sequence: Synthetic oligonucleotide
auaccuuugcuuuuaucac

SEQ ID NO: 3182463 - RNA, 19 nt, Artificial Sequence
  Description of Artificial Sequence: Synthetic oligonucleotide
uaucaccucacauauauaa

SEQ ID NO: 3182464 - RNA, 19 nt, Artificial Sequence
  Description of Artificial Sequence: Synthetic oligonucleotide
uauauaaauguguuuuccu

SEQ ID NO: 3182465 - RNA, 19 nt, Artificial Sequence
  Description of Artificial Sequence: Synthetic oligonucleotide
uuauuaaggaucacauugu

SEQ ID NO: 3182466 - RNA, 19 nt, Artificial Sequence
  Description of Artificial Sequence: Synthetic oligonucleotide
ugagacuuuacaugaagca

SEQ ID NO: 3182467 - RNA, 19 nt, Artificial Sequence
  Description of Artificial Sequence: Synthetic oligonucleotide
aucacauugucuuuaugag

SEQ ID NO: 3182468 - RNA, 19 nt, Artificial Sequence
  Description of Artificial Sequence: Synthetic oligonucleotide
acagauaaccaauguuagc

SEQ ID NO: 3182469 - RNA, 19 nt, Artificial Sequence
  Description of Artificial Sequence: Synthetic oligonucleotide
ucaccucacauauauaaug

SEQ ID NO: 3182470 - RNA, 19 nt, Artificial Sequence
  Description of Artificial Sequence: Synthetic oligonucleotide
gauuuuagaagguuuggga

SEQ ID NO: 3182471 - RNA, 19 nt, Artificial Sequence
  Description of Artificial Sequence: Synthetic oligonucleotide
auauauaaugcauaucuuu

SEQ ID NO: 3182472 - RNA, 19 nt, Artificial Sequence
  Description of Artificial Sequence: Synthetic oligonucleotide
uuaugagcugacuaauaag

SEQ ID NO: 3182473 - RNA, 19 nt, Artificial Sequence
  Description of Artificial Sequence: Synthetic oligonucleotide
ucaucaugaaaagugagac

SEQ ID NO: 3182474 - RNA, 19 nt, Artificial Sequence
  Description of Artificial Sequence: Synthetic oligonucleotide
uucaucaugaaaagugaga

SEQ ID NO: 3182475 - RNA, 19 nt, Artificial Sequence
  Description of Artificial Sequence: Synthetic oligonucleotide
uaaugcauaucuuuccaug

SEQ ID NO: 3182476 - RNA, 19 nt, Artificial Sequence
  Description of Artificial Sequence: Synthetic oligonucleotide
aagucaaacaccugaaaua

SEQ ID NO: 3182477 - RNA, 19 nt, Artificial Sequence
  Description of Artificial Sequence: Synthetic oligonucleotide
augcaaauggaucggacuc

SEQ ID NO: 3182478 - RNA, 19 nt, Artificial Sequence
  Description of Artificial Sequence: Synthetic oligonucleotide
ugggaugcuauguauauac

SEQ ID NO: 3182479 - RNA, 19 nt, Artificial Sequence
  Description of Artificial Sequence: Synthetic oligonucleotide
uuugcuuuuaucaccucac

SEQ ID NO: 3182480 - RNA, 19 nt, Artificial Sequence
  Description of Artificial Sequence: Synthetic oligonucleotide
uaaagaaaauguauucauc

SEQ ID NO: 3182481 - RNA, 19 nt, Artificial Sequence
  Description of Artificial Sequence: Synthetic oligonucleotide
uauuguuuguuaugcaaca

SEQ ID NO: 3182482 - RNA, 19 nt, Artificial Sequence
  Description of Artificial Sequence: Synthetic oligonucleotide
ugacuaauaagcuuuguuu

SEQ ID NO: 3182483 - RNA, 19 nt, Artificial Sequence
  Description of Artificial Sequence: Synthetic oligonucleotide
acaccugaaauaaaacugc

SEQ ID NO: 3182484 - RNA, 19 nt, Artificial Sequence
  Description of Artificial Sequence: Synthetic oligonucleotide
aauucugccacuuuauuuc

SEQ ID NO: 3182485 - RNA, 19 nt, Artificial Sequence
  Description of Artificial Sequence: Synthetic oligonucleotide
uucaaaaucuccaacaagc

SEQ ID NO: 3182486 - RNA, 19 nt, Artificial Sequence
  Description of Artificial Sequence: Synthetic oligonucleotide
ucuuguucauuucagacag

SEQ ID NO: 3182487 - RNA, 19 nt, Artificial Sequence
  Description of Artificial Sequence: Synthetic oligonucleotide
uuugcgaaagcucagguug

SEQ ID NO: 3182488 - RNA, 19 nt, Artificial Sequence
  Description of Artificial Sequence: Synthetic oligonucleotide
aaauguuuccaguuggcuc

SEQ ID NO: 3182489 - RNA, 19 nt, Artificial Sequence
  Description of Artificial Sequence: Synthetic oligonucleotide
aagaaauguuuccaguugg

SEQ ID NO: 3182490 - RNA, 19 nt, Artificial Sequence
  Description of Artificial Sequence: Synthetic oligonucleotide
aauguuuccaguuggcuca

SEQ ID NO: 3182491 - RNA, 19 nt, Artificial Sequence
  Description of Artificial Sequence: Synthetic oligonucleotide
acaacaaagcagaagaagc

SEQ ID NO: 3182492 - RNA, 19 nt, Artificial Sequence
  Description of Artificial Sequence: Synthetic oligonucleotide
uaucacacaacaaagcaga

SEQ ID NO: 3182493 - RNA, 19 nt, Artificial Sequence
  Description of Artificial Sequence: Synthetic oligonucleotide
aaaaucuccaacaagcucu

SEQ ID NO: 3182494 - RNA, 19 nt, Artificial Sequence
  Description of Artificial Sequence: Synthetic oligonucleotide
aacaaagcagaagaagccc

SEQ ID NO: 3182495 - RNA, 19 nt, Artificial Sequence
  Description of Artificial Sequence: Synthetic oligonucleotide
cuuaacaaaauucugccac

SEQ ID NO: 3182496 - RNA, 19 nt, Artificial Sequence
  Description of Artificial Sequence: Synthetic oligonucleotide
ucaagguuagauacaaucc

SEQ ID NO: 3182497 - RNA, 19 nt, Artificial Sequence
  Description of Artificial Sequence: Synthetic oligonucleotide
guucauuucagacagugag

SEQ ID NO: 3182498 - RNA, 19 nt, Artificial Sequence
  Description of Artificial Sequence: Synthetic oligonucleotide
uuagauacaauccaugcuu

SEQ ID NO: 3182499 - RNA, 19 nt, Artificial Sequence
  Description of Artificial Sequence: Synthetic oligonucleotide
cuuuauuucaccuugguaa

SEQ ID NO: 3182500 - RNA, 19 nt, Artificial Sequence
  Description of Artificial Sequence: Synthetic oligonucleotide
ucuucuuugcgaaagcuca

SEQ ID NO: 3182501 - RNA, 19 nt, Artificial Sequence
  Description of Artificial Sequence: Synthetic oligonucleotide
guaacccaaaucuuggugg

SEQ ID NO: 3182502 - RNA, 19 nt, Artificial Sequence
  Description of Artificial Sequence: Synthetic oligonucleotide
cagauaaugaccaaucuuc

SEQ ID NO: 3182503 - RNA, 19 nt, Artificial Sequence
  Description of Artificial Sequence: Synthetic oligonucleotide
uaagaaauguuuccaguug

SEQ ID NO: 3182504 - RNA, 19 nt, Artificial Sequence
  Description of Artificial Sequence: Synthetic oligonucleotide
aaugaccaaucuucuuugc

SEQ ID NO: 3182505 - RNA, 19 nt, Artificial Sequence
  Description of Artificial Sequence: Synthetic oligonucleotide
uugguaacccaaaucuugg

SEQ ID NO: 3182506 - RNA, 19 nt, Artificial Sequence
  Description of Artificial Sequence: Synthetic oligonucleotide
cacuuaacaaaauucugcc

SEQ ID NO: 3182507 - RNA, 19 nt, Artificial Sequence
  Description of Artificial Sequence: Synthetic oligonucleotide
ucuauguugauuuugccuu

SEQ ID NO: 3182508 - RNA, 19 nt, Artificial Sequence
  Description of Artificial Sequence: Synthetic oligonucleotide
auagcucugaccuugggca

SEQ ID NO: 3182509 - RNA, 19 nt, Artificial Sequence
  Description of Artificial Sequence: Synthetic oligonucleotide
ucauuucagacagugagcc

SEQ ID NO: 3182510 - RNA, 19 nt, Artificial Sequence
  Description of Artificial Sequence: Synthetic oligonucleotide
accuugguaacccaaaucu

SEQ ID NO: 3182511 - RNA, 19 nt, Artificial Sequence
  Description of Artificial Sequence: Synthetic oligonucleotide
ugagccagaucuuugaggu

SEQ ID NO: 3182512 - RNA, 19 nt, Artificial Sequence
  Description of Artificial Sequence: Synthetic oligonucleotide
cucaagguuagauacaauc

SEQ ID NO: 3182513 - RNA, 19 nt, Artificial Sequence
  Description of Artificial Sequence: Synthetic oligonucleotide
gagagagacagccagauaa

SEQ ID NO: 3182514 - RNA, 19 nt, Artificial Sequence
  Description of Artificial Sequence: Synthetic oligonucleotide
uuggcucaagguuagauac

SEQ ID NO: 3182515 - RNA, 19 nt, Artificial Sequence
  Description of Artificial Sequence: Synthetic oligonucleotide
uugucuauguugauuuugc

SEQ ID NO: 3182516 - RNA, 19 nt, Artificial Sequence
  Description of Artificial Sequence: Synthetic oligonucleotide
augcuugccacauauagcu

SEQ ID NO: 3182517 - RNA, 19 nt, Artificial Sequence
  Description of Artificial Sequence: Synthetic oligonucleotide
uguucagccacuuaacaaa

SEQ ID NO: 3182518 - RNA, 19 nt, Artificial Sequence
  Description of Artificial Sequence: Synthetic oligonucleotide
uuuauuucaccuugguaac

SEQ ID NO: 3182519 - RNA, 19 nt, Artificial Sequence
  Description of Artificial Sequence: Synthetic oligonucleotide
uugagguugucuauguuga

SEQ ID NO: 3182520 - RNA, 19 nt, Artificial Sequence
  Description of Artificial Sequence: Synthetic oligonucleotide
aaauucugccacuuuauuu

SEQ ID NO: 3182521 - RNA, 19 nt, Artificial Sequence
  Description of Artificial Sequence: Synthetic oligonucleotide
agugacaucuucaaaaucu

SEQ ID NO: 3182522 - RNA, 19 nt, Artificial Sequence
  Description of Artificial Sequence: Synthetic oligonucleotide
cuugguaacccaaaucuug

SEQ ID NO: 3182523 - RNA, 19 nt, Artificial Sequence
  Description of Artificial Sequence: Synthetic oligonucleotide
cuuagugacaucuucaaaa

SEQ ID NO: 3182524 - RNA, 19 nt, Artificial Sequence
  Description of Artificial Sequence: Synthetic oligonucleotide
aucuucaaaaucuccaaca

SEQ ID NO: 3182525 - RNA, 19 nt, Artificial Sequence
  Description of Artificial Sequence: Synthetic oligonucleotide
uauagcucugaccuugggc

SEQ ID NO: 3182526 - RNA, 19 nt, Artificial Sequence
  Description of Artificial Sequence: Synthetic oligonucleotide
auaaugaccaaucuucuuu

SEQ ID NO: 3182527 - RNA, 19 nt, Artificial Sequence
  Description of Artificial Sequence: Synthetic oligonucleotide
gaagaagcccuguucagcc

SEQ ID NO: 3182528 - RNA, 19 nt, Artificial Sequence
  Description of Artificial Sequence: Synthetic oligonucleotide
aaaucuuggugguuaagaa

SEQ ID NO: 3182529 - RNA, 19 nt, Artificial Sequence
  Description of Artificial Sequence: Synthetic oligonucleotide
uccaacaagcucuuguuca

SEQ ID NO: 3182530 - RNA, 19 nt, Artificial Sequence
  Description of Artificial Sequence: Synthetic oligonucleotide
caacaaagcagaagaagcc

SEQ ID NO: 3182531 - RNA, 19 nt, Artificial Sequence
  Description of Artificial Sequence: Synthetic oligonucleotide
auuucagacagugagccag

SEQ ID NO: 3182532 - RNA, 19 nt, Artificial Sequence
  Description of Artificial Sequence: Synthetic oligonucleotide
ucaaaaucuccaacaagcu

SEQ ID NO: 3182533 - RNA, 19 nt, Artificial Sequence
  Description of Artificial Sequence: Synthetic oligonucleotide
guugagguugucuauguug

SEQ ID NO: 3182534 - RNA, 19 nt, Artificial Sequence
  Description of Artificial Sequence: Synthetic oligonucleotide
ucugaccuugggcagagag

SEQ ID NO: 3182535 - RNA, 19 nt, Artificial Sequence
  Description of Artificial Sequence: Synthetic oligonucleotide
cacacaacaaagcagaaga

SEQ ID NO: 3182536 - RNA, 19 nt, Artificial Sequence
  Description of Artificial Sequence: Synthetic oligonucleotide
uuaagaaauguuuccaguu

SEQ ID NO: 3182537 - RNA, 19 nt, Artificial Sequence
  Description of Artificial Sequence: Synthetic oligonucleotide
aaagcucagguugagguug

SEQ ID NO: 3182538 - RNA, 19 nt, Artificial Sequence
  Description of Artificial Sequence: Synthetic oligonucleotide
ucuucaaaaucuccaacaa

SEQ ID NO: 3182539 - RNA, 19 nt, Artificial Sequence
  Description of Artificial Sequence: Synthetic oligonucleotide
agauacaauccaugcuugc

SEQ ID NO: 3182540 - RNA, 19 nt, Artificial Sequence
  Description of Artificial Sequence: Synthetic oligonucleotide
uucauuucagacagugagc

SEQ ID NO: 3182541 - RNA, 19 nt, Artificial Sequence
  Description of Artificial Sequence: Synthetic oligonucleotide
ugaccuugggcagagagag

SEQ ID NO: 3182542 - RNA, 19 nt, Artificial Sequence
  Description of Artificial Sequence: Synthetic oligonucleotide
gagacagccagauaaugac

SEQ ID NO: 3182543 - RNA, 19 nt, Artificial Sequence
  Description of Artificial Sequence: Synthetic oligonucleotide
uaaugaccaaucuucuuug

SEQ ID NO: 3182544 - RNA, 19 nt, Artificial Sequence
  Description of Artificial Sequence: Synthetic oligonucleotide
ugaccaaucuucuuugcga

SEQ ID NO: 3182545 - RNA, 19 nt, Artificial Sequence
  Description of Artificial Sequence: Synthetic oligonucleotide
uugauuuugccuuggcaug

SEQ ID NO: 3182546 - RNA, 19 nt, Artificial Sequence
  Description of Artificial Sequence: Synthetic oligonucleotide
aaucuuggugguuaagaaa

SEQ ID NO: 3182547 - RNA, 19 nt, Artificial Sequence
  Description of Artificial Sequence: Synthetic oligonucleotide
uguugauuuugccuuggca

SEQ ID NO: 3182548 - RNA, 19 nt, Artificial Sequence
  Description of Artificial Sequence: Synthetic oligonucleotide
augaccaaucuucuuugcg

SEQ ID NO: 3182549 - RNA, 19 nt, Artificial Sequence
  Description of Artificial Sequence: Synthetic oligonucleotide
uuaacaaaauucugccacu

SEQ ID NO: 3182550 - RNA, 19 nt, Artificial Sequence
  Description of Artificial Sequence: Synthetic oligonucleotide
uguucuuagugacaucuuc

SEQ ID NO: 3182551 - RNA, 19 nt, Artificial Sequence
  Description of Artificial Sequence: Synthetic oligonucleotide
agcagaagaagcccuguuc

SEQ ID NO: 3182552 - RNA, 19 nt, Artificial Sequence
  Description of Artificial Sequence: Synthetic oligonucleotide
cauaucacacaacaaagca

SEQ ID NO: 3182553 - RNA, 19 nt, Artificial Sequence
  Description of Artificial Sequence: Synthetic oligonucleotide
gugguuaagaaauguuucc

SEQ ID NO: 3182554 - RNA, 19 nt, Artificial Sequence
  Description of Artificial Sequence: Synthetic oligonucleotide
uagauacaauccaugcuug

SEQ ID NO: 3182555 - RNA, 19 nt, Artificial Sequence
  Description of Artificial Sequence: Synthetic oligonucleotide
agaagaagcccuguucagc

SEQ ID NO: 3182556 - RNA, 19 nt, Artificial Sequence
  Description of Artificial Sequence: Synthetic oligonucleotide
uuguucauuucagacagug

SEQ ID NO: 3182557 - RNA, 19 nt, Artificial Sequence
  Description of Artificial Sequence: Synthetic oligonucleotide
gauacaauccaugcuugcc

SEQ ID NO: 3182558 - RNA, 19 nt, Artificial Sequence
  Description of Artificial Sequence: Synthetic oligonucleotide
uuagugacaucuucaaaau

SEQ ID NO: 3182559 - RNA, 19 nt, Artificial Sequence
  Description of Artificial Sequence: Synthetic oligonucleotide
uauuucaccuugguaaccc

SEQ ID NO: 3182560 - RNA, 19 nt, Artificial Sequence
  Description of Artificial Sequence: Synthetic oligonucleotide
gguuagauacaauccaugc

SEQ ID NO: 3182561 - RNA, 19 nt, Artificial Sequence
  Description of Artificial Sequence: Synthetic oligonucleotide
ugacaucuucaaaaucucc

SEQ ID NO: 3182562 - RNA, 19 nt, Artificial Sequence
  Description of Artificial Sequence: Synthetic oligonucleotide
auacaauccaugcuugcca

SEQ ID NO: 3182563 - RNA, 19 nt, Artificial Sequence
  Description of Artificial Sequence: Synthetic oligonucleotide
acaaaauucugccacuuua

SEQ ID NO: 3182564 - RNA, 19 nt, Artificial Sequence
  Description of Artificial Sequence: Synthetic oligonucleotide
cuucaaaaucuccaacaag

SEQ ID NO: 3182565 - RNA, 19 nt, Artificial Sequence
  Description of Artificial Sequence: Synthetic oligonucleotide
ucugccacuuuauuucacc

SEQ ID NO: 3182566 - RNA, 19 nt, Artificial Sequence
  Description of Artificial Sequence: Synthetic oligonucleotide
auaucacacaacaaagcag

SEQ ID NO: 3182567 - RNA, 19 nt, Artificial Sequence
  Description of Artificial Sequence: Synthetic oligonucleotide
agaaauguuuccaguuggc

SEQ ID NO: 3182568 - RNA, 19 nt, Artificial Sequence
  Description of Artificial Sequence: Synthetic oligonucleotide
accuugggcagagagagac

SEQ ID NO: 3182569 - RNA, 19 nt, Artificial Sequence
  Description of Artificial Sequence: Synthetic oligonucleotide
aaaauucugccacuuuauu

SEQ ID NO: 3182570 - RNA, 19 nt, Artificial Sequence
  Description of Artificial Sequence: Synthetic oligonucleotide
agaagcccuguucagccac

SEQ ID NO: 3182571 - RNA, 19 nt, Artificial Sequence
  Description of Artificial Sequence: Synthetic oligonucleotide
gguuaagaaauguuuccag

SEQ ID NO: 3182572 - RNA, 19 nt, Artificial Sequence
  Description of Artificial Sequence: Synthetic oligonucleotide
ugggcagagagagacagcc

SEQ ID NO: 3182573 - RNA, 19 nt, Artificial Sequence
  Description of Artificial Sequence: Synthetic oligonucleotide
caugcuugccacauauagc

SEQ ID NO: 3182574 - RNA, 19 nt, Artificial Sequence
  Description of Artificial Sequence: Synthetic oligonucleotide
uggugguuaagaaauguuu

SEQ ID NO: 3182575 - RNA, 19 nt, Artificial Sequence
  Description of Artificial Sequence: Synthetic oligonucleotide
uuggcauguucuuagugac

SEQ ID NO: 3182576 - RNA, 19 nt, Artificial Sequence
  Description of Artificial Sequence: Synthetic oligonucleotide
uuuugccuuggcauguucu

SEQ ID NO: 3182577 - RNA, 19 nt, Artificial Sequence
  Description of Artificial Sequence: Synthetic oligonucleotide
guuuccaguuggcucaagg

SEQ ID NO: 3182578 - RNA, 19 nt, Artificial Sequence
  Description of Artificial Sequence: Synthetic oligonucleotide
cacaacaaagcagaagaag

SEQ ID NO: 3182579 - RNA, 19 nt, Artificial Sequence
  Description of Artificial Sequence: Synthetic oligonucleotide
acuuaacaaaauucugcca

SEQ ID NO: 3182580 - RNA, 19 nt, Artificial Sequence
  Description of Artificial Sequence: Synthetic oligonucleotide
uuuccaguuggcucaaggu

SEQ ID NO: 3182581 - RNA, 19 nt, Artificial Sequence
  Description of Artificial Sequence: Synthetic oligonucleotide
ucagccacuuaacaaaauu

SEQ ID NO: 3182582 - RNA, 19 nt, Artificial Sequence
  Description of Artificial Sequence: Synthetic oligonucleotide
gacaucuucaaaaucucca

SEQ ID NO: 3182583 - RNA, 19 nt, Artificial Sequence
  Description of Artificial Sequence: Synthetic oligonucleotide
acauauagcucugaccuug

SEQ ID NO: 3182584 - RNA, 19 nt, Artificial Sequence
  Description of Artificial Sequence: Synthetic oligonucleotide
caugcauugaauaagggag

SEQ ID NO: 3182585 - RNA, 19 nt, Artificial Sequence
  Description of Artificial Sequence: Synthetic oligonucleotide
aaaagaaguucugugcagc

SEQ ID NO: 3182586 - RNA, 19 nt, Artificial Sequence
  Description of Artificial Sequence: Synthetic oligonucleotide
uauuccuaaaagaaguucu

SEQ ID NO: 3182587 - RNA, 19 nt, Artificial Sequence
  Description of Artificial Sequence: Synthetic oligonucleotide
gaauaagggaguuacacca

SEQ ID NO: 3182588 - RNA, 19 nt, Artificial Sequence
  Description of Artificial Sequence: Synthetic oligonucleotide
aguuacaccaucuaucgug

SEQ ID NO: 3182589 - RNA, 19 nt, Artificial Sequence
  Description of Artificial Sequence: Synthetic oligonucleotide
auugcauuugcauuagcuc

SEQ ID NO: 3182590 - RNA, 19 nt, Artificial Sequence
  Description of Artificial Sequence: Synthetic oligonucleotide
uugcauuugcauuagcucc

SEQ ID NO: 3182591 - RNA, 19 nt, Artificial Sequence
  Description of Artificial Sequence: Synthetic oligonucleotide
auuagcuccugcuuccagc

SEQ ID NO: 3182592 - RNA, 19 nt, Artificial Sequence
  Description of Artificial Sequence: Synthetic oligonucleotide
ugaauaagggaguuacacc

SEQ ID NO: 3182593 - RNA, 19 nt, Artificial Sequence
  Description of Artificial Sequence: Synthetic oligonucleotide
cacgugaucacccaggcag

SEQ ID NO: 3182594 - RNA, 19 nt, Artificial Sequence
  Description of Artificial Sequence: Synthetic oligonucleotide
uccuaaaagaaguucugug

SEQ ID NO: 3182595 - RNA, 19 nt, Artificial Sequence
  Description of Artificial Sequence: Synthetic oligonucleotide
uaaaagaaguucugugcag

SEQ ID NO: 3182596 - RNA, 19 nt, Artificial Sequence
  Description of Artificial Sequence: Synthetic oligonucleotide
uugaauaagggaguuacac

SEQ ID NO: 3182597 - RNA, 19 nt, Artificial Sequence
  Description of Artificial Sequence: Synthetic oligonucleotide
uuuggcaccauauuccuaa

SEQ ID NO: 3182598 - RNA, 19 nt, Artificial Sequence
  Description of Artificial Sequence: Synthetic oligonucleotide
cauugaauaagggaguuac

SEQ ID NO: 3182599 - RNA, 19 nt, Artificial Sequence
  Description of Artificial Sequence: Synthetic oligonucleotide
ggaguuacaccaucuaucg

SEQ ID NO: 3182600 - RNA, 19 nt, Artificial Sequence
  Description of Artificial Sequence: Synthetic oligonucleotide
agaaguucugugcagcuug

SEQ ID NO: 3182601 - RNA, 19 nt, Artificial Sequence
  Description of Artificial Sequence: Synthetic oligonucleotide
uaugguuacugcauuuaca

SEQ ID NO: 3182602 - RNA, 19 nt, Artificial Sequence
  Description of Artificial Sequence: Synthetic oligonucleotide
ugagcaugcauugaauaag

SEQ ID NO: 3182603 - RNA, 19 nt, Artificial Sequence
  Description of Artificial Sequence: Synthetic oligonucleotide
aaagaaguucugugcagcu

SEQ ID NO: 3182604 - RNA, 19 nt, Artificial Sequence
  Description of Artificial Sequence: Synthetic oligonucleotide
auauuccuaaaagaaguuc

SEQ ID NO: 3182605 - RNA, 19 nt, Artificial Sequence
  Description of Artificial Sequence: Synthetic oligonucleotide
aguucugugcagcuugcac

SEQ ID NO: 3182606 - RNA, 19 nt, Artificial Sequence
  Description of Artificial Sequence: Synthetic oligonucleotide
augguuacugcauuuacau

SEQ ID NO: 3182607 - RNA, 19 nt, Artificial Sequence
  Description of Artificial Sequence: Synthetic oligonucleotide
cuaaaagaaguucugugca

SEQ ID NO: 3182608 - RNA, 19 nt, Artificial Sequence
  Description of Artificial Sequence: Synthetic oligonucleotide
auaagggaguuacaccauc

SEQ ID NO: 3182609 - RNA, 19 nt, Artificial Sequence
  Description of Artificial Sequence: Synthetic oligonucleotide
acaccaucuaucgugauug

SEQ ID NO: 3182610 - RNA, 19 nt, Artificial Sequence
  Description of Artificial Sequence: Synthetic oligonucleotide
auuugcauuagcuccugcu

SEQ ID NO: 3182611 - RNA, 19 nt, Artificial Sequence
  Description of Artificial Sequence: Synthetic oligonucleotide
ccuaaaagaaguucugugc

SEQ ID NO: 3182612 - RNA, 19 nt, Artificial Sequence
  Description of Artificial Sequence: Synthetic oligonucleotide
aguccuugcacaugccacg

SEQ ID NO: 3182613 - RNA, 19 nt, Artificial Sequence
  Description of Artificial Sequence: Synthetic oligonucleotide
ucuaucgugauugcauuug

SEQ ID NO: 3182614 - RNA, 19 nt, Artificial Sequence
  Description of Artificial Sequence: Synthetic oligonucleotide
gagcaugcauugaauaagg

SEQ ID NO: 3182615 - RNA, 19 nt, Artificial Sequence
  Description of Artificial Sequence: Synthetic oligonucleotide
ggcaccauauuccuaaaag

SEQ ID NO: 3182616 - RNA, 19 nt, Artificial Sequence
  Description of Artificial Sequence: Synthetic oligonucleotide
ugcacaugccacgugauca

SEQ ID NO: 3182617 - RNA, 19 nt, Artificial Sequence
  Description of Artificial Sequence: Synthetic oligonucleotide
ugcauuugcauuagcuccu

SEQ ID NO: 3182618 - RNA, 19 nt, Artificial Sequence
  Description of Artificial Sequence: Synthetic oligonucleotide
ugcauuagcuccugcuucc

SEQ ID NO: 3182619 - RNA, 19 nt, Artificial Sequence
  Description of Artificial Sequence: Synthetic oligonucleotide
uuugcauuagcuccugcuu

SEQ ID NO: 3182620 - RNA, 19 nt, Artificial Sequence
  Description of Artificial Sequence: Synthetic oligonucleotide
auggaguggggugacaugg

SEQ ID NO: 3182621 - RNA, 19 nt, Artificial Sequence
  Description of Artificial Sequence: Synthetic oligonucleotide
uucugugcagcuugcacug

SEQ ID NO: 3182622 - RNA, 19 nt, Artificial Sequence
  Description of Artificial Sequence: Synthetic oligonucleotide
accauauuccuaaaagaag

SEQ ID NO: 3182623 - RNA, 19 nt, Artificial Sequence
  Description of Artificial Sequence: Synthetic oligonucleotide
uaagggaguuacaccaucu

SEQ ID NO: 3182624 - RNA, 19 nt, Artificial Sequence
  Description of Artificial Sequence: Synthetic oligonucleotide
ugaucacccaggcaggccu

SEQ ID NO: 3182625 - RNA, 19 nt, Artificial Sequence
  Description of Artificial Sequence: Synthetic oligonucleotide
uuagcuccugcuuccagca

SEQ ID NO: 3182626 - RNA, 19 nt, Artificial Sequence
  Description of Artificial Sequence: Synthetic oligonucleotide
gguuacugcauuuacauua

SEQ ID NO: 3182627 - RNA, 19 nt, Artificial Sequence
  Description of Artificial Sequence: Synthetic oligonucleotide
ugugagcaugcauugaaua

SEQ ID NO: 3182628 - RNA, 19 nt, Artificial Sequence
  Description of Artificial Sequence: Synthetic oligonucleotide
uccugcuuccagcagaguc

SEQ ID NO: 3182629 - RNA, 19 nt, Artificial Sequence
  Description of Artificial Sequence: Synthetic oligonucleotide
uggucuaugguuacugcau

SEQ ID NO: 3182630 - RNA, 19 nt, Artificial Sequence
  Description of Artificial Sequence: Synthetic oligonucleotide
ugccacgugaucacccagg

SEQ ID NO: 3182631 - RNA, 19 nt, Artificial Sequence
  Description of Artificial Sequence: Synthetic oligonucleotide
uugcauuagcuccugcuuc

SEQ ID NO: 3182632 - RNA, 19 nt, Artificial Sequence
  Description of Artificial Sequence: Synthetic oligonucleotide
aucgugauugcauuugcau

SEQ ID NO: 3182633 - RNA, 19 nt, Artificial Sequence
  Description of Artificial Sequence: Synthetic oligonucleotide
caccauauuccuaaaagaa

SEQ ID NO: 3182634 - RNA, 19 nt, Artificial Sequence
  Description of Artificial Sequence: Synthetic oligonucleotide
uaucgugauugcauuugca

SEQ ID NO: 3182635 - RNA, 19 nt, Artificial Sequence
  Description of Artificial Sequence: Synthetic oligonucleotide
acccaggcaggccucaugg

SEQ ID NO: 3182636 - RNA, 19 nt, Artificial Sequence
  Description of Artificial Sequence: Synthetic oligonucleotide
uccagcagaguccuugcac

SEQ ID NO: 3182637 - RNA, 19 nt, Artificial Sequence
  Description of Artificial Sequence: Synthetic oligonucleotide
auggucuaugguuacugca

SEQ ID NO: 3182638 - RNA, 19 nt, Artificial Sequence
  Description of Artificial Sequence: Synthetic oligonucleotide
cuaugguuacugcauuuac

SEQ ID NO: 3182639 - RNA, 19 nt, Artificial Sequence
  Description of Artificial Sequence: Synthetic oligonucleotide
ugccuugugagcaugcauu

SEQ ID NO: 3182640 - RNA, 19 nt, Artificial Sequence
  Description of Artificial Sequence: Synthetic oligonucleotide
cuaucgugauugcauuugc

SEQ ID NO: 3182641 - RNA, 19 nt, Artificial Sequence
  Description of Artificial Sequence: Synthetic oligonucleotide
uuccuaaaagaaguucugu

SEQ ID NO: 3182642 - RNA, 19 nt, Artificial Sequence
  Description of Artificial Sequence: Synthetic oligonucleotide
cauggucuaugguuacugc

SEQ ID NO: 3182643 - RNA, 19 nt, Artificial Sequence
  Description of Artificial Sequence: Synthetic oligonucleotide
auuccuaaaagaaguucug

SEQ ID NO: 3182644 - RNA, 19 nt, Artificial Sequence
  Description of Artificial Sequence: Synthetic oligonucleotide
gauugcauuugcauuagcu

SEQ ID NO: 3182645 - RNA, 19 nt, Artificial Sequence
  Description of Artificial Sequence: Synthetic oligonucleotide
gcuugcacugccuugugag

SEQ ID NO: 3182646 - RNA, 19 nt, Artificial Sequence
  Description of Artificial Sequence: Synthetic oligonucleotide
ucgugauugcauuugcauu

SEQ ID NO: 3182647 - RNA, 19 nt, Artificial Sequence
  Description of Artificial Sequence: Synthetic oligonucleotide
agaguccuugcacaugcca

SEQ ID NO: 3182648 - RNA, 19 nt, Artificial Sequence
  Description of Artificial Sequence: Synthetic oligonucleotide
acaugccacgugaucaccc

SEQ ID NO: 3182649 - RNA, 19 nt, Artificial Sequence
  Description of Artificial Sequence: Synthetic oligonucleotide
acauggucuaugguuacug

SEQ ID NO: 3182650 - RNA, 19 nt, Artificial Sequence
  Description of Artificial Sequence: Synthetic oligonucleotide
ucuaugguuacugcauuua

SEQ ID NO: 3182651 - RNA, 19 nt, Artificial Sequence
  Description of Artificial Sequence: Synthetic oligonucleotide
aagggaguuacaccaucua

SEQ ID NO: 3182652 - RNA, 19 nt, Artificial Sequence
  Description of Artificial Sequence: Synthetic oligonucleotide
cuugcacugccuugugagc

SEQ ID NO: 3182653 - RNA, 19 nt, Artificial Sequence
  Description of Artificial Sequence: Synthetic oligonucleotide
agggaguuacaccaucuau

SEQ ID NO: 3182654 - RNA, 19 nt, Artificial Sequence
  Description of Artificial Sequence: Synthetic oligonucleotide
uacaccaucuaucgugauu

SEQ ID NO: 3182655 - RNA, 19 nt, Artificial Sequence
  Description of Artificial Sequence: Synthetic oligonucleotide
uugcacugccuugugagca

SEQ ID NO: 3182656 - RNA, 19 nt, Artificial Sequence
  Description of Artificial Sequence: Synthetic oligonucleotide
ugauugcauuugcauuagc

SEQ ID NO: 3182657 - RNA, 19 nt, Artificial Sequence
  Description of Artificial Sequence: Synthetic oligonucleotide
aauaagggaguuacaccau

SEQ ID NO: 3182658 - RNA, 19 nt, Artificial Sequence
  Description of Artificial Sequence: Synthetic oligonucleotide
gugagcaugcauugaauaa

SEQ ID NO: 3182659 - RNA, 19 nt, Artificial Sequence
  Description of Artificial Sequence: Synthetic oligonucleotide
uugugagcaugcauugaau

SEQ ID NO: 3182660 - RNA, 19 nt, Artificial Sequence
  Description of Artificial Sequence: Synthetic oligonucleotide
gcagaguccuugcacaugc

SEQ ID NO: 3182661 - RNA, 19 nt, Artificial Sequence
  Description of Artificial Sequence: Synthetic oligonucleotide
cuugugagcaugcauugaa

SEQ ID NO: 3182662 - RNA, 19 nt, Artificial Sequence
  Description of Artificial Sequence: Synthetic oligonucleotide
cuuccagcagaguccuugc

SEQ ID NO: 3182663 - RNA, 19 nt, Artificial Sequence
  Description of Artificial Sequence: Synthetic oligonucleotide
ugcagcuugcacugccuug

SEQ ID NO: 3182664 - RNA, 19 nt, Artificial Sequence
  Description of Artificial Sequence: Synthetic oligonucleotide
gcaugcauugaauaaggga

SEQ ID NO: 3182665 - RNA, 19 nt, Artificial Sequence
  Description of Artificial Sequence: Synthetic oligonucleotide
gaguccuugcacaugccac

SEQ ID NO: 3182666 - RNA, 19 nt, Artificial Sequence
  Description of Artificial Sequence: Synthetic oligonucleotide
ccugcuuccagcagagucc

SEQ ID NO: 3182667 - RNA, 19 nt, Artificial Sequence
  Description of Artificial Sequence: Synthetic oligonucleotide
ugacauggucuaugguuac

SEQ ID NO: 3182668 - RNA, 19 nt, Artificial Sequence
  Description of Artificial Sequence: Synthetic oligonucleotide
aguggggugacauggucua

SEQ ID NO: 3182669 - RNA, 19 nt, Artificial Sequence
  Description of Artificial Sequence: Synthetic oligonucleotide
ugugcagcuugcacugccu

SEQ ID NO: 3182670 - RNA, 19 nt, Artificial Sequence
  Description of Artificial Sequence: Synthetic oligonucleotide
agcaugcauugaauaaggg

SEQ ID NO: 3182671 - RNA, 19 nt, Artificial Sequence
  Description of Artificial Sequence: Synthetic oligonucleotide
agcuccugcuuccagcaga

SEQ ID NO: 3182672 - RNA, 19 nt, Artificial Sequence
  Description of Artificial Sequence: Synthetic oligonucleotide
guuacaccaucuaucguga

SEQ ID NO: 3182673 - RNA, 19 nt, Artificial Sequence
  Description of Artificial Sequence: Synthetic oligonucleotide
gcaccauauuccuaaaaga

SEQ ID NO: 3182674 - RNA, 19 nt, Artificial Sequence
  Description of Artificial Sequence: Synthetic oligonucleotide
ggggugacauggucuaugg

SEQ ID NO: 3182675 - RNA, 19 nt, Artificial Sequence
  Description of Artificial Sequence: Synthetic oligonucleotide
uggggugacauggucuaug

SEQ ID NO: 3182676 - RNA, 19 nt, Artificial Sequence
  Description of Artificial Sequence: Synthetic oligonucleotide
ugcauugaauaagggaguu

SEQ ID NO: 3182677 - RNA, 19 nt, Artificial Sequence
  Description of Artificial Sequence: Synthetic oligonucleotide
ucauggaguggggugacau

SEQ ID NO: 3182678 - RNA, 19 nt, Artificial Sequence
  Description of Artificial Sequence: Synthetic oligonucleotide
gaaguucugugcagcuugc

SEQ ID NO: 3182679 - RNA, 19 nt, Artificial Sequence
  Description of Artificial Sequence: Synthetic oligonucleotide
guucugugcagcuugcacu

SEQ ID NO: 3182680 - RNA, 19 nt, Artificial Sequence
  Description of Artificial Sequence: Synthetic oligonucleotide
gugauugcauuugcauuag

SEQ ID NO: 3182681 - RNA, 19 nt, Artificial Sequence
  Description of Artificial Sequence: Synthetic oligonucleotide
cugugcagcuugcacugcc

SEQ ID NO: 3182682 - RNA, 19 nt, Artificial Sequence
  Description of Artificial Sequence: Synthetic oligonucleotide
aggcaggccucauggagug

SEQ ID NO: 3182683 - RNA, 19 nt, Artificial Sequence
  Description of Artificial Sequence: Synthetic oligonucleotide
augcauugaauaagggagu

SEQ ID NO: 3182684 - RNA, 19 nt, Artificial Sequence
  Description of Artificial Sequence: Synthetic oligonucleotide
ucaggauucaaauaaaugg

SEQ ID NO: 3182685 - RNA, 19 nt, Artificial Sequence
  Description of Artificial Sequence: Synthetic oligonucleotide
aauacggugcauuugagac

SEQ ID NO: 3182686 - RNA, 19 nt, Artificial Sequence
  Description of Artificial Sequence: Synthetic oligonucleotide
aguacaauaaccuauccac

SEQ ID NO: 3182687 - RNA, 19 nt, Artificial Sequence
  Description of Artificial Sequence: Synthetic oligonucleotide
cauuaaaacaguuugaagc

SEQ ID NO: 3182688 - RNA, 19 nt, Artificial Sequence
  Description of Artificial Sequence: Synthetic oligonucleotide
uaaccuauccacuaaaugg

SEQ ID NO: 3182689 - RNA, 19 nt, Artificial Sequence
  Description of Artificial Sequence: Synthetic oligonucleotide
aaaaguguguaacagaaca

SEQ ID NO: 3182690 - RNA, 19 nt, Artificial Sequence
  Description of Artificial Sequence: Synthetic oligonucleotide
aauguauaaagauugcugu

SEQ ID NO: 3182691 - RNA, 19 nt, Artificial Sequence
  Description of Artificial Sequence: Synthetic oligonucleotide
uuauaagucaauucacugg

SEQ ID NO: 3182692 - RNA, 19 nt, Artificial Sequence
  Description of Artificial Sequence: Synthetic oligonucleotide
uuauuaaaaccucagggug

SEQ ID NO: 3182693 - RNA, 19 nt, Artificial Sequence
  Description of Artificial Sequence: Synthetic oligonucleotide
aaugguaaaguaccgaaca

SEQ ID NO: 3182694 - RNA, 19 nt, Artificial Sequence
  Description of Artificial Sequence: Synthetic oligonucleotide
acuuuuaaugcauauauga

SEQ ID NO: 3182695 - RNA, 19 nt, Artificial Sequence
  Description of Artificial Sequence: Synthetic oligonucleotide
aauuuauaagucaauucac

SEQ ID NO: 3182696 - RNA, 19 nt, Artificial Sequence
  Description of Artificial Sequence: Synthetic oligonucleotide
ucucagaauagaaauauca

SEQ ID NO: 3182697 - RNA, 19 nt, Artificial Sequence
  Description of Artificial Sequence: Synthetic oligonucleotide
ugagaguacauguuguugg

SEQ ID NO: 3182698 - RNA, 19 nt, Artificial Sequence
  Description of Artificial Sequence: Synthetic oligonucleotide
caugcuaacacacuguugc

SEQ ID NO: 3182699 - RNA, 19 nt, Artificial Sequence
  Description of Artificial Sequence: Synthetic oligonucleotide
uuuauaagucaauucacug

SEQ ID NO: 3182700 - RNA, 19 nt, Artificial Sequence
  Description of Artificial Sequence: Synthetic oligonucleotide
auauauuacaagcgcauuc

SEQ ID NO: 3182701 - RNA, 19 nt, Artificial Sequence
  Description of Artificial Sequence: Synthetic oligonucleotide
aaaggcaaaagcaauuuuc

SEQ ID NO: 3182702 - RNA, 19 nt, Artificial Sequence
  Description of Artificial Sequence: Synthetic oligonucleotide
caaauguugauaaagauaa

SEQ ID NO: 3182703 - RNA, 19 nt, Artificial Sequence
  Description of Artificial Sequence: Synthetic oligonucleotide
cuuaacauucaugaaaagg

SEQ ID NO: 3182704 - RNA, 19 nt, Artificial Sequence
  Description of Artificial Sequence: Synthetic oligonucleotide
auaaagauugcugugauca

SEQ ID NO: 3182705 - RNA, 19 nt, Artificial Sequence
  Description of Artificial Sequence: Synthetic oligonucleotide
uguaacagaacaauauaac

SEQ ID NO: 3182706 - RNA, 19 nt, Artificial Sequence
  Description of Artificial Sequence: Synthetic oligonucleotide
aaccuauccacuaaauggc

SEQ ID NO: 3182707 - RNA, 19 nt, Artificial Sequence
  Description of Artificial Sequence: Synthetic oligonucleotide
agggcuaaccucuuuauac

SEQ ID NO: 3182708 - RNA, 19 nt, Artificial Sequence
  Description of Artificial Sequence: Synthetic oligonucleotide
aagucaauucacugggugg

SEQ ID NO: 3182709 - RNA, 19 nt, Artificial Sequence
  Description of Artificial Sequence: Synthetic oligonucleotide
aaucauccuuuguaaaacg

SEQ ID NO: 3182710 - RNA, 19 nt, Artificial Sequence
  Description of Artificial Sequence: Synthetic oligonucleotide
gagacuucaaacauuacag

SEQ ID NO: 3182711 - RNA, 19 nt, Artificial Sequence
  Description of Artificial Sequence: Synthetic oligonucleotide
aaccucuuuauacaaaaca

SEQ ID NO: 3182712 - RNA, 19 nt, Artificial Sequence
  Description of Artificial Sequence: Synthetic oligonucleotide
aauaaauuuguaccaugca

SEQ ID NO: 3182713 - RNA, 19 nt, Artificial Sequence
  Description of Artificial Sequence: Synthetic oligonucleotide
aauucaguccuacgugcgc

SEQ ID NO: 3182714 - RNA, 19 nt, Artificial Sequence
  Description of Artificial Sequence: Synthetic oligonucleotide
uuugacagcuuucacauuc

SEQ ID NO: 3182715 - RNA, 19 nt, Artificial Sequence
  Description of Artificial Sequence: Synthetic oligonucleotide
auguugauaaagauaauac

SEQ ID NO: 3182716 - RNA, 19 nt, Artificial Sequence
  Description of Artificial Sequence: Synthetic oligonucleotide
caauaugggaaaacaaucc

SEQ ID NO: 3182717 - RNA, 19 nt, Artificial Sequence
  Description of Artificial Sequence: Synthetic oligonucleotide
uuuaugucgacauacuguc

SEQ ID NO: 3182718 - RNA, 19 nt, Artificial Sequence
  Description of Artificial Sequence: Synthetic oligonucleotide
uucaucucagaauagaaau

SEQ ID NO: 3182719 - RNA, 19 nt, Artificial Sequence
  Description of Artificial Sequence: Synthetic oligonucleotide
acccuaacaacguccaucc

SEQ ID NO: 3182720 - RNA, 19 nt, Artificial Sequence
  Description of Artificial Sequence: Synthetic oligonucleotide
uucaggauucaaauaaaug

SEQ ID NO: 3182721 - RNA, 19 nt, Artificial Sequence
  Description of Artificial Sequence: Synthetic oligonucleotide
ugucuuacuauaccaaaca

SEQ ID NO: 3182722 - RNA, 19 nt, Artificial Sequence
  Description of Artificial Sequence: Synthetic oligonucleotide
ugaacugugaccugauuug

SEQ ID NO: 3182723 - RNA, 19 nt, Artificial Sequence
  Description of Artificial Sequence: Synthetic oligonucleotide
uaucacugaauucaguccu

SEQ ID NO: 3182724 - RNA, 19 nt, Artificial Sequence
  Description of Artificial Sequence: Synthetic oligonucleotide
auuacaugcuacuuguuca

SEQ ID NO: 3182725 - RNA, 19 nt, Artificial Sequence
  Description of Artificial Sequence: Synthetic oligonucleotide
gauaaucccuuugauaucc

SEQ ID NO: 3182726 - RNA, 19 nt, Artificial Sequence
  Description of Artificial Sequence: Synthetic oligonucleotide
aaugauccuacucucuacu

SEQ ID NO: 3182727 - RNA, 19 nt, Artificial Sequence
  Description of Artificial Sequence: Synthetic oligonucleotide
ugcuuaacauucaugaaaa

SEQ ID NO: 3182728 - RNA, 19 nt, Artificial Sequence
  Description of Artificial Sequence: Synthetic oligonucleotide
acugaauucaguccuacgu

SEQ ID NO: 3182729 - RNA, 19 nt, Artificial Sequence
  Description of Artificial Sequence: Synthetic oligonucleotide
ugguuuaguuuauuuaaag

SEQ ID NO: 3182730 - RNA, 19 nt, Artificial Sequence
  Description of Artificial Sequence: Synthetic oligonucleotide
ugaauucaguccuacgugc

SEQ ID NO: 3182731 - RNA, 19 nt, Artificial Sequence
  Description of Artificial Sequence: Synthetic oligonucleotide
uguacaagaagaugaaaau

SEQ ID NO: 3182732 - RNA, 19 nt, Artificial Sequence
  Description of Artificial Sequence: Synthetic oligonucleotide
aaaugguaaaguaccgaac

SEQ ID NO: 3182733 - RNA, 19 nt, Artificial Sequence
  Description of Artificial Sequence: Synthetic oligonucleotide
uuucacauucuuuaaguuc

SEQ ID NO: 3182734 - RNA, 19 nt, Artificial Sequence
  Description of Artificial Sequence: Synthetic oligonucleotide
ugagucaaucauuugguac

SEQ ID NO: 3182735 - RNA, 19 nt, Artificial Sequence
  Description of Artificial Sequence: Synthetic oligonucleotide
aacacaaaagugauucguc

SEQ ID NO: 3182736 - RNA, 19 nt, Artificial Sequence
  Description of Artificial Sequence: Synthetic oligonucleotide
auaaccuauccacuaaaug

SEQ ID NO: 3182737 - RNA, 19 nt, Artificial Sequence
  Description of Artificial Sequence: Synthetic oligonucleotide
ugcauuacaugcuacuugu

SEQ ID NO: 3182738 - RNA, 19 nt, Artificial Sequence
  Description of Artificial Sequence: Synthetic oligonucleotide
ucuuacgaaacacaaucaa

SEQ ID NO: 3182739 - RNA, 19 nt, Artificial Sequence
  Description of Artificial Sequence: Synthetic oligonucleotide
ucuucauauuaauaaauuu

SEQ ID NO: 3182740 - RNA, 19 nt, Artificial Sequence
  Description of Artificial Sequence: Synthetic oligonucleotide
aaacacaaaagugauucgu

SEQ ID NO: 3182741 - RNA, 19 nt, Artificial Sequence
  Description of Artificial Sequence: Synthetic oligonucleotide
aaccaaucugcaucaguuc

SEQ ID NO: 3182742 - RNA, 19 nt, Artificial Sequence
  Description of Artificial Sequence: Synthetic oligonucleotide
ucgucaaauacucuuugac

SEQ ID NO: 3182743 - RNA, 19 nt, Artificial Sequence
  Description of Artificial Sequence: Synthetic oligonucleotide
ugaauggaaguacaauaac

SEQ ID NO: 3182744 - RNA, 19 nt, Artificial Sequence
  Description of Artificial Sequence: Synthetic oligonucleotide
auuucucacccuaacaacg

SEQ ID NO: 3182745 - RNA, 19 nt, Artificial Sequence
  Description of Artificial Sequence: Synthetic oligonucleotide
acuuguucaucucagaaua

SEQ ID NO: 3182746 - RNA, 19 nt, Artificial Sequence
  Description of Artificial Sequence: Synthetic oligonucleotide
gauucaggacauuagcuca

SEQ ID NO: 3182747 - RNA, 19 nt, Artificial Sequence
  Description of Artificial Sequence: Synthetic oligonucleotide
acagcuuucacauucuuua

SEQ ID NO: 3182748 - RNA, 19 nt, Artificial Sequence
  Description of Artificial Sequence: Synthetic oligonucleotide
uugcauuacaugcuacuug

SEQ ID NO: 3182749 - RNA, 19 nt, Artificial Sequence
  Description of Artificial Sequence: Synthetic oligonucleotide
auuacauaccauccuauau

SEQ ID NO: 3182750 - RNA, 19 nt, Artificial Sequence
  Description of Artificial Sequence: Synthetic oligonucleotide
uccuauauugccagcauau

SEQ ID NO: 3182751 - RNA, 19 nt, Artificial Sequence
  Description of Artificial Sequence: Synthetic oligonucleotide
uacuuuuaaugcauauaug

SEQ ID NO: 3182752 - RNA, 19 nt, Artificial Sequence
  Description of Artificial Sequence: Synthetic oligonucleotide
uuguucacaagccuuuaac

SEQ ID NO: 3182753 - RNA, 19 nt, Artificial Sequence
  Description of Artificial Sequence: Synthetic oligonucleotide
cuuccuauguaacccaggc

SEQ ID NO: 3182754 - RNA, 19 nt, Artificial Sequence
  Description of Artificial Sequence: Synthetic oligonucleotide
aaugauuacgcuguugaua

SEQ ID NO: 3182755 - RNA, 19 nt, Artificial Sequence
  Description of Artificial Sequence: Synthetic oligonucleotide
uugucuuacuauaccaaac

SEQ ID NO: 3182756 - RNA, 19 nt, Artificial Sequence
  Description of Artificial Sequence: Synthetic oligonucleotide
guccuuuuauuucucaccc

SEQ ID NO: 3182757 - RNA, 19 nt, Artificial Sequence
  Description of Artificial Sequence: Synthetic oligonucleotide
aaggcaaaagcaauuuucu

SEQ ID NO: 3182758 - RNA, 19 nt, Artificial Sequence
  Description of Artificial Sequence: Synthetic oligonucleotide
ugugcaguuguaaaaguuu

SEQ ID NO: 3182759 - RNA, 19 nt, Artificial Sequence
  Description of Artificial Sequence: Synthetic oligonucleotide
uacaauaaccuauccacua

SEQ ID NO: 3182760 - RNA, 19 nt, Artificial Sequence
  Description of Artificial Sequence: Synthetic oligonucleotide
ucucacccuaacaacgucc

SEQ ID NO: 3182761 - RNA, 19 nt, Artificial Sequence
  Description of Artificial Sequence: Synthetic oligonucleotide
auguauaaagauugcugug

SEQ ID NO: 3182762 - RNA, 19 nt, Artificial Sequence
  Description of Artificial Sequence: Synthetic oligonucleotide
acuauaguggcaggauugc

SEQ ID NO: 3182763 - RNA, 19 nt, Artificial Sequence
  Description of Artificial Sequence: Synthetic oligonucleotide
ugcuacuuguucaucucag

SEQ ID NO: 3182764 - RNA, 19 nt, Artificial Sequence
  Description of Artificial Sequence: Synthetic oligonucleotide
cuaaaaccuauguuauuac

SEQ ID NO: 3182765 - RNA, 19 nt, Artificial Sequence
  Description of Artificial Sequence: Synthetic oligonucleotide
gaaucauccuuuguaaaac

SEQ ID NO: 3182766 - RNA, 19 nt, Artificial Sequence
  Description of Artificial Sequence: Synthetic oligonucleotide
acacaaaagugauucguca

SEQ ID NO: 3182767 - RNA, 19 nt, Artificial Sequence
  Description of Artificial Sequence: Synthetic oligonucleotide
accaugcacagccaacuac

SEQ ID NO: 3182768 - RNA, 19 nt, Artificial Sequence
  Description of Artificial Sequence: Synthetic oligonucleotide
guuuaguuuauuuaaaguu

SEQ ID NO: 3182769 - RNA, 19 nt, Artificial Sequence
  Description of Artificial Sequence: Synthetic oligonucleotide
cagcauaucaauaugggaa

SEQ ID NO: 3182770 - RNA, 19 nt, Artificial Sequence
  Description of Artificial Sequence: Synthetic oligonucleotide
ucucuacuauauaaaacau

SEQ ID NO: 3182771 - RNA, 19 nt, Artificial Sequence
  Description of Artificial Sequence: Synthetic oligonucleotide
agccaacuacaauauguac

SEQ ID NO: 3182772 - RNA, 19 nt, Artificial Sequence
  Description of Artificial Sequence: Synthetic oligonucleotide
uccuuuguaaaacgguccu

SEQ ID NO: 3182773 - RNA, 19 nt, Artificial Sequence
  Description of Artificial Sequence: Synthetic oligonucleotide
acagaucgaucucacaaug

SEQ ID NO: 3182774 - RNA, 19 nt, Artificial Sequence
  Description of Artificial Sequence: Synthetic oligonucleotide
auccuuuguaaaacggucc

SEQ ID NO: 3182775 - RNA, 19 nt, Artificial Sequence
  Description of Artificial Sequence: Synthetic oligonucleotide
guucucaaccuuuggaggc

SEQ ID NO: 3182776 - RNA, 19 nt, Artificial Sequence
  Description of Artificial Sequence: Synthetic oligonucleotide
auuuauaagucaauucacu

SEQ ID NO: 3182777 - RNA, 19 nt, Artificial Sequence
  Description of Artificial Sequence: Synthetic oligonucleotide
uuacuuuggaaugaaucac

SEQ ID NO: 3182778 - RNA, 19 nt, Artificial Sequence
  Description of Artificial Sequence: Synthetic oligonucleotide
uauaacacaagugcccaga

SEQ ID NO: 3182779 - RNA, 19 nt, Artificial Sequence
  Description of Artificial Sequence: Synthetic oligonucleotide
cacuauaguggcaggauug

SEQ ID NO: 3182780 - RNA, 19 nt, Artificial Sequence
  Description of Artificial Sequence: Synthetic oligonucleotide
guacaagaagaugaaaaug

SEQ ID NO: 3182781 - RNA, 19 nt, Artificial Sequence
  Description of Artificial Sequence: Synthetic oligonucleotide
cuucuguuacuuuggaaug

SEQ ID NO: 3182782 - RNA, 19 nt, Artificial Sequence
  Description of Artificial Sequence: Synthetic oligonucleotide
uaccaaacacaaaagugau

SEQ ID NO: 3182783 - RNA, 19 nt, Artificial Sequence
  Description of Artificial Sequence: Synthetic oligonucleotide
auucaaccaaucugcauca

SEQ ID NO: 3182784 - RNA, 19 nt, Artificial Sequence
  Description of Artificial Sequence: Synthetic oligonucleotide
aaacagaacaaacuaaccc

SEQ ID NO: 3182785 - RNA, 19 nt, Artificial Sequence
  Description of Artificial Sequence: Synthetic oligonucleotide
aacagaacaaacuaacccc

SEQ ID NO: 3182786 - RNA, 19 nt, Artificial Sequence
  Description of Artificial Sequence: Synthetic oligonucleotide
aaaauauggaaacagaaca

SEQ ID NO: 3182787 - RNA, 19 nt, Artificial Sequence
  Description of Artificial Sequence: Synthetic oligonucleotide
uuuaauaucugacaaaaug

SEQ ID NO: 3182788 - RNA, 19 nt, Artificial Sequence
  Description of Artificial Sequence: Synthetic oligonucleotide
ugugcaaagaaacaaaugc

SEQ ID NO: 3182789 - RNA, 19 nt, Artificial Sequence
  Description of Artificial Sequence: Synthetic oligonucleotide
aaaaguagaguuuuaauau

SEQ ID NO: 3182790 - RNA, 19 nt, Artificial Sequence
  Description of Artificial Sequence: Synthetic oligonucleotide
gaaacaaaugcauaaagac

SEQ ID NO: 3182791 - RNA, 19 nt, Artificial Sequence
  Description of Artificial Sequence: Synthetic oligonucleotide
cuagcuuuuacuuagcuag

SEQ ID NO: 3182792 - RNA, 19 nt, Artificial Sequence
  Description of Artificial Sequence: Synthetic oligonucleotide
uuaauaucugacaaaaugu

SEQ ID NO: 3182793 - RNA, 19 nt, Artificial Sequence
  Description of Artificial Sequence: Synthetic oligonucleotide
uuauaugcuaauaugugcc

SEQ ID NO: 3182794 - RNA, 19 nt, Artificial Sequence
  Description of Artificial Sequence: Synthetic oligonucleotide
aagaaacaaaugcauaaag

SEQ ID NO: 3182795 - RNA, 19 nt, Artificial Sequence
  Description of Artificial Sequence: Synthetic oligonucleotide
aaaguagaguuuuaauauc

SEQ ID NO: 3182796 - RNA, 19 nt, Artificial Sequence
  Description of Artificial Sequence: Synthetic oligonucleotide
auuaaggcaauaugaaacg

SEQ ID NO: 3182797 - RNA, 19 nt, Artificial Sequence
  Description of Artificial Sequence: Synthetic oligonucleotide
aaugucugugcaaagaaac

SEQ ID NO: 3182798 - RNA, 19 nt, Artificial Sequence
  Description of Artificial Sequence: Synthetic oligonucleotide
ggaauaaaggcuuauaugc

SEQ ID NO: 3182799 - RNA, 19 nt, Artificial Sequence
  Description of Artificial Sequence: Synthetic oligonucleotide
aaacaaaugcauaaagacg

SEQ ID NO: 3182800 - RNA, 19 nt, Artificial Sequence
  Description of Artificial Sequence: Synthetic oligonucleotide
aaugaggucagcuagguuu

SEQ ID NO: 3182801 - RNA, 19 nt, Artificial Sequence
  Description of Artificial Sequence: Synthetic oligonucleotide
aacaaaugcauaaagacgu

SEQ ID NO: 3182802 - RNA, 19 nt, Artificial Sequence
  Description of Artificial Sequence: Synthetic oligonucleotide
auaaagacguuacugcuac

SEQ ID NO: 3182803 - RNA, 19 nt, Artificial Sequence
  Description of Artificial Sequence: Synthetic oligonucleotide
cauuaaggcaauaugaaac

SEQ ID NO: 3182804 - RNA, 19 nt, Artificial Sequence
  Description of Artificial Sequence: Synthetic oligonucleotide
guuacugcuacauuaaggc

SEQ ID NO: 3182805 - RNA, 19 nt, Artificial Sequence
  Description of Artificial Sequence: Synthetic oligonucleotide
uuuuacuuagcuaguauug

SEQ ID NO: 3182806 - RNA, 19 nt, Artificial Sequence
  Description of Artificial Sequence: Synthetic oligonucleotide
caauaugaaacguagacuc

SEQ ID NO: 3182807 - RNA, 19 nt, Artificial Sequence
  Description of Artificial Sequence: Synthetic oligonucleotide
aguaaagugacaguguagg

SEQ ID NO: 3182808 - RNA, 19 nt, Artificial Sequence
  Description of Artificial Sequence: Synthetic oligonucleotide
cuuauaugcuaauaugugc

SEQ ID NO: 3182809 - RNA, 19 nt, Artificial Sequence
  Description of Artificial Sequence: Synthetic oligonucleotide
aaaugcauaaagacguuac

SEQ ID NO: 3182810 - RNA, 19 nt, Artificial Sequence
  Description of Artificial Sequence: Synthetic oligonucleotide
uuccaaaaugcccacgugg

SEQ ID NO: 3182811 - RNA, 19 nt, Artificial Sequence
  Description of Artificial Sequence: Synthetic oligonucleotide
uauggaaacagaacaaacu

SEQ ID NO: 3182812 - RNA, 19 nt, Artificial Sequence
  Description of Artificial Sequence: Synthetic oligonucleotide
uaguauugcacccaaugag

SEQ ID NO: 3182813 - RNA, 19 nt, Artificial Sequence
  Description of Artificial Sequence: Synthetic oligonucleotide
aaucucaguaaagugacag

SEQ ID NO: 3182814 - RNA, 19 nt, Artificial Sequence
  Description of Artificial Sequence: Synthetic oligonucleotide
ugcauaaagacguuacugc

SEQ ID NO: 3182815 - RNA, 19 nt, Artificial Sequence
  Description of Artificial Sequence: Synthetic oligonucleotide
uccaaaaugcccacguggg

SEQ ID NO: 3182816 - RNA, 19 nt, Artificial Sequence
  Description of Artificial Sequence: Synthetic oligonucleotide
acuuagcuaguauugcacc

SEQ ID NO: 3182817 - RNA, 19 nt, Artificial Sequence
  Description of Artificial Sequence: Synthetic oligonucleotide
uagaguuuuaauaucugac

SEQ ID NO: 3182818 - RNA, 19 nt, Artificial Sequence
  Description of Artificial Sequence: Synthetic oligonucleotide
guuucuagcuuuuacuuag

SEQ ID NO: 3182819 - RNA, 19 nt, Artificial Sequence
  Description of Artificial Sequence: Synthetic oligonucleotide
aaagugacaguguagguuu

SEQ ID NO: 3182820 - RNA, 19 nt, Artificial Sequence
  Description of Artificial Sequence: Synthetic oligonucleotide
uaauaucugacaaaauguc

SEQ ID NO: 3182821 - RNA, 19 nt, Artificial Sequence
  Description of Artificial Sequence: Synthetic oligonucleotide
aaaaugucugugcaaagaa

SEQ ID NO: 3182822 - RNA, 19 nt, Artificial Sequence
  Description of Artificial Sequence: Synthetic oligonucleotide
uggaauaaaggcuuauaug

SEQ ID NO: 3182823 - RNA, 19 nt, Artificial Sequence
  Description of Artificial Sequence: Synthetic oligonucleotide
agaacaaacuaaccccacc

SEQ ID NO: 3182824 - RNA, 19 nt, Artificial Sequence
  Description of Artificial Sequence: Synthetic oligonucleotide
aacaaacuaaccccaccuc

SEQ ID NO: 3182825 - RNA, 19 nt, Artificial Sequence
  Description of Artificial Sequence: Synthetic oligonucleotide
aaggcuuauaugcuaauau

SEQ ID NO: 3182826 - RNA, 19 nt, Artificial Sequence
  Description of Artificial Sequence: Synthetic oligonucleotide
aauaaaggcuuauaugcua

SEQ ID NO: 3182827 - RNA, 19 nt, Artificial Sequence
  Description of Artificial Sequence: Synthetic oligonucleotide
agaguuuuaauaucugaca

SEQ ID NO: 3182828 - RNA, 19 nt, Artificial Sequence
  Description of Artificial Sequence: Synthetic oligonucleotide
ugcaaagaaacaaaugcau

SEQ ID NO: 3182829 - RNA, 19 nt, Artificial Sequence
  Description of Artificial Sequence: Synthetic oligonucleotide
uacauuaaggcaauaugaa

SEQ ID NO: 3182830 - RNA, 19 nt, Artificial Sequence
  Description of Artificial Sequence: Synthetic oligonucleotide
ucugacaaaaugucugugc

SEQ ID NO: 3182831 - RNA, 19 nt, Artificial Sequence
  Description of Artificial Sequence: Synthetic oligonucleotide
aaggcaauaugaaacguag

SEQ ID NO: 3182832 - RNA, 19 nt, Artificial Sequence
  Description of Artificial Sequence: Synthetic oligonucleotide
ucacuagcuuccaaaaugc

SEQ ID NO: 3182833 - RNA, 19 nt, Artificial Sequence
  Description of Artificial Sequence: Synthetic oligonucleotide
gaaacguagacucagaaau

SEQ ID NO: 3182834 - RNA, 19 nt, Artificial Sequence
  Description of Artificial Sequence: Synthetic oligonucleotide
uuggaauaaaggcuuauau

SEQ ID NO: 3182835 - RNA, 19 nt, Artificial Sequence
  Description of Artificial Sequence: Synthetic oligonucleotide
aaugcauaaagacguuacu

SEQ ID NO: 3182836 - RNA, 19 nt, Artificial Sequence
  Description of Artificial Sequence: Synthetic oligonucleotide
uacugcuacauuaaggcaa

SEQ ID NO: 3182837 - RNA, 19 nt, Artificial Sequence
  Description of Artificial Sequence: Synthetic oligonucleotide
ucagaaaucucaguaaagu

SEQ ID NO: 3182838 - RNA, 19 nt, Artificial Sequence
  Description of Artificial Sequence: Synthetic oligonucleotide
uuccugacagccuagaaaa

SEQ ID NO: 3182839 - RNA, 19 nt, Artificial Sequence
  Description of Artificial Sequence: Synthetic oligonucleotide
gacaguguagguuucuagc

SEQ ID NO: 3182840 - RNA, 19 nt, Artificial Sequence
  Description of Artificial Sequence: Synthetic oligonucleotide
cuacauuaaggcaauauga

SEQ ID NO: 3182841 - RNA, 19 nt, Artificial Sequence
  Description of Artificial Sequence: Synthetic oligonucleotide
ucucaguaaagugacagug

SEQ ID NO: 3182842 - RNA, 19 nt, Artificial Sequence
  Description of Artificial Sequence: Synthetic oligonucleotide
acuagcuuccaaaaugccc

SEQ ID NO: 3182843 - RNA, 19 nt, Artificial Sequence
  Description of Artificial Sequence: Synthetic oligonucleotide
gaaaucucaguaaagugac

SEQ ID NO: 3182844 - RNA, 19 nt, Artificial Sequence
  Description of Artificial Sequence: Synthetic oligonucleotide
aauaucugacaaaaugucu

SEQ ID NO: 3182845 - RNA, 19 nt, Artificial Sequence
  Description of Artificial Sequence: Synthetic oligonucleotide
cucacuagcuuccaaaaug

SEQ ID NO: 3182846 - RNA, 19 nt, Artificial Sequence
  Description of Artificial Sequence: Synthetic oligonucleotide
aauauggaaacagaacaaa

SEQ ID NO: 3182847 - RNA, 19 nt, Artificial Sequence
  Description of Artificial Sequence: Synthetic oligonucleotide
uuuacuuagcuaguauugc

SEQ ID NO: 3182848 - RNA, 19 nt, Artificial Sequence
  Description of Artificial Sequence: Synthetic oligonucleotide
aguauugcacccaaugagg

SEQ ID NO: 3182849 - RNA, 19 nt, Artificial Sequence
  Description of Artificial Sequence: Synthetic oligonucleotide
auauggaaacagaacaaac

SEQ ID NO: 3182850 - RNA, 19 nt, Artificial Sequence
  Description of Artificial Sequence: Synthetic oligonucleotide
agaaaucucaguaaaguga

SEQ ID NO: 3182851 - RNA, 19 nt, Artificial Sequence
  Description of Artificial Sequence: Synthetic oligonucleotide
aaguagaguuuuaauaucu

SEQ ID NO: 3182852 - RNA, 19 nt, Artificial Sequence
  Description of Artificial Sequence: Synthetic oligonucleotide
cuagguuuuccugacagcc

SEQ ID NO: 3182853 - RNA, 19 nt, Artificial Sequence
  Description of Artificial Sequence: Synthetic oligonucleotide
aacguagacucagaaaucu

SEQ ID NO: 3182854 - RNA, 19 nt, Artificial Sequence
  Description of Artificial Sequence: Synthetic oligonucleotide
auaucugacaaaaugucug

SEQ ID NO: 3182855 - RNA, 19 nt, Artificial Sequence
  Description of Artificial Sequence: Synthetic oligonucleotide
cuuagcuaguauugcaccc

SEQ ID NO: 3182856 - RNA, 19 nt, Artificial Sequence
  Description of Artificial Sequence: Synthetic oligonucleotide
uuuccugacagccuagaaa

SEQ ID NO: 3182857 - RNA, 19 nt, Artificial Sequence
  Description of Artificial Sequence: Synthetic oligonucleotide
caaagaaacaaaugcauaa

SEQ ID NO: 3182858 - RNA, 19 nt, Artificial Sequence
  Description of Artificial Sequence: Synthetic oligonucleotide
uuacuuagcuaguauugca

SEQ ID NO: 3182859 - RNA, 19 nt, Artificial Sequence
  Description of Artificial Sequence: Synthetic oligonucleotide
gaguuuuaauaucugacaa

SEQ ID NO: 3182860 - RNA, 19 nt, Artificial Sequence
  Description of Artificial Sequence: Synthetic oligonucleotide
ucaguaaagugacagugua

SEQ ID NO: 3182861 - RNA, 19 nt, Artificial Sequence
  Description of Artificial Sequence: Synthetic oligonucleotide
gaaacagaacaaacuaacc

SEQ ID NO: 3182862 - RNA, 19 nt, Artificial Sequence
  Description of Artificial Sequence: Synthetic oligonucleotide
uacuuagcuaguauugcac

SEQ ID NO: 3182863 - RNA, 19 nt, Artificial Sequence
  Description of Artificial Sequence: Synthetic oligonucleotide
auggaaacagaacaaacua

SEQ ID NO: 3182864 - RNA, 19 nt, Artificial Sequence
  Description of Artificial Sequence: Synthetic oligonucleotide
cuagcuuccaaaaugccca

SEQ ID NO: 3182865 - RNA, 19 nt, Artificial Sequence
  Description of Artificial Sequence: Synthetic oligonucleotide
ucugugcaaagaaacaaau

SEQ ID NO: 3182866 - RNA, 19 nt, Artificial Sequence
  Description of Artificial Sequence: Synthetic oligonucleotide
agcuagguuuuccugacag

SEQ ID NO: 3182867 - RNA, 19 nt, Artificial Sequence
  Description of Artificial Sequence: Synthetic oligonucleotide
aaagaaacaaaugcauaaa

SEQ ID NO: 3182868 - RNA, 19 nt, Artificial Sequence
  Description of Artificial Sequence: Synthetic oligonucleotide
cugacagccuagaaaaccc

SEQ ID NO: 3182869 - RNA, 19 nt, Artificial Sequence
  Description of Artificial Sequence: Synthetic oligonucleotide
uggaaacagaacaaacuaa

SEQ ID NO: 3182870 - RNA, 19 nt, Artificial Sequence
  Description of Artificial Sequence: Synthetic oligonucleotide
uauaugcuaauaugugcca

SEQ ID NO: 3182871 - RNA, 19 nt, Artificial Sequence
  Description of Artificial Sequence: Synthetic oligonucleotide
uagguuucuagcuuuuacu

SEQ ID NO: 3182872 - RNA, 19 nt, Artificial Sequence
  Description of Artificial Sequence: Synthetic oligonucleotide
auaugaaacguagacucag

SEQ ID NO: 3182873 - RNA, 19 nt, Artificial Sequence
  Description of Artificial Sequence: Synthetic oligonucleotide
acaaacuaaccccaccucu

SEQ ID NO: 3182874 - RNA, 19 nt, Artificial Sequence
  Description of Artificial Sequence: Synthetic oligonucleotide
aaauauggaaacagaacaa

SEQ ID NO: 3182875 - RNA, 19 nt, Artificial Sequence
  Description of Artificial Sequence: Synthetic oligonucleotide
guuuuaauaucugacaaaa

SEQ ID NO: 3182876 - RNA, 19 nt, Artificial Sequence
  Description of Artificial Sequence: Synthetic oligonucleotide
cagaaaucucaguaaagug

SEQ ID NO: 3182877 - RNA, 19 nt, Artificial Sequence
  Description of Artificial Sequence: Synthetic oligonucleotide
agaaacaaaugcauaaaga

SEQ ID NO: 3182878 - RNA, 19 nt, Artificial Sequence
  Description of Artificial Sequence: Synthetic oligonucleotide
ggcaauaugaaacguagac

SEQ ID NO: 3182879 - RNA, 19 nt, Artificial Sequence
  Description of Artificial Sequence: Synthetic oligonucleotide
aggcuuauaugcuaauaug

SEQ ID NO: 3182880 - RNA, 19 nt, Artificial Sequence
  Description of Artificial Sequence: Synthetic oligonucleotide
aaagacguuacugcuacau

SEQ ID NO: 3182881 - RNA, 19 nt, Artificial Sequence
  Description of Artificial Sequence: Synthetic oligonucleotide
aguuuuaauaucugacaaa

SEQ ID NO: 3182882 - RNA, 19 nt, Artificial Sequence
  Description of Artificial Sequence: Synthetic oligonucleotide
aaacguagacucagaaauc

SEQ ID NO: 3182883 - RNA, 19 nt, Artificial Sequence
  Description of Artificial Sequence: Synthetic oligonucleotide
uaaggcaauaugaaacgua

SEQ ID NO: 3182884 - RNA, 19 nt, Artificial Sequence
  Description of Artificial Sequence: Synthetic oligonucleotide
aaagaaacaccuaacauuc

SEQ ID NO: 3182885 - RNA, 19 nt, Artificial Sequence
  Description of Artificial Sequence: Synthetic oligonucleotide
aagacaacuaauuacaaau

SEQ ID NO: 3182886 - RNA, 19 nt, Artificial Sequence
  Description of Artificial Sequence: Synthetic oligonucleotide
aagugcagagauuugcugc

SEQ ID NO: 3182887 - RNA, 19 nt, Artificial Sequence
  Description of Artificial Sequence: Synthetic oligonucleotide
cauagcuucuccuugaagg

SEQ ID NO: 3182888 - RNA, 19 nt, Artificial Sequence
  Description of Artificial Sequence: Synthetic oligonucleotide
ucauuguaagaucauaccc

SEQ ID NO: 3182889 - RNA, 19 nt, Artificial Sequence
  Description of Artificial Sequence: Synthetic oligonucleotide
uaugaagacaacuaauuac

SEQ ID NO: 3182890 - RNA, 19 nt, Artificial Sequence
  Description of Artificial Sequence: Synthetic oligonucleotide
ucuguuaacguacuugugc

SEQ ID NO: 3182891 - RNA, 19 nt, Artificial Sequence
  Description of Artificial Sequence: Synthetic oligonucleotide
ugguucuugggauugaacg

SEQ ID NO: 3182892 - RNA, 19 nt, Artificial Sequence
  Description of Artificial Sequence: Synthetic oligonucleotide
ucuacaaagccaaggacag

SEQ ID NO: 3182893 - RNA, 19 nt, Artificial Sequence
  Description of Artificial Sequence: Synthetic oligonucleotide
uuuauaugaagacaacuaa

SEQ ID NO: 3182894 - RNA, 19 nt, Artificial Sequence
  Description of Artificial Sequence: Synthetic oligonucleotide
uuuuauaugaagacaacua

SEQ ID NO: 3182895 - RNA, 19 nt, Artificial Sequence
  Description of Artificial Sequence: Synthetic oligonucleotide
ucuuuugccagcugggucg

SEQ ID NO: 3182896 - RNA, 19 nt, Artificial Sequence
  Description of Artificial Sequence: Synthetic oligonucleotide
cauuguaagaucauacccc

SEQ ID NO: 3182897 - RNA, 19 nt, Artificial Sequence
  Description of Artificial Sequence: Synthetic oligonucleotide
aauccuucggauuugugca

SEQ ID NO: 3182898 - RNA, 19 nt, Artificial Sequence
  Description of Artificial Sequence: Synthetic oligonucleotide
uguaagaucauaccccaug

SEQ ID NO: 3182899 - RNA, 19 nt, Artificial Sequence
  Description of Artificial Sequence: Synthetic oligonucleotide
uacaaagccaaggacaggg

SEQ ID NO: 3182900 - RNA, 19 nt, Artificial Sequence
  Description of Artificial Sequence: Synthetic oligonucleotide
aagaucauaccccaugagu

SEQ ID NO: 3182901 - RNA, 19 nt, Artificial Sequence
  Description of Artificial Sequence: Synthetic oligonucleotide
uauaugaagacaacuaauu

SEQ ID NO: 3182902 - RNA, 19 nt, Artificial Sequence
  Description of Artificial Sequence: Synthetic oligonucleotide
uguagaaaugguucuuggg

SEQ ID NO: 3182903 - RNA, 19 nt, Artificial Sequence
  Description of Artificial Sequence: Synthetic oligonucleotide
aaagccaaggacagggacc

SEQ ID NO: 3182904 - RNA, 19 nt, Artificial Sequence
  Description of Artificial Sequence: Synthetic oligonucleotide
agaaacaccuaacauucuc

SEQ ID NO: 3182905 - RNA, 19 nt, Artificial Sequence
  Description of Artificial Sequence: Synthetic oligonucleotide
acuaauuacaaauguauuu

SEQ ID NO: 3182906 - RNA, 19 nt, Artificial Sequence
  Description of Artificial Sequence: Synthetic oligonucleotide
uucauuguaagaucauacc

SEQ ID NO: 3182907 - RNA, 19 nt, Artificial Sequence
  Description of Artificial Sequence: Synthetic oligonucleotide
agugcagagauuugcugcc

SEQ ID NO: 3182908 - RNA, 19 nt, Artificial Sequence
  Description of Artificial Sequence: Synthetic oligonucleotide
aacauucucuuuugccagc

SEQ ID NO: 3182909 - RNA, 19 nt, Artificial Sequence
  Description of Artificial Sequence: Synthetic oligonucleotide
ugugcagucaaagaaacac

SEQ ID NO: 3182910 - RNA, 19 nt, Artificial Sequence
  Description of Artificial Sequence: Synthetic oligonucleotide
ugcaucuccuuccacagag

SEQ ID NO: 3182911 - RNA, 19 nt, Artificial Sequence
  Description of Artificial Sequence: Synthetic oligonucleotide
ucaaagaaacaccuaacau

SEQ ID NO: 3182912 - RNA, 19 nt, Artificial Sequence
  Description of Artificial Sequence: Synthetic oligonucleotide
uuauaugaagacaacuaau

SEQ ID NO: 3182913 - RNA, 19 nt, Artificial Sequence
  Description of Artificial Sequence: Synthetic oligonucleotide
uuucuguuaacguacuugu

SEQ ID NO: 3182914 - RNA, 19 nt, Artificial Sequence
  Description of Artificial Sequence: Synthetic oligonucleotide
gaggcugccacucaugucc

SEQ ID NO: 3182915 - RNA, 19 nt, Artificial Sequence
  Description of Artificial Sequence: Synthetic oligonucleotide
gaucauaccccaugagugg

SEQ ID NO: 3182916 - RNA, 19 nt, Artificial Sequence
  Description of Artificial Sequence: Synthetic oligonucleotide
auucucuuuugccagcugg

SEQ ID NO: 3182917 - RNA, 19 nt, Artificial Sequence
  Description of Artificial Sequence: Synthetic oligonucleotide
caugcuguagaaaugguuc

SEQ ID NO: 3182918 - RNA, 19 nt, Artificial Sequence
  Description of Artificial Sequence: Synthetic oligonucleotide
gauugaacguguaaagugc

SEQ ID NO: 3182919 - RNA, 19 nt, Artificial Sequence
  Description of Artificial Sequence: Synthetic oligonucleotide
uuugugcagucaaagaaac

SEQ ID NO: 3182920 - RNA, 19 nt, Artificial Sequence
  Description of Artificial Sequence: Synthetic oligonucleotide
ugcaacaugcuguagaaau

SEQ ID NO: 3182921 - RNA, 19 nt, Artificial Sequence
  Description of Artificial Sequence: Synthetic oligonucleotide
uaacauucucuuuugccag

SEQ ID NO: 3182922 - RNA, 19 nt, Artificial Sequence
  Description of Artificial Sequence: Synthetic oligonucleotide
ugaggcaucuacaaagcca

SEQ ID NO: 3182923 - RNA, 19 nt, Artificial Sequence
  Description of Artificial Sequence: Synthetic oligonucleotide
ugcagucaaagaaacaccu

SEQ ID NO: 3182924 - RNA, 19 nt, Artificial Sequence
  Description of Artificial Sequence: Synthetic oligonucleotide
aaagugcagagauuugcug

SEQ ID NO: 3182925 - RNA, 19 nt, Artificial Sequence
  Description of Artificial Sequence: Synthetic oligonucleotide
gauuugugcagucaaagaa

SEQ ID NO: 3182926 - RNA, 19 nt, Artificial Sequence
  Description of Artificial Sequence: Synthetic oligonucleotide
caauccuucggauuugugc

SEQ ID NO: 3182927 - RNA, 19 nt, Artificial Sequence
  Description of Artificial Sequence: Synthetic oligonucleotide
gaacguguaaagugcagag

SEQ ID NO: 3182928 - RNA, 19 nt, Artificial Sequence
  Description of Artificial Sequence: Synthetic oligonucleotide
auuguaagaucauacccca

SEQ ID NO: 3182929 - RNA, 19 nt, Artificial Sequence
  Description of Artificial Sequence: Synthetic oligonucleotide
uuuuccuguucauuguaag

SEQ ID NO: 3182930 - RNA, 19 nt, Artificial Sequence
  Description of Artificial Sequence: Synthetic oligonucleotide
acguacuugugcaacaugc

SEQ ID NO: 3182931 - RNA, 19 nt, Artificial Sequence
  Description of Artificial Sequence: Synthetic oligonucleotide
guagaaaugguucuuggga

SEQ ID NO: 3182932 - RNA, 19 nt, Artificial Sequence
  Description of Artificial Sequence: Synthetic oligonucleotide
uacuugugcaacaugcugu

SEQ ID NO: 3182933 - RNA, 19 nt, Artificial Sequence
  Description of Artificial Sequence: Synthetic oligonucleotide
uucucuuuugccagcuggg

SEQ ID NO: 3182934 - RNA, 19 nt, Artificial Sequence
  Description of Artificial Sequence: Synthetic oligonucleotide
cuaacauucucuuuugcca

SEQ ID NO: 3182935 - RNA, 19 nt, Artificial Sequence
  Description of Artificial Sequence: Synthetic oligonucleotide
uaaagugcagagauuugcu

SEQ ID NO: 3182936 - RNA, 19 nt, Artificial Sequence
  Description of Artificial Sequence: Synthetic oligonucleotide
ugggauugaacguguaaag

SEQ ID NO: 3182937 - RNA, 19 nt, Artificial Sequence
  Description of Artificial Sequence: Synthetic oligonucleotide
uugugcaacaugcuguaga

SEQ ID NO: 3182938 - RNA, 19 nt, Artificial Sequence
  Description of Artificial Sequence: Synthetic oligonucleotide
uuugcugccaggcuuuacu

SEQ ID NO: 3182939 - RNA, 19 nt, Artificial Sequence
  Description of Artificial Sequence: Synthetic oligonucleotide
augaagacaacuaauuaca

SEQ ID NO: 3182940 - RNA, 19 nt, Artificial Sequence
  Description of Artificial Sequence: Synthetic oligonucleotide
uaagaucauaccccaugag

SEQ ID NO: 3182941 - RNA, 19 nt, Artificial Sequence
  Description of Artificial Sequence: Synthetic oligonucleotide
caacaugcuguagaaaugg

SEQ ID NO: 3182942 - RNA, 19 nt, Artificial Sequence
  Description of Artificial Sequence: Synthetic oligonucleotide
aaggacagggaccacugca

SEQ ID NO: 3182943 - RNA, 19 nt, Artificial Sequence
  Description of Artificial Sequence: Synthetic oligonucleotide
ucuccuugaaggaucugcc

SEQ ID NO: 3182944 - RNA, 19 nt, Artificial Sequence
  Description of Artificial Sequence: Synthetic oligonucleotide
agaucauaccccaugagug

SEQ ID NO: 3182945 - RNA, 19 nt, Artificial Sequence
  Description of Artificial Sequence: Synthetic oligonucleotide
ggauugaacguguaaagug

SEQ ID NO: 3182946 - RNA, 19 nt, Artificial Sequence
  Description of Artificial Sequence: Synthetic oligonucleotide
ugaaggaucugccucuccu

SEQ ID NO: 3182947 - RNA, 19 nt, Artificial Sequence
  Description of Artificial Sequence: Synthetic oligonucleotide
acguguaaagugcagagau

SEQ ID NO: 3182948 - RNA, 19 nt, Artificial Sequence
  Description of Artificial Sequence: Synthetic oligonucleotide
guaaagugcagagauuugc

SEQ ID NO: 3182949 - RNA, 19 nt, Artificial Sequence
  Description of Artificial Sequence: Synthetic oligonucleotide
ucuccuuccacagagcgga

SEQ ID NO: 3182950 - RNA, 19 nt, Artificial Sequence
  Description of Artificial Sequence: Synthetic oligonucleotide
auaugaagacaacuaauua

SEQ ID NO: 3182951 - RNA, 19 nt, Artificial Sequence
  Description of Artificial Sequence: Synthetic oligonucleotide
gucaaagaaacaccuaaca

SEQ ID NO: 3182952 - RNA, 19 nt, Artificial Sequence
  Description of Artificial Sequence: Synthetic oligonucleotide
uguaaagugcagagauuug

SEQ ID NO: 3182953 - RNA, 19 nt, Artificial Sequence
  Description of Artificial Sequence: Synthetic oligonucleotide
uagaaaugguucuugggau

SEQ ID NO: 3182954 - RNA, 19 nt, Artificial Sequence
  Description of Artificial Sequence: Synthetic oligonucleotide
uuaacguacuugugcaaca

SEQ ID NO: 3182955 - RNA, 19 nt, Artificial Sequence
  Description of Artificial Sequence: Synthetic oligonucleotide
cuuucuguuaacguacuug

SEQ ID NO: 3182956 - RNA, 19 nt, Artificial Sequence
  Description of Artificial Sequence: Synthetic oligonucleotide
uuuccuguucauuguaaga

SEQ ID NO: 3182957 - RNA, 19 nt, Artificial Sequence
  Description of Artificial Sequence: Synthetic oligonucleotide
aucuacaaagccaaggaca

SEQ ID NO: 3182958 - RNA, 19 nt, Artificial Sequence
  Description of Artificial Sequence: Synthetic oligonucleotide
ugagugguggccaucccug

SEQ ID NO: 3182959 - RNA, 19 nt, Artificial Sequence
  Description of Artificial Sequence: Synthetic oligonucleotide
acugcaucuccuuccacag

SEQ ID NO: 3182960 - RNA, 19 nt, Artificial Sequence
  Description of Artificial Sequence: Synthetic oligonucleotide
ugaagacaacuaauuacaa

SEQ ID NO: 3182961 - RNA, 19 nt, Artificial Sequence
  Description of Artificial Sequence: Synthetic oligonucleotide
gacaacuaauuacaaaugu

SEQ ID NO: 3182962 - RNA, 19 nt, Artificial Sequence
  Description of Artificial Sequence: Synthetic oligonucleotide
cuguagaaaugguucuugg

SEQ ID NO: 3182963 - RNA, 19 nt, Artificial Sequence
  Description of Artificial Sequence: Synthetic oligonucleotide
accuaacauucucuuuugc

SEQ ID NO: 3182964 - RNA, 19 nt, Artificial Sequence
  Description of Artificial Sequence: Synthetic oligonucleotide
guucauuguaagaucauac

SEQ ID NO: 3182965 - RNA, 19 nt, Artificial Sequence
  Description of Artificial Sequence: Synthetic oligonucleotide
acaccuaacauucucuuuu

SEQ ID NO: 3182966 - RNA, 19 nt, Artificial Sequence
  Description of Artificial Sequence: Synthetic oligonucleotide
caucuccuuccacagagcg

SEQ ID NO: 3182967 - RNA, 19 nt, Artificial Sequence
  Description of Artificial Sequence: Synthetic oligonucleotide
agucaaagaaacaccuaac

SEQ ID NO: 3182968 - RNA, 19 nt, Artificial Sequence
  Description of Artificial Sequence: Synthetic oligonucleotide
uucuccuugaaggaucugc

SEQ ID NO: 3182969 - RNA, 19 nt, Artificial Sequence
  Description of Artificial Sequence: Synthetic oligonucleotide
ugugcaacaugcuguagaa

SEQ ID NO: 3182970 - RNA, 19 nt, Artificial Sequence
  Description of Artificial Sequence: Synthetic oligonucleotide
aaacaccuaacauucucuu

SEQ ID NO: 3182971 - RNA, 19 nt, Artificial Sequence
  Description of Artificial Sequence: Synthetic oligonucleotide
gaaaugguucuugggauug

SEQ ID NO: 3182972 - RNA, 19 nt, Artificial Sequence
  Description of Artificial Sequence: Synthetic oligonucleotide
auagcuucuccuugaagga

SEQ ID NO: 3182973 - RNA, 19 nt, Artificial Sequence
  Description of Artificial Sequence: Synthetic oligonucleotide
uugaacguguaaagugcag

SEQ ID NO: 3182974 - RNA, 19 nt, Artificial Sequence
  Description of Artificial Sequence: Synthetic oligonucleotide
gaagacaacuaauuacaaa

SEQ ID NO: 3182975 - RNA, 19 nt, Artificial Sequence
  Description of Artificial Sequence: Synthetic oligonucleotide
uguccuuucuguuaacgua

SEQ ID NO: 3182976 - RNA, 19 nt, Artificial Sequence
  Description of Artificial Sequence: Synthetic oligonucleotide
uccuugaaggaucugccuc

SEQ ID NO: 3182977 - RNA, 19 nt, Artificial Sequence
  Description of Artificial Sequence: Synthetic oligonucleotide
uucggauuugugcagucaa

SEQ ID NO: 3182978 - RNA, 19 nt, Artificial Sequence
  Description of Artificial Sequence: Synthetic oligonucleotide
ugaacguguaaagugcaga

SEQ ID NO: 3182979 - RNA, 19 nt, Artificial Sequence
  Description of Artificial Sequence: Synthetic oligonucleotide
aacguacuugugcaacaug

SEQ ID NO: 3182980 - RNA, 19 nt, Artificial Sequence
  Description of Artificial Sequence: Synthetic oligonucleotide
guacuugugcaacaugcug

SEQ ID NO: 3182981 - RNA, 19 nt, Artificial Sequence
  Description of Artificial Sequence: Synthetic oligonucleotide
uugggauugaacguguaaa

SEQ ID NO: 3182982 - RNA, 19 nt, Artificial Sequence
  Description of Artificial Sequence: Synthetic oligonucleotide
aacuaauuacaaauguauu

SEQ ID NO: 3182983 - RNA, 19 nt, Artificial Sequence
  Description of Artificial Sequence: Synthetic oligonucleotide
uuccuguucauuguaagau

SEQ ID NO: 3182984 - RNA, 19 nt, Artificial Sequence
  Description of Artificial Sequence: Synthetic oligonucleotide
ugggucaucauccagaagg

SEQ ID NO: 3182985 - RNA, 19 nt, Artificial Sequence
  Description of Artificial Sequence: Synthetic oligonucleotide
uaguccacaauuuugaaag

SEQ ID NO: 3182986 - RNA, 19 nt, Artificial Sequence
  Description of Artificial Sequence: Synthetic oligonucleotide
aauuuugaaagucucuugu

SEQ ID NO: 3182987 - RNA, 19 nt, Artificial Sequence
  Description of Artificial Sequence: Synthetic oligonucleotide
uaaguuuucauuucugucu

SEQ ID NO: 3182988 - RNA, 19 nt, Artificial Sequence
  Description of Artificial Sequence: Synthetic oligonucleotide
aagguugacauuucuuuuc

SEQ ID NO: 3182989 - RNA, 19 nt, Artificial Sequence
  Description of Artificial Sequence: Synthetic oligonucleotide
agugacagcuacuacagag

SEQ ID NO: 3182990 - RNA, 19 nt, Artificial Sequence
  Description of Artificial Sequence: Synthetic oligonucleotide
uucggcaucuauuugagug

SEQ ID NO: 3182991 - RNA, 19 nt, Artificial Sequence
  Description of Artificial Sequence: Synthetic oligonucleotide
uucauaguccacaauuuug

SEQ ID NO: 3182992 - RNA, 19 nt, Artificial Sequence
  Description of Artificial Sequence: Synthetic oligonucleotide
ucauaguccacaauuuuga

SEQ ID NO: 3182993 - RNA, 19 nt, Artificial Sequence
  Description of Artificial Sequence: Synthetic oligonucleotide
agugauuaaguuuucauuu

SEQ ID NO: 3182994 - RNA, 19 nt, Artificial Sequence
  Description of Artificial Sequence: Synthetic oligonucleotide
ugagugacagcuacuacag

SEQ ID NO: 3182995 - RNA, 19 nt, Artificial Sequence
  Description of Artificial Sequence: Synthetic oligonucleotide
uugacauuucuuuucacca

SEQ ID NO: 3182996 - RNA, 19 nt, Artificial Sequence
  Description of Artificial Sequence: Synthetic oligonucleotide
auuucugucuucucuauug

SEQ ID NO: 3182997 - RNA, 19 nt, Artificial Sequence
  Description of Artificial Sequence: Synthetic oligonucleotide
ucugucuucucuauuggcc

SEQ ID NO: 3182998 - RNA, 19 nt, Artificial Sequence
  Description of Artificial Sequence: Synthetic oligonucleotide
aauccaggugagcuuuucc

SEQ ID NO: 3182999 - RNA, 19 nt, Artificial Sequence
  Description of Artificial Sequence: Synthetic oligonucleotide
uuugaaagucucuuguucu

SEQ ID NO: 3183000 - RNA, 19 nt, Artificial Sequence
  Description of Artificial Sequence: Synthetic oligonucleotide
aagucucuuguucuggguc

SEQ ID NO: 3183001 - RNA, 19 nt, Artificial Sequence
  Description of Artificial Sequence: Synthetic oligonucleotide
uccagaagcuguaacagug

SEQ ID NO: 3183002 - RNA, 19 nt, Artificial Sequence
  Description of Artificial Sequence: Synthetic oligonucleotide
uuuugaaagucucuuguuc

SEQ ID NO: 3183003 - RNA, 19 nt, Artificial Sequence
  Description of Artificial Sequence: Synthetic oligonucleotide
acagcuacuacagagagca

SEQ ID NO: 3183004 - RNA, 19 nt, Artificial Sequence
  Description of Artificial Sequence: Synthetic oligonucleotide
aucuauuugagugacagcu

SEQ ID NO: 3183005 - RNA, 19 nt, Artificial Sequence
  Description of Artificial Sequence: Synthetic oligonucleotide
cucauuacaguggaaaucc

SEQ ID NO: 3183006 - RNA, 19 nt, Artificial Sequence
  Description of Artificial Sequence: Synthetic oligonucleotide
uuucauuucugucuucucu

SEQ ID NO: 3183007 - RNA, 19 nt, Artificial Sequence
  Description of Artificial Sequence: Synthetic oligonucleotide
uugagugacagcuacuaca

SEQ ID NO: 3183008 - RNA, 19 nt, Artificial Sequence
  Description of Artificial Sequence: Synthetic oligonucleotide
uuguucugggucaucaucc

SEQ ID NO: 3183009 - RNA, 19 nt, Artificial Sequence
  Description of Artificial Sequence: Synthetic oligonucleotide
aacucaucuucauagucca

SEQ ID NO: 3183010 - RNA, 19 nt, Artificial Sequence
  Description of Artificial Sequence: Synthetic oligonucleotide
auuaaguuuucauuucugu

SEQ ID NO: 3183011 - RNA, 19 nt, Artificial Sequence
  Description of Artificial Sequence: Synthetic oligonucleotide
ucaccacucguccagaagc

SEQ ID NO: 3183012 - RNA, 19 nt, Artificial Sequence
  Description of Artificial Sequence: Synthetic oligonucleotide
ugauuaaguuuucauuucu

SEQ ID NO: 3183013 - RNA, 19 nt, Artificial Sequence
  Description of Artificial Sequence: Synthetic oligonucleotide
guugacauuucuuuucacc

SEQ ID NO: 3183014 - RNA, 19 nt, Artificial Sequence
  Description of Artificial Sequence: Synthetic oligonucleotide
uucuuuucaccacucgucc

SEQ ID NO: 3183015 - RNA, 19 nt, Artificial Sequence
  Description of Artificial Sequence: Synthetic oligonucleotide
acaguggaaauccagguga

SEQ ID NO: 3183016 - RNA, 19 nt, Artificial Sequence
  Description of Artificial Sequence: Synthetic oligonucleotide
uuucugucuucucuauugg

SEQ ID NO: 3183017 - RNA, 19 nt, Artificial Sequence
  Description of Artificial Sequence: Synthetic oligonucleotide
uccacaauuuugaaagucu

SEQ ID NO: 3183018 - RNA, 19 nt, Artificial Sequence
  Description of Artificial Sequence: Synthetic oligonucleotide
uuaaguuuucauuucuguc

SEQ ID NO: 3183019 - RNA, 19 nt, Artificial Sequence
  Description of Artificial Sequence: Synthetic oligonucleotide
uguaacagugauuaaguuu

SEQ ID NO: 3183020 - RNA, 19 nt, Artificial Sequence
  Description of Artificial Sequence: Synthetic oligonucleotide
ugacagcuacuacagagag

SEQ ID NO: 3183021 - RNA, 19 nt, Artificial Sequence
  Description of Artificial Sequence: Synthetic oligonucleotide
uacuacagagagcaagucc

SEQ ID NO: 3183022 - RNA, 19 nt, Artificial Sequence
  Description of Artificial Sequence: Synthetic oligonucleotide
auacucuugaguagggucc

SEQ ID NO: 3183023 - RNA, 19 nt, Artificial Sequence
  Description of Artificial Sequence: Synthetic oligonucleotide
auuacaguggaaauccagg

SEQ ID NO: 3183024 - RNA, 19 nt, Artificial Sequence
  Description of Artificial Sequence: Synthetic oligonucleotide
ucauccagaagguugacau

SEQ ID NO: 3183025 - RNA, 19 nt, Artificial Sequence
  Description of Artificial Sequence: Synthetic oligonucleotide
caacucaucuucauagucc

SEQ ID NO: 3183026 - RNA, 19 nt, Artificial Sequence
  Description of Artificial Sequence: Synthetic oligonucleotide
guccaacucaucuucauag

SEQ ID NO: 3183027 - RNA, 19 nt, Artificial Sequence
  Description of Artificial Sequence: Synthetic oligonucleotide
uuucuuuucaccacucguc

SEQ ID NO: 3183028 - RNA, 19 nt, Artificial Sequence
  Description of Artificial Sequence: Synthetic oligonucleotide
gaagcuguaacagugauua

SEQ ID NO: 3183029 - RNA, 19 nt, Artificial Sequence
  Description of Artificial Sequence: Synthetic oligonucleotide
ucaucauccagaagguuga

SEQ ID NO: 3183030 - RNA, 19 nt, Artificial Sequence
  Description of Artificial Sequence: Synthetic oligonucleotide
gauacucuugaguaggguc

SEQ ID NO: 3183031 - RNA, 19 nt, Artificial Sequence
  Description of Artificial Sequence: Synthetic oligonucleotide
gaaagucucuuguucuggg

SEQ ID NO: 3183032 - RNA, 19 nt, Artificial Sequence
  Description of Artificial Sequence: Synthetic oligonucleotide
agugggauacucuugagua

SEQ ID NO: 3183033 - RNA, 19 nt, Artificial Sequence
  Description of Artificial Sequence: Synthetic oligonucleotide
aucuucauaguccacaauu

SEQ ID NO: 3183034 - RNA, 19 nt, Artificial Sequence
  Description of Artificial Sequence: Synthetic oligonucleotide
ugggauacucuugaguagg

SEQ ID NO: 3183035 - RNA, 19 nt, Artificial Sequence
  Description of Artificial Sequence: Synthetic oligonucleotide
auuucuuuucaccacucgu

SEQ ID NO: 3183036 - RNA, 19 nt, Artificial Sequence
  Description of Artificial Sequence: Synthetic oligonucleotide
agaagguugacauuucuuu

SEQ ID NO: 3183037 - RNA, 19 nt, Artificial Sequence
  Description of Artificial Sequence: Synthetic oligonucleotide
cuauuugagugacagcuac

SEQ ID NO: 3183038 - RNA, 19 nt, Artificial Sequence
  Description of Artificial Sequence: Synthetic oligonucleotide
acuagugggauacucuuga

SEQ ID NO: 3183039 - RNA, 19 nt, Artificial Sequence
  Description of Artificial Sequence: Synthetic oligonucleotide
ucccguacucauuacagug

SEQ ID NO: 3183040 - RNA, 19 nt, Artificial Sequence
  Description of Artificial Sequence: Synthetic oligonucleotide
uacaguggaaauccaggug

SEQ ID NO: 3183041 - RNA, 19 nt, Artificial Sequence
  Description of Artificial Sequence: Synthetic oligonucleotide
cauuacaguggaaauccag

SEQ ID NO: 3183042 - RNA, 19 nt, Artificial Sequence
  Description of Artificial Sequence: Synthetic oligonucleotide
uuacaguggaaauccaggu

SEQ ID NO: 3183043 - RNA, 19 nt, Artificial Sequence
  Description of Artificial Sequence: Synthetic oligonucleotide
ugaaagucucuuguucugg

SEQ ID NO: 3183044 - RNA, 19 nt, Artificial Sequence
  Description of Artificial Sequence: Synthetic oligonucleotide
agcuguaacagugauuaag

SEQ ID NO: 3183045 - RNA, 19 nt, Artificial Sequence
  Description of Artificial Sequence: Synthetic oligonucleotide
acuacagagagcaagucca

SEQ ID NO: 3183046 - RNA, 19 nt, Artificial Sequence
  Description of Artificial Sequence: Synthetic oligonucleotide
aaguuuucauuucugucuu

SEQ ID NO: 3183047 - RNA, 19 nt, Artificial Sequence
  Description of Artificial Sequence: Synthetic oligonucleotide
uucugggucaucauccaga

SEQ ID NO: 3183048 - RNA, 19 nt, Artificial Sequence
  Description of Artificial Sequence: Synthetic oligonucleotide
acucauuacaguggaaauc

SEQ ID NO: 3183049 - RNA, 19 nt, Artificial Sequence
  Description of Artificial Sequence: Synthetic oligonucleotide
acagagagcaaguccaacu

SEQ ID NO: 3183050 - RNA, 19 nt, Artificial Sequence
  Description of Artificial Sequence: Synthetic oligonucleotide
gauuaaguuuucauuucug

SEQ ID NO: 3183051 - RNA, 19 nt, Artificial Sequence
  Description of Artificial Sequence: Synthetic oligonucleotide
uccuucggcaucuauuuga

SEQ ID NO: 3183052 - RNA, 19 nt, Artificial Sequence
  Description of Artificial Sequence: Synthetic oligonucleotide
cugucuucucuauuggccc

SEQ ID NO: 3183053 - RNA, 19 nt, Artificial Sequence
  Description of Artificial Sequence: Synthetic oligonucleotide
uugaaagucucuuguucug

SEQ ID NO: 3183054 - RNA, 19 nt, Artificial Sequence
  Description of Artificial Sequence: Synthetic oligonucleotide
ucuucauaguccacaauuu

SEQ ID NO: 3183055 - RNA, 19 nt, Artificial Sequence
  Description of Artificial Sequence: Synthetic oligonucleotide
caauuuugaaagucucuug

SEQ ID NO: 3183056 - RNA, 19 nt, Artificial Sequence
  Description of Artificial Sequence: Synthetic oligonucleotide
cuuuucaccacucguccag

SEQ ID NO: 3183057 - RNA, 19 nt, Artificial Sequence
  Description of Artificial Sequence: Synthetic oligonucleotide
uugaguagggucccguacu

SEQ ID NO: 3183058 - RNA, 19 nt, Artificial Sequence
  Description of Artificial Sequence: Synthetic oligonucleotide
gucaucauccagaagguug

SEQ ID NO: 3183059 - RNA, 19 nt, Artificial Sequence
  Description of Artificial Sequence: Synthetic oligonucleotide
caucccaugacuccacuag

SEQ ID NO: 3183060 - RNA, 19 nt, Artificial Sequence
  Description of Artificial Sequence: Synthetic oligonucleotide
uuuccuucggcaucuauuu

SEQ ID NO: 3183061 - RNA, 19 nt, Artificial Sequence
  Description of Artificial Sequence: Synthetic oligonucleotide
uuuuccuucggcaucuauu

SEQ ID NO: 3183062 - RNA, 19 nt, Artificial Sequence
  Description of Artificial Sequence: Synthetic oligonucleotide
acagugauuaaguuuucau

SEQ ID NO: 3183063 - RNA, 19 nt, Artificial Sequence
  Description of Artificial Sequence: Synthetic oligonucleotide
aaagucucuuguucugggu

SEQ ID NO: 3183064 - RNA, 19 nt, Artificial Sequence
  Description of Artificial Sequence: Synthetic oligonucleotide
agcuacuacagagagcaag

SEQ ID NO: 3183065 - RNA, 19 nt, Artificial Sequence
  Description of Artificial Sequence: Synthetic oligonucleotide
uucauuucugucuucucua

SEQ ID NO: 3183066 - RNA, 19 nt, Artificial Sequence
  Description of Artificial Sequence: Synthetic oligonucleotide
ucguccagaagcuguaaca

SEQ ID NO: 3183067 - RNA, 19 nt, Artificial Sequence
  Description of Artificial Sequence: Synthetic oligonucleotide
cauuucuuuucaccacucg

SEQ ID NO: 3183068 - RNA, 19 nt, Artificial Sequence
  Description of Artificial Sequence: Synthetic oligonucleotide
ugacauuucuuuucaccac

SEQ ID NO: 3183069 - RNA, 19 nt, Artificial Sequence
  Description of Artificial Sequence: Synthetic oligonucleotide
uccacuagugggauacucu

SEQ ID NO: 3183070 - RNA, 19 nt, Artificial Sequence
  Description of Artificial Sequence: Synthetic oligonucleotide
auaguccacaauuuugaaa

SEQ ID NO: 3183071 - RNA, 19 nt, Artificial Sequence
  Description of Artificial Sequence: Synthetic oligonucleotide
uagugggauacucuugagu

SEQ ID NO: 3183072 - RNA, 19 nt, Artificial Sequence
  Description of Artificial Sequence: Synthetic oligonucleotide
uuugagugacagcuacuac

SEQ ID NO: 3183073 - RNA, 19 nt, Artificial Sequence
  Description of Artificial Sequence: Synthetic oligonucleotide
ugagcuuuuccuucggcau

SEQ ID NO: 3183074 - RNA, 19 nt, Artificial Sequence
  Description of Artificial Sequence: Synthetic oligonucleotide
acaauuuugaaagucucuu

SEQ ID NO: 3183075 - RNA, 19 nt, Artificial Sequence
  Description of Artificial Sequence: Synthetic oligonucleotide
uucugucuucucuauuggc

SEQ ID NO: 3183076 - RNA, 19 nt, Artificial Sequence
  Description of Artificial Sequence: Synthetic oligonucleotide
ucccaugacuccacuagug

SEQ ID NO: 3183077 - RNA, 19 nt, Artificial Sequence
  Description of Artificial Sequence: Synthetic oligonucleotide
uucaccacucguccagaag

SEQ ID NO: 3183078 - RNA, 19 nt, Artificial Sequence
  Description of Artificial Sequence: Synthetic oligonucleotide
ucggcaucuauuugaguga

SEQ ID NO: 3183079 - RNA, 19 nt, Artificial Sequence
  Description of Artificial Sequence: Synthetic oligonucleotide
ucaucuucauaguccacaa

SEQ ID NO: 3183080 - RNA, 19 nt, Artificial Sequence
  Description of Artificial Sequence: Synthetic oligonucleotide
gugauuaaguuuucauuuc

SEQ ID NO: 3183081 - RNA, 19 nt, Artificial Sequence
  Description of Artificial Sequence: Synthetic oligonucleotide
uauuugagugacagcuacu

SEQ ID NO: 3183082 - RNA, 19 nt, Artificial Sequence
  Description of Artificial Sequence: Synthetic oligonucleotide
aacagugauuaaguuuuca

SEQ ID NO: 3183083 - RNA, 19 nt, Artificial Sequence
  Description of Artificial Sequence: Synthetic oligonucleotide
uacucauuacaguggaaau

SEQ ID NO: 3183084 - RNA, 19 nt, Artificial Sequence
  Description of Artificial Sequence: Synthetic oligonucleotide
acucauauuaaauaguucc

SEQ ID NO: 3183085 - RNA, 19 nt, Artificial Sequence
  Description of Artificial Sequence: Synthetic oligonucleotide
aguuccccaaauuugaccc

SEQ ID NO: 3183086 - RNA, 19 nt, Artificial Sequence
  Description of Artificial Sequence: Synthetic oligonucleotide
uuuugauugucccaacugg

SEQ ID NO: 3183087 - RNA, 19 nt, Artificial Sequence
  Description of Artificial Sequence: Synthetic oligonucleotide
uugaacucauauuaaauag

SEQ ID NO: 3183088 - RNA, 19 nt, Artificial Sequence
  Description of Artificial Sequence: Synthetic oligonucleotide
ucaaaugucaccaacccac

SEQ ID NO: 3183089 - RNA, 19 nt, Artificial Sequence
  Description of Artificial Sequence: Synthetic oligonucleotide
aaugucaccaacccacaac

SEQ ID NO: 3183090 - RNA, 19 nt, Artificial Sequence
  Description of Artificial Sequence: Synthetic oligonucleotide
uuuggcaucacacugguuc

SEQ ID NO: 3183091 - RNA, 19 nt, Artificial Sequence
  Description of Artificial Sequence: Synthetic oligonucleotide
cugagcaucauccaggucc

SEQ ID NO: 3183092 - RNA, 19 nt, Artificial Sequence
  Description of Artificial Sequence: Synthetic oligonucleotide
caaauaucucuuuugauug

SEQ ID NO: 3183093 - RNA, 19 nt, Artificial Sequence
  Description of Artificial Sequence: Synthetic oligonucleotide
aacuguguucauuuccucg

SEQ ID NO: 3183094 - RNA, 19 nt, Artificial Sequence
  Description of Artificial Sequence: Synthetic oligonucleotide
uuuaacagggaagaguucc

SEQ ID NO: 3183095 - RNA, 19 nt, Artificial Sequence
  Description of Artificial Sequence: Synthetic oligonucleotide
acuguguucauuuccucgc

SEQ ID NO: 3183096 - RNA, 19 nt, Artificial Sequence
  Description of Artificial Sequence: Synthetic oligonucleotide
auucuuaauagccaggcgu

SEQ ID NO: 3183097 - RNA, 19 nt, Artificial Sequence
  Description of Artificial Sequence: Synthetic oligonucleotide
acuggugucguucaggcuc

SEQ ID NO: 3183098 - RNA, 19 nt, Artificial Sequence
  Description of Artificial Sequence: Synthetic oligonucleotide
ucaaauaucucuuuugauu

SEQ ID NO: 3183099 - RNA, 19 nt, Artificial Sequence
  Description of Artificial Sequence: Synthetic oligonucleotide
uaaaacaugguuugaacuc

SEQ ID NO: 3183100 - RNA, 19 nt, Artificial Sequence
  Description of Artificial Sequence: Synthetic oligonucleotide
uuugaacucauauuaaaua

SEQ ID NO: 3183101 - RNA, 19 nt, Artificial Sequence
  Description of Artificial Sequence: Synthetic oligonucleotide
uaaauaguuccccaaauuu

SEQ ID NO: 3183102 - RNA, 19 nt, Artificial Sequence
  Description of Artificial Sequence: Synthetic oligonucleotide
uccaacuucaggaucaacu

SEQ ID NO: 3183103 - RNA, 19 nt, Artificial Sequence
  Description of Artificial Sequence: Synthetic oligonucleotide
ucuucuuccuuccauggcc

SEQ ID NO: 3183104 - RNA, 19 nt, Artificial Sequence
  Description of Artificial Sequence: Synthetic oligonucleotide
aaauuugacccucuccuca

SEQ ID NO: 3183105 - RNA, 19 nt, Artificial Sequence
  Description of Artificial Sequence: Synthetic oligonucleotide
aauagccaggcguaaaaca

SEQ ID NO: 3183106 - RNA, 19 nt, Artificial Sequence
  Description of Artificial Sequence: Synthetic oligonucleotide
ucaggaucaacucagguuu

SEQ ID NO: 3183107 - RNA, 19 nt, Artificial Sequence
  Description of Artificial Sequence: Synthetic oligonucleotide
uuccauucuccauagcugg

SEQ ID NO: 3183108 - RNA, 19 nt, Artificial Sequence
  Description of Artificial Sequence: Synthetic oligonucleotide
cuuccucugagcaucaucc

SEQ ID NO: 3183109 - RNA, 19 nt, Artificial Sequence
  Description of Artificial Sequence: Synthetic oligonucleotide
aauaucucuuuugauuguc

SEQ ID NO: 3183110 - RNA, 19 nt, Artificial Sequence
  Description of Artificial Sequence: Synthetic oligonucleotide
aaauaguuccccaaauuug

SEQ ID NO: 3183111 - RNA, 19 nt, Artificial Sequence
  Description of Artificial Sequence: Synthetic oligonucleotide
ucauauuaaauaguucccc

SEQ ID NO: 3183112 - RNA, 19 nt, Artificial Sequence
  Description of Artificial Sequence: Synthetic oligonucleotide
cucauauuaaauaguuccc

SEQ ID NO: 3183113 - RNA, 19 nt, Artificial Sequence
  Description of Artificial Sequence: Synthetic oligonucleotide
aguucaaauaucucuuuug

SEQ ID NO: 3183114 - RNA, 19 nt, Artificial Sequence
  Description of Artificial Sequence: Synthetic oligonucleotide
uauucuuaauagccaggcg

SEQ ID NO: 3183115 - RNA, 19 nt, Artificial Sequence
  Description of Artificial Sequence: Synthetic oligonucleotide
ugaacucauauuaaauagu

SEQ ID NO: 3183116 - RNA, 19 nt, Artificial Sequence
  Description of Artificial Sequence: Synthetic oligonucleotide
uuuccauucuccauagcug

SEQ ID NO: 3183117 - RNA, 19 nt, Artificial Sequence
  Description of Artificial Sequence: Synthetic oligonucleotide
aucacacugguucaaggac

SEQ ID NO: 3183118 - RNA, 19 nt, Artificial Sequence
  Description of Artificial Sequence: Synthetic oligonucleotide
gugauuaccagguaguuca

SEQ ID NO: 3183119 - RNA, 19 nt, Artificial Sequence
  Description of Artificial Sequence: Synthetic oligonucleotide
uauuaaauaguuccccaaa

SEQ ID NO: 3183120 - RNA, 19 nt, Artificial Sequence
  Description of Artificial Sequence: Synthetic oligonucleotide
agguaguucaaauaucucu

SEQ ID NO: 3183121 - RNA, 19 nt, Artificial Sequence
  Description of Artificial Sequence: Synthetic oligonucleotide
guuccuauucuuaauagcc

SEQ ID NO: 3183122 - RNA, 19 nt, Artificial Sequence
  Description of Artificial Sequence: Synthetic oligonucleotide
aauaguuccccaaauuuga

SEQ ID NO: 3183123 - RNA, 19 nt, Artificial Sequence
  Description of Artificial Sequence: Synthetic oligonucleotide
augguuugaacucauauua

SEQ ID NO: 3183124 - RNA, 19 nt, Artificial Sequence
  Description of Artificial Sequence: Synthetic oligonucleotide
uccuauucuuaauagccag

SEQ ID NO: 3183125 - RNA, 19 nt, Artificial Sequence
  Description of Artificial Sequence: Synthetic oligonucleotide
aauuugacccucuccucag

SEQ ID NO: 3183126 - RNA, 19 nt, Artificial Sequence
  Description of Artificial Sequence: Synthetic oligonucleotide
guugccagugauuaccagg

SEQ ID NO: 3183127 - RNA, 19 nt, Artificial Sequence
  Description of Artificial Sequence: Synthetic oligonucleotide
auuuccucgcucucuaagg

SEQ ID NO: 3183128 - RNA, 19 nt, Artificial Sequence
  Description of Artificial Sequence: Synthetic oligonucleotide
aacuucaggaucaacucag

SEQ ID NO: 3183129 - RNA, 19 nt, Artificial Sequence
  Description of Artificial Sequence: Synthetic oligonucleotide
aaaacaugguuugaacuca

SEQ ID NO: 3183130 - RNA, 19 nt, Artificial Sequence
  Description of Artificial Sequence: Synthetic oligonucleotide
uuugauugucccaacuggu

SEQ ID NO: 3183131 - RNA, 19 nt, Artificial Sequence
  Description of Artificial Sequence: Synthetic oligonucleotide
uccucaaaugucaccaacc

SEQ ID NO: 3183132 - RNA, 19 nt, Artificial Sequence
  Description of Artificial Sequence: Synthetic oligonucleotide
cucucuaaggcacauggag

SEQ ID NO: 3183133 - RNA, 19 nt, Artificial Sequence
  Description of Artificial Sequence: Synthetic oligonucleotide
aggugaaguccacacagac

SEQ ID NO: 3183134 - RNA, 19 nt, Artificial Sequence
  Description of Artificial Sequence: Synthetic oligonucleotide
ucaguugaugaguugccag

SEQ ID NO: 3183135 - RNA, 19 nt, Artificial Sequence
  Description of Artificial Sequence: Synthetic oligonucleotide
gaaguccacacagacaucc

SEQ ID NO: 3183136 - RNA, 19 nt, Artificial Sequence
  Description of Artificial Sequence: Synthetic oligonucleotide
uuaaauaguuccccaaauu

SEQ ID NO: 3183137 - RNA, 19 nt, Artificial Sequence
  Description of Artificial Sequence: Synthetic oligonucleotide
ugaguugccagugauuacc

SEQ ID NO: 3183138 - RNA, 19 nt, Artificial Sequence
  Description of Artificial Sequence: Synthetic oligonucleotide
aaauaucucuuuugauugu

SEQ ID NO: 3183139 - RNA, 19 nt, Artificial Sequence
  Description of Artificial Sequence: Synthetic oligonucleotide
aacucauauuaaauaguuc

SEQ ID NO: 3183140 - RNA, 19 nt, Artificial Sequence
  Description of Artificial Sequence: Synthetic oligonucleotide
gaguuccuauucuuaauag

SEQ ID NO: 3183141 - RNA, 19 nt, Artificial Sequence
  Description of Artificial Sequence: Synthetic oligonucleotide
uuaauagccaggcguaaaa

SEQ ID NO: 3183142 - RNA, 19 nt, Artificial Sequence
  Description of Artificial Sequence: Synthetic oligonucleotide
uaucucuuuugauuguccc

SEQ ID NO: 3183143 - RNA, 19 nt, Artificial Sequence
  Description of Artificial Sequence: Synthetic oligonucleotide
auuaaauaguuccccaaau

SEQ ID NO: 3183144 - RNA, 19 nt, Artificial Sequence
  Description of Artificial Sequence: Synthetic oligonucleotide
uaccagguaguucaaauau

SEQ ID NO: 3183145 - RNA, 19 nt, Artificial Sequence
  Description of Artificial Sequence: Synthetic oligonucleotide
cuauucuuaauagccaggc

SEQ ID NO: 3183146 - RNA, 19 nt, Artificial Sequence
  Description of Artificial Sequence: Synthetic oligonucleotide
gacagcaggcuucuguagg

SEQ ID NO: 3183147 - RNA, 19 nt, Artificial Sequence
  Description of Artificial Sequence: Synthetic oligonucleotide
aucaccucccuguagagcu

SEQ ID NO: 3183148 - RNA, 19 nt, Artificial Sequence
  Description of Artificial Sequence: Synthetic oligonucleotide
ugauugucccaacuggugu

SEQ ID NO: 3183149 - RNA, 19 nt, Artificial Sequence
  Description of Artificial Sequence: Synthetic oligonucleotide
uucuccauagcugggagcc

SEQ ID NO: 3183150 - RNA, 19 nt, Artificial Sequence
  Description of Artificial Sequence: Synthetic oligonucleotide
cuuuugauugucccaacug

SEQ ID NO: 3183151 - RNA, 19 nt, Artificial Sequence
  Description of Artificial Sequence: Synthetic oligonucleotide
ucaccaacccacaacugug

SEQ ID NO: 3183152 - RNA, 19 nt, Artificial Sequence
  Description of Artificial Sequence: Synthetic oligonucleotide
ugcuccaacuucaggauca

SEQ ID NO: 3183153 - RNA, 19 nt, Artificial Sequence
  Description of Artificial Sequence: Synthetic oligonucleotide
ucucuaaggcacauggagu

SEQ ID NO: 3183154 - RNA, 19 nt, Artificial Sequence
  Description of Artificial Sequence: Synthetic oligonucleotide
uuccuauucuuaauagcca

SEQ ID NO: 3183155 - RNA, 19 nt, Artificial Sequence
  Description of Artificial Sequence: Synthetic oligonucleotide
uugauugucccaacuggug

SEQ ID NO: 3183156 - RNA, 19 nt, Artificial Sequence
  Description of Artificial Sequence: Synthetic oligonucleotide
guucaaauaucucuuuuga

SEQ ID NO: 3183157 - RNA, 19 nt, Artificial Sequence
  Description of Artificial Sequence: Synthetic oligonucleotide
uugccagugauuaccaggu

SEQ ID NO: 3183158 - RNA, 19 nt, Artificial Sequence
  Description of Artificial Sequence: Synthetic oligonucleotide
aaggacagcaggcuucugu

SEQ ID NO: 3183159 - RNA, 19 nt, Artificial Sequence
  Description of Artificial Sequence: Synthetic oligonucleotide
auuaccagguaguucaaau

SEQ ID NO: 3183160 - RNA, 19 nt, Artificial Sequence
  Description of Artificial Sequence: Synthetic oligonucleotide
uuuccucgcucucuaaggc

SEQ ID NO: 3183161 - RNA, 19 nt, Artificial Sequence
  Description of Artificial Sequence: Synthetic oligonucleotide
ucacacugguucaaggaca

SEQ ID NO: 3183162 - RNA, 19 nt, Artificial Sequence
  Description of Artificial Sequence: Synthetic oligonucleotide
auauuaaauaguuccccaa

SEQ ID NO: 3183163 - RNA, 19 nt, Artificial Sequence
  Description of Artificial Sequence: Synthetic oligonucleotide
guuuggggcaucuucuucc

SEQ ID NO: 3183164 - RNA, 19 nt, Artificial Sequence
  Description of Artificial Sequence: Synthetic oligonucleotide
aucuucuuccuuccauggc

SEQ ID NO: 3183165 - RNA, 19 nt, Artificial Sequence
  Description of Artificial Sequence: Synthetic oligonucleotide
auccucaaaugucaccaac

SEQ ID NO: 3183166 - RNA, 19 nt, Artificial Sequence
  Description of Artificial Sequence: Synthetic oligonucleotide
ucuuuugauugucccaacu

SEQ ID NO: 3183167 - RNA, 19 nt, Artificial Sequence
  Description of Artificial Sequence: Synthetic oligonucleotide
aucaacucagguuuggcau

SEQ ID NO: 3183168 - RNA, 19 nt, Artificial Sequence
  Description of Artificial Sequence: Synthetic oligonucleotide
agagcuuccucugagcauc

SEQ ID NO: 3183169 - RNA, 19 nt, Artificial Sequence
  Description of Artificial Sequence: Synthetic oligonucleotide
ugguucaaggacagcaggc

SEQ ID NO: 3183170 - RNA, 19 nt, Artificial Sequence
  Description of Artificial Sequence: Synthetic oligonucleotide
acagacauccucaaauguc

SEQ ID NO: 3183171 - RNA, 19 nt, Artificial Sequence
  Description of Artificial Sequence: Synthetic oligonucleotide
auucuccauagcugggagc

SEQ ID NO: 3183172 - RNA, 19 nt, Artificial Sequence
  Description of Artificial Sequence: Synthetic oligonucleotide
uucuuaauagccaggcgua

SEQ ID NO: 3183173 - RNA, 19 nt, Artificial Sequence
  Description of Artificial Sequence: Synthetic oligonucleotide
cucagguuuggcaucacac

SEQ ID NO: 3183174 - RNA, 19 nt, Artificial Sequence
  Description of Artificial Sequence: Synthetic oligonucleotide
cacaacuguguucauuucc

SEQ ID NO: 3183175 - RNA, 19 nt, Artificial Sequence
  Description of Artificial Sequence: Synthetic oligonucleotide
uccucugagcaucauccag

SEQ ID NO: 3183176 - RNA, 19 nt, Artificial Sequence
  Description of Artificial Sequence: Synthetic oligonucleotide
cauauuaaauaguucccca

SEQ ID NO: 3183177 - RNA, 19 nt, Artificial Sequence
  Description of Artificial Sequence: Synthetic oligonucleotide
acaugguuugaacucauau

SEQ ID NO: 3183178 - RNA, 19 nt, Artificial Sequence
  Description of Artificial Sequence: Synthetic oligonucleotide
aggcguaaaacaugguuug

SEQ ID NO: 3183179 - RNA, 19 nt, Artificial Sequence
  Description of Artificial Sequence: Synthetic oligonucleotide
auaucucuuuugauugucc

SEQ ID NO: 3183180 - RNA, 19 nt, Artificial Sequence
  Description of Artificial Sequence: Synthetic oligonucleotide
caucuucuuccuuccaugg

SEQ ID NO: 3183181 - RNA, 19 nt, Artificial Sequence
  Description of Artificial Sequence: Synthetic oligonucleotide
uugguuuggggcaucuucu

SEQ ID NO: 3183182 - RNA, 19 nt, Artificial Sequence
  Description of Artificial Sequence: Synthetic oligonucleotide
uucaggaucaacucagguu

SEQ ID NO: 3183183 - RNA, 19 nt, Artificial Sequence
  Description of Artificial Sequence: Synthetic oligonucleotide
uaguuccccaaauuugacc

SEQ ID NO: 3183184 - RNA, 19 nt, Artificial Sequence
  Description of Artificial Sequence: Synthetic oligonucleotide
aacauccuuaaccuuaucc

SEQ ID NO: 3183185 - RNA, 19 nt, Artificial Sequence
  Description of Artificial Sequence: Synthetic oligonucleotide
agcuaggugaaccagaggc

SEQ ID NO: 3183186 - RNA, 19 nt, Artificial Sequence
  Description of Artificial Sequence: Synthetic oligonucleotide
gagucaaugauuaauagag

SEQ ID NO: 3183187 - RNA, 19 nt, Artificial Sequence
  Description of Artificial Sequence: Synthetic oligonucleotide
uuuucauccuuuaauauga

SEQ ID NO: 3183188 - RNA, 19 nt, Artificial Sequence
  Description of Artificial Sequence: Synthetic oligonucleotide
aaucucuuuucaucuaagc

SEQ ID NO: 3183189 - RNA, 19 nt, Artificial Sequence
  Description of Artificial Sequence: Synthetic oligonucleotide
aucucuuuucaucuaagcc

SEQ ID NO: 3183190 - RNA, 19 nt, Artificial Sequence
  Description of Artificial Sequence: Synthetic oligonucleotide
uguggauugaaucaucuug

SEQ ID NO: 3183191 - RNA, 19 nt, Artificial Sequence
  Description of Artificial Sequence: Synthetic oligonucleotide
gauugaaucaucuugcaca

SEQ ID NO: 3183192 - RNA, 19 nt, Artificial Sequence
  Description of Artificial Sequence: Synthetic oligonucleotide
aauaugacagucccauuuc

SEQ ID NO: 3183193 - RNA, 19 nt, Artificial Sequence
  Description of Artificial Sequence: Synthetic oligonucleotide
uuugccuugaagcauagga

SEQ ID NO: 3183194 - RNA, 19 nt, Artificial Sequence
  Description of Artificial Sequence: Synthetic oligonucleotide
uaaauugccucauuaauga

SEQ ID NO: 3183195 - RNA, 19 nt, Artificial Sequence
  Description of Artificial Sequence: Synthetic oligonucleotide
uaguaaaucaccuuuugca

SEQ ID NO: 3183196 - RNA, 19 nt, Artificial Sequence
  Description of Artificial Sequence: Synthetic oligonucleotide
aaaccagcaacucuggucu

SEQ ID NO: 3183197 - RNA, 19 nt, Artificial Sequence
  Description of Artificial Sequence: Synthetic oligonucleotide
guauacuucaaucaagcag

SEQ ID NO: 3183198 - RNA, 19 nt, Artificial Sequence
  Description of Artificial Sequence: Synthetic oligonucleotide
aauggagguaaccaagcag

SEQ ID NO: 3183199 - RNA, 19 nt, Artificial Sequence
  Description of Artificial Sequence: Synthetic oligonucleotide
uguugauaccccuaggugc

SEQ ID NO: 3183200 - RNA, 19 nt, Artificial Sequence
  Description of Artificial Sequence: Synthetic oligonucleotide
uuuugaaacaauagaaaau

SEQ ID NO: 3183201 - RNA, 19 nt, Artificial Sequence
  Description of Artificial Sequence: Synthetic oligonucleotide
ucugggaccaacaugaaau

SEQ ID NO: 3183202 - RNA, 19 nt, Artificial Sequence
  Description of Artificial Sequence: Synthetic oligonucleotide
uuaaugauaacauccuuaa

SEQ ID NO: 3183203 - RNA, 19 nt, Artificial Sequence
  Description of Artificial Sequence: Synthetic oligonucleotide
uauuuuacaguuugagacc

SEQ ID NO: 3183204 - RNA, 19 nt, Artificial Sequence
  Description of Artificial Sequence: Synthetic oligonucleotide
ucaaaaguuucaauccucc

SEQ ID NO: 3183205 - RNA, 19 nt, Artificial Sequence
  Description of Artificial Sequence: Synthetic oligonucleotide
ucaaugauuaauagagucu

SEQ ID NO: 3183206 - RNA, 19 nt, Artificial Sequence
  Description of Artificial Sequence: Synthetic oligonucleotide
aaucaucuugcacagauua

SEQ ID NO: 3183207 - RNA, 19 nt, Artificial Sequence
  Description of Artificial Sequence: Synthetic oligonucleotide
auaaagcugucagugaacc

SEQ ID NO: 3183208 - RNA, 19 nt, Artificial Sequence
  Description of Artificial Sequence: Synthetic oligonucleotide
auugcuggcauccacacca

SEQ ID NO: 3183209 - RNA, 19 nt, Artificial Sequence
  Description of Artificial Sequence: Synthetic oligonucleotide
aauccuccuguugauaccc

SEQ ID NO: 3183210 - RNA, 19 nt, Artificial Sequence
  Description of Artificial Sequence: Synthetic oligonucleotide
acuaaugugcuugacacuc

SEQ ID NO: 3183211 - RNA, 19 nt, Artificial Sequence
  Description of Artificial Sequence: Synthetic oligonucleotide
gauuaauagagucuccuga

SEQ ID NO: 3183212 - RNA, 19 nt, Artificial Sequence
  Description of Artificial Sequence: Synthetic oligonucleotide
auugaaucaucuugcacag

SEQ ID NO: 3183213 - RNA, 19 nt, Artificial Sequence
  Description of Artificial Sequence: Synthetic oligonucleotide
aaugauuaauagagucucc

SEQ ID NO: 3183214 - RNA, 19 nt, Artificial Sequence
  Description of Artificial Sequence: Synthetic oligonucleotide
cuguauacuucaaucaagc

SEQ ID NO: 3183215 - RNA, 19 nt, Artificial Sequence
  Description of Artificial Sequence: Synthetic oligonucleotide
ucuuugaaugcugagauuc

SEQ ID NO: 3183216 - RNA, 19 nt, Artificial Sequence
  Description of Artificial Sequence: Synthetic oligonucleotide
augaaaucucuuuucaucu

SEQ ID NO: 3183217 - RNA, 19 nt, Artificial Sequence
  Description of Artificial Sequence: Synthetic oligonucleotide
uugaaugcugagauucacg

SEQ ID NO: 3183218 - RNA, 19 nt, Artificial Sequence
  Description of Artificial Sequence: Synthetic oligonucleotide
uuuugcauguaaauugccu

SEQ ID NO: 3183219 - RNA, 19 nt, Artificial Sequence
  Description of Artificial Sequence: Synthetic oligonucleotide
uaaaucaccuuuugcaugu

SEQ ID NO: 3183220 - RNA, 19 nt, Artificial Sequence
  Description of Artificial Sequence: Synthetic oligonucleotide
auuuuacaguuugagaccg

SEQ ID NO: 3183221 - RNA, 19 nt, Artificial Sequence
  Description of Artificial Sequence: Synthetic oligonucleotide
uaauaugacagucccauuu

SEQ ID NO: 3183222 - RNA, 19 nt, Artificial Sequence
  Description of Artificial Sequence: Synthetic oligonucleotide
ugaagaguccguaagccac

SEQ ID NO: 3183223 - RNA, 19 nt, Artificial Sequence
  Description of Artificial Sequence: Synthetic oligonucleotide
caugaaaucucuuuucauc

SEQ ID NO: 3183224 - RNA, 19 nt, Artificial Sequence
  Description of Artificial Sequence: Synthetic oligonucleotide
cuaggugcugaauugcugg

SEQ ID NO: 3183225 - RNA, 19 nt, Artificial Sequence
  Description of Artificial Sequence: Synthetic oligonucleotide
aaugcuauguaugccuguc

SEQ ID NO: 3183226 - RNA, 19 nt, Artificial Sequence
  Description of Artificial Sequence: Synthetic oligonucleotide
uuugcauguaaauugccuc

SEQ ID NO: 3183227 - RNA, 19 nt, Artificial Sequence
  Description of Artificial Sequence: Synthetic oligonucleotide
uccuuuaauaugacagucc

SEQ ID NO: 3183228 - RNA, 19 nt, Artificial Sequence
  Description of Artificial Sequence: Synthetic oligonucleotide
aauugcuggcauccacacc

SEQ ID NO: 3183229 - RNA, 19 nt, Artificial Sequence
  Description of Artificial Sequence: Synthetic oligonucleotide
uuaagcuguggauugaauc

SEQ ID NO: 3183230 - RNA, 19 nt, Artificial Sequence
  Description of Artificial Sequence: Synthetic oligonucleotide
acauccuuaaccuuaucca

SEQ ID NO: 3183231 - RNA, 19 nt, Artificial Sequence
  Description of Artificial Sequence: Synthetic oligonucleotide
uuucuggugugccagaauc

SEQ ID NO: 3183232 - RNA, 19 nt, Artificial Sequence
  Description of Artificial Sequence: Synthetic oligonucleotide
auggagguaaccaagcagg

SEQ ID NO: 3183233 - RNA, 19 nt, Artificial Sequence
  Description of Artificial Sequence: Synthetic oligonucleotide
gaaacaacagcuucuguaa

SEQ ID NO: 3183234 - RNA, 19 nt, Artificial Sequence
  Description of Artificial Sequence: Synthetic oligonucleotide
aguaaaucaccuuuugcau

SEQ ID NO: 3183235 - RNA, 19 nt, Artificial Sequence
  Description of Artificial Sequence: Synthetic oligonucleotide
uauaggagcuaggugaacc

SEQ ID NO: 3183236 - RNA, 19 nt, Artificial Sequence
  Description of Artificial Sequence: Synthetic oligonucleotide
ugccuugaagcauaggaug

SEQ ID NO: 3183237 - RNA, 19 nt, Artificial Sequence
  Description of Artificial Sequence: Synthetic oligonucleotide
ugauuaauagagucuccug

SEQ ID NO: 3183238 - RNA, 19 nt, Artificial Sequence
  Description of Artificial Sequence: Synthetic oligonucleotide
aaauggagguaaccaagca

SEQ ID NO: 3183239 - RNA, 19 nt, Artificial Sequence
  Description of Artificial Sequence: Synthetic oligonucleotide
ugaagcauaggaugaaguc

SEQ ID NO: 3183240 - RNA, 19 nt, Artificial Sequence
  Description of Artificial Sequence: Synthetic oligonucleotide
guuucaauccuccuguuga

SEQ ID NO: 3183241 - RNA, 19 nt, Artificial Sequence
  Description of Artificial Sequence: Synthetic oligonucleotide
auuaauagagucuccugau

SEQ ID NO: 3183242 - RNA, 19 nt, Artificial Sequence
  Description of Artificial Sequence: Synthetic oligonucleotide
uaaaccagcaacucugguc

SEQ ID NO: 3183243 - RNA, 19 nt, Artificial Sequence
  Description of Artificial Sequence: Synthetic oligonucleotide
uugcacagauuauaggagc

SEQ ID NO: 3183244 - RNA, 19 nt, Artificial Sequence
  Description of Artificial Sequence: Synthetic oligonucleotide
guaaaucaccuuuugcaug

SEQ ID NO: 3183245 - RNA, 19 nt, Artificial Sequence
  Description of Artificial Sequence: Synthetic oligonucleotide
uugaagcauaggaugaagu

SEQ ID NO: 3183246 - RNA, 19 nt, Artificial Sequence
  Description of Artificial Sequence: Synthetic oligonucleotide
guaguaaaucaccuuuugc

SEQ ID NO: 3183247 - RNA, 19 nt, Artificial Sequence
  Description of Artificial Sequence: Synthetic oligonucleotide
uaugacagucccauuucug

SEQ ID NO: 3183248 - RNA, 19 nt, Artificial Sequence
  Description of Artificial Sequence: Synthetic oligonucleotide
ucaauaaagcugucaguga

SEQ ID NO: 3183249 - RNA, 19 nt, Artificial Sequence
  Description of Artificial Sequence: Synthetic oligonucleotide
ugauguggcuuucuggugu

SEQ ID NO: 3183250 - RNA, 19 nt, Artificial Sequence
  Description of Artificial Sequence: Synthetic oligonucleotide
aacaacagcuucuguaaau

SEQ ID NO: 3183251 - RNA, 19 nt, Artificial Sequence
  Description of Artificial Sequence: Synthetic oligonucleotide
cuuaaaccagcaacucugg

SEQ ID NO: 3183252 - RNA, 19 nt, Artificial Sequence
  Description of Artificial Sequence: Synthetic oligonucleotide
caaugauuaauagagucuc

SEQ ID NO: 3183253 - RNA, 19 nt, Artificial Sequence
  Description of Artificial Sequence: Synthetic oligonucleotide
gacuacuugggauaucuca

SEQ ID NO: 3183254 - RNA, 19 nt, Artificial Sequence
  Description of Artificial Sequence: Synthetic oligonucleotide
uguauacuucaaucaagca

SEQ ID NO: 3183255 - RNA, 19 nt, Artificial Sequence
  Description of Artificial Sequence: Synthetic oligonucleotide
uggaaagcauuuuauuccu

SEQ ID NO: 3183256 - RNA, 19 nt, Artificial Sequence
  Description of Artificial Sequence: Synthetic oligonucleotide
ucaucuaagcccucuuggc

SEQ ID NO: 3183257 - RNA, 19 nt, Artificial Sequence
  Description of Artificial Sequence: Synthetic oligonucleotide
uccuuaaccuuauccaucu

SEQ ID NO: 3183258 - RNA, 19 nt, Artificial Sequence
  Description of Artificial Sequence: Synthetic oligonucleotide
auccuuuaauaugacaguc

SEQ ID NO: 3183259 - RNA, 19 nt, Artificial Sequence
  Description of Artificial Sequence: Synthetic oligonucleotide
uccuguauacuucaaucaa

SEQ ID NO: 3183260 - RNA, 19 nt, Artificial Sequence
  Description of Artificial Sequence: Synthetic oligonucleotide
uugcauguaaauugccuca

SEQ ID NO: 3183261 - RNA, 19 nt, Artificial Sequence
  Description of Artificial Sequence: Synthetic oligonucleotide
gaaugcugagauucacggg

SEQ ID NO: 3183262 - RNA, 19 nt, Artificial Sequence
  Description of Artificial Sequence: Synthetic oligonucleotide
gcauuuuauuccuuaaacc

SEQ ID NO: 3183263 - RNA, 19 nt, Artificial Sequence
  Description of Artificial Sequence: Synthetic oligonucleotide
uuaauagagucuccugauc

SEQ ID NO: 3183264 - RNA, 19 nt, Artificial Sequence
  Description of Artificial Sequence: Synthetic oligonucleotide
gaguccguaagccaccagc

SEQ ID NO: 3183265 - RNA, 19 nt, Artificial Sequence
  Description of Artificial Sequence: Synthetic oligonucleotide
uuugagaccgugccuugcc

SEQ ID NO: 3183266 - RNA, 19 nt, Artificial Sequence
  Description of Artificial Sequence: Synthetic oligonucleotide
aagacaaugcuggucuuug

SEQ ID NO: 3183267 - RNA, 19 nt, Artificial Sequence
  Description of Artificial Sequence: Synthetic oligonucleotide
ccaagcaggccuaugaugg

SEQ ID NO: 3183268 - RNA, 19 nt, Artificial Sequence
  Description of Artificial Sequence: Synthetic oligonucleotide
acaccaucccuaguuaagc

SEQ ID NO: 3183269 - RNA, 19 nt, Artificial Sequence
  Description of Artificial Sequence: Synthetic oligonucleotide
aagugagucaaugauuaau

SEQ ID NO: 3183270 - RNA, 19 nt, Artificial Sequence
  Description of Artificial Sequence: Synthetic oligonucleotide
uacuugggauaucucaugu

SEQ ID NO: 3183271 - RNA, 19 nt, Artificial Sequence
  Description of Artificial Sequence: Synthetic oligonucleotide
aaagcagcuuuugaaacaa

SEQ ID NO: 3183272 - RNA, 19 nt, Artificial Sequence
  Description of Artificial Sequence: Synthetic oligonucleotide
gaaccaggcgguuacggug

SEQ ID NO: 3183273 - RNA, 19 nt, Artificial Sequence
  Description of Artificial Sequence: Synthetic oligonucleotide
aauaagaugcagagguagu

SEQ ID NO: 3183274 - RNA, 19 nt, Artificial Sequence
  Description of Artificial Sequence: Synthetic oligonucleotide
agcaacucuggucuaggag

SEQ ID NO: 3183275 - RNA, 19 nt, Artificial Sequence
  Description of Artificial Sequence: Synthetic oligonucleotide
gaugccaagugagucaaug

SEQ ID NO: 3183276 - RNA, 19 nt, Artificial Sequence
  Description of Artificial Sequence: Synthetic oligonucleotide
caucuggaugccaagugag

SEQ ID NO: 3183277 - RNA, 19 nt, Artificial Sequence
  Description of Artificial Sequence: Synthetic oligonucleotide
uuacaguuugagaccgugc

SEQ ID NO: 3183278 - RNA, 19 nt, Artificial Sequence
  Description of Artificial Sequence: Synthetic oligonucleotide
aaaugcuauguaugccugu

SEQ ID NO: 3183279 - RNA, 19 nt, Artificial Sequence
  Description of Artificial Sequence: Synthetic oligonucleotide
caucuaagcccucuuggcc

SEQ ID NO: 3183280 - RNA, 19 nt, Artificial Sequence
  Description of Artificial Sequence: Synthetic oligonucleotide
auuaaugauaacauccuua

SEQ ID NO: 3183281 - RNA, 19 nt, Artificial Sequence
  Description of Artificial Sequence: Synthetic oligonucleotide
ugcuauguaugccugucaa

SEQ ID NO: 3183282 - RNA, 19 nt, Artificial Sequence
  Description of Artificial Sequence: Synthetic oligonucleotide
ugccuugccauguagccca

SEQ ID NO: 3183283 - RNA, 19 nt, Artificial Sequence
  Description of Artificial Sequence: Synthetic oligonucleotide
aucuaagcccucuuggcca

SEQ ID NO: 3183284 - RNA, 19 nt, Artificial Sequence
  Description of Artificial Sequence: Synthetic oligonucleotide
uuaguuucaggacagucag

SEQ ID NO: 3183285 - RNA, 19 nt, Artificial Sequence
  Description of Artificial Sequence: Synthetic oligonucleotide
agaguuccaaaguaagacc

SEQ ID NO: 3183286 - RNA, 19 nt, Artificial Sequence
  Description of Artificial Sequence: Synthetic oligonucleotide
caaaguaagaccuugucuc

SEQ ID NO: 3183287 - RNA, 19 nt, Artificial Sequence
  Description of Artificial Sequence: Synthetic oligonucleotide
uacagaguuaguuucagga

SEQ ID NO: 3183288 - RNA, 19 nt, Artificial Sequence
  Description of Artificial Sequence: Synthetic oligonucleotide
uuucaggacagucagaguu

SEQ ID NO: 3183289 - RNA, 19 nt, Artificial Sequence
  Description of Artificial Sequence: Synthetic oligonucleotide
uuugaggcuagccuggucu

SEQ ID NO: 3183290 - RNA, 19 nt, Artificial Sequence
  Description of Artificial Sequence: Synthetic oligonucleotide
acagaguuaguuucaggac

SEQ ID NO: 3183291 - RNA, 19 nt, Artificial Sequence
  Description of Artificial Sequence: Synthetic oligonucleotide
ugaguuugaggcuagccug

SEQ ID NO: 3183292 - RNA, 19 nt, Artificial Sequence
  Description of Artificial Sequence: Synthetic oligonucleotide
uuuagucccagcacuuggg

SEQ ID NO: 3183293 - RNA, 19 nt, Artificial Sequence
  Description of Artificial Sequence: Synthetic oligonucleotide
aaaguaagaccuugucuca

SEQ ID NO: 3183294 - RNA, 19 nt, Artificial Sequence
  Description of Artificial Sequence: Synthetic oligonucleotide
ggaucucugaguuugaggc

SEQ ID NO: 3183295 - RNA, 19 nt, Artificial Sequence
  Description of Artificial Sequence: Synthetic oligonucleotide
aguuucaggacagucagag

SEQ ID NO: 3183296 - RNA, 19 nt, Artificial Sequence
  Description of Artificial Sequence: Synthetic oligonucleotide
agucccagcacuugggagg

SEQ ID NO: 3183297 - RNA, 19 nt, Artificial Sequence
  Description of Artificial Sequence: Synthetic oligonucleotide
gacagucagaguuccaaag

SEQ ID NO: 3183298 - RNA, 19 nt, Artificial Sequence
  Description of Artificial Sequence: Synthetic oligonucleotide
ucagaguuccaaaguaaga

SEQ ID NO: 3183299 - RNA, 19 nt, Artificial Sequence
  Description of Artificial Sequence: Synthetic oligonucleotide
uggaucucugaguuugagg

SEQ ID NO: 3183300 - RNA, 19 nt, Artificial Sequence
  Description of Artificial Sequence: Synthetic oligonucleotide
acaccuuuagucccagcac

SEQ ID NO: 3183301 - RNA, 19 nt, Artificial Sequence
  Description of Artificial Sequence: Synthetic oligonucleotide
cuuuagucccagcacuugg

SEQ ID NO: 3183302 - RNA, 19 nt, Artificial Sequence
  Description of Artificial Sequence: Synthetic oligonucleotide
aguuaguuucaggacaguc

SEQ ID NO: 3183303 - RNA, 19 nt, Artificial Sequence
  Description of Artificial Sequence: Synthetic oligonucleotide
cagaguuccaaaguaagac

SEQ ID NO: 3183304 - RNA, 19 nt, Artificial Sequence
  Description of Artificial Sequence: Synthetic oligonucleotide
uggcacacaccuuuagucc

SEQ ID NO: 3183305 - RNA, 19 nt, Artificial Sequence
  Description of Artificial Sequence: Synthetic oligonucleotide
uccaaaguaagaccuuguc

SEQ ID NO: 3183306 - RNA, 19 nt, Artificial Sequence
  Description of Artificial Sequence: Synthetic oligonucleotide
ucuacagaguuaguuucag

SEQ ID NO: 3183307 - RNA, 19 nt, Artificial Sequence
  Description of Artificial Sequence: Synthetic oligonucleotide
acagucagaguuccaaagu

SEQ ID NO: 3183308 - RNA, 19 nt, Artificial Sequence
  Description of Artificial Sequence: Synthetic oligonucleotide
acuugggaggcagaggccg

SEQ ID NO: 3183309 - RNA, 19 nt, Artificial Sequence
  Description of Artificial Sequence: Synthetic oligonucleotide
agaguuaguuucaggacag

SEQ ID NO: 3183310 - RNA, 19 nt, Artificial Sequence
  Description of Artificial Sequence: Synthetic oligonucleotide
gucagaguuccaaaguaag

SEQ ID NO: 3183311 - RNA, 19 nt, Artificial Sequence
  Description of Artificial Sequence: Synthetic oligonucleotide
guuaguuucaggacaguca

SEQ ID NO: 3183312 - RNA, 19 nt, Artificial Sequence
  Description of Artificial Sequence: Synthetic oligonucleotide
uuagucccagcacuuggga

SEQ ID NO: 3183313 - RNA, 19 nt, Artificial Sequence
  Description of Artificial Sequence: Synthetic oligonucleotide
ucugaguuugaggcuagcc

SEQ ID NO: 3183314 - RNA, 19 nt, Artificial Sequence
  Description of Artificial Sequence: Synthetic oligonucleotide
uucaggacagucagaguuc

SEQ ID NO: 3183315 - RNA, 19 nt, Artificial Sequence
  Description of Artificial Sequence: Synthetic oligonucleotide
cagaguuaguuucaggaca

SEQ ID NO: 3183316 - RNA, 19 nt, Artificial Sequence
  Description of Artificial Sequence: Synthetic oligonucleotide
cuacagaguuaguuucagg

SEQ ID NO: 3183317 - RNA, 19 nt, Artificial Sequence
  Description of Artificial Sequence: Synthetic oligonucleotide
gcuagccuggucuacagag

SEQ ID NO: 3183318 - RNA, 19 nt, Artificial Sequence
  Description of Artificial Sequence: Synthetic oligonucleotide
uggucuacagaguuaguuu

SEQ ID NO: 3183319 - RNA, 19 nt, Artificial Sequence
  Description of Artificial Sequence: Synthetic oligonucleotide
guggcacacaccuuuaguc

SEQ ID NO: 3183320 - RNA, 19 nt, Artificial Sequence
  Description of Artificial Sequence: Synthetic oligonucleotide
gaguuugaggcuagccugg

SEQ ID NO: 3183321 - RNA, 19 nt, Artificial Sequence
  Description of Artificial Sequence: Synthetic oligonucleotide
uuccaaaguaagaccuugu

SEQ ID NO: 3183322 - RNA, 19 nt, Artificial Sequence
  Description of Artificial Sequence: Synthetic oligonucleotide
guuccaaaguaagaccuug

SEQ ID NO: 3183323 - RNA, 19 nt, Artificial Sequence
  Description of Artificial Sequence: Synthetic oligonucleotide
ucaggacagucagaguucc

SEQ ID NO: 3183324 - RNA, 19 nt, Artificial Sequence
  Description of Artificial Sequence: Synthetic oligonucleotide
uagucccagcacuugggag

SEQ ID NO: 3183325 - RNA, 19 nt, Artificial Sequence
  Description of Artificial Sequence: Synthetic oligonucleotide
gcacuugggaggcagaggc

SEQ ID NO: 3183326 - RNA, 19 nt, Artificial Sequence
  Description of Artificial Sequence: Synthetic oligonucleotide
ucucugaguuugaggcuag

SEQ ID NO: 3183327 - RNA, 19 nt, Artificial Sequence
  Description of Artificial Sequence: Synthetic oligonucleotide
cacaccuuuagucccagca

SEQ ID NO: 3183328 - RNA, 19 nt, Artificial Sequence
  Description of Artificial Sequence: Synthetic oligonucleotide
ggucuacagaguuaguuuc

SEQ ID NO: 3183329 - RNA, 19 nt, Artificial Sequence
  Description of Artificial Sequence: Synthetic oligonucleotide
aguaagaccuugucucaaa

SEQ ID NO: 3183330 - RNA, 19 nt, Artificial Sequence
  Description of Artificial Sequence: Synthetic oligonucleotide
gaguuccaaaguaagaccu

SEQ ID NO: 3183331 - RNA, 19 nt, Artificial Sequence
  Description of Artificial Sequence: Synthetic oligonucleotide
uagccuggucuacagaguu

SEQ ID NO: 3183332 - RNA, 19 nt, Artificial Sequence
  Description of Artificial Sequence: Synthetic oligonucleotide
ugguggcacacaccuuuag

SEQ ID NO: 3183333 - RNA, 19 nt, Artificial Sequence
  Description of Artificial Sequence: Synthetic oligonucleotide
aaguaagaccuugucucaa

SEQ ID NO: 3183334 - RNA, 19 nt, Artificial Sequence
  Description of Artificial Sequence: Synthetic oligonucleotide
ggcacacaccuuuaguccc

SEQ ID NO: 3183335 - RNA, 19 nt, Artificial Sequence
  Description of Artificial Sequence: Synthetic oligonucleotide
aggccgguggaucucugag

SEQ ID NO: 3183336 - RNA, 19 nt, Artificial Sequence
  Description of Artificial Sequence: Synthetic oligonucleotide
uaguuucaggacagucaga

SEQ ID NO: 3183337 - RNA, 19 nt, Artificial Sequence
  Description of Artificial Sequence: Synthetic oligonucleotide
cuugggaggcagaggccgg

SEQ ID NO: 3183338 - RNA, 19 nt, Artificial Sequence
  Description of Artificial Sequence: Synthetic oligonucleotide
aggacagucagaguuccaa

SEQ ID NO: 3183339 - RNA, 19 nt, Artificial Sequence
  Description of Artificial Sequence: Synthetic oligonucleotide
guaagaccuugucucaaaa

SEQ ID NO: 3183340 - RNA, 19 nt, Artificial Sequence
  Description of Artificial Sequence: Synthetic oligonucleotide
acacaccuuuagucccagc

SEQ ID NO: 3183341 - RNA, 19 nt, Artificial Sequence
  Description of Artificial Sequence: Synthetic oligonucleotide
agucagaguuccaaaguaa

SEQ ID NO: 3183342 - RNA, 19 nt, Artificial Sequence
  Description of Artificial Sequence: Synthetic oligonucleotide
agcacuugggaggcagagg

SEQ ID NO: 3183343 - RNA, 19 nt, Artificial Sequence
  Description of Artificial Sequence: Synthetic oligonucleotide
aucucugaguuugaggcua

SEQ ID NO: 3183344 - RNA, 19 nt, Artificial Sequence
  Description of Artificial Sequence: Synthetic oligonucleotide
aggcuagccuggucuacag

SEQ ID NO: 3183345 - RNA, 19 nt, Artificial Sequence
  Description of Artificial Sequence: Synthetic oligonucleotide
cugaguuugaggcuagccu

SEQ ID NO: 3183346 - RNA, 19 nt, Artificial Sequence
  Description of Artificial Sequence: Synthetic oligonucleotide
cagucagaguuccaaagua

SEQ ID NO: 3183347 - RNA, 19 nt, Artificial Sequence
  Description of Artificial Sequence: Synthetic oligonucleotide
cacuugggaggcagaggcc

SEQ ID NO: 3183348 - RNA, 19 nt, Artificial Sequence
  Description of Artificial Sequence: Synthetic oligonucleotide
gccuggucuacagaguuag

SEQ ID NO: 3183349 - RNA, 19 nt, Artificial Sequence
  Description of Artificial Sequence: Synthetic oligonucleotide
guggaucucugaguuugag

SEQ ID NO: 3183350 - RNA, 19 nt, Artificial Sequence
  Description of Artificial Sequence: Synthetic oligonucleotide
uugaggcuagccuggucua

SEQ ID NO: 3183351 - RNA, 19 nt, Artificial Sequence
  Description of Artificial Sequence: Synthetic oligonucleotide
gaucucugaguuugaggcu

SEQ ID NO: 3183352 - RNA, 19 nt, Artificial Sequence
  Description of Artificial Sequence: Synthetic oligonucleotide
gucuacagaguuaguuuca

SEQ ID NO: 3183353 - RNA, 19 nt, Artificial Sequence
  Description of Artificial Sequence: Synthetic oligonucleotide
aggcagaggccgguggauc

SEQ ID NO: 3183354 - RNA, 19 nt, Artificial Sequence
  Description of Artificial Sequence: Synthetic oligonucleotide
cagcacuugggaggcagag

SEQ ID NO: 3183355 - RNA, 19 nt, Artificial Sequence
  Description of Artificial Sequence: Synthetic oligonucleotide
ugaggcuagccuggucuac

SEQ ID NO: 3183356 - RNA, 19 nt, Artificial Sequence
  Description of Artificial Sequence: Synthetic oligonucleotide
gucccagcacuugggaggc

SEQ ID NO: 3183357 - RNA, 19 nt, Artificial Sequence
  Description of Artificial Sequence: Synthetic oligonucleotide
gaggcuagccuggucuaca

SEQ ID NO: 3183358 - RNA, 19 nt, Artificial Sequence
  Description of Artificial Sequence: Synthetic oligonucleotide
caccuuuagucccagcacu

SEQ ID NO: 3183359 - RNA, 19 nt, Artificial Sequence
  Description of Artificial Sequence: Synthetic oligonucleotide
aguuccaaaguaagaccuu

SEQ ID NO: 3183360 - RNA, 19 nt, Artificial Sequence
  Description of Artificial Sequence: Synthetic oligonucleotide
guuugaggcuagccugguc

SEQ ID NO: 3183361 - RNA, 19 nt, Artificial Sequence
  Description of Artificial Sequence: Synthetic oligonucleotide
aguuugaggcuagccuggu

SEQ ID NO: 3183362 - RNA, 19 nt, Artificial Sequence
  Description of Artificial Sequence: Synthetic oligonucleotide
gggaggcagaggccggugg

SEQ ID NO: 3183363 - RNA, 19 nt, Artificial Sequence
  Description of Artificial Sequence: Synthetic oligonucleotide
ccaaaguaagaccuugucu

SEQ ID NO: 3183364 - RNA, 19 nt, Artificial Sequence
  Description of Artificial Sequence: Synthetic oligonucleotide
gaggccgguggaucucuga

SEQ ID NO: 3183365 - RNA, 19 nt, Artificial Sequence
  Description of Artificial Sequence: Synthetic oligonucleotide
cacacaccuuuagucccag

SEQ ID NO: 3183366 - RNA, 19 nt, Artificial Sequence
  Description of Artificial Sequence: Synthetic oligonucleotide
cucugaguuugaggcuagc

SEQ ID NO: 3183367 - RNA, 19 nt, Artificial Sequence
  Description of Artificial Sequence: Synthetic oligonucleotide
uugggaggcagaggccggu

SEQ ID NO: 3183368 - RNA, 19 nt, Artificial Sequence
  Description of Artificial Sequence: Synthetic oligonucleotide
ggacagucagaguuccaaa

SEQ ID NO: 3183369 - RNA, 19 nt, Artificial Sequence
  Description of Artificial Sequence: Synthetic oligonucleotide
accuuuagucccagcacuu

SEQ ID NO: 3183370 - RNA, 19 nt, Artificial Sequence
  Description of Artificial Sequence: Synthetic oligonucleotide
guuucaggacagucagagu

SEQ ID NO: 3183371 - RNA, 19 nt, Artificial Sequence
  Description of Artificial Sequence: Synthetic oligonucleotide
ugggaggcagaggccggug

SEQ ID NO: 3183372 - RNA, 19 nt, Artificial Sequence
  Description of Artificial Sequence: Synthetic oligonucleotide
cuagccuggucuacagagu

SEQ ID NO: 3183373 - RNA, 19 nt, Artificial Sequence
  Description of Artificial Sequence: Synthetic oligonucleotide
cuggucuacagaguuaguu

SEQ ID NO: 3183374 - RNA, 19 nt, Artificial Sequence
  Description of Artificial Sequence: Synthetic oligonucleotide
gguggcacacaccuuuagu

SEQ ID NO: 3183375 - RNA, 19 nt, Artificial Sequence
  Description of Artificial Sequence: Synthetic oligonucleotide
cgguggaucucugaguuug

SEQ ID NO: 3183376 - RNA, 19 nt, Artificial Sequence
  Description of Artificial Sequence: Synthetic oligonucleotide
ggaggcagaggccggugga

SEQ ID NO: 3183377 - RNA, 19 nt, Artificial Sequence
  Description of Artificial Sequence: Synthetic oligonucleotide
ccuuuagucccagcacuug

SEQ ID NO: 3183378 - RNA, 19 nt, Artificial Sequence
  Description of Artificial Sequence: Synthetic oligonucleotide
cccagcacuugggaggcag

SEQ ID NO: 3183379 - RNA, 19 nt, Artificial Sequence
  Description of Artificial Sequence: Synthetic oligonucleotide
caggacagucagaguucca

SEQ ID NO: 3183380 - RNA, 19 nt, Artificial Sequence
  Description of Artificial Sequence: Synthetic oligonucleotide
gaguuaguuucaggacagu

SEQ ID NO: 3183381 - RNA, 19 nt, Artificial Sequence
  Description of Artificial Sequence: Synthetic oligonucleotide
ggcagaggccgguggaucu

SEQ ID NO: 3183382 - RNA, 19 nt, Artificial Sequence
  Description of Artificial Sequence: Synthetic oligonucleotide
ggcuagccuggucuacaga

SEQ ID NO: 3183383 - RNA, 19 nt, Artificial Sequence
  Description of Artificial Sequence: Synthetic oligonucleotide
gccgguggaucucugaguu

SEQ ID NO: 3183384 - RNA, 19 nt, Artificial Sequence
  Description of Artificial Sequence: Synthetic oligonucleotide
augaacaugaaucuguacc

SEQ ID NO: 3183385 - RNA, 19 nt, Artificial Sequence
  Description of Artificial Sequence: Synthetic oligonucleotide
ugucaaaggguucugaagg

SEQ ID NO: 3183386 - RNA, 19 nt, Artificial Sequence
  Description of Artificial Sequence: Synthetic oligonucleotide
cuuuauauugaauaguuug

SEQ ID NO: 3183387 - RNA, 19 nt, Artificial Sequence
  Description of Artificial Sequence: Synthetic oligonucleotide
uuuauauugaauaguuugc

SEQ ID NO: 3183388 - RNA, 19 nt, Artificial Sequence
  Description of Artificial Sequence: Synthetic oligonucleotide
uccaauggcaucuuuaagg

SEQ ID NO: 3183389 - RNA, 19 nt, Artificial Sequence
  Description of Artificial Sequence: Synthetic oligonucleotide
aaaauugcugucuuugaag

SEQ ID NO: 3183390 - RNA, 19 nt, Artificial Sequence
  Description of Artificial Sequence: Synthetic oligonucleotide
uuacauuccacuauuacac

SEQ ID NO: 3183391 - RNA, 19 nt, Artificial Sequence
  Description of Artificial Sequence: Synthetic oligonucleotide
gaauaguuugccuucaucc

SEQ ID NO: 3183392 - RNA, 19 nt, Artificial Sequence
  Description of Artificial Sequence: Synthetic oligonucleotide
aacaugaaucuguaccugc

SEQ ID NO: 3183393 - RNA, 19 nt, Artificial Sequence
  Description of Artificial Sequence: Synthetic oligonucleotide
cauacuucaagauaguuuc

SEQ ID NO: 3183394 - RNA, 19 nt, Artificial Sequence
  Description of Artificial Sequence: Synthetic oligonucleotide
uccacuauuacaccuuugg

SEQ ID NO: 3183395 - RNA, 19 nt, Artificial Sequence
  Description of Artificial Sequence: Synthetic oligonucleotide
acagcugugaccuugaccu

SEQ ID NO: 3183396 - RNA, 19 nt, Artificial Sequence
  Description of Artificial Sequence: Synthetic oligonucleotide
ucuuugaagacacaguggu

SEQ ID NO: 3183397 - RNA, 19 nt, Artificial Sequence
  Description of Artificial Sequence: Synthetic oligonucleotide
ucaucuuuauauugaauag

SEQ ID NO: 3183398 - RNA, 19 nt, Artificial Sequence
  Description of Artificial Sequence: Synthetic oligonucleotide
gagauuuuguugcagcugg

SEQ ID NO: 3183399 - RNA, 19 nt, Artificial Sequence
  Description of Artificial Sequence: Synthetic oligonucleotide
auauaugucuuuaccaucc

SEQ ID NO: 3183400 - RNA, 19 nt, Artificial Sequence
  Description of Artificial Sequence: Synthetic oligonucleotide
aaauugcugucuuugaaga

SEQ ID NO: 3183401 - RNA, 19 nt, Artificial Sequence
  Description of Artificial Sequence: Synthetic oligonucleotide
aaggaguucuguccguucc

SEQ ID NO: 3183402 - RNA, 19 nt, Artificial Sequence
  Description of Artificial Sequence: Synthetic oligonucleotide
uuuuguugcagcuggaaug

SEQ ID NO: 3183403 - RNA, 19 nt, Artificial Sequence
  Description of Artificial Sequence: Synthetic oligonucleotide
agugguauggcccaucauc

SEQ ID NO: 3183404 - RNA, 19 nt, Artificial Sequence
  Description of Artificial Sequence: Synthetic oligonucleotide
aaucuguaccugcaagccc

SEQ ID NO: 3183405 - RNA, 19 nt, Artificial Sequence
  Description of Artificial Sequence: Synthetic oligonucleotide
aaccuccagaguuacauuc

SEQ ID NO: 3183406 - RNA, 19 nt, Artificial Sequence
  Description of Artificial Sequence: Synthetic oligonucleotide
acaccuuugguauuggagg

SEQ ID NO: 3183407 - RNA, 19 nt, Artificial Sequence
  Description of Artificial Sequence: Synthetic oligonucleotide
auaacugacagcugaguuc

SEQ ID NO: 3183408 - RNA, 19 nt, Artificial Sequence
  Description of Artificial Sequence: Synthetic oligonucleotide
acuauuacaccuuugguau

SEQ ID NO: 3183409 - RNA, 19 nt, Artificial Sequence
  Description of Artificial Sequence: Synthetic oligonucleotide
auaguuucuccauauaugu

SEQ ID NO: 3183410 - RNA, 19 nt, Artificial Sequence
  Description of Artificial Sequence: Synthetic oligonucleotide
aagguuuccacccaaugga

SEQ ID NO: 3183411 - RNA, 19 nt, Artificial Sequence
  Description of Artificial Sequence: Synthetic oligonucleotide
aguuacauuccacuauuac

SEQ ID NO: 3183412 - RNA, 19 nt, Artificial Sequence
  Description of Artificial Sequence: Synthetic oligonucleotide
aguuucuccauauaugucu

SEQ ID NO: 3183413 - RNA, 19 nt, Artificial Sequence
  Description of Artificial Sequence: Synthetic oligonucleotide
uaugucuuuaccaucccug

SEQ ID NO: 3183414 - RNA, 19 nt, Artificial Sequence
  Description of Artificial Sequence: Synthetic oligonucleotide
aauaguuugccuucauccu

SEQ ID NO: 3183415 - RNA, 19 nt, Artificial Sequence
  Description of Artificial Sequence: Synthetic oligonucleotide
ucuaaugagaagaaucauc

SEQ ID NO: 3183416 - RNA, 19 nt, Artificial Sequence
  Description of Artificial Sequence: Synthetic oligonucleotide
ugugaugggaauaacugac

SEQ ID NO: 3183417 - RNA, 19 nt, Artificial Sequence
  Description of Artificial Sequence: Synthetic oligonucleotide
ugguauuggaggaugaaca

SEQ ID NO: 3183418 - RNA, 19 nt, Artificial Sequence
  Description of Artificial Sequence: Synthetic oligonucleotide
aauggagccacaacuggcc

SEQ ID NO: 3183419 - RNA, 19 nt, Artificial Sequence
  Description of Artificial Sequence: Synthetic oligonucleotide
aagacacagugguauggcc

SEQ ID NO: 3183420 - RNA, 19 nt, Artificial Sequence
  Description of Artificial Sequence: Synthetic oligonucleotide
uccauauaugucuuuacca

SEQ ID NO: 3183421 - RNA, 19 nt, Artificial Sequence
  Description of Artificial Sequence: Synthetic oligonucleotide
aauugcugucuuugaagac

SEQ ID NO: 3183422 - RNA, 19 nt, Artificial Sequence
  Description of Artificial Sequence: Synthetic oligonucleotide
ugugaugugcucuucauaa

SEQ ID NO: 3183423 - RNA, 19 nt, Artificial Sequence
  Description of Artificial Sequence: Synthetic oligonucleotide
uuauauugaauaguuugcc

SEQ ID NO: 3183424 - RNA, 19 nt, Artificial Sequence
  Description of Artificial Sequence: Synthetic oligonucleotide
aauggcaucuuuaaggagu

SEQ ID NO: 3183425 - RNA, 19 nt, Artificial Sequence
  Description of Artificial Sequence: Synthetic oligonucleotide
uguauaauggugccggaac

SEQ ID NO: 3183426 - RNA, 19 nt, Artificial Sequence
  Description of Artificial Sequence: Synthetic oligonucleotide
ugaugggaauaacugacag

SEQ ID NO: 3183427 - RNA, 19 nt, Artificial Sequence
  Description of Artificial Sequence: Synthetic oligonucleotide
ugaacaugaaucuguaccu

SEQ ID NO: 3183428 - RNA, 19 nt, Artificial Sequence
  Description of Artificial Sequence: Synthetic oligonucleotide
uuaaagauccugaggguca

SEQ ID NO: 3183429 - RNA, 19 nt, Artificial Sequence
  Description of Artificial Sequence: Synthetic oligonucleotide
ucugaagguagcaagugac

SEQ ID NO: 3183430 - RNA, 19 nt, Artificial Sequence
  Description of Artificial Sequence: Synthetic oligonucleotide
uacaccuuugguauuggag

SEQ ID NO: 3183431 - RNA, 19 nt, Artificial Sequence
  Description of Artificial Sequence: Synthetic oligonucleotide
auuaaagauccugaggguc

SEQ ID NO: 3183432 - RNA, 19 nt, Artificial Sequence
  Description of Artificial Sequence: Synthetic oligonucleotide
ucuuccuucuccaauggca

SEQ ID NO: 3183433 - RNA, 19 nt, Artificial Sequence
  Description of Artificial Sequence: Synthetic oligonucleotide
uggcccaucaucaucaaca

SEQ ID NO: 3183434 - RNA, 19 nt, Artificial Sequence
  Description of Artificial Sequence: Synthetic oligonucleotide
augggaauaacugacagcu

SEQ ID NO: 3183435 - RNA, 19 nt, Artificial Sequence
  Description of Artificial Sequence: Synthetic oligonucleotide
ugaaucuguaccugcaagc

SEQ ID NO: 3183436 - RNA, 19 nt, Artificial Sequence
  Description of Artificial Sequence: Synthetic oligonucleotide
uauauugaauaguuugccu

SEQ ID NO: 3183437 - RNA, 19 nt, Artificial Sequence
  Description of Artificial Sequence: Synthetic oligonucleotide
gauaguuucuccauauaug

SEQ ID NO: 3183438 - RNA, 19 nt, Artificial Sequence
  Description of Artificial Sequence: Synthetic oligonucleotide
gaaccaacgaaucuccaug

SEQ ID NO: 3183439 - RNA, 19 nt, Artificial Sequence
  Description of Artificial Sequence: Synthetic oligonucleotide
guagcaagugacuuuuggg

SEQ ID NO: 3183440 - RNA, 19 nt, Artificial Sequence
  Description of Artificial Sequence: Synthetic oligonucleotide
uuugaagacacagugguau

SEQ ID NO: 3183441 - RNA, 19 nt, Artificial Sequence
  Description of Artificial Sequence: Synthetic oligonucleotide
ugugcugugcaucuuguga

SEQ ID NO: 3183442 - RNA, 19 nt, Artificial Sequence
  Description of Artificial Sequence: Synthetic oligonucleotide
ucuugugaugggaauaacu

SEQ ID NO: 3183443 - RNA, 19 nt, Artificial Sequence
  Description of Artificial Sequence: Synthetic oligonucleotide
uguaccugcaagcccacag

SEQ ID NO: 3183444 - RNA, 19 nt, Artificial Sequence
  Description of Artificial Sequence: Synthetic oligonucleotide
ucacauuaaagauccugag

SEQ ID NO: 3183445 - RNA, 19 nt, Artificial Sequence
  Description of Artificial Sequence: Synthetic oligonucleotide
cacauuaaagauccugagg

SEQ ID NO: 3183446 - RNA, 19 nt, Artificial Sequence
  Description of Artificial Sequence: Synthetic oligonucleotide
aauggugccggaaccaacg

SEQ ID NO: 3183447 - RNA, 19 nt, Artificial Sequence
  Description of Artificial Sequence: Synthetic oligonucleotide
caagguuuccacccaaugg

SEQ ID NO: 3183448 - RNA, 19 nt, Artificial Sequence
  Description of Artificial Sequence: Synthetic oligonucleotide
gaguucaagguuuccaccc

SEQ ID NO: 3183449 - RNA, 19 nt, Artificial Sequence
  Description of Artificial Sequence: Synthetic oligonucleotide
uacuggcuguguauaaugg

SEQ ID NO: 3183450 - RNA, 19 nt, Artificial Sequence
  Description of Artificial Sequence: Synthetic oligonucleotide
uuccaugagaggcuuuggg

SEQ ID NO: 3183451 - RNA, 19 nt, Artificial Sequence
  Description of Artificial Sequence: Synthetic oligonucleotide
auauugaauaguuugccuu

SEQ ID NO: 3183452 - RNA, 19 nt, Artificial Sequence
  Description of Artificial Sequence: Synthetic oligonucleotide
uauugaauaguuugccuuc

SEQ ID NO: 3183453 - RNA, 19 nt, Artificial Sequence
  Description of Artificial Sequence: Synthetic oligonucleotide
uugggaaccaaccuccaga

SEQ ID NO: 3183454 - RNA, 19 nt, Artificial Sequence
  Description of Artificial Sequence: Synthetic oligonucleotide
acugucucuaaugagaaga

SEQ ID NO: 3183455 - RNA, 19 nt, Artificial Sequence
  Description of Artificial Sequence: Synthetic oligonucleotide
cugacagcugaguucaagg

SEQ ID NO: 3183456 - RNA, 19 nt, Artificial Sequence
  Description of Artificial Sequence: Synthetic oligonucleotide
uaacugacagcugaguuca

SEQ ID NO: 3183457 - RNA, 19 nt, Artificial Sequence
  Description of Artificial Sequence: Synthetic oligonucleotide
ugaugugcucuucauaaaa

SEQ ID NO: 3183458 - RNA, 19 nt, Artificial Sequence
  Description of Artificial Sequence: Synthetic oligonucleotide
ugaagacacagugguaugg

SEQ ID NO: 3183459 - RNA, 19 nt, Artificial Sequence
  Description of Artificial Sequence: Synthetic oligonucleotide
aaaggguucugaagguagc

SEQ ID NO: 3183460 - RNA, 19 nt, Artificial Sequence
  Description of Artificial Sequence: Synthetic oligonucleotide
uuaccaucccuguaaaggu

SEQ ID NO: 3183461 - RNA, 19 nt, Artificial Sequence
  Description of Artificial Sequence: Synthetic oligonucleotide
uccagaguuacauuccacu

SEQ ID NO: 3183462 - RNA, 19 nt, Artificial Sequence
  Description of Artificial Sequence: Synthetic oligonucleotide
gaugggaauaacugacagc

SEQ ID NO: 3183463 - RNA, 19 nt, Artificial Sequence
  Description of Artificial Sequence: Synthetic oligonucleotide
cuaaugagaagaaucaucu

SEQ ID NO: 3183464 - RNA, 19 nt, Artificial Sequence
  Description of Artificial Sequence: Synthetic oligonucleotide
caaaggguucugaagguag

SEQ ID NO: 3183465 - RNA, 19 nt, Artificial Sequence
  Description of Artificial Sequence: Synthetic oligonucleotide
ugacuuuuggggaggaacu

SEQ ID NO: 3183466 - RNA, 19 nt, Artificial Sequence
  Description of Artificial Sequence: Synthetic oligonucleotide
ucugcugucccuccauucc

SEQ ID NO: 3183467 - RNA, 19 nt, Artificial Sequence
  Description of Artificial Sequence: Synthetic oligonucleotide
uauuacaccuuugguauug

SEQ ID NO: 3183468 - RNA, 19 nt, Artificial Sequence
  Description of Artificial Sequence: Synthetic oligonucleotide
ucaagguuuccacccaaug

SEQ ID NO: 3183469 - RNA, 19 nt, Artificial Sequence
  Description of Artificial Sequence: Synthetic oligonucleotide
cuccauauaugucuuuacc

SEQ ID NO: 3183470 - RNA, 19 nt, Artificial Sequence
  Description of Artificial Sequence: Synthetic oligonucleotide
gaaucuguaccugcaagcc

SEQ ID NO: 3183471 - RNA, 19 nt, Artificial Sequence
  Description of Artificial Sequence: Synthetic oligonucleotide
ugguccuuugcucuuggcc

SEQ ID NO: 3183472 - RNA, 19 nt, Artificial Sequence
  Description of Artificial Sequence: Synthetic oligonucleotide
uggcuguguauaauggugc

SEQ ID NO: 3183473 - RNA, 19 nt, Artificial Sequence
  Description of Artificial Sequence: Synthetic oligonucleotide
aagauccugagggucacuc

SEQ ID NO: 3183474 - RNA, 19 nt, Artificial Sequence
  Description of Artificial Sequence: Synthetic oligonucleotide
ucaucaacagucacauuaa

SEQ ID NO: 3183475 - RNA, 19 nt, Artificial Sequence
  Description of Artificial Sequence: Synthetic oligonucleotide
uguugcagcuggaaugacc

SEQ ID NO: 3183476 - RNA, 19 nt, Artificial Sequence
  Description of Artificial Sequence: Synthetic oligonucleotide
uuuguugcagcuggaauga

SEQ ID NO: 3183477 - RNA, 19 nt, Artificial Sequence
  Description of Artificial Sequence: Synthetic oligonucleotide
aaccaacgaaucuccaugu

SEQ ID NO: 3183478 - RNA, 19 nt, Artificial Sequence
  Description of Artificial Sequence: Synthetic oligonucleotide
ugggaaccaaccuccagag

SEQ ID NO: 3183479 - RNA, 19 nt, Artificial Sequence
  Description of Artificial Sequence: Synthetic oligonucleotide
uucugaagguagcaaguga

SEQ ID NO: 3183480 - RNA, 19 nt, Artificial Sequence
  Description of Artificial Sequence: Synthetic oligonucleotide
aaugaccucuccucugcug

SEQ ID NO: 3183481 - RNA, 19 nt, Artificial Sequence
  Description of Artificial Sequence: Synthetic oligonucleotide
guauaauggugccggaacc

SEQ ID NO: 3183482 - RNA, 19 nt, Artificial Sequence
  Description of Artificial Sequence: Synthetic oligonucleotide
uccaugagaggcuuuggga

SEQ ID NO: 3183483 - RNA, 19 nt, Artificial Sequence
  Description of Artificial Sequence: Synthetic oligonucleotide
uauaugucuuuaccauccc

SEQ ID NO: 3183484 - RNA, 19 nt, Artificial Sequence
  Description of Artificial Sequence: Synthetic oligonucleotide
aacugacucgguuuugucc

SEQ ID NO: 3183485 - RNA, 19 nt, Artificial Sequence
  Description of Artificial Sequence: Synthetic oligonucleotide
ucuucuucaggaaggaggg

SEQ ID NO: 3183486 - RNA, 19 nt, Artificial Sequence
  Description of Artificial Sequence: Synthetic oligonucleotide
gucaccaucagugucaugg

SEQ ID NO: 3183487 - RNA, 19 nt, Artificial Sequence
  Description of Artificial Sequence: Synthetic oligonucleotide
uggagggugacuuggaggg

SEQ ID NO: 3183488 - RNA, 19 nt, Artificial Sequence
  Description of Artificial Sequence: Synthetic oligonucleotide
uucaucaccaccccuuccg

SEQ ID NO: 3183489 - RNA, 19 nt, Artificial Sequence
  Description of Artificial Sequence: Synthetic oligonucleotide
cucuucuucaggaaggagg

SEQ ID NO: 3183490 - RNA, 19 nt, Artificial Sequence
  Description of Artificial Sequence: Synthetic oligonucleotide
uccucuuucccauucauca

SEQ ID NO: 3183491 - RNA, 19 nt, Artificial Sequence
  Description of Artificial Sequence: Synthetic oligonucleotide
uucccauucaucaccaccc

SEQ ID NO: 3183492 - RNA, 19 nt, Artificial Sequence
  Description of Artificial Sequence: Synthetic oligonucleotide
guagcugucaccaucagug

SEQ ID NO: 3183493 - RNA, 19 nt, Artificial Sequence
  Description of Artificial Sequence: Synthetic oligonucleotide
ugucaugguggucaucugg

SEQ ID NO: 3183494 - RNA, 19 nt, Artificial Sequence
  Description of Artificial Sequence: Synthetic oligonucleotide
ugauccgagguccuucucg

SEQ ID NO: 3183495 - RNA, 19 nt, Artificial Sequence
  Description of Artificial Sequence: Synthetic oligonucleotide
uucucgaucccucauuggc

SEQ ID NO: 3183496 - RNA, 19 nt, Artificial Sequence
  Description of Artificial Sequence: Synthetic oligonucleotide
uuucccauucaucaccacc

SEQ ID NO: 3183497 - RNA, 19 nt, Artificial Sequence
  Description of Artificial Sequence: Synthetic oligonucleotide
ucaggauuccaccuucucc

SEQ ID NO: 3183498 - RNA, 19 nt, Artificial Sequence
  Description of Artificial Sequence: Synthetic oligonucleotide
ucgguuuuguccuuguagc

SEQ ID NO: 3183499 - RNA, 19 nt, Artificial Sequence
  Description of Artificial Sequence: Synthetic oligonucleotide
uugcucuucuucaggaagg

SEQ ID NO: 3183500 - RNA, 19 nt, Artificial Sequence
  Description of Artificial Sequence: Synthetic oligonucleotide
uuugcugagggccucuucu

SEQ ID NO: 3183501 - RNA, 19 nt, Artificial Sequence
  Description of Artificial Sequence: Synthetic oligonucleotide
accuucuccuucuucuugc

SEQ ID NO: 3183502 - RNA, 19 nt, Artificial Sequence
  Description of Artificial Sequence: Synthetic oligonucleotide
uuggagggugacuuggagg

SEQ ID NO: 3183503 - RNA, 19 nt, Artificial Sequence
  Description of Artificial Sequence: Synthetic oligonucleotide
uucuccuucuucuugcucu

SEQ ID NO: 3183504 - RNA, 19 nt, Artificial Sequence
  Description of Artificial Sequence: Synthetic oligonucleotide
acugacucgguuuuguccu

SEQ ID NO: 3183505 - RNA, 19 nt, Artificial Sequence
  Description of Artificial Sequence: Synthetic oligonucleotide
ucugagugugauccgaggu

SEQ ID NO: 3183506 - RNA, 19 nt, Artificial Sequence
  Description of Artificial Sequence: Synthetic oligonucleotide
uucuucuugcucuucuuca

SEQ ID NO: 3183507 - RNA, 19 nt, Artificial Sequence
  Description of Artificial Sequence: Synthetic oligonucleotide
uuuggagggugacuuggag

SEQ ID NO: 3183508 - RNA, 19 nt, Artificial Sequence
  Description of Artificial Sequence: Synthetic oligonucleotide
ucuucuugcucuucuucag

SEQ ID NO: 3183509 - RNA, 19 nt, Artificial Sequence
  Description of Artificial Sequence: Synthetic oligonucleotide
cuugcucuucuucaggaag

SEQ ID NO: 3183510 - RNA, 19 nt, Artificial Sequence
  Description of Artificial Sequence: Synthetic oligonucleotide
cucgguuuuguccuuguag

SEQ ID NO: 3183511 - RNA, 19 nt, Artificial Sequence
  Description of Artificial Sequence: Synthetic oligonucleotide
ucucgaucccucauuggcc

SEQ ID NO: 3183512 - RNA, 19 nt, Artificial Sequence
  Description of Artificial Sequence: Synthetic oligonucleotide
ugagugugauccgaggucc

SEQ ID NO: 3183513 - RNA, 19 nt, Artificial Sequence
  Description of Artificial Sequence: Synthetic oligonucleotide
cucuuucccauucaucacc

SEQ ID NO: 3183514 - RNA, 19 nt, Artificial Sequence
  Description of Artificial Sequence: Synthetic oligonucleotide
uccaccuucuccuucuucu

SEQ ID NO: 3183515 - RNA, 19 nt, Artificial Sequence
  Description of Artificial Sequence: Synthetic oligonucleotide
agggcagggagguagcagg

SEQ ID NO: 3183516 - RNA, 19 nt, Artificial Sequence
  Description of Artificial Sequence: Synthetic oligonucleotide
aaggagggcagggagguag

SEQ ID NO: 3183517 - RNA, 19 nt, Artificial Sequence
  Description of Artificial Sequence: Synthetic oligonucleotide
aucagugucauggugguca

SEQ ID NO: 3183518 - RNA, 19 nt, Artificial Sequence
  Description of Artificial Sequence: Synthetic oligonucleotide
cucuucugcacuuggcucc

SEQ ID NO: 3183519 - RNA, 19 nt, Artificial Sequence
  Description of Artificial Sequence: Synthetic oligonucleotide
ucuuucccauucaucacca

SEQ ID NO: 3183520 - RNA, 19 nt, Artificial Sequence
  Description of Artificial Sequence: Synthetic oligonucleotide
accaucagugucauggugg

SEQ ID NO: 3183521 - RNA, 19 nt, Artificial Sequence
  Description of Artificial Sequence: Synthetic oligonucleotide
agugucaugguggucaucu

SEQ ID NO: 3183522 - RNA, 19 nt, Artificial Sequence
  Description of Artificial Sequence: Synthetic oligonucleotide
auucaucaccaccccuucc

SEQ ID NO: 3183523 - RNA, 19 nt, Artificial Sequence
  Description of Artificial Sequence: Synthetic oligonucleotide
ugggagaagggcagggaag

SEQ ID NO: 3183524 - RNA, 19 nt, Artificial Sequence
  Description of Artificial Sequence: Synthetic oligonucleotide
uucuugcucuucuucagga

SEQ ID NO: 3183525 - RNA, 19 nt, Artificial Sequence
  Description of Artificial Sequence: Synthetic oligonucleotide
ucaucaccaccccuuccgg

SEQ ID NO: 3183526 - RNA, 19 nt, Artificial Sequence
  Description of Artificial Sequence: Synthetic oligonucleotide
uucggaauuucuuuucuuu

SEQ ID NO: 3183527 - RNA, 19 nt, Artificial Sequence
  Description of Artificial Sequence: Synthetic oligonucleotide
cucgaucccucauuggccc

SEQ ID NO: 3183528 - RNA, 19 nt, Artificial Sequence
  Description of Artificial Sequence: Synthetic oligonucleotide
agaagggcagggaaggagg

SEQ ID NO: 3183529 - RNA, 19 nt, Artificial Sequence
  Description of Artificial Sequence: Synthetic oligonucleotide
uguagcugucaccaucagu

SEQ ID NO: 3183530 - RNA, 19 nt, Artificial Sequence
  Description of Artificial Sequence: Synthetic oligonucleotide
agcugucaccaucaguguc

SEQ ID NO: 3183531 - RNA, 19 nt, Artificial Sequence
  Description of Artificial Sequence: Synthetic oligonucleotide
accaaucaggauuccaccu

SEQ ID NO: 3183532 - RNA, 19 nt, Artificial Sequence
  Description of Artificial Sequence: Synthetic oligonucleotide
cuucuugcucuucuucagg

SEQ ID NO: 3183533 - RNA, 19 nt, Artificial Sequence
  Description of Artificial Sequence: Synthetic oligonucleotide
caugguggucaucuggccc

SEQ ID NO: 3183534 - RNA, 19 nt, Artificial Sequence
  Description of Artificial Sequence: Synthetic oligonucleotide
ugcacuuggcuccuccucu

SEQ ID NO: 3183535 - RNA, 19 nt, Artificial Sequence
  Description of Artificial Sequence: Synthetic oligonucleotide
uguccuuguagcugucacc

SEQ ID NO: 3183536 - RNA, 19 nt, Artificial Sequence
  Description of Artificial Sequence: Synthetic oligonucleotide
uggagggcgagcccucugg

SEQ ID NO: 3183537 - RNA, 19 nt, Artificial Sequence
  Description of Artificial Sequence: Synthetic oligonucleotide
caccaaucaggauuccacc

SEQ ID NO: 3183538 - RNA, 19 nt, Artificial Sequence
  Description of Artificial Sequence: Synthetic oligonucleotide
uuguccuuguagcugucac

SEQ ID NO: 3183539 - RNA, 19 nt, Artificial Sequence
  Description of Artificial Sequence: Synthetic oligonucleotide
agggaaggagggcagggag

SEQ ID NO: 3183540 - RNA, 19 nt, Artificial Sequence
  Description of Artificial Sequence: Synthetic oligonucleotide
caguccuuugcugagggcc

SEQ ID NO: 3183541 - RNA, 19 nt, Artificial Sequence
  Description of Artificial Sequence: Synthetic oligonucleotide
agcaggagccaccaaucag

SEQ ID NO: 3183542 - RNA, 19 nt, Artificial Sequence
  Description of Artificial Sequence: Synthetic oligonucleotide
cuuguagcugucaccauca

SEQ ID NO: 3183543 - RNA, 19 nt, Artificial Sequence
  Description of Artificial Sequence: Synthetic oligonucleotide
aucaggauuccaccuucuc

SEQ ID NO: 3183544 - RNA, 19 nt, Artificial Sequence
  Description of Artificial Sequence: Synthetic oligonucleotide
gagggugacuuggagggcg

SEQ ID NO: 3183545 - RNA, 19 nt, Artificial Sequence
  Description of Artificial Sequence: Synthetic oligonucleotide
uugggagaagggcagggaa

SEQ ID NO: 3183546 - RNA, 19 nt, Artificial Sequence
  Description of Artificial Sequence: Synthetic oligonucleotide
cuuggcuccuccucuuucc

SEQ ID NO: 3183547 - RNA, 19 nt, Artificial Sequence
  Description of Artificial Sequence: Synthetic oligonucleotide
uuuuggagggugacuugga

SEQ ID NO: 3183548 - RNA, 19 nt, Artificial Sequence
  Description of Artificial Sequence: Synthetic oligonucleotide
cucugugguggcuucacug

SEQ ID NO: 3183549 - RNA, 19 nt, Artificial Sequence
  Description of Artificial Sequence: Synthetic oligonucleotide
acaaggggccacugguaac

SEQ ID NO: 3183550 - RNA, 19 nt, Artificial Sequence
  Description of Artificial Sequence: Synthetic oligonucleotide
cucauuggcccugugcucc

SEQ ID NO: 3183551 - RNA, 19 nt, Artificial Sequence
  Description of Artificial Sequence: Synthetic oligonucleotide
aucuggcccaguccuuugc

SEQ ID NO: 3183552 - RNA, 19 nt, Artificial Sequence
  Description of Artificial Sequence: Synthetic oligonucleotide
cagggagguagcaggagcc

SEQ ID NO: 3183553 - RNA, 19 nt, Artificial Sequence
  Description of Artificial Sequence: Synthetic oligonucleotide
uccuucuucuugcucuucu

SEQ ID NO: 3183554 - RNA, 19 nt, Artificial Sequence
  Description of Artificial Sequence: Synthetic oligonucleotide
augguggucaucuggccca

SEQ ID NO: 3183555 - RNA, 19 nt, Artificial Sequence
  Description of Artificial Sequence: Synthetic oligonucleotide
guuucgcuggcucaggcuc

SEQ ID NO: 3183556 - RNA, 19 nt, Artificial Sequence
  Description of Artificial Sequence: Synthetic oligonucleotide
uggucaucuggcccagucc

SEQ ID NO: 3183557 - RNA, 19 nt, Artificial Sequence
  Description of Artificial Sequence: Synthetic oligonucleotide
gagaagggcagggaaggag

SEQ ID NO: 3183558 - RNA, 19 nt, Artificial Sequence
  Description of Artificial Sequence: Synthetic oligonucleotide
aagggcagggaaggagggc

SEQ ID NO: 3183559 - RNA, 19 nt, Artificial Sequence
  Description of Artificial Sequence: Synthetic oligonucleotide
ucggaauuucuuuucuuuu

SEQ ID NO: 3183560 - RNA, 19 nt, Artificial Sequence
  Description of Artificial Sequence: Synthetic oligonucleotide
acugguaacugacucgguu

SEQ ID NO: 3183561 - RNA, 19 nt, Artificial Sequence
  Description of Artificial Sequence: Synthetic oligonucleotide
acuuggcuccuccucuuuc

SEQ ID NO: 3183562 - RNA, 19 nt, Artificial Sequence
  Description of Artificial Sequence: Synthetic oligonucleotide
ugugauccgagguccuucu

SEQ ID NO: 3183563 - RNA, 19 nt, Artificial Sequence
  Description of Artificial Sequence: Synthetic oligonucleotide
uucugcacuuggcuccucc

SEQ ID NO: 3183564 - RNA, 19 nt, Artificial Sequence
  Description of Artificial Sequence: Synthetic oligonucleotide
cucugagugugauccgagg

SEQ ID NO: 3183565 - RNA, 19 nt, Artificial Sequence
  Description of Artificial Sequence: Synthetic oligonucleotide
uuggcccugugcuccaggg

SEQ ID NO: 3183566 - RNA, 19 nt, Artificial Sequence
  Description of Artificial Sequence: Synthetic oligonucleotide
ucccucauuggcccugugc

SEQ ID NO: 3183567 - RNA, 19 nt, Artificial Sequence
  Description of Artificial Sequence: Synthetic oligonucleotide
cagaguugggagaagggca

SEQ ID NO: 3183568 - RNA, 19 nt, Artificial Sequence
  Description of Artificial Sequence: Synthetic oligonucleotide
gugacuuggagggcgagcc

SEQ ID NO: 3183569 - RNA, 19 nt, Artificial Sequence
  Description of Artificial Sequence: Synthetic oligonucleotide
ucaugguggucaucuggcc

SEQ ID NO: 3183570 - RNA, 19 nt, Artificial Sequence
  Description of Artificial Sequence: Synthetic oligonucleotide
ugcugagggccucuucugc

SEQ ID NO: 3183571 - RNA, 19 nt, Artificial Sequence
  Description of Artificial Sequence: Synthetic oligonucleotide
accccuuccgguuucgcug

SEQ ID NO: 3183572 - RNA, 19 nt, Artificial Sequence
  Description of Artificial Sequence: Synthetic oligonucleotide
agaguugggagaagggcag

SEQ ID NO: 3183573 - RNA, 19 nt, Artificial Sequence
  Description of Artificial Sequence: Synthetic oligonucleotide
caaucaggauuccaccuuc

SEQ ID NO: 3183574 - RNA, 19 nt, Artificial Sequence
  Description of Artificial Sequence: Synthetic oligonucleotide
gaagggcagggaaggaggg

SEQ ID NO: 3183575 - RNA, 19 nt, Artificial Sequence
  Description of Artificial Sequence: Synthetic oligonucleotide
cugagugugauccgagguc

SEQ ID NO: 3183576 - RNA, 19 nt, Artificial Sequence
  Description of Artificial Sequence: Synthetic oligonucleotide
cuucuucuugcucuucuuc

SEQ ID NO: 3183577 - RNA, 19 nt, Artificial Sequence
  Description of Artificial Sequence: Synthetic oligonucleotide
aguugggagaagggcaggg

SEQ ID NO: 3183578 - RNA, 19 nt, Artificial Sequence
  Description of Artificial Sequence: Synthetic oligonucleotide
gucaugguggucaucuggc

SEQ ID NO: 3183579 - RNA, 19 nt, Artificial Sequence
  Description of Artificial Sequence: Synthetic oligonucleotide
cuucucgaucccucauugg

SEQ ID NO: 3183580 - RNA, 19 nt, Artificial Sequence
  Description of Artificial Sequence: Synthetic oligonucleotide
ugguaacugacucgguuuu

SEQ ID NO: 3183581 - RNA, 19 nt, Artificial Sequence
  Description of Artificial Sequence: Synthetic oligonucleotide
uagcaggagccaccaauca

SEQ ID NO: 3183582 - RNA, 19 nt, Artificial Sequence
  Description of Artificial Sequence: Synthetic oligonucleotide
gcaggagccaccaaucagg

SEQ ID NO: 3183583 - RNA, 19 nt, Artificial Sequence
  Description of Artificial Sequence: Synthetic oligonucleotide
uccgagguccuucucgauc

SEQ ID NO: 3183584 - RNA, 19 nt, Artificial Sequence
  Description of Artificial Sequence: Synthetic oligonucleotide
aauuacuugacauuugguc

SEQ ID NO: 3183585 - RNA, 19 nt, Artificial Sequence
  Description of Artificial Sequence: Synthetic oligonucleotide
ucaauuacuugacauuugg

SEQ ID NO: 3183586 - RNA, 19 nt, Artificial Sequence
  Description of Artificial Sequence: Synthetic oligonucleotide
acuccuuugaauuccaggg

SEQ ID NO: 3183587 - RNA, 19 nt, Artificial Sequence
  Description of Artificial Sequence: Synthetic oligonucleotide
uuuuauuccacuucaauua

SEQ ID NO: 3183588 - RNA, 19 nt, Artificial Sequence
  Description of Artificial Sequence: Synthetic oligonucleotide
cuuuaggauucuuugaugc

SEQ ID NO: 3183589 - RNA, 19 nt, Artificial Sequence
  Description of Artificial Sequence: Synthetic oligonucleotide
aguucaucuaggcuuuucc

SEQ ID NO: 3183590 - RNA, 19 nt, Artificial Sequence
  Description of Artificial Sequence: Synthetic oligonucleotide
aaccgagaaagcuggauuc

SEQ ID NO: 3183591 - RNA, 19 nt, Artificial Sequence
  Description of Artificial Sequence: Synthetic oligonucleotide
auugcuuuaggauucuuug

SEQ ID NO: 3183592 - RNA, 19 nt, Artificial Sequence
  Description of Artificial Sequence: Synthetic oligonucleotide
cuagcgaccccucugaugg

SEQ ID NO: 3183593 - RNA, 19 nt, Artificial Sequence
  Description of Artificial Sequence: Synthetic oligonucleotide
aggguuacuguucugcagc

SEQ ID NO: 3183594 - RNA, 19 nt, Artificial Sequence
  Description of Artificial Sequence: Synthetic oligonucleotide
auuguggauguucaccacc

SEQ ID NO: 3183595 - RNA, 19 nt, Artificial Sequence
  Description of Artificial Sequence: Synthetic oligonucleotide
ucauaguucaucuaggcuu

SEQ ID NO: 3183596 - RNA, 19 nt, Artificial Sequence
  Description of Artificial Sequence: Synthetic oligonucleotide
uccucucugagcuaguagg

SEQ ID NO: 3183597 - RNA, 19 nt, Artificial Sequence
  Description of Artificial Sequence: Synthetic oligonucleotide
uuccacuucaauuacuuga

SEQ ID NO: 3183598 - RNA, 19 nt, Artificial Sequence
  Description of Artificial Sequence: Synthetic oligonucleotide
uucaccacccuaaacucgg

SEQ ID NO: 3183599 - RNA, 19 nt, Artificial Sequence
  Description of Artificial Sequence: Synthetic oligonucleotide
ugaugcaucgucgucauag

SEQ ID NO: 3183600 - RNA, 19 nt, Artificial Sequence
  Description of Artificial Sequence: Synthetic oligonucleotide
gauucuuugaugcaucguc

SEQ ID NO: 3183601 - RNA, 19 nt, Artificial Sequence
  Description of Artificial Sequence: Synthetic oligonucleotide
auguucaccacccuaaacu

SEQ ID NO: 3183602 - RNA, 19 nt, Artificial Sequence
  Description of Artificial Sequence: Synthetic oligonucleotide
aaagcucuauugcuuuagg

SEQ ID NO: 3183603 - RNA, 19 nt, Artificial Sequence
  Description of Artificial Sequence: Synthetic oligonucleotide
uuuauuccacuucaauuac

SEQ ID NO: 3183604 - RNA, 19 nt, Artificial Sequence
  Description of Artificial Sequence: Synthetic oligonucleotide
ugacauuuggucuuccucu

SEQ ID NO: 3183605 - RNA, 19 nt, Artificial Sequence
  Description of Artificial Sequence: Synthetic oligonucleotide
ucauuguggauguucacca

SEQ ID NO: 3183606 - RNA, 19 nt, Artificial Sequence
  Description of Artificial Sequence: Synthetic oligonucleotide
uugaauuccaggguuacug

SEQ ID NO: 3183607 - RNA, 19 nt, Artificial Sequence
  Description of Artificial Sequence: Synthetic oligonucleotide
acugcgagugccaagacac

SEQ ID NO: 3183608 - RNA, 19 nt, Artificial Sequence
  Description of Artificial Sequence: Synthetic oligonucleotide
uuuuccacuccuuugaauu

SEQ ID NO: 3183609 - RNA, 19 nt, Artificial Sequence
  Description of Artificial Sequence: Synthetic oligonucleotide
gucgucauaguucaucuag

SEQ ID NO: 3183610 - RNA, 19 nt, Artificial Sequence
  Description of Artificial Sequence: Synthetic oligonucleotide
ugcaguuccaggcuggcgc

SEQ ID NO: 3183611 - RNA, 19 nt, Artificial Sequence
  Description of Artificial Sequence: Synthetic oligonucleotide
acaggcugcgacuagcgac

SEQ ID NO: 3183612 - RNA, 19 nt, Artificial Sequence
  Description of Artificial Sequence: Synthetic oligonucleotide
aauuccaggguuacuguuc

SEQ ID NO: 3183613 - RNA, 19 nt, Artificial Sequence
  Description of Artificial Sequence: Synthetic oligonucleotide
aaaagcucuauugcuuuag

SEQ ID NO: 3183614 - RNA, 19 nt, Artificial Sequence
  Description of Artificial Sequence: Synthetic oligonucleotide
gaaagcuggauucggcucc

SEQ ID NO: 3183615 - RNA, 19 nt, Artificial Sequence
  Description of Artificial Sequence: Synthetic oligonucleotide
ucgucauaguucaucuagg

SEQ ID NO: 3183616 - RNA, 19 nt, Artificial Sequence
  Description of Artificial Sequence: Synthetic oligonucleotide
aacucgggcuccuucccgc

SEQ ID NO: 3183617 - RNA, 19 nt, Artificial Sequence
  Description of Artificial Sequence: Synthetic oligonucleotide
uccacuucaauuacuugac

SEQ ID NO: 3183618 - RNA, 19 nt, Artificial Sequence
  Description of Artificial Sequence: Synthetic oligonucleotide
cucugauggccaaaguucg

SEQ ID NO: 3183619 - RNA, 19 nt, Artificial Sequence
  Description of Artificial Sequence: Synthetic oligonucleotide
agaaagcuggauucggcuc

SEQ ID NO: 3183620 - RNA, 19 nt, Artificial Sequence
  Description of Artificial Sequence: Synthetic oligonucleotide
ucugcagcuucccugauau

SEQ ID NO: 3183621 - RNA, 19 nt, Artificial Sequence
  Description of Artificial Sequence: Synthetic oligonucleotide
ugcuuuaggauucuuugau

SEQ ID NO: 3183622 - RNA, 19 nt, Artificial Sequence
  Description of Artificial Sequence: Synthetic oligonucleotide
uucaucuaggcuuuuccac

SEQ ID NO: 3183623 - RNA, 19 nt, Artificial Sequence
  Description of Artificial Sequence: Synthetic oligonucleotide
uuguggauguucaccaccc

SEQ ID NO: 3183624 - RNA, 19 nt, Artificial Sequence
  Description of Artificial Sequence: Synthetic oligonucleotide
caagacacggcgaucgggg

SEQ ID NO: 3183625 - RNA, 19 nt, Artificial Sequence
  Description of Artificial Sequence: Synthetic oligonucleotide
uucaauuacuugacauuug

SEQ ID NO: 3183626 - RNA, 19 nt, Artificial Sequence
  Description of Artificial Sequence: Synthetic oligonucleotide
uauuccacuucaauuacuu

SEQ ID NO: 3183627 - RNA, 19 nt, Artificial Sequence
  Description of Artificial Sequence: Synthetic oligonucleotide
uuuaggauucuuugaugca

SEQ ID NO: 3183628 - RNA, 19 nt, Artificial Sequence
  Description of Artificial Sequence: Synthetic oligonucleotide
agcuaguagggguagggag

SEQ ID NO: 3183629 - RNA, 19 nt, Artificial Sequence
  Description of Artificial Sequence: Synthetic oligonucleotide
ucaucuaggcuuuuccacu

SEQ ID NO: 3183630 - RNA, 19 nt, Artificial Sequence
  Description of Artificial Sequence: Synthetic oligonucleotide
cuaaacucgggcuccuucc

SEQ ID NO: 3183631 - RNA, 19 nt, Artificial Sequence
  Description of Artificial Sequence: Synthetic oligonucleotide
caaaguucggggaaccgag

SEQ ID NO: 3183632 - RNA, 19 nt, Artificial Sequence
  Description of Artificial Sequence: Synthetic oligonucleotide
ugcaucgucgucauaguuc

SEQ ID NO: 3183633 - RNA, 19 nt, Artificial Sequence
  Description of Artificial Sequence: Synthetic oligonucleotide
ucuccgagggcucugcgcc

SEQ ID NO: 3183634 - RNA, 19 nt, Artificial Sequence
  Description of Artificial Sequence: Synthetic oligonucleotide
aagcucuauugcuuuagga

SEQ ID NO: 3183635 - RNA, 19 nt, Artificial Sequence
  Description of Artificial Sequence: Synthetic oligonucleotide
uugacauuuggucuuccuc

SEQ ID NO: 3183636 - RNA, 19 nt, Artificial Sequence
  Description of Artificial Sequence: Synthetic oligonucleotide
ugccaagacacggcgaucg

SEQ ID NO: 3183637 - RNA, 19 nt, Artificial Sequence
  Description of Artificial Sequence: Synthetic oligonucleotide
aggauucuuugaugcaucg

SEQ ID NO: 3183638 - RNA, 19 nt, Artificial Sequence
  Description of Artificial Sequence: Synthetic oligonucleotide
acuucucuuccccggacac

SEQ ID NO: 3183639 - RNA, 19 nt, Artificial Sequence
  Description of Artificial Sequence: Synthetic oligonucleotide
ugagcuaguagggguaggg

SEQ ID NO: 3183640 - RNA, 19 nt, Artificial Sequence
  Description of Artificial Sequence: Synthetic oligonucleotide
ugauggccaaaguucgggg

SEQ ID NO: 3183641 - RNA, 19 nt, Artificial Sequence
  Description of Artificial Sequence: Synthetic oligonucleotide
aaacucgggcuccuucccg

SEQ ID NO: 3183642 - RNA, 19 nt, Artificial Sequence
  Description of Artificial Sequence: Synthetic oligonucleotide
auucuuugaugcaucgucg

SEQ ID NO: 3183643 - RNA, 19 nt, Artificial Sequence
  Description of Artificial Sequence: Synthetic oligonucleotide
cucuauugcuuuaggauuc

SEQ ID NO: 3183644 - RNA, 19 nt, Artificial Sequence
  Description of Artificial Sequence: Synthetic oligonucleotide
uggauguucaccacccuaa

SEQ ID NO: 3183645 - RNA, 19 nt, Artificial Sequence
  Description of Artificial Sequence: Synthetic oligonucleotide
uguucaccacccuaaacuc

SEQ ID NO: 3183646 - RNA, 19 nt, Artificial Sequence
  Description of Artificial Sequence: Synthetic oligonucleotide
ucugauggccaaaguucgg

SEQ ID NO: 3183647 - RNA, 19 nt, Artificial Sequence
  Description of Artificial Sequence: Synthetic oligonucleotide
guuacuguucugcagcuuc

SEQ ID NO: 3183648 - RNA, 19 nt, Artificial Sequence
  Description of Artificial Sequence: Synthetic oligonucleotide
cacuccuuugaauuccagg

SEQ ID NO: 3183649 - RNA, 19 nt, Artificial Sequence
  Description of Artificial Sequence: Synthetic oligonucleotide
uauugcuuuaggauucuuu

SEQ ID NO: 3183650 - RNA, 19 nt, Artificial Sequence
  Description of Artificial Sequence: Synthetic oligonucleotide
cucauuguggauguucacc

SEQ ID NO: 3183651 - RNA, 19 nt, Artificial Sequence
  Description of Artificial Sequence: Synthetic oligonucleotide
guucggggaaccgagaaag

SEQ ID NO: 3183652 - RNA, 19 nt, Artificial Sequence
  Description of Artificial Sequence: Synthetic oligonucleotide
acuucaauuacuugacauu

SEQ ID NO: 3183653 - RNA, 19 nt, Artificial Sequence
  Description of Artificial Sequence: Synthetic oligonucleotide
uuauuccacuucaauuacu

SEQ ID NO: 3183654 - RNA, 19 nt, Artificial Sequence
  Description of Artificial Sequence: Synthetic oligonucleotide
ucuggcgaggcgcuggcag

SEQ ID NO: 3183655 - RNA, 19 nt, Artificial Sequence
  Description of Artificial Sequence: Synthetic oligonucleotide
uccaagcuccuccagcgcc

SEQ ID NO: 3183656 - RNA, 19 nt, Artificial Sequence
  Description of Artificial Sequence: Synthetic oligonucleotide
ucucugagcuaguaggggu

SEQ ID NO: 3183657 - RNA, 19 nt, Artificial Sequence
  Description of Artificial Sequence: Synthetic oligonucleotide
uuaggauucuuugaugcau

SEQ ID NO: 3183658 - RNA, 19 nt, Artificial Sequence
  Description of Artificial Sequence: Synthetic oligonucleotide
uccagcgccgcucauugug

SEQ ID NO: 3183659 - RNA, 19 nt, Artificial Sequence
  Description of Artificial Sequence: Synthetic oligonucleotide
uccuuugaauuccaggguu

SEQ ID NO: 3183660 - RNA, 19 nt, Artificial Sequence
  Description of Artificial Sequence: Synthetic oligonucleotide
uuacuguucugcagcuucc

SEQ ID NO: 3183661 - RNA, 19 nt, Artificial Sequence
  Description of Artificial Sequence: Synthetic oligonucleotide
uuacuugacauuuggucuu

SEQ ID NO: 3183662 - RNA, 19 nt, Artificial Sequence
  Description of Artificial Sequence: Synthetic oligonucleotide
uugcuuuaggauucuuuga

SEQ ID NO: 3183663 - RNA, 19 nt, Artificial Sequence
  Description of Artificial Sequence: Synthetic oligonucleotide
agcuggauucggcuccucc

SEQ ID NO: 3183664 - RNA, 19 nt, Artificial Sequence
  Description of Artificial Sequence: Synthetic oligonucleotide
ugaauuccaggguuacugu

SEQ ID NO: 3183665 - RNA, 19 nt, Artificial Sequence
  Description of Artificial Sequence: Synthetic oligonucleotide
uaaacucgggcuccuuccc

SEQ ID NO: 3183666 - RNA, 19 nt, Artificial Sequence
  Description of Artificial Sequence: Synthetic oligonucleotide
uuuucuggcgaggcgcugg

SEQ ID NO: 3183667 - RNA, 19 nt, Artificial Sequence
  Description of Artificial Sequence: Synthetic oligonucleotide
ugcgagugccaagacacgg

SEQ ID NO: 3183668 - RNA, 19 nt, Artificial Sequence
  Description of Artificial Sequence: Synthetic oligonucleotide
uccaggguuacuguucugc

SEQ ID NO: 3183669 - RNA, 19 nt, Artificial Sequence
  Description of Artificial Sequence: Synthetic oligonucleotide
uucuuugaugcaucgucgu

SEQ ID NO: 3183670 - RNA, 19 nt, Artificial Sequence
  Description of Artificial Sequence: Synthetic oligonucleotide
ucgucgucauaguucaucu

SEQ ID NO: 3183671 - RNA, 19 nt, Artificial Sequence
  Description of Artificial Sequence: Synthetic oligonucleotide
gauguucaccacccuaaac

SEQ ID NO: 3183672 - RNA, 19 nt, Artificial Sequence
  Description of Artificial Sequence: Synthetic oligonucleotide
uuccucucugagcuaguag

SEQ ID NO: 3183673 - RNA, 19 nt, Artificial Sequence
  Description of Artificial Sequence: Synthetic oligonucleotide
aucgucgucauaguucauc

SEQ ID NO: 3183674 - RNA, 19 nt, Artificial Sequence
  Description of Artificial Sequence: Synthetic oligonucleotide
aaguucggggaaccgagaa

SEQ ID NO: 3183675 - RNA, 19 nt, Artificial Sequence
  Description of Artificial Sequence: Synthetic oligonucleotide
auuccaggguuacuguucu

SEQ ID NO: 3183676 - RNA, 19 nt, Artificial Sequence
  Description of Artificial Sequence: Synthetic oligonucleotide
uaggauucuuugaugcauc

SEQ ID NO: 3183677 - RNA, 19 nt, Artificial Sequence
  Description of Artificial Sequence: Synthetic oligonucleotide
agcuucccacuucucuucc

SEQ ID NO: 3183678 - RNA, 19 nt, Artificial Sequence
  Description of Artificial Sequence: Synthetic oligonucleotide
acggcgaucggggaggugg

SEQ ID NO: 3183679 - RNA, 19 nt, Artificial Sequence
  Description of Artificial Sequence: Synthetic oligonucleotide
uuugaugcaucgucgucau

SEQ ID NO: 3183680 - RNA, 19 nt, Artificial Sequence
  Description of Artificial Sequence: Synthetic oligonucleotide
agugccaagacacggcgau

SEQ ID NO: 3183681 - RNA, 19 nt, Artificial Sequence
  Description of Artificial Sequence: Synthetic oligonucleotide
ucuuugaugcaucgucguc

SEQ ID NO: 3183682 - RNA, 19 nt, Artificial Sequence
  Description of Artificial Sequence: Synthetic oligonucleotide
cugauggccaaaguucggg

SEQ ID NO: 3183683 - RNA, 19 nt, Artificial Sequence
  Description of Artificial Sequence: Synthetic oligonucleotide
auuccacuucaauuacuug

SEQ ID NO: 3183684 - RNA, 19 nt, Artificial Sequence
  Description of Artificial Sequence: Synthetic oligonucleotide
ugucugaugacuuuggucg

SEQ ID NO: 3183685 - RNA, 19 nt, Artificial Sequence
  Description of Artificial Sequence: Synthetic oligonucleotide
ucuacaauguccuugaccc

SEQ ID NO: 3183686 - RNA, 19 nt, Artificial Sequence
  Description of Artificial Sequence: Synthetic oligonucleotide
aacuuucuggaauaguccc

SEQ ID NO: 3183687 - RNA, 19 nt, Artificial Sequence
  Description of Artificial Sequence: Synthetic oligonucleotide
uucagcaucaucuacaaug

SEQ ID NO: 3183688 - RNA, 19 nt, Artificial Sequence
  Description of Artificial Sequence: Synthetic oligonucleotide
uuauugauuauuccauugg

SEQ ID NO: 3183689 - RNA, 19 nt, Artificial Sequence
  Description of Artificial Sequence: Synthetic oligonucleotide
aaauacuuugcuucggcuc

SEQ ID NO: 3183690 - RNA, 19 nt, Artificial Sequence
  Description of Artificial Sequence: Synthetic oligonucleotide
auuuguuuuacuuggaggu

SEQ ID NO: 3183691 - RNA, 19 nt, Artificial Sequence
  Description of Artificial Sequence: Synthetic oligonucleotide
aauuaacucuuccaggaug

SEQ ID NO: 3183692 - RNA, 19 nt, Artificial Sequence
  Description of Artificial Sequence: Synthetic oligonucleotide
uauuccauuggccacuggg

SEQ ID NO: 3183693 - RNA, 19 nt, Artificial Sequence
  Description of Artificial Sequence: Synthetic oligonucleotide
uuucuaaauacuuugcuuc

SEQ ID NO: 3183694 - RNA, 19 nt, Artificial Sequence
  Description of Artificial Sequence: Synthetic oligonucleotide
uuuggaagaagucacucug

SEQ ID NO: 3183695 - RNA, 19 nt, Artificial Sequence
  Description of Artificial Sequence: Synthetic oligonucleotide
uuuauugauuauuccauug

SEQ ID NO: 3183696 - RNA, 19 nt, Artificial Sequence
  Description of Artificial Sequence: Synthetic oligonucleotide
uugauuauuccauuggcca

SEQ ID NO: 3183697 - RNA, 19 nt, Artificial Sequence
  Description of Artificial Sequence: Synthetic oligonucleotide
uauugauuauuccauuggc

SEQ ID NO: 3183698 - RNA, 19 nt, Artificial Sequence
  Description of Artificial Sequence: Synthetic oligonucleotide
uccauuucuaaauacuuug

SEQ ID NO: 3183699 - RNA, 19 nt, Artificial Sequence
  Description of Artificial Sequence: Synthetic oligonucleotide
uuugcuucggcucuguaug

SEQ ID NO: 3183700 - RNA, 19 nt, Artificial Sequence
  Description of Artificial Sequence: Synthetic oligonucleotide
gaccauuuguuuuacuugg

SEQ ID NO: 3183701 - RNA, 19 nt, Artificial Sequence
  Description of Artificial Sequence: Synthetic oligonucleotide
aauacuuugcuucggcucu

SEQ ID NO: 3183702 - RNA, 19 nt, Artificial Sequence
  Description of Artificial Sequence: Synthetic oligonucleotide
gacaauuaacucuuccagg

SEQ ID NO: 3183703 - RNA, 19 nt, Artificial Sequence
  Description of Artificial Sequence: Synthetic oligonucleotide
uuuucaaucuggcuguggc

SEQ ID NO: 3183704 - RNA, 19 nt, Artificial Sequence
  Description of Artificial Sequence: Synthetic oligonucleotide
aucuacaauguccuugacc

SEQ ID NO: 3183705 - RNA, 19 nt, Artificial Sequence
  Description of Artificial Sequence: Synthetic oligonucleotide
uucuaaauacuuugcuucg

SEQ ID NO: 3183706 - RNA, 19 nt, Artificial Sequence
  Description of Artificial Sequence: Synthetic oligonucleotide
auaacuuucuggaauaguc

SEQ ID NO: 3183707 - RNA, 19 nt, Artificial Sequence
  Description of Artificial Sequence: Synthetic oligonucleotide
uccaccaugacaucauacg

SEQ ID NO: 3183708 - RNA, 19 nt, Artificial Sequence
  Description of Artificial Sequence: Synthetic oligonucleotide
agcaucaucuacaaugucc

SEQ ID NO: 3183709 - RNA, 19 nt, Artificial Sequence
  Description of Artificial Sequence: Synthetic oligonucleotide
cauuuguuuuacuuggagg

SEQ ID NO: 3183710 - RNA, 19 nt, Artificial Sequence
  Description of Artificial Sequence: Synthetic oligonucleotide
auugauuauuccauuggcc

SEQ ID NO: 3183711 - RNA, 19 nt, Artificial Sequence
  Description of Artificial Sequence: Synthetic oligonucleotide
uuuacuuggagguggauaa

SEQ ID NO: 3183712 - RNA, 19 nt, Artificial Sequence
  Description of Artificial Sequence: Synthetic oligonucleotide
acaauuaacucuuccagga

SEQ ID NO: 3183713 - RNA, 19 nt, Artificial Sequence
  Description of Artificial Sequence: Synthetic oligonucleotide
uaacuuucuggaauagucc

SEQ ID NO: 3183714 - RNA, 19 nt, Artificial Sequence
  Description of Artificial Sequence: Synthetic oligonucleotide
aagucacucugacaucagc

SEQ ID NO: 3183715 - RNA, 19 nt, Artificial Sequence
  Description of Artificial Sequence: Synthetic oligonucleotide
uguugguacagacuuucag

SEQ ID NO: 3183716 - RNA, 19 nt, Artificial Sequence
  Description of Artificial Sequence: Synthetic oligonucleotide
auguccuugacccaugcag

SEQ ID NO: 3183717 - RNA, 19 nt, Artificial Sequence
  Description of Artificial Sequence: Synthetic oligonucleotide
uucaguagcguccaccaug

SEQ ID NO: 3183718 - RNA, 19 nt, Artificial Sequence
  Description of Artificial Sequence: Synthetic oligonucleotide
gaagaagucacucugacau

SEQ ID NO: 3183719 - RNA, 19 nt, Artificial Sequence
  Description of Artificial Sequence: Synthetic oligonucleotide
uguaugauuccuuggacaa

SEQ ID NO: 3183720 - RNA, 19 nt, Artificial Sequence
  Description of Artificial Sequence: Synthetic oligonucleotide
uauuuacucgaccauuugu

SEQ ID NO: 3183721 - RNA, 19 nt, Artificial Sequence
  Description of Artificial Sequence: Synthetic oligonucleotide
uugguacagacuuucagca

SEQ ID NO: 3183722 - RNA, 19 nt, Artificial Sequence
  Description of Artificial Sequence: Synthetic oligonucleotide
guugguacagacuuucagc

SEQ ID NO: 3183723 - RNA, 19 nt, Artificial Sequence
  Description of Artificial Sequence: Synthetic oligonucleotide
gagguggauaacuuucugg

SEQ ID NO: 3183724 - RNA, 19 nt, Artificial Sequence
  Description of Artificial Sequence: Synthetic oligonucleotide
uuguuuuacuuggaggugg

SEQ ID NO: 3183725 - RNA, 19 nt, Artificial Sequence
  Description of Artificial Sequence: Synthetic oligonucleotide
ucucuuuggaagaagucac

SEQ ID NO: 3183726 - RNA, 19 nt, Artificial Sequence
  Description of Artificial Sequence: Synthetic oligonucleotide
uuuucaguagcguccacca

SEQ ID NO: 3183727 - RNA, 19 nt, Artificial Sequence
  Description of Artificial Sequence: Synthetic oligonucleotide
uggacaauuaacucuucca

SEQ ID NO: 3183728 - RNA, 19 nt, Artificial Sequence
  Description of Artificial Sequence: Synthetic oligonucleotide
uucuggaauagucccaggc

SEQ ID NO: 3183729 - RNA, 19 nt, Artificial Sequence
  Description of Artificial Sequence: Synthetic oligonucleotide
ucaucuacaauguccuuga

SEQ ID NO: 3183730 - RNA, 19 nt, Artificial Sequence
  Description of Artificial Sequence: Synthetic oligonucleotide
ucuggaauagucccaggca

SEQ ID NO: 3183731 - RNA, 19 nt, Artificial Sequence
  Description of Artificial Sequence: Synthetic oligonucleotide
ucagcaucaucuacaaugu

SEQ ID NO: 3183732 - RNA, 19 nt, Artificial Sequence
  Description of Artificial Sequence: Synthetic oligonucleotide
cugcaauucucuuuggaag

SEQ ID NO: 3183733 - RNA, 19 nt, Artificial Sequence
  Description of Artificial Sequence: Synthetic oligonucleotide
uucucuuuggaagaaguca

SEQ ID NO: 3183734 - RNA, 19 nt, Artificial Sequence
  Description of Artificial Sequence: Synthetic oligonucleotide
uccuuggacaauuaacucu

SEQ ID NO: 3183735 - RNA, 19 nt, Artificial Sequence
  Description of Artificial Sequence: Synthetic oligonucleotide
cuaaauacuuugcuucggc

SEQ ID NO: 3183736 - RNA, 19 nt, Artificial Sequence
  Description of Artificial Sequence: Synthetic oligonucleotide
ugcaauucucuuuggaaga

SEQ ID NO: 3183737 - RNA, 19 nt, Artificial Sequence
  Description of Artificial Sequence: Synthetic oligonucleotide
aauagucccaggcaaguuu

SEQ ID NO: 3183738 - RNA, 19 nt, Artificial Sequence
  Description of Artificial Sequence: Synthetic oligonucleotide
augucugaugacuuugguc

SEQ ID NO: 3183739 - RNA, 19 nt, Artificial Sequence
  Description of Artificial Sequence: Synthetic oligonucleotide
auuucuaaauacuuugcuu

SEQ ID NO: 3183740 - RNA, 19 nt, Artificial Sequence
  Description of Artificial Sequence: Synthetic oligonucleotide
acuggguauuuacucgacc

SEQ ID NO: 3183741 - RNA, 19 nt, Artificial Sequence
  Description of Artificial Sequence: Synthetic oligonucleotide
acucuccauuucuaaauac

SEQ ID NO: 3183742 - RNA, 19 nt, Artificial Sequence
  Description of Artificial Sequence: Synthetic oligonucleotide
uuggacaauuaacucuucc

SEQ ID NO: 3183743 - RNA, 19 nt, Artificial Sequence
  Description of Artificial Sequence: Synthetic oligonucleotide
ucuaaauacuuugcuucgg

SEQ ID NO: 3183744 - RNA, 19 nt, Artificial Sequence
  Description of Artificial Sequence: Synthetic oligonucleotide
agguggauaacuuucugga

SEQ ID NO: 3183745 - RNA, 19 nt, Artificial Sequence
  Description of Artificial Sequence: Synthetic oligonucleotide
uggcuuuucaguagcgucc

SEQ ID NO: 3183746 - RNA, 19 nt, Artificial Sequence
  Description of Artificial Sequence: Synthetic oligonucleotide
aauucucuuuggaagaagu

SEQ ID NO: 3183747 - RNA, 19 nt, Artificial Sequence
  Description of Artificial Sequence: Synthetic oligonucleotide
aagaagucacucugacauc

SEQ ID NO: 3183748 - RNA, 19 nt, Artificial Sequence
  Description of Artificial Sequence: Synthetic oligonucleotide
gauuccuuggacaauuaac

SEQ ID NO: 3183749 - RNA, 19 nt, Artificial Sequence
  Description of Artificial Sequence: Synthetic oligonucleotide
ucccaucugggcuuguugg

SEQ ID NO: 3183750 - RNA, 19 nt, Artificial Sequence
  Description of Artificial Sequence: Synthetic oligonucleotide
ucaguggcuuuucaguagc

SEQ ID NO: 3183751 - RNA, 19 nt, Artificial Sequence
  Description of Artificial Sequence: Synthetic oligonucleotide
uguccuugacccaugcagc

SEQ ID NO: 3183752 - RNA, 19 nt, Artificial Sequence
  Description of Artificial Sequence: Synthetic oligonucleotide
ucuguaugauuccuuggac

SEQ ID NO: 3183753 - RNA, 19 nt, Artificial Sequence
  Description of Artificial Sequence: Synthetic oligonucleotide
ggacaauuaacucuuccag

SEQ ID NO: 3183754 - RNA, 19 nt, Artificial Sequence
  Description of Artificial Sequence: Synthetic oligonucleotide
auuccuuggacaauuaacu

SEQ ID NO: 3183755 - RNA, 19 nt, Artificial Sequence
  Description of Artificial Sequence: Synthetic oligonucleotide
aacucuuccaggaugucug

SEQ ID NO: 3183756 - RNA, 19 nt, Artificial Sequence
  Description of Artificial Sequence: Synthetic oligonucleotide
uuucucaguggcuuuucag

SEQ ID NO: 3183757 - RNA, 19 nt, Artificial Sequence
  Description of Artificial Sequence: Synthetic oligonucleotide
ugggguuuauugauuauuc

SEQ ID NO: 3183758 - RNA, 19 nt, Artificial Sequence
  Description of Artificial Sequence: Synthetic oligonucleotide
uuggagguggauaacuuuc

SEQ ID NO: 3183759 - RNA, 19 nt, Artificial Sequence
  Description of Artificial Sequence: Synthetic oligonucleotide
uucucaguggcuuuucagu

SEQ ID NO: 3183760 - RNA, 19 nt, Artificial Sequence
  Description of Artificial Sequence: Synthetic oligonucleotide
ucaguagcguccaccauga

SEQ ID NO: 3183761 - RNA, 19 nt, Artificial Sequence
  Description of Artificial Sequence: Synthetic oligonucleotide
uaaauacuuugcuucggcu

SEQ ID NO: 3183762 - RNA, 19 nt, Artificial Sequence
  Description of Artificial Sequence: Synthetic oligonucleotide
ugauuauuccauuggccac

SEQ ID NO: 3183763 - RNA, 19 nt, Artificial Sequence
  Description of Artificial Sequence: Synthetic oligonucleotide
accaugacaucauacgacu

SEQ ID NO: 3183764 - RNA, 19 nt, Artificial Sequence
  Description of Artificial Sequence: Synthetic oligonucleotide
ucuccauuucuaaauacuu

SEQ ID NO: 3183765 - RNA, 19 nt, Artificial Sequence
  Description of Artificial Sequence: Synthetic oligonucleotide
cagacuuucagcaucaucu

SEQ ID NO: 3183766 - RNA, 19 nt, Artificial Sequence
  Description of Artificial Sequence: Synthetic oligonucleotide
uggaauagucccaggcaag

SEQ ID NO: 3183767 - RNA, 19 nt, Artificial Sequence
  Description of Artificial Sequence: Synthetic oligonucleotide
aguagcguccaccaugaca

SEQ ID NO: 3183768 - RNA, 19 nt, Artificial Sequence
  Description of Artificial Sequence: Synthetic oligonucleotide
uggaagaagucacucugac

SEQ ID NO: 3183769 - RNA, 19 nt, Artificial Sequence
  Description of Artificial Sequence: Synthetic oligonucleotide
caggaguugggguuuauug

SEQ ID NO: 3183770 - RNA, 19 nt, Artificial Sequence
  Description of Artificial Sequence: Synthetic oligonucleotide
aggcaaguuucccaucugg

SEQ ID NO: 3183771 - RNA, 19 nt, Artificial Sequence
  Description of Artificial Sequence: Synthetic oligonucleotide
acuuuggucgcucccaacu

SEQ ID NO: 3183772 - RNA, 19 nt, Artificial Sequence
  Description of Artificial Sequence: Synthetic oligonucleotide
aucaucuacaauguccuug

SEQ ID NO: 3183773 - RNA, 19 nt, Artificial Sequence
  Description of Artificial Sequence: Synthetic oligonucleotide
ucuuccaggaugucugaug

SEQ ID NO: 3183774 - RNA, 19 nt, Artificial Sequence
  Description of Artificial Sequence: Synthetic oligonucleotide
cuggcuguggcuuucucag

SEQ ID NO: 3183775 - RNA, 19 nt, Artificial Sequence
  Description of Artificial Sequence: Synthetic oligonucleotide
acagacuuucagcaucauc

SEQ ID NO: 3183776 - RNA, 19 nt, Artificial Sequence
  Description of Artificial Sequence: Synthetic oligonucleotide
uuuguuuuacuuggaggug

SEQ ID NO: 3183777 - RNA, 19 nt, Artificial Sequence
  Description of Artificial Sequence: Synthetic oligonucleotide
ucgaccauuuguuuuacuu

SEQ ID NO: 3183778 - RNA, 19 nt, Artificial Sequence
  Description of Artificial Sequence: Synthetic oligonucleotide
aacuuuccaggaguugggg

SEQ ID NO: 3183779 - RNA, 19 nt, Artificial Sequence
  Description of Artificial Sequence: Synthetic oligonucleotide
uuggaagaagucacucuga

SEQ ID NO: 3183780 - RNA, 19 nt, Artificial Sequence
  Description of Artificial Sequence: Synthetic oligonucleotide
uggauaacuuucuggaaua

SEQ ID NO: 3183781 - RNA, 19 nt, Artificial Sequence
  Description of Artificial Sequence: Synthetic oligonucleotide
uguuuuacuuggaggugga

SEQ ID NO: 3183782 - RNA, 19 nt, Artificial Sequence
  Description of Artificial Sequence: Synthetic oligonucleotide
agaagucacucugacauca

SEQ ID NO: 3183783 - RNA, 19 nt, Artificial Sequence
  Description of Artificial Sequence: Synthetic oligonucleotide
auuaacucuuccaggaugu

SEQ ID NO: 3183784 - RNA, 19 nt, Artificial Sequence
  Description of Artificial Sequence: Synthetic oligonucleotide
aaagcaagaaugcugaggg

SEQ ID NO: 3183785 - RNA, 19 nt, Artificial Sequence
  Description of Artificial Sequence: Synthetic oligonucleotide
aauaagauagcauaagccu

SEQ ID NO: 3183786 - RNA, 19 nt, Artificial Sequence
  Description of Artificial Sequence: Synthetic oligonucleotide
aaaguagcagaccacaggg

SEQ ID NO: 3183787 - RNA, 19 nt, Artificial Sequence
  Description of Artificial Sequence: Synthetic oligonucleotide
uaugcuuuugguaaaagcc

SEQ ID NO: 3183788 - RNA, 19 nt, Artificial Sequence
  Description of Artificial Sequence: Synthetic oligonucleotide
ucuaaagcuagcuaaacag

SEQ ID NO: 3183789 - RNA, 19 nt, Artificial Sequence
  Description of Artificial Sequence: Synthetic oligonucleotide
agucuaaggaaccaagucc

SEQ ID NO: 3183790 - RNA, 19 nt, Artificial Sequence
  Description of Artificial Sequence: Synthetic oligonucleotide
auauacuuuacucugagca

SEQ ID NO: 3183791 - RNA, 19 nt, Artificial Sequence
  Description of Artificial Sequence: Synthetic oligonucleotide
uauuuguuuaccaaaacaa

SEQ ID NO: 3183792 - RNA, 19 nt, Artificial Sequence
  Description of Artificial Sequence: Synthetic oligonucleotide
aagacauucucucuuuaac

SEQ ID NO: 3183793 - RNA, 19 nt, Artificial Sequence
  Description of Artificial Sequence: Synthetic oligonucleotide
agggguaucgaguucaucc

SEQ ID NO: 3183794 - RNA, 19 nt, Artificial Sequence
  Description of Artificial Sequence: Synthetic oligonucleotide
cucaacuacaaauugacag

SEQ ID NO: 3183795 - RNA, 19 nt, Artificial Sequence
  Description of Artificial Sequence: Synthetic oligonucleotide
uaaagaaauccucaaaacu

SEQ ID NO: 3183796 - RNA, 19 nt, Artificial Sequence
  Description of Artificial Sequence: Synthetic oligonucleotide
aaauccucaaaacuacauc

SEQ ID NO: 3183797 - RNA, 19 nt, Artificial Sequence
  Description of Artificial Sequence: Synthetic oligonucleotide
uuuaugggcuauuucaggg

SEQ ID NO: 3183798 - RNA, 19 nt, Artificial Sequence
  Description of Artificial Sequence: Synthetic oligonucleotide
accacuguccuccauaacc

SEQ ID NO: 3183799 - RNA, 19 nt, Artificial Sequence
  Description of Artificial Sequence: Synthetic oligonucleotide
auugaguugaugaacaugg

SEQ ID NO: 3183800 - RNA, 19 nt, Artificial Sequence
  Description of Artificial Sequence: Synthetic oligonucleotide
uacacaaucauguaguccu

SEQ ID NO: 3183801 - RNA, 19 nt, Artificial Sequence
  Description of Artificial Sequence: Synthetic oligonucleotide
uggaucaccauccucauug

SEQ ID NO: 3183802 - RNA, 19 nt, Artificial Sequence
  Description of Artificial Sequence: Synthetic oligonucleotide
uggaacugcaucuagacca

SEQ ID NO: 3183803 - RNA, 19 nt, Artificial Sequence
  Description of Artificial Sequence: Synthetic oligonucleotide
auauauaaaagguuaauuu

SEQ ID NO: 3183804 - RNA, 19 nt, Artificial Sequence
  Description of Artificial Sequence: Synthetic oligonucleotide
guacuuauuacauauagga

SEQ ID NO: 3183805 - RNA, 19 nt, Artificial Sequence
  Description of Artificial Sequence: Synthetic oligonucleotide
aacgaacuauuucauaaag

SEQ ID NO: 3183806 - RNA, 19 nt, Artificial Sequence
  Description of Artificial Sequence: Synthetic oligonucleotide
acauccuaagauuggaggc

SEQ ID NO: 3183807 - RNA, 19 nt, Artificial Sequence
  Description of Artificial Sequence: Synthetic oligonucleotide
aguagcagaccacaggggc

SEQ ID NO: 3183808 - RNA, 19 nt, Artificial Sequence
  Description of Artificial Sequence: Synthetic oligonucleotide
aauucagucagacuacgga

SEQ ID NO: 3183809 - RNA, 19 nt, Artificial Sequence
  Description of Artificial Sequence: Synthetic oligonucleotide
guagcuuuucucuaguacg

SEQ ID NO: 3183810 - RNA, 19 nt, Artificial Sequence
  Description of Artificial Sequence: Synthetic oligonucleotide
uacauccuaagauuggagg

SEQ ID NO: 3183811 - RNA, 19 nt, Artificial Sequence
  Description of Artificial Sequence: Synthetic oligonucleotide
uuugaguuggccaccuugg

SEQ ID NO: 3183812 - RNA, 19 nt, Artificial Sequence
  Description of Artificial Sequence: Synthetic oligonucleotide
ucugucaaucaucugguag

SEQ ID NO: 3183813 - RNA, 19 nt, Artificial Sequence
  Description of Artificial Sequence: Synthetic oligonucleotide
aaaucagugacuuccucca

SEQ ID NO: 3183814 - RNA, 19 nt, Artificial Sequence
  Description of Artificial Sequence: Synthetic oligonucleotide
auuugaaagauagacucac

SEQ ID NO: 3183815 - RNA, 19 nt, Artificial Sequence
  Description of Artificial Sequence: Synthetic oligonucleotide
uaagguacuuauuacauau

SEQ ID NO: 3183816 - RNA, 19 nt, Artificial Sequence
  Description of Artificial Sequence: Synthetic oligonucleotide
aaugguauuacagcccagg

SEQ ID NO: 3183817 - RNA, 19 nt, Artificial Sequence
  Description of Artificial Sequence: Synthetic oligonucleotide
uugaaagauagacucacac

SEQ ID NO: 3183818 - RNA, 19 nt, Artificial Sequence
  Description of Artificial Sequence: Synthetic oligonucleotide
ucaauguuaccaaauuaug

SEQ ID NO: 3183819 - RNA, 19 nt, Artificial Sequence
  Description of Artificial Sequence: Synthetic oligonucleotide
aaacucuuucaauauauaa

SEQ ID NO: 3183820 - RNA, 19 nt, Artificial Sequence
  Description of Artificial Sequence: Synthetic oligonucleotide
aacacuguauggcuucaac

SEQ ID NO: 3183821 - RNA, 19 nt, Artificial Sequence
  Description of Artificial Sequence: Synthetic oligonucleotide
acucugagcaauccaauac

SEQ ID NO: 3183822 - RNA, 19 nt, Artificial Sequence
  Description of Artificial Sequence: Synthetic oligonucleotide
agguacuuauuacauauag

SEQ ID NO: 3183823 - RNA, 19 nt, Artificial Sequence
  Description of Artificial Sequence: Synthetic oligonucleotide
aggguauauagcuauaugu

SEQ ID NO: 3183824 - RNA, 19 nt, Artificial Sequence
  Description of Artificial Sequence: Synthetic oligonucleotide
gaaugaaaacaccacuuug

SEQ ID NO: 3183825 - RNA, 19 nt, Artificial Sequence
  Description of Artificial Sequence: Synthetic oligonucleotide
uuuauuucugaguuacaca

SEQ ID NO: 3183826 - RNA, 19 nt, Artificial Sequence
  Description of Artificial Sequence: Synthetic oligonucleotide
ucauuguggcccaagacca

SEQ ID NO: 3183827 - RNA, 19 nt, Artificial Sequence
  Description of Artificial Sequence: Synthetic oligonucleotide
uuuuauuucugaguuacac

SEQ ID NO: 3183828 - RNA, 19 nt, Artificial Sequence
  Description of Artificial Sequence: Synthetic oligonucleotide
auauauacuuuacucugag

SEQ ID NO: 3183829 - RNA, 19 nt, Artificial Sequence
  Description of Artificial Sequence: Synthetic oligonucleotide
ucuagagauccacagauua

SEQ ID NO: 3183830 - RNA, 19 nt, Artificial Sequence
  Description of Artificial Sequence: Synthetic oligonucleotide
ugucuaacagcagaguuag

SEQ ID NO: 3183831 - RNA, 19 nt, Artificial Sequence
  Description of Artificial Sequence: Synthetic oligonucleotide
uuuugcaaugcacaugagu

SEQ ID NO: 3183832 - RNA, 19 nt, Artificial Sequence
  Description of Artificial Sequence: Synthetic oligonucleotide
ugaagauaauaagauagca

SEQ ID NO: 3183833 - RNA, 19 nt, Artificial Sequence
  Description of Artificial Sequence: Synthetic oligonucleotide
ugugcacacacagauaucc

SEQ ID NO: 3183834 - RNA, 19 nt, Artificial Sequence
  Description of Artificial Sequence: Synthetic oligonucleotide
aguacgugcaguuaaagua

SEQ ID NO: 3183835 - RNA, 19 nt, Artificial Sequence
  Description of Artificial Sequence: Synthetic oligonucleotide
acaaugaugaaugacuuca

SEQ ID NO: 3183836 - RNA, 19 nt, Artificial Sequence
  Description of Artificial Sequence: Synthetic oligonucleotide
cucauuguggcccaagacc

SEQ ID NO: 3183837 - RNA, 19 nt, Artificial Sequence
  Description of Artificial Sequence: Synthetic oligonucleotide
uguucuuacauauuuucau

SEQ ID NO: 3183838 - RNA, 19 nt, Artificial Sequence
  Description of Artificial Sequence: Synthetic oligonucleotide
cugucaaucaucugguagc

SEQ ID NO: 3183839 - RNA, 19 nt, Artificial Sequence
  Description of Artificial Sequence: Synthetic oligonucleotide
aagguuugaaccugcuuug

SEQ ID NO: 3183840 - RNA, 19 nt, Artificial Sequence
  Description of Artificial Sequence: Synthetic oligonucleotide
uucaaauucuugcgcaacc

SEQ ID NO: 3183841 - RNA, 19 nt, Artificial Sequence
  Description of Artificial Sequence: Synthetic oligonucleotide
gauauccuaaaguagcaga

SEQ ID NO: 3183842 - RNA, 19 nt, Artificial Sequence
  Description of Artificial Sequence: Synthetic oligonucleotide
uugcucaucaguaugcccu

SEQ ID NO: 3183843 - RNA, 19 nt, Artificial Sequence
  Description of Artificial Sequence: Synthetic oligonucleotide
cacuguauggcuucaacag

SEQ ID NO: 3183844 - RNA, 19 nt, Artificial Sequence
  Description of Artificial Sequence: Synthetic oligonucleotide
ugcuccacaguuuugucag

SEQ ID NO: 3183845 - RNA, 19 nt, Artificial Sequence
  Description of Artificial Sequence: Synthetic oligonucleotide
aagcucuacagggaaauuc

SEQ ID NO: 3183846 - RNA, 19 nt, Artificial Sequence
  Description of Artificial Sequence: Synthetic oligonucleotide
ugaccagagcucuuguugg

SEQ ID NO: 3183847 - RNA, 19 nt, Artificial Sequence
  Description of Artificial Sequence: Synthetic oligonucleotide
ugugauaagacaguaguua

SEQ ID NO: 3183848 - RNA, 19 nt, Artificial Sequence
  Description of Artificial Sequence: Synthetic oligonucleotide
ugucaugucaccugaguga

SEQ ID NO: 3183849 - RNA, 19 nt, Artificial Sequence
  Description of Artificial Sequence: Synthetic oligonucleotide
cuacuuucugugcagauug

SEQ ID NO: 3183850 - RNA, 19 nt, Artificial Sequence
  Description of Artificial Sequence: Synthetic oligonucleotide
uuucugugcagauuguugu

SEQ ID NO: 3183851 - RNA, 19 nt, Artificial Sequence
  Description of Artificial Sequence: Synthetic oligonucleotide
cuaugcuuuugguaaaagc

SEQ ID NO: 3183852 - RNA, 19 nt, Artificial Sequence
  Description of Artificial Sequence: Synthetic oligonucleotide
agacuacggacaugcaucc

SEQ ID NO: 3183853 - RNA, 19 nt, Artificial Sequence
  Description of Artificial Sequence: Synthetic oligonucleotide
cauucagcuuuucauagag

SEQ ID NO: 3183854 - RNA, 19 nt, Artificial Sequence
  Description of Artificial Sequence: Synthetic oligonucleotide
guauuuguuuaccaaaaca

SEQ ID NO: 3183855 - RNA, 19 nt, Artificial Sequence
  Description of Artificial Sequence: Synthetic oligonucleotide
aaagacucaggcuggcaug

SEQ ID NO: 3183856 - RNA, 19 nt, Artificial Sequence
  Description of Artificial Sequence: Synthetic oligonucleotide
uccucagcuaccaucagcu

SEQ ID NO: 3183857 - RNA, 19 nt, Artificial Sequence
  Description of Artificial Sequence: Synthetic oligonucleotide
auagugguaaucugcccgg

SEQ ID NO: 3183858 - RNA, 19 nt, Artificial Sequence
  Description of Artificial Sequence: Synthetic oligonucleotide
ggaaggugagcuuauaaag

SEQ ID NO: 3183859 - RNA, 19 nt, Artificial Sequence
  Description of Artificial Sequence: Synthetic oligonucleotide
auauccuaaaguagcagac

SEQ ID NO: 3183860 - RNA, 19 nt, Artificial Sequence
  Description of Artificial Sequence: Synthetic oligonucleotide
ucaaauucuugcgcaaccg

SEQ ID NO: 3183861 - RNA, 19 nt, Artificial Sequence
  Description of Artificial Sequence: Synthetic oligonucleotide
ucaguaugcccuagggagg

SEQ ID NO: 3183862 - RNA, 19 nt, Artificial Sequence
  Description of Artificial Sequence: Synthetic oligonucleotide
aacucuuucaauauauaaa

SEQ ID NO: 3183863 - RNA, 19 nt, Artificial Sequence
  Description of Artificial Sequence: Synthetic oligonucleotide
uauacacuugcauuuaauu

SEQ ID NO: 3183864 - RNA, 19 nt, Artificial Sequence
  Description of Artificial Sequence: Synthetic oligonucleotide
aacaagucuaauauauacu

SEQ ID NO: 3183865 - RNA, 19 nt, Artificial Sequence
  Description of Artificial Sequence: Synthetic oligonucleotide
uucuuacauauuuucauau

SEQ ID NO: 3183866 - RNA, 19 nt, Artificial Sequence
  Description of Artificial Sequence: Synthetic oligonucleotide
uuggaugauucaauguuac

SEQ ID NO: 3183867 - RNA, 19 nt, Artificial Sequence
  Description of Artificial Sequence: Synthetic oligonucleotide
caugucaauccguuguucc

SEQ ID NO: 3183868 - RNA, 19 nt, Artificial Sequence
  Description of Artificial Sequence: Synthetic oligonucleotide
uacuauuuagguaguauuu

SEQ ID NO: 3183869 - RNA, 19 nt, Artificial Sequence
  Description of Artificial Sequence: Synthetic oligonucleotide
uauaacacuguauggcuuc

SEQ ID NO: 3183870 - RNA, 19 nt, Artificial Sequence
  Description of Artificial Sequence: Synthetic oligonucleotide
ucccuuagucuaaagcuag

SEQ ID NO: 3183871 - RNA, 19 nt, Artificial Sequence
  Description of Artificial Sequence: Synthetic oligonucleotide
auuuuggaugauucaaugu

SEQ ID NO: 3183872 - RNA, 19 nt, Artificial Sequence
  Description of Artificial Sequence: Synthetic oligonucleotide
uagacucacacuaaauuua

SEQ ID NO: 3183873 - RNA, 19 nt, Artificial Sequence
  Description of Artificial Sequence: Synthetic oligonucleotide
aaacgaacuauuucauaaa

SEQ ID NO: 3183874 - RNA, 19 nt, Artificial Sequence
  Description of Artificial Sequence: Synthetic oligonucleotide
agacauucucucuuuaacu

SEQ ID NO: 3183875 - RNA, 19 nt, Artificial Sequence
  Description of Artificial Sequence: Synthetic oligonucleotide
uuuggaugauucaauguua

SEQ ID NO: 3183876 - RNA, 19 nt, Artificial Sequence
  Description of Artificial Sequence: Synthetic oligonucleotide
cgaacuauuucauaaaggc

SEQ ID NO: 3183877 - RNA, 19 nt, Artificial Sequence
  Description of Artificial Sequence: Synthetic oligonucleotide
cuguuuaugggcuauuuca

SEQ ID NO: 3183878 - RNA, 19 nt, Artificial Sequence
  Description of Artificial Sequence: Synthetic oligonucleotide
uaguuaugcagaaccauaa

SEQ ID NO: 3183879 - RNA, 19 nt, Artificial Sequence
  Description of Artificial Sequence: Synthetic oligonucleotide
gagacucaagaacugcucc

SEQ ID NO: 3183880 - RNA, 19 nt, Artificial Sequence
  Description of Artificial Sequence: Synthetic oligonucleotide
agauuagaaauuacacugg

SEQ ID NO: 3183881 - RNA, 19 nt, Artificial Sequence
  Description of Artificial Sequence: Synthetic oligonucleotide
uauacuuuacucugagcaa

SEQ ID NO: 3183882 - RNA, 19 nt, Artificial Sequence
  Description of Artificial Sequence: Synthetic oligonucleotide
gaaauucagucagacuacg

SEQ ID NO: 3183883 - RNA, 19 nt, Artificial Sequence
  Description of Artificial Sequence: Synthetic oligonucleotide
acaggcggcaaacacaaug

SEQ ID NO: 3183884 - RNA, 19 nt, Artificial Sequence
  Description of Artificial Sequence: Synthetic oligonucleotide
uuagucauacuucugauug

SEQ ID NO: 3183885 - RNA, 19 nt, Artificial Sequence
  Description of Artificial Sequence: Synthetic oligonucleotide
ucaguguugaaccacaaag

SEQ ID NO: 3183886 - RNA, 19 nt, Artificial Sequence
  Description of Artificial Sequence: Synthetic oligonucleotide
ugugaugucaguguuaggg

SEQ ID NO: 3183887 - RNA, 19 nt, Artificial Sequence
  Description of Artificial Sequence: Synthetic oligonucleotide
aaugcugaaaugccaaguc

SEQ ID NO: 3183888 - RNA, 19 nt, Artificial Sequence
  Description of Artificial Sequence: Synthetic oligonucleotide
aggagaucaguguugaacc

SEQ ID NO: 3183889 - RNA, 19 nt, Artificial Sequence
  Description of Artificial Sequence: Synthetic oligonucleotide
uuuuaggucauauaggguc

SEQ ID NO: 3183890 - RNA, 19 nt, Artificial Sequence
  Description of Artificial Sequence: Synthetic oligonucleotide
uguugaaccacaaagcgaa

SEQ ID NO: 3183891 - RNA, 19 nt, Artificial Sequence
  Description of Artificial Sequence: Synthetic oligonucleotide
aaggagaucaguguugaac

SEQ ID NO: 3183892 - RNA, 19 nt, Artificial Sequence
  Description of Artificial Sequence: Synthetic oligonucleotide
ugaagcguccaucagagga

SEQ ID NO: 3183893 - RNA, 19 nt, Artificial Sequence
  Description of Artificial Sequence: Synthetic oligonucleotide
ucucauuacagcucaaggc

SEQ ID NO: 3183894 - RNA, 19 nt, Artificial Sequence
  Description of Artificial Sequence: Synthetic oligonucleotide
uuuugugcccgacaccucg

SEQ ID NO: 3183895 - RNA, 19 nt, Artificial Sequence
  Description of Artificial Sequence: Synthetic oligonucleotide
ucgagaguggcauagacgu

SEQ ID NO: 3183896 - RNA, 19 nt, Artificial Sequence
  Description of Artificial Sequence: Synthetic oligonucleotide
aaguucuucagccugccca

SEQ ID NO: 3183897 - RNA, 19 nt, Artificial Sequence
  Description of Artificial Sequence: Synthetic oligonucleotide
uuucccgguagacagcucg

SEQ ID NO: 3183898 - RNA, 19 nt, Artificial Sequence
  Description of Artificial Sequence: Synthetic oligonucleotide
uauacuagggaacuugcaa

SEQ ID NO: 3183899 - RNA, 19 nt, Artificial Sequence
  Description of Artificial Sequence: Synthetic oligonucleotide
ugcacgugcauccaggggc

SEQ ID NO: 3183900 - RNA, 19 nt, Artificial Sequence
  Description of Artificial Sequence: Synthetic oligonucleotide
auacuagggaacuugcaag

SEQ ID NO: 3183901 - RNA, 19 nt, Artificial Sequence
  Description of Artificial Sequence: Synthetic oligonucleotide
uacuagggaacuugcaagg

SEQ ID NO: 3183902 - RNA, 19 nt, Artificial Sequence
  Description of Artificial Sequence: Synthetic oligonucleotide
guugauuaggaacagcgac

SEQ ID NO: 3183903 - RNA, 19 nt, Artificial Sequence
  Description of Artificial Sequence: Synthetic oligonucleotide
aguguuagggcccagcacu

SEQ ID NO: 3183904 - RNA, 19 nt, Artificial Sequence
  Description of Artificial Sequence: Synthetic oligonucleotide
aaggcauuagucauacuuc

SEQ ID NO: 3183905 - RNA, 19 nt, Artificial Sequence
  Description of Artificial Sequence: Synthetic oligonucleotide
gaugaagcguccaucagag

SEQ ID NO: 3183906 - RNA, 19 nt, Artificial Sequence
  Description of Artificial Sequence: Synthetic oligonucleotide
cuuauacuagggaacuugc

SEQ ID NO: 3183907 - RNA, 19 nt, Artificial Sequence
  Description of Artificial Sequence: Synthetic oligonucleotide
uugauuaggaacagcgacu

SEQ ID NO: 3183908 - RNA, 19 nt, Artificial Sequence
  Description of Artificial Sequence: Synthetic oligonucleotide
uacugugaccuccugcacg

SEQ ID NO: 3183909 - RNA, 19 nt, Artificial Sequence
  Description of Artificial Sequence: Synthetic oligonucleotide
gacacugucgaugagcagc

SEQ ID NO: 3183910 - RNA, 19 nt, Artificial Sequence
  Description of Artificial Sequence: Synthetic oligonucleotide
uggugugcaaccaggaaca

SEQ ID NO: 3183911 - RNA, 19 nt, Artificial Sequence
  Description of Artificial Sequence: Synthetic oligonucleotide
aucgacggaagugucagcc

SEQ ID NO: 3183912 - RNA, 19 nt, Artificial Sequence
  Description of Artificial Sequence: Synthetic oligonucleotide
agacguuguacugauugcc

SEQ ID NO: 3183913 - RNA, 19 nt, Artificial Sequence
  Description of Artificial Sequence: Synthetic oligonucleotide
aagcgcauaccuuauacua

SEQ ID NO: 3183914 - RNA, 19 nt, Artificial Sequence
  Description of Artificial Sequence: Synthetic oligonucleotide
ggagguacuguccaaagag

SEQ ID NO: 3183915 - RNA, 19 nt, Artificial Sequence
  Description of Artificial Sequence: Synthetic oligonucleotide
uuuucauaccuccccgacc

SEQ ID NO: 3183916 - RNA, 19 nt, Artificial Sequence
  Description of Artificial Sequence: Synthetic oligonucleotide
gagaugauuuccuugcaca

SEQ ID NO: 3183917 - RNA, 19 nt, Artificial Sequence
  Description of Artificial Sequence: Synthetic oligonucleotide
caguguugaaccacaaagc

SEQ ID NO: 3183918 - RNA, 19 nt, Artificial Sequence
  Description of Artificial Sequence: Synthetic oligonucleotide
ucucccguugauuaggaac

SEQ ID NO: 3183919 - RNA, 19 nt, Artificial Sequence
  Description of Artificial Sequence: Synthetic oligonucleotide
auaccuuauacuagggaac

SEQ ID NO: 3183920 - RNA, 19 nt, Artificial Sequence
  Description of Artificial Sequence: Synthetic oligonucleotide
cucauuacagcucaaggca

SEQ ID NO: 3183921 - RNA, 19 nt, Artificial Sequence
  Description of Artificial Sequence: Synthetic oligonucleotide
uuaggaacagcgacucuug

SEQ ID NO: 3183922 - RNA, 19 nt, Artificial Sequence
  Description of Artificial Sequence: Synthetic oligonucleotide
uauagggucuggauuuccc

SEQ ID NO: 3183923 - RNA, 19 nt, Artificial Sequence
  Description of Artificial Sequence: Synthetic oligonucleotide
aaggcaaucgacggaagug

SEQ ID NO: 3183924 - RNA, 19 nt, Artificial Sequence
  Description of Artificial Sequence: Synthetic oligonucleotide
cauaccuuauacuagggaa

SEQ ID NO: 3183925 - RNA, 19 nt, Artificial Sequence
  Description of Artificial Sequence: Synthetic oligonucleotide
ugcaaggagaucaguguug

SEQ ID NO: 3183926 - RNA, 19 nt, Artificial Sequence
  Description of Artificial Sequence: Synthetic oligonucleotide
uuauacuagggaacuugca

SEQ ID NO: 3183927 - RNA, 19 nt, Artificial Sequence
  Description of Artificial Sequence: Synthetic oligonucleotide
ugugacacugucgaugagc

SEQ ID NO: 3183928 - RNA, 19 nt, Artificial Sequence
  Description of Artificial Sequence: Synthetic oligonucleotide
ugaaccacaaagcgaagua

SEQ ID NO: 3183929 - RNA, 19 nt, Artificial Sequence
  Description of Artificial Sequence: Synthetic oligonucleotide
ucugugguguccccaggcg

SEQ ID NO: 3183930 - RNA, 19 nt, Artificial Sequence
  Description of Artificial Sequence: Synthetic oligonucleotide
uagucauacuucugauugg

SEQ ID NO: 3183931 - RNA, 19 nt, Artificial Sequence
  Description of Artificial Sequence: Synthetic oligonucleotide
acccuuuugugcccgacac

SEQ ID NO: 3183932 - RNA, 19 nt, Artificial Sequence
  Description of Artificial Sequence: Synthetic oligonucleotide
ugcaaccaggaacagagau

SEQ ID NO: 3183933 - RNA, 19 nt, Artificial Sequence
  Description of Artificial Sequence: Synthetic oligonucleotide
aaucgacggaagugucagc

SEQ ID NO: 3183934 - RNA, 19 nt, Artificial Sequence
  Description of Artificial Sequence: Synthetic oligonucleotide
aaagagcccacugucccuc

SEQ ID NO: 3183935 - RNA, 19 nt, Artificial Sequence
  Description of Artificial Sequence: Synthetic oligonucleotide
uguccaaagagcccacugu

SEQ ID NO: 3183936 - RNA, 19 nt, Artificial Sequence
  Description of Artificial Sequence: Synthetic oligonucleotide
uccaaagagcccacugucc

SEQ ID NO: 3183937 - RNA, 19 nt, Artificial Sequence
  Description of Artificial Sequence: Synthetic oligonucleotide
acugauugccuucagugaa

SEQ ID NO: 3183938 - RNA, 19 nt, Artificial Sequence
  Description of Artificial Sequence: Synthetic oligonucleotide
ucuggcuccuugucgagag

SEQ ID NO: 3183939 - RNA, 19 nt, Artificial Sequence
  Description of Artificial Sequence: Synthetic oligonucleotide
uacagcucaaggcauuagu

SEQ ID NO: 3183940 - RNA, 19 nt, Artificial Sequence
  Description of Artificial Sequence: Synthetic oligonucleotide
ucgaggaacagcaggucug

SEQ ID NO: 3183941 - RNA, 19 nt, Artificial Sequence
  Description of Artificial Sequence: Synthetic oligonucleotide
gagaguggcauagacguug

SEQ ID NO: 3183942 - RNA, 19 nt, Artificial Sequence
  Description of Artificial Sequence: Synthetic oligonucleotide
ucaguguuagggcccagca

SEQ ID NO: 3183943 - RNA, 19 nt, Artificial Sequence
  Description of Artificial Sequence: Synthetic oligonucleotide
uuugucucccguugauuag

SEQ ID NO: 3183944 - RNA, 19 nt, Artificial Sequence
  Description of Artificial Sequence: Synthetic oligonucleotide
ggaacuugcaaggagauca

SEQ ID NO: 3183945 - RNA, 19 nt, Artificial Sequence
  Description of Artificial Sequence: Synthetic oligonucleotide
ggaagugucagccugggca

SEQ ID NO: 3183946 - RNA, 19 nt, Artificial Sequence
  Description of Artificial Sequence: Synthetic oligonucleotide
uacugauugccuucaguga

SEQ ID NO: 3183947 - RNA, 19 nt, Artificial Sequence
  Description of Artificial Sequence: Synthetic oligonucleotide
acacugacgaugaagcguc

SEQ ID NO: 3183948 - RNA, 19 nt, Artificial Sequence
  Description of Artificial Sequence: Synthetic oligonucleotide
acaccucgcaucucagggc

SEQ ID NO: 3183949 - RNA, 19 nt, Artificial Sequence
  Description of Artificial Sequence: Synthetic oligonucleotide
ccguugauuaggaacagcg

SEQ ID NO: 3183950 - RNA, 19 nt, Artificial Sequence
  Description of Artificial Sequence: Synthetic oligonucleotide
ugauuaggaacagcgacuc

SEQ ID NO: 3183951 - RNA, 19 nt, Artificial Sequence
  Description of Artificial Sequence: Synthetic oligonucleotide
aggcauuagucauacuucu

SEQ ID NO: 3183952 - RNA, 19 nt, Artificial Sequence
  Description of Artificial Sequence: Synthetic oligonucleotide
uccugcacgugcauccagg

SEQ ID NO: 3183953 - RNA, 19 nt, Artificial Sequence
  Description of Artificial Sequence: Synthetic oligonucleotide
ugucgagaguggcauagac

SEQ ID NO: 3183954 - RNA, 19 nt, Artificial Sequence
  Description of Artificial Sequence: Synthetic oligonucleotide
agacacugacgaugaagcg

SEQ ID NO: 3183955 - RNA, 19 nt, Artificial Sequence
  Description of Artificial Sequence: Synthetic oligonucleotide
gaaaugccaagucugagau

SEQ ID NO: 3183956 - RNA, 19 nt, Artificial Sequence
  Description of Artificial Sequence: Synthetic oligonucleotide
acagcucaaggcauuaguc

SEQ ID NO: 3183957 - RNA, 19 nt, Artificial Sequence
  Description of Artificial Sequence: Synthetic oligonucleotide
gacagcucgaggaacagca

SEQ ID NO: 3183958 - RNA, 19 nt, Artificial Sequence
  Description of Artificial Sequence: Synthetic oligonucleotide
auauagggucuggauuucc

SEQ ID NO: 3183959 - RNA, 19 nt, Artificial Sequence
  Description of Artificial Sequence: Synthetic oligonucleotide
uugucucccguugauuagg

SEQ ID NO: 3183960 - RNA, 19 nt, Artificial Sequence
  Description of Artificial Sequence: Synthetic oligonucleotide
auccaggggcccuuguugg

SEQ ID NO: 3183961 - RNA, 19 nt, Artificial Sequence
  Description of Artificial Sequence: Synthetic oligonucleotide
acuugcaaggagaucagug

SEQ ID NO: 3183962 - RNA, 19 nt, Artificial Sequence
  Description of Artificial Sequence: Synthetic oligonucleotide
cuugucgagaguggcauag

SEQ ID NO: 3183963 - RNA, 19 nt, Artificial Sequence
  Description of Artificial Sequence: Synthetic oligonucleotide
acugugaccuccugcacgu

SEQ ID NO: 3183964 - RNA, 19 nt, Artificial Sequence
  Description of Artificial Sequence: Synthetic oligonucleotide
uaccuuauacuagggaacu

SEQ ID NO: 3183965 - RNA, 19 nt, Artificial Sequence
  Description of Artificial Sequence: Synthetic oligonucleotide
caaccaggaacagagauga

SEQ ID NO: 3183966 - RNA, 19 nt, Artificial Sequence
  Description of Artificial Sequence: Synthetic oligonucleotide
acugucgaugagcagcugu

SEQ ID NO: 3183967 - RNA, 19 nt, Artificial Sequence
  Description of Artificial Sequence: Synthetic oligonucleotide
gauucugcgggguccgccc

SEQ ID NO: 3183968 - RNA, 19 nt, Artificial Sequence
  Description of Artificial Sequence: Synthetic oligonucleotide
uguggagguaggagugucc

SEQ ID NO: 3183969 - RNA, 19 nt, Artificial Sequence
  Description of Artificial Sequence: Synthetic oligonucleotide
caaucgacggaagugucag

SEQ ID NO: 3183970 - RNA, 19 nt, Artificial Sequence
  Description of Artificial Sequence: Synthetic oligonucleotide
auuaggaacagcgacucuu

SEQ ID NO: 3183971 - RNA, 19 nt, Artificial Sequence
  Description of Artificial Sequence: Synthetic oligonucleotide
uggcauagacguuguacug

SEQ ID NO: 3183972 - RNA, 19 nt, Artificial Sequence
  Description of Artificial Sequence: Synthetic oligonucleotide
uugaaccacaaagcgaagu

SEQ ID NO: 3183973 - RNA, 19 nt, Artificial Sequence
  Description of Artificial Sequence: Synthetic oligonucleotide
gacguggugugcaaccagg

SEQ ID NO: 3183974 - RNA, 19 nt, Artificial Sequence
  Description of Artificial Sequence: Synthetic oligonucleotide
caccucgcaucucagggcg

SEQ ID NO: 3183975 - RNA, 19 nt, Artificial Sequence
  Description of Artificial Sequence: Synthetic oligonucleotide
agucauacuucugauugga

SEQ ID NO: 3183976 - RNA, 19 nt, Artificial Sequence
  Description of Artificial Sequence: Synthetic oligonucleotide
ucucagggcguuuugucuc

SEQ ID NO: 3183977 - RNA, 19 nt, Artificial Sequence
  Description of Artificial Sequence: Synthetic oligonucleotide
gaaccacaaagcgaaguac

SEQ ID NO: 3183978 - RNA, 19 nt, Artificial Sequence
  Description of Artificial Sequence: Synthetic oligonucleotide
ugucagccugggcagcagg

SEQ ID NO: 3183979 - RNA, 19 nt, Artificial Sequence
  Description of Artificial Sequence: Synthetic oligonucleotide
cucccguugauuaggaaca

SEQ ID NO: 3183980 - RNA, 19 nt, Artificial Sequence
  Description of Artificial Sequence: Synthetic oligonucleotide
gcuccuuuaaguucuucag

SEQ ID NO: 3183981 - RNA, 19 nt, Artificial Sequence
  Description of Artificial Sequence: Synthetic oligonucleotide
gucgagaguggcauagacg

SEQ ID NO: 3183982 - RNA, 19 nt, Artificial Sequence
  Description of Artificial Sequence: Synthetic oligonucleotide
aggaacagcaggucuggcu

SEQ ID NO: 3183983 - RNA, 19 nt, Artificial Sequence
  Description of Artificial Sequence: Synthetic oligonucleotide
aucucagggcguuuugucu

SEQ ID NO: 3183984 - RNA, 19 nt, Artificial Sequence
  Description of Artificial Sequence: Synthetic oligonucleotide
aauaguuucagucugccgc

SEQ ID NO: 3183985 - RNA, 19 nt, Artificial Sequence
  Description of Artificial Sequence: Synthetic oligonucleotide
aaauccuucauucuggucg

SEQ ID NO: 3183986 - RNA, 19 nt, Artificial Sequence
  Description of Artificial Sequence: Synthetic oligonucleotide
aaugaaauccuucauucug

SEQ ID NO: 3183987 - RNA, 19 nt, Artificial Sequence
  Description of Artificial Sequence: Synthetic oligonucleotide
aagaauccggcauuccucc

SEQ ID NO: 3183988 - RNA, 19 nt, Artificial Sequence
  Description of Artificial Sequence: Synthetic oligonucleotide
aguaucacaguacaggcuc

SEQ ID NO: 3183989 - RNA, 19 nt, Artificial Sequence
  Description of Artificial Sequence: Synthetic oligonucleotide
aaaggaauaguuucagucu

SEQ ID NO: 3183990 - RNA, 19 nt, Artificial Sequence
  Description of Artificial Sequence: Synthetic oligonucleotide
cucacugucagucuggucg

SEQ ID NO: 3183991 - RNA, 19 nt, Artificial Sequence
  Description of Artificial Sequence: Synthetic oligonucleotide
ggagcuuuugauuaaaugg

SEQ ID NO: 3183992 - RNA, 19 nt, Artificial Sequence
  Description of Artificial Sequence: Synthetic oligonucleotide
uccagcaucuaucagagug

SEQ ID NO: 3183993 - RNA, 19 nt, Artificial Sequence
  Description of Artificial Sequence: Synthetic oligonucleotide
uccacuauccuucaggcug

SEQ ID NO: 3183994 - RNA, 19 nt, Artificial Sequence
  Description of Artificial Sequence: Synthetic oligonucleotide
uuuugauuaaaugggcacg

SEQ ID NO: 3183995 - RNA, 19 nt, Artificial Sequence
  Description of Artificial Sequence: Synthetic oligonucleotide
aaggaauaguuucagucug

SEQ ID NO: 3183996 - RNA, 19 nt, Artificial Sequence
  Description of Artificial Sequence: Synthetic oligonucleotide
uucagcacaucauucacag

SEQ ID NO: 3183997 - RNA, 19 nt, Artificial Sequence
  Description of Artificial Sequence: Synthetic oligonucleotide
caaaggaauaguuucaguc

SEQ ID NO: 3183998 - RNA, 19 nt, Artificial Sequence
  Description of Artificial Sequence: Synthetic oligonucleotide
uuugauuaaaugggcacgg

SEQ ID NO: 3183999 - RNA, 19 nt, Artificial Sequence
  Description of Artificial Sequence: Synthetic oligonucleotide
gagcuuuugauuaaauggg

SEQ ID NO: 3184000 - RNA, 19 nt, Artificial Sequence
  Description of Artificial Sequence: Synthetic oligonucleotide
aucagaguggccaagaauc

SEQ ID NO: 3184001 - RNA, 19 nt, Artificial Sequence
  Description of Artificial Sequence: Synthetic oligonucleotide
uauucacguaguuagaguc

SEQ ID NO: 3184002 - RNA, 19 nt, Artificial Sequence
  Description of Artificial Sequence: Synthetic oligonucleotide
gagucaaaggaauaguuuc

SEQ ID NO: 3184003 - RNA, 19 nt, Artificial Sequence
  Description of Artificial Sequence: Synthetic oligonucleotide
aaugggcacggcuauucac

SEQ ID NO: 3184004 - RNA, 19 nt, Artificial Sequence
  Description of Artificial Sequence: Synthetic oligonucleotide
cuuuugauuaaaugggcac

SEQ ID NO: 3184005 - RNA, 19 nt, Artificial Sequence
  Description of Artificial Sequence: Synthetic oligonucleotide
agcaguaucacaguacagg

SEQ ID NO: 3184006 - RNA, 19 nt, Artificial Sequence
  Description of Artificial Sequence: Synthetic oligonucleotide
gagacuuggagcgaguagg

SEQ ID NO: 3184007 - RNA, 19 nt, Artificial Sequence
  Description of Artificial Sequence: Synthetic oligonucleotide
aggcauaggauuccguggc

SEQ ID NO: 3184008 - RNA, 19 nt, Artificial Sequence
  Description of Artificial Sequence: Synthetic oligonucleotide
uccagguccuugaaggugg

SEQ ID NO: 3184009 - RNA, 19 nt, Artificial Sequence
  Description of Artificial Sequence: Synthetic oligonucleotide
cuauccuucaggcuguugc

SEQ ID NO: 3184010 - RNA, 19 nt, Artificial Sequence
  Description of Artificial Sequence: Synthetic oligonucleotide
ucugagaucccauggaggu

SEQ ID NO: 3184011 - RNA, 19 nt, Artificial Sequence
  Description of Artificial Sequence: Synthetic oligonucleotide
auaguuucagucugccgcg

SEQ ID NO: 3184012 - RNA, 19 nt, Artificial Sequence
  Description of Artificial Sequence: Synthetic oligonucleotide
guuagagucaaaggaauag

SEQ ID NO: 3184013 - RNA, 19 nt, Artificial Sequence
  Description of Artificial Sequence: Synthetic oligonucleotide
ugauuaaaugggcacggcu

SEQ ID NO: 3184014 - RNA, 19 nt, Artificial Sequence
  Description of Artificial Sequence: Synthetic oligonucleotide
auucacagcaguaucacag

SEQ ID NO: 3184015 - RNA, 19 nt, Artificial Sequence
  Description of Artificial Sequence: Synthetic oligonucleotide
uaggcauaggauuccgugg

SEQ ID NO: 3184016 - RNA, 19 nt, Artificial Sequence
  Description of Artificial Sequence: Synthetic oligonucleotide
auguccacuauccuucagg

SEQ ID NO: 3184017 - RNA, 19 nt, Artificial Sequence
  Description of Artificial Sequence: Synthetic oligonucleotide
auggaggucacacuggugu

SEQ ID NO: 3184018 - RNA, 19 nt, Artificial Sequence
  Description of Artificial Sequence: Synthetic oligonucleotide
auaggauuccguggcaucc

SEQ ID NO: 3184019 - RNA, 19 nt, Artificial Sequence
  Description of Artificial Sequence: Synthetic oligonucleotide
aagguggagcuuuugauua

SEQ ID NO: 3184020 - RNA, 19 nt, Artificial Sequence
  Description of Artificial Sequence: Synthetic oligonucleotide
cuggacaucaugcucacug

SEQ ID NO: 3184021 - RNA, 19 nt, Artificial Sequence
  Description of Artificial Sequence: Synthetic oligonucleotide
acguaguuagagucaaagg

SEQ ID NO: 3184022 - RNA, 19 nt, Artificial Sequence
  Description of Artificial Sequence: Synthetic oligonucleotide
gaauaguuucagucugccg

SEQ ID NO: 3184023 - RNA, 19 nt, Artificial Sequence
  Description of Artificial Sequence: Synthetic oligonucleotide
acagcaguaucacaguaca

SEQ ID NO: 3184024 - RNA, 19 nt, Artificial Sequence
  Description of Artificial Sequence: Synthetic oligonucleotide
uggagcuuuugauuaaaug

SEQ ID NO: 3184025 - RNA, 19 nt, Artificial Sequence
  Description of Artificial Sequence: Synthetic oligonucleotide
cauccagcaucuaucagag

SEQ ID NO: 3184026 - RNA, 19 nt, Artificial Sequence
  Description of Artificial Sequence: Synthetic oligonucleotide
aguacaggcuccucuggac

SEQ ID NO: 3184027 - RNA, 19 nt, Artificial Sequence
  Description of Artificial Sequence: Synthetic oligonucleotide
uguccacuauccuucaggc

SEQ ID NO: 3184028 - RNA, 19 nt, Artificial Sequence
  Description of Artificial Sequence: Synthetic oligonucleotide
aucaugcucacugucaguc

SEQ ID NO: 3184029 - RNA, 19 nt, Artificial Sequence
  Description of Artificial Sequence: Synthetic oligonucleotide
agcuuuugauuaaaugggc

SEQ ID NO: 3184030 - RNA, 19 nt, Artificial Sequence
  Description of Artificial Sequence: Synthetic oligonucleotide
cucauguccacuauccuuc

SEQ ID NO: 3184031 - RNA, 19 nt, Artificial Sequence
  Description of Artificial Sequence: Synthetic oligonucleotide
ugcaaugaaauccuucauu

SEQ ID NO: 3184032 - RNA, 19 nt, Artificial Sequence
  Description of Artificial Sequence: Synthetic oligonucleotide
uguucagcacaucauucac

SEQ ID NO: 3184033 - RNA, 19 nt, Artificial Sequence
  Description of Artificial Sequence: Synthetic oligonucleotide
aauccuucauucuggucgu

SEQ ID NO: 3184034 - RNA, 19 nt, Artificial Sequence
  Description of Artificial Sequence: Synthetic oligonucleotide
auucuggucguggucaggc

SEQ ID NO: 3184035 - RNA, 19 nt, Artificial Sequence
  Description of Artificial Sequence: Synthetic oligonucleotide
augaaauccuucauucugg

SEQ ID NO: 3184036 - RNA, 19 nt, Artificial Sequence
  Description of Artificial Sequence: Synthetic oligonucleotide
agguccuugaagguggagc

SEQ ID NO: 3184037 - RNA, 19 nt, Artificial Sequence
  Description of Artificial Sequence: Synthetic oligonucleotide
acaucaugcucacugucag

SEQ ID NO: 3184038 - RNA, 19 nt, Artificial Sequence
  Description of Artificial Sequence: Synthetic oligonucleotide
ucccauggaggucacacug

SEQ ID NO: 3184039 - RNA, 19 nt, Artificial Sequence
  Description of Artificial Sequence: Synthetic oligonucleotide
ugcucaggagacuuggagc

SEQ ID NO: 3184040 - RNA, 19 nt, Artificial Sequence
  Description of Artificial Sequence: Synthetic oligonucleotide
acugguguucagcacauca

SEQ ID NO: 3184041 - RNA, 19 nt, Artificial Sequence
  Description of Artificial Sequence: Synthetic oligonucleotide
uugaagguggagcuuuuga

SEQ ID NO: 3184042 - RNA, 19 nt, Artificial Sequence
  Description of Artificial Sequence: Synthetic oligonucleotide
uaguuagagucaaaggaau

SEQ ID NO: 3184043 - RNA, 19 nt, Artificial Sequence
  Description of Artificial Sequence: Synthetic oligonucleotide
cagcacaucauucacagca

SEQ ID NO: 3184044 - RNA, 19 nt, Artificial Sequence
  Description of Artificial Sequence: Synthetic oligonucleotide
ucagaguggccaagaaucc

SEQ ID NO: 3184045 - RNA, 19 nt, Artificial Sequence
  Description of Artificial Sequence: Synthetic oligonucleotide
guaggcauaggauuccgug

SEQ ID NO: 3184046 - RNA, 19 nt, Artificial Sequence
  Description of Artificial Sequence: Synthetic oligonucleotide
gauuccguggcauccagca

SEQ ID NO: 3184047 - RNA, 19 nt, Artificial Sequence
  Description of Artificial Sequence: Synthetic oligonucleotide
uucauucuggucgugguca

SEQ ID NO: 3184048 - RNA, 19 nt, Artificial Sequence
  Description of Artificial Sequence: Synthetic oligonucleotide
ugagaucccauggagguca

SEQ ID NO: 3184049 - RNA, 19 nt, Artificial Sequence
  Description of Artificial Sequence: Synthetic oligonucleotide
cuccucauguccacuaucc

SEQ ID NO: 3184050 - RNA, 19 nt, Artificial Sequence
  Description of Artificial Sequence: Synthetic oligonucleotide
uagagucaaaggaauaguu

SEQ ID NO: 3184051 - RNA, 19 nt, Artificial Sequence
  Description of Artificial Sequence: Synthetic oligonucleotide
uuagagucaaaggaauagu

SEQ ID NO: 3184052 - RNA, 19 nt, Artificial Sequence
  Description of Artificial Sequence: Synthetic oligonucleotide
auuaaaugggcacggcuau

SEQ ID NO: 3184053 - RNA, 19 nt, Artificial Sequence
  Description of Artificial Sequence: Synthetic oligonucleotide
gcaaugaaauccuucauuc

SEQ ID NO: 3184054 - RNA, 19 nt, Artificial Sequence
  Description of Artificial Sequence: Synthetic oligonucleotide
ugaagguggagcuuuugau

SEQ ID NO: 3184055 - RNA, 19 nt, Artificial Sequence
  Description of Artificial Sequence: Synthetic oligonucleotide
gcucaggagacuuggagcg

SEQ ID NO: 3184056 - RNA, 19 nt, Artificial Sequence
  Description of Artificial Sequence: Synthetic oligonucleotide
aguuucagucugccgcgcc

SEQ ID NO: 3184057 - RNA, 19 nt, Artificial Sequence
  Description of Artificial Sequence: Synthetic oligonucleotide
ucacaguacaggcuccucu

SEQ ID NO: 3184058 - RNA, 19 nt, Artificial Sequence
  Description of Artificial Sequence: Synthetic oligonucleotide
uauccuucaggcuguugcc

SEQ ID NO: 3184059 - RNA, 19 nt, Artificial Sequence
  Description of Artificial Sequence: Synthetic oligonucleotide
cacguaguuagagucaaag

SEQ ID NO: 3184060 - RNA, 19 nt, Artificial Sequence
  Description of Artificial Sequence: Synthetic oligonucleotide
ucaaaggaauaguuucagu

SEQ ID NO: 3184061 - RNA, 19 nt, Artificial Sequence
  Description of Artificial Sequence: Synthetic oligonucleotide
uaucagaguggccaagaau

SEQ ID NO: 3184062 - RNA, 19 nt, Artificial Sequence
  Description of Artificial Sequence: Synthetic oligonucleotide
ugaaauccuucauucuggu

SEQ ID NO: 3184063 - RNA, 19 nt, Artificial Sequence
  Description of Artificial Sequence: Synthetic oligonucleotide
caagaauccggcauuccuc

SEQ ID NO: 3184064 - RNA, 19 nt, Artificial Sequence
  Description of Artificial Sequence: Synthetic oligonucleotide
caucugagaucccauggag

SEQ ID NO: 3184065 - RNA, 19 nt, Artificial Sequence
  Description of Artificial Sequence: Synthetic oligonucleotide
uuccguggcauccagcauc

SEQ ID NO: 3184066 - RNA, 19 nt, Artificial Sequence
  Description of Artificial Sequence: Synthetic oligonucleotide
acuuggagcgaguaggcau

SEQ ID NO: 3184067 - RNA, 19 nt, Artificial Sequence
  Description of Artificial Sequence: Synthetic oligonucleotide
aauccggcauuccucccug

SEQ ID NO: 3184068 - RNA, 19 nt, Artificial Sequence
  Description of Artificial Sequence: Synthetic oligonucleotide
gucaaaggaauaguuucag

SEQ ID NO: 3184069 - RNA, 19 nt, Artificial Sequence
  Description of Artificial Sequence: Synthetic oligonucleotide
gauuaaaugggcacggcua

SEQ ID NO: 3184070 - RNA, 19 nt, Artificial Sequence
  Description of Artificial Sequence: Synthetic oligonucleotide
aggaauaguuucagucugc

SEQ ID NO: 3184071 - RNA, 19 nt, Artificial Sequence
  Description of Artificial Sequence: Synthetic oligonucleotide
agaguggccaagaauccgg

SEQ ID NO: 3184072 - RNA, 19 nt, Artificial Sequence
  Description of Artificial Sequence: Synthetic oligonucleotide
agcgaguaggcauaggauu

SEQ ID NO: 3184073 - RNA, 19 nt, Artificial Sequence
  Description of Artificial Sequence: Synthetic oligonucleotide
agucuggucgcucuccuca

SEQ ID NO: 3184074 - RNA, 19 nt, Artificial Sequence
  Description of Artificial Sequence: Synthetic oligonucleotide
aaaugggcacggcuauuca

SEQ ID NO: 3184075 - RNA, 19 nt, Artificial Sequence
  Description of Artificial Sequence: Synthetic oligonucleotide
ucauucacagcaguaucac

SEQ ID NO: 3184076 - RNA, 19 nt, Artificial Sequence
  Description of Artificial Sequence: Synthetic oligonucleotide
gaucccauggaggucacac

SEQ ID NO: 3184077 - RNA, 19 nt, Artificial Sequence
  Description of Artificial Sequence: Synthetic oligonucleotide
guaguuagagucaaaggaa

SEQ ID NO: 3184078 - RNA, 19 nt, Artificial Sequence
  Description of Artificial Sequence: Synthetic oligonucleotide
acaguacaggcuccucugg

SEQ ID NO: 3184079 - RNA, 19 nt, Artificial Sequence
  Description of Artificial Sequence: Synthetic oligonucleotide
ucguggucaggcaucugag

SEQ ID NO: 3184080 - RNA, 19 nt, Artificial Sequence
  Description of Artificial Sequence: Synthetic oligonucleotide
gcaguaucacaguacaggc

SEQ ID NO: 3184081 - RNA, 19 nt, Artificial Sequence
  Description of Artificial Sequence: Synthetic oligonucleotide
cacagcaguaucacaguac

SEQ ID NO: 3184082 - RNA, 19 nt, Artificial Sequence
  Description of Artificial Sequence: Synthetic oligonucleotide
ucuaucagaguggccaaga

SEQ ID NO: 3184083 - RNA, 19 nt, Artificial Sequence
  Description of Artificial Sequence: Synthetic oligonucleotide
uccuucauucuggucgugg

SEQ ID NO: 3184084 - RNA, 19 nt, Artificial Sequence
  Description of Artificial Sequence: Synthetic oligonucleotide
aucauuggcaucuaaaagc

SEQ ID NO: 3184085 - RNA, 19 nt, Artificial Sequence
  Description of Artificial Sequence: Synthetic oligonucleotide
auuaaagaaauauucacag

SEQ ID NO: 3184086 - RNA, 19 nt, Artificial Sequence
  Description of Artificial Sequence: Synthetic oligonucleotide
ugauaaaagagcuacauga

SEQ ID NO: 3184087 - RNA, 19 nt, Artificial Sequence
  Description of Artificial Sequence: Synthetic oligonucleotide
gaucaaaccauucaauugg

SEQ ID NO: 3184088 - RNA, 19 nt, Artificial Sequence
  Description of Artificial Sequence: Synthetic oligonucleotide
uggaauacugauaaaagag

SEQ ID NO: 3184089 - RNA, 19 nt, Artificial Sequence
  Description of Artificial Sequence: Synthetic oligonucleotide
aaguuuuauacucaaagca

SEQ ID NO: 3184090 - RNA, 19 nt, Artificial Sequence
  Description of Artificial Sequence: Synthetic oligonucleotide
ucgacuacaaagaugaaag

SEQ ID NO: 3184091 - RNA, 19 nt, Artificial Sequence
  Description of Artificial Sequence: Synthetic oligonucleotide
aguguagccauauugaguc

SEQ ID NO: 3184092 - RNA, 19 nt, Artificial Sequence
  Description of Artificial Sequence: Synthetic oligonucleotide
cauacaguagcauaguugg

SEQ ID NO: 3184093 - RNA, 19 nt, Artificial Sequence
  Description of Artificial Sequence: Synthetic oligonucleotide
agaaguuuuauacucaaag

SEQ ID NO: 3184094 - RNA, 19 nt, Artificial Sequence
  Description of Artificial Sequence: Synthetic oligonucleotide
aaauauucacagaacaugg

SEQ ID NO: 3184095 - RNA, 19 nt, Artificial Sequence
  Description of Artificial Sequence: Synthetic oligonucleotide
auaaacuucaaugaugggg

SEQ ID NO: 3184096 - RNA, 19 nt, Artificial Sequence
  Description of Artificial Sequence: Synthetic oligonucleotide
acaucauuuauggugaugc

SEQ ID NO: 3184097 - RNA, 19 nt, Artificial Sequence
  Description of Artificial Sequence: Synthetic oligonucleotide
uuuaauuacagcauccaaa

SEQ ID NO: 3184098 - RNA, 19 nt, Artificial Sequence
  Description of Artificial Sequence: Synthetic oligonucleotide
aaugcaguccuccagaaaa

SEQ ID NO: 3184099 - RNA, 19 nt, Artificial Sequence
  Description of Artificial Sequence: Synthetic oligonucleotide
uuaguaaacacuuguguca

SEQ ID NO: 3184100 - RNA, 19 nt, Artificial Sequence
  Description of Artificial Sequence: Synthetic oligonucleotide
uguaaugguguucuaaaca

SEQ ID NO: 3184101 - RNA, 19 nt, Artificial Sequence
  Description of Artificial Sequence: Synthetic oligonucleotide
auacugauaaaagagcuac

SEQ ID NO: 3184102 - RNA, 19 nt, Artificial Sequence
  Description of Artificial Sequence: Synthetic oligonucleotide
gaaguuuuauacucaaagc

SEQ ID NO: 3184103 - RNA, 19 nt, Artificial Sequence
  Description of Artificial Sequence: Synthetic oligonucleotide
uuagauugcaauuugcauc

SEQ ID NO: 3184104 - RNA, 19 nt, Artificial Sequence
  Description of Artificial Sequence: Synthetic oligonucleotide
cacaaaaucguauuucugc

SEQ ID NO: 3184105 - RNA, 19 nt, Artificial Sequence
  Description of Artificial Sequence: Synthetic oligonucleotide
uauuagauugcaauuugca

SEQ ID NO: 3184106 - RNA, 19 nt, Artificial Sequence
  Description of Artificial Sequence: Synthetic oligonucleotide
uauucaucagcacauauua

SEQ ID NO: 3184107 - RNA, 19 nt, Artificial Sequence
  Description of Artificial Sequence: Synthetic oligonucleotide
aucuaaaagcaucaaguuc

SEQ ID NO: 3184108 - RNA, 19 nt, Artificial Sequence
  Description of Artificial Sequence: Synthetic oligonucleotide
aaugauggggcaauuaaag

SEQ ID NO: 3184109 - RNA, 19 nt, Artificial Sequence
  Description of Artificial Sequence: Synthetic oligonucleotide
auaaaagagcuacaugauc

SEQ ID NO: 3184110 - RNA, 19 nt, Artificial Sequence
  Description of Artificial Sequence: Synthetic oligonucleotide
uccauaaacuucaaugaug

SEQ ID NO: 3184111 - RNA, 19 nt, Artificial Sequence
  Description of Artificial Sequence: Synthetic oligonucleotide
auucaauugggacaugcuc

SEQ ID NO: 3184112 - RNA, 19 nt, Artificial Sequence
  Description of Artificial Sequence: Synthetic oligonucleotide
uauucuugaacugggaaag

SEQ ID NO: 3184113 - RNA, 19 nt, Artificial Sequence
  Description of Artificial Sequence: Synthetic oligonucleotide
uuguggacaaauaaccuug

SEQ ID NO: 3184114 - RNA, 19 nt, Artificial Sequence
  Description of Artificial Sequence: Synthetic oligonucleotide
ucccaagucauucuuagug

SEQ ID NO: 3184115 - RNA, 19 nt, Artificial Sequence
  Description of Artificial Sequence: Synthetic oligonucleotide
uuaagcuguacuuuggccu

SEQ ID NO: 3184116 - RNA, 19 nt, Artificial Sequence
  Description of Artificial Sequence: Synthetic oligonucleotide
agacauaagaacaauucgg

SEQ ID NO: 3184117 - RNA, 19 nt, Artificial Sequence
  Description of Artificial Sequence: Synthetic oligonucleotide
aaaacgaggcucaaugggg

SEQ ID NO: 3184118 - RNA, 19 nt, Artificial Sequence
  Description of Artificial Sequence: Synthetic oligonucleotide
aauaaccuugguuacucca

SEQ ID NO: 3184119 - RNA, 19 nt, Artificial Sequence
  Description of Artificial Sequence: Synthetic oligonucleotide
ucggacuucaggauaagcc

SEQ ID NO: 3184120 - RNA, 19 nt, Artificial Sequence
  Description of Artificial Sequence: Synthetic oligonucleotide
acauaagaacaauucggac

SEQ ID NO: 3184121 - RNA, 19 nt, Artificial Sequence
  Description of Artificial Sequence: Synthetic oligonucleotide
aggcgcagaaguuuuauac

SEQ ID NO: 3184122 - RNA, 19 nt, Artificial Sequence
  Description of Artificial Sequence: Synthetic oligonucleotide
auaagccagaaccacauca

SEQ ID NO: 3184123 - RNA, 19 nt, Artificial Sequence
  Description of Artificial Sequence: Synthetic oligonucleotide
uuaguguagccauauugag

SEQ ID NO: 3184124 - RNA, 19 nt, Artificial Sequence
  Description of Artificial Sequence: Synthetic oligonucleotide
ugucaguaaacaaucuucu

SEQ ID NO: 3184125 - RNA, 19 nt, Artificial Sequence
  Description of Artificial Sequence: Synthetic oligonucleotide
uauuucugcuucuucuccg

SEQ ID NO: 3184126 - RNA, 19 nt, Artificial Sequence
  Description of Artificial Sequence: Synthetic oligonucleotide
uuuaagcuguacuuuggcc

SEQ ID NO: 3184127 - RNA, 19 nt, Artificial Sequence
  Description of Artificial Sequence: Synthetic oligonucleotide
caaaacgaggcucaauggg

SEQ ID NO: 3184128 - RNA, 19 nt, Artificial Sequence
  Description of Artificial Sequence: Synthetic oligonucleotide
guuaguaaacacuuguguc

SEQ ID NO: 3184129 - RNA, 19 nt, Artificial Sequence
  Description of Artificial Sequence: Synthetic oligonucleotide
uguucuaaacaucucuggu

SEQ ID NO: 3184130 - RNA, 19 nt, Artificial Sequence
  Description of Artificial Sequence: Synthetic oligonucleotide
ucaauaguugcagacauaa

SEQ ID NO: 3184131 - RNA, 19 nt, Artificial Sequence
  Description of Artificial Sequence: Synthetic oligonucleotide
cuugugucaguaaacaauc

SEQ ID NO: 3184132 - RNA, 19 nt, Artificial Sequence
  Description of Artificial Sequence: Synthetic oligonucleotide
ccauaaacuucaaugaugg

SEQ ID NO: 3184133 - RNA, 19 nt, Artificial Sequence
  Description of Artificial Sequence: Synthetic oligonucleotide
uaucaauaguugcagacau

SEQ ID NO: 3184134 - RNA, 19 nt, Artificial Sequence
  Description of Artificial Sequence: Synthetic oligonucleotide
aaaauuccggugaauguag

SEQ ID NO: 3184135 - RNA, 19 nt, Artificial Sequence
  Description of Artificial Sequence: Synthetic oligonucleotide
aggagucaauaacauaaac

SEQ ID NO: 3184136 - RNA, 19 nt, Artificial Sequence
  Description of Artificial Sequence: Synthetic oligonucleotide
ugcaauuugcaucaucuau

SEQ ID NO: 3184137 - RNA, 19 nt, Artificial Sequence
  Description of Artificial Sequence: Synthetic oligonucleotide
uuuauggugaugcuuguuu

SEQ ID NO: 3184138 - RNA, 19 nt, Artificial Sequence
  Description of Artificial Sequence: Synthetic oligonucleotide
caaucuucuggaaagccag

SEQ ID NO: 3184139 - RNA, 19 nt, Artificial Sequence
  Description of Artificial Sequence: Synthetic oligonucleotide
gaugaaagcagaacccggg

SEQ ID NO: 3184140 - RNA, 19 nt, Artificial Sequence
  Description of Artificial Sequence: Synthetic oligonucleotide
auuucugcuucuucuccgc

SEQ ID NO: 3184141 - RNA, 19 nt, Artificial Sequence
  Description of Artificial Sequence: Synthetic oligonucleotide
aguacuaccagaaggaagu

SEQ ID NO: 3184142 - RNA, 19 nt, Artificial Sequence
  Description of Artificial Sequence: Synthetic oligonucleotide
auguaaugguguucuaaac

SEQ ID NO: 3184143 - RNA, 19 nt, Artificial Sequence
  Description of Artificial Sequence: Synthetic oligonucleotide
uuugcucacaaaaucguau

SEQ ID NO: 3184144 - RNA, 19 nt, Artificial Sequence
  Description of Artificial Sequence: Synthetic oligonucleotide
ugcccauacaguagcauag

SEQ ID NO: 3184145 - RNA, 19 nt, Artificial Sequence
  Description of Artificial Sequence: Synthetic oligonucleotide
uguggacaaauaaccuugg

SEQ ID NO: 3184146 - RNA, 19 nt, Artificial Sequence
  Description of Artificial Sequence: Synthetic oligonucleotide
uuuugaugcccauacagua

SEQ ID NO: 3184147 - RNA, 19 nt, Artificial Sequence
  Description of Artificial Sequence: Synthetic oligonucleotide
aagccagaaccacaucacg

SEQ ID NO: 3184148 - RNA, 19 nt, Artificial Sequence
  Description of Artificial Sequence: Synthetic oligonucleotide
uuugcaaggaauuggccaa

SEQ ID NO: 3184149 - RNA, 19 nt, Artificial Sequence
  Description of Artificial Sequence: Synthetic oligonucleotide
aaguccuuccauaaacuuc

SEQ ID NO: 3184150 - RNA, 19 nt, Artificial Sequence
  Description of Artificial Sequence: Synthetic oligonucleotide
ucagaaaaucuguuuccag

SEQ ID NO: 3184151 - RNA, 19 nt, Artificial Sequence
  Description of Artificial Sequence: Synthetic oligonucleotide
ucaggauaagccagaacca

SEQ ID NO: 3184152 - RNA, 19 nt, Artificial Sequence
  Description of Artificial Sequence: Synthetic oligonucleotide
uaugcucugcuuuaauuac

SEQ ID NO: 3184153 - RNA, 19 nt, Artificial Sequence
  Description of Artificial Sequence: Synthetic oligonucleotide
aauuucauguaaugguguu

SEQ ID NO: 3184154 - RNA, 19 nt, Artificial Sequence
  Description of Artificial Sequence: Synthetic oligonucleotide
uacuggaucaaaccauuca

SEQ ID NO: 3184155 - RNA, 19 nt, Artificial Sequence
  Description of Artificial Sequence: Synthetic oligonucleotide
gaauugggucaucugaaug

SEQ ID NO: 3184156 - RNA, 19 nt, Artificial Sequence
  Description of Artificial Sequence: Synthetic oligonucleotide
guucaaucgccuuugcaag

SEQ ID NO: 3184157 - RNA, 19 nt, Artificial Sequence
  Description of Artificial Sequence: Synthetic oligonucleotide
uuuggaggaggaaugaauu

SEQ ID NO: 3184158 - RNA, 19 nt, Artificial Sequence
  Description of Artificial Sequence: Synthetic oligonucleotide
aauacgucccagaggaguc

SEQ ID NO: 3184159 - RNA, 19 nt, Artificial Sequence
  Description of Artificial Sequence: Synthetic oligonucleotide
gcagagaugguacaaacag

SEQ ID NO: 3184160 - RNA, 19 nt, Artificial Sequence
  Description of Artificial Sequence: Synthetic oligonucleotide
uuuuggaggaggaaugaau

SEQ ID NO: 3184161 - RNA, 19 nt, Artificial Sequence
  Description of Artificial Sequence: Synthetic oligonucleotide
gaauuggccaauuccuccc

SEQ ID NO: 3184162 - RNA, 19 nt, Artificial Sequence
  Description of Artificial Sequence: Synthetic oligonucleotide
agcucgacuacaaagauga

SEQ ID NO: 3184163 - RNA, 19 nt, Artificial Sequence
  Description of Artificial Sequence: Synthetic oligonucleotide
uacucaaagcaauuucaug

SEQ ID NO: 3184164 - RNA, 19 nt, Artificial Sequence
  Description of Artificial Sequence: Synthetic oligonucleotide
ugcucaacuuuguuucugg

SEQ ID NO: 3184165 - RNA, 19 nt, Artificial Sequence
  Description of Artificial Sequence: Synthetic oligonucleotide
ugagcaguaaagaguuuca

SEQ ID NO: 3184166 - RNA, 19 nt, Artificial Sequence
  Description of Artificial Sequence: Synthetic oligonucleotide
uauuguugugagcaguaaa

SEQ ID NO: 3184167 - RNA, 19 nt, Artificial Sequence
  Description of Artificial Sequence: Synthetic oligonucleotide
uaguaaacacuugugucag

SEQ ID NO: 3184168 - RNA, 19 nt, Artificial Sequence
  Description of Artificial Sequence: Synthetic oligonucleotide
uaagaguaugcucugcuuu

SEQ ID NO: 3184169 - RNA, 19 nt, Artificial Sequence
  Description of Artificial Sequence: Synthetic oligonucleotide
uggcccauauucaucagca

SEQ ID NO: 3184170 - RNA, 19 nt, Artificial Sequence
  Description of Artificial Sequence: Synthetic oligonucleotide
ucaguauuaauaucucuuu

SEQ ID NO: 3184171 - RNA, 19 nt, Artificial Sequence
  Description of Artificial Sequence: Synthetic oligonucleotide
uaagccagaaccacaucac

SEQ ID NO: 3184172 - RNA, 19 nt, Artificial Sequence
  Description of Artificial Sequence: Synthetic oligonucleotide
ugaugcuuguuucagcaau

SEQ ID NO: 3184173 - RNA, 19 nt, Artificial Sequence
  Description of Artificial Sequence: Synthetic oligonucleotide
uuccauaaacuucaaugau

SEQ ID NO: 3184174 - RNA, 19 nt, Artificial Sequence
  Description of Artificial Sequence: Synthetic oligonucleotide
uguuucuggcccauauuca

SEQ ID NO: 3184175 - RNA, 19 nt, Artificial Sequence
  Description of Artificial Sequence: Synthetic oligonucleotide
aguugcagacauaagaaca

SEQ ID NO: 3184176 - RNA, 19 nt, Artificial Sequence
  Description of Artificial Sequence: Synthetic oligonucleotide
aguaaagaguuucacuuuu

SEQ ID NO: 3184177 - RNA, 19 nt, Artificial Sequence
  Description of Artificial Sequence: Synthetic oligonucleotide
ggacaaauaaccuugguua

SEQ ID NO: 3184178 - RNA, 19 nt, Artificial Sequence
  Description of Artificial Sequence: Synthetic oligonucleotide
aucacgaaguacuaccaga

SEQ ID NO: 3184179 - RNA, 19 nt, Artificial Sequence
  Description of Artificial Sequence: Synthetic oligonucleotide
aucucuuucaugaauuuca

SEQ ID NO: 3184180 - RNA, 19 nt, Artificial Sequence
  Description of Artificial Sequence: Synthetic oligonucleotide
aaauuccggugaauguagc

SEQ ID NO: 3184181 - RNA, 19 nt, Artificial Sequence
  Description of Artificial Sequence: Synthetic oligonucleotide
uucuuguccuuuuggagga

SEQ ID NO: 3184182 - RNA, 19 nt, Artificial Sequence
  Description of Artificial Sequence: Synthetic oligonucleotide
ugugucaguaaacaaucuu

SEQ ID NO: 3184183 - RNA, 19 nt, Artificial Sequence
  Description of Artificial Sequence: Synthetic oligonucleotide
gguaucaauaguugcagac

SEQ ID NO: 3184184 - RNA, 19 nt, Artificial Sequence
  Description of Artificial Sequence: Synthetic oligonucleotide
aaugagaauggguacagcc

SEQ ID NO: 3184185 - RNA, 19 nt, Artificial Sequence
  Description of Artificial Sequence: Synthetic oligonucleotide
aauaaaugagaauggguac

SEQ ID NO: 3184186 - RNA, 19 nt, Artificial Sequence
  Description of Artificial Sequence: Synthetic oligonucleotide
uuugccaccagauagacag

SEQ ID NO: 3184187 - RNA, 19 nt, Artificial Sequence
  Description of Artificial Sequence: Synthetic oligonucleotide
uagaggaucaaucaagugg

SEQ ID NO: 3184188 - RNA, 19 nt, Artificial Sequence
  Description of Artificial Sequence: Synthetic oligonucleotide
uagaguaccaggcugagcg

SEQ ID NO: 3184189 - RNA, 19 nt, Artificial Sequence
  Description of Artificial Sequence: Synthetic oligonucleotide
uacagaauaaaugagaaug

SEQ ID NO: 3184190 - RNA, 19 nt, Artificial Sequence
  Description of Artificial Sequence: Synthetic oligonucleotide
aauagaaccaguugaagaa

SEQ ID NO: 3184191 - RNA, 19 nt, Artificial Sequence
  Description of Artificial Sequence: Synthetic oligonucleotide
aaggcacccaaguugauac

SEQ ID NO: 3184192 - RNA, 19 nt, Artificial Sequence
  Description of Artificial Sequence: Synthetic oligonucleotide
aacugugacagccugaaug

SEQ ID NO: 3184193 - RNA, 19 nt, Artificial Sequence
  Description of Artificial Sequence: Synthetic oligonucleotide
aauggguacagccaguucu

SEQ ID NO: 3184194 - RNA, 19 nt, Artificial Sequence
  Description of Artificial Sequence: Synthetic oligonucleotide
gauguuggggauuuggagg

SEQ ID NO: 3184195 - RNA, 19 nt, Artificial Sequence
  Description of Artificial Sequence: Synthetic oligonucleotide
ucaucugcagagcugaggg

SEQ ID NO: 3184196 - RNA, 19 nt, Artificial Sequence
  Description of Artificial Sequence: Synthetic oligonucleotide
uguaguaacucuuuucuga

SEQ ID NO: 3184197 - RNA, 19 nt, Artificial Sequence
  Description of Artificial Sequence: Synthetic oligonucleotide
aagggucaccaucacaggc

SEQ ID NO: 3184198 - RNA, 19 nt, Artificial Sequence
  Description of Artificial Sequence: Synthetic oligonucleotide
aacaaggguaucucuccgc

SEQ ID NO: 3184199 - RNA, 19 nt, Artificial Sequence
  Description of Artificial Sequence: Synthetic oligonucleotide
caugauugcaccuugcaug

SEQ ID NO: 3184200 - RNA, 19 nt, Artificial Sequence
  Description of Artificial Sequence: Synthetic oligonucleotide
aucaccacaacauuggcca

SEQ ID NO: 3184201 - RNA, 19 nt, Artificial Sequence
  Description of Artificial Sequence: Synthetic oligonucleotide
aaucaagugguccuugaca

SEQ ID NO: 3184202 - RNA, 19 nt, Artificial Sequence
  Description of Artificial Sequence: Synthetic oligonucleotide
uaauguuggguacagaaua

SEQ ID NO: 3184203 - RNA, 19 nt, Artificial Sequence
  Description of Artificial Sequence: Synthetic oligonucleotide
aucaagugguccuugacag

SEQ ID NO: 3184204 - RNA, 19 nt, Artificial Sequence
  Description of Artificial Sequence: Synthetic oligonucleotide
cugaaugccggcuagcagg

SEQ ID NO: 3184205 - RNA, 19 nt, Artificial Sequence
  Description of Artificial Sequence: Synthetic oligonucleotide
cauccaguaaggcacaagg

SEQ ID NO: 3184206 - RNA, 19 nt, Artificial Sequence
  Description of Artificial Sequence: Synthetic oligonucleotide
uccaagguccaucaccugg

SEQ ID NO: 3184207 - RNA, 19 nt, Artificial Sequence
  Description of Artificial Sequence: Synthetic oligonucleotide
aaguaaagguccaucuggc

SEQ ID NO: 3184208 - RNA, 19 nt, Artificial Sequence
  Description of Artificial Sequence: Synthetic oligonucleotide
aaacaaggguaucucuccg

SEQ ID NO: 3184209 - RNA, 19 nt, Artificial Sequence
  Description of Artificial Sequence: Synthetic oligonucleotide
cauaguacaaguccugccc

SEQ ID NO: 3184210 - RNA, 19 nt, Artificial Sequence
  Description of Artificial Sequence: Synthetic oligonucleotide
gaaacaaggguaucucucc

SEQ ID NO: 3184211 - RNA, 19 nt, Artificial Sequence
  Description of Artificial Sequence: Synthetic oligonucleotide
augauugcaccuugcaugg

SEQ ID NO: 3184212 - RNA, 19 nt, Artificial Sequence
  Description of Artificial Sequence: Synthetic oligonucleotide
ucaguugaggcacugugug

SEQ ID NO: 3184213 - RNA, 19 nt, Artificial Sequence
  Description of Artificial Sequence: Synthetic oligonucleotide
uccaguaaggcacaagggu

SEQ ID NO: 3184214 - RNA, 19 nt, Artificial Sequence
  Description of Artificial Sequence: Synthetic oligonucleotide
gaauaaaugagaaugggua

SEQ ID NO: 3184215 - RNA, 19 nt, Artificial Sequence
  Description of Artificial Sequence: Synthetic oligonucleotide
gagaaagcggcccagguac

SEQ ID NO: 3184216 - RNA, 19 nt, Artificial Sequence
  Description of Artificial Sequence: Synthetic oligonucleotide
uggagacuaagucagcccc

SEQ ID NO: 3184217 - RNA, 19 nt, Artificial Sequence
  Description of Artificial Sequence: Synthetic oligonucleotide
uggagaaggaccccacugg

SEQ ID NO: 3184218 - RNA, 19 nt, Artificial Sequence
  Description of Artificial Sequence: Synthetic oligonucleotide
ucccacaggagccagcagg

SEQ ID NO: 3184219 - RNA, 19 nt, Artificial Sequence
  Description of Artificial Sequence: Synthetic oligonucleotide
aguaucaccacaacauugg

SEQ ID NO: 3184220 - RNA, 19 nt, Artificial Sequence
  Description of Artificial Sequence: Synthetic oligonucleotide
uggguacagaauaaaugag

SEQ ID NO: 3184221 - RNA, 19 nt, Artificial Sequence
  Description of Artificial Sequence: Synthetic oligonucleotide
uaucaccacaacauuggcc

SEQ ID NO: 3184222 - RNA, 19 nt, Artificial Sequence
  Description of Artificial Sequence: Synthetic oligonucleotide
ugagccuaccccagaaagg

SEQ ID NO: 3184223 - RNA, 19 nt, Artificial Sequence
  Description of Artificial Sequence: Synthetic oligonucleotide
ugccgcauaguacaagucc

SEQ ID NO: 3184224 - RNA, 19 nt, Artificial Sequence
  Description of Artificial Sequence: Synthetic oligonucleotide
uuguugauguucccgaagu

SEQ ID NO: 3184225 - RNA, 19 nt, Artificial Sequence
  Description of Artificial Sequence: Synthetic oligonucleotide
guaguaacucuuuucugag

SEQ ID NO: 3184226 - RNA, 19 nt, Artificial Sequence
  Description of Artificial Sequence: Synthetic oligonucleotide
aggaucaaucaaguggucc

SEQ ID NO: 3184227 - RNA, 19 nt, Artificial Sequence
  Description of Artificial Sequence: Synthetic oligonucleotide
agauguuggggauuuggag

SEQ ID NO: 3184228 - RNA, 19 nt, Artificial Sequence
  Description of Artificial Sequence: Synthetic oligonucleotide
cuaagucagccccugaccc

SEQ ID NO: 3184229 - RNA, 19 nt, Artificial Sequence
  Description of Artificial Sequence: Synthetic oligonucleotide
ucuggaaauauaccaucca

SEQ ID NO: 3184230 - RNA, 19 nt, Artificial Sequence
  Description of Artificial Sequence: Synthetic oligonucleotide
aaggguaucucuccgcaga

SEQ ID NO: 3184231 - RNA, 19 nt, Artificial Sequence
  Description of Artificial Sequence: Synthetic oligonucleotide
gauugcaccuugcauggag

SEQ ID NO: 3184232 - RNA, 19 nt, Artificial Sequence
  Description of Artificial Sequence: Synthetic oligonucleotide
uucauucuaauguugggua

SEQ ID NO: 3184233 - RNA, 19 nt, Artificial Sequence
  Description of Artificial Sequence: Synthetic oligonucleotide
cagcaauguacuucaagcg

SEQ ID NO: 3184234 - RNA, 19 nt, Artificial Sequence
  Description of Artificial Sequence: Synthetic oligonucleotide
aaccaguaucaccacaaca

SEQ ID NO: 3184235 - RNA, 19 nt, Artificial Sequence
  Description of Artificial Sequence: Synthetic oligonucleotide
aucuggaaauauaccaucc

SEQ ID NO: 3184236 - RNA, 19 nt, Artificial Sequence
  Description of Artificial Sequence: Synthetic oligonucleotide
acauuggccagcaggagcc

SEQ ID NO: 3184237 - RNA, 19 nt, Artificial Sequence
  Description of Artificial Sequence: Synthetic oligonucleotide
accagcaauccagagaaac

SEQ ID NO: 3184238 - RNA, 19 nt, Artificial Sequence
  Description of Artificial Sequence: Synthetic oligonucleotide
aggauuugcggccaucguc

SEQ ID NO: 3184239 - RNA, 19 nt, Artificial Sequence
  Description of Artificial Sequence: Synthetic oligonucleotide
agauagacaguggugccgc

SEQ ID NO: 3184240 - RNA, 19 nt, Artificial Sequence
  Description of Artificial Sequence: Synthetic oligonucleotide
aagcaguagaggaucaauc

SEQ ID NO: 3184241 - RNA, 19 nt, Artificial Sequence
  Description of Artificial Sequence: Synthetic oligonucleotide
agcaguagaggaucaauca

SEQ ID NO: 3184242 - RNA, 19 nt, Artificial Sequence
  Description of Artificial Sequence: Synthetic oligonucleotide
ugagcucagagacgaagag

SEQ ID NO: 3184243 - RNA, 19 nt, Artificial Sequence
  Description of Artificial Sequence: Synthetic oligonucleotide
ucugaguaggcgaacucca

SEQ ID NO: 3184244 - RNA, 19 nt, Artificial Sequence
  Description of Artificial Sequence: Synthetic oligonucleotide
agguccaucaccuggucag

SEQ ID NO: 3184245 - RNA, 19 nt, Artificial Sequence
  Description of Artificial Sequence: Synthetic oligonucleotide
aaugauggaggugaaccca

SEQ ID NO: 3184246 - RNA, 19 nt, Artificial Sequence
  Description of Artificial Sequence: Synthetic oligonucleotide
caauagaaccaguugaaga

SEQ ID NO: 3184247 - RNA, 19 nt, Artificial Sequence
  Description of Artificial Sequence: Synthetic oligonucleotide
auagcgaccagcaauccag

SEQ ID NO: 3184248 - RNA, 19 nt, Artificial Sequence
  Description of Artificial Sequence: Synthetic oligonucleotide
auaaaugagaauggguaca

SEQ ID NO: 3184249 - RNA, 19 nt, Artificial Sequence
  Description of Artificial Sequence: Synthetic oligonucleotide
agcaacaagcccgagguag

SEQ ID NO: 3184250 - RNA, 19 nt, Artificial Sequence
  Description of Artificial Sequence: Synthetic oligonucleotide
aggcaaggacaguagggcc

SEQ ID NO: 3184251 - RNA, 19 nt, Artificial Sequence
  Description of Artificial Sequence: Synthetic oligonucleotide
agaggaucaaucaaguggu

SEQ ID NO: 3184252 - RNA, 19 nt, Artificial Sequence
  Description of Artificial Sequence: Synthetic oligonucleotide
cuugcauggagcguggagc

SEQ ID NO: 3184253 - RNA, 19 nt, Artificial Sequence
  Description of Artificial Sequence: Synthetic oligonucleotide
gaggugaacccaaagaaca

SEQ ID NO: 3184254 - RNA, 19 nt, Artificial Sequence
  Description of Artificial Sequence: Synthetic oligonucleotide
uaaggcacaagggucacca

SEQ ID NO: 3184255 - RNA, 19 nt, Artificial Sequence
  Description of Artificial Sequence: Synthetic oligonucleotide
uucccgaaguccuuggggc

SEQ ID NO: 3184256 - RNA, 19 nt, Artificial Sequence
  Description of Artificial Sequence: Synthetic oligonucleotide
agaauaaaugagaaugggu

SEQ ID NO: 3184257 - RNA, 19 nt, Artificial Sequence
  Description of Artificial Sequence: Synthetic oligonucleotide
caaugauggaggugaaccc

SEQ ID NO: 3184258 - RNA, 19 nt, Artificial Sequence
  Description of Artificial Sequence: Synthetic oligonucleotide
agugguccuugacagggac

SEQ ID NO: 3184259 - RNA, 19 nt, Artificial Sequence
  Description of Artificial Sequence: Synthetic oligonucleotide
agagacgaagagcuaucgg

SEQ ID NO: 3184260 - RNA, 19 nt, Artificial Sequence
  Description of Artificial Sequence: Synthetic oligonucleotide
gauggaggugaacccaaag

SEQ ID NO: 3184261 - RNA, 19 nt, Artificial Sequence
  Description of Artificial Sequence: Synthetic oligonucleotide
gaguaggcgaacuccagac

SEQ ID NO: 3184262 - RNA, 19 nt, Artificial Sequence
  Description of Artificial Sequence: Synthetic oligonucleotide
uggaaguuggccaugucuu

SEQ ID NO: 3184263 - RNA, 19 nt, Artificial Sequence
  Description of Artificial Sequence: Synthetic oligonucleotide
ugaggcacugugugguugg

SEQ ID NO: 3184264 - RNA, 19 nt, Artificial Sequence
  Description of Artificial Sequence: Synthetic oligonucleotide
uuggagacuaagucagccc

SEQ ID NO: 3184265 - RNA, 19 nt, Artificial Sequence
  Description of Artificial Sequence: Synthetic oligonucleotide
gugagccuaccccagaaag

SEQ ID NO: 3184266 - RNA, 19 nt, Artificial Sequence
  Description of Artificial Sequence: Synthetic oligonucleotide
uucugaguaggcgaacucc

SEQ ID NO: 3184267 - RNA, 19 nt, Artificial Sequence
  Description of Artificial Sequence: Synthetic oligonucleotide
ucagcuccgaaugaaguga

SEQ ID NO: 3184268 - RNA, 19 nt, Artificial Sequence
  Description of Artificial Sequence: Synthetic oligonucleotide
guacacaucugccagccac

SEQ ID NO: 3184269 - RNA, 19 nt, Artificial Sequence
  Description of Artificial Sequence: Synthetic oligonucleotide
ugaguaggcgaacuccaga

SEQ ID NO: 3184270 - RNA, 19 nt, Artificial Sequence
  Description of Artificial Sequence: Synthetic oligonucleotide
auaguacaaguccugccca

SEQ ID NO: 3184271 - RNA, 19 nt, Artificial Sequence
  Description of Artificial Sequence: Synthetic oligonucleotide
ugcuggaugagcucuggga

SEQ ID NO: 3184272 - RNA, 19 nt, Artificial Sequence
  Description of Artificial Sequence: Synthetic oligonucleotide
agcgagauggugagaaagc

SEQ ID NO: 3184273 - RNA, 19 nt, Artificial Sequence
  Description of Artificial Sequence: Synthetic oligonucleotide
guugauacuccaauagaac

SEQ ID NO: 3184274 - RNA, 19 nt, Artificial Sequence
  Description of Artificial Sequence: Synthetic oligonucleotide
aguugauacuccaauagaa

SEQ ID NO: 3184275 - RNA, 19 nt, Artificial Sequence
  Description of Artificial Sequence: Synthetic oligonucleotide
auagaaccaguugaagaag

SEQ ID NO: 3184276 - RNA, 19 nt, Artificial Sequence
  Description of Artificial Sequence: Synthetic oligonucleotide
ucaagugguccuugacagg

SEQ ID NO: 3184277 - RNA, 19 nt, Artificial Sequence
  Description of Artificial Sequence: Synthetic oligonucleotide
guucccgaaguccuugggg

SEQ ID NO: 3184278 - RNA, 19 nt, Artificial Sequence
  Description of Artificial Sequence: Synthetic oligonucleotide
gugaacccaaagaacaugc

SEQ ID NO: 3184279 - RNA, 19 nt, Artificial Sequence
  Description of Artificial Sequence: Synthetic oligonucleotide
uuugcggccaucgucggug

SEQ ID NO: 3184280 - RNA, 19 nt, Artificial Sequence
  Description of Artificial Sequence: Synthetic oligonucleotide
aggcacaagggucaccauc

SEQ ID NO: 3184281 - RNA, 19 nt, Artificial Sequence
  Description of Artificial Sequence: Synthetic oligonucleotide
agaaacaggacaacuguga

SEQ ID NO: 3184282 - RNA, 19 nt, Artificial Sequence
  Description of Artificial Sequence: Synthetic oligonucleotide
gaccagaaccaguaucacc

SEQ ID NO: 3184283 - RNA, 19 nt, Artificial Sequence
  Description of Artificial Sequence: Synthetic oligonucleotide
gagacgaagagcuaucggu

SEQ ID NO: 3184284 - RNA, 19 nt, Artificial Sequence
  Description of Artificial Sequence: Synthetic oligonucleotide
ugaaccauacuucaccaug

SEQ ID NO: 3184285 - RNA, 19 nt, Artificial Sequence
  Description of Artificial Sequence: Synthetic oligonucleotide
uccaucguuaguuagccug

SEQ ID NO: 3184286 - RNA, 19 nt, Artificial Sequence
  Description of Artificial Sequence: Synthetic oligonucleotide
ucguuaguuagccugcucc

SEQ ID NO: 3184287 - RNA, 19 nt, Artificial Sequence
  Description of Artificial Sequence: Synthetic oligonucleotide
aaccauacuucaccauggc

SEQ ID NO: 3184288 - RNA, 19 nt, Artificial Sequence
  Description of Artificial Sequence: Synthetic oligonucleotide
accauacuucaccauggcc

SEQ ID NO: 3184289 - RNA, 19 nt, Artificial Sequence
  Description of Artificial Sequence: Synthetic oligonucleotide
gaaccauacuucaccaugg

SEQ ID NO: 3184290 - RNA, 19 nt, Artificial Sequence
  Description of Artificial Sequence: Synthetic oligonucleotide
ugcuccauacuuuucucag

SEQ ID NO: 3184291 - RNA, 19 nt, Artificial Sequence
  Description of Artificial Sequence: Synthetic oligonucleotide
acuccaucguuaguuagcc

SEQ ID NO: 3184292 - RNA, 19 nt, Artificial Sequence
  Description of Artificial Sequence: Synthetic oligonucleotide
ccauacuucaccauggccc

SEQ ID NO: 3184293 - RNA, 19 nt, Artificial Sequence
  Description of Artificial Sequence: Synthetic oligonucleotide
cauacuucaccauggcccc

SEQ ID NO: 3184294 - RNA, 19 nt, Artificial Sequence
  Description of Artificial Sequence: Synthetic oligonucleotide
agaugcgcguacuccaucg

SEQ ID NO: 3184295 - RNA, 19 nt, Artificial Sequence
  Description of Artificial Sequence: Synthetic oligonucleotide
uacuccaucguuaguuagc

SEQ ID NO: 3184296 - RNA, 19 nt, Artificial Sequence
  Description of Artificial Sequence: Synthetic oligonucleotide
cauacuuuucucaggucug

SEQ ID NO: 3184297 - RNA, 19 nt, Artificial Sequence
  Description of Artificial Sequence: Synthetic oligonucleotide
cuuuucucaggucugucuc

SEQ ID NO: 3184298 - RNA, 19 nt, Artificial Sequence
  Description of Artificial Sequence: Synthetic oligonucleotide
acuuuucucaggucugucu

SEQ ID NO: 3184299 - RNA, 19 nt, Artificial Sequence
  Description of Artificial Sequence: Synthetic oligonucleotide
caccauuugaucauggcaa

SEQ ID NO: 3184300 - RNA, 19 nt, Artificial Sequence
  Description of Artificial Sequence: Synthetic oligonucleotide
uaguuagccugcuccauac

SEQ ID NO: 3184301 - RNA, 19 nt, Artificial Sequence
  Description of Artificial Sequence: Synthetic oligonucleotide
ugcucgaugucccggccag

SEQ ID NO: 3184302 - RNA, 19 nt, Artificial Sequence
  Description of Artificial Sequence: Synthetic oligonucleotide
uuaguuagccugcuccaua

SEQ ID NO: 3184303 - RNA, 19 nt, Artificial Sequence
  Description of Artificial Sequence: Synthetic oligonucleotide
auggggcaccauuugauca

SEQ ID NO: 3184304 - RNA, 19 nt, Artificial Sequence
  Description of Artificial Sequence: Synthetic oligonucleotide
uggauggggcaccauuuga

SEQ ID NO: 3184305 - RNA, 19 nt, Artificial Sequence
  Description of Artificial Sequence: Synthetic oligonucleotide
gauggggcaccauuugauc

SEQ ID NO: 3184306 - RNA, 19 nt, Artificial Sequence
  Description of Artificial Sequence: Synthetic oligonucleotide
uuagccugcuccauacuuu

SEQ ID NO: 3184307 - RNA, 19 nt, Artificial Sequence
  Description of Artificial Sequence: Synthetic oligonucleotide
guacuccaucguuaguuag

SEQ ID NO: 3184308 - RNA, 19 nt, Artificial Sequence
  Description of Artificial Sequence: Synthetic oligonucleotide
aucguuaguuagccugcuc

SEQ ID NO: 3184309 - RNA, 19 nt, Artificial Sequence
  Description of Artificial Sequence: Synthetic oligonucleotide
auggauggggcaccauuug

SEQ ID NO: 3184310 - RNA, 19 nt, Artificial Sequence
  Description of Artificial Sequence: Synthetic oligonucleotide
ugcgcguacuccaucguua

SEQ ID NO: 3184311 - RNA, 19 nt, Artificial Sequence
  Description of Artificial Sequence: Synthetic oligonucleotide
accauuugaucauggcaau

SEQ ID NO: 3184312 - RNA, 19 nt, Artificial Sequence
  Description of Artificial Sequence: Synthetic oligonucleotide
uugaaccauacuucaccau

SEQ ID NO: 3184313 - RNA, 19 nt, Artificial Sequence
  Description of Artificial Sequence: Synthetic oligonucleotide
uaggccauggauggggcac

SEQ ID NO: 3184314 - RNA, 19 nt, Artificial Sequence
  Description of Artificial Sequence: Synthetic oligonucleotide
uggggcaccauuugaucau

SEQ ID NO: 3184315 - RNA, 19 nt, Artificial Sequence
  Description of Artificial Sequence: Synthetic oligonucleotide
cauuugaucauggcaaucu

SEQ ID NO: 3184316 - RNA, 19 nt, Artificial Sequence
  Description of Artificial Sequence: Synthetic oligonucleotide
gcaccauuugaucauggca

SEQ ID NO: 3184317 - RNA, 19 nt, Artificial Sequence
  Description of Artificial Sequence: Synthetic oligonucleotide
gcuccauacuuuucucagg

SEQ ID NO: 3184318 - RNA, 19 nt, Artificial Sequence
  Description of Artificial Sequence: Synthetic oligonucleotide
uccauacuuuucucagguc

SEQ ID NO: 3184319 - RNA, 19 nt, Artificial Sequence
  Description of Artificial Sequence: Synthetic oligonucleotide
auacuuuucucaggucugu

SEQ ID NO: 3184320 - RNA, 19 nt, Artificial Sequence
  Description of Artificial Sequence: Synthetic oligonucleotide
ccuggagcaucuuccagcc

SEQ ID NO: 3184321 - RNA, 19 nt, Artificial Sequence
  Description of Artificial Sequence: Synthetic oligonucleotide
cucgaugucccggccaggc

SEQ ID NO: 3184322 - RNA, 19 nt, Artificial Sequence
  Description of Artificial Sequence: Synthetic oligonucleotide
ucgaugucccggccaggcc

SEQ ID NO: 3184323 - RNA, 19 nt, Artificial Sequence
  Description of Artificial Sequence: Synthetic oligonucleotide
uagccugcuccauacuuuu

SEQ ID NO: 3184324 - RNA, 19 nt, Artificial Sequence
  Description of Artificial Sequence: Synthetic oligonucleotide
ccaucguuaguuagccugc

SEQ ID NO: 3184325 - RNA, 19 nt, Artificial Sequence
  Description of Artificial Sequence: Synthetic oligonucleotide
aguuagccugcuccauacu

SEQ ID NO: 3184326 - RNA, 19 nt, Artificial Sequence
  Description of Artificial Sequence: Synthetic oligonucleotide
aggccauggauggggcacc

SEQ ID NO: 3184327 - RNA, 19 nt, Artificial Sequence
  Description of Artificial Sequence: Synthetic oligonucleotide
ggcaccauuugaucauggc

SEQ ID NO: 3184328 - RNA, 19 nt, Artificial Sequence
  Description of Artificial Sequence: Synthetic oligonucleotide
cuccauacuuuucucaggu

SEQ ID NO: 3184329 - RNA, 19 nt, Artificial Sequence
  Description of Artificial Sequence: Synthetic oligonucleotide
auaggccauggauggggca

SEQ ID NO: 3184330 - RNA, 19 nt, Artificial Sequence
  Description of Artificial Sequence: Synthetic oligonucleotide
cccuggagcaucuuccagc

SEQ ID NO: 3184331 - RNA, 19 nt, Artificial Sequence
  Description of Artificial Sequence: Synthetic oligonucleotide
ugccugcucgaugucccgg

SEQ ID NO: 3184332 - RNA, 19 nt, Artificial Sequence
  Description of Artificial Sequence: Synthetic oligonucleotide
gaugucccggccaggcccc

SEQ ID NO: 3184333 - RNA, 19 nt, Artificial Sequence
  Description of Artificial Sequence: Synthetic oligonucleotide
cugcuccauacuuuucuca

SEQ ID NO: 3184334 - RNA, 19 nt, Artificial Sequence
  Description of Artificial Sequence: Synthetic oligonucleotide
uacuuuucucaggucuguc

SEQ ID NO: 3184335 - RNA, 19 nt, Artificial Sequence
  Description of Artificial Sequence: Synthetic oligonucleotide
guuagccugcuccauacuu

SEQ ID NO: 3184336 - RNA, 19 nt, Artificial Sequence
  Description of Artificial Sequence: Synthetic oligonucleotide
ccauacuuuucucaggucu

SEQ ID NO: 3184337 - RNA, 19 nt, Artificial Sequence
  Description of Artificial Sequence: Synthetic oligonucleotide
gugccugcucgaugucccg

SEQ ID NO: 3184338 - RNA, 19 nt, Artificial Sequence
  Description of Artificial Sequence: Synthetic oligonucleotide
augcgcguacuccaucguu

SEQ ID NO: 3184339 - RNA, 19 nt, Artificial Sequence
  Description of Artificial Sequence: Synthetic oligonucleotide
gcgcguacuccaucguuag

SEQ ID NO: 3184340 - RNA, 19 nt, Artificial Sequence
  Description of Artificial Sequence: Synthetic oligonucleotide
ucccggccaggccccagcc

SEQ ID NO: 3184341 - RNA, 19 nt, Artificial Sequence
  Description of Artificial Sequence: Synthetic oligonucleotide
cuggagcaucuuccagccc

SEQ ID NO: 3184342 - RNA, 19 nt, Artificial Sequence
  Description of Artificial Sequence: Synthetic oligonucleotide
cagaugcgcguacuccauc

SEQ ID NO: 3184343 - RNA, 19 nt, Artificial Sequence
  Description of Artificial Sequence: Synthetic oligonucleotide
cauggauggggcaccauuu

SEQ ID NO: 3184344 - RNA, 19 nt, Artificial Sequence
  Description of Artificial Sequence: Synthetic oligonucleotide
cgaugucccggccaggccc

SEQ ID NO: 3184345 - RNA, 19 nt, Artificial Sequence
  Description of Artificial Sequence: Synthetic oligonucleotide
ccugcuccauacuuuucuc

SEQ ID NO: 3184346 - RNA, 19 nt, Artificial Sequence
  Description of Artificial Sequence: Synthetic oligonucleotide
cgugccugcucgauguccc

SEQ ID NO: 3184347 - RNA, 19 nt, Artificial Sequence
  Description of Artificial Sequence: Synthetic oligonucleotide
gaugcgcguacuccaucgu

SEQ ID NO: 3184348 - RNA, 19 nt, Artificial Sequence
  Description of Artificial Sequence: Synthetic oligonucleotide
agccugcuccauacuuuuc

SEQ ID NO: 3184349 - RNA, 19 nt, Artificial Sequence
  Description of Artificial Sequence: Synthetic oligonucleotide
gggcaccauuugaucaugg

SEQ ID NO: 3184350 - RNA, 19 nt, Artificial Sequence
  Description of Artificial Sequence: Synthetic oligonucleotide
guuaguuagccugcuccau

SEQ ID NO: 3184351 - RNA, 19 nt, Artificial Sequence
  Description of Artificial Sequence: Synthetic oligonucleotide
gccugcucgaugucccggc

SEQ ID NO: 3184352 - RNA, 19 nt, Artificial Sequence
  Description of Artificial Sequence: Synthetic oligonucleotide
gccugcuccauacuuuucu

SEQ ID NO: 3184353 - RNA, 19 nt, Artificial Sequence
  Description of Artificial Sequence: Synthetic oligonucleotide
cugcucgaugucccggcca

SEQ ID NO: 3184354 - RNA, 19 nt, Artificial Sequence
  Description of Artificial Sequence: Synthetic oligonucleotide
gucccggccaggccccagc

SEQ ID NO: 3184355 - RNA, 19 nt, Artificial Sequence
  Description of Artificial Sequence: Synthetic oligonucleotide
cguuaguuagccugcucca

SEQ ID NO: 3184356 - RNA, 19 nt, Artificial Sequence
  Description of Artificial Sequence: Synthetic oligonucleotide
ccauuugaucauggcaauc

SEQ ID NO: 3184357 - RNA, 19 nt, Artificial Sequence
  Description of Artificial Sequence: Synthetic oligonucleotide
ggggcaccauuugaucaug

SEQ ID NO: 3184358 - RNA, 19 nt, Artificial Sequence
  Description of Artificial Sequence: Synthetic oligonucleotide
ccugcucgaugucccggcc

SEQ ID NO: 3184359 - RNA, 19 nt, Artificial Sequence
  Description of Artificial Sequence: Synthetic oligonucleotide
ugucccggccaggccccag

SEQ ID NO: 3184360 - RNA, 19 nt, Artificial Sequence
  Description of Artificial Sequence: Synthetic oligonucleotide
gcguacuccaucguuaguu

SEQ ID NO: 3184361 - RNA, 19 nt, Artificial Sequence
  Description of Artificial Sequence: Synthetic oligonucleotide
ggauggggcaccauuugau

SEQ ID NO: 3184362 - RNA, 19 nt, Artificial Sequence
  Description of Artificial Sequence: Synthetic oligonucleotide
ccccuggagcaucuuccag

SEQ ID NO: 3184363 - RNA, 19 nt, Artificial Sequence
  Description of Artificial Sequence: Synthetic oligonucleotide
caucguuaguuagccugcu

SEQ ID NO: 3184364 - RNA, 19 nt, Artificial Sequence
  Description of Artificial Sequence: Synthetic oligonucleotide
cuccaucguuaguuagccu

SEQ ID NO: 3184365 - RNA, 19 nt, Artificial Sequence
  Description of Artificial Sequence: Synthetic oligonucleotide
cguacuccaucguuaguua

SEQ ID NO: 3184366 - RNA, 19 nt, Artificial Sequence
  Description of Artificial Sequence: Synthetic oligonucleotide
gcucgaugucccggccagg

SEQ ID NO: 3184367 - RNA, 19 nt, Artificial Sequence
  Description of Artificial Sequence: Synthetic oligonucleotide
ccauggauggggcaccauu

SEQ ID NO: 3184368 - RNA, 19 nt, Artificial Sequence
  Description of Artificial Sequence: Synthetic oligonucleotide
ggccauggauggggcacca

SEQ ID NO: 3184369 - RNA, 19 nt, Artificial Sequence
  Description of Artificial Sequence: Synthetic oligonucleotide
augucccggccaggcccca

SEQ ID NO: 3184370 - RNA, 19 nt, Artificial Sequence
  Description of Artificial Sequence: Synthetic oligonucleotide
cgcguacuccaucguuagu

SEQ ID NO: 3184371 - RNA, 19 nt, Artificial Sequence
  Description of Artificial Sequence: Synthetic oligonucleotide
guuggauuaaccuagaagg

SEQ ID NO: 3184372 - RNA, 19 nt, Artificial Sequence
  Description of Artificial Sequence: Synthetic oligonucleotide
aaguaggugaccuggaugc

SEQ ID NO: 3184373 - RNA, 19 nt, Artificial Sequence
  Description of Artificial Sequence: Synthetic oligonucleotide
ucuaaguacacuuuugugc

SEQ ID NO: 3184374 - RNA, 19 nt, Artificial Sequence
  Description of Artificial Sequence: Synthetic oligonucleotide
aacgcuaaggauuacugag

SEQ ID NO: 3184375 - RNA, 19 nt, Artificial Sequence
  Description of Artificial Sequence: Synthetic oligonucleotide
cuaaggauuacugagaaag

SEQ ID NO: 3184376 - RNA, 19 nt, Artificial Sequence
  Description of Artificial Sequence: Synthetic oligonucleotide
gauacauaguuccagcuag

SEQ ID NO: 3184377 - RNA, 19 nt, Artificial Sequence
  Description of Artificial Sequence: Synthetic oligonucleotide
aacaugagauauuugauaa

SEQ ID NO: 3184378 - RNA, 19 nt, Artificial Sequence
  Description of Artificial Sequence: Synthetic oligonucleotide
uaaccuagaagguuugugg

SEQ ID NO: 3184379 - RNA, 19 nt, Artificial Sequence
  Description of Artificial Sequence: Synthetic oligonucleotide
aaauaaugaggacauuuca

SEQ ID NO: 3184380 - RNA, 19 nt, Artificial Sequence
  Description of Artificial Sequence: Synthetic oligonucleotide
aauguagauuuccuguguc

SEQ ID NO: 3184381 - RNA, 19 nt, Artificial Sequence
  Description of Artificial Sequence: Synthetic oligonucleotide
aaugaagguuccuucauga

SEQ ID NO: 3184382 - RNA, 19 nt, Artificial Sequence
  Description of Artificial Sequence: Synthetic oligonucleotide
gaaacuagaucguuacagg

SEQ ID NO: 3184383 - RNA, 19 nt, Artificial Sequence
  Description of Artificial Sequence: Synthetic oligonucleotide
gaugaaacccuaaauaaug

SEQ ID NO: 3184384 - RNA, 19 nt, Artificial Sequence
  Description of Artificial Sequence: Synthetic oligonucleotide
ugugaaugaagaucuggcg

SEQ ID NO: 3184385 - RNA, 19 nt, Artificial Sequence
  Description of Artificial Sequence: Synthetic oligonucleotide
uugaccagguagaagagag

SEQ ID NO: 3184386 - RNA, 19 nt, Artificial Sequence
  Description of Artificial Sequence: Synthetic oligonucleotide
gauaaucucccauuggcug

SEQ ID NO: 3184387 - RNA, 19 nt, Artificial Sequence
  Description of Artificial Sequence: Synthetic oligonucleotide
uagaagacgaagauggcca

SEQ ID NO: 3184388 - RNA, 19 nt, Artificial Sequence
  Description of Artificial Sequence: Synthetic oligonucleotide
aacccagaaggaugaaacc

SEQ ID NO: 3184389 - RNA, 19 nt, Artificial Sequence
  Description of Artificial Sequence: Synthetic oligonucleotide
ugaaauacucaucgguucc

SEQ ID NO: 3184390 - RNA, 19 nt, Artificial Sequence
  Description of Artificial Sequence: Synthetic oligonucleotide
uaaauaaugaggacauuuc

SEQ ID NO: 3184391 - RNA, 19 nt, Artificial Sequence
  Description of Artificial Sequence: Synthetic oligonucleotide
aaaagguucuggaggaggc

SEQ ID NO: 3184392 - RNA, 19 nt, Artificial Sequence
  Description of Artificial Sequence: Synthetic oligonucleotide
ugcaaugacauugaccagg

SEQ ID NO: 3184393 - RNA, 19 nt, Artificial Sequence
  Description of Artificial Sequence: Synthetic oligonucleotide
agaaacuagaucguuacag

SEQ ID NO: 3184394 - RNA, 19 nt, Artificial Sequence
  Description of Artificial Sequence: Synthetic oligonucleotide
ugagaaagugacaaggauc

SEQ ID NO: 3184395 - RNA, 19 nt, Artificial Sequence
  Description of Artificial Sequence: Synthetic oligonucleotide
aaacgaugaauguccacag

SEQ ID NO: 3184396 - RNA, 19 nt, Artificial Sequence
  Description of Artificial Sequence: Synthetic oligonucleotide
augaaauacucaucgguuc

SEQ ID NO: 3184397 - RNA, 19 nt, Artificial Sequence
  Description of Artificial Sequence: Synthetic oligonucleotide
acgucugggagccaaaugg

SEQ ID NO: 3184398 - RNA, 19 nt, Artificial Sequence
  Description of Artificial Sequence: Synthetic oligonucleotide
ugagauagaagguaacuuc

SEQ ID NO: 3184399 - RNA, 19 nt, Artificial Sequence
  Description of Artificial Sequence: Synthetic oligonucleotide
auuugauaaugauggggac

SEQ ID NO: 3184400 - RNA, 19 nt, Artificial Sequence
  Description of Artificial Sequence: Synthetic oligonucleotide
gagauauuugauaaugaug

SEQ ID NO: 3184401 - RNA, 19 nt, Artificial Sequence
  Description of Artificial Sequence: Synthetic oligonucleotide
aaugagauagaagguaacu

SEQ ID NO: 3184402 - RNA, 19 nt, Artificial Sequence
  Description of Artificial Sequence: Synthetic oligonucleotide
acgauccacaaccauggcc

SEQ ID NO: 3184403 - RNA, 19 nt, Artificial Sequence
  Description of Artificial Sequence: Synthetic oligonucleotide
aacuagaucguuacagggg

SEQ ID NO: 3184404 - RNA, 19 nt, Artificial Sequence
  Description of Artificial Sequence: Synthetic oligonucleotide
augcggagagaaucgaugc

SEQ ID NO: 3184405 - RNA, 19 nt, Artificial Sequence
  Description of Artificial Sequence: Synthetic oligonucleotide
gaagggcgaagauugagag

SEQ ID NO: 3184406 - RNA, 19 nt, Artificial Sequence
  Description of Artificial Sequence: Synthetic oligonucleotide
agaagcaaguagcuacagc

SEQ ID NO: 3184407 - RNA, 19 nt, Artificial Sequence
  Description of Artificial Sequence: Synthetic oligonucleotide
gaagcaaguagcuacagcu

SEQ ID NO: 3184408 - RNA, 19 nt, Artificial Sequence
  Description of Artificial Sequence: Synthetic oligonucleotide
aggaugaaacccuaaauaa

SEQ ID NO: 3184409 - RNA, 19 nt, Artificial Sequence
  Description of Artificial Sequence: Synthetic oligonucleotide
ucagacccagguauggagg

SEQ ID NO: 3184410 - RNA, 19 nt, Artificial Sequence
  Description of Artificial Sequence: Synthetic oligonucleotide
ugucauagcuguaggaacu

SEQ ID NO: 3184411 - RNA, 19 nt, Artificial Sequence
  Description of Artificial Sequence: Synthetic oligonucleotide
guaggaacuaaacaccaug

SEQ ID NO: 3184412 - RNA, 19 nt, Artificial Sequence
  Description of Artificial Sequence: Synthetic oligonucleotide
accauggugcaauucugcc

SEQ ID NO: 3184413 - RNA, 19 nt, Artificial Sequence
  Description of Artificial Sequence: Synthetic oligonucleotide
ugaauguccacaggaaaag

SEQ ID NO: 3184414 - RNA, 19 nt, Artificial Sequence
  Description of Artificial Sequence: Synthetic oligonucleotide
aacgaugaauguccacagg

SEQ ID NO: 3184415 - RNA, 19 nt, Artificial Sequence
  Description of Artificial Sequence: Synthetic oligonucleotide
acuagaucguuacaggggu

SEQ ID NO: 3184416 - RNA, 19 nt, Artificial Sequence
  Description of Artificial Sequence: Synthetic oligonucleotide
aaccuagaagguuugugga

SEQ ID NO: 3184417 - RNA, 19 nt, Artificial Sequence
  Description of Artificial Sequence: Synthetic oligonucleotide
ugaugaggaugcauggugc

SEQ ID NO: 3184418 - RNA, 19 nt, Artificial Sequence
  Description of Artificial Sequence: Synthetic oligonucleotide
ugaacaugagauauuugau

SEQ ID NO: 3184419 - RNA, 19 nt, Artificial Sequence
  Description of Artificial Sequence: Synthetic oligonucleotide
aaugguacguggcaucuaa

SEQ ID NO: 3184420 - RNA, 19 nt, Artificial Sequence
  Description of Artificial Sequence: Synthetic oligonucleotide
acuuaagccugucuucagg

SEQ ID NO: 3184421 - RNA, 19 nt, Artificial Sequence
  Description of Artificial Sequence: Synthetic oligonucleotide
auacucaucgguuccucgg

SEQ ID NO: 3184422 - RNA, 19 nt, Artificial Sequence
  Description of Artificial Sequence: Synthetic oligonucleotide
auuuccugugucuccugcc

SEQ ID NO: 3184423 - RNA, 19 nt, Artificial Sequence
  Description of Artificial Sequence: Synthetic oligonucleotide
ucaugaauguagauuuccu

SEQ ID NO: 3184424 - RNA, 19 nt, Artificial Sequence
  Description of Artificial Sequence: Synthetic oligonucleotide
agaagguuuguggauaauc

SEQ ID NO: 3184425 - RNA, 19 nt, Artificial Sequence
  Description of Artificial Sequence: Synthetic oligonucleotide
gaaagugacaaggaucaug

SEQ ID NO: 3184426 - RNA, 19 nt, Artificial Sequence
  Description of Artificial Sequence: Synthetic oligonucleotide
gaaguaggugaccuggaug

SEQ ID NO: 3184427 - RNA, 19 nt, Artificial Sequence
  Description of Artificial Sequence: Synthetic oligonucleotide
ucauuguuguucagcagca

SEQ ID NO: 3184428 - RNA, 19 nt, Artificial Sequence
  Description of Artificial Sequence: Synthetic oligonucleotide
ugaagguuccuucaugaau

SEQ ID NO: 3184429 - RNA, 19 nt, Artificial Sequence
  Description of Artificial Sequence: Synthetic oligonucleotide
uuugauaaugauggggacu

SEQ ID NO: 3184430 - RNA, 19 nt, Artificial Sequence
  Description of Artificial Sequence: Synthetic oligonucleotide
uauggagggagcuugugaa

SEQ ID NO: 3184431 - RNA, 19 nt, Artificial Sequence
  Description of Artificial Sequence: Synthetic oligonucleotide
aagacgauccacaaccaug

SEQ ID NO: 3184432 - RNA, 19 nt, Artificial Sequence
  Description of Artificial Sequence: Synthetic oligonucleotide
aggacuuaagccugucuuc

SEQ ID NO: 3184433 - RNA, 19 nt, Artificial Sequence
  Description of Artificial Sequence: Synthetic oligonucleotide
gauggggacugccagggag

SEQ ID NO: 3184434 - RNA, 19 nt, Artificial Sequence
  Description of Artificial Sequence: Synthetic oligonucleotide
aucguguucugcaggaucc

SEQ ID NO: 3184435 - RNA, 19 nt, Artificial Sequence
  Description of Artificial Sequence: Synthetic oligonucleotide
aaucgaugccaucguguuc

SEQ ID NO: 3184436 - RNA, 19 nt, Artificial Sequence
  Description of Artificial Sequence: Synthetic oligonucleotide
uuaaccuagaagguuugug

SEQ ID NO: 3184437 - RNA, 19 nt, Artificial Sequence
  Description of Artificial Sequence: Synthetic oligonucleotide
ugcccaucaggacuuaagc

SEQ ID NO: 3184438 - RNA, 19 nt, Artificial Sequence
  Description of Artificial Sequence: Synthetic oligonucleotide
uaaugagauagaagguaac

SEQ ID NO: 3184439 - RNA, 19 nt, Artificial Sequence
  Description of Artificial Sequence: Synthetic oligonucleotide
agacgauccacaaccaugg

SEQ ID NO: 3184440 - RNA, 19 nt, Artificial Sequence
  Description of Artificial Sequence: Synthetic oligonucleotide
ugaucaggguccccgacgc

SEQ ID NO: 3184441 - RNA, 19 nt, Artificial Sequence
  Description of Artificial Sequence: Synthetic oligonucleotide
aaacugccaguccuccuuc

SEQ ID NO: 3184442 - RNA, 19 nt, Artificial Sequence
  Description of Artificial Sequence: Synthetic oligonucleotide
auggccaagagagugauga

SEQ ID NO: 3184443 - RNA, 19 nt, Artificial Sequence
  Description of Artificial Sequence: Synthetic oligonucleotide
ugcaaguugaggaccacaa

SEQ ID NO: 3184444 - RNA, 19 nt, Artificial Sequence
  Description of Artificial Sequence: Synthetic oligonucleotide
gaacaugagauauuugaua

SEQ ID NO: 3184445 - RNA, 19 nt, Artificial Sequence
  Description of Artificial Sequence: Synthetic oligonucleotide
guuccagcuagccuggacc

SEQ ID NO: 3184446 - RNA, 19 nt, Artificial Sequence
  Description of Artificial Sequence: Synthetic oligonucleotide
uuuccgucauuguuguuca

SEQ ID NO: 3184447 - RNA, 19 nt, Artificial Sequence
  Description of Artificial Sequence: Synthetic oligonucleotide
auaaucucccauuggcugu

SEQ ID NO: 3184448 - RNA, 19 nt, Artificial Sequence
  Description of Artificial Sequence: Synthetic oligonucleotide
guagaagacgaagauggcc

SEQ ID NO: 3184449 - RNA, 19 nt, Artificial Sequence
  Description of Artificial Sequence: Synthetic oligonucleotide
cagaaacacagucaggguc

SEQ ID NO: 3184450 - RNA, 19 nt, Artificial Sequence
  Description of Artificial Sequence: Synthetic oligonucleotide
agcuugugaaugaagaucu

SEQ ID NO: 3184451 - RNA, 19 nt, Artificial Sequence
  Description of Artificial Sequence: Synthetic oligonucleotide
augaucaggguccccgacg

SEQ ID NO: 3184452 - RNA, 19 nt, Artificial Sequence
  Description of Artificial Sequence: Synthetic oligonucleotide
agagugaugaggaugcaug

SEQ ID NO: 3184453 - RNA, 19 nt, Artificial Sequence
  Description of Artificial Sequence: Synthetic oligonucleotide
ucuaggauccccuggucgu

SEQ ID NO: 3184454 - RNA, 19 nt, Artificial Sequence
  Description of Artificial Sequence: Synthetic oligonucleotide
gucuaaguacacuuuugug

SEQ ID NO: 3184455 - RNA, 19 nt, Artificial Sequence
  Description of Artificial Sequence: Synthetic oligonucleotide
gaugcggagagaaucgaug

SEQ ID NO: 3184456 - RNA, 19 nt, Artificial Sequence
  Description of Artificial Sequence: Synthetic oligonucleotide
agaaggaugaaacccuaaa

SEQ ID NO: 3184457 - RNA, 19 nt, Artificial Sequence
  Description of Artificial Sequence: Synthetic oligonucleotide
auggugcaaguugaggacc

SEQ ID NO: 3184458 - RNA, 19 nt, Artificial Sequence
  Description of Artificial Sequence: Synthetic oligonucleotide
cucuaggauccccuggucg

SEQ ID NO: 3184459 - RNA, 19 nt, Artificial Sequence
  Description of Artificial Sequence: Synthetic oligonucleotide
uuccgucgaauaaugagau

SEQ ID NO: 3184460 - RNA, 19 nt, Artificial Sequence
  Description of Artificial Sequence: Synthetic oligonucleotide
agcaccggcaacucuugac

SEQ ID NO: 3184461 - RNA, 19 nt, Artificial Sequence
  Description of Artificial Sequence: Synthetic oligonucleotide
aucgaugccaucguguucu

SEQ ID NO: 3184462 - RNA, 19 nt, Artificial Sequence
  Description of Artificial Sequence: Synthetic oligonucleotide
uguucucaaugaagguucc

SEQ ID NO: 3184463 - RNA, 19 nt, Artificial Sequence
  Description of Artificial Sequence: Synthetic oligonucleotide
cugggagccaaauggauuc

SEQ ID NO: 3184464 - RNA, 19 nt, Artificial Sequence
  Description of Artificial Sequence: Synthetic oligonucleotide
ucugcaggaucccagcuua

SEQ ID NO: 3184465 - RNA, 19 nt, Artificial Sequence
  Description of Artificial Sequence: Synthetic oligonucleotide
cuuccgucgaauaaugaga

SEQ ID NO: 3184466 - RNA, 19 nt, Artificial Sequence
  Description of Artificial Sequence: Synthetic oligonucleotide
gaucauggugaacaugaga

SEQ ID NO: 3184467 - RNA, 19 nt, Artificial Sequence
  Description of Artificial Sequence: Synthetic oligonucleotide
caauucugccagucaaagg

SEQ ID NO: 3184468 - RNA, 19 nt, Artificial Sequence
  Description of Artificial Sequence: Synthetic oligonucleotide
cuaaguacacuuuugugcu

SEQ ID NO: 3184469 - RNA, 19 nt, Artificial Sequence
  Description of Artificial Sequence: Synthetic oligonucleotide
agaaacacagucaggguca

SEQ ID NO: 3184470 - RNA, 19 nt, Artificial Sequence
  Description of Artificial Sequence: Synthetic oligonucleotide
auaaugagauagaagguaa

SEQ ID NO: 3184471 - RNA, 19 nt, Artificial Sequence
  Description of Artificial Sequence: Synthetic oligonucleotide
acuaacagcuccuugacuc

SEQ ID NO: 3184472 - RNA, 19 nt, Artificial Sequence
  Description of Artificial Sequence: Synthetic oligonucleotide
acagucaacuaacagcucc

SEQ ID NO: 3184473 - RNA, 19 nt, Artificial Sequence
  Description of Artificial Sequence: Synthetic oligonucleotide
uaacagucaacuaacagcu

SEQ ID NO: 3184474 - RNA, 19 nt, Artificial Sequence
  Description of Artificial Sequence: Synthetic oligonucleotide
guaacagucaacuaacagc

SEQ ID NO: 3184475 - RNA, 19 nt, Artificial Sequence
  Description of Artificial Sequence: Synthetic oligonucleotide
aucaucacuuuccaugucc

SEQ ID NO: 3184476 - RNA, 19 nt, Artificial Sequence
  Description of Artificial Sequence: Synthetic oligonucleotide
uuuguaacagucaacuaac

SEQ ID NO: 3184477 - RNA, 19 nt, Artificial Sequence
  Description of Artificial Sequence: Synthetic oligonucleotide
uguaacagucaacuaacag

SEQ ID NO: 3184478 - RNA, 19 nt, Artificial Sequence
  Description of Artificial Sequence: Synthetic oligonucleotide
ucaacuaacagcuccuuga

SEQ ID NO: 3184479 - RNA, 19 nt, Artificial Sequence
  Description of Artificial Sequence: Synthetic oligonucleotide
aguucauccacaucuaucu

SEQ ID NO: 3184480 - RNA, 19 nt, Artificial Sequence
  Description of Artificial Sequence: Synthetic oligonucleotide
agaugaaggccucaguggg

SEQ ID NO: 3184481 - RNA, 19 nt, Artificial Sequence
  Description of Artificial Sequence: Synthetic oligonucleotide
gagaugaaggccucagugg

SEQ ID NO: 3184482 - RNA, 19 nt, Artificial Sequence
  Description of Artificial Sequence: Synthetic oligonucleotide
gguaucaucacuuuccaug

SEQ ID NO: 3184483 - RNA, 19 nt, Artificial Sequence
  Description of Artificial Sequence: Synthetic oligonucleotide
agagaugaaggccucagug

SEQ ID NO: 3184484 - RNA, 19 nt, Artificial Sequence
  Description of Artificial Sequence: Synthetic oligonucleotide
uucauccacaucuaucucc

SEQ ID NO: 3184485 - RNA, 19 nt, Artificial Sequence
  Description of Artificial Sequence: Synthetic oligonucleotide
auccacaucuaucuccagc

SEQ ID NO: 3184486 - RNA, 19 nt, Artificial Sequence
  Description of Artificial Sequence: Synthetic oligonucleotide
guuuguaacagucaacuaa

SEQ ID NO: 3184487 - RNA, 19 nt, Artificial Sequence
  Description of Artificial Sequence: Synthetic oligonucleotide
acucuuguccagcaggccg

SEQ ID NO: 3184488 - RNA, 19 nt, Artificial Sequence
  Description of Artificial Sequence: Synthetic oligonucleotide
agcuccuugacucuagcag

SEQ ID NO: 3184489 - RNA, 19 nt, Artificial Sequence
  Description of Artificial Sequence: Synthetic oligonucleotide
uggaaucuccucuuccugg

SEQ ID NO: 3184490 - RNA, 19 nt, Artificial Sequence
  Description of Artificial Sequence: Synthetic oligonucleotide
aaucuccucuuccuggcag

SEQ ID NO: 3184491 - RNA, 19 nt, Artificial Sequence
  Description of Artificial Sequence: Synthetic oligonucleotide
uccacaucuaucuccagcu

SEQ ID NO: 3184492 - RNA, 19 nt, Artificial Sequence
  Description of Artificial Sequence: Synthetic oligonucleotide
uuguccagcaggccgagag

SEQ ID NO: 3184493 - RNA, 19 nt, Artificial Sequence
  Description of Artificial Sequence: Synthetic oligonucleotide
ucauccacaucuaucucca

SEQ ID NO: 3184494 - RNA, 19 nt, Artificial Sequence
  Description of Artificial Sequence: Synthetic oligonucleotide
ucacuuuccauguccaaga

SEQ ID NO: 3184495 - RNA, 19 nt, Artificial Sequence
  Description of Artificial Sequence: Synthetic oligonucleotide
agugagcuguucuaagauc

SEQ ID NO: 3184496 - RNA, 19 nt, Artificial Sequence
  Description of Artificial Sequence: Synthetic oligonucleotide
uguccaagaguucauccac

SEQ ID NO: 3184497 - RNA, 19 nt, Artificial Sequence
  Description of Artificial Sequence: Synthetic oligonucleotide
aagugagcuguucuaagau

SEQ ID NO: 3184498 - RNA, 19 nt, Artificial Sequence
  Description of Artificial Sequence: Synthetic oligonucleotide
cauguccaagaguucaucc

SEQ ID NO: 3184499 - RNA, 19 nt, Artificial Sequence
  Description of Artificial Sequence: Synthetic oligonucleotide
caagaguucauccacaucu

SEQ ID NO: 3184500 - RNA, 19 nt, Artificial Sequence
  Description of Artificial Sequence: Synthetic oligonucleotide
ucuaucuccagcucuggaa

SEQ ID NO: 3184501 - RNA, 19 nt, Artificial Sequence
  Description of Artificial Sequence: Synthetic oligonucleotide
agucguagagacaagugag

SEQ ID NO: 3184502 - RNA, 19 nt, Artificial Sequence
  Description of Artificial Sequence: Synthetic oligonucleotide
ucagcuucugcaugccccg

SEQ ID NO: 3184503 - RNA, 19 nt, Artificial Sequence
  Description of Artificial Sequence: Synthetic oligonucleotide
ucaucacuuuccaugucca

SEQ ID NO: 3184504 - RNA, 19 nt, Artificial Sequence
  Description of Artificial Sequence: Synthetic oligonucleotide
ucuggaaucuccucuuccu

SEQ ID NO: 3184505 - RNA, 19 nt, Artificial Sequence
  Description of Artificial Sequence: Synthetic oligonucleotide
gugagcuguucuaagaucc

SEQ ID NO: 3184506 - RNA, 19 nt, Artificial Sequence
  Description of Artificial Sequence: Synthetic oligonucleotide
cucagcuucugcaugcccc

SEQ ID NO: 3184507 - RNA, 19 nt, Artificial Sequence
  Description of Artificial Sequence: Synthetic oligonucleotide
ucugggguggugcucagcu

SEQ ID NO: 3184508 - RNA, 19 nt, Artificial Sequence
  Description of Artificial Sequence: Synthetic oligonucleotide
acaagugagcuguucuaag

SEQ ID NO: 3184509 - RNA, 19 nt, Artificial Sequence
  Description of Artificial Sequence: Synthetic oligonucleotide
uuccauguccaagaguuca

SEQ ID NO: 3184510 - RNA, 19 nt, Artificial Sequence
  Description of Artificial Sequence: Synthetic oligonucleotide
aucacuuuccauguccaag

SEQ ID NO: 3184511 - RNA, 19 nt, Artificial Sequence
  Description of Artificial Sequence: Synthetic oligonucleotide
aacuaacagcuccuugacu

SEQ ID NO: 3184512 - RNA, 19 nt, Artificial Sequence
  Description of Artificial Sequence: Synthetic oligonucleotide
cuugacucuagcagcccgg

SEQ ID NO: 3184513 - RNA, 19 nt, Artificial Sequence
  Description of Artificial Sequence: Synthetic oligonucleotide
cuuccuggcagucguagag

SEQ ID NO: 3184514 - RNA, 19 nt, Artificial Sequence
  Description of Artificial Sequence: Synthetic oligonucleotide
augccccggacucuugucc

SEQ ID NO: 3184515 - RNA, 19 nt, Artificial Sequence
  Description of Artificial Sequence: Synthetic oligonucleotide
uuguaacagucaacuaaca

SEQ ID NO: 3184516 - RNA, 19 nt, Artificial Sequence
  Description of Artificial Sequence: Synthetic oligonucleotide
auguccaagaguucaucca

SEQ ID NO: 3184517 - RNA, 19 nt, Artificial Sequence
  Description of Artificial Sequence: Synthetic oligonucleotide
uucugcaugccccggacuc

SEQ ID NO: 3184518 - RNA, 19 nt, Artificial Sequence
  Description of Artificial Sequence: Synthetic oligonucleotide
cuuuccauguccaagaguu

SEQ ID NO: 3184519 - RNA, 19 nt, Artificial Sequence
  Description of Artificial Sequence: Synthetic oligonucleotide
ucguagagacaagugagcu

SEQ ID NO: 3184520 - RNA, 19 nt, Artificial Sequence
  Description of Artificial Sequence: Synthetic oligonucleotide
acagcuccuugacucuagc

SEQ ID NO: 3184521 - RNA, 19 nt, Artificial Sequence
  Description of Artificial Sequence: Synthetic oligonucleotide
aggccgagagaugaaggcc

SEQ ID NO: 3184522 - RNA, 19 nt, Artificial Sequence
  Description of Artificial Sequence: Synthetic oligonucleotide
cuccuugacucuagcagcc

SEQ ID NO: 3184523 - RNA, 19 nt, Artificial Sequence
  Description of Artificial Sequence: Synthetic oligonucleotide
uccucuuccuggcagucgu

SEQ ID NO: 3184524 - RNA, 19 nt, Artificial Sequence
  Description of Artificial Sequence: Synthetic oligonucleotide
ugggguggugcucagcuuc

SEQ ID NO: 3184525 - RNA, 19 nt, Artificial Sequence
  Description of Artificial Sequence: Synthetic oligonucleotide
caacuaacagcuccuugac

SEQ ID NO: 3184526 - RNA, 19 nt, Artificial Sequence
  Description of Artificial Sequence: Synthetic oligonucleotide
caggccgagagaugaaggc

SEQ ID NO: 3184527 - RNA, 19 nt, Artificial Sequence
  Description of Artificial Sequence: Synthetic oligonucleotide
uggguuuguaacagucaac

SEQ ID NO: 3184528 - RNA, 19 nt, Artificial Sequence
  Description of Artificial Sequence: Synthetic oligonucleotide
guagagacaagugagcugu

SEQ ID NO: 3184529 - RNA, 19 nt, Artificial Sequence
  Description of Artificial Sequence: Synthetic oligonucleotide
cucaguggguuuguaacag

SEQ ID NO: 3184530 - RNA, 19 nt, Artificial Sequence
  Description of Artificial Sequence: Synthetic oligonucleotide
ucuucugggguggugcuca

SEQ ID NO: 3184531 - RNA, 19 nt, Artificial Sequence
  Description of Artificial Sequence: Synthetic oligonucleotide
cucuggaaucuccucuucc

SEQ ID NO: 3184532 - RNA, 19 nt, Artificial Sequence
  Description of Artificial Sequence: Synthetic oligonucleotide
caguggguuuguaacaguc

SEQ ID NO: 3184533 - RNA, 19 nt, Artificial Sequence
  Description of Artificial Sequence: Synthetic oligonucleotide
uccaagaguucauccacau

SEQ ID NO: 3184534 - RNA, 19 nt, Artificial Sequence
  Description of Artificial Sequence: Synthetic oligonucleotide
agagacaagugagcuguuc

SEQ ID NO: 3184535 - RNA, 19 nt, Artificial Sequence
  Description of Artificial Sequence: Synthetic oligonucleotide
gucaacuaacagcuccuug

SEQ ID NO: 3184536 - RNA, 19 nt, Artificial Sequence
  Description of Artificial Sequence: Synthetic oligonucleotide
uugacucuagcagcccggg

SEQ ID NO: 3184537 - RNA, 19 nt, Artificial Sequence
  Description of Artificial Sequence: Synthetic oligonucleotide
acuuuccauguccaagagu

SEQ ID NO: 3184538 - RNA, 19 nt, Artificial Sequence
  Description of Artificial Sequence: Synthetic oligonucleotide
uccagcucuggaaucuccu

SEQ ID NO: 3184539 - RNA, 19 nt, Artificial Sequence
  Description of Artificial Sequence: Synthetic oligonucleotide
guaucaucacuuuccaugu

SEQ ID NO: 3184540 - RNA, 19 nt, Artificial Sequence
  Description of Artificial Sequence: Synthetic oligonucleotide
aacagucaacuaacagcuc

SEQ ID NO: 3184541 - RNA, 19 nt, Artificial Sequence
  Description of Artificial Sequence: Synthetic oligonucleotide
gacucuagcagcccgggua

SEQ ID NO: 3184542 - RNA, 19 nt, Artificial Sequence
  Description of Artificial Sequence: Synthetic oligonucleotide
uccuggcagucguagagac

SEQ ID NO: 3184543 - RNA, 19 nt, Artificial Sequence
  Description of Artificial Sequence: Synthetic oligonucleotide
cagucguagagacaaguga

SEQ ID NO: 3184544 - RNA, 19 nt, Artificial Sequence
  Description of Artificial Sequence: Synthetic oligonucleotide
ccggguaucaucacuuucc

SEQ ID NO: 3184545 - RNA, 19 nt, Artificial Sequence
  Description of Artificial Sequence: Synthetic oligonucleotide
gaguucauccacaucuauc

SEQ ID NO: 3184546 - RNA, 19 nt, Artificial Sequence
  Description of Artificial Sequence: Synthetic oligonucleotide
caagugagcuguucuaaga

SEQ ID NO: 3184547 - RNA, 19 nt, Artificial Sequence
  Description of Artificial Sequence: Synthetic oligonucleotide
gagacaagugagcuguucu

SEQ ID NO: 3184548 - RNA, 19 nt, Artificial Sequence
  Description of Artificial Sequence: Synthetic oligonucleotide
acaucuaucuccagcucug

SEQ ID NO: 3184549 - RNA, 19 nt, Artificial Sequence
  Description of Artificial Sequence: Synthetic oligonucleotide
guggguuuguaacagucaa

SEQ ID NO: 3184550 - RNA, 19 nt, Artificial Sequence
  Description of Artificial Sequence: Synthetic oligonucleotide
uuuccauguccaagaguuc

SEQ ID NO: 3184551 - RNA, 19 nt, Artificial Sequence
  Description of Artificial Sequence: Synthetic oligonucleotide
agaguucauccacaucuau

SEQ ID NO: 3184552 - RNA, 19 nt, Artificial Sequence
  Description of Artificial Sequence: Synthetic oligonucleotide
ucuagcagcccggguauca

SEQ ID NO: 3184553 - RNA, 19 nt, Artificial Sequence
  Description of Artificial Sequence: Synthetic oligonucleotide
gcuccuugacucuagcagc

SEQ ID NO: 3184554 - RNA, 19 nt, Artificial Sequence
  Description of Artificial Sequence: Synthetic oligonucleotide
cuggaaucuccucuuccug

SEQ ID NO: 3184555 - RNA, 19 nt, Artificial Sequence
  Description of Artificial Sequence: Synthetic oligonucleotide
gucguagagacaagugagc

SEQ ID NO: 3184556 - RNA, 19 nt, Artificial Sequence
  Description of Artificial Sequence: Synthetic oligonucleotide
agacaagugagcuguucua

SEQ ID NO: 3184557 - RNA, 19 nt, Artificial Sequence
  Description of Artificial Sequence: Synthetic oligonucleotide
aacagcuccuugacucuag

SEQ ID NO: 3184558 - RNA, 19 nt, Artificial Sequence
  Description of Artificial Sequence: Synthetic oligonucleotide
ggaaucuccucuuccuggc

SEQ ID NO: 3184559 - RNA, 19 nt, Artificial Sequence
  Description of Artificial Sequence: Synthetic oligonucleotide
gugcucagcuucugcaugc

SEQ ID NO: 3184560 - RNA, 19 nt, Artificial Sequence
  Description of Artificial Sequence: Synthetic oligonucleotide
uaucaucacuuuccauguc

SEQ ID NO: 3184561 - RNA, 19 nt, Artificial Sequence
  Description of Artificial Sequence: Synthetic oligonucleotide
uguccagcaggccgagaga

SEQ ID NO: 3184562 - RNA, 19 nt, Artificial Sequence
  Description of Artificial Sequence: Synthetic oligonucleotide
ucaguggguuuguaacagu

SEQ ID NO: 3184563 - RNA, 19 nt, Artificial Sequence
  Description of Artificial Sequence: Synthetic oligonucleotide
uccauguccaagaguucau

SEQ ID NO: 3184564 - RNA, 19 nt, Artificial Sequence
  Description of Artificial Sequence: Synthetic oligonucleotide
ucuuccuggcagucguaga

SEQ ID NO: 3184565 - RNA, 19 nt, Artificial Sequence
  Description of Artificial Sequence: Synthetic oligonucleotide
acucuagcagcccggguau

SEQ ID NO: 3184566 - RNA, 19 nt, Artificial Sequence
  Description of Artificial Sequence: Synthetic oligonucleotide
cuggcagucguagagacaa

SEQ ID NO: 3184567 - RNA, 19 nt, Artificial Sequence
  Description of Artificial Sequence: Synthetic oligonucleotide
cacuuuccauguccaagag

SEQ ID NO: 3184568 - RNA, 19 nt, Artificial Sequence
  Description of Artificial Sequence: Synthetic oligonucleotide
gaaggccucaguggguuug

SEQ ID NO: 3184569 - RNA, 19 nt, Artificial Sequence
  Description of Artificial Sequence: Synthetic oligonucleotide
uaucuccagcucuggaauc

SEQ ID NO: 3184570 - RNA, 19 nt, Artificial Sequence
  Description of Artificial Sequence: Synthetic oligonucleotide
gacaagugagcuguucuaa

SEQ ID NO: 3184571 - RNA, 19 nt, Artificial Sequence
  Description of Artificial Sequence: Synthetic oligonucleotide
aagaaaaugagccagcagc

SEQ ID NO: 3184572 - RNA, 19 nt, Artificial Sequence
  Description of Artificial Sequence: Synthetic oligonucleotide
agaagaaggaacucaaucc

SEQ ID NO: 3184573 - RNA, 19 nt, Artificial Sequence
  Description of Artificial Sequence: Synthetic oligonucleotide
gugagaaagaaauacaugg

SEQ ID NO: 3184574 - RNA, 19 nt, Artificial Sequence
  Description of Artificial Sequence: Synthetic oligonucleotide
aagaacaagacgaagaggg

SEQ ID NO: 3184575 - RNA, 19 nt, Artificial Sequence
  Description of Artificial Sequence: Synthetic oligonucleotide
uguggcauaagacacaucc

SEQ ID NO: 3184576 - RNA, 19 nt, Artificial Sequence
  Description of Artificial Sequence: Synthetic oligonucleotide
aaggaggaugaauucaugc

SEQ ID NO: 3184577 - RNA, 19 nt, Artificial Sequence
  Description of Artificial Sequence: Synthetic oligonucleotide
aauucaugcacccaugucu

SEQ ID NO: 3184578 - RNA, 19 nt, Artificial Sequence
  Description of Artificial Sequence: Synthetic oligonucleotide
aacucaaucccacccaagc

SEQ ID NO: 3184579 - RNA, 19 nt, Artificial Sequence
  Description of Artificial Sequence: Synthetic oligonucleotide
aaaaugagccagcagcugg

SEQ ID NO: 3184580 - RNA, 19 nt, Artificial Sequence
  Description of Artificial Sequence: Synthetic oligonucleotide
aaggaacucaaucccaccc

SEQ ID NO: 3184581 - RNA, 19 nt, Artificial Sequence
  Description of Artificial Sequence: Synthetic oligonucleotide
auaagacacauccacaagg

SEQ ID NO: 3184582 - RNA, 19 nt, Artificial Sequence
  Description of Artificial Sequence: Synthetic oligonucleotide
ugcugcaagaaaaugagcc

SEQ ID NO: 3184583 - RNA, 19 nt, Artificial Sequence
  Description of Artificial Sequence: Synthetic oligonucleotide
ugagaaagaaauacauggg

SEQ ID NO: 3184584 - RNA, 19 nt, Artificial Sequence
  Description of Artificial Sequence: Synthetic oligonucleotide
augaauaagaacaagacga

SEQ ID NO: 3184585 - RNA, 19 nt, Artificial Sequence
  Description of Artificial Sequence: Synthetic oligonucleotide
aacggaauugcuuugugug

SEQ ID NO: 3184586 - RNA, 19 nt, Artificial Sequence
  Description of Artificial Sequence: Synthetic oligonucleotide
uacaugaauaagaacaaga

SEQ ID NO: 3184587 - RNA, 19 nt, Artificial Sequence
  Description of Artificial Sequence: Synthetic oligonucleotide
aauaagaacaagacgaaga

SEQ ID NO: 3184588 - RNA, 19 nt, Artificial Sequence
  Description of Artificial Sequence: Synthetic oligonucleotide
uaagacacauccacaaggg

SEQ ID NO: 3184589 - RNA, 19 nt, Artificial Sequence
  Description of Artificial Sequence: Synthetic oligonucleotide
aaaauaacugugcugcaca

SEQ ID NO: 3184590 - RNA, 19 nt, Artificial Sequence
  Description of Artificial Sequence: Synthetic oligonucleotide
auaagaacaagacgaagag

SEQ ID NO: 3184591 - RNA, 19 nt, Artificial Sequence
  Description of Artificial Sequence: Synthetic oligonucleotide
ugugcugcaagaaaaugag

SEQ ID NO: 3184592 - RNA, 19 nt, Artificial Sequence
  Description of Artificial Sequence: Synthetic oligonucleotide
caugaauaagaacaagacg

SEQ ID NO: 3184593 - RNA, 19 nt, Artificial Sequence
  Description of Artificial Sequence: Synthetic oligonucleotide
aaagaaauacaugggagug

SEQ ID NO: 3184594 - RNA, 19 nt, Artificial Sequence
  Description of Artificial Sequence: Synthetic oligonucleotide
gaagaaggaacucaauccc

SEQ ID NO: 3184595 - RNA, 19 nt, Artificial Sequence
  Description of Artificial Sequence: Synthetic oligonucleotide
gaucagaagaaugaugagg

SEQ ID NO: 3184596 - RNA, 19 nt, Artificial Sequence
  Description of Artificial Sequence: Synthetic oligonucleotide
gaagagggagacuugagug

SEQ ID NO: 3184597 - RNA, 19 nt, Artificial Sequence
  Description of Artificial Sequence: Synthetic oligonucleotide
acaugaauaagaacaagac

SEQ ID NO: 3184598 - RNA, 19 nt, Artificial Sequence
  Description of Artificial Sequence: Synthetic oligonucleotide
acugucaccagguacauga

SEQ ID NO: 3184599 - RNA, 19 nt, Artificial Sequence
  Description of Artificial Sequence: Synthetic oligonucleotide
agguacaugaauaagaaca

SEQ ID NO: 3184600 - RNA, 19 nt, Artificial Sequence
  Description of Artificial Sequence: Synthetic oligonucleotide
agaaugaugaggacguucc

SEQ ID NO: 3184601 - RNA, 19 nt, Artificial Sequence
  Description of Artificial Sequence: Synthetic oligonucleotide
ugcugcacagcucagaaac

SEQ ID NO: 3184602 - RNA, 19 nt, Artificial Sequence
  Description of Artificial Sequence: Synthetic oligonucleotide
ucuggacaggccaaggagg

SEQ ID NO: 3184603 - RNA, 19 nt, Artificial Sequence
  Description of Artificial Sequence: Synthetic oligonucleotide
uaugcuuguggcauaagac

SEQ ID NO: 3184604 - RNA, 19 nt, Artificial Sequence
  Description of Artificial Sequence: Synthetic oligonucleotide
uuugugugcugcaagaaaa

SEQ ID NO: 3184605 - RNA, 19 nt, Artificial Sequence
  Description of Artificial Sequence: Synthetic oligonucleotide
aauacaugggaguguggag

SEQ ID NO: 3184606 - RNA, 19 nt, Artificial Sequence
  Description of Artificial Sequence: Synthetic oligonucleotide
aaauaacugugcugcacag

SEQ ID NO: 3184607 - RNA, 19 nt, Artificial Sequence
  Description of Artificial Sequence: Synthetic oligonucleotide
auaacugugcugcacagcu

SEQ ID NO: 3184608 - RNA, 19 nt, Artificial Sequence
  Description of Artificial Sequence: Synthetic oligonucleotide
ucugaucagaagaaugaug

SEQ ID NO: 3184609 - RNA, 19 nt, Artificial Sequence
  Description of Artificial Sequence: Synthetic oligonucleotide
gagaaagaaauacauggga

SEQ ID NO: 3184610 - RNA, 19 nt, Artificial Sequence
  Description of Artificial Sequence: Synthetic oligonucleotide
aaauacaugggagugugga

SEQ ID NO: 3184611 - RNA, 19 nt, Artificial Sequence
  Description of Artificial Sequence: Synthetic oligonucleotide
aggaugaauucaugcaccc

SEQ ID NO: 3184612 - RNA, 19 nt, Artificial Sequence
  Description of Artificial Sequence: Synthetic oligonucleotide
aagcacugucaccagguac

SEQ ID NO: 3184613 - RNA, 19 nt, Artificial Sequence
  Description of Artificial Sequence: Synthetic oligonucleotide
aauaacugugcugcacagc

SEQ ID NO: 3184614 - RNA, 19 nt, Artificial Sequence
  Description of Artificial Sequence: Synthetic oligonucleotide
cugaucagaagaaugauga

SEQ ID NO: 3184615 - RNA, 19 nt, Artificial Sequence
  Description of Artificial Sequence: Synthetic oligonucleotide
uccacaagggacagguugg

SEQ ID NO: 3184616 - RNA, 19 nt, Artificial Sequence
  Description of Artificial Sequence: Synthetic oligonucleotide
acuugagugucccagucuc

SEQ ID NO: 3184617 - RNA, 19 nt, Artificial Sequence
  Description of Artificial Sequence: Synthetic oligonucleotide
aagaaugaugaggacguuc

SEQ ID NO: 3184618 - RNA, 19 nt, Artificial Sequence
  Description of Artificial Sequence: Synthetic oligonucleotide
agaaagaaauacaugggag

SEQ ID NO: 3184619 - RNA, 19 nt, Artificial Sequence
  Description of Artificial Sequence: Synthetic oligonucleotide
acucaaucccacccaagcc

SEQ ID NO: 3184620 - RNA, 19 nt, Artificial Sequence
  Description of Artificial Sequence: Synthetic oligonucleotide
aacugugcugcacagcuca

SEQ ID NO: 3184621 - RNA, 19 nt, Artificial Sequence
  Description of Artificial Sequence: Synthetic oligonucleotide
uggcauaagacacauccac

SEQ ID NO: 3184622 - RNA, 19 nt, Artificial Sequence
  Description of Artificial Sequence: Synthetic oligonucleotide
ugucugguuguucuguucc

SEQ ID NO: 3184623 - RNA, 19 nt, Artificial Sequence
  Description of Artificial Sequence: Synthetic oligonucleotide
ugaauaagaacaagacgaa

SEQ ID NO: 3184624 - RNA, 19 nt, Artificial Sequence
  Description of Artificial Sequence: Synthetic oligonucleotide
ucagaaacggaauugcuuu

SEQ ID NO: 3184625 - RNA, 19 nt, Artificial Sequence
  Description of Artificial Sequence: Synthetic oligonucleotide
guuggugagaaagaaauac

SEQ ID NO: 3184626 - RNA, 19 nt, Artificial Sequence
  Description of Artificial Sequence: Synthetic oligonucleotide
agacacauccacaagggac

SEQ ID NO: 3184627 - RNA, 19 nt, Artificial Sequence
  Description of Artificial Sequence: Synthetic oligonucleotide
cagaagaaugaugaggacg

SEQ ID NO: 3184628 - RNA, 19 nt, Artificial Sequence
  Description of Artificial Sequence: Synthetic oligonucleotide
caucacugccagaagaagg

SEQ ID NO: 3184629 - RNA, 19 nt, Artificial Sequence
  Description of Artificial Sequence: Synthetic oligonucleotide
acggaauugcuuugugugc

SEQ ID NO: 3184630 - RNA, 19 nt, Artificial Sequence
  Description of Artificial Sequence: Synthetic oligonucleotide
uuggugagaaagaaauaca

SEQ ID NO: 3184631 - RNA, 19 nt, Artificial Sequence
  Description of Artificial Sequence: Synthetic oligonucleotide
uaagaacaagacgaagagg

SEQ ID NO: 3184632 - RNA, 19 nt, Artificial Sequence
  Description of Artificial Sequence: Synthetic oligonucleotide
uggugagaaagaaauacau

SEQ ID NO: 3184633 - RNA, 19 nt, Artificial Sequence
  Description of Artificial Sequence: Synthetic oligonucleotide
gaugaggacguucccaagc

SEQ ID NO: 3184634 - RNA, 19 nt, Artificial Sequence
  Description of Artificial Sequence: Synthetic oligonucleotide
cucaaucccacccaagccc

SEQ ID NO: 3184635 - RNA, 19 nt, Artificial Sequence
  Description of Artificial Sequence: Synthetic oligonucleotide
gaacaagacgaagagggag

SEQ ID NO: 3184636 - RNA, 19 nt, Artificial Sequence
  Description of Artificial Sequence: Synthetic oligonucleotide
ugcuuguggcauaagacac

SEQ ID NO: 3184637 - RNA, 19 nt, Artificial Sequence
  Description of Artificial Sequence: Synthetic oligonucleotide
aaacggaauugcuuugugu

SEQ ID NO: 3184638 - RNA, 19 nt, Artificial Sequence
  Description of Artificial Sequence: Synthetic oligonucleotide
aucagaagaaugaugagga

SEQ ID NO: 3184639 - RNA, 19 nt, Artificial Sequence
  Description of Artificial Sequence: Synthetic oligonucleotide
aagagggagacuugagugu

SEQ ID NO: 3184640 - RNA, 19 nt, Artificial Sequence
  Description of Artificial Sequence: Synthetic oligonucleotide
gaauaagaacaagacgaag

SEQ ID NO: 3184641 - RNA, 19 nt, Artificial Sequence
  Description of Artificial Sequence: Synthetic oligonucleotide
auccacaagggacagguug

SEQ ID NO: 3184642 - RNA, 19 nt, Artificial Sequence
  Description of Artificial Sequence: Synthetic oligonucleotide
aagacgaagagggagacuu

SEQ ID NO: 3184643 - RNA, 19 nt, Artificial Sequence
  Description of Artificial Sequence: Synthetic oligonucleotide
agaagaaugaugaggacgu

SEQ ID NO: 3184644 - RNA, 19 nt, Artificial Sequence
  Description of Artificial Sequence: Synthetic oligonucleotide
agcucagaaacggaauugc

SEQ ID NO: 3184645 - RNA, 19 nt, Artificial Sequence
  Description of Artificial Sequence: Synthetic oligonucleotide
acaagggacagguugguga

SEQ ID NO: 3184646 - RNA, 19 nt, Artificial Sequence
  Description of Artificial Sequence: Synthetic oligonucleotide
cacacacugccacauagcg

SEQ ID NO: 3184647 - RNA, 19 nt, Artificial Sequence
  Description of Artificial Sequence: Synthetic oligonucleotide
aaugaugaggacguuccca

SEQ ID NO: 3184648 - RNA, 19 nt, Artificial Sequence
  Description of Artificial Sequence: Synthetic oligonucleotide
agaaauacaugggagugug

SEQ ID NO: 3184649 - RNA, 19 nt, Artificial Sequence
  Description of Artificial Sequence: Synthetic oligonucleotide
ugaauucaugcacccaugu

SEQ ID NO: 3184650 - RNA, 19 nt, Artificial Sequence
  Description of Artificial Sequence: Synthetic oligonucleotide
gaaagaaauacaugggagu

SEQ ID NO: 3184651 - RNA, 19 nt, Artificial Sequence
  Description of Artificial Sequence: Synthetic oligonucleotide
cacauagcggucauaggcc

SEQ ID NO: 3184652 - RNA, 19 nt, Artificial Sequence
  Description of Artificial Sequence: Synthetic oligonucleotide
cagaagaaggaacucaauc

SEQ ID NO: 3184653 - RNA, 19 nt, Artificial Sequence
  Description of Artificial Sequence: Synthetic oligonucleotide
ugcaagaaaaugagccagc

SEQ ID NO: 3184654 - RNA, 19 nt, Artificial Sequence
  Description of Artificial Sequence: Synthetic oligonucleotide
uucccaagcacugucacca

SEQ ID NO: 3184655 - RNA, 19 nt, Artificial Sequence
  Description of Artificial Sequence: Synthetic oligonucleotide
augcuuguggcauaagaca

SEQ ID NO: 3184656 - RNA, 19 nt, Artificial Sequence
  Description of Artificial Sequence: Synthetic oligonucleotide
ucauaggccaucacugcca

SEQ ID NO: 3184657 - RNA, 19 nt, Artificial Sequence
  Description of Artificial Sequence: Synthetic oligonucleotide
ugaucagaagaaugaugag

SEQ ID NO: 3184658 - RNA, 19 nt, Artificial Sequence
  Description of Artificial Sequence: Synthetic oligonucleotide
aaaugagccagcagcuggg

SEQ ID NO: 3184659 - RNA, 19 nt, Artificial Sequence
  Description of Artificial Sequence: Synthetic oligonucleotide
aggaggaugaauucaugca

SEQ ID NO: 3184660 - RNA, 19 nt, Artificial Sequence
  Description of Artificial Sequence: Synthetic oligonucleotide
ugccacauagcggucauag

SEQ ID NO: 3184661 - RNA, 19 nt, Artificial Sequence
  Description of Artificial Sequence: Synthetic oligonucleotide
gucacacacugccacauag

SEQ ID NO: 3184662 - RNA, 19 nt, Artificial Sequence
  Description of Artificial Sequence: Synthetic oligonucleotide
agaaggaacucaaucccac

SEQ ID NO: 3184663 - RNA, 19 nt, Artificial Sequence
  Description of Artificial Sequence: Synthetic oligonucleotide
gaggaugaauucaugcacc

SEQ ID NO: 3184664 - RNA, 19 nt, Artificial Sequence
  Description of Artificial Sequence: Synthetic oligonucleotide
ucaaucccacccaagccca

SEQ ID NO: 3184665 - RNA, 19 nt, Artificial Sequence
  Description of Artificial Sequence: Synthetic oligonucleotide
aagaaauacaugggagugu

SEQ ID NO: 3184666 - RNA, 19 nt, Artificial Sequence
  Description of Artificial Sequence: Synthetic oligonucleotide
gucgagucugaucagaaga

SEQ ID NO: 3184667 - RNA, 19 nt, Artificial Sequence
  Description of Artificial Sequence: Synthetic oligonucleotide
aacaagacgaagagggaga

SEQ ID NO: 3184668 - RNA, 19 nt, Artificial Sequence
  Description of Artificial Sequence: Synthetic oligonucleotide
agacuugagugucccaguc

SEQ ID NO: 3184669 - RNA, 19 nt, Artificial Sequence
  Description of Artificial Sequence: Synthetic oligonucleotide
gagucugaucagaagaaug

SEQ ID NO: 3184670 - RNA, 19 nt, Artificial Sequence
  Description of Artificial Sequence: Synthetic oligonucleotide
aauugcuuugugugcugca

SEQ ID NO: 3184671 - RNA, 19 nt, Artificial Sequence
  Description of Artificial Sequence: Synthetic oligonucleotide
aauagaaacagcuccaugc

SEQ ID NO: 3184672 - RNA, 19 nt, Artificial Sequence
  Description of Artificial Sequence: Synthetic oligonucleotide
uacaaaauaaccuacuagg

SEQ ID NO: 3184673 - RNA, 19 nt, Artificial Sequence
  Description of Artificial Sequence: Synthetic oligonucleotide
aaaggcaugaaguagucac

SEQ ID NO: 3184674 - RNA, 19 nt, Artificial Sequence
  Description of Artificial Sequence: Synthetic oligonucleotide
aaaguuuccauucuuaucu

SEQ ID NO: 3184675 - RNA, 19 nt, Artificial Sequence
  Description of Artificial Sequence: Synthetic oligonucleotide
uuaaaguucuguaaaauug

SEQ ID NO: 3184676 - RNA, 19 nt, Artificial Sequence
  Description of Artificial Sequence: Synthetic oligonucleotide
uccauucuuaucuagaaag

SEQ ID NO: 3184677 - RNA, 19 nt, Artificial Sequence
  Description of Artificial Sequence: Synthetic oligonucleotide
agagauuucagcuuaaagu

SEQ ID NO: 3184678 - RNA, 19 nt, Artificial Sequence
  Description of Artificial Sequence: Synthetic oligonucleotide
aaauccauuuaccacuggg

SEQ ID NO: 3184679 - RNA, 19 nt, Artificial Sequence
  Description of Artificial Sequence: Synthetic oligonucleotide
aaaauaaccuacuaggguu

SEQ ID NO: 3184680 - RNA, 19 nt, Artificial Sequence
  Description of Artificial Sequence: Synthetic oligonucleotide
cuuuagacaggaaugaagc

SEQ ID NO: 3184681 - RNA, 19 nt, Artificial Sequence
  Description of Artificial Sequence: Synthetic oligonucleotide
acaggaaugaagcagagcu

SEQ ID NO: 3184682 - RNA, 19 nt, Artificial Sequence
  Description of Artificial Sequence: Synthetic oligonucleotide
aagcaaauccauuuaccac

SEQ ID NO: 3184683 - RNA, 19 nt, Artificial Sequence
  Description of Artificial Sequence: Synthetic oligonucleotide
aaugaagcagagcuggaag

SEQ ID NO: 3184684 - RNA, 19 nt, Artificial Sequence
  Description of Artificial Sequence: Synthetic oligonucleotide
uuaucuagaaaguggacca

SEQ ID NO: 3184685 - RNA, 19 nt, Artificial Sequence
  Description of Artificial Sequence: Synthetic oligonucleotide
aguucuguaaaauuguggu

SEQ ID NO: 3184686 - RNA, 19 nt, Artificial Sequence
  Description of Artificial Sequence: Synthetic oligonucleotide
ugaaccagagauuucagcu

SEQ ID NO: 3184687 - RNA, 19 nt, Artificial Sequence
  Description of Artificial Sequence: Synthetic oligonucleotide
uaaaguucuguaaaauugu

SEQ ID NO: 3184688 - RNA, 19 nt, Artificial Sequence
  Description of Artificial Sequence: Synthetic oligonucleotide
uaaaauuguggucaggaau

SEQ ID NO: 3184689 - RNA, 19 nt, Artificial Sequence
  Description of Artificial Sequence: Synthetic oligonucleotide
uucuguaaaauugugguca

SEQ ID NO: 3184690 - RNA, 19 nt, Artificial Sequence
  Description of Artificial Sequence: Synthetic oligonucleotide
ucuagaaaguggaccaagg

SEQ ID NO: 3184691 - RNA, 19 nt, Artificial Sequence
  Description of Artificial Sequence: Synthetic oligonucleotide
uucuuaucuagaaagugga

SEQ ID NO: 3184692 - RNA, 19 nt, Artificial Sequence
  Description of Artificial Sequence: Synthetic oligonucleotide
auagaaacagcuccaugcg

SEQ ID NO: 3184693 - RNA, 19 nt, Artificial Sequence
  Description of Artificial Sequence: Synthetic oligonucleotide
uuucuuaaaguuuccauuc

SEQ ID NO: 3184694 - RNA, 19 nt, Artificial Sequence
  Description of Artificial Sequence: Synthetic oligonucleotide
uuagacaggaaugaagcag

SEQ ID NO: 3184695 - RNA, 19 nt, Artificial Sequence
  Description of Artificial Sequence: Synthetic oligonucleotide
agcaaauccauuuaccacu

SEQ ID NO: 3184696 - RNA, 19 nt, Artificial Sequence
  Description of Artificial Sequence: Synthetic oligonucleotide
caggaauagaaacagcucc

SEQ ID NO: 3184697 - RNA, 19 nt, Artificial Sequence
  Description of Artificial Sequence: Synthetic oligonucleotide
uguaaaauuguggucagga

SEQ ID NO: 3184698 - RNA, 19 nt, Artificial Sequence
  Description of Artificial Sequence: Synthetic oligonucleotide
uguaucgauguccuuuggg

SEQ ID NO: 3184699 - RNA, 19 nt, Artificial Sequence
  Description of Artificial Sequence: Synthetic oligonucleotide
cuuaucuagaaaguggacc

SEQ ID NO: 3184700 - RNA, 19 nt, Artificial Sequence
  Description of Artificial Sequence: Synthetic oligonucleotide
guacaaaauaaccuacuag

SEQ ID NO: 3184701 - RNA, 19 nt, Artificial Sequence
  Description of Artificial Sequence: Synthetic oligonucleotide
uagaaaguggaccaagggu

SEQ ID NO: 3184702 - RNA, 19 nt, Artificial Sequence
  Description of Artificial Sequence: Synthetic oligonucleotide
uguggucaggaauagaaac

SEQ ID NO: 3184703 - RNA, 19 nt, Artificial Sequence
  Description of Artificial Sequence: Synthetic oligonucleotide
ucacuuuucuuaaaguuuc

SEQ ID NO: 3184704 - RNA, 19 nt, Artificial Sequence
  Description of Artificial Sequence: Synthetic oligonucleotide
aaggguacaaaauaaccua

SEQ ID NO: 3184705 - RNA, 19 nt, Artificial Sequence
  Description of Artificial Sequence: Synthetic oligonucleotide
auucuuaucuagaaagugg

SEQ ID NO: 3184706 - RNA, 19 nt, Artificial Sequence
  Description of Artificial Sequence: Synthetic oligonucleotide
gaagcaaauccauuuacca

SEQ ID NO: 3184707 - RNA, 19 nt, Artificial Sequence
  Description of Artificial Sequence: Synthetic oligonucleotide
uuuucuuaaaguuuccauu

SEQ ID NO: 3184708 - RNA, 19 nt, Artificial Sequence
  Description of Artificial Sequence: Synthetic oligonucleotide
aaguucuguaaaauugugg

SEQ ID NO: 3184709 - RNA, 19 nt, Artificial Sequence
  Description of Artificial Sequence: Synthetic oligonucleotide
acaaaauaaccuacuaggg

SEQ ID NO: 3184710 - RNA, 19 nt, Artificial Sequence
  Description of Artificial Sequence: Synthetic oligonucleotide
agaagcaaauccauuuacc

SEQ ID NO: 3184711 - RNA, 19 nt, Artificial Sequence
  Description of Artificial Sequence: Synthetic oligonucleotide
uagacaggaaugaagcaga

SEQ ID NO: 3184712 - RNA, 19 nt, Artificial Sequence
  Description of Artificial Sequence: Synthetic oligonucleotide
guagucacuuuucuuaaag

SEQ ID NO: 3184713 - RNA, 19 nt, Artificial Sequence
  Description of Artificial Sequence: Synthetic oligonucleotide
aggaaugaagcagagcugg

SEQ ID NO: 3184714 - RNA, 19 nt, Artificial Sequence
  Description of Artificial Sequence: Synthetic oligonucleotide
gaaguagucacuuuucuua

SEQ ID NO: 3184715 - RNA, 19 nt, Artificial Sequence
  Description of Artificial Sequence: Synthetic oligonucleotide
uuuguaucgauguccuuug

SEQ ID NO: 3184716 - RNA, 19 nt, Artificial Sequence
  Description of Artificial Sequence: Synthetic oligonucleotide
augaagcagagcuggaagg

SEQ ID NO: 3184717 - RNA, 19 nt, Artificial Sequence
  Description of Artificial Sequence: Synthetic oligonucleotide
ucagcuuaaaguucuguaa

SEQ ID NO: 3184718 - RNA, 19 nt, Artificial Sequence
  Description of Artificial Sequence: Synthetic oligonucleotide
aaaauuguggucaggaaua

SEQ ID NO: 3184719 - RNA, 19 nt, Artificial Sequence
  Description of Artificial Sequence: Synthetic oligonucleotide
guggcagagaagcaaaucc

SEQ ID NO: 3184720 - RNA, 19 nt, Artificial Sequence
  Description of Artificial Sequence: Synthetic oligonucleotide
cuagaaaguggaccaaggg

SEQ ID NO: 3184721 - RNA, 19 nt, Artificial Sequence
  Description of Artificial Sequence: Synthetic oligonucleotide
uuaaaguuuccauucuuau

SEQ ID NO: 3184722 - RNA, 19 nt, Artificial Sequence
  Description of Artificial Sequence: Synthetic oligonucleotide
uccguuuuccuguugaaaa

SEQ ID NO: 3184723 - RNA, 19 nt, Artificial Sequence
  Description of Artificial Sequence: Synthetic oligonucleotide
ucuguaaaauuguggucag

SEQ ID NO: 3184724 - RNA, 19 nt, Artificial Sequence
  Description of Artificial Sequence: Synthetic oligonucleotide
uaaccuacuaggguugggg

SEQ ID NO: 3184725 - RNA, 19 nt, Artificial Sequence
  Description of Artificial Sequence: Synthetic oligonucleotide
uggucaggaauagaaacag

SEQ ID NO: 3184726 - RNA, 19 nt, Artificial Sequence
  Description of Artificial Sequence: Synthetic oligonucleotide
uuuagacaggaaugaagca

SEQ ID NO: 3184727 - RNA, 19 nt, Artificial Sequence
  Description of Artificial Sequence: Synthetic oligonucleotide
acuggguuuguaucgaugu

SEQ ID NO: 3184728 - RNA, 19 nt, Artificial Sequence
  Description of Artificial Sequence: Synthetic oligonucleotide
uaccacuggguuuguaucg

SEQ ID NO: 3184729 - RNA, 19 nt, Artificial Sequence
  Description of Artificial Sequence: Synthetic oligonucleotide
ugaagcagagcuggaaggg

SEQ ID NO: 3184730 - RNA, 19 nt, Artificial Sequence
  Description of Artificial Sequence: Synthetic oligonucleotide
aaauaaccuacuaggguug

SEQ ID NO: 3184731 - RNA, 19 nt, Artificial Sequence
  Description of Artificial Sequence: Synthetic oligonucleotide
uuuccauucuuaucuagaa

SEQ ID NO: 3184732 - RNA, 19 nt, Artificial Sequence
  Description of Artificial Sequence: Synthetic oligonucleotide
uaaaguuuccauucuuauc

SEQ ID NO: 3184733 - RNA, 19 nt, Artificial Sequence
  Description of Artificial Sequence: Synthetic oligonucleotide
aauaaccuacuaggguugg

SEQ ID NO: 3184734 - RNA, 19 nt, Artificial Sequence
  Description of Artificial Sequence: Synthetic oligonucleotide
uuuaccacuggguuuguau

SEQ ID NO: 3184735 - RNA, 19 nt, Artificial Sequence
  Description of Artificial Sequence: Synthetic oligonucleotide
aaaguucuguaaaauugug

SEQ ID NO: 3184736 - RNA, 19 nt, Artificial Sequence
  Description of Artificial Sequence: Synthetic oligonucleotide
ucaggaauagaaacagcuc

SEQ ID NO: 3184737 - RNA, 19 nt, Artificial Sequence
  Description of Artificial Sequence: Synthetic oligonucleotide
gagaagcaaauccauuuac

SEQ ID NO: 3184738 - RNA, 19 nt, Artificial Sequence
  Description of Artificial Sequence: Synthetic oligonucleotide
uaucgauguccuuugggug

SEQ ID NO: 3184739 - RNA, 19 nt, Artificial Sequence
  Description of Artificial Sequence: Synthetic oligonucleotide
agucacuuuucuuaaaguu

SEQ ID NO: 3184740 - RNA, 19 nt, Artificial Sequence
  Description of Artificial Sequence: Synthetic oligonucleotide
uggguuuguaucgaugucc

SEQ ID NO: 3184741 - RNA, 19 nt, Artificial Sequence
  Description of Artificial Sequence: Synthetic oligonucleotide
uucuuaaaguuuccauucu

SEQ ID NO: 3184742 - RNA, 19 nt, Artificial Sequence
  Description of Artificial Sequence: Synthetic oligonucleotide
gagauuucagcuuaaaguu

SEQ ID NO: 3184743 - RNA, 19 nt, Artificial Sequence
  Description of Artificial Sequence: Synthetic oligonucleotide
aaguagucacuuuucuuaa

SEQ ID NO: 3184744 - RNA, 19 nt, Artificial Sequence
  Description of Artificial Sequence: Synthetic oligonucleotide
aauccauuuaccacugggu

SEQ ID NO: 3184745 - RNA, 19 nt, Artificial Sequence
  Description of Artificial Sequence: Synthetic oligonucleotide
uguccuuugggugaaccag

SEQ ID NO: 3184746 - RNA, 19 nt, Artificial Sequence
  Description of Artificial Sequence: Synthetic oligonucleotide
gaauagaaacagcuccaug

SEQ ID NO: 3184747 - RNA, 19 nt, Artificial Sequence
  Description of Artificial Sequence: Synthetic oligonucleotide
aaauuguggucaggaauag

SEQ ID NO: 3184748 - RNA, 19 nt, Artificial Sequence
  Description of Artificial Sequence: Synthetic oligonucleotide
uggcagagaagcaaaucca

SEQ ID NO: 3184749 - RNA, 19 nt, Artificial Sequence
  Description of Artificial Sequence: Synthetic oligonucleotide
cauucuuaucuagaaagug

SEQ ID NO: 3184750 - RNA, 19 nt, Artificial Sequence
  Description of Artificial Sequence: Synthetic oligonucleotide
aguuuccauucuuaucuag

SEQ ID NO: 3184751 - RNA, 19 nt, Artificial Sequence
  Description of Artificial Sequence: Synthetic oligonucleotide
acuaggguuggggaauucc

SEQ ID NO: 3184752 - RNA, 19 nt, Artificial Sequence
  Description of Artificial Sequence: Synthetic oligonucleotide
auauccguuuuccuguuga

SEQ ID NO: 3184753 - RNA, 19 nt, Artificial Sequence
  Description of Artificial Sequence: Synthetic oligonucleotide
ucuuaucuagaaaguggac

SEQ ID NO: 3184754 - RNA, 19 nt, Artificial Sequence
  Description of Artificial Sequence: Synthetic oligonucleotide
uucagcuuaaaguucugua

SEQ ID NO: 3184755 - RNA, 19 nt, Artificial Sequence
  Description of Artificial Sequence: Synthetic oligonucleotide
aaccagagauuucagcuua

SEQ ID NO: 3184756 - RNA, 19 nt, Artificial Sequence
  Description of Artificial Sequence: Synthetic oligonucleotide
caugaaguagucacuuuuc

SEQ ID NO: 3184757 - RNA, 19 nt, Artificial Sequence
  Description of Artificial Sequence: Synthetic oligonucleotide
ucuuaaaguuuccauucuu

SEQ ID NO: 3184758 - RNA, 19 nt, Artificial Sequence
  Description of Artificial Sequence: Synthetic oligonucleotide
augaaguagucacuuuucu

SEQ ID NO: 3184759 - RNA, 19 nt, Artificial Sequence
  Description of Artificial Sequence: Synthetic oligonucleotide
aggguacaaaauaaccuac

SEQ ID NO: 3184760 - RNA, 19 nt, Artificial Sequence
  Description of Artificial Sequence: Synthetic oligonucleotide
gaaacagcuccaugcgugc

SEQ ID NO: 3184761 - RNA, 19 nt, Artificial Sequence
  Description of Artificial Sequence: Synthetic oligonucleotide
auuguggucaggaauagaa

SEQ ID NO: 3184762 - RNA, 19 nt, Artificial Sequence
  Description of Artificial Sequence: Synthetic oligonucleotide
aucgauguccuuuggguga

SEQ ID NO: 3184763 - RNA, 19 nt, Artificial Sequence
  Description of Artificial Sequence: Synthetic oligonucleotide
cagagauuucagcuuaaag

SEQ ID NO: 3184764 - RNA, 19 nt, Artificial Sequence
  Description of Artificial Sequence: Synthetic oligonucleotide
uggaccaaggguacaaaau

SEQ ID NO: 3184765 - RNA, 19 nt, Artificial Sequence
  Description of Artificial Sequence: Synthetic oligonucleotide
uuggggaauuccuugcugu

SEQ ID NO: 3184766 - RNA, 19 nt, Artificial Sequence
  Description of Artificial Sequence: Synthetic oligonucleotide
accaaggguacaaaauaac

SEQ ID NO: 3184767 - RNA, 19 nt, Artificial Sequence
  Description of Artificial Sequence: Synthetic oligonucleotide
agauuucagcuuaaaguuc

SEQ ID NO: 3184768 - RNA, 19 nt, Artificial Sequence
  Description of Artificial Sequence: Synthetic oligonucleotide
aaacagcuccaugcgugcc

SEQ ID NO: 3184769 - RNA, 19 nt, Artificial Sequence
  Description of Artificial Sequence: Synthetic oligonucleotide
agaaaguggaccaagggua

SEQ ID NO: 3184770 - RNA, 19 nt, Artificial Sequence
  Description of Artificial Sequence: Synthetic oligonucleotide
agaaacagcuccaugcgug

SEQ ID NO: 3184771 - RNA, 19 nt, Artificial Sequence
  Description of Artificial Sequence: Synthetic oligonucleotide
uuuaauaagcuucugggag

SEQ ID NO: 3184772 - RNA, 19 nt, Artificial Sequence
  Description of Artificial Sequence: Synthetic oligonucleotide
auuuuaauaagcuucuggg

SEQ ID NO: 3184773 - RNA, 19 nt, Artificial Sequence
  Description of Artificial Sequence: Synthetic oligonucleotide
aauauguugaguuuauuca

SEQ ID NO: 3184774 - RNA, 19 nt, Artificial Sequence
  Description of Artificial Sequence: Synthetic oligonucleotide
uuaaaauacaaugauauga

SEQ ID NO: 3184775 - RNA, 19 nt, Artificial Sequence
  Description of Artificial Sequence: Synthetic oligonucleotide
auuaacagcuaauaaaguc

SEQ ID NO: 3184776 - RNA, 19 nt, Artificial Sequence
  Description of Artificial Sequence: Synthetic oligonucleotide
aaugaaauuauccuuuuaa

SEQ ID NO: 3184777 - RNA, 19 nt, Artificial Sequence
  Description of Artificial Sequence: Synthetic oligonucleotide
aauaaaguccacuuuaaaa

SEQ ID NO: 3184778 - RNA, 19 nt, Artificial Sequence
  Description of Artificial Sequence: Synthetic oligonucleotide
uaugaaaacaggcacaccu

SEQ ID NO: 3184779 - RNA, 19 nt, Artificial Sequence
  Description of Artificial Sequence: Synthetic oligonucleotide
augauaugaaaacaggcac

SEQ ID NO: 3184780 - RNA, 19 nt, Artificial Sequence
  Description of Artificial Sequence: Synthetic oligonucleotide
cucauuuaaaauuaacagc

SEQ ID NO: 3184781 - RNA, 19 nt, Artificial Sequence
  Description of Artificial Sequence: Synthetic oligonucleotide
uuaauuuuaauaagcuucu

SEQ ID NO: 3184782 - RNA, 19 nt, Artificial Sequence
  Description of Artificial Sequence: Synthetic oligonucleotide
auagccacaaaggacaugc

SEQ ID NO: 3184783 - RNA, 19 nt, Artificial Sequence
  Description of Artificial Sequence: Synthetic oligonucleotide
augaaauuauccuuuuaac

SEQ ID NO: 3184784 - RNA, 19 nt, Artificial Sequence
  Description of Artificial Sequence: Synthetic oligonucleotide
aaggacaugcuucugcuuc

SEQ ID NO: 3184785 - RNA, 19 nt, Artificial Sequence
  Description of Artificial Sequence: Synthetic oligonucleotide
aguuucuucuccuacacag

SEQ ID NO: 3184786 - RNA, 19 nt, Artificial Sequence
  Description of Artificial Sequence: Synthetic oligonucleotide
uuguucuuaauuuuaauaa

SEQ ID NO: 3184787 - RNA, 19 nt, Artificial Sequence
  Description of Artificial Sequence: Synthetic oligonucleotide
uacgguaggagcuuuaaag

SEQ ID NO: 3184788 - RNA, 19 nt, Artificial Sequence
  Description of Artificial Sequence: Synthetic oligonucleotide
uguucuuaauuuuaauaag

SEQ ID NO: 3184789 - RNA, 19 nt, Artificial Sequence
  Description of Artificial Sequence: Synthetic oligonucleotide
cauagcaauagccacaaag

SEQ ID NO: 3184790 - RNA, 19 nt, Artificial Sequence
  Description of Artificial Sequence: Synthetic oligonucleotide
aaugauaugaaaacaggca

SEQ ID NO: 3184791 - RNA, 19 nt, Artificial Sequence
  Description of Artificial Sequence: Synthetic oligonucleotide
cacagguuaacuucaaugg

SEQ ID NO: 3184792 - RNA, 19 nt, Artificial Sequence
  Description of Artificial Sequence: Synthetic oligonucleotide
aguaccacagucucuacgg

SEQ ID NO: 3184793 - RNA, 19 nt, Artificial Sequence
  Description of Artificial Sequence: Synthetic oligonucleotide
acaaaggacaugcuucugc

SEQ ID NO: 3184794 - RNA, 19 nt, Artificial Sequence
  Description of Artificial Sequence: Synthetic oligonucleotide
ucuucagugucaauucugg

SEQ ID NO: 3184795 - RNA, 19 nt, Artificial Sequence
  Description of Artificial Sequence: Synthetic oligonucleotide
uauccuuuuaacuucuuca

SEQ ID NO: 3184796 - RNA, 19 nt, Artificial Sequence
  Description of Artificial Sequence: Synthetic oligonucleotide
cuuucucauagcaauagcc

SEQ ID NO: 3184797 - RNA, 19 nt, Artificial Sequence
  Description of Artificial Sequence: Synthetic oligonucleotide
uuuauuuccacuggccucg

SEQ ID NO: 3184798 - RNA, 19 nt, Artificial Sequence
  Description of Artificial Sequence: Synthetic oligonucleotide
ucuauauuguucuuaauuu

SEQ ID NO: 3184799 - RNA, 19 nt, Artificial Sequence
  Description of Artificial Sequence: Synthetic oligonucleotide
ucuucuuuauuuccacugg

SEQ ID NO: 3184800 - RNA, 19 nt, Artificial Sequence
  Description of Artificial Sequence: Synthetic oligonucleotide
guucugugaguacagaugg

SEQ ID NO: 3184801 - RNA, 19 nt, Artificial Sequence
  Description of Artificial Sequence: Synthetic oligonucleotide
caggugaccacauucaggg

SEQ ID NO: 3184802 - RNA, 19 nt, Artificial Sequence
  Description of Artificial Sequence: Synthetic oligonucleotide
uuucucauagcaauagcca

SEQ ID NO: 3184803 - RNA, 19 nt, Artificial Sequence
  Description of Artificial Sequence: Synthetic oligonucleotide
uuugcauaaauauguugag

SEQ ID NO: 3184804 - RNA, 19 nt, Artificial Sequence
  Description of Artificial Sequence: Synthetic oligonucleotide
agggcaaaugucuauauug

SEQ ID NO: 3184805 - RNA, 19 nt, Artificial Sequence
  Description of Artificial Sequence: Synthetic oligonucleotide
uuuuaauaagcuucuggga

SEQ ID NO: 3184806 - RNA, 19 nt, Artificial Sequence
  Description of Artificial Sequence: Synthetic oligonucleotide
auagcaauagccacaaagg

SEQ ID NO: 3184807 - RNA, 19 nt, Artificial Sequence
  Description of Artificial Sequence: Synthetic oligonucleotide
aaugcuggugcccacugag

SEQ ID NO: 3184808 - RNA, 19 nt, Artificial Sequence
  Description of Artificial Sequence: Synthetic oligonucleotide
ugcauaaauauguugaguu

SEQ ID NO: 3184809 - RNA, 19 nt, Artificial Sequence
  Description of Artificial Sequence: Synthetic oligonucleotide
ucaagauacacucuucaaa

SEQ ID NO: 3184810 - RNA, 19 nt, Artificial Sequence
  Description of Artificial Sequence: Synthetic oligonucleotide
uauauuguucuuaauuuua

SEQ ID NO: 3184811 - RNA, 19 nt, Artificial Sequence
  Description of Artificial Sequence: Synthetic oligonucleotide
ugauaugaaaacaggcaca

SEQ ID NO: 3184812 - RNA, 19 nt, Artificial Sequence
  Description of Artificial Sequence: Synthetic oligonucleotide
uuucguuccacaauccucu

SEQ ID NO: 3184813 - RNA, 19 nt, Artificial Sequence
  Description of Artificial Sequence: Synthetic oligonucleotide
uuaaaauuaacagcuaaua

SEQ ID NO: 3184814 - RNA, 19 nt, Artificial Sequence
  Description of Artificial Sequence: Synthetic oligonucleotide
ucuuuauuuccacuggccu

SEQ ID NO: 3184815 - RNA, 19 nt, Artificial Sequence
  Description of Artificial Sequence: Synthetic oligonucleotide
aaagcuggaaucuucuuua

SEQ ID NO: 3184816 - RNA, 19 nt, Artificial Sequence
  Description of Artificial Sequence: Synthetic oligonucleotide
uguacaguaccacagucuc

SEQ ID NO: 3184817 - RNA, 19 nt, Artificial Sequence
  Description of Artificial Sequence: Synthetic oligonucleotide
acacagguuaacuucaaug

SEQ ID NO: 3184818 - RNA, 19 nt, Artificial Sequence
  Description of Artificial Sequence: Synthetic oligonucleotide
guucuuaauuuuaauaagc

SEQ ID NO: 3184819 - RNA, 19 nt, Artificial Sequence
  Description of Artificial Sequence: Synthetic oligonucleotide
auuguucuuaauuuuaaua

SEQ ID NO: 3184820 - RNA, 19 nt, Artificial Sequence
  Description of Artificial Sequence: Synthetic oligonucleotide
uucuuuauuuccacuggcc

SEQ ID NO: 3184821 - RNA, 19 nt, Artificial Sequence
  Description of Artificial Sequence: Synthetic oligonucleotide
acgguaggagcuuuaaagg

SEQ ID NO: 3184822 - RNA, 19 nt, Artificial Sequence
  Description of Artificial Sequence: Synthetic oligonucleotide
ucaaauuaccucauuuaaa

SEQ ID NO: 3184823 - RNA, 19 nt, Artificial Sequence
  Description of Artificial Sequence: Synthetic oligonucleotide
aaaagcuggaaucuucuuu

SEQ ID NO: 3184824 - RNA, 19 nt, Artificial Sequence
  Description of Artificial Sequence: Synthetic oligonucleotide
acuuucucauagcaauagc

SEQ ID NO: 3184825 - RNA, 19 nt, Artificial Sequence
  Description of Artificial Sequence: Synthetic oligonucleotide
ugugaguacagaugggccc

SEQ ID NO: 3184826 - RNA, 19 nt, Artificial Sequence
  Description of Artificial Sequence: Synthetic oligonucleotide
aucuucuuuauuuccacug

SEQ ID NO: 3184827 - RNA, 19 nt, Artificial Sequence
  Description of Artificial Sequence: Synthetic oligonucleotide
ccucauuuaaaauuaacag

SEQ ID NO: 3184828 - RNA, 19 nt, Artificial Sequence
  Description of Artificial Sequence: Synthetic oligonucleotide
cuugcguacuuucucauag

SEQ ID NO: 3184829 - RNA, 19 nt, Artificial Sequence
  Description of Artificial Sequence: Synthetic oligonucleotide
uccaaaagauauuaucuaa

SEQ ID NO: 3184830 - RNA, 19 nt, Artificial Sequence
  Description of Artificial Sequence: Synthetic oligonucleotide
caaauuaccucauuuaaaa

SEQ ID NO: 3184831 - RNA, 19 nt, Artificial Sequence
  Description of Artificial Sequence: Synthetic oligonucleotide
ucaggugaccacauucagg

SEQ ID NO: 3184832 - RNA, 19 nt, Artificial Sequence
  Description of Artificial Sequence: Synthetic oligonucleotide
uccacaauccucuugcccu

SEQ ID NO: 3184833 - RNA, 19 nt, Artificial Sequence
  Description of Artificial Sequence: Synthetic oligonucleotide
agguuaacuucaauggugc

SEQ ID NO: 3184834 - RNA, 19 nt, Artificial Sequence
  Description of Artificial Sequence: Synthetic oligonucleotide
aaauuaccucauuuaaaau

SEQ ID NO: 3184835 - RNA, 19 nt, Artificial Sequence
  Description of Artificial Sequence: Synthetic oligonucleotide
uggaaucuucuuuauuucc

SEQ ID NO: 3184836 - RNA, 19 nt, Artificial Sequence
  Description of Artificial Sequence: Synthetic oligonucleotide
uagcaauagccacaaagga

SEQ ID NO: 3184837 - RNA, 19 nt, Artificial Sequence
  Description of Artificial Sequence: Synthetic oligonucleotide
uuucuucuccuacacaggu

SEQ ID NO: 3184838 - RNA, 19 nt, Artificial Sequence
  Description of Artificial Sequence: Synthetic oligonucleotide
agcaauagccacaaaggac

SEQ ID NO: 3184839 - RNA, 19 nt, Artificial Sequence
  Description of Artificial Sequence: Synthetic oligonucleotide
auucaagauacacucuuca

SEQ ID NO: 3184840 - RNA, 19 nt, Artificial Sequence
  Description of Artificial Sequence: Synthetic oligonucleotide
uuacaaugaaauuauccuu

SEQ ID NO: 3184841 - RNA, 19 nt, Artificial Sequence
  Description of Artificial Sequence: Synthetic oligonucleotide
ucucauagcaauagccaca

SEQ ID NO: 3184842 - RNA, 19 nt, Artificial Sequence
  Description of Artificial Sequence: Synthetic oligonucleotide
uuaacuucaauggugcguc

SEQ ID NO: 3184843 - RNA, 19 nt, Artificial Sequence
  Description of Artificial Sequence: Synthetic oligonucleotide
cauguuucguuccacaauc

SEQ ID NO: 3184844 - RNA, 19 nt, Artificial Sequence
  Description of Artificial Sequence: Synthetic oligonucleotide
ucuucuccuacacagguua

SEQ ID NO: 3184845 - RNA, 19 nt, Artificial Sequence
  Description of Artificial Sequence: Synthetic oligonucleotide
uuuguuguuuccuugcgua

SEQ ID NO: 3184846 - RNA, 19 nt, Artificial Sequence
  Description of Artificial Sequence: Synthetic oligonucleotide
uacagaugggcccuggacu

SEQ ID NO: 3184847 - RNA, 19 nt, Artificial Sequence
  Description of Artificial Sequence: Synthetic oligonucleotide
uucucauagcaauagccac

SEQ ID NO: 3184848 - RNA, 19 nt, Artificial Sequence
  Description of Artificial Sequence: Synthetic oligonucleotide
ucugugaguacagaugggc

SEQ ID NO: 3184849 - RNA, 19 nt, Artificial Sequence
  Description of Artificial Sequence: Synthetic oligonucleotide
ccuuacaaugaaauuaucc

SEQ ID NO: 3184850 - RNA, 19 nt, Artificial Sequence
  Description of Artificial Sequence: Synthetic oligonucleotide
aaucuucuuuauuuccacu

SEQ ID NO: 3184851 - RNA, 19 nt, Artificial Sequence
  Description of Artificial Sequence: Synthetic oligonucleotide
acuggcaacgccuuuccag

SEQ ID NO: 3184852 - RNA, 19 nt, Artificial Sequence
  Description of Artificial Sequence: Synthetic oligonucleotide
cagguuaacuucaauggug

SEQ ID NO: 3184853 - RNA, 19 nt, Artificial Sequence
  Description of Artificial Sequence: Synthetic oligonucleotide
uacuuucucauagcaauag

SEQ ID NO: 3184854 - RNA, 19 nt, Artificial Sequence
  Description of Artificial Sequence: Synthetic oligonucleotide
cacucuucaaauuaccuca

SEQ ID NO: 3184855 - RNA, 19 nt, Artificial Sequence
  Description of Artificial Sequence: Synthetic oligonucleotide
gaaucuucuuuauuuccac

SEQ ID NO: 3184856 - RNA, 19 nt, Artificial Sequence
  Description of Artificial Sequence: Synthetic oligonucleotide
aacuucuucagugucaauu

SEQ ID NO: 3184857 - RNA, 19 nt, Artificial Sequence
  Description of Artificial Sequence: Synthetic oligonucleotide
aauuaacagcuaauaaagu

SEQ ID NO: 3184858 - RNA, 19 nt, Artificial Sequence
  Description of Artificial Sequence: Synthetic oligonucleotide
ugcguacuuucucauagca

SEQ ID NO: 3184859 - RNA, 19 nt, Artificial Sequence
  Description of Artificial Sequence: Synthetic oligonucleotide
uaauaaaguccacuuuaaa

SEQ ID NO: 3184860 - RNA, 19 nt, Artificial Sequence
  Description of Artificial Sequence: Synthetic oligonucleotide
acaugcuucugcuucaggu

SEQ ID NO: 3184861 - RNA, 19 nt, Artificial Sequence
  Description of Artificial Sequence: Synthetic oligonucleotide
auaagcuucugggaguuuc

SEQ ID NO: 3184862 - RNA, 19 nt, Artificial Sequence
  Description of Artificial Sequence: Synthetic oligonucleotide
cuugagcccauauuuguug

SEQ ID NO: 3184863 - RNA, 19 nt, Artificial Sequence
  Description of Artificial Sequence: Synthetic oligonucleotide
uuuuguuguuuccuugcgu

SEQ ID NO: 3184864 - RNA, 19 nt, Artificial Sequence
  Description of Artificial Sequence: Synthetic oligonucleotide
uccuacacagguuaacuuc

SEQ ID NO: 3184865 - RNA, 19 nt, Artificial Sequence
  Description of Artificial Sequence: Synthetic oligonucleotide
ugagauaguucugugagua

SEQ ID NO: 3184866 - RNA, 19 nt, Artificial Sequence
  Description of Artificial Sequence: Synthetic oligonucleotide
gauacacucuucaaauuac

SEQ ID NO: 3184867 - RNA, 19 nt, Artificial Sequence
  Description of Artificial Sequence: Synthetic oligonucleotide
gauaguucugugaguacag

SEQ ID NO: 3184868 - RNA, 19 nt, Artificial Sequence
  Description of Artificial Sequence: Synthetic oligonucleotide
cuucuuuauuuccacuggc

SEQ ID NO: 3184869 - RNA, 19 nt, Artificial Sequence
  Description of Artificial Sequence: Synthetic oligonucleotide
acugcuaaugcuggugccc

SEQ ID NO: 3184870 - RNA, 19 nt, Artificial Sequence
  Description of Artificial Sequence: Synthetic oligonucleotide
uucaggugaccacauucag

SEQ ID NO: 3184871 - RNA, 19 nt, Artificial Sequence
  Description of Artificial Sequence: Synthetic oligonucleotide
acuauugaaaacuauuugg

SEQ ID NO: 3184872 - RNA, 19 nt, Artificial Sequence
  Description of Artificial Sequence: Synthetic oligonucleotide
uuaaugaugggaaauacug

SEQ ID NO: 3184873 - RNA, 19 nt, Artificial Sequence
  Description of Artificial Sequence: Synthetic oligonucleotide
cuauuugggaaccaaaucg

SEQ ID NO: 3184874 - RNA, 19 nt, Artificial Sequence
  Description of Artificial Sequence: Synthetic oligonucleotide
uuggaaauggcaaggaccg

SEQ ID NO: 3184875 - RNA, 19 nt, Artificial Sequence
  Description of Artificial Sequence: Synthetic oligonucleotide
aauacugaaagacacuagu

SEQ ID NO: 3184876 - RNA, 19 nt, Artificial Sequence
  Description of Artificial Sequence: Synthetic oligonucleotide
cauaagaauagaaaucccg

SEQ ID NO: 3184877 - RNA, 19 nt, Artificial Sequence
  Description of Artificial Sequence: Synthetic oligonucleotide
agaaacaccaggcaauggc

SEQ ID NO: 3184878 - RNA, 19 nt, Artificial Sequence
  Description of Artificial Sequence: Synthetic oligonucleotide
cuauugaaaacuauuuggg

SEQ ID NO: 3184879 - RNA, 19 nt, Artificial Sequence
  Description of Artificial Sequence: Synthetic oligonucleotide
uugggaaccaaaucgaagg

SEQ ID NO: 3184880 - RNA, 19 nt, Artificial Sequence
  Description of Artificial Sequence: Synthetic oligonucleotide
ugaugggaaauacugaaag

SEQ ID NO: 3184881 - RNA, 19 nt, Artificial Sequence
  Description of Artificial Sequence: Synthetic oligonucleotide
uaagacucaagacacaaga

SEQ ID NO: 3184882 - RNA, 19 nt, Artificial Sequence
  Description of Artificial Sequence: Synthetic oligonucleotide
aacuauugaaaacuauuug

SEQ ID NO: 3184883 - RNA, 19 nt, Artificial Sequence
  Description of Artificial Sequence: Synthetic oligonucleotide
ugcauaagaauagaaaucc

SEQ ID NO: 3184884 - RNA, 19 nt, Artificial Sequence
  Description of Artificial Sequence: Synthetic oligonucleotide
acuguuaagacucaagaca

SEQ ID NO: 3184885 - RNA, 19 nt, Artificial Sequence
  Description of Artificial Sequence: Synthetic oligonucleotide
aaggcaaucugcuauguug

SEQ ID NO: 3184886 - RNA, 19 nt, Artificial Sequence
  Description of Artificial Sequence: Synthetic oligonucleotide
acugaaagacacuagucac

SEQ ID NO: 3184887 - RNA, 19 nt, Artificial Sequence
  Description of Artificial Sequence: Synthetic oligonucleotide
cuagucaccaguaacgggg

SEQ ID NO: 3184888 - RNA, 19 nt, Artificial Sequence
  Description of Artificial Sequence: Synthetic oligonucleotide
agaauagaaaucccgguuc

SEQ ID NO: 3184889 - RNA, 19 nt, Artificial Sequence
  Description of Artificial Sequence: Synthetic oligonucleotide
uuauuuucugggauaagcc

SEQ ID NO: 3184890 - RNA, 19 nt, Artificial Sequence
  Description of Artificial Sequence: Synthetic oligonucleotide
ucugcuauguugcauaaga

SEQ ID NO: 3184891 - RNA, 19 nt, Artificial Sequence
  Description of Artificial Sequence: Synthetic oligonucleotide
aaugaugggaaauacugaa

SEQ ID NO: 3184892 - RNA, 19 nt, Artificial Sequence
  Description of Artificial Sequence: Synthetic oligonucleotide
aaagacacuagucaccagu

SEQ ID NO: 3184893 - RNA, 19 nt, Artificial Sequence
  Description of Artificial Sequence: Synthetic oligonucleotide
uuagauguuggaaauggca

SEQ ID NO: 3184894 - RNA, 19 nt, Artificial Sequence
  Description of Artificial Sequence: Synthetic oligonucleotide
aaaagaaccugaagguucc

SEQ ID NO: 3184895 - RNA, 19 nt, Artificial Sequence
  Description of Artificial Sequence: Synthetic oligonucleotide
uacugaaagacacuaguca

SEQ ID NO: 3184896 - RNA, 19 nt, Artificial Sequence
  Description of Artificial Sequence: Synthetic oligonucleotide
augggaaauacugaaagac

SEQ ID NO: 3184897 - RNA, 19 nt, Artificial Sequence
  Description of Artificial Sequence: Synthetic oligonucleotide
aagguuccggguuagaugu

SEQ ID NO: 3184898 - RNA, 19 nt, Artificial Sequence
  Description of Artificial Sequence: Synthetic oligonucleotide
auugaaaacuauuugggaa

SEQ ID NO: 3184899 - RNA, 19 nt, Artificial Sequence
  Description of Artificial Sequence: Synthetic oligonucleotide
uguugaacuauugaaaacu

SEQ ID NO: 3184900 - RNA, 19 nt, Artificial Sequence
  Description of Artificial Sequence: Synthetic oligonucleotide
gacacuguguucuacaaac

SEQ ID NO: 3184901 - RNA, 19 nt, Artificial Sequence
  Description of Artificial Sequence: Synthetic oligonucleotide
agacacaagaaacaccagg

SEQ ID NO: 3184902 - RNA, 19 nt, Artificial Sequence
  Description of Artificial Sequence: Synthetic oligonucleotide
uuuguccuuauuuucuggg

SEQ ID NO: 3184903 - RNA, 19 nt, Artificial Sequence
  Description of Artificial Sequence: Synthetic oligonucleotide
uuuguuguugaacuauuga

SEQ ID NO: 3184904 - RNA, 19 nt, Artificial Sequence
  Description of Artificial Sequence: Synthetic oligonucleotide
auaagaauagaaaucccgg

SEQ ID NO: 3184905 - RNA, 19 nt, Artificial Sequence
  Description of Artificial Sequence: Synthetic oligonucleotide
uacaaacugagguaggagc

SEQ ID NO: 3184906 - RNA, 19 nt, Artificial Sequence
  Description of Artificial Sequence: Synthetic oligonucleotide
uugaaaacuauuugggaac

SEQ ID NO: 3184907 - RNA, 19 nt, Artificial Sequence
  Description of Artificial Sequence: Synthetic oligonucleotide
uguugcauaagaauagaaa

SEQ ID NO: 3184908 - RNA, 19 nt, Artificial Sequence
  Description of Artificial Sequence: Synthetic oligonucleotide
acuauuugggaaccaaauc

SEQ ID NO: 3184909 - RNA, 19 nt, Artificial Sequence
  Description of Artificial Sequence: Synthetic oligonucleotide
uuuaaugaugggaaauacu

SEQ ID NO: 3184910 - RNA, 19 nt, Artificial Sequence
  Description of Artificial Sequence: Synthetic oligonucleotide
uguuguugaacuauugaaa

SEQ ID NO: 3184911 - RNA, 19 nt, Artificial Sequence
  Description of Artificial Sequence: Synthetic oligonucleotide
ugaacuauugaaaacuauu

SEQ ID NO: 3184912 - RNA, 19 nt, Artificial Sequence
  Description of Artificial Sequence: Synthetic oligonucleotide
uauugaaaacuauuuggga

SEQ ID NO: 3184913 - RNA, 19 nt, Artificial Sequence
  Description of Artificial Sequence: Synthetic oligonucleotide
cuauguugcauaagaauag

SEQ ID NO: 3184914 - RNA, 19 nt, Artificial Sequence
  Description of Artificial Sequence: Synthetic oligonucleotide
uacacuagaaggcaaucug

SEQ ID NO: 3184915 - RNA, 19 nt, Artificial Sequence
  Description of Artificial Sequence: Synthetic oligonucleotide
cuuauuuucugggauaagc

SEQ ID NO: 3184916 - RNA, 19 nt, Artificial Sequence
  Description of Artificial Sequence: Synthetic oligonucleotide
ucacucacugcauagacac

SEQ ID NO: 3184917 - RNA, 19 nt, Artificial Sequence
  Description of Artificial Sequence: Synthetic oligonucleotide
gaggcuaucacucacugca

SEQ ID NO: 3184918 - RNA, 19 nt, Artificial Sequence
  Description of Artificial Sequence: Synthetic oligonucleotide
uauuugggaaccaaaucga

SEQ ID NO: 3184919 - RNA, 19 nt, Artificial Sequence
  Description of Artificial Sequence: Synthetic oligonucleotide
uuugggaaccaaaucgaag

SEQ ID NO: 3184920 - RNA, 19 nt, Artificial Sequence
  Description of Artificial Sequence: Synthetic oligonucleotide
caagacacaagaaacacca

SEQ ID NO: 3184921 - RNA, 19 nt, Artificial Sequence
  Description of Artificial Sequence: Synthetic oligonucleotide
cuguuaagacucaagacac

SEQ ID NO: 3184922 - RNA, 19 nt, Artificial Sequence
  Description of Artificial Sequence: Synthetic oligonucleotide
aagaauagaaaucccgguu

SEQ ID NO: 3184923 - RNA, 19 nt, Artificial Sequence
  Description of Artificial Sequence: Synthetic oligonucleotide
uugcauaagaauagaaauc

SEQ ID NO: 3184924 - RNA, 19 nt, Artificial Sequence
  Description of Artificial Sequence: Synthetic oligonucleotide
ugagguaggagcacuacac

SEQ ID NO: 3184925 - RNA, 19 nt, Artificial Sequence
  Description of Artificial Sequence: Synthetic oligonucleotide
gauguuggaaauggcaagg

SEQ ID NO: 3184926 - RNA, 19 nt, Artificial Sequence
  Description of Artificial Sequence: Synthetic oligonucleotide
ucugggauaagccuuggaa

SEQ ID NO: 3184927 - RNA, 19 nt, Artificial Sequence
  Description of Artificial Sequence: Synthetic oligonucleotide
aaccaaaucgaaggaggcc

SEQ ID NO: 3184928 - RNA, 19 nt, Artificial Sequence
  Description of Artificial Sequence: Synthetic oligonucleotide
ucaagacacaagaaacacc

SEQ ID NO: 3184929 - RNA, 19 nt, Artificial Sequence
  Description of Artificial Sequence: Synthetic oligonucleotide
gcuaugaagggucagaggc

SEQ ID NO: 3184930 - RNA, 19 nt, Artificial Sequence
  Description of Artificial Sequence: Synthetic oligonucleotide
gacacaagaaacaccaggc

SEQ ID NO: 3184931 - RNA, 19 nt, Artificial Sequence
  Description of Artificial Sequence: Synthetic oligonucleotide
uuguuguugaacuauugaa

SEQ ID NO: 3184932 - RNA, 19 nt, Artificial Sequence
  Description of Artificial Sequence: Synthetic oligonucleotide
uauuuucugggauaagccu

SEQ ID NO: 3184933 - RNA, 19 nt, Artificial Sequence
  Description of Artificial Sequence: Synthetic oligonucleotide
agaaaucccgguucacacc

SEQ ID NO: 3184934 - RNA, 19 nt, Artificial Sequence
  Description of Artificial Sequence: Synthetic oligonucleotide
uuuuguccuuauuuucugg

SEQ ID NO: 3184935 - RNA, 19 nt, Artificial Sequence
  Description of Artificial Sequence: Synthetic oligonucleotide
aaauggcaaggaccgcugc

SEQ ID NO: 3184936 - RNA, 19 nt, Artificial Sequence
  Description of Artificial Sequence: Synthetic oligonucleotide
uagauguuggaaauggcaa

SEQ ID NO: 3184937 - RNA, 19 nt, Artificial Sequence
  Description of Artificial Sequence: Synthetic oligonucleotide
ugggaaauacugaaagaca

SEQ ID NO: 3184938 - RNA, 19 nt, Artificial Sequence
  Description of Artificial Sequence: Synthetic oligonucleotide
uaagaauagaaaucccggu

SEQ ID NO: 3184939 - RNA, 19 nt, Artificial Sequence
  Description of Artificial Sequence: Synthetic oligonucleotide
agaaccugaagguuccggg

SEQ ID NO: 3184940 - RNA, 19 nt, Artificial Sequence
  Description of Artificial Sequence: Synthetic oligonucleotide
uaaugaugggaaauacuga

SEQ ID NO: 3184941 - RNA, 19 nt, Artificial Sequence
  Description of Artificial Sequence: Synthetic oligonucleotide
aaucccgguucacaccagc

SEQ ID NO: 3184942 - RNA, 19 nt, Artificial Sequence
  Description of Artificial Sequence: Synthetic oligonucleotide
aacaccaggcaauggcagg

SEQ ID NO: 3184943 - RNA, 19 nt, Artificial Sequence
  Description of Artificial Sequence: Synthetic oligonucleotide
gacucaagacacaagaaac

SEQ ID NO: 3184944 - RNA, 19 nt, Artificial Sequence
  Description of Artificial Sequence: Synthetic oligonucleotide
uuaagacucaagacacaag

SEQ ID NO: 3184945 - RNA, 19 nt, Artificial Sequence
  Description of Artificial Sequence: Synthetic oligonucleotide
guuggaaauggcaaggacc

SEQ ID NO: 3184946 - RNA, 19 nt, Artificial Sequence
  Description of Artificial Sequence: Synthetic oligonucleotide
ggagcacuacacuagaagg

SEQ ID NO: 3184947 - RNA, 19 nt, Artificial Sequence
  Description of Artificial Sequence: Synthetic oligonucleotide
uuuucugggauaagccuug

SEQ ID NO: 3184948 - RNA, 19 nt, Artificial Sequence
  Description of Artificial Sequence: Synthetic oligonucleotide
agauguuggaaauggcaag

SEQ ID NO: 3184949 - RNA, 19 nt, Artificial Sequence
  Description of Artificial Sequence: Synthetic oligonucleotide
cuguguucuacaaacugag

SEQ ID NO: 3184950 - RNA, 19 nt, Artificial Sequence
  Description of Artificial Sequence: Synthetic oligonucleotide
uuuuaaugaugggaaauac

SEQ ID NO: 3184951 - RNA, 19 nt, Artificial Sequence
  Description of Artificial Sequence: Synthetic oligonucleotide
ugcauagacacuguguucu

SEQ ID NO: 3184952 - RNA, 19 nt, Artificial Sequence
  Description of Artificial Sequence: Synthetic oligonucleotide
aauagaaaucccgguucac

SEQ ID NO: 3184953 - RNA, 19 nt, Artificial Sequence
  Description of Artificial Sequence: Synthetic oligonucleotide
ugaaagacacuagucacca

SEQ ID NO: 3184954 - RNA, 19 nt, Artificial Sequence
  Description of Artificial Sequence: Synthetic oligonucleotide
uguguucuacaaacugagg

SEQ ID NO: 3184955 - RNA, 19 nt, Artificial Sequence
  Description of Artificial Sequence: Synthetic oligonucleotide
aggagcacuacacuagaag

SEQ ID NO: 3184956 - RNA, 19 nt, Artificial Sequence
  Description of Artificial Sequence: Synthetic oligonucleotide
uguucuacaaacugaggua

SEQ ID NO: 3184957 - RNA, 19 nt, Artificial Sequence
  Description of Artificial Sequence: Synthetic oligonucleotide
gacacuagucaccaguaac

SEQ ID NO: 3184958 - RNA, 19 nt, Artificial Sequence
  Description of Artificial Sequence: Synthetic oligonucleotide
cugaaagacacuagucacc

SEQ ID NO: 3184959 - RNA, 19 nt, Artificial Sequence
  Description of Artificial Sequence: Synthetic oligonucleotide
uaucacucacugcauagac

SEQ ID NO: 3184960 - RNA, 19 nt, Artificial Sequence
  Description of Artificial Sequence: Synthetic oligonucleotide
guuguugaacuauugaaaa

SEQ ID NO: 3184961 - RNA, 19 nt, Artificial Sequence
  Description of Artificial Sequence: Synthetic oligonucleotide
ugcacuguuaagacucaag

SEQ ID NO: 3184962 - RNA, 19 nt, Artificial Sequence
  Description of Artificial Sequence: Synthetic oligonucleotide
ugaaaacuauuugggaacc

SEQ ID NO: 3184963 - RNA, 19 nt, Artificial Sequence
  Description of Artificial Sequence: Synthetic oligonucleotide
gaagguuccggguuagaug

SEQ ID NO: 3184964 - RNA, 19 nt, Artificial Sequence
  Description of Artificial Sequence: Synthetic oligonucleotide
uucuacaaacugagguagg

SEQ ID NO: 3184965 - RNA, 19 nt, Artificial Sequence
  Description of Artificial Sequence: Synthetic oligonucleotide
gguuagauguuggaaaugg

SEQ ID NO: 3184966 - RNA, 19 nt, Artificial Sequence
  Description of Artificial Sequence: Synthetic oligonucleotide
uagaaaucccgguucacac

SEQ ID NO: 3184967 - RNA, 19 nt, Artificial Sequence
  Description of Artificial Sequence: Synthetic oligonucleotide
guucuacaaacugagguag

SEQ ID NO: 3184968 - RNA, 19 nt, Artificial Sequence
  Description of Artificial Sequence: Synthetic oligonucleotide
guugcauaagaauagaaau

SEQ ID NO: 3184969 - RNA, 19 nt, Artificial Sequence
  Description of Artificial Sequence: Synthetic oligonucleotide
ugcuauguugcauaagaau

SEQ ID NO: 3184970 - RNA, 19 nt, Artificial Sequence
  Description of Artificial Sequence: Synthetic oligonucleotide
acacuagucaccaguaacg

SEQ ID NO: 3184971 - RNA, 19 nt, Artificial Sequence
  Description of Artificial Sequence: Synthetic oligonucleotide
ugucaaaucaauaaaagca

SEQ ID NO: 3184972 - RNA, 19 nt, Artificial Sequence
  Description of Artificial Sequence: Synthetic oligonucleotide
aguauuacaucccuguugc

SEQ ID NO: 3184973 - RNA, 19 nt, Artificial Sequence
  Description of Artificial Sequence: Synthetic oligonucleotide
uaugacagcaugcauaggc

SEQ ID NO: 3184974 - RNA, 19 nt, Artificial Sequence
  Description of Artificial Sequence: Synthetic oligonucleotide
aucuauacauauuaccugg

SEQ ID NO: 3184975 - RNA, 19 nt, Artificial Sequence
  Description of Artificial Sequence: Synthetic oligonucleotide
uguguugucauuuacugca

SEQ ID NO: 3184976 - RNA, 19 nt, Artificial Sequence
  Description of Artificial Sequence: Synthetic oligonucleotide
ugcaucuugaucuaaguug

SEQ ID NO: 3184977 - RNA, 19 nt, Artificial Sequence
  Description of Artificial Sequence: Synthetic oligonucleotide
augaucauuggacuuuucc

SEQ ID NO: 3184978 - RNA, 19 nt, Artificial Sequence
  Description of Artificial Sequence: Synthetic oligonucleotide
uuguccaugaugaacagcu

SEQ ID NO: 3184979 - RNA, 19 nt, Artificial Sequence
  Description of Artificial Sequence: Synthetic oligonucleotide
augucaaugacuccucagc

SEQ ID NO: 3184980 - RNA, 19 nt, Artificial Sequence
  Description of Artificial Sequence: Synthetic oligonucleotide
ucuucaacaaagcauucug

SEQ ID NO: 3184981 - RNA, 19 nt, Artificial Sequence
  Description of Artificial Sequence: Synthetic oligonucleotide
acuguuuaagucuguuucc

SEQ ID NO: 3184982 - RNA, 19 nt, Artificial Sequence
  Description of Artificial Sequence: Synthetic oligonucleotide
uuuauuucacaugagccag

SEQ ID NO: 3184983 - RNA, 19 nt, Artificial Sequence
  Description of Artificial Sequence: Synthetic oligonucleotide
uaaaauuucucggucauca

SEQ ID NO: 3184984 - RNA, 19 nt, Artificial Sequence
  Description of Artificial Sequence: Synthetic oligonucleotide
auuaccuggcauuccaagc

SEQ ID NO: 3184985 - RNA, 19 nt, Artificial Sequence
  Description of Artificial Sequence: Synthetic oligonucleotide
ucugaguaagccaagcaca

SEQ ID NO: 3184986 - RNA, 19 nt, Artificial Sequence
  Description of Artificial Sequence: Synthetic oligonucleotide
uacuguuuaagucuguuuc

SEQ ID NO: 3184987 - RNA, 19 nt, Artificial Sequence
  Description of Artificial Sequence: Synthetic oligonucleotide
uugucuguuaucaacauuu

SEQ ID NO: 3184988 - RNA, 19 nt, Artificial Sequence
  Description of Artificial Sequence: Synthetic oligonucleotide
auuacccagagucccaggc

SEQ ID NO: 3184989 - RNA, 19 nt, Artificial Sequence
  Description of Artificial Sequence: Synthetic oligonucleotide
ucaugugucaaaucaauaa

SEQ ID NO: 3184990 - RNA, 19 nt, Artificial Sequence
  Description of Artificial Sequence: Synthetic oligonucleotide
uuuccauuaugacagcaug

SEQ ID NO: 3184991 - RNA, 19 nt, Artificial Sequence
  Description of Artificial Sequence: Synthetic oligonucleotide
aaauaaaugaaacgccgua

SEQ ID NO: 3184992 - RNA, 19 nt, Artificial Sequence
  Description of Artificial Sequence: Synthetic oligonucleotide
aacgccguaaaauccagca

SEQ ID NO: 3184993 - RNA, 19 nt, Artificial Sequence
  Description of Artificial Sequence: Synthetic oligonucleotide
aucaauacauguuucuuca

SEQ ID NO: 3184994 - RNA, 19 nt, Artificial Sequence
  Description of Artificial Sequence: Synthetic oligonucleotide
ugaucauuggacuuuucca

SEQ ID NO: 3184995 - RNA, 19 nt, Artificial Sequence
  Description of Artificial Sequence: Synthetic oligonucleotide
agcaacucauaguauuagc

SEQ ID NO: 3184996 - RNA, 19 nt, Artificial Sequence
  Description of Artificial Sequence: Synthetic oligonucleotide
aguggucaauaucuaaaac

SEQ ID NO: 3184997 - RNA, 19 nt, Artificial Sequence
  Description of Artificial Sequence: Synthetic oligonucleotide
auaguaucaggcuguaaag

SEQ ID NO: 3184998 - RNA, 19 nt, Artificial Sequence
  Description of Artificial Sequence: Synthetic oligonucleotide
ugaaacgccguaaaaucca

SEQ ID NO: 3184999 - RNA, 19 nt, Artificial Sequence
  Description of Artificial Sequence: Synthetic oligonucleotide
uuuaaaacaugaggaauca

SEQ ID NO: 3185000 - RNA, 19 nt, Artificial Sequence
  Description of Artificial Sequence: Synthetic oligonucleotide
acaaugaaaugaucauugg

SEQ ID NO: 3185001 - RNA, 19 nt, Artificial Sequence
  Description of Artificial Sequence: Synthetic oligonucleotide
aacuaaguuucaguauuac

SEQ ID NO: 3185002 - RNA, 19 nt, Artificial Sequence
  Description of Artificial Sequence: Synthetic oligonucleotide
auaucuaaaacuguuacuu

SEQ ID NO: 3185003 - RNA, 19 nt, Artificial Sequence
  Description of Artificial Sequence: Synthetic oligonucleotide
gaacccuucaccccuaggc

SEQ ID NO: 3185004 - RNA, 19 nt, Artificial Sequence
  Description of Artificial Sequence: Synthetic oligonucleotide
ucuaaguugguuccagaac

SEQ ID NO: 3185005 - RNA, 19 nt, Artificial Sequence
  Description of Artificial Sequence: Synthetic oligonucleotide
uugacuuacugcuugaguu

SEQ ID NO: 3185006 - RNA, 19 nt, Artificial Sequence
  Description of Artificial Sequence: Synthetic oligonucleotide
aaacuguuacuuccauuag

SEQ ID NO: 3185007 - RNA, 19 nt, Artificial Sequence
  Description of Artificial Sequence: Synthetic oligonucleotide
uaaguuucaguauuacauc

SEQ ID NO: 3185008 - RNA, 19 nt, Artificial Sequence
  Description of Artificial Sequence: Synthetic oligonucleotide
uccaguaaaauuucucggu

SEQ ID NO: 3185009 - RNA, 19 nt, Artificial Sequence
  Description of Artificial Sequence: Synthetic oligonucleotide
gucucuuuauuucacauga

SEQ ID NO: 3185010 - RNA, 19 nt, Artificial Sequence
  Description of Artificial Sequence: Synthetic oligonucleotide
augaaacgccguaaaaucc

SEQ ID NO: 3185011 - RNA, 19 nt, Artificial Sequence
  Description of Artificial Sequence: Synthetic oligonucleotide
cuaaguugguuccagaaca

SEQ ID NO: 3185012 - RNA, 19 nt, Artificial Sequence
  Description of Artificial Sequence: Synthetic oligonucleotide
caggcuguaaagaacuacc

SEQ ID NO: 3185013 - RNA, 19 nt, Artificial Sequence
  Description of Artificial Sequence: Synthetic oligonucleotide
uucauccaauaucaaaacu

SEQ ID NO: 3185014 - RNA, 19 nt, Artificial Sequence
  Description of Artificial Sequence: Synthetic oligonucleotide
gauaacauucuuugcagaa

SEQ ID NO: 3185015 - RNA, 19 nt, Artificial Sequence
  Description of Artificial Sequence: Synthetic oligonucleotide
uauagaguucuguucuuca

SEQ ID NO: 3185016 - RNA, 19 nt, Artificial Sequence
  Description of Artificial Sequence: Synthetic oligonucleotide
caucuuugcuucuuugggg

SEQ ID NO: 3185017 - RNA, 19 nt, Artificial Sequence
  Description of Artificial Sequence: Synthetic oligonucleotide
auaaaugaaacgccguaaa

SEQ ID NO: 3185018 - RNA, 19 nt, Artificial Sequence
  Description of Artificial Sequence: Synthetic oligonucleotide
acaauuguccaaguccucg

SEQ ID NO: 3185019 - RNA, 19 nt, Artificial Sequence
  Description of Artificial Sequence: Synthetic oligonucleotide
uaucaugugucaaaucaau

SEQ ID NO: 3185020 - RNA, 19 nt, Artificial Sequence
  Description of Artificial Sequence: Synthetic oligonucleotide
uagauggauguccuguuca

SEQ ID NO: 3185021 - RNA, 19 nt, Artificial Sequence
  Description of Artificial Sequence: Synthetic oligonucleotide
gaugucaaugacuccucag

SEQ ID NO: 3185022 - RNA, 19 nt, Artificial Sequence
  Description of Artificial Sequence: Synthetic oligonucleotide
cuaaguuucaguauuacau

SEQ ID NO: 3185023 - RNA, 19 nt, Artificial Sequence
  Description of Artificial Sequence: Synthetic oligonucleotide
guauuuucacaaugaaaug

SEQ ID NO: 3185024 - RNA, 19 nt, Artificial Sequence
  Description of Artificial Sequence: Synthetic oligonucleotide
uuuacccucauuugaagua

SEQ ID NO: 3185025 - RNA, 19 nt, Artificial Sequence
  Description of Artificial Sequence: Synthetic oligonucleotide
ucucuuagucuuuucauua

SEQ ID NO: 3185026 - RNA, 19 nt, Artificial Sequence
  Description of Artificial Sequence: Synthetic oligonucleotide
aguaaaauuucucggucau

SEQ ID NO: 3185027 - RNA, 19 nt, Artificial Sequence
  Description of Artificial Sequence: Synthetic oligonucleotide
agguucacuaccuucauuu

SEQ ID NO: 3185028 - RNA, 19 nt, Artificial Sequence
  Description of Artificial Sequence: Synthetic oligonucleotide
aggaaucaaagcuucugug

SEQ ID NO: 3185029 - RNA, 19 nt, Artificial Sequence
  Description of Artificial Sequence: Synthetic oligonucleotide
aaugacuccucagcuauca

SEQ ID NO: 3185030 - RNA, 19 nt, Artificial Sequence
  Description of Artificial Sequence: Synthetic oligonucleotide
ucugagaagagugauucaa

SEQ ID NO: 3185031 - RNA, 19 nt, Artificial Sequence
  Description of Artificial Sequence: Synthetic oligonucleotide
aauuacccagagucccagg

SEQ ID NO: 3185032 - RNA, 19 nt, Artificial Sequence
  Description of Artificial Sequence: Synthetic oligonucleotide
uggggucaaaucaauacau

SEQ ID NO: 3185033 - RNA, 19 nt, Artificial Sequence
  Description of Artificial Sequence: Synthetic oligonucleotide
cauaccauguuuaaggcua

SEQ ID NO: 3185034 - RNA, 19 nt, Artificial Sequence
  Description of Artificial Sequence: Synthetic oligonucleotide
ugauaacauucuuugcaga

SEQ ID NO: 3185035 - RNA, 19 nt, Artificial Sequence
  Description of Artificial Sequence: Synthetic oligonucleotide
cauucugcaggacugcuug

SEQ ID NO: 3185036 - RNA, 19 nt, Artificial Sequence
  Description of Artificial Sequence: Synthetic oligonucleotide
uggaguagguucuuucucu

SEQ ID NO: 3185037 - RNA, 19 nt, Artificial Sequence
  Description of Artificial Sequence: Synthetic oligonucleotide
aaaucaauacauguuucuu

SEQ ID NO: 3185038 - RNA, 19 nt, Artificial Sequence
  Description of Artificial Sequence: Synthetic oligonucleotide
gguuccagaacauuccaag

SEQ ID NO: 3185039 - RNA, 19 nt, Artificial Sequence
  Description of Artificial Sequence: Synthetic oligonucleotide
uuaaggcuaggggagguag

SEQ ID NO: 3185040 - RNA, 19 nt, Artificial Sequence
  Description of Artificial Sequence: Synthetic oligonucleotide
aagucuguuuccuuucuuu

SEQ ID NO: 3185041 - RNA, 19 nt, Artificial Sequence
  Description of Artificial Sequence: Synthetic oligonucleotide
caguauuacaucccuguug

SEQ ID NO: 3185042 - RNA, 19 nt, Artificial Sequence
  Description of Artificial Sequence: Synthetic oligonucleotide
uuuacugcagauucccuuu

SEQ ID NO: 3185043 - RNA, 19 nt, Artificial Sequence
  Description of Artificial Sequence: Synthetic oligonucleotide
agucuguuuccuuucuuug

SEQ ID NO: 3185044 - RNA, 19 nt, Artificial Sequence
  Description of Artificial Sequence: Synthetic oligonucleotide
auguaaaaguuuucaggga

SEQ ID NO: 3185045 - RNA, 19 nt, Artificial Sequence
  Description of Artificial Sequence: Synthetic oligonucleotide
ugguggaauuacuacuacc

SEQ ID NO: 3185046 - RNA, 19 nt, Artificial Sequence
  Description of Artificial Sequence: Synthetic oligonucleotide
guggucaauaucuaaaacu

SEQ ID NO: 3185047 - RNA, 19 nt, Artificial Sequence
  Description of Artificial Sequence: Synthetic oligonucleotide
  modified_base (16)..(16): a, c, u, g, unknown or other
uccaccuacuuccucnuuu

SEQ ID NO: 3185048 - RNA, 19 nt, Artificial Sequence
  Description of Artificial Sequence: Synthetic oligonucleotide
auguuuaaggcuaggggag

SEQ ID NO: 3185049 - RNA, 19 nt, Artificial Sequence
  Description of Artificial Sequence: Synthetic oligonucleotide
ucugacauuccaguaaaau

SEQ ID NO: 3185050 - RNA, 19 nt, Artificial Sequence
  Description of Artificial Sequence: Synthetic oligonucleotide
ucuguuuccuuucuuuguu

SEQ ID NO: 3185051 - RNA, 19 nt, Artificial Sequence
  Description of Artificial Sequence: Synthetic oligonucleotide
ucggucaucauuucuuguc

SEQ ID NO: 3185052 - RNA, 19 nt, Artificial Sequence
  Description of Artificial Sequence: Synthetic oligonucleotide
caauucaaauuugauggug

SEQ ID NO: 3185053 - RNA, 19 nt, Artificial Sequence
  Description of Artificial Sequence: Synthetic oligonucleotide
aagaugucaaugacuccuc

SEQ ID NO: 3185054 - RNA, 19 nt, Artificial Sequence
  Description of Artificial Sequence: Synthetic oligonucleotide
guuggaaaaguagcaagug

SEQ ID NO: 3185055 - RNA, 19 nt, Artificial Sequence
  Description of Artificial Sequence: Synthetic oligonucleotide
uuccagagcuagauggaug

SEQ ID NO: 3185056 - RNA, 19 nt, Artificial Sequence
  Description of Artificial Sequence: Synthetic oligonucleotide
agauggauguccuguucag

SEQ ID NO: 3185057 - RNA, 19 nt, Artificial Sequence
  Description of Artificial Sequence: Synthetic oligonucleotide
aauuugaugguggcucuga

SEQ ID NO: 3185058 - RNA, 19 nt, Artificial Sequence
  Description of Artificial Sequence: Synthetic oligonucleotide
uugguuccagaacauucca

SEQ ID NO: 3185059 - RNA, 19 nt, Artificial Sequence
  Description of Artificial Sequence: Synthetic oligonucleotide
ugugagcaucaccaguucu

SEQ ID NO: 3185060 - RNA, 19 nt, Artificial Sequence
  Description of Artificial Sequence: Synthetic oligonucleotide
guugguuccagaacauucc

SEQ ID NO: 3185061 - RNA, 19 nt, Artificial Sequence
  Description of Artificial Sequence: Synthetic oligonucleotide
caaugaaaugaucauugga

SEQ ID NO: 3185062 - RNA, 19 nt, Artificial Sequence
  Description of Artificial Sequence: Synthetic oligonucleotide
caagccuucaccagcuaac

SEQ ID NO: 3185063 - RNA, 19 nt, Artificial Sequence
  Description of Artificial Sequence: Synthetic oligonucleotide
uugaucugaguaagccaag

SEQ ID NO: 3185064 - RNA, 19 nt, Artificial Sequence
  Description of Artificial Sequence: Synthetic oligonucleotide
ucucggucaucauuucuug

SEQ ID NO: 3185065 - RNA, 19 nt, Artificial Sequence
  Description of Artificial Sequence: Synthetic oligonucleotide
aaacgccguaaaauccagc

SEQ ID NO: 3185066 - RNA, 19 nt, Artificial Sequence
  Description of Artificial Sequence: Synthetic oligonucleotide
aaguccucgacagacuuaa

SEQ ID NO: 3185067 - RNA, 19 nt, Artificial Sequence
  Description of Artificial Sequence: Synthetic oligonucleotide
ugaucugaguaagccaagc

SEQ ID NO: 3185068 - RNA, 19 nt, Artificial Sequence
  Description of Artificial Sequence: Synthetic oligonucleotide
guugaucugaguaagccaa

SEQ ID NO: 3185069 - RNA, 19 nt, Artificial Sequence
  Description of Artificial Sequence: Synthetic oligonucleotide
gaucugaguaagccaagca

SEQ ID NO: 3185070 - RNA, 19 nt, Artificial Sequence
  Description of Artificial Sequence: Synthetic oligonucleotide
uucuguucuucaugaguug

SEQ ID NO: 3185071 - RNA, 19 nt, Artificial Sequence
  Description of Artificial Sequence: Synthetic oligonucleotide
uaaacauugauacagagac

SEQ ID NO: 3185072 - RNA, 19 nt, Artificial Sequence
  Description of Artificial Sequence: Synthetic oligonucleotide
aauuauugacauuggaagc

SEQ ID NO: 3185073 - RNA, 19 nt, Artificial Sequence
  Description of Artificial Sequence: Synthetic oligonucleotide
uaauuauugacauuggaag

SEQ ID NO: 3185074 - RNA, 19 nt, Artificial Sequence
  Description of Artificial Sequence: Synthetic oligonucleotide
aaauggacaauucacauca

SEQ ID NO: 3185075 - RNA, 19 nt, Artificial Sequence
  Description of Artificial Sequence: Synthetic oligonucleotide
gaaaucucaagcaagagag

SEQ ID NO: 3185076 - RNA, 19 nt, Artificial Sequence
  Description of Artificial Sequence: Synthetic oligonucleotide
uaaacaauuuuccuguugc

SEQ ID NO: 3185077 - RNA, 19 nt, Artificial Sequence
  Description of Artificial Sequence: Synthetic oligonucleotide
aauuagagaagacaucucu

SEQ ID NO: 3185078 - RNA, 19 nt, Artificial Sequence
  Description of Artificial Sequence: Synthetic oligonucleotide
uguuagauagcauuaauaa

SEQ ID NO: 3185079 - RNA, 19 nt, Artificial Sequence
  Description of Artificial Sequence: Synthetic oligonucleotide
agcuaagacaucuuuggcc

SEQ ID NO: 3185080 - RNA, 19 nt, Artificial Sequence
  Description of Artificial Sequence: Synthetic oligonucleotide
gguguuauuuguuagauag

SEQ ID NO: 3185081 - RNA, 19 nt, Artificial Sequence
  Description of Artificial Sequence: Synthetic oligonucleotide
ucacuauucaucaaguugu

SEQ ID NO: 3185082 - RNA, 19 nt, Artificial Sequence
  Description of Artificial Sequence: Synthetic oligonucleotide
aaacuuauucuuaagaaca

SEQ ID NO: 3185083 - RNA, 19 nt, Artificial Sequence
  Description of Artificial Sequence: Synthetic oligonucleotide
ugucacaaaacugacaucc

SEQ ID NO: 3185084 - RNA, 19 nt, Artificial Sequence
  Description of Artificial Sequence: Synthetic oligonucleotide
ugcuauucugucaagaaca

SEQ ID NO: 3185085 - RNA, 19 nt, Artificial Sequence
  Description of Artificial Sequence: Synthetic oligonucleotide
ucuacuuagcauuauaaaa

SEQ ID NO: 3185086 - RNA, 19 nt, Artificial Sequence
  Description of Artificial Sequence: Synthetic oligonucleotide
auuguucugucauaauccc

SEQ ID NO: 3185087 - RNA, 19 nt, Artificial Sequence
  Description of Artificial Sequence: Synthetic oligonucleotide
uccauauaaucccugaaug

SEQ ID NO: 3185088 - RNA, 19 nt, Artificial Sequence
  Description of Artificial Sequence: Synthetic oligonucleotide
aauggugagaacaagaaau

SEQ ID NO: 3185089 - RNA, 19 nt, Artificial Sequence
  Description of Artificial Sequence: Synthetic oligonucleotide
ucaaguugugacaagagaa

SEQ ID NO: 3185090 - RNA, 19 nt, Artificial Sequence
  Description of Artificial Sequence: Synthetic oligonucleotide
cuuauaaaagucacuauuc

SEQ ID NO: 3185091 - RNA, 19 nt, Artificial Sequence
  Description of Artificial Sequence: Synthetic oligonucleotide
ucugucacaaucaggagca

SEQ ID NO: 3185092 - RNA, 19 nt, Artificial Sequence
  Description of Artificial Sequence: Synthetic oligonucleotide
acaauagggauucugagga

SEQ ID NO: 3185093 - RNA, 19 nt, Artificial Sequence
  Description of Artificial Sequence: Synthetic oligonucleotide
aauuuguuugucacaaaac

SEQ ID NO: 3185094 - RNA, 19 nt, Artificial Sequence
  Description of Artificial Sequence: Synthetic oligonucleotide
uauaauuauugacauugga

SEQ ID NO: 3185095 - RNA, 19 nt, Artificial Sequence
  Description of Artificial Sequence: Synthetic oligonucleotide
aaaguaucuagacaggaua

SEQ ID NO: 3185096 - RNA, 19 nt, Artificial Sequence
  Description of Artificial Sequence: Synthetic oligonucleotide
uguucugucauaaucccca

SEQ ID NO: 3185097 - RNA, 19 nt, Artificial Sequence
  Description of Artificial Sequence: Synthetic oligonucleotide
ucaauagccacugugaagu

SEQ ID NO: 3185098 - RNA, 19 nt, Artificial Sequence
  Description of Artificial Sequence: Synthetic oligonucleotide
uuggaucagacuuagaaaa

SEQ ID NO: 3185099 - RNA, 19 nt, Artificial Sequence
  Description of Artificial Sequence: Synthetic oligonucleotide
gauaaguuaggacucuuug

SEQ ID NO: 3185100 - RNA, 19 nt, Artificial Sequence
  Description of Artificial Sequence: Synthetic oligonucleotide
gagguuauaaagcagucac

SEQ ID NO: 3185101 - RNA, 19 nt, Artificial Sequence
  Description of Artificial Sequence: Synthetic oligonucleotide
accuacuauaauuauugac

SEQ ID NO: 3185102 - RNA, 19 nt, Artificial Sequence
  Description of Artificial Sequence: Synthetic oligonucleotide
gauuguucugucauaaucc

SEQ ID NO: 3185103 - RNA, 19 nt, Artificial Sequence
  Description of Artificial Sequence: Synthetic oligonucleotide
aaaacgaagauucucucuu

SEQ ID NO: 3185104 - RNA, 19 nt, Artificial Sequence
  Description of Artificial Sequence: Synthetic oligonucleotide
aauucaugagauauccuuc

SEQ ID NO: 3185105 - RNA, 19 nt, Artificial Sequence
  Description of Artificial Sequence: Synthetic oligonucleotide
auuucugcaggacacugac

SEQ ID NO: 3185106 - RNA, 19 nt, Artificial Sequence
  Description of Artificial Sequence: Synthetic oligonucleotide
uuuggauccaagaaagcac

SEQ ID NO: 3185107 - RNA, 19 nt, Artificial Sequence
  Description of Artificial Sequence: Synthetic oligonucleotide
aaauaaauacacaucucug

SEQ ID NO: 3185108 - RNA, 19 nt, Artificial Sequence
  Description of Artificial Sequence: Synthetic oligonucleotide
uaggaauacuccaaguagc

SEQ ID NO: 3185109 - RNA, 19 nt, Artificial Sequence
  Description of Artificial Sequence: Synthetic oligonucleotide
uaucaaucacuucaguucu

SEQ ID NO: 3185110 - RNA, 19 nt, Artificial Sequence
  Description of Artificial Sequence: Synthetic oligonucleotide
guaggaauacuccaaguag

SEQ ID NO: 3185111 - RNA, 19 nt, Artificial Sequence
  Description of Artificial Sequence: Synthetic oligonucleotide
ugucccaauaauacauugg

SEQ ID NO: 3185112 - RNA, 19 nt, Artificial Sequence
  Description of Artificial Sequence: Synthetic oligonucleotide
aaguaucuagacaggauac

SEQ ID NO: 3185113 - RNA, 19 nt, Artificial Sequence
  Description of Artificial Sequence: Synthetic oligonucleotide
uacugcugaaaccaaacug

SEQ ID NO: 3185114 - RNA, 19 nt, Artificial Sequence
  Description of Artificial Sequence: Synthetic oligonucleotide
ugauuguucugucauaauc

SEQ ID NO: 3185115 - RNA, 19 nt, Artificial Sequence
  Description of Artificial Sequence: Synthetic oligonucleotide
ugcuacaugguuuauuaca

SEQ ID NO: 3185116 - RNA, 19 nt, Artificial Sequence
  Description of Artificial Sequence: Synthetic oligonucleotide
caucucuguauguugaagg

SEQ ID NO: 3185117 - RNA, 19 nt, Artificial Sequence
  Description of Artificial Sequence: Synthetic oligonucleotide
uccaagaaagcacauuugu

SEQ ID NO: 3185118 - RNA, 19 nt, Artificial Sequence
  Description of Artificial Sequence: Synthetic oligonucleotide
gcuauugcgauuuagaaga

SEQ ID NO: 3185119 - RNA, 19 nt, Artificial Sequence
  Description of Artificial Sequence: Synthetic oligonucleotide
agcuaugcgacugugaguc

SEQ ID NO: 3185120 - RNA, 19 nt, Artificial Sequence
  Description of Artificial Sequence: Synthetic oligonucleotide
ucugacuucccgaagaaau

SEQ ID NO: 3185121 - RNA, 19 nt, Artificial Sequence
  Description of Artificial Sequence: Synthetic oligonucleotide
aagauucucucuuucuuca

SEQ ID NO: 3185122 - RNA, 19 nt, Artificial Sequence
  Description of Artificial Sequence: Synthetic oligonucleotide
auauguauauagcagucga

SEQ ID NO: 3185123 - RNA, 19 nt, Artificial Sequence
  Description of Artificial Sequence: Synthetic oligonucleotide
uacuucuauaaaauacgag

SEQ ID NO: 3185124 - RNA, 19 nt, Artificial Sequence
  Description of Artificial Sequence: Synthetic oligonucleotide
aagaacaaaacaaaaguuu

SEQ ID NO: 3185125 - RNA, 19 nt, Artificial Sequence
  Description of Artificial Sequence: Synthetic oligonucleotide
aaauucugcagguccaaca

SEQ ID NO: 3185126 - RNA, 19 nt, Artificial Sequence
  Description of Artificial Sequence: Synthetic oligonucleotide
aauacuccaaguagcaaag

SEQ ID NO: 3185127 - RNA, 19 nt, Artificial Sequence
  Description of Artificial Sequence: Synthetic oligonucleotide
gucacuauucaucaaguug

SEQ ID NO: 3185128 - RNA, 19 nt, Artificial Sequence
  Description of Artificial Sequence: Synthetic oligonucleotide
uccaauucgaccauugcau

SEQ ID NO: 3185129 - RNA, 19 nt, Artificial Sequence
  Description of Artificial Sequence: Synthetic oligonucleotide
acgaauuucuuucacaaau

SEQ ID NO: 3185130 - RNA, 19 nt, Artificial Sequence
  Description of Artificial Sequence: Synthetic oligonucleotide
uauugguguuauuuguuag

SEQ ID NO: 3185131 - RNA, 19 nt, Artificial Sequence
  Description of Artificial Sequence: Synthetic oligonucleotide
uauucaaaacuuauucuua

SEQ ID NO: 3185132 - RNA, 19 nt, Artificial Sequence
  Description of Artificial Sequence: Synthetic oligonucleotide
aaagugucccguucccugg

SEQ ID NO: 3185133 - RNA, 19 nt, Artificial Sequence
  Description of Artificial Sequence: Synthetic oligonucleotide
agcuauugcgauuuagaag

SEQ ID NO: 3185134 - RNA, 19 nt, Artificial Sequence
  Description of Artificial Sequence: Synthetic oligonucleotide
aaacccaaaguccaugaaa

SEQ ID NO: 3185135 - RNA, 19 nt, Artificial Sequence
  Description of Artificial Sequence: Synthetic oligonucleotide
gacauaaugucacaaaacu

SEQ ID NO: 3185136 - RNA, 19 nt, Artificial Sequence
  Description of Artificial Sequence: Synthetic oligonucleotide
uauaaucccugaauggcac

SEQ ID NO: 3185137 - RNA, 19 nt, Artificial Sequence
  Description of Artificial Sequence: Synthetic oligonucleotide
aacauaaguugacugcagu

SEQ ID NO: 3185138 - RNA, 19 nt, Artificial Sequence
  Description of Artificial Sequence: Synthetic oligonucleotide
uggcucucauguaagagag

SEQ ID NO: 3185139 - RNA, 19 nt, Artificial Sequence
  Description of Artificial Sequence: Synthetic oligonucleotide
uuggauccaagaaagcaca

SEQ ID NO: 3185140 - RNA, 19 nt, Artificial Sequence
  Description of Artificial Sequence: Synthetic oligonucleotide
aaaucaugacuuccaucuc

SEQ ID NO: 3185141 - RNA, 19 nt, Artificial Sequence
  Description of Artificial Sequence: Synthetic oligonucleotide
uuacuauggauucuuuagu

SEQ ID NO: 3185142 - RNA, 19 nt, Artificial Sequence
  Description of Artificial Sequence: Synthetic oligonucleotide
aaauaguccagaauaaauu

SEQ ID NO: 3185143 - RNA, 19 nt, Artificial Sequence
  Description of Artificial Sequence: Synthetic oligonucleotide
uccuacuuuucuauuauuc

SEQ ID NO: 3185144 - RNA, 19 nt, Artificial Sequence
  Description of Artificial Sequence: Synthetic oligonucleotide
uuaaacccaaaguccauga

SEQ ID NO: 3185145 - RNA, 19 nt, Artificial Sequence
  Description of Artificial Sequence: Synthetic oligonucleotide
uuaugugcuaagucacagg

SEQ ID NO: 3185146 - RNA, 19 nt, Artificial Sequence
  Description of Artificial Sequence: Synthetic oligonucleotide
uggaaaucugcuauucugu

SEQ ID NO: 3185147 - RNA, 19 nt, Artificial Sequence
  Description of Artificial Sequence: Synthetic oligonucleotide
gaauacuccaaguagcaaa

SEQ ID NO: 3185148 - RNA, 19 nt, Artificial Sequence
  Description of Artificial Sequence: Synthetic oligonucleotide
acaccuacuauaauuauug

SEQ ID NO: 3185149 - RNA, 19 nt, Artificial Sequence
  Description of Artificial Sequence: Synthetic oligonucleotide
cagucgaugacaauauuug

SEQ ID NO: 3185150 - RNA, 19 nt, Artificial Sequence
  Description of Artificial Sequence: Synthetic oligonucleotide
acugcagucagucuaaauu

SEQ ID NO: 3185151 - RNA, 19 nt, Artificial Sequence
  Description of Artificial Sequence: Synthetic oligonucleotide
auaauuauugacauuggaa

SEQ ID NO: 3185152 - RNA, 19 nt, Artificial Sequence
  Description of Artificial Sequence: Synthetic oligonucleotide
auagcggcuguccaucucg

SEQ ID NO: 3185153 - RNA, 19 nt, Artificial Sequence
  Description of Artificial Sequence: Synthetic oligonucleotide
ugggauuccuacuauuggc

SEQ ID NO: 3185154 - RNA, 19 nt, Artificial Sequence
  Description of Artificial Sequence: Synthetic oligonucleotide
agaagauuucugcaggaca

SEQ ID NO: 3185155 - RNA, 19 nt, Artificial Sequence
  Description of Artificial Sequence: Synthetic oligonucleotide
gugguuuccacuucugucc

SEQ ID NO: 3185156 - RNA, 19 nt, Artificial Sequence
  Description of Artificial Sequence: Synthetic oligonucleotide
aacuuauucuuaagaacag

SEQ ID NO: 3185157 - RNA, 19 nt, Artificial Sequence
  Description of Artificial Sequence: Synthetic oligonucleotide
uuguaaaacuuccauccuc

SEQ ID NO: 3185158 - RNA, 19 nt, Artificial Sequence
  Description of Artificial Sequence: Synthetic oligonucleotide
ucccuuugaauuaaaguau

SEQ ID NO: 3185159 - RNA, 19 nt, Artificial Sequence
  Description of Artificial Sequence: Synthetic oligonucleotide
caacugaauacaaaguuca

SEQ ID NO: 3185160 - RNA, 19 nt, Artificial Sequence
  Description of Artificial Sequence: Synthetic oligonucleotide
cauugcaucaaauucugca

SEQ ID NO: 3185161 - RNA, 19 nt, Artificial Sequence
  Description of Artificial Sequence: Synthetic oligonucleotide
uaggugggguauauggagg

SEQ ID NO: 3185162 - RNA, 19 nt, Artificial Sequence
  Description of Artificial Sequence: Synthetic oligonucleotide
auucaaaacuuauucuuaa

SEQ ID NO: 3185163 - RNA, 19 nt, Artificial Sequence
  Description of Artificial Sequence: Synthetic oligonucleotide
ugagaauucacaagagauu

SEQ ID NO: 3185164 - RNA, 19 nt, Artificial Sequence
  Description of Artificial Sequence: Synthetic oligonucleotide
caaguugugacaagagaac

SEQ ID NO: 3185165 - RNA, 19 nt, Artificial Sequence
  Description of Artificial Sequence: Synthetic oligonucleotide
ucagcauauuucccucugg

SEQ ID NO: 3185166 - RNA, 19 nt, Artificial Sequence
  Description of Artificial Sequence: Synthetic oligonucleotide
gacaauucacaucacagcu

SEQ ID NO: 3185167 - RNA, 19 nt, Artificial Sequence
  Description of Artificial Sequence: Synthetic oligonucleotide
aguacugcugaaaccaaac

SEQ ID NO: 3185168 - RNA, 19 nt, Artificial Sequence
  Description of Artificial Sequence: Synthetic oligonucleotide
cauaucugagaucacacca

SEQ ID NO: 3185169 - RNA, 19 nt, Artificial Sequence
  Description of Artificial Sequence: Synthetic oligonucleotide
uuugagccauaucugagau

SEQ ID NO: 3185170 - RNA, 19 nt, Artificial Sequence
  Description of Artificial Sequence: Synthetic oligonucleotide
ggauuauacauuauuuucc

SEQ ID NO: 3185171 - RNA, 19 nt, Artificial Sequence
  Description of Artificial Sequence: Synthetic oligonucleotide
aaauguaucauccaugucu

SEQ ID NO: 3185172 - RNA, 19 nt, Artificial Sequence
  Description of Artificial Sequence: Synthetic oligonucleotide
aaguugaggaguuagaaag

SEQ ID NO: 3185173 - RNA, 19 nt, Artificial Sequence
  Description of Artificial Sequence: Synthetic oligonucleotide
ucuuaagggagucaugacg

SEQ ID NO: 3185174 - RNA, 19 nt, Artificial Sequence
  Description of Artificial Sequence: Synthetic oligonucleotide
cuaaauagcugucagaaug

SEQ ID NO: 3185175 - RNA, 19 nt, Artificial Sequence
  Description of Artificial Sequence: Synthetic oligonucleotide
uaaauagcugucagaaugg

SEQ ID NO: 3185176 - RNA, 19 nt, Artificial Sequence
  Description of Artificial Sequence: Synthetic oligonucleotide
cuuaagggagucaugacgg

SEQ ID NO: 3185177 - RNA, 19 nt, Artificial Sequence
  Description of Artificial Sequence: Synthetic oligonucleotide
acugaugaggcacaagccc

SEQ ID NO: 3185178 - RNA, 19 nt, Artificial Sequence
  Description of Artificial Sequence: Synthetic oligonucleotide
augcauuucucauacacgg

SEQ ID NO: 3185179 - RNA, 19 nt, Artificial Sequence
  Description of Artificial Sequence: Synthetic oligonucleotide
ugaaaauguaucauccaug

SEQ ID NO: 3185180 - RNA, 19 nt, Artificial Sequence
  Description of Artificial Sequence: Synthetic oligonucleotide
ucuugcaccacuauguacu

SEQ ID NO: 3185181 - RNA, 19 nt, Artificial Sequence
  Description of Artificial Sequence: Synthetic oligonucleotide
ugaggaguuagaaagagua

SEQ ID NO: 3185182 - RNA, 19 nt, Artificial Sequence
  Description of Artificial Sequence: Synthetic oligonucleotide
uguacuggccugaagaugu

SEQ ID NO: 3185183 - RNA, 19 nt, Artificial Sequence
  Description of Artificial Sequence: Synthetic oligonucleotide
uucacuuguucuaaggugu

SEQ ID NO: 3185184 - RNA, 19 nt, Artificial Sequence
  Description of Artificial Sequence: Synthetic oligonucleotide
auuucucauacacggggcc

SEQ ID NO: 3185185 - RNA, 19 nt, Artificial Sequence
  Description of Artificial Sequence: Synthetic oligonucleotide
uguaccaugcucacuguag

SEQ ID NO: 3185186 - RNA, 19 nt, Artificial Sequence
  Description of Artificial Sequence: Synthetic oligonucleotide
agcaauuguuucugggucc

SEQ ID NO: 3185187 - RNA, 19 nt, Artificial Sequence
  Description of Artificial Sequence: Synthetic oligonucleotide
acaguagucgccuccggcc

SEQ ID NO: 3185188 - RNA, 19 nt, Artificial Sequence
  Description of Artificial Sequence: Synthetic oligonucleotide
ugaaggacagcucucuagc

SEQ ID NO: 3185189 - RNA, 19 nt, Artificial Sequence
  Description of Artificial Sequence: Synthetic oligonucleotide
uugaaaguacucaugguau

SEQ ID NO: 3185190 - RNA, 19 nt, Artificial Sequence
  Description of Artificial Sequence: Synthetic oligonucleotide
uguacgcccauccugggag

SEQ ID NO: 3185191 - RNA, 19 nt, Artificial Sequence
  Description of Artificial Sequence: Synthetic oligonucleotide
uggcuugugaucauugaag

SEQ ID NO: 3185192 - RNA, 19 nt, Artificial Sequence
  Description of Artificial Sequence: Synthetic oligonucleotide
uugugaucauugaagcccg

SEQ ID NO: 3185193 - RNA, 19 nt, Artificial Sequence
  Description of Artificial Sequence: Synthetic oligonucleotide
uguucuaagguguccagca

SEQ ID NO: 3185194 - RNA, 19 nt, Artificial Sequence
  Description of Artificial Sequence: Synthetic oligonucleotide
gaguucauguccuuggaug

SEQ ID NO: 3185195 - RNA, 19 nt, Artificial Sequence
  Description of Artificial Sequence: Synthetic oligonucleotide
gauuccauggaaguggcag

SEQ ID NO: 3185196 - RNA, 19 nt, Artificial Sequence
  Description of Artificial Sequence: Synthetic oligonucleotide
uuugccuggcuaaauagcu

SEQ ID NO: 3185197 - RNA, 19 nt, Artificial Sequence
  Description of Artificial Sequence: Synthetic oligonucleotide
uucaucuucacuggugugg

SEQ ID NO: 3185198 - RNA, 19 nt, Artificial Sequence
  Description of Artificial Sequence: Synthetic oligonucleotide
cuucgauuggcucacauuc

SEQ ID NO: 3185199 - RNA, 19 nt, Artificial Sequence
  Description of Artificial Sequence: Synthetic oligonucleotide
aaggacagcucucuagcag

SEQ ID NO: 3185200 - RNA, 19 nt, Artificial Sequence
  Description of Artificial Sequence: Synthetic oligonucleotide
caugcauuucucauacacg

SEQ ID NO: 3185201 - RNA, 19 nt, Artificial Sequence
  Description of Artificial Sequence: Synthetic oligonucleotide
aagacuugucuucggugac

SEQ ID NO: 3185202 - RNA, 19 nt, Artificial Sequence
  Description of Artificial Sequence: Synthetic oligonucleotide
ucaaacuuggcuauugcuu

SEQ ID NO: 3185203 - RNA, 19 nt, Artificial Sequence
  Description of Artificial Sequence: Synthetic oligonucleotide
uguccuuggaugaagacuu

SEQ ID NO: 3185204 - RNA, 19 nt, Artificial Sequence
  Description of Artificial Sequence: Synthetic oligonucleotide
aagcccgucaaucccauug

SEQ ID NO: 3185205 - RNA, 19 nt, Artificial Sequence
  Description of Artificial Sequence: Synthetic oligonucleotide
uauugcuucgauuggcuca

SEQ ID NO: 3185206 - RNA, 19 nt, Artificial Sequence
  Description of Artificial Sequence: Synthetic oligonucleotide
gaagauguagaccuccuga

SEQ ID NO: 3185207 - RNA, 19 nt, Artificial Sequence
  Description of Artificial Sequence: Synthetic oligonucleotide
ugucaaucuucuuaaggga

SEQ ID NO: 3185208 - RNA, 19 nt, Artificial Sequence
  Description of Artificial Sequence: Synthetic oligonucleotide
aagggcuggaggcuucagc

SEQ ID NO: 3185209 - RNA, 19 nt, Artificial Sequence
  Description of Artificial Sequence: Synthetic oligonucleotide
ucccaggucaaguugagga

SEQ ID NO: 3185210 - RNA, 19 nt, Artificial Sequence
  Description of Artificial Sequence: Synthetic oligonucleotide
uugaaggacagcucucuag

SEQ ID NO: 3185211 - RNA, 19 nt, Artificial Sequence
  Description of Artificial Sequence: Synthetic oligonucleotide
acggaguucauucaaggca

SEQ ID NO: 3185212 - RNA, 19 nt, Artificial Sequence
  Description of Artificial Sequence: Synthetic oligonucleotide
cagaauggcggucaguggg

SEQ ID NO: 3185213 - RNA, 19 nt, Artificial Sequence
  Description of Artificial Sequence: Synthetic oligonucleotide
ugaucauugaagcccgugu

SEQ ID NO: 3185214 - RNA, 19 nt, Artificial Sequence
  Description of Artificial Sequence: Synthetic oligonucleotide
ucuaagguguccagcacga

SEQ ID NO: 3185215 - RNA, 19 nt, Artificial Sequence
  Description of Artificial Sequence: Synthetic oligonucleotide
gaagacuugucuucgguga

SEQ ID NO: 3185216 - RNA, 19 nt, Artificial Sequence
  Description of Artificial Sequence: Synthetic oligonucleotide
ucauucaaggcaguguuca

SEQ ID NO: 3185217 - RNA, 19 nt, Artificial Sequence
  Description of Artificial Sequence: Synthetic oligonucleotide
ggcuugaaaguacucaugg

SEQ ID NO: 3185218 - RNA, 19 nt, Artificial Sequence
  Description of Artificial Sequence: Synthetic oligonucleotide
ugcauuucucauacacggg

SEQ ID NO: 3185219 - RNA, 19 nt, Artificial Sequence
  Description of Artificial Sequence: Synthetic oligonucleotide
guacucaugguaucacugg

SEQ ID NO: 3185220 - RNA, 19 nt, Artificial Sequence
  Description of Artificial Sequence: Synthetic oligonucleotide
gauacagcagcagggaggc

SEQ ID NO: 3185221 - RNA, 19 nt, Artificial Sequence
  Description of Artificial Sequence: Synthetic oligonucleotide
gucugaaaauguaucaucc

SEQ ID NO: 3185222 - RNA, 19 nt, Artificial Sequence
  Description of Artificial Sequence: Synthetic oligonucleotide
aagauguagaccuccugau

SEQ ID NO: 3185223 - RNA, 19 nt, Artificial Sequence
  Description of Artificial Sequence: Synthetic oligonucleotide
aucuucacugguguggggc

SEQ ID NO: 3185224 - RNA, 19 nt, Artificial Sequence
  Description of Artificial Sequence: Synthetic oligonucleotide
ugaagacuugucuucggug

SEQ ID NO: 3185225 - RNA, 19 nt, Artificial Sequence
  Description of Artificial Sequence: Synthetic oligonucleotide
ucagagugucugaaaaugu

SEQ ID NO: 3185226 - RNA, 19 nt, Artificial Sequence
  Description of Artificial Sequence: Synthetic oligonucleotide
cuagguuugggaucccagg

SEQ ID NO: 3185227 - RNA, 19 nt, Artificial Sequence
  Description of Artificial Sequence: Synthetic oligonucleotide
auuccauggaaguggcagg

SEQ ID NO: 3185228 - RNA, 19 nt, Artificial Sequence
  Description of Artificial Sequence: Synthetic oligonucleotide
gaguucacggaguucauuc

SEQ ID NO: 3185229 - RNA, 19 nt, Artificial Sequence
  Description of Artificial Sequence: Synthetic oligonucleotide
uguccagcacgacaucagg

SEQ ID NO: 3185230 - RNA, 19 nt, Artificial Sequence
  Description of Artificial Sequence: Synthetic oligonucleotide
aguucauguccuuggauga

SEQ ID NO: 3185231 - RNA, 19 nt, Artificial Sequence
  Description of Artificial Sequence: Synthetic oligonucleotide
cuuugccuggcuaaauagc

SEQ ID NO: 3185232 - RNA, 19 nt, Artificial Sequence
  Description of Artificial Sequence: Synthetic oligonucleotide
gauuggcucacauucaucu

SEQ ID NO: 3185233 - RNA, 19 nt, Artificial Sequence
  Description of Artificial Sequence: Synthetic oligonucleotide
gcauuucucauacacgggg

SEQ ID NO: 3185234 - RNA, 19 nt, Artificial Sequence
  Description of Artificial Sequence: Synthetic oligonucleotide
cugagagauuccauggaag

SEQ ID NO: 3185235 - RNA, 19 nt, Artificial Sequence
  Description of Artificial Sequence: Synthetic oligonucleotide
cucucuagcagaccgcccg

SEQ ID NO: 3185236 - RNA, 19 nt, Artificial Sequence
  Description of Artificial Sequence: Synthetic oligonucleotide
gauaggagggcugucaauc

SEQ ID NO: 3185237 - RNA, 19 nt, Artificial Sequence
  Description of Artificial Sequence: Synthetic oligonucleotide
uggccuaagggcuggaggc

SEQ ID NO: 3185238 - RNA, 19 nt, Artificial Sequence
  Description of Artificial Sequence: Synthetic oligonucleotide
auugcuucgauuggcucac

SEQ ID NO: 3185239 - RNA, 19 nt, Artificial Sequence
  Description of Artificial Sequence: Synthetic oligonucleotide
ucaugguaucacuggauga

SEQ ID NO: 3185240 - RNA, 19 nt, Artificial Sequence
  Description of Artificial Sequence: Synthetic oligonucleotide
guaccaugcucacuguagg

SEQ ID NO: 3185241 - RNA, 19 nt, Artificial Sequence
  Description of Artificial Sequence: Synthetic oligonucleotide
caugguaucacuggaugag

SEQ ID NO: 3185242 - RNA, 19 nt, Artificial Sequence
  Description of Artificial Sequence: Synthetic oligonucleotide
uggaugaagacuugucuuc

SEQ ID NO: 3185243 - RNA, 19 nt, Artificial Sequence
  Description of Artificial Sequence: Synthetic oligonucleotide
cuugaaaguacucauggua

SEQ ID NO: 3185244 - RNA, 19 nt, Artificial Sequence
  Description of Artificial Sequence: Synthetic oligonucleotide
uagguuugggaucccaggu

SEQ ID NO: 3185245 - RNA, 19 nt, Artificial Sequence
  Description of Artificial Sequence: Synthetic oligonucleotide
aauguaucauccaugucuu

SEQ ID NO: 3185246 - RNA, 19 nt, Artificial Sequence
  Description of Artificial Sequence: Synthetic oligonucleotide
gugacuggcccacugcugg

SEQ ID NO: 3185247 - RNA, 19 nt, Artificial Sequence
  Description of Artificial Sequence: Synthetic oligonucleotide
cuugucuucggugacuggc

SEQ ID NO: 3185248 - RNA, 19 nt, Artificial Sequence
  Description of Artificial Sequence: Synthetic oligonucleotide
aaucugaggcuccgagcuc

SEQ ID NO: 3185249 - RNA, 19 nt, Artificial Sequence
  Description of Artificial Sequence: Synthetic oligonucleotide
gagcaauuguuucuggguc

SEQ ID NO: 3185250 - RNA, 19 nt, Artificial Sequence
  Description of Artificial Sequence: Synthetic oligonucleotide
ugaaaguacucaugguauc

SEQ ID NO: 3185251 - RNA, 19 nt, Artificial Sequence
  Description of Artificial Sequence: Synthetic oligonucleotide
ucaggggcaugcuucacug

SEQ ID NO: 3185252 - RNA, 19 nt, Artificial Sequence
  Description of Artificial Sequence: Synthetic oligonucleotide
uguaggggcugucacagua

SEQ ID NO: 3185253 - RNA, 19 nt, Artificial Sequence
  Description of Artificial Sequence: Synthetic oligonucleotide
ucaugacggcugauguugg

SEQ ID NO: 3185254 - RNA, 19 nt, Artificial Sequence
  Description of Artificial Sequence: Synthetic oligonucleotide
ugguaucacuggaugagcu

SEQ ID NO: 3185255 - RNA, 19 nt, Artificial Sequence
  Description of Artificial Sequence: Synthetic oligonucleotide
ugcaccacuauguacugau

SEQ ID NO: 3185256 - RNA, 19 nt, Artificial Sequence
  Description of Artificial Sequence: Synthetic oligonucleotide
gucaugacggcugauguug

SEQ ID NO: 3185257 - RNA, 19 nt, Artificial Sequence
  Description of Artificial Sequence: Synthetic oligonucleotide
ucuucuuaagggagucaug

SEQ ID NO: 3185258 - RNA, 19 nt, Artificial Sequence
  Description of Artificial Sequence: Synthetic oligonucleotide
augguaucacuggaugagc

SEQ ID NO: 3185259 - RNA, 19 nt, Artificial Sequence
  Description of Artificial Sequence: Synthetic oligonucleotide
uugucuucggugacuggcc

SEQ ID NO: 3185260 - RNA, 19 nt, Artificial Sequence
  Description of Artificial Sequence: Synthetic oligonucleotide
cucuucgauauccugagca

SEQ ID NO: 3185261 - RNA, 19 nt, Artificial Sequence
  Description of Artificial Sequence: Synthetic oligonucleotide
ugacggcugauguugguca

SEQ ID NO: 3185262 - RNA, 19 nt, Artificial Sequence
  Description of Artificial Sequence: Synthetic oligonucleotide
ugugcuccggcgaaucuga

SEQ ID NO: 3185263 - RNA, 19 nt, Artificial Sequence
  Description of Artificial Sequence: Synthetic oligonucleotide
uggcuauugcuucgauugg

SEQ ID NO: 3185264 - RNA, 19 nt, Artificial Sequence
  Description of Artificial Sequence: Synthetic oligonucleotide
ugaggcacaagcccgucaa

SEQ ID NO: 3185265 - RNA, 19 nt, Artificial Sequence
  Description of Artificial Sequence: Synthetic oligonucleotide
ugugucugccuucccacca

SEQ ID NO: 3185266 - RNA, 19 nt, Artificial Sequence
  Description of Artificial Sequence: Synthetic oligonucleotide
aauguaccaugcucacugu

SEQ ID NO: 3185267 - RNA, 19 nt, Artificial Sequence
  Description of Artificial Sequence: Synthetic oligonucleotide
uuuuggcucagagugucug

SEQ ID NO: 3185268 - RNA, 19 nt, Artificial Sequence
  Description of Artificial Sequence: Synthetic oligonucleotide
uguucauggucucuucgau

SEQ ID NO: 3185269 - RNA, 19 nt, Artificial Sequence
  Description of Artificial Sequence: Synthetic oligonucleotide
agguuugggaucccagguc

SEQ ID NO: 3185270 - RNA, 19 nt, Artificial Sequence
  Description of Artificial Sequence: Synthetic oligonucleotide
uucgauauccugagcaauu

SEQ ID NO: 3185271 - RNA, 19 nt, Artificial Sequence
  Description of Artificial Sequence: Synthetic oligonucleotide
gauuuuauguccccgaagg

SEQ ID NO: 3185272 - RNA, 19 nt, Artificial Sequence
  Description of Artificial Sequence: Synthetic oligonucleotide
agugaaugauuuuaugucc

SEQ ID NO: 3185273 - RNA, 19 nt, Artificial Sequence
  Description of Artificial Sequence: Synthetic oligonucleotide
gaagcgaauagacauaggg

SEQ ID NO: 3185274 - RNA, 19 nt, Artificial Sequence
  Description of Artificial Sequence: Synthetic oligonucleotide
ucuacgaagacuuuuggag

SEQ ID NO: 3185275 - RNA, 19 nt, Artificial Sequence
  Description of Artificial Sequence: Synthetic oligonucleotide
agaacauucucccacaauc

SEQ ID NO: 3185276 - RNA, 19 nt, Artificial Sequence
  Description of Artificial Sequence: Synthetic oligonucleotide
aagcgacauauuuaaaggc

SEQ ID NO: 3185277 - RNA, 19 nt, Artificial Sequence
  Description of Artificial Sequence: Synthetic oligonucleotide
gaagcgacauauuuaaagg

SEQ ID NO: 3185278 - RNA, 19 nt, Artificial Sequence
  Description of Artificial Sequence: Synthetic oligonucleotide
acacacuuugcauuuaugc

SEQ ID NO: 3185279 - RNA, 19 nt, Artificial Sequence
  Description of Artificial Sequence: Synthetic oligonucleotide
aagccuuuuauguaccucg

SEQ ID NO: 3185280 - RNA, 19 nt, Artificial Sequence
  Description of Artificial Sequence: Synthetic oligonucleotide
aauagacauagggauaagc

SEQ ID NO: 3185281 - RNA, 19 nt, Artificial Sequence
  Description of Artificial Sequence: Synthetic oligonucleotide
aacuguaacuugugaaggc

SEQ ID NO: 3185282 - RNA, 19 nt, Artificial Sequence
  Description of Artificial Sequence: Synthetic oligonucleotide
agaacgaccuaccacauuc

SEQ ID NO: 3185283 - RNA, 19 nt, Artificial Sequence
  Description of Artificial Sequence: Synthetic oligonucleotide
ucucuuaugugcuugaaca

SEQ ID NO: 3185284 - RNA, 19 nt, Artificial Sequence
  Description of Artificial Sequence: Synthetic oligonucleotide
uguaugaagccuuuuaugu

SEQ ID NO: 3185285 - RNA, 19 nt, Artificial Sequence
  Description of Artificial Sequence: Synthetic oligonucleotide
agcauuaggaaauguuucc

SEQ ID NO: 3185286 - RNA, 19 nt, Artificial Sequence
  Description of Artificial Sequence: Synthetic oligonucleotide
uguacauccaugaaguuuc

SEQ ID NO: 3185287 - RNA, 19 nt, Artificial Sequence
  Description of Artificial Sequence: Synthetic oligonucleotide
agugugacuccuuuugugc

SEQ ID NO: 3185288 - RNA, 19 nt, Artificial Sequence
  Description of Artificial Sequence: Synthetic oligonucleotide
aaugucggaaggcucuccc

SEQ ID NO: 3185289 - RNA, 19 nt, Artificial Sequence
  Description of Artificial Sequence: Synthetic oligonucleotide
ugugcuugaacauggcugg

SEQ ID NO: 3185290 - RNA, 19 nt, Artificial Sequence
  Description of Artificial Sequence: Synthetic oligonucleotide
cuuaugugcuugaacaugg

SEQ ID NO: 3185291 - RNA, 19 nt, Artificial Sequence
  Description of Artificial Sequence: Synthetic oligonucleotide
uaagcuuuuccacacaccu

SEQ ID NO: 3185292 - RNA, 19 nt, Artificial Sequence
  Description of Artificial Sequence: Synthetic oligonucleotide
uauuuaaaggcuuucccac

SEQ ID NO: 3185293 - RNA, 19 nt, Artificial Sequence
  Description of Artificial Sequence: Synthetic oligonucleotide
gaaauguuuccucacacac

SEQ ID NO: 3185294 - RNA, 19 nt, Artificial Sequence
  Description of Artificial Sequence: Synthetic oligonucleotide
aaugucuccuugcacaaug

SEQ ID NO: 3185295 - RNA, 19 nt, Artificial Sequence
  Description of Artificial Sequence: Synthetic oligonucleotide
acaucuauagggcugcccg

SEQ ID NO: 3185296 - RNA, 19 nt, Artificial Sequence
  Description of Artificial Sequence: Synthetic oligonucleotide
agagugaaugauuuuaugu

SEQ ID NO: 3185297 - RNA, 19 nt, Artificial Sequence
  Description of Artificial Sequence: Synthetic oligonucleotide
uccaugaaguuucucuucg

SEQ ID NO: 3185298 - RNA, 19 nt, Artificial Sequence
  Description of Artificial Sequence: Synthetic oligonucleotide
gaaguaaaggucuucccgc

SEQ ID NO: 3185299 - RNA, 19 nt, Artificial Sequence
  Description of Artificial Sequence: Synthetic oligonucleotide
aaugauuuuauguccccga

SEQ ID NO: 3185300 - RNA, 19 nt, Artificial Sequence
  Description of Artificial Sequence: Synthetic oligonucleotide
uaugaagccuuuuauguac

SEQ ID NO: 3185301 - RNA, 19 nt, Artificial Sequence
  Description of Artificial Sequence: Synthetic oligonucleotide
uuuugaugguuucgaagcg

SEQ ID NO: 3185302 - RNA, 19 nt, Artificial Sequence
  Description of Artificial Sequence: Synthetic oligonucleotide
uuucgaagcgaauagacau

SEQ ID NO: 3185303 - RNA, 19 nt, Artificial Sequence
  Description of Artificial Sequence: Synthetic oligonucleotide
uggaguacgagaacgaccu

SEQ ID NO: 3185304 - RNA, 19 nt, Artificial Sequence
  Description of Artificial Sequence: Synthetic oligonucleotide
aauggccagaaguaaaggu

SEQ ID NO: 3185305 - RNA, 19 nt, Artificial Sequence
  Description of Artificial Sequence: Synthetic oligonucleotide
ucuccuugcacaauggcca

SEQ ID NO: 3185306 - RNA, 19 nt, Artificial Sequence
  Description of Artificial Sequence: Synthetic oligonucleotide
auuuguaaggccaggcucc

SEQ ID NO: 3185307 - RNA, 19 nt, Artificial Sequence
  Description of Artificial Sequence: Synthetic oligonucleotide
uuuauguccccgaagggcu

SEQ ID NO: 3185308 - RNA, 19 nt, Artificial Sequence
  Description of Artificial Sequence: Synthetic oligonucleotide
agcugaaaggaacuguaac

SEQ ID NO: 3185309 - RNA, 19 nt, Artificial Sequence
  Description of Artificial Sequence: Synthetic oligonucleotide
auagggauaagcuuuucca

SEQ ID NO: 3185310 - RNA, 19 nt, Artificial Sequence
  Description of Artificial Sequence: Synthetic oligonucleotide
ucugcauguaacuggaaca

SEQ ID NO: 3185311 - RNA, 19 nt, Artificial Sequence
  Description of Artificial Sequence: Synthetic oligonucleotide
uuuugugcagcugaaagga

SEQ ID NO: 3185312 - RNA, 19 nt, Artificial Sequence
  Description of Artificial Sequence: Synthetic oligonucleotide
aacagcugaaagccuuccc

SEQ ID NO: 3185313 - RNA, 19 nt, Artificial Sequence
  Description of Artificial Sequence: Synthetic oligonucleotide
cuuuugugcagcugaaagg

SEQ ID NO: 3185314 - RNA, 19 nt, Artificial Sequence
  Description of Artificial Sequence: Synthetic oligonucleotide
agcgaauagacauagggau

SEQ ID NO: 3185315 - RNA, 19 nt, Artificial Sequence
  Description of Artificial Sequence: Synthetic oligonucleotide
aggaaauguuuccucacac

SEQ ID NO: 3185316 - RNA, 19 nt, Artificial Sequence
  Description of Artificial Sequence: Synthetic oligonucleotide
uuuuauguccccgaagggc

SEQ ID NO: 3185317 - RNA, 19 nt, Artificial Sequence
  Description of Artificial Sequence: Synthetic oligonucleotide
ugacucugcauguaacugg

SEQ ID NO: 3185318 - RNA, 19 nt, Artificial Sequence
  Description of Artificial Sequence: Synthetic oligonucleotide
uauuuacauucauaaagcu

SEQ ID NO: 3185319 - RNA, 19 nt, Artificial Sequence
  Description of Artificial Sequence: Synthetic oligonucleotide
acacuuugcauuuaugccu

SEQ ID NO: 3185320 - RNA, 19 nt, Artificial Sequence
  Description of Artificial Sequence: Synthetic oligonucleotide
uuugcauuuaugccugucu

SEQ ID NO: 3185321 - RNA, 19 nt, Artificial Sequence
  Description of Artificial Sequence: Synthetic oligonucleotide
cuuuuggaguacgagaacg

SEQ ID NO: 3185322 - RNA, 19 nt, Artificial Sequence
  Description of Artificial Sequence: Synthetic oligonucleotide
acauccaugaaguuucucu

SEQ ID NO: 3185323 - RNA, 19 nt, Artificial Sequence
  Description of Artificial Sequence: Synthetic oligonucleotide
ugaaguuucucuucgguau

SEQ ID NO: 3185324 - RNA, 19 nt, Artificial Sequence
  Description of Artificial Sequence: Synthetic oligonucleotide
cacacuuugcauuuaugcc

SEQ ID NO: 3185325 - RNA, 19 nt, Artificial Sequence
  Description of Artificial Sequence: Synthetic oligonucleotide
gaacuguaacuugugaagg

SEQ ID NO: 3185326 - RNA, 19 nt, Artificial Sequence
  Description of Artificial Sequence: Synthetic oligonucleotide
ggaagcgacauauuuaaag

SEQ ID NO: 3185327 - RNA, 19 nt, Artificial Sequence
  Description of Artificial Sequence: Synthetic oligonucleotide
cuaaaugucuccuugcaca

SEQ ID NO: 3185328 - RNA, 19 nt, Artificial Sequence
  Description of Artificial Sequence: Synthetic oligonucleotide
aacuugugaaggccuuccc

SEQ ID NO: 3185329 - RNA, 19 nt, Artificial Sequence
  Description of Artificial Sequence: Synthetic oligonucleotide
ucagcauuaggaaauguuu

SEQ ID NO: 3185330 - RNA, 19 nt, Artificial Sequence
  Description of Artificial Sequence: Synthetic oligonucleotide
acuguguauagucaugugu

SEQ ID NO: 3185331 - RNA, 19 nt, Artificial Sequence
  Description of Artificial Sequence: Synthetic oligonucleotide
ugauuuuauguccccgaag

SEQ ID NO: 3185332 - RNA, 19 nt, Artificial Sequence
  Description of Artificial Sequence: Synthetic oligonucleotide
acgagaacgaccuaccaca

SEQ ID NO: 3185333 - RNA, 19 nt, Artificial Sequence
  Description of Artificial Sequence: Synthetic oligonucleotide
uuuuauguaccucgaggga

SEQ ID NO: 3185334 - RNA, 19 nt, Artificial Sequence
  Description of Artificial Sequence: Synthetic oligonucleotide
uguaccucgagggaacugg

SEQ ID NO: 3185335 - RNA, 19 nt, Artificial Sequence
  Description of Artificial Sequence: Synthetic oligonucleotide
uguauagucaugugucuac

SEQ ID NO: 3185336 - RNA, 19 nt, Artificial Sequence
  Description of Artificial Sequence: Synthetic oligonucleotide
cuugugaaggccuucccgc

SEQ ID NO: 3185337 - RNA, 19 nt, Artificial Sequence
  Description of Artificial Sequence: Synthetic oligonucleotide
gaacuggaaguccagaaca

SEQ ID NO: 3185338 - RNA, 19 nt, Artificial Sequence
  Description of Artificial Sequence: Synthetic oligonucleotide
ugugugucccuaaaugucu

SEQ ID NO: 3185339 - RNA, 19 nt, Artificial Sequence
  Description of Artificial Sequence: Synthetic oligonucleotide
cuguguauagucauguguc

SEQ ID NO: 3185340 - RNA, 19 nt, Artificial Sequence
  Description of Artificial Sequence: Synthetic oligonucleotide
ugucuacgaagacuuuugg

SEQ ID NO: 3185341 - RNA, 19 nt, Artificial Sequence
  Description of Artificial Sequence: Synthetic oligonucleotide
uagucaugugucuacgaag

SEQ ID NO: 3185342 - RNA, 19 nt, Artificial Sequence
  Description of Artificial Sequence: Synthetic oligonucleotide
acuugugaaggccuucccg

SEQ ID NO: 3185343 - RNA, 19 nt, Artificial Sequence
  Description of Artificial Sequence: Synthetic oligonucleotide
uuggaguacgagaacgacc

SEQ ID NO: 3185344 - RNA, 19 nt, Artificial Sequence
  Description of Artificial Sequence: Synthetic oligonucleotide
uuuuggaguacgagaacga

SEQ ID NO: 3185345 - RNA, 19 nt, Artificial Sequence
  Description of Artificial Sequence: Synthetic oligonucleotide
gaaugauuuuauguccccg

SEQ ID NO: 3185346 - RNA, 19 nt, Artificial Sequence
  Description of Artificial Sequence: Synthetic oligonucleotide
uguuguaugaagccuuuua

SEQ ID NO: 3185347 - RNA, 19 nt, Artificial Sequence
  Description of Artificial Sequence: Synthetic oligonucleotide
ugaaugauuuuaugucccc

SEQ ID NO: 3185348 - RNA, 19 nt, Artificial Sequence
  Description of Artificial Sequence: Synthetic oligonucleotide
aauucucuuaugugcuuga

SEQ ID NO: 3185349 - RNA, 19 nt, Artificial Sequence
  Description of Artificial Sequence: Synthetic oligonucleotide
acugugugucccuaaaugu

SEQ ID NO: 3185350 - RNA, 19 nt, Artificial Sequence
  Description of Artificial Sequence: Synthetic oligonucleotide
uuacauuccgguaucucuc

SEQ ID NO: 3185351 - RNA, 19 nt, Artificial Sequence
  Description of Artificial Sequence: Synthetic oligonucleotide
auagacauagggauaagcu

SEQ ID NO: 3185352 - RNA, 19 nt, Artificial Sequence
  Description of Artificial Sequence: Synthetic oligonucleotide
ugugcagcugaaaggaacu

SEQ ID NO: 3185353 - RNA, 19 nt, Artificial Sequence
  Description of Artificial Sequence: Synthetic oligonucleotide
ucuuaugugcuugaacaug

SEQ ID NO: 3185354 - RNA, 19 nt, Artificial Sequence
  Description of Artificial Sequence: Synthetic oligonucleotide
uuuauguaccucgagggaa

SEQ ID NO: 3185355 - RNA, 19 nt, Artificial Sequence
  Description of Artificial Sequence: Synthetic oligonucleotide
ggucauaugguuucguaag

SEQ ID NO: 3185356 - RNA, 19 nt, Artificial Sequence
  Description of Artificial Sequence: Synthetic oligonucleotide
uugaacauggcuggaaugu

SEQ ID NO: 3185357 - RNA, 19 nt, Artificial Sequence
  Description of Artificial Sequence: Synthetic oligonucleotide
aacauggcuggaaugucgg

SEQ ID NO: 3185358 - RNA, 19 nt, Artificial Sequence
  Description of Artificial Sequence: Synthetic oligonucleotide
aaguaaaggucuucccgca

SEQ ID NO: 3185359 - RNA, 19 nt, Artificial Sequence
  Description of Artificial Sequence: Synthetic oligonucleotide
aguacgagaacgaccuacc

SEQ ID NO: 3185360 - RNA, 19 nt, Artificial Sequence
  Description of Artificial Sequence: Synthetic oligonucleotide
uuauguaccucgagggaac

SEQ ID NO: 3185361 - RNA, 19 nt, Artificial Sequence
  Description of Artificial Sequence: Synthetic oligonucleotide
cauagggauaagcuuuucc

SEQ ID NO: 3185362 - RNA, 19 nt, Artificial Sequence
  Description of Artificial Sequence: Synthetic oligonucleotide
uggaaugucggaaggcucu

SEQ ID NO: 3185363 - RNA, 19 nt, Artificial Sequence
  Description of Artificial Sequence: Synthetic oligonucleotide
ucccgcaguauuuacauuc

SEQ ID NO: 3185364 - RNA, 19 nt, Artificial Sequence
  Description of Artificial Sequence: Synthetic oligonucleotide
uuaggaaauguuuccucac

SEQ ID NO: 3185365 - RNA, 19 nt, Artificial Sequence
  Description of Artificial Sequence: Synthetic oligonucleotide
ucgaagcgaauagacauag

SEQ ID NO: 3185366 - RNA, 19 nt, Artificial Sequence
  Description of Artificial Sequence: Synthetic oligonucleotide
uaggaaauguuuccucaca

SEQ ID NO: 3185367 - RNA, 19 nt, Artificial Sequence
  Description of Artificial Sequence: Synthetic oligonucleotide
uguaaggccaggcuccacu

SEQ ID NO: 3185368 - RNA, 19 nt, Artificial Sequence
  Description of Artificial Sequence: Synthetic oligonucleotide
gucauaugguuucguaagg

SEQ ID NO: 3185369 - RNA, 19 nt, Artificial Sequence
  Description of Artificial Sequence: Synthetic oligonucleotide
uaugugcuugaacauggcu

SEQ ID NO: 3185370 - RNA, 19 nt, Artificial Sequence
  Description of Artificial Sequence: Synthetic oligonucleotide
acuuuuggaguacgagaac

SEQ ID NO: 3185371 - RNA, 19 nt, Artificial Sequence
  Description of Artificial Sequence: Synthetic oligonucleotide
agugguaugccccagagcc

SEQ ID NO: 3185372 - RNA, 19 nt, Artificial Sequence
  Description of Artificial Sequence: Synthetic oligonucleotide
aauggaacuauguaaauga

SEQ ID NO: 3185373 - RNA, 19 nt, Artificial Sequence
  Description of Artificial Sequence: Synthetic oligonucleotide
aaaauaugaggugagaaag

SEQ ID NO: 3185374 - RNA, 19 nt, Artificial Sequence
  Description of Artificial Sequence: Synthetic oligonucleotide
aaaguguuccuccucuucc

SEQ ID NO: 3185375 - RNA, 19 nt, Artificial Sequence
  Description of Artificial Sequence: Synthetic oligonucleotide
ugacuaaacaagaagcagg

SEQ ID NO: 3185376 - RNA, 19 nt, Artificial Sequence
  Description of Artificial Sequence: Synthetic oligonucleotide
uacuagagaaaauaugagg

SEQ ID NO: 3185377 - RNA, 19 nt, Artificial Sequence
  Description of Artificial Sequence: Synthetic oligonucleotide
uggcauaaggcgcagacgg

SEQ ID NO: 3185378 - RNA, 19 nt, Artificial Sequence
  Description of Artificial Sequence: Synthetic oligonucleotide
uuccucaugauuuccacgg

SEQ ID NO: 3185379 - RNA, 19 nt, Artificial Sequence
  Description of Artificial Sequence: Synthetic oligonucleotide
aaggugcaaaguuugguuc

SEQ ID NO: 3185380 - RNA, 19 nt, Artificial Sequence
  Description of Artificial Sequence: Synthetic oligonucleotide
aaauaugaggugagaaagc

SEQ ID NO: 3185381 - RNA, 19 nt, Artificial Sequence
  Description of Artificial Sequence: Synthetic oligonucleotide
uguguuaucaguguugaca

SEQ ID NO: 3185382 - RNA, 19 nt, Artificial Sequence
  Description of Artificial Sequence: Synthetic oligonucleotide
uuaucuacacacacaaugu

SEQ ID NO: 3185383 - RNA, 19 nt, Artificial Sequence
  Description of Artificial Sequence: Synthetic oligonucleotide
aagcgcaccacgcacgccc

SEQ ID NO: 3185384 - RNA, 19 nt, Artificial Sequence
  Description of Artificial Sequence: Synthetic oligonucleotide
ucauuuaaguccuuccuca

SEQ ID NO: 3185385 - RNA, 19 nt, Artificial Sequence
  Description of Artificial Sequence: Synthetic oligonucleotide
aaagcggggcaccuuuugc

SEQ ID NO: 3185386 - RNA, 19 nt, Artificial Sequence
  Description of Artificial Sequence: Synthetic oligonucleotide
aaauggaacuauguaaaug

SEQ ID NO: 3185387 - RNA, 19 nt, Artificial Sequence
  Description of Artificial Sequence: Synthetic oligonucleotide
aaacacugcugagaaaugg

SEQ ID NO: 3185388 - RNA, 19 nt, Artificial Sequence
  Description of Artificial Sequence: Synthetic oligonucleotide
ucuuggacuaguuaucuac

SEQ ID NO: 3185389 - RNA, 19 nt, Artificial Sequence
  Description of Artificial Sequence: Synthetic oligonucleotide
agcaauggaaggugguucc

SEQ ID NO: 3185390 - RNA, 19 nt, Artificial Sequence
  Description of Artificial Sequence: Synthetic oligonucleotide
auauucaugccccaaagaa

SEQ ID NO: 3185391 - RNA, 19 nt, Artificial Sequence
  Description of Artificial Sequence: Synthetic oligonucleotide
aaguuuugugaaauucacc

SEQ ID NO: 3185392 - RNA, 19 nt, Artificial Sequence
  Description of Artificial Sequence: Synthetic oligonucleotide
accuacauaggucuguauc

SEQ ID NO: 3185393 - RNA, 19 nt, Artificial Sequence
  Description of Artificial Sequence: Synthetic oligonucleotide
gacuauaagugguaugccc

SEQ ID NO: 3185394 - RNA, 19 nt, Artificial Sequence
  Description of Artificial Sequence: Synthetic oligonucleotide
aguguugacagagaugggg

SEQ ID NO: 3185395 - RNA, 19 nt, Artificial Sequence
  Description of Artificial Sequence: Synthetic oligonucleotide
guguuaucaguguugacag

SEQ ID NO: 3185396 - RNA, 19 nt, Artificial Sequence
  Description of Artificial Sequence: Synthetic oligonucleotide
auaggucuguaucuuuggc

SEQ ID NO: 3185397 - RNA, 19 nt, Artificial Sequence
  Description of Artificial Sequence: Synthetic oligonucleotide
uagagaaaauaugagguga

SEQ ID NO: 3185398 - RNA, 19 nt, Artificial Sequence
  Description of Artificial Sequence: Synthetic oligonucleotide
gaaaauaugaggugagaaa

SEQ ID NO: 3185399 - RNA, 19 nt, Artificial Sequence
  Description of Artificial Sequence: Synthetic oligonucleotide
agauagauggucccuuccg

SEQ ID NO: 3185400 - RNA, 19 nt, Artificial Sequence
  Description of Artificial Sequence: Synthetic oligonucleotide
acagaacaucauuaacccc

SEQ ID NO: 3185401 - RNA, 19 nt, Artificial Sequence
  Description of Artificial Sequence: Synthetic oligonucleotide
cagccgacgauucagaccc

SEQ ID NO: 3185402 - RNA, 19 nt, Artificial Sequence
  Description of Artificial Sequence: Synthetic oligonucleotide
aacuauguaaaugaccgaa

SEQ ID NO: 3185403 - RNA, 19 nt, Artificial Sequence
  Description of Artificial Sequence: Synthetic oligonucleotide
ugagagguggguaacagua

SEQ ID NO: 3185404 - RNA, 19 nt, Artificial Sequence
  Description of Artificial Sequence: Synthetic oligonucleotide
ugagccaauccugucaagg

SEQ ID NO: 3185405 - RNA, 19 nt, Artificial Sequence
  Description of Artificial Sequence: Synthetic oligonucleotide
cauuuuauucagcacugag

SEQ ID NO: 3185406 - RNA, 19 nt, Artificial Sequence
  Description of Artificial Sequence: Synthetic oligonucleotide
agagguggguaacaguagg

SEQ ID NO: 3185407 - RNA, 19 nt, Artificial Sequence
  Description of Artificial Sequence: Synthetic oligonucleotide
uaagugguaugccccagag

SEQ ID NO: 3185408 - RNA, 19 nt, Artificial Sequence
  Description of Artificial Sequence: Synthetic oligonucleotide
ucacacuaggcccugugcc

SEQ ID NO: 3185409 - RNA, 19 nt, Artificial Sequence
  Description of Artificial Sequence: Synthetic oligonucleotide
aaagggagggagcagcccu

SEQ ID NO: 3185410 - RNA, 19 nt, Artificial Sequence
  Description of Artificial Sequence: Synthetic oligonucleotide
uucccuggcacuaacacau

SEQ ID NO: 3185411 - RNA, 19 nt, Artificial Sequence
  Description of Artificial Sequence: Synthetic oligonucleotide
uauucccuggcacuaacac

SEQ ID NO: 3185412 - RNA, 19 nt, Artificial Sequence
  Description of Artificial Sequence: Synthetic oligonucleotide
ccaugacuaaacaagaagc

SEQ ID NO: 3185413 - RNA, 19 nt, Artificial Sequence
  Description of Artificial Sequence: Synthetic oligonucleotide
gagaaucggccagagagcg

SEQ ID NO: 3185414 - RNA, 19 nt, Artificial Sequence
  Description of Artificial Sequence: Synthetic oligonucleotide
agaccaauguguuaucagu

SEQ ID NO: 3185415 - RNA, 19 nt, Artificial Sequence
  Description of Artificial Sequence: Synthetic oligonucleotide
ugcuagagugacauuguca

SEQ ID NO: 3185416 - RNA, 19 nt, Artificial Sequence
  Description of Artificial Sequence: Synthetic oligonucleotide
augacuaaacaagaagcag

SEQ ID NO: 3185417 - RNA, 19 nt, Artificial Sequence
  Description of Artificial Sequence: Synthetic oligonucleotide
guaucuuuggccccugacc

SEQ ID NO: 3185418 - RNA, 19 nt, Artificial Sequence
  Description of Artificial Sequence: Synthetic oligonucleotide
caauguguuaucaguguug

SEQ ID NO: 3185419 - RNA, 19 nt, Artificial Sequence
  Description of Artificial Sequence: Synthetic oligonucleotide
aaacgguggccgcagucgg

SEQ ID NO: 3185420 - RNA, 19 nt, Artificial Sequence
  Description of Artificial Sequence: Synthetic oligonucleotide
uguucaggaugaaggguag

SEQ ID NO: 3185421 - RNA, 19 nt, Artificial Sequence
  Description of Artificial Sequence: Synthetic oligonucleotide
uggacuaguuaucuacaca

SEQ ID NO: 3185422 - RNA, 19 nt, Artificial Sequence
  Description of Artificial Sequence: Synthetic oligonucleotide
agcauagcggaucuccguc

SEQ ID NO: 3185423 - RNA, 19 nt, Artificial Sequence
  Description of Artificial Sequence: Synthetic oligonucleotide
caugacuaaacaagaagca

SEQ ID NO: 3185424 - RNA, 19 nt, Artificial Sequence
  Description of Artificial Sequence: Synthetic oligonucleotide
cauaggucuguaucuuugg

SEQ ID NO: 3185425 - RNA, 19 nt, Artificial Sequence
  Description of Artificial Sequence: Synthetic oligonucleotide
cuagaaggaaagaggcuag

SEQ ID NO: 3185426 - RNA, 19 nt, Artificial Sequence
  Description of Artificial Sequence: Synthetic oligonucleotide
ggagcaaaccauuuuauuc

SEQ ID NO: 3185427 - RNA, 19 nt, Artificial Sequence
  Description of Artificial Sequence: Synthetic oligonucleotide
gagagcgaggccaacaagc

SEQ ID NO: 3185428 - RNA, 19 nt, Artificial Sequence
  Description of Artificial Sequence: Synthetic oligonucleotide
agaaaauaugaggugagaa

SEQ ID NO: 3185429 - RNA, 19 nt, Artificial Sequence
  Description of Artificial Sequence: Synthetic oligonucleotide
uuuucagccucuugcagaa

SEQ ID NO: 3185430 - RNA, 19 nt, Artificial Sequence
  Description of Artificial Sequence: Synthetic oligonucleotide
aggacuggucucuacuagg

SEQ ID NO: 3185431 - RNA, 19 nt, Artificial Sequence
  Description of Artificial Sequence: Synthetic oligonucleotide
caccuggaagucaagcugg

SEQ ID NO: 3185432 - RNA, 19 nt, Artificial Sequence
  Description of Artificial Sequence: Synthetic oligonucleotide
ugcgcgcuggcauaaggcg

SEQ ID NO: 3185433 - RNA, 19 nt, Artificial Sequence
  Description of Artificial Sequence: Synthetic oligonucleotide
uaacaugccccuuccacac

SEQ ID NO: 3185434 - RNA, 19 nt, Artificial Sequence
  Description of Artificial Sequence: Synthetic oligonucleotide
gaggcuaggaaagcaaagc

SEQ ID NO: 3185435 - RNA, 19 nt, Artificial Sequence
  Description of Artificial Sequence: Synthetic oligonucleotide
acugcaguagcaugcuaag

SEQ ID NO: 3185436 - RNA, 19 nt, Artificial Sequence
  Description of Artificial Sequence: Synthetic oligonucleotide
gaggguguaagacgucggg

SEQ ID NO: 3185437 - RNA, 19 nt, Artificial Sequence
  Description of Artificial Sequence: Synthetic oligonucleotide
aggaaagaggcuaggaaag

SEQ ID NO: 3185438 - RNA, 19 nt, Artificial Sequence
  Description of Artificial Sequence: Synthetic oligonucleotide
cuuccucaugauuuccacg

SEQ ID NO: 3185439 - RNA, 19 nt, Artificial Sequence
  Description of Artificial Sequence: Synthetic oligonucleotide
ucuggugagccaauccugu

SEQ ID NO: 3185440 - RNA, 19 nt, Artificial Sequence
  Description of Artificial Sequence: Synthetic oligonucleotide
ccgagaaucggccagagag

SEQ ID NO: 3185441 - RNA, 19 nt, Artificial Sequence
  Description of Artificial Sequence: Synthetic oligonucleotide
uucaucccagaccaaugug

SEQ ID NO: 3185442 - RNA, 19 nt, Artificial Sequence
  Description of Artificial Sequence: Synthetic oligonucleotide
uguaucuuuggccccugac

SEQ ID NO: 3185443 - RNA, 19 nt, Artificial Sequence
  Description of Artificial Sequence: Synthetic oligonucleotide
agagaaaauaugaggugag

SEQ ID NO: 3185444 - RNA, 19 nt, Artificial Sequence
  Description of Artificial Sequence: Synthetic oligonucleotide
uggugagccaauccuguca

SEQ ID NO: 3185445 - RNA, 19 nt, Artificial Sequence
  Description of Artificial Sequence: Synthetic oligonucleotide
gaccaauguguuaucagug

SEQ ID NO: 3185446 - RNA, 19 nt, Artificial Sequence
  Description of Artificial Sequence: Synthetic oligonucleotide
cagcaagacccaaagggag

SEQ ID NO: 3185447 - RNA, 19 nt, Artificial Sequence
  Description of Artificial Sequence: Synthetic oligonucleotide
uuggacuaguuaucuacac

SEQ ID NO: 3185448 - RNA, 19 nt, Artificial Sequence
  Description of Artificial Sequence: Synthetic oligonucleotide
aacaagaagcaggggcuuc

SEQ ID NO: 3185449 - RNA, 19 nt, Artificial Sequence
  Description of Artificial Sequence: Synthetic oligonucleotide
agaagggccgagaaucggc

SEQ ID NO: 3185450 - RNA, 19 nt, Artificial Sequence
  Description of Artificial Sequence: Synthetic oligonucleotide
aggcuaggaaagcaaagca

SEQ ID NO: 3185451 - RNA, 19 nt, Artificial Sequence
  Description of Artificial Sequence: Synthetic oligonucleotide
uccucgagcgccaggagac

SEQ ID NO: 3185452 - RNA, 19 nt, Artificial Sequence
  Description of Artificial Sequence: Synthetic oligonucleotide
ggcaccuuuugcuucaucc

SEQ ID NO: 3185453 - RNA, 19 nt, Artificial Sequence
  Description of Artificial Sequence: Synthetic oligonucleotide
gccaugacuaaacaagaag

SEQ ID NO: 3185454 - RNA, 19 nt, Artificial Sequence
  Description of Artificial Sequence: Synthetic oligonucleotide
uucgguccauaacaugccc

SEQ ID NO: 3185455 - RNA, 19 nt, Artificial Sequence
  Description of Artificial Sequence: Synthetic oligonucleotide
aaugaccgaaagcggggca

SEQ ID NO: 3185456 - RNA, 19 nt, Artificial Sequence
  Description of Artificial Sequence: Synthetic oligonucleotide
aagcauaagacagcuccca

SEQ ID NO: 3185457 - RNA, 19 nt, Artificial Sequence
  Description of Artificial Sequence: Synthetic oligonucleotide
agugacauugucacacuag

SEQ ID NO: 3185458 - RNA, 19 nt, Artificial Sequence
  Description of Artificial Sequence: Synthetic oligonucleotide
agcgaggccaacaagccuc

SEQ ID NO: 3185459 - RNA, 19 nt, Artificial Sequence
  Description of Artificial Sequence: Synthetic oligonucleotide
cuucgguccauaacaugcc

SEQ ID NO: 3185460 - RNA, 19 nt, Artificial Sequence
  Description of Artificial Sequence: Synthetic oligonucleotide
uuggagcaaaccauuuuau

SEQ ID NO: 3185461 - RNA, 19 nt, Artificial Sequence
  Description of Artificial Sequence: Synthetic oligonucleotide
cagaccaauguguuaucag

SEQ ID NO: 3185462 - RNA, 19 nt, Artificial Sequence
  Description of Artificial Sequence: Synthetic oligonucleotide
agcauaagacagcucccag

SEQ ID NO: 3185463 - RNA, 19 nt, Artificial Sequence
  Description of Artificial Sequence: Synthetic oligonucleotide
aggaccggaagcguucugc

SEQ ID NO: 3185464 - RNA, 19 nt, Artificial Sequence
  Description of Artificial Sequence: Synthetic oligonucleotide
aacacugcugagaaaugga

SEQ ID NO: 3185465 - RNA, 19 nt, Artificial Sequence
  Description of Artificial Sequence: Synthetic oligonucleotide
cuccuugccgcgaagcgcc

SEQ ID NO: 3185466 - RNA, 19 nt, Artificial Sequence
  Description of Artificial Sequence: Synthetic oligonucleotide
auggaacuauguaaaugac

SEQ ID NO: 3185467 - RNA, 19 nt, Artificial Sequence
  Description of Artificial Sequence: Synthetic oligonucleotide
uuuguuucuuggacuaguu

SEQ ID NO: 3185468 - RNA, 19 nt, Artificial Sequence
  Description of Artificial Sequence: Synthetic oligonucleotide
aggacccucauccuuuuca

SEQ ID NO: 3185469 - RNA, 19 nt, Artificial Sequence
  Description of Artificial Sequence: Synthetic oligonucleotide
uucagaccugccaacuggu

SEQ ID NO: 3185470 - RNA, 19 nt, Artificial Sequence
  Description of Artificial Sequence: Synthetic oligonucleotide
ugaggugagaaagccaaaa

SEQ ID NO: 3185471 - RNA, 19 nt, Artificial Sequence
  Description of Artificial Sequence: Synthetic oligonucleotide
aaauaaaacauuuacaaug

SEQ ID NO: 3185472 - RNA, 19 nt, Artificial Sequence
  Description of Artificial Sequence: Synthetic oligonucleotide
aauaacauaaauaaugcac

SEQ ID NO: 3185473 - RNA, 19 nt, Artificial Sequence
  Description of Artificial Sequence: Synthetic oligonucleotide
uuuacaauggaaaauuuag

SEQ ID NO: 3185474 - RNA, 19 nt, Artificial Sequence
  Description of Artificial Sequence: Synthetic oligonucleotide
aaaagacaacuucagacgc

SEQ ID NO: 3185475 - RNA, 19 nt, Artificial Sequence
  Description of Artificial Sequence: Synthetic oligonucleotide
gauaaaauaaaacauuuac

SEQ ID NO: 3185476 - RNA, 19 nt, Artificial Sequence
  Description of Artificial Sequence: Synthetic oligonucleotide
uaaaauaaaacauuuacaa

SEQ ID NO: 3185477 - RNA, 19 nt, Artificial Sequence
  Description of Artificial Sequence: Synthetic oligonucleotide
ucaguaauaacauaaauaa

SEQ ID NO: 3185478 - RNA, 19 nt, Artificial Sequence
  Description of Artificial Sequence: Synthetic oligonucleotide
acaaaacuaaaccagaauc

SEQ ID NO: 3185479 - RNA, 19 nt, Artificial Sequence
  Description of Artificial Sequence: Synthetic oligonucleotide
aauaaaacauuuacaaugg

SEQ ID NO: 3185480 - RNA, 19 nt, Artificial Sequence
  Description of Artificial Sequence: Synthetic oligonucleotide
auuuggauaaaauaaaaca

SEQ ID NO: 3185481 - RNA, 19 nt, Artificial Sequence
  Description of Artificial Sequence: Synthetic oligonucleotide
auaaauaaugcacaaaacu

SEQ ID NO: 3185482 - RNA, 19 nt, Artificial Sequence
  Description of Artificial Sequence: Synthetic oligonucleotide
gaaaagacaacuucagacg

SEQ ID NO: 3185483 - RNA, 19 nt, Artificial Sequence
  Description of Artificial Sequence: Synthetic oligonucleotide
aguaauaacauaaauaaug

SEQ ID NO: 3185484 - RNA, 19 nt, Artificial Sequence
  Description of Artificial Sequence: Synthetic oligonucleotide
acaauggaaaauuuagccc

SEQ ID NO: 3185485 - RNA, 19 nt, Artificial Sequence
  Description of Artificial Sequence: Synthetic oligonucleotide
aaugcacaaaacuaaacca

SEQ ID NO: 3185486 - RNA, 19 nt, Artificial Sequence
  Description of Artificial Sequence: Synthetic oligonucleotide
uaaugcacaaaacuaaacc

SEQ ID NO: 3185487 - RNA, 19 nt, Artificial Sequence
  Description of Artificial Sequence: Synthetic oligonucleotide
ugaaaagacaacuucagac

SEQ ID NO: 3185488 - RNA, 19 nt, Artificial Sequence
  Description of Artificial Sequence: Synthetic oligonucleotide
uacaauggaaaauuuagcc

SEQ ID NO: 3185489 - RNA, 19 nt, Artificial Sequence
  Description of Artificial Sequence: Synthetic oligonucleotide
aauaaugcaaccuuuuaaa

SEQ ID NO: 3185490 - RNA, 19 nt, Artificial Sequence
  Description of Artificial Sequence: Synthetic oligonucleotide
uuuggauaaaauaaaacau

SEQ ID NO: 3185491 - RNA, 19 nt, Artificial Sequence
  Description of Artificial Sequence: Synthetic oligonucleotide
ucugaaagugcaaauuugg

SEQ ID NO: 3185492 - RNA, 19 nt, Artificial Sequence
  Description of Artificial Sequence: Synthetic oligonucleotide
caauggaaaauuuagcccg

SEQ ID NO: 3185493 - RNA, 19 nt, Artificial Sequence
  Description of Artificial Sequence: Synthetic oligonucleotide
aauuuggauaaaauaaaac

SEQ ID NO: 3185494 - RNA, 19 nt, Artificial Sequence
  Description of Artificial Sequence: Synthetic oligonucleotide
accagaaucagaauaaugc

SEQ ID NO: 3185495 - RNA, 19 nt, Artificial Sequence
  Description of Artificial Sequence: Synthetic oligonucleotide
uaaauaaugcacaaaacua

SEQ ID NO: 3185496 - RNA, 19 nt, Artificial Sequence
  Description of Artificial Sequence: Synthetic oligonucleotide
uuuugaaaagacaacuuca

SEQ ID NO: 3185497 - RNA, 19 nt, Artificial Sequence
  Description of Artificial Sequence: Synthetic oligonucleotide
uuuucagucgaccuagccg

SEQ ID NO: 3185498 - RNA, 19 nt, Artificial Sequence
  Description of Artificial Sequence: Synthetic oligonucleotide
uuucagucgaccuagccgg

SEQ ID NO: 3185499 - RNA, 19 nt, Artificial Sequence
  Description of Artificial Sequence: Synthetic oligonucleotide
uuugaaaagacaacuucag

SEQ ID NO: 3185500 - RNA, 19 nt, Artificial Sequence
  Description of Artificial Sequence: Synthetic oligonucleotide
aaugcaaccuuuuaaaguu

SEQ ID NO: 3185501 - RNA, 19 nt, Artificial Sequence
  Description of Artificial Sequence: Synthetic oligonucleotide
ucguauuugucucugaggc

SEQ ID NO: 3185502 - RNA, 19 nt, Artificial Sequence
  Description of Artificial Sequence: Synthetic oligonucleotide
uuuucuuucuuuugaaaag

SEQ ID NO: 3185503 - RNA, 19 nt, Artificial Sequence
  Description of Artificial Sequence: Synthetic oligonucleotide
aaaguuuucuuucuuuuga

SEQ ID NO: 3185504 - RNA, 19 nt, Artificial Sequence
  Description of Artificial Sequence: Synthetic oligonucleotide
aaaauaaaacauuuacaau

SEQ ID NO: 3185505 - RNA, 19 nt, Artificial Sequence
  Description of Artificial Sequence: Synthetic oligonucleotide
acauaaauaaugcacaaaa

SEQ ID NO: 3185506 - RNA, 19 nt, Artificial Sequence
  Description of Artificial Sequence: Synthetic oligonucleotide
aaaacuaaaccagaaucag

SEQ ID NO: 3185507 - RNA, 19 nt, Artificial Sequence
  Description of Artificial Sequence: Synthetic oligonucleotide
aaaacauuuacaauggaaa

SEQ ID NO: 3185508 - RNA, 19 nt, Artificial Sequence
  Description of Artificial Sequence: Synthetic oligonucleotide
uaaaacauuuacaauggaa

SEQ ID NO: 3185509 - RNA, 19 nt, Artificial Sequence
  Description of Artificial Sequence: Synthetic oligonucleotide
uucagacgcauucugaaag

SEQ ID NO: 3185510 - RNA, 19 nt, Artificial Sequence
  Description of Artificial Sequence: Synthetic oligonucleotide
guaauaacauaaauaaugc

SEQ ID NO: 3185511 - RNA, 19 nt, Artificial Sequence
  Description of Artificial Sequence: Synthetic oligonucleotide
aauuuagcccguccucugc

SEQ ID NO: 3185512 - RNA, 19 nt, Artificial Sequence
  Description of Artificial Sequence: Synthetic oligonucleotide
uuacaauggaaaauuuagc

SEQ ID NO: 3185513 - RNA, 19 nt, Artificial Sequence
  Description of Artificial Sequence: Synthetic oligonucleotide
uaaaccagaaucagaauaa

SEQ ID NO: 3185514 - RNA, 19 nt, Artificial Sequence
  Description of Artificial Sequence: Synthetic oligonucleotide
agaaucagaauaaugcaac

SEQ ID NO: 3185515 - RNA, 19 nt, Artificial Sequence
  Description of Artificial Sequence: Synthetic oligonucleotide
aaacauuuacaauggaaaa

SEQ ID NO: 3185516 - RNA, 19 nt, Artificial Sequence
  Description of Artificial Sequence: Synthetic oligonucleotide
uggauaaaauaaaacauuu

SEQ ID NO: 3185517 - RNA, 19 nt, Artificial Sequence
  Description of Artificial Sequence: Synthetic oligonucleotide
uaaugcaaccuuuuaaagu

SEQ ID NO: 3185518 - RNA, 19 nt, Artificial Sequence
  Description of Artificial Sequence: Synthetic oligonucleotide
uuggauaaaauaaaacauu

SEQ ID NO: 3185519 - RNA, 19 nt, Artificial Sequence
  Description of Artificial Sequence: Synthetic oligonucleotide
uaauaacauaaauaaugca

SEQ ID NO: 3185520 - RNA, 19 nt, Artificial Sequence
  Description of Artificial Sequence: Synthetic oligonucleotide
cuuucuuuugaaaagacaa

SEQ ID NO: 3185521 - RNA, 19 nt, Artificial Sequence
  Description of Artificial Sequence: Synthetic oligonucleotide
aaauaaugcacaaaacuaa

SEQ ID NO: 3185522 - RNA, 19 nt, Artificial Sequence
  Description of Artificial Sequence: Synthetic oligonucleotide
aaagugcaaauuuggauaa
